United States Patent Application Publication US 2023/0025039 A1 - sequence listing, part 2

SEQ ID NO: 1012 - protein, 1161 aa, Artificial
  Synthetic
MKVTKVDGISHKKYIEEGKLVKSTSEENRTSERLSELLSIRLDIYIKNPDNASEEENRIRRENLKKFFSNKVLHLKDSVLYLKNRNEKNAVQDKNYSEEDISEYDLKNKNSFSVLKKILLNEDINSEELEIFRKDVEAKLNKINSLKYSFEENKANYQKINENNVEKVGGKSKRNIIYDYYRESAKRNDYINNVQEAFDKLYKKEDIEKLFFLIENSKKHEKYKIREYYHKIIGRKNDKENFAKIIYEEIQNVNSIKELIEKVPDMSELKKSQVFYKYYLDKEELNDKNIKYAFCHFVEIEMSQLLKNYVYKRLSNISNDKIKRIFEYQNLKKLIENKLLNKLDTYVRNCGKYNYYLQVGEIATSDFIARNRQNEAFLRNIIGVSSVAYFSLRNILETENENDITGRMRGKTVKNNKGEEKYVSGEVDKIYNENKQNEVKENLKMFYSYDFNMDNKNEIEDFFANIDEAISSIRHGIVHFNLELEGKDIFAFKNIVPSEISKKMFQNEINEKKLKLKIFRQLNSANVFRYLEKYKILNYLKRTRFEFVNKNIPFVPSFTKLYSRIDDLKNSLGIYWKTPKTNDDNKTKEIIDAQIYLLKNIYYGEFLNYFMSNNGNFFEISREIIELNKNDKRNLKTGFYKLQKFEDIQEKTPKEYLANIQSLYMINAGNQDEEEKDTYIDFIQKIFLKGFMTYLANNGRLSLIYIGSDEETNTSLAEKKQEFDKFLKKYEQNNNIEIPHEINEFVREIKLGKILKYTERLNMFYLILKLLNHKELTNLKGSLEKYQSANKEETFSDELELINLLNLDNNRVTEDFELEANEIGKFLDFNGNKIKDRKELKKFDTKKIYFDGENIIKHRAFYNIKKYGMLNLLEKIADKAKYKISLKELKEYSNKKNEIEKNYTMQQNLHRKYARPKKDEKFNDEDYKEYEKAIGNIQKYTHLKNKVEFNELNLLQGLLLKILHRLVGYTSIWERDLRFRLKGEFPENQYIEEIFNFDNSKNVKYKSGQIVEKYINFYKELYKDNVEKRSIYSDKKVKKLKQEKKDLYIRNYIAHFNYIPHAEISLLEVLENLRKLLSYDRKLKNAVMKSVMNILKEYGFVAKFKIGADKKIEIQTLESEKIVHLKNLKKEKLTTNRNSKELCKLVKVMFEYKMEEKKSEN

SEQ ID NO: 1013 - protein, 1360 aa, Artificial; identical to SEQ ID NO: 92
  Synthetic

SEQ ID NO: 1014 - protein, 1161 aa, Artificial; identical to SEQ ID NO: 604
  Synthetic

SEQ ID NO: 1015 - protein, 1250 aa, Artificial
  Synthetic
MKIVKPYGLSATDKKGERYLRARLLKRNEAGETQIPETAFKEHEFGEFNQSDPRILIGQWISIIDKIIRKPNQKDFQPKGMCDRTNSPTNNDVRRRAQVKFRTELGRACWNLLEERKLLDRKALDDFAPIWAQKLHPAGDVPEEFQSDRQKKNERGKKIWEDNKPVWDDEYILNITGLWYVRFMGEDTKLDNEEQLDQLEFDNIAADIFKHLHEKEFKKHDGEKSIGLIEARAISVANSSPKKHMEKMWVEGEGTKLLESLTQEKIMLPWTDVDEKSFINGKRVHSLAEQISATNAHLEDQKQRLHYDIVGGYIFEHYRKQFIDKDGAVPKRVDIAKERFGLLALYDEVRSLYKGLIKNSNKKSLKRTLPANDKELFTLLRQRHANKITNNLIRLGKILHYEGTVGDGDGFGLSLNKSGNIKQGGQDIFALNLKDIANSAYWKSDGQADIKRTEAFVRIWRNTISQAQRTAQTLADPDGKFSKALGRPLDVLEDKVSPMLSTDDKVMGRANNNAKLLFGVQAKLFEDVDPSDFIYGTLRLLANIRNKAFHFNGRRAFVQKMISGFDEDNIKNIVTHEKTVDLDGFWTQVKALLASDQMERFKRQISVLEGAQFNCFATTNQINNYLKLLSHNESDVSLPRFNKLLTRIDNTTQKISRTNNWFFPEPASHVDLNAFPAMLTKFVGLKILYEGPFRAWVHKIKPEKLAEYRNAAADLGSKAAKKINSQSKYPELIRAKTEDLPLISKIDTISSYMDTLQAFQASEQRLQKGYESNSSAAKEQAEWIENFRKDILARAFRDYLNEHFSQLKWLLELKKADAPREPQAMPKAGSATDGETLSESWHAALYYILHLVPAYEVSRLLHQIRKWGILEKKSGATDEPDTDVENLRRLLILYIEMSEDKHTGEGIALEGMDKFYDMFKDKQTGFDKVFKTEGSTEDVLASTRRGLREILRYGNKNVLTVAIGEVKVTDNDITAYRDQQAGIERAQLKRKKIHSELIKRAGDKNQQFVEYVTALKSIISYRELSHRVNLTNFVKLHKIMLQVVARLIDYAGVWERDGYFIATALMKIHGKKPEDVLGDGAPWFRSAGKLPRTESMDITFLGQLSRFYTPQLTQIRKDLHHFNLVAGDDVDLTGAVNNVRRLMAYDRKMKNAVSKSIKEMMDEEGLFLCWKMDASHNLALDPECIRNGQKVPAIESRVIKHLQKGWRPKRESYAARQKDNQALSENFHDDNFVRAVTCLFSPNRSTSSPV

SEQ ID NO: 1016 - protein, 1155 aa, Artificial; identical to SEQ ID NO: 306
  Synthetic

SEQ ID NO: 1017 - protein, 1155 aa, Artificial; identical to SEQ ID NO: 306
  Synthetic

SEQ ID NO: 1018 - protein, 1360 aa, Artificial; identical to SEQ ID NO: 92
  Synthetic

SEQ ID NO: 1019 - protein, 1360 aa, Artificial; identical to SEQ ID NO: 92
  Synthetic

SEQ ID NO: 1020 - protein, 1268 aa, Artificial; identical to SEQ ID NO: 76
  Synthetic

SEQ ID NO: 1021 - protein, 1101 aa, Artificial; identical to SEQ ID NO: 73
  Synthetic

SEQ ID NO: 1022 - protein, 1161 aa, Artificial; identical to SEQ ID NO: 604
  Synthetic

SEQ ID NO: 1023 - protein, 1388 aa, Artificial; identical to SEQ ID NO: 755
  Synthetic

SEQ ID NO: 1024 - protein, 1388 aa, Artificial; identical to SEQ ID NO: 103
  Synthetic

SEQ ID NO: 1025 - protein, 1382 aa, Artificial; identical to SEQ ID NO: 210
  Synthetic

SEQ ID NO: 1026 - protein, 1360 aa, Artificial; identical to SEQ ID NO: 92
  Synthetic

SEQ ID NO: 1027 - protein, 1139 aa, Artificial
  Synthetic
MKITKIDGISHKKYKEKGKLIKSNEIEKDVTEERFYDIKTKTTELFLKTLDFYVKNYEQCEEQNKERREKAKNYFSKVKLIIENRKITIFNENTEKIEIEGFNEYDVRDEKYFNVLNKILKEENCTEEDLEVFENDLQKKLNQIQSIKNSLEENKAHFKKESVNNTADRVKGNNKKSLFYEYYRISSKHQEYANNIFEAFDKLYSNSHEAMNNLFSEITKDSKDRNIRKIREAYHEILNKNKTEFGEELYKKIQDNRNNFDKLLEIEPEIKELTKSQIFYKYYIDKVNLDETSIKHCFCHLVEIEVNQLLKNYVYSKRNINKEKLENIFEYCKLRNLVKNKLVNKLNNYIRNCGKYNAYISNNDVVVNSEKISEIRTKEAFLRSIIGVSSSAYFSLRNILNTDNTQDITNKVDKEVDKLYQENKKIELEEILKLFFGNYFDINNQQEIKVFLMNIDKIISSIRHEIIHFKMETNAQNIFDFNNVNLGNTAKNIFSNEINEEKIKFKIFKQLNSANVFDYLSNKDITEYMDKVVFSFTNRNVSFVPSFTKIYNRVQDLANSLEIKEWKIPDESEGKDAQIYLLKNIYYGKFLDKFLNEENGIFISVKDKITGFYKLEKFEKIEETNPKKYLEIIQSLYMINIEEIDSEGKNIFLDFIQKIFLKGFFEFIKNDYNYLLELKKVQDKKNIFDSKMSEYIAGEKTLEDMEEINEIIQDIKITEIDKILNQTDKINCFYLLLKLLNYKEITELKGNLEKYQILSKANVYEKELMLLNIVNLDNNKVKIENFKISAEEIGKFIEKINIEEINKKIKTFGELRNFEKGENTGEYYNIYSDDKNIKNIRNLYNIKKYGMLDLLEKISEKTNYCIKKKDLKEYSKLRKQLEDKKKENEKIEDEKTNFYKIQEYLHSKYQQEPKKILWKKNKNDYEKYKKSIENIEKYVHLKNKIEFNELNLLQSLLLKILHRLAGFTSIWERDLRFRLTGEFPDELDVEDIFNHRKRYKGTGKGICKKYDRFINTHTEYKNNNKMKNVKFVDDNPVRNYIAHFNYLPTPKYSILKMMEKLRKLLDYDRKLKNAVMKSIKDILEEYGFKAEFIINSDKEIILNSVKSVEIIHLGKEDLKSHRNSEDLCKLVKAMLEYSE

SEQ ID NO: 1028 - protein, 1256 aa, Artificial
  Synthetic
MKLSKVTYRVKDKNAKYKKEYNVRAAVANNSENAGGVLYHVPGVDLIDLKEQMLDRDRSVRLLYNIFNQIQTGTKPKKWGNDETLSVDENERKAKEQNIKIMNYKWREACSEYIEKSQSTINSVLFYSYEESGYKTKRMNDNEAIIVKMQYENRLSHFTGGKLEDFVAYTLRNSLVVSRYDNQEFDSVNAMVVFINNIGNGNISDKDKKTICKLADLIRNDFSKLNPNVQSSQGANMVRSVRNQNMVVQPQGDKVSFPLVSDEGKNTVTNKNVEKKGLNEFLLNYANLDDEERMENLRKLRRIIDVYFSSPSHYQKDMDISLSDNIDKTKFDVWKKHETGKKNTGLFVDIPDELLTAETEKIKLDAVLEKQARKRLTDSIRKQNMVCYRYTRAVVEKYNLTENLFFENDYINQYWIHHIENAVERILKSCKAETLFKLRMGYLTEKVWKDAINLISIKYIALGKVIYNFAVDDIWKDKKVKNLGSIDEKIKHGITSFDYEMIKAQEALQRELAVNVAFAANNLARAVCDMTNLKDKESDFLIWNKKDIANKLKNKDDMASVSVVLQFFGGKSSWDIDAFREAYKGNKYNYEVCFIDDLRKAVYAARNESFHFKTALVNNDIWNTEFFGKLFIKETEICLDIEKDRFYSNNLPVFYSDNDLKKMLDHLYNNKVSRAAQVPSYNSVMVRKYFPENITSTLKYQKPGYDEDTLEKWYSACYYLLKEIYYNSFLQSDEALALFEESVNNLKGDNKDQELAVKSFRNNYKNIKSSCTSFSQVCQMYMTEYNQQNNQFKKVRSSKNSIFDKPIYQHYKLLLKKVVANAFALYLQNNKELFGFIGKPLKVNCLKEIDKEQFLPEWTSKKYVSLCEEVRKSPELQKWYIVGKFLNSRSLNLMAGSMRSYIQYVNDIKRRADGIGNELHVIAQNLDVVDKWVQVIEVCLLLSSRVSNEFEDYFYDKDDYAAYLKSYVDFDNSDMPSDYSALVEFSDQGKVDLYVDPSNPKVNRNIVQSKLFAADYILRDIIEPVSKDEIEDFYNQKDEITTCKIKGAELTDEEQKKILKYQKLKNRVELRDVVEYGEIINELLGQLINWSFMRERDLLYFQLGFHYNCLRNDSAKPEEYKNLVLDNISIKDAILHQIIGMYVNGVAIYAPGKDENKLESQCAQGGAGGKIGAFCRYSLYLKLAADTLYNAGLEVFEVLPEHEDIIKLRNGIDHFKFYLGGYRSIMSLYSEVFDRFFTYDMKYQKNVLNLLQKYFT

SEQ ID NO: 1029 - protein, 1161 aa, Artificial
  Synthetic
MKVTKVDGISHKKYIEEGKLVKSTSEENRTSERLSELLSIRLDIYIKNPDNASEEENRIRRENLKKFFSNKVLHLKDSVLYLKNRKEKNAVQDKNYSEEDISEYDLKNKNSFSVLKKILLNEDINSEELEIFRKDVEAKLNKINSLKYSFEENKANYQKINENNVEKVGGKSKRNIIYDYYRESAKRNDYINNVQEAFDKLYKKEDIENLFFLIENSKKHEKYKIRECYHKIIGRKNDKENFAKIIYEEIQNVNNIKELIEKVPDMSELKKSQVFYKYYLDKEELNDKNIKYAFCHFVEIEMSKLLKNYVYKKPSNISNDKVKRIFEYQSLKKLIENKLLNKLDTYVRNCGKYNYYLQDGEIATSDFIARNRQNEAFLRNIIGVSSVAYFSLRNILETENENDITGRMRGKTVKNNKGEEKYVSGEVDKIYNENKQNEVKENLKMFYSYDFNMDNKNEIEDFFANIDEAISSIRHGIVHFNLELEGKDIFAFKNIAPSEISKKMFQNEINEKKLKLKIFRQLNSANVFRYLEKYKILNYLKRTRFEFVNKNIPFVPSFTKLYSRIDDLKNSLGIYWKTPKTNDDNKTKEIIDAQIYLLKNIYYGEFLNYFMSNNGNFFEISREIIELNKNDKRNLKTGFYKLQKFEDIQEKIPKEYLANIQSLYMINAGNQDEEEKDTYIDFIQKIFLKGFMTYLANNGRLSLIYIGSDEETSTSLAEKKQEFDKFLKKYEQNNNIKIPYEINEFLREIKLGNILKYTERLNMFYLILKLLNHKELTNLKGSLEKYQSANKEETFSDELELINLLNLDNNRVTEDFELEANEIGKFLDFNGNKIKDRKELKKFDTNKIYFDGENIIKHRAFYNIKKYGMLNLLEKISDEAKYKISIEELKNYSNKKNEIEKNHTTQENLHRKYARPRKDEKFNDKDYKEYEKAIGNIQKYTYLKNKVEFNELNLLQGLLLKILHRLVGYTSIWERDLRFRLKGEFPENQYIEEIFNFDNSKNVKYKSGQIVEKYINFYKELYKDNVEKRSIYSDKKVKELKKEKKDLYIRNYIAHFNYIPHAEISLLEVLENLRKLLSYDRKLKNAVMKSVVDILKEYGFVVKFKIGADKKIGIQTLESEKIVHLKNLKKKKLMTDRNSEELCKLVKVMFEYKMEEKKSEN

SEQ ID NO: 1030 - protein, 1315 aa, Artificial; identical to SEQ ID NO: 751
  Synthetic

SEQ ID NO: 1031 - protein, 1182 aa, Artificial; identical to SEQ ID NO: 572
  Synthetic

SEQ ID NO: 1032 - protein, 1249 aa, Artificial
  Synthetic
MYMKITKIDGVSHYKEKEKGVLKGKDILNGKIEKIVKKRYDATIESKIYKEFIKLRKNRIEQNNEKSILKLIKLNIDKNEKEIKTLLLNKFKIKEKNKKYDKYMLDENKLDNDIKIYESVESLYFLIKEIYLGQNNKKWNISKIDLEKIMEEDNNLIMLGYKLKKNITENDYPYLYSDKNGQESTSVYKLLKKLIEENKDRNQDIRKSQEYEKIRKNFEEYKNRKINLLVKSIKNNKINIQYINNEIKSHNNSREENIIKFFKKMIEEKNEPILKDKLKLFKLEVFFDEEFLEEIKKLLDSDDFDKSYNKKISELRGKIFNRIREKIKNNKNRDELENIYFLELKKYIENNLSHKKEKNKNNNTGEEKSKELYLKFLKKVLFIDDNNRISIEKLKSRIDDNFKNLLIQHVIEYGKIKYYVENDDYIRNIVKNGELKLETKDLEYIKTKETLIRKMAVLVSFAANSYYNLFGSVSEDILGTEVVKNRRTNVIKVKSYIFKEKMLNYFFDSEDFDINKTIEVLESISYSIYNIRNGVGHFNKLVLGKYKKKDINTNKRVEEDLNNNEEIKGYFIQKRGEIEKKIKERFLSNNLQYYYAKERIENYFEVYEFEILKEKIPFAPNFKRIIKKGEDLFNNKKNKKYEYFKNFDKNSAEEKKEFLKTRNFLLKELYYNNFYKEFLSKKEELKKIVIEVKEEKKNRGNNKKSGVSFQNIDDYDTKINISDYIASIHKKEMERVEKYNEEKQKDTAKYIRDFVEEIFLTGFINYLEKDERLHFLKEEFSVLCNSNNNVIDFNVNINEEKIKEFLKENDSKTLNLYLFFNMIDSKRISEFRNELIKYKQFTKKRLDEEKEFLGIKIELYETLIEFVILTREKLDTKKSEETDAWLVDKLYVKEKNECNEYEYKEYEEILKLFVDEKILISKEAPYYATNNKTPIILSNFEKTRKYGTQNLLAKIQSSYKYNEIEKQKIENYNEKKESEKKKKSNIEKLQDLKVELHKKWEQNKITEKEIKKYNDTIKEIREYNYLKNKEELQNVYLLHEILSDLLARNVAFFNKWERDFKFIVIAIKQFLRENDKEKVENFLNPPDNSKGKKVYFSVSKYKNTVENIDGIHKNFMNLIFLNNKFMNRKIDKMNCTIWVYFRNYIAHFLHLHTKNEKISLINQMNLLIKLFSYDKKVQNHILKSTKTLLEKYNIQINFEISNDKNEVFKYKIKNRLYSKKGKMLGKNNKFEILENEFLENVKAMLEYSE

SEQ ID NO: 1033 - protein, 1245 aa, Artificial; identical to SEQ ID NO: 2
  Synthetic

SEQ ID NO: 1034 - protein, 1254 aa, Artificial
  Synthetic
MEGEGVMKLTRRRIGQERKGEKIKAAFYRNISRGLLYLDSENCDYTECVVEAMDFERSCRGRILKNADNEKNPFYKIVKGLTDKDTGIFYEAIVDDGNDIDILINNNITRYGKELQAPGSTVSFEELIREIQSGTSKSEIILELEKIKRMIQDDIQKSKDRLIKSIANNRIPFSLQSNGLVPSSKKMKWLYKILDDNNILKKYWDKYEYEKLESTLIKAIEDLQYKNARLISRTVSGAIRDYHRSLKTRYTNSSLEGKARSEHEINSTENNSEKEEFLLFLKAVEQHFKKYFPVKGKHSTDAYDKALCQAENYKLYCKFNFVKKEVNRSIMNQLVSGLIQHGKLIHYFNNDGTWDVDFLNSHGLSYIQVEEAFKKSLMASLSWGINRLTSFYYDINDTRINSNEESIVDDILLESKRHKELRRNYYNDLRSNDIKQKYFREKLAACYSIIAKDDKDKISDDINKLIGLVERIRKSVAHIRHSSFHYKKVTLPEMLNAVNINYIRVEEFFARDIENLYNAFREKIRSLGIVEYYSGSDIAECFEKCGIKFTLYSPQNSLIPSFKKIYKKGVNLNKGYRAKENQKEPNKHNKHDEQVNRKDLLWYLEIPNNEQGLLAYKNLLQIIYYHSFLPEVQKNELLITNFINNTKEWNRVEAKKISERRGKKNKSSKHNNEKDFKAYRYEAIPDYQGESLDDYLKIIQREQMAQANEMDEGTTDHNYYIRFMQDVVVWAFGDYLEKLMGRYRDFLQKPALQDVDIYDALEELLPEDKEKGKFPMACRFNMKTDENGNTIVYTFEQIKDQIKNRKDLLCFYLFLRLLDAREIAKLQHQFIRYRCSLIERRLPDGRSNQIEDEIELFKELEELMELVRYTIPEVHSLYGKKKSVFNVMIQLHFKEFFEVKALKNPEVVNLYYQLDKKTPIPRKHMALLIRSVPLPLYKNMFKNYYCITENDFKEYIQTSEVIEEIQNKQKELHKMLERARLKSPNIEKMKDKNLWYIEDKNVVEKVIEYEENLRIIARYNQIKRKITFESLYRIFQIHVDLCARLIGYTQDWERDMYFLLKSLENKGIIRNNILDRIFSRNIVRELNNILNTNEKGILYKLCWHKELTIDDMYNKMDIRNSIAHLNHFTQSWNFDKPSLIEMINALRVLLHYDRKRQNAVLKTINDLLLKDYRIKIEWERKVHDTGEIKFDINGDVINEPIIHLKNIHKGAKCKVYNKAYMIEKQREWLCNGIREEIYDKNFLECIERLFKFNY

SEQ ID NO: 1035 - protein, 1388 aa, Artificial; identical to SEQ ID NO: 103
  Synthetic

SEQ ID NO: 1036 - protein, 1245 aa, Artificial; identical to SEQ ID NO: 2
  Synthetic

SEQ ID NO: 1037 - protein, 1245 aa, Artificial; identical to SEQ ID NO: 2
  Synthetic

SEQ ID NO: 1038 - protein, 1184 aa, Artificial; identical to SEQ ID NO: 874
  Synthetic

SEQ ID NO: 1039 - protein, 1412 aa, Artificial; identical to SEQ ID NO: 344
  Synthetic

SEQ ID NO: 1040 - protein, 1387 aa, Artificial; identical to SEQ ID NO: 93
  Synthetic

SEQ ID NO: 1041 - protein, 1419 aa, Artificial; identical to SEQ ID NO: 968
  Synthetic

SEQ ID NO: 1042 - protein, 1250 aa, Artificial; identical to SEQ ID NO: 1015
  Synthetic

SEQ ID NO: 1043 - protein, 1360 aa, Artificial; identical to SEQ ID NO: 92
  Synthetic

SEQ ID NO: 1044 - protein, 1169 aa, Artificial
  Synthetic
MKVTKVDGISHKKYIEEGKLVKSTSEENRTSERLSELLSIRLDIYIKNPDNASEEENRIRRENLKKFFSNKVLHLKDSVLYLKNRKEKNGVQDKNYSEEDISEYDLKNKNSFSVLKKILLNEDVNSEELEIFRKDVEAKLNKINSLKYSFEENKANYQKINENNVEKVGGKSKRNIIYDYYRESAKRNDYINNVQEAFDKLYKKEDIEKLFFLIENSKKHEKYKIRECYHKIIGRKNDKENFAKIIYEEIQNVNNMKELIEKVPDMSELKKSQVFYKYYLDKEELNDENVKYVFCHFVEIEMSKLLKNYVYKKPSNISNDKVKRIFEYQSLKKLIENKLLNKLDTYVRNCGKYNYYLQDGEIATSDFIAGNRQNEAFLRNIIGVSSVAYFSLRNILETENKDDITGKMRGKTRIDSKTGEEKYIPGEVDQIYYENKQNEVKNKLKMFYGYDFDMDNKKEIEDFFANIDEAISSIRHGIVHFNLDLDGKDIFAFKNIVPSEISKKMFQNEINEKKLKLKIFRQLNSANVFRYLEKYKILNYLKRTRFEFVNKNIPFVPSFTKLYSRIDDLKNSLGIYWKTPKTNDDNKTKEIIDAQIYLLKNIYYGEFLNYFMSNNGNFFEISREIIELNKNDKRNLKTGFYKLQKFENLQEKTPKEYLANIQSLYMINAGNQDEEEKDTYIDFIQKIFLKGFMTYLANNGRLSLIYIGSDEETNTSLAEKKQEFDKFLKKYEQNNNIEIPHEINEFLREIKLGNILKYTERLNMFYLILKLLNHKELTNLKGSLEKYQSANKEEAFSDQLELINLLNLDNNRVTEDFELEADEIGKFLNFNGNKIKDRKELKKFDTNKIYFDGENIIKHRAFYNIKKYGMLNLLEKISDEAKYKISIEELKNYSNKKNEIEKNHTTQENLHRKYARPRKDEKFTDEDYKEYEKAIGNIQKYTHLKNKVEFNELNLLQSLLLRILHRLVGYTSIWERDLRFRLKGEFPENQYIEEIFNFENKKNVKYKGGQIVEKYIKFYKELHQNDEVKINKYSSANIKVLKQEKKDLYIRNYIAHFNYIPHAEISLLEVLENLRKLLSYDRKLKNAVMKSVVDILKEYGFVATFKIGADKKIGIQTLESEKIVHLKKLKLKDNDKKKELIKTYRNSKELCKLVKVMFEYKMEEKSSEK

SEQ ID NO: 1045 - protein, 1191 aa, Artificial; identical to SEQ ID NO: 358
  Synthetic

SEQ ID NO: 1046 - protein, 937 aa, Artificial
  Synthetic
MKVTKIDGLSHKKFEDEGKLVKIEDASQKNETLERLENLKGIKLGNYIKNPDKTKNKDNKKRRKGLKEYFSEITLRKENEKYVLLKGKKLKKINNDIKDTDIKAKDKKEEVFDILKEILKLNLLANDAEEKIQFDSIKLKNVFGKDFVKKELQIKSIEESLEKNKADYRKEFIETENHKYGNVKGKNKRSRIYEYYKKSENHKKFEDNIREAFEKLYTEENIKELYSKIEQVLKKTHLKSIVREFYQNEIIGESEFSKKNGDGISILYNQIKDSIKKEKNFIEFIENIGNLELKDLTKSQIFYKYFLENEELNDENIKFVFCYFVEIEVSDLLKGNVYKASKIYENKIKNIFEYGKLKNLIVYKLENKLNNYVRNCGKYNYHMENGDIATSDINMRNRQTEAFLRSMIGVSSFGYFSLRNILGVNDDDFYEIEEDLTEEERKNESNVLKKAKEDITSKSIFEKVVDKSFEKKGIHSIRENVKMFYGDSFDKANEDELKQFFVNMLNAITSIRHRVVHYNMNTNSENIFNFSDIEVSRLLKSIFEKETDKRELKLKIFRQLNSAGVFDYWEDWEIEKYLKNIEFKFVNKNIPFVPSFTKLYNRIDDLKGNNALKLGAINIPKRKEARDSQIYLLKNIYYGEFIEKFVNNNDNFEKIFREIIEINKNAGTNTKTKFYKLEKFETLKANTPTEYLEKLQSLHKINYDKEKVEEAKDIYVDFVQKIFLKGFINYLQKSNSLRPLNLLNLKKDEVINSEKSSYDEKLKQWENNGSNLSKMPEEIYEYIKKIQINKINYSDRMSIFYLLLKLIDHKELTNLRGNLEKYESMNKNKIYSEELNIVNLVSLDNNKVRANFSVEAEDIGKFLKTETLIKDARQLNNFSERFSDGENVIKHRSFYNIKKYGILDLLEKIVAKADLKITKEEIKKYENLQKELEKKQE

SEQ ID NO: 1047 - protein, 1140 aa, Artificial
  Synthetic
MCMKITKIDGVSHYKEKEKGVLKAKGVLNEEIQKIVKKRYDKTIESKIYKEFIKLRKNRIEQNNEKSILELIKSNIDKNEKEIKTLLWKNFKIKEKNKNYDEYITDEIKLDNDIKIYESAESLYFFIKEVYLGENNKKWNISKIDLEKIMEEDNNLIMLGYKLKKNITENDYPYLYSDKNGQESTSVYKLLKKLIEENKDRNQDIRESEEYRKIQKEFKEYKNRKINLLVKSILNNKVNIKYNTNNNSLEDSNSKREKEIIEFFKKMIEEKNEPILKDKLELFRLEVFFDEEFLEEIKKLLDSDDSDKSDNKKIAELRGKIFSRIREKIKEDKNRDILKNIYFLELKKYIENNLSHKKEKNKNNNNTGEEKRKELYLKFLKKVLFIDDNNRISIEKLKSRIDDNFKNLLIQHVIEYGKIKYYVENDEYIKNIVKNGELKLETENLEYIRIRETLIRKMAVLVSFAANSFYNLFENITSDILTANINLDSGVIKIGNNRLKEKFLNYFFYSEEISDKEDFLKALKDSIYNVRNGVNHFDKMILGKYNNGLDLKDSDTIKDYFNFKKKEIQQDLKDRFISNNLQYYYTENEIKKYFEKYKFEILKTKASFAPNFKRILRKGENLSISEISDIYDFFKRYSENSDKSSEYNEFTKTRNFLLKELYYNNFYREFLSDGIKFEEAVKKVKKNKKNRIIGKKKSAGKSYDVIEDYNSLDDVLEYISRIHKSEMERIEVNTEKNRKDTSKYIRDFIEEVFLEGFIKYLDNNNFNFLKNRNKSDKERKEIVRNLNIKIEGLDILNQNDSEILNLYLFFNMIDNKRISEFRNEMIKYKQFLTKRQNIKSKFLEIDIEKIEAIIEFVIITREKLEILENEIKEQNKDNMNALFNKFYSSESEYDECLKKFIEETVLNDKKNTPFYSTDGKTPIVHSNLEKMRKYGTENFLSKVLKGEKYTLDNMRIKEKFETEANDKFKEQKILEKVDKIKGNEKHKKLIEYYNDCRCYLHKEWENKKNKKEFEYKKIYEKIIEEIRKYNYLENKEKLQNVYLLHEITSDLMARNVAFINKWERDFKFLSIAIKENLKDSNDIQKIKEFLAPSLDTTSDEEHFNVKNYASKLKKIQGLHNNIISLIFIKNLDGWSNKIDN

SEQ ID NO: 1048 - protein, 1234 aa, Artificial
  Synthetic
MKIIRPYGTSRSRKKDEGLRRVLIDNTPERKEHPIPRFAASRDELVIAQWISTIDKIARKPPGKKKPTPAQHELRHKLGNRCWMRLIEGGHLPGAAEEKRKEHLRNLWWFKIHPYPAKPEAPRLKDGKLPGWAEPKGPLYKAFIGDCEPEEIDPNKAAEIAARIERHLYGEEIRLGAHAKPKRKGRIEARAESIEGNVLHMPDAPDARPNQPRWTEQDKAAYTQPGDPAQTIRQKAEALEANKDRMSLPAAAEVLFAHWAKVFRDPQSGRTLGVKEAMETRPGLFAIHSALKECYRRLLKRTRKDTSAQRKANPEERRLSTLLPRDLKGALRLSELQAKNAELAELVRLGKIIHYAASEGRADRTRTIKDHWPDKIAESRFWLSDGQADIKRAEAFVRVWRHALVLAGLTLKDLTGYSGDILGGKGDRNEAIAALRSDATKQKHFDEKLPVLFGHRQVLFSALDCVELASGLIDGAAKLRHAVFHFKGRGQFLGELSTLDQNFPASIQQAAELFWEEDIKDRINRLKDVLTAAHVQKFLTQEQAEQGFQLIADQTVTELPLPRFSRLLERRKNAWEETIRLPEPANLRALEVPARNCQYTLLKLIYERPFRAWLKSHDAEAISLWIDRAVKRATAAAQKLNAADAAGREVIAARAAGLPKPSGKRDIMDFFFDLSAATASEMRVQSGYQSDREQAREQAGYIDDLLCDVVILAFSDYLSGQKLDWLLDLKLDQEPSKLPTCSLDHLQMPEQQPELVAQPWHAALYLILHLLPVDAVGQLLHQLFKWNVAATRETDLPADEDERRKRLEATMTLYLDMHDAKFEGGFALAGCEDFADLFKDKEAFKKFSAQASREEPDRRVPQRGLREIARFGHLPLVKTLCRGKQIDDDTIRCVAAMEAAPEGGESQIALLHKTRERLHAKWVEAKRLDAKDLAEYCDAIAKISEHRRKSNFVNLVDHVRAHRMVLAPLGRLVDYAGLFERDLYFVTLALLKQHGVRPEDFFEVSDDERKNGLEKFYNGEIISALHNCKVDSPHVAEIRKQIELHFTAIWAPRNPIREIRNDLMHLKMLKGAAPAPRLTYWINQARRLMDYDRKLKNAVSKSVIDLLQREGLTLRWTMSTTGGAHDLAGAKLSARSAEHLGSKRLTRKRAGPKDKEELIHERLHGEDYVGMIAVAFEGEPVPTISILDDLSQVDWEASVAVKRPRRDRDQGGPQRPASDREKYRHGSRGRELRH

SEQ ID NO: 1049 - protein, 1373 aa, Artificial; identical to SEQ ID NO: 104
  Synthetic

SEQ ID NO: 1050 - protein, 1167 aa, Artificial; identical to SEQ ID NO: 361
  Synthetic

SEQ ID NO: 1051 - protein, 1234 aa, Artificial; identical to SEQ ID NO: 1048
  Synthetic

SEQ ID NO: 1052 - protein, 1157 aa, Artificial; identical to SEQ ID NO: 699
  Synthetic

SEQ ID NO: 1053 - protein, 1066 aa, Artificial
  Synthetic
MKVTKVGGISHKKYTSEGRLVKSESEENRTDERLSALLNMRLDMYIKNPSSTETKENQKRIGKLKKFFSNKMVYLKDNTLSLKNGKKENIDREYSETDILESDVRDKKNFAVLKKIYLNENVNSEELEVFRNDIKKKLNKINSLKYSFEKNKANYQKINENNIEKVEGKSKRNIIYDYYRESAKRDAYVSNVKEAFDKLYKEEDIAKLVLEIENLTKLEKYKIREFYHEIIGRKNDKENFAKIIYEEIQNVNNMKELIEKVPDMSELKKSQVFYKYYLDKEELNDKNIKYAFCHFVEIEMSQLLKNYVYKRLSNISNDKIKRIFEYQNLKKLIENKLLNKLDTYVRNCGKYNYYLQDGEIATSDFIARNRQNEAFLRNIIGVSSVSYFSLRNILETENENDITGRMRGKTVKNNKGEEKYVSGEVDKLYDNNRQNEVKKNLKMFYSYDFNMDSKNEIEDFFSNIDEAISSIRHGIVHFNLELEGKDIFAFKNIAPSEISKKMFQNEINEKKLKLKIFRQLNSANVFRYLEKYKILNYLKRTRFEFVNKNIPFVPSFTKLYSRIDDLKNSLGIYWKTPKTNDDNKTKEIIDAQIYLLKNIYYGEFLNYFMSNNGNFFEISREIIELNKNDKRNLKTGFYKLQKFEDIQEKTPKEYLANIQSLYMINAGNQDEEEKDTYIDFIQKIFLKGFMTYLANNGRLSLIYIGSDEETNTSLAEKKQEFDKFLKKYEQNNNIKIPYEINEFLREIKLGNILKYTERLNMFYLILKLLNHKELTNLKGSLEKYQSANKEEAFSDQLELINLLNLDNNRVTEDFELEVNEIGKFLDFNGNKIKDRKELKKFDTNKIYFDGENIIKHRAFYNIKKYGMLNLLEKISDEAKYKISIEELKNYSNKKNEIEKNHTTQENLHRKYARPRKDEKFTDEDYKKYEKAIRNIQQYTHLKNKVEAGTDFLASQMFFDNDVFVKFKEQAEKLDIEVPLIAGIMPVTNAKQIKRIIELSKCSVPEKLDKLLEKYGDNPESMKKAGIMYASEQIIELLAYGIKGIHIYTMNKPEIAKEIMKNIEFAR

SEQ ID NO: 1054 - protein, 1382 aa, Artificial; identical to SEQ ID NO: 166
  Synthetic

SEQ ID NO: 1055 - protein, 1185 aa, Artificial; identical to SEQ ID NO: 421
  Synthetic

SEQ ID NO: 1056 - protein, 1276 aa, Artificial
  Synthetic
MKISKVDHVKSGIDQKLSSQRGMLYKQPQKKYEGKQLEEHVRNLSRKAKALYQVFPVSGNSKMEKELQIINSFIKNILLRLDSGKTSEEIVGYINTYSVASQISGDHIQELVDQHLKESLRKYTCVGDKRIYVPDIIVALLKSKFNSETLQYDHSELKILIDFIREDYLKEKQIKQIVHSIENNSTPLRIAEINGQKRLIPANVDNPKKSYIFEFLKEYAQSDPKGQESLLQHMRYLILLYLYGPDKITDDYCEEIEAWNFGSIVMDNEQLFSEEASMLIQDRIYVNQQIEEGRQSKDTAKVKKNKSKYRMLGDKIEHSINESVVKHYQEACKAVEEKDIPWIKYISDHVMSVYSSKNRVDLDKLSLPYLAKNTWNTWISFIAMKYVDMGKGVYHFAMSDVDKVGKQDNLIIGQIDPKFSDGISSFDYERIKAEDDLHRSMSGYIAFAVNNFARAICSDEFRKKNRKEDVLTVGLDEIPLYDNVKRKLLQYFGGASNWDDSIIDIIDDKDLVACIKENLYVARNVNFHFAGSEKVQKKQDDILEEIVRKETRDIGKHYRKVFYSNNVAVFYCDEDIIKLMNHLYQREKPYQAQIPSYNKVISKTYLPDLIFMLLKGKNRTKISDPSIMNMFRGTFYFLLKEIYYNDFLQASNLKEMFCEGLKNNVKNKKSEKPYQNFMRRFEELENMGMDFGEICQQIMTDYEQQNKQKKKTATAVMSEKDKKIRTLDNDTQKYKHFRTLLYIGLREAFIIYLKDEKNKEWYEFLREPVKREQPEEKEFVNKWKLNQYSDCSELILKDSLAAAWYVVAHFINQAQLNHLIGDIKNYIQFISDIDRRAKSTGNPVSESTEIQIERYRKILRVLEFAKFFCGQITNVLTDYYQDENDFSTHVGHYVKFEKKNMEPAHALQAFSNSLYACGKEKKKAGFYYDGMNPIVNRNITLASMYGNKKLLENAMNPVTEQDIRKYYSLMAELDSVLKNGAVCKSEDEQKNLRHFQNLKNRIELVDVLTLSELVNDLVAQLIGWVYIRERDMMYLQLGLHYIKLYFTDSVAEDSYLRTLDLEEGSIADGAVLYQIASLYSFNLPMYVKPNKSSVYCKKHVNSVATKFDIFEKEYCNGDETVIENGLRLFENINLHKDMVKFRDYLAHFKYFAKLDESILELYSKAYDFFFSYNIKLKKSVSYVLTNVLLSYFINAKLSFSTYKSSGNKTVQHRTTKISVVAQTDYFTYKLRSIVKNKNGVESIENDDCRCEVVNIAARDKEFVDEVCNVINYNSDK

SEQ ID NO: 1057 - protein, 1360 aa, Artificial; identical to SEQ ID NO: 92
  Synthetic

SEQ ID NO: 1058 - protein, 1388 aa, Artificial; identical to SEQ ID NO: 103
  Synthetic

SEQ ID NO: 1059 - protein, 1143 aa, Artificial; identical to SEQ ID NO: 11
  Synthetic

SEQ ID NO: 1060 - protein, 1391 aa, Artificial; identical to SEQ ID NO: 420
  Synthetic

SEQ ID NO: 1061 - protein, 971 aa, Artificial
  Synthetic
MKREKNITIMKISKVNHRRTAVALNGDKSELGGILYEAPVQKDKNGNYNDVIAETGKVVNEALDKKSRLYTPFNNQKVIIDKNLQRYANNLKRCYINFVKQYVNNKSFNYKAMQFIPDIQNPKTNDAVNYRTDRDNVYNKNKYYDKQTKSKSKKFIYEKIVIPQNEQNIVISALVNCSLRKSLRKDVSYKTKSGEIKTYNLPELVKKSMRFYCLEGQREPDEKEKYEMYILFSYMKEDKRTKNTDLLVKSISNQNTKVKVEDIDGNKLLKLSIADTKKKPLWEYLIKYADSSRQRELMYDIRKKIILYVAGIEEYENIKEDSGLSKVSWSKYNISDNKMFFDINSCTDKRKQNLEIKIREANIEHYRNASSKLCDDESIFWFQHFEGVIETLFSKKSKISEERLGCAYICDYLWKDFLSYLAAKYIDLGKGVYHFTMKDKLDMLNKNEAVTDLRFGIVSEKYEKGITSFDYERIKAEEELDRNIAAYVTFAADIFAKSVIKSDYRTKKDNNSDVLQYSDKEFRNSEVIRDNAEKNILQYWGGYSRWCTENSKLPENNKVSDFGKLDVSDLCIDIKKHLAGIRNSSVHYTTKIKNESAADGSNVKILFEKDLADINIIYADKYYSNNVWMFYSLEDINKLIAFLYKEKRVIRQVQIPSFSRILKRKAMQDVINEIFKDDFDENIVNPELKEKYRNSLYFMLKEIYYNAFIIQPELKEKFKDKIKTMKSELYNKLKTIDKKEYKALYCMLSNEESALKNFADRIYSVDGDNVSFADICKILMTDYNMQNQEKKNIESMEQKKKNKGKDENYKHFPLLLHKVLKELFIEYLKQTHELEFLRNNICIKSDVTMESFESQIKGVEIYKDLKEKIDKNNSLLDWYVIAHFLMPKQLNHLIGNIKNYIQFATNIDKRAESVKNLTESGMVKRIQYYDDIVRTLEFSAQYIGKISNNINDYFNSEDEYVSFYNKNTIKI

SEQ ID NO: 1062 - protein, 1101 aa, Artificial; identical to SEQ ID NO: 73
  Synthetic

SEQ ID NO: 1063 - protein, 1185 aa, Artificial; identical to SEQ ID NO: 421
  Synthetic

SEQ ID NO: 1064 - protein, 1176 aa, Artificial
  Synthetic
MKLSKVTYRVKDKNAKYKKEYNVRAAVANNSENAGGVLYHVPGVDLIDLREQMLDRDRSVRLLYNIFNHIQTGTKPKKWGNDETLSVDENERKAKEQNIKIMNYKWREACSEYIEKSQSTINSVLFYSYEESGYKTKRMNDNEAIIVKMQYENRLSHFTGGKLEDFVAYTLRNSLVVSRYDNQEFDSVNAMVVFINNIGNGNISDKDKKTICKLADLIRNDFSKLNPNVQSSQGANMVRSVRNQNMVVQPQGDKVSFPLVSDEGKNTVTNKNVEKKGLNEFLLNYANLDDEERMEKLRKLRRIIDVYFSSPSHYQKDMDISLSDNIDKTKFDVWKKHETGKKNTELFVDIPDELLTAETEKIKLDAVLEKKARKRLTDSIRKQNMICYRYTRAVVEKYNSTENLFFENDSINQYWIHHIENAVERILKSCKAETLFKLRRGYLTEKVWKDAINLISIKYIALGKVIYNFTVDDIWKDKKVKNLGSIDEKIKHGITSFDYEMIKAQEALQRELAVNVAFAANNLARAVCDMTNLKDKESDFLIWNKKDIANKLKNKDDMASVSVVLQFFGGKSSWDIDAFREAYKGNKYNYEVCFIDDLRKAVYAARNESFHFKTALVNNDIWNTEFFGKLFIKETEICLDIEKDRFYSNNLPVFYSDNDLKKMLDHLYNNKVSRAAQVPSYNSVMVRKYFPENITSTLKYQKPGYDEDTLEKWYSACYYLLKEIYYNSFLQSDEALALFEESVNNLKGDNKDQELAVKNFRNNYKNIKSSCTSFSQVCQMYMTEYNQQNNQFKKVRSSKDSIVDKPIYQHYKLLLKKVIANAFASYLQHNEELFGFIGKPLKVNCLKEIDKEQFLPEWTSKKYVSLCEEVRKSPELQKWYIVGKFLNSRSLNLMAGSMRSYIQYVNDIKRRADGIGNELHVIAQNLDVVNKWVQVIEVCLLLSSRVSNEFEDYFYDKDDYAAYLKSYVDFDNSDMPSEYSALVEFSDQGKVDLYVDPSNPKVNRNIVQSKLFAADYILRDIIEPVSKDEIEDFYNQKDEITTCKIKGAELTDEEQKKILKYQKLKNRVELRDVVEYGEIINELLGQLINWSFMRERDLLYFQLGFHYNCLRNDSAKPEEYKNLVLDDISIKDAILHQIIGVYVNGVAIYAPGKDKNKLESQCVKGRVGGKIGAFCG

SEQ ID NO: 1065 - protein, 1101 aa, Artificial; identical to SEQ ID NO: 73
  Synthetic

SEQ ID NO: 1066 - protein, 931 aa, Artificial
  Synthetic
LKWRKNMKLSKVTYRVKDKNAKYKKEYNVRAAVANNSENAGGVLYHVPGVDLIDLREQMLDRDRSVRLLYNIFNHIQTGTKPKKWGNDETLSVDENERKAKEQNIKIMNYKWREACSEYIEKSQSTINSVLFYSYEESGYKTKRMNDNEAIIVKMQYENRLSHFTGGKLEDFVAYTLRNSLVVSRYDNQEFDSVNAMVVFINNIGNGNISDKDKKTICKLADLIRNDFSKLNPNVQSSQGANMVRSVRNQNMVVQPQGDKVSFPLVSDEGKNTVTNKNVEKKGLNEFLLNYANLDDEERMEKLRKLRRIIDVYFSSPSHYQKDMDISLSDNIDKTKFDVWKKHETGKKNTELFVDIPDELLTAETEKIKLDAVLEKKARKRLTDSIRKQNMICYRYTRAVVEKYNSTENLFFENDSINQYWIHHIENAVERILKSCKAETLFKLRRGYLTEKVWKDAINLISIKYIALGKVIYNFTVDDIWKDKKVKNLGSIDEKIKHGITSFDYEMIKAQEALQRELAVNVAFAANNLARAVCDMTNLKDKESDFLIWNKKDIANKLKNKDDMASVSVVLQFFGGKSSWDIDAFREAYKGNKYNYEVCFIDDLRKAVYAARNESFHFKTALVNNDIWNTEFFGKLFIKETEICLDIEKDRFYSNNLPVFYSDNDLKKMLDHLYNNKVSRAAQVPSYNSVMVRKYFPENITSTLKYQKPGYDEDTLEKWYSACYYLLKEIYYNSFLQSDEALALFEESVNNLKGDNKDQELAVKNFRNNYKNIKSSCTSFSQVCQMYMTEYNQQNNQFKKVRSSKDSIVDKPIYQHYKLLLKKVIANAFASYLQHNEELFGFIGKPLKVNCLKEIDKEQFLPEWTSKKYVSLCEEVRKSPELQKWYIVGKFLNSRSLNLMAGSMRSYIQYVNDIKRRADGIGNELHVIAQN

SEQ ID NO: 1067 - protein, 1391 aa, Artificial; identical to SEQ ID NO: 559
  Synthetic

SEQ ID NO: 1068 - protein, 1161 aa, Artificial
  Synthetic
MKVTKVDGISHKKYIEEGKLVKSTSEENRTSERLSELLSIRLDIYIKNPDNASEEENRIRRENLKKFFSNKVLHLKDSVLYLKNRNEKNAVQDKNYSEEDISEYDLKNKNSFLVLKKILLNEDINSEELEIFRKDVEAKLNKINSLKYSFEENKANYQKINENNVEKVGGKSKRNIIYDYYRESAKRNDYINNVQEAFDKLYKKEDIEKLFFLIENSKKHEKYKIRECYHKIIGRKNDKENFAKIIYEEIQNVNNIKELIEKVPDMSELKKSQVFYKYYLDKEELNDKNIKYAFCHFVEIEMSKLLKNYVYKKPSNISNDKVKRIFEYQSLKKLIENKLLNKLDTYVRNCGKYNYYLQDGEIATSDFIARNRQNEAFLRNIIGVSSVAYFSLRNILETENENDITGRMRGKTVKNNKGEEKYVSGEVDKIYNENKQNEVKENLKMFYSYDFNMDNKNEIEDFFANIDEAISSIRHGIVHFNLELEGKDIFAFKNIVPSEISKKMFQNEINEKKLKLKIFRQLNSANVFRYLEKYKILNYLKRTRFEFVNKNIPFVPSFTKLYSRIDDLKNSLGIYWKTPKTNDDNKTKEIIDVQIYLLKNIYYGEFLNYFMSNNGNFFEISREIIELNKNDKRNLKTGFYKLQKFEDIQEKTPKEYLANIQSLYMINAGNQDEEEKDTYIDFIQKIFLKGFMTYLANNGRLSLIYIGSDEETNTSLAEKKQEFDKFLKKYEQNNNIEIPHEINEFVREIKLGNILKYTERLNMFYLILKLLNHKELTNLKGSLEKYQSANKEETFSDELELINLLNLDNNRVTEDFELEADEIGKFLDFNGNKVKDNKELKKFDTNKIYFDGENIIKHRAFYNIKKYGMLNLLEKISDEAKYKISIEELKNYSNKKNEIEKNHTTQENLHRKYARPRKDEKFTDEDYKKYEKAIRNIQQYTHLKNKVEFNELNLLQSLLLRILHRLVGYTSIWERDLRFRLKGEFPENQYIEEIFNFDNSKNVKYKNGQIVEKYINFYKELYKDDTEKISIYSDKKVKELKKEKKDLYIRNYIAHFNYIPNAEISLLEVLENLRKLLSYDRKLKNAIMKSIVDILKEYGFVVTFKIGADKKIGIQTLESEKIVHLKNLKKKKLMTDRNSEELCELVKVMFEYKMKEKKSEN

SEQ ID NO: 1069 - protein, 1388 aa, Artificial; identical to SEQ ID NO: 185
  Synthetic

SEQ ID NO: 1070 - protein, 1287 aa, Artificial; identical to SEQ ID NO: 105
  Synthetic

SEQ ID NO: 1071 - protein, 1373 aa, Artificial; identical to SEQ ID NO: 104
  Synthetic

SEQ ID NO: 1072 - protein, 1113 aa, Artificial
  Synthetic
MQMKISKIKNSRPGISVAENKNEEPLSRQSLLYYAPVKDGKIRLESKDLEQHVTECNEKAQKLYNVITPEINFYRDENRQKMVENLAKNFNAVINNALRSIRNPKEKKEQRVEKEVAFILNLSKKSIKMKKDVFVKSTDLIVKFPENNKYNKKNDKGTGSKEADIQKIISDLVLRKLKKTLRKEVKLENGCRMQMTEITISLMSAICLYGNAESFDPAILKAFFEKVDSDYTKYKYVEQIVKSIESQSAKLKVVEKDGRHLLISANADHRKKKYVFEFMRMYAAADEKEKRELTEHIQDLIGLYLCGKAGYENAENRFSDMTESHNCICGKIEEIFNGLEELENLSQQKKEKLKNTTVKVMALKYRAAVNYLADEVRKTVLGEIREKKVCSCADLYWIEYIDSTVEKLLLKSRNKKRYRYEIGFLSKHIWKEWTQYISGKYIEMGKGVYHFAIPDLSGALEGESVSICEVKPEYRNGVSGFDYERIRAEESLEREMEKYVLFAVNNFARAVTPEEEREKSGHEDVLLMKTLSEIEESQTKEERQKKHDNNVKNAITLYADADRRILQFFGGQSRFREKEDSLINLYSGEDLYKEIRKELYAIRNITFHYTTKAEKDQTQKHDLAEYLFEEEFSDITELFREKYYANNVWKYYDAEVINTIMENIYCGRKYRAAQVPALKNIISRPELPQVMNGFVKGNSLRRLMNCPDRDVINKYWSALFFVLKELYYYDFLQEQKRPEDNVKERFFRAIKKLSGQEKGDKEQKAWESFENRIDQIGRDRSFGAICQGLMIEYMLQNSDISMVQTETDNGKANNKKQIYKHYRTLLYNCISEAFIEYLREKWKELRTPVLTAKEWSKEEFCRVDGLKHLSLFDHLKETFNDAESGSSWYMAAHFINQKYLNHLLGSIRNYLQFTEDIEDRAISLGDCVDNKREEKNLRYRNTLEILEFVAQFCERTTNVMEDYFESNQEYAEYLSGFVDYNTTKKETDIEKALYSFCKQKFKVDGKEYMAGIYYDGENLIPNRNIIRANMYGNTSCLKPCMDRITLKEIRTMYADQNKLDMVLKEGVCHTEEEQKAYREYQNEKNRIELFDVCTYTQILNDMQIGRASCRERV

SEQ ID NO: 1073 - protein, 1386 aa, Artificial
  Synthetic
VGEQQYDGTRGIVYYDPSQGVELGNNYLRRDGHIGNSLPDVKQLVKKRSDESANLYSVLNRNTVIFTKDKNKQKVIKRIINDFSSIFTGNGKKDQHLLFNGVNVCDYNAVSQYMKCEEKPDIDSLGYESDEKLAQDIVAHALRNSLRRKIVWKKKAYYLPDIAVKLLLAVGIRADKEEYKLIPREEVLAFVGYVRVDRINKQSRWKNGNKITRQEDMVASIRKKDVKVQVFDKAGKHMLMLSNSENVKKRYVADFLKSFAVCADEGEQNQMIFQIRRLIVLFVYGSNQYAAFSDKNPWGKIPGLGEKADIFGDILEKDNMGNIIARKVITEDTFTEIANSKGKESNRAVHLDFDAKIRQIMISHYKAAESKIIEEKGIEDSGDSLFWISHFETVVEQFVKIRKKRKFNDYRCVRICNMLWEEWLSYIALKYMDLGKAVYYFGTPDLYALDSRQPVKIGPVQERYADGLTSFDYEKIKAEETLVRNFATAVTFAENAFSNAVVREEYRLGFDKREGDRADVLGYSDSQFKDKDIINENAWKRVMGYFGGAAIWKDMKINGSGEQEPKFLNEIRKHIANIRNANFHFSTDRNPILSDNNTYAKKLFSGEYGRINQLIGEKYLSNNILAFYPAASSVEGMETGLYPLMKKLYCHVVEREAQIPAFNHIIKKKDVRVFVEEFLLKDESVKNKSVKNSIFSDTKLTDKYLSGLYFLLKEIYYYGFLSENDLMVKFDNALKQIKNKVDEENDKLKKEKDSKDTSEKKAMNNFIKRYDEIKDKMTFGQMCQQIMTDYNMQNQKQKEVPSTAKSKWNAQNGNKPLYKHYVLILQQCIRRAFEEYLDSDEVFGFLKVPKIFQADFEAELISKEKAEEFIRNIPSGICLFEKVAVMGKEIEQKKDKVNIRQDIQLMYDWYVTAHFMSAKQINMLIGDIRSYKQYVNNIYERAKNTGNTTAADRILDTSLVSRYSDILSVLEFVLQFVGKTSRNIEDYFDTQEEYAKYIANYVDFDAFLGEADSEGNKYKAALQEFCRQMVESAKSTDKALGIYYDVKNPVPNRNMVYSLLYGDKHMLSAVMKKVRENGTFRITQEEIVQYYEMRNQLSSVFKRGSCISDDEQKLLKEFQNLKNRIELLDIQTYTELLNDIMAQMVSWAYLRERDLMYYQLGYHYVRLFYTDKVTEAKYHTLRGDKINIEEGALLYQIIALYDHMLPLYGVDKEGKAFVALKRGTPGKGMTPFMKEYCQEKDTNNPYVYYGGIRLFEDKDKHDKFVFLRDYIAHMKYHTLHDKSIWDLFGEMYNGFLRYDTKLKKSVSYISKNILERYFVVLNTSMEQGKGSVRGTVFSVEKITSDTFTYKYKDGNKKEHRVEVPCRSDIFLKQLEELLAYKRKRLI

SEQ ID NO: 1074 - protein, 1360 aa, Artificial
  Synthetic
MQMKISKIKNSRSGISVTENKNEEQLSRQSLLYYAPVKDGKIRLESKDLEQHVTECNEKAQKLYNVITPEINFYRDENRQKMVENLAKNFNAVINNALRSIRNPKEKKEQRVEKEVAFILNLSKKSIKMKKDVFVKSTDLIVKFPENNKYNKKNDKGTGSKEAYIQKMISDLVLRKLKKTLRKEVKLENGCRMQMTEITISLMSAICLYGNAEFFDPAILKAFFEKVDSDYTKYKYVEQIVKSIESQSVKLKVVEKDGRHLLISANADHRKKKYVFEFMRMYAAADEKEKRELMEHIQDLIGLYLCGKAGYENAENRFSDMTESHNCICGKIEEIFNGLEELENLSQQKKEKLKNTTVKVMALNYRAAVNYLADEVRKTVLGEIREKKVRSCADLYWIEYIDSTVEKLLLKSRNKERYRYEIGFLSKHIWKEWTQYISGKYIEMGKGVYHFAIPDLSGALEGGSVSICEVKPEYKNGVSGFDYERIRAEESLEREMEKYVLFAVNNFARAVTPEEEREKSGHEDVLLMKTLSEIEESQTKEERQKKHDNNVKNAITLYADADRRILQFFGGQSRFREKEDSLVNLYSGEDLYKEIRKELYAIRNITFHYTTKADKDQTQKHDLAEYLFEEEFSDITELFREKYYANNVWKYYDAEVINTIMENIYCGRKYRAAQVPAFKNIISRPELPQVMNGFVKGNSLRRLMNCPDRDVINKYWSALFFVLKELYYYDFLQDQKKPEDNVKERFFRAIEKLSGQENDDEKQRAWESFENRIDQIGRDRSFGAICQGLMIEYMLQNSDISMVQTETVNGKANNKKQIYKHYRTLLYNCISEAFIEYLREKWEELRTPVLTVKEWSKEEFCRADGLKHLSLFDHLKETFNDAESGSSWYMAAHFINQKYLNHLLGSIRNYLQFTEDIEDRAISLGDRVDNKREEKNLRYRNTLEILEFVAQFCERTTNVMEDYFESNQEYAEYLSGFVDYNTTKKETDIEKALYSFCKQKFKVDGKEYMAGIYYDGENLIPNRNIIRANMYGNTSCLKPCMDRITLKEIRTMYADQNKLDLVLKEGVCHTEEEQKAYREYQNEKNRIELFDVCTYTQILNDMQARLIGWSYMRERDLMYYQLGYYYTKLFWTDSISEEDARRRLVGNLVNVEDGAILYQILAFNSYNLPIIANKNNTVTLLKDEGSIGGKAITAFFKNYENAEMIYEEALDLFENMDEHAAIINTRNYIEHFKYFIKSDRSMMDLYSEVYDRFFRHDHNRKKNVPDSLKNVLADNFMIVDISMELGSKKVGEKKKGFREHKAARIEFTDSGIRSTDMTYTIKPDIKDNKKDEKVLVPARSEVFLKQFRKILEYRIQDKTQ

SEQ ID NO: 1075 - protein, 1184 aa, Artificial; identical to SEQ ID NO: 874
  Synthetic

SEQ ID NO: 1076 - protein, 1388 aa, Artificial
  Synthetic
MKLSKVTYRVKDKNAKYKKEYNVRAAVANNSENAGGVLYHVPGVDLIDLKEQMLDRDRSVRFLYNIFNQIQTGTKPKEWGNDETLSVDENERKAKEQNIKIMNYKWREACSEYIKKSQSTINSVLFYSYEESGYKTKRMNDNEAIIVKMQYENRLSHFTGGKLEDFVAYTLRNSLVVSRYDNQEFDSVNAMVVFINNIGNGNISDKDKKTICKLADLIRNDFSKLNPNVQSSQGANMVRSVRNQNMVVQPQGDIVSFPLVSDEGKNTVTNKNVEKKGLNEFLLNYANLDDEERMENLRKLRRIIDVYFSSPSHYQKDMDISLSDNIDKTKFVVWKKHETGKKNTELFVDIPDELFTAETEKIKLDAVLEKQARKRLTDSIRKQNMICYRYTRAVVEKYNSTENLFFENDSINQYWIHHIENAVERILKSCKAETLFKLRRGYLTEKVWKDAINLISIKYIALGKVIYNFTVDDIWKDKKVKNLGSIDEKIKHGITSFDYEMIKAQEALQRELAVNVAFAANNLARAVCDMTNLKDKESDFLIWNKKDIANKLKNKDDMASVSVVLQFFGGKSSWDIDAFREAYKGNKYNYEVCFIDDLRKAVYAARNESFHFKTALVNNDIWNTEFFGKLFIKETEICLDIEKDRFYSNNLPVFYSDNDLKKMLDHLYNNKVSRAAQVPSYNSVMVRKYFPENITSTLKYQKPGYDEDTLEKWYSACYYLLKEIYYNSFLQSDEALALFEESVNNLKGDNKDQELAVKNFRNNYKNIKSSCTSFSQVCQMYMTEYNQQNNQFKKVRSSKDSIVDKPIYQHYKLLLKKVIANAFASYLQHNKELFGFIGKPLKVNCLKEIDKEQFLPEWTAKKYVSLCEEVRKSPELQKWYIVGKFLNSRSLNLMAGSMRSYIQYVNDIKRRADGIGNELHVIAQNLDVVDKWVQVIEVCLLLSSRVSNEFEDYFYDKDDYAAYLKSYVDFDNSDMPSEYSALVEFSDQGKVDLYVDPSNPKVNRNIVQSKLFAADYILRDIIEPVSKDEIEDFYNQKDEITICKIKGAELTDEEQKKILKYQKLKNRVELRDVVEYGEIINELLGQLINWSFMRERDLLYFQLGFHYNCLRNDSAKPEEYKNLVLDDISIKDAILHQIIGMYVNGVAIYAPGKDENKLESQCAQGGAGGKIGAFCRYSLYLKLAADTLYNAGLEVFEVLPEHEDIIKLRNGIDHFKFYLGGYRSIMSLYSEVFDRFFTYDMKYQKNVLNLLQNILLRHNVIIEPIFESGIKKIGKDTKPCAKLCISSIKSDSFEYKIKDGTLITDAKDKRYLETIKKILFYPEVESEVRILSSKDSFEQNNQYGYMKGKSENNKNKKNKKNNGNRDEKKNSDGLTYNPFLNLPFELPE

SEQ ID NO: 1077 - protein, 1360 aa, Artificial; identical to SEQ ID NO: 92
  Synthetic

SEQ ID NO: 1078 - protein, 1245 aa, Artificial; identical to SEQ ID NO: 609
  Synthetic

SEQ ID NO: 1079 - protein, 1245 aa, Artificial; identical to SEQ ID NO: 609
  Synthetic

SEQ ID NO: 1080 - protein, 1287 aa, Artificial; identical to SEQ ID NO: 105
  Synthetic

SEQ ID NO: 1081 - protein, 1169 aa, Artificial; identical to SEQ ID NO: 23
  Synthetic

SEQ ID NO: 1082 - protein, 1169 aa, Artificial
  Synthetic
MGSGKYRITKIARDWDENKKRIILKRIVSDGEVKYVNENNNVDIDITETYYRILSNNKAKFLGSNEQFIFKVNKMKRNIKNDCVIIKDYTEEEFEKLDKKIFFSRKIKVNNKDREKICRNFYEDEREIMKKRLEEAKKFNNIIFNICNKIFKLEYLDYTDEKVYKIFQNEIKVKDVKNLKEAFKQQEKGLETDKLLAISFNKKRNNILLEFIQQIAKQEFENQKELENWFSYGGEKYCKEIFKIYSNMSQKEKYFKLLGHRNQGIASIYDEKKETLQRRLKLGDYSKYDLKRYYQKDYKEEAIKELKDKNKEGLEREIEELIKKNYKIDKLCDEISNLEFSFVESKKENKDKMSEIIVKIKEHYKKNVNVEEELENKEKYILSIIHNYVKGRYRKCLELQQKENVDFENLEKRIKEIFDSNEVTKKLKKSIINKVNSYKIFEMKFQNPNVESSDDLEILKAEETFLNKLSTAVSKVGYILNILLEIHFRNDILQDYNQVEKLWKSDSFQKICAIYPEINNDEKLLKGMIYFIQGLRQQVLHPKILWEKQNIYNAENIKEKEKIVSVKLQNEGEAYNKKGIQNYFENVLKKIPDYFIEKYESNNVFNIYRNSVDKIMEVVKNFNFKENNTIDYLFPKFHKIYKRMCKSENIDDRQNGARKYLLQTIYYYYFQYEIENDKNNMSKYLNLYRNKIKVKKISYSYIIDNKAVNNKNIEILYRNIQREGMLNNRLLQMNNEWIEFIVVQFSEFLTKKKLNWILDDLSEYKKKEKLDENDKNELLKIFKQKMNKNITYSNDSYAFISLAQFLDLKEISNLIHDIKKFVQFREKNILKYNPEKNKIYIEELRKILYILKVMLEHKERVIQKHYLGSYDEDISIMYGKDIEKKDIKDIEIKIKNKNQEVINQPLYKSGNDENSSWIILYGIEQAKRNGTFKFFEGFFNLNDDIKLCKEDIEKYEKLYNEKEENQKKVDEYISKLNNDIEKINNDINIEKTNDNKQLFYYYKNMIYGDGLKKGYDFINDIYIYYLSWAYRIERDCKIYKIKEYENKKNFNEYKFKEYKSIKYFRNEIAHFNYFQKTNKSLLELLNNFYDIFDYNLKYQRDVQKVINNIFEKYQVIREDGGPVIFYCKIDKKLKLSENIIPKKHLKCSKIKLIHEKYVEFFRKLFEYKK

SEQ ID NO: 1083 - protein, 1373 aa, Artificial
  Synthetic
MAKHLRPIGESYTDFLDETEFVRLGRGLHRGHHGVQIPPTELPSYLAEYRKALMRQVVAVLDKVVGKRRRLSGMHPEAYRDRVHLAEALWVRLVARVKEIGTPPDPSELLDLRRMWNAKAHPYAEYDVVPRAPLNDGNGQKILECREVDDPKIERSDFEGRWHGRFWQSEPGPVDYNAIADRIFAHLFDQEAVIGGGPRREGNVTVPDEDINGQPGPATGKGLIIARGQSIVKSASDPRRSSKKVQRTWDKAVERRYFGDDGKGGSDIAKAIYEELGDPATLADPIYASWFGSRLYDHFGSFKNSLPLELKDPFKEQIWALHNSVRQFYQRMAKSDRFRLALQNARSEVPDRSELLALLPKDHDHLLLVLGGKKKNAEMSELIRLGKLFVHASDVLHDFDANDAAALDAFKRRMSFLATSIGQSEIKQTETFARTWRGAVGLTLRTVKGLADPRGIIGTPDNRDLGTAGPMKDAFNKFDQPHFQQHMTIIFGNKELQAEGNPTRSSLFTANGDKDHQAELLWGFLCVVRSVRNRTNHYNVRRALLRLLDEGIVSPMPSDPKKERVENRNLCTVSPTALEAFRRLLNFDLAIQKEAVRTALEQAKASEFVEEGKLRGLVSELAGTEDMPALHIPRFSAVMDKVRRLADNRDVGLDPILSTLQRSLPPTDKQAESDAARCRYRLLLELYKSGFRSWFSGIQSNEENNREICHWAVKQVGRAKDARKSEYDKKTKRHYRSPNSLIDDLGLDKFDDLTDLLEALASQSTREHDQNLKYVPDARVQSQMSNRIEEFRQELFAHIFTKYLDTHDFGWIGAIEVRREACDLADVVSAFEVRDQKFDADWHSQFYAWLYMVPPIEASRLRHQMRKSAVMDDKWSTTLELTSGDRKTRDDHAQDVLADMDRLFSLYTKVQAAGFNGQEHESALGSKSLFYEDGNQFDEVYSPDTETHNKTFPGTRRGLRQLVRYAHLPALEGVFKKHRITKAEVETFVALYDENRRDPGSVAHMLRREKLRTEILRSIHDGPKPKDKDFWPKLEAKCLEYRTVATETAIYNFQANAARLNDHARLHQIVMRVVARLTDYALIWERDRLFAFVGMLYRQTGGTGINPAMRHAEKTNAPPRIGILVSDSALAKKLNSNSAEVFIPYLDTETGFDAPRFDDLCTLLSHEHAKEFRFHFLEVGEENSKDEARRLNEETMGHRKRPAFKRGTRRQGIRNDLAHHNVLDLAGGAGPNLTYVVNAVRSLLSYDRKLKNAVPKSIKRILGEEGLIIEWQMNYDRLKKPTVYPNVETHLTMVPPRHMTAPVSFTLPRASVRLASMVKAVFDFGSSGYGEERMIGGRTAKQAVYPDDFTRRFPQTPMGLKQATRLVFASENS

SEQ ID NO: 1084 - protein, 1161 aa, Artificial
  Synthetic
MKVTKVDGISHKKYIEEGKLVKSTSEENRTSERLSELLSIRLDIYIKNPDNASEEENRIRRENLKKFFSNKVLHLKDSVLYLKNRNEKNTVQDKNYSEEDISEYDLKNKNSFSVLKKILLNEDINSEELEIFRKDVEAKLNKINSLKYSFEENKANYQKINENNVEKVGGKSKRNIIYDYYRESAKRNDYINNVQEAFDKLYKKEDIEKLFFLIENSKKHEKYKIREYYHKIIGRKNDKENFAKIIYEEIQNVNNIKELIEKVPNMSELKKSQVFYKYYLDKEELNDKNIKYAFCHFVEIEMSKLLKNYVYKKPSNISNDKVKRIFEYQSLKKLIENKLLNKLDTYVRNCGKYNYYLQDGEIATSDFIARNRQNEAFLRNIIGVSSVAYFSLRNILETENENDITGRMRGKTVKNNKGEEKYVSGEVDKIYNENKQNEVKENLKMFYSYDFNMDNKNEIEDFFANIDEAISSIRHGIVHFNLDLDGKDIFAFKNIAPSEISKKMFQNEINEKKLKLKIFRQLNSANVFRYLEKYKILNYLKRTRFEFVNKNIPFVPSFTKLYSRIDDLKNSLGIYWKTPKTNDDNKTKEIIDAQIYLLKNIYYGEFLNYFMSNNGNFFEISREIIELNKNDKRNLKTGFYKLQKFEDIQEKTPKEYLANIQSLYMINAGNQDEEEKDTYIDFIQKIFLKGFMTYLANNGRLSLIYIGSDEETNTSLAEKKQEFDKFLKKYEQNNNIKIPYEINEFLREIKLGNILKYTERLNMFYLILKLLNHKELTNLKGSLEKYQSANKEEAFSDQLELINLLNLDNNRVTEDFELEADEIGKFLDFNGNKIKDRKELKKFDTNKIYFDGENIIKHRAFYNIKKYGMLNLLEKIADKAKYKISLKELKEYSNKKNEIEKNHTTQENLHRKYARPRKDEKFTDEDYKEYEKAIGNIQKYTHLKNKVEFNELNLLQGLLLKILHRLVGYTSIWERDLRFRLKGEFPENQYIEEIFNFDNSKNVKYKSGQIVEKYINFYKELYKDNVEKRSIYSDKKVKKLKQEKKDLYIRNYIAHFNYIPHAEISLLEVLENLRKLLSYDRKLKNAVMKSVVNILKEYGFVAKFKIGADKKIGIQTLESEKIVHLKNLKKKKLMTDRNSKELCKLVKVMFEYKMEEKKSEN

SEQ ID NO: 1085 - protein, 1387 aa, Artificial
  Synthetic
MKLTKVEKARIAVSREKKDSGRIILYTNPEDVKKTSVTTMEQQVSKRIDQANKLYQVFFKSVIPVELNKHFAEISKIAAKCRNTEEFYKKACGYSGYEWTDAKQKKRTSQISRFSYTSSGKNMYVVMDNFVKEYMVQIWQEKDFRNAAVKILCCICDGKKFASKLEKVKKESPDTLKKFIEISGKCEGNPFVDYDTSFLEKVFTLVISQMVKNCDRKSYEQDDKEKIKKSIQKEIQWLSHVQSVTERSFGREGKTYLLFKIRNPYATEERLQTVLIRMRKTLKRGRNRDIAIVLLQGLAQMNQVTFTDTVKHLYQEEEKAFCDFIDAVNRDYYRVNIVKSVRNMDVKVQPDLNDNSILKLSGLGNIKKEALSDTLLRYAASADESDQVLLDIKKLLFEYFLPGNSKETSKYTTVQNLWNIPYLPKIFFDYGFENEDSDDDNECAEDIETLCDVEPQYKINQHSLKRRIRYVNYGKYLQMTKNESDRERRYWIHYIKEFVEKNYVDSGRTLSEKNCYASSMMLNCWKEIIRYLCGKYIDIGKAVFHFTNLTAMPKPKDKIIYGQLEEQYKKGISSFDYEAIKAEETLQRDIVQSVVAAAFAFSKSVIDETKMEECQETNKEDILFLSENVLGSLLKENTIKLILRFYGGESSVAQKEYFDQQEIVQEMISHLKSIRNENFHYLDGAKKDNPHKYASILWKNDEMAYQKLTKQRYYANNVGLFYRAEEIQELVQELYSQKNITEAQIPAFRTVLKRKDLPGYMEELGILFPDNTQEKSKGDFEGTLYFLMKEIYYRDFIVKDKAAAYFFKAVDQNKEQSKKEDKHTERAAENFHRYVKSLEKKYNKKEISFGTVCQYIMMEYNQQNTTKQETEIYKHFKMLISLCIRKAFGNYIKETYRFLFHPIYSKQQGEPEYLDTLELESGVKEKNYEWFTLAHFLHPVQLNHLVGDLKSYIQYREDILRRIVFAEQRVYADQQKEVQQKVKTAKEILEVLEFVREVSGRVSNEYTDYYENEEEYAEFLYQYIDFRKREGKSAFESLKYFCQNILDSGTVVDLYADTENPKVLRNIELTRMYAGSNVKIPEYEKITEDEIKMYYQEKNSVALILSRGLCRNEKEQKKVIEFNWKKKRLTLNEITDVFSLVNDLLGKMISFSYLRERDQMYLLLGFYYMAVCAENKSENHLGWKGETLDKLESSDSKFDIGGGLVLYQIVSAFNFGSKLLYISEDGRWKMAGGAFPGKYGRFENDYNHRTSLSKVIRLFENESYEREIIYWRDYVDHMKYYVNQNQSIMEIYSAFYSKVLGYSAKLRKSVVFNLQAALEKHHINPECIWMTSDGKCADIKLMKNLESQKFTYKLAKREGEKTERKICMNALNENFLKTIRTSLEYKK

SEQ ID NO: 1086 - protein, 1190 aa, Artificial
  Synthetic
MLIIKPYGRSQTQLASDSQRIRLHLPSGQAQAEPVKELQKNLDFVMAQWISVIDKIISKKPPHYDKSKSRDSATPRISETQYSARKALGTAALQCIEKNFGELSVGQRKHWAWKVHPYDCTNLAAHQDKDRITGRWYSQFVGDIQPTKITLLIAETIAQKIFDHLYVKALRPATSISTHAQGHSTHQLHTIYRNVHALKSPKKSTCTTSDSDLVSDSDWEKYFLSGDVVAQIYQTLNEKYTKNDKTKSLPKAKPTTPSTGSKSPHLNDRATIAKHLFDHYAKVFAAQGGAPTPVKDLLSETHPQHAQWLVHQSIKATYKALFDNASIPGLKHIQHKLPANSATMRLLVENRRKNHDVGHLVRLGKVLHYEAAERGKVPSACWSDISTPAVAEGSAFWLSEGQAEIKRSEALVRSFKQAITHAGHTLSQLSGWAGDSDIFLKASKAAEQAYANTVEQQLTLLYGRACSELFPSSYAPGGNLKAAMQALLAQSIEAWAQLRHASFHFKGKQGFLEKLQTGLSTNGTNTQELDAVAQKLWAQDWQQRQERIKASLEAAHCLDYLSQAQLNAIYQSISGASHARMGATLDMPRLNRVLTRAQNTSDVQETEKLPSPAKRQDLENSHAQRCRYVLLKLLYEQDFSVWLQNKSHKEVSKWIQKSIERSSNAARKLNEKGLQSADTIHAKAERLWRKQAQAPTTKPASQSNPIARFFHDLAAATASEFRVQRHYASDSKQAQQQAAFIDDLKCDVVARAFLAYLRSKRPWLLQDLVVQNTPSRISDLPTYAEESRHQVDIWQKRLYFLLHMVPVGVVSQLMHQLRKWQVLSSQAEASKTPEDQTLYSNCLQVMVLYLDMHDAKFDGGTAILIDDTRRQTLQSCFEREKDFASCFPSNVKPSLSGDAHIPLRGLREMLRFGGANVLTPVFQQHPITAAECVNWQELETKINEAQKTREALHAEWVKNRKGFTKQTEYEQALDTCTHHRHLAHRVRLVDHLQLHHLLMAVLARLADYAGLWERDLYFVSLALCYHKRLNPAQIFGESGKHGNYFDGGEIVEAVRKESSCDKVIQKKAKDLFGTNCERGDLKVNIRNALSHFNMLRHPKGQPDPAPIDLTHWVNQTRCLMAYDRKLKNAVSQSVMELLAREGLVLTWQTNSEHQLVLQRVESQKIAHLGAKQGRESHHSEAYCAMVKQVF

SEQ ID NO: 1087 - protein, 1360 aa, Artificial; identical to SEQ ID NO: 92
  Synthetic

SEQ ID NO: 1088 - protein, 1360 aa, Artificial; identical to SEQ ID NO: 92
  Synthetic

SEQ ID NO: 1089 - protein, 1245 aa, Artificial; identical to SEQ ID NO: 609
  Synthetic

SEQ ID NO: 1090 - protein, 1245 aa, Artificial; identical to SEQ ID NO: 609
  Synthetic

SEQ ID NO: 1091 - protein, 1360 aa, Artificial; identical to SEQ ID NO: 75
  Synthetic

SEQ ID NO: 1092 - protein, 1388 aa, Artificial; identical to SEQ ID NO: 103
  Synthetic

SEQ ID NO: 1093 - protein, 1388 aa, Artificial; identical to SEQ ID NO: 103
  Synthetic

SEQ ID NO: 1094 - protein, 1168 aa, Artificial
  Synthetic
MKVTKVDGISHKKYIEEGKLVKSTSEENRTSERLSELLSIRLDIYIKNPDNASEEENRIRRENLKKFFSNKVLHLKDSVLYLKNRKEKNAVQDKNYSEEDISEYDLKNKNSFSVLKKILLNEDINSEELEIFRKDVEAKLNKINSLKYSFEENKANYQKINENNVEKVGGKSKRNIIYDYYRESAKRNDYINNVQEAFDKLYKKEDIEKLFFLIENSKKHEKHKIRGCYHKIIGRKNDKENFAKIIYEEIQNVNNIKELIEKVPDMSELKKSQVFYKYYLDKEELNDKNIKYAFCHFVEIEMSQLLKNYVYKRLSNISNDKIKRIFEYQSLKKLIENKLLNKLDTYVRNCGKYNYYLQDGEIATSDFIARNRQNEAFLRNIIGVSSVAYFSLRNILETENENDITGRMRGKTVKNNKGEEKYVSGEVDKIYNENKQNEVKENLKMFYSYDFNMDNKNEIEDFFANIDEAISSIRHGIVHFNLELEGKDIFAFKNIVPSEISKKMFQNEINEKKLKLKIFRQLNSANVFRYLEKYKILNYLKRTRFEFVNKNIPFVPSFTKLYSRIDDLKNSLGIYWKTPKTNDDNKTKEIIDAQIYLLKNIYYGEFLNYFMSNNGNFFEISKEIIELNKNDKRNLKTGFYKLQKFEDIQEKTPKEYLANIQSLYMINAGNQDEEEKDTYIDFIQKIFLKGFMTYLANNGRLSLIYIGSDEETSTSLAEKKQEFDKFLKKYEQNNNIEIPHEINEFVREIKLGKILKYTESLNMFYLILKLLNHKELTNLKGSLEKYQSANKEETFSDQLELINLLNLDNNRVTEDFELEADEIGKFLDFNGDKVKDRKELKKFDTKKIYFDGENIIKHRAFYNIKKYGMLNLLEKIADKAKYKISIEELRNYSNKKNEIEKNHTTQENLHRKYARPRKDEKFTDEDYKKYEKAIRNIQQYTHLKNKVEFNELNLLQGLLLRILHRLVGYTSIWERDLRFRLKGEFPENQYIEEIFNFENKKNVKYKSGQIVEKYIKFYKELHQNDEVKINKYSSVNIKVLKQEKKDLYIRNYIAHFNYIPHAEISILEVLENLRKLLSYDRKLKNAVMKSVVDILKEYGFVTKFKIGADKKIEIQSLKSEEIVHLKKLKLKDNDKKKEPIKTYRNSKELCELVKIMFEYKMEEKKSEN

SEQ ID NO: 1095 - protein, 1195 aa, Artificial
  Synthetic
MKLTKSKNAQEAFFYRNTHMGKLYMRSAFSEDKTDSTIDNLPFKESLARRILLRCDKTKSHKQNPFKSFMEELIDKEKAVLPSKEVIGYDKTFQAVRYFSPYGRALRIGQGGNGITFEKLLIEHYDNNKDISEELKKISAMLKLRRTYKKDHLKKSIKNNKIVFPLVINEANTSKIGKGEWLLDFINNEKKFTDYKNWYDYAKLYETKLKPLQTNLGYLKNPQVWGGLLYAEVKKYHHELYKTKKSELNCEKKLQEFGFYLNEVQDYFRHYFGSSKAGKSLNKAAKIDRLIEIKEGAVEESYMYKWIKAHITNKITALLIQNGKFMHYKVEHPTSDILSNIQIEESFKKQLFLSIAWATTRLNYFFDYGSNNDVLLGEPKNNSTVGTNIQGDILSEFDEDTTLKNIYQKNIKNTKAYMEYFLAELKKSENNNKNVFQEKVCTTFPIHIQENNSDDTIEALLDILDAAKESISYLRNNVFHPQKEYLYELTLPEKIKGIVEKDYFAKTKEVMKTDISQINSCFKEKIRSALIADVYPLEILQNLFTNCKLSFYLYAPKYELMPAFRKVYQRGANLCSQGGTQRNLSWFYNKPVVSRGADGLRDINDIKQWQAYKNLLQMIYEHSFLPAVHEDESLITKYIYETIQQSQEASRDRNKEYCFRYRNMPKYKSSSLAAYMSNLQRLQSAEESNQHDDTKSKTDNKNYYIDFVQDFFVRAFDRYLEGHLSSIKRYLLPDAGNKLHVTEKEDVETTLSQLFQKENPTICMKDANVINENDEFCLLFYPFLRMLERRELSNLQHQVIRYRCSFKHRLSIEVDSSEKLERLIAMLIFTFPDHIDEEDCYKDMVKKYFGKFVEGSLKDYLDLYFQSGEKLIQQKSMLALMRTGSMALYSEMFSPIYKITSEDYNKYKSYCQLGENPGGKQLSPIEQAQQQLASLHQELCEEKSISKDNEKLRKYKECLVLVHEYSELRRKLTFDLLYEIHLIHVDILGRFASFAADWERDMHFLLLGLYGLGQQNQIDKLLSFKSQEEVDNIFRYMRREKSMTAKFKNALKNEINRKTLEELCLYNCQDGLDKVINVRNTLAHLNHMTQISYKNEYQKSIFELLTAISKLLNYDLKRKNSVTRVLKALLNKYHIKLSLYQKNDDYECISIKSEEIVHLKNLRIRENKKRIELPAQDVLFVECVAKLLDFSYNKK

SEQ ID NO: 1096 - protein, 1191 aa, Artificial
  Synthetic
MKVTKIDGLSHKKFEDEGKLVKIEDASQKNETLERLENLKGIKLGSYIKNPDKTKNKDNKKRRKGLKEYFSEITLRKENEKYVLLKGKKLKKINNDIKDTDIKAKDKKEEVFDILKEILKLNLLANDAEEKIQFDSIKLKNVFGKDFAKKELQIKSIEESLEKNRADYRKEFIEIENHKYGNVKGKNKRSRIYEYYKKSENHKKFEDNIREAFEKLYTEENIKKLYSKIEEVLKKTHLKSIVREFYKNEIIGESEFSKKNGDGISILYNQIKDSIKKEENFIEFIENIGNLELKDLTKSQIFYKYFLENEELNDENIKFVFCYFVEIEVSDLLKGNVYKVSKIYENKIKNIFEYDKLKKLVINKLENKLNNYVRNCGKYNYHMENGDIATSDINMRNRQTEAFLRSMIGVSSFGYFSLRNILGVNDDDFYEIEEDLTEEERKNESNVLKKVKEDIASKSIFEKVVDKSFQKKGIYNIKENLKMFYGDSFDDADEDELKQFFVNMLNAITSIRHRVVHYSMNTNSENIFNFSDIEVSRLLKSIFEKETDKRELKLKIFRQLNSAGVFDYWENWEIEKYLENIKFEFVNKNIPFVPSFTKLYNRIDNLKGSNALNLGFINIPKRKEARDSQIYLLKNIYYGEFVEKFVDNNDNFEKIFREIIEINKNAGTNTKTKFYKLEKFETLKANTPTEYLEKLQSLHQINYDREKIEGDKDIYVDFVQKIFLKGFINYLQKSNSLKPLNLLNLKKDEVINSEKSSYDEKLKQWENNGSKLSEMPKEIYKYIKEININETNYSDRMSIFYLLLKLIDHKELTNLRGNLEKYESMNKNKIYSEELNIVNLVSLDNNKVRTNFSVEAEDIGKFLKTETLIKDARQLNNFSERFSDGENVIKHRSFYNIKKYGILDLLEKIVAKADLKIAKEEIKKYENLQKELEKNDFYKIQENIHRKYNQKPNLILRTENKKDFNNYKKAIENIQNYTQLKNKIEFNDLNLLQSLLFRILHRLAGYTSLWERDLQFKLKGEFPEDKYIDEIFNSDGNNNQKYKNGGIADKYADFLIEKEEEKSGEILKKNQRNKRKKKIKEDLEIRNYIAHFNYFPDATKSILELLEELRELLKYDRKLKNAVMKSVKDIFKEYGFIVEFGISHESDSKKIKVCDVKSEEIKHLKNNGLVTTRNSKDLCNLVKVMLEYKKS

SEQ ID NO: 1097 - protein, 1307 aa, Artificial
  Synthetic
MKFTKVDDSRTFRKNENNSGKIIKYEGTIDENSKYVECSLEAKKNAYIANNLNKLLYTSLAKKVEKTKNKDTKANQMLSILKQISVDKNDKVYMSDKNIAKIKSIYDSVIKSGKNLDCVLATFSKDDNHFGFIKNAIRDICLNSNNQTFQLKFDLSAEKLINYCYHEEDTDVSFYYKRKNQIEKKANIIIDSIAYNSIAVRDIEKIFTEYENQNKDIKKDDSIEKKIEKLLDIYQIEKLIASIKVFFCDEKALEDKESNNIENIAFLDIVEDHIKYNKIDDNYKFRDKENQFLDKKSGKVKEKQQLIRNKIIKKIFFTFQLNSIEIKQAWEKQKDQHEKTPLKYIDDFVKEYLDKHFPIKNTKSRWSLDDLNKDKIFYFCKCRYYNKRTTSNILKSRIKESDSGQIFNSIDLEKNHIDNVLQRKMSAIIAYAGNDYNSKIVEKLKKIYKTDLEEQLSEIEVKMQSIPAFIDEKGSEVKIFDGKINKYKKDLDSKMKVMEVYKNYLKDDFVSTGIKENCKIVKEEVNLLEKKKDEILSYLEDSLSKIDNEISRKDILGKNKTKLEEYIARLSETNQILFKQSIFERRCIFAIRNTNIHFKRKLDTTILEKSDNQEIKTNILSEYRNKISELPSIAISNAYDNNVINTWGLEKTVEFLSDNNLFYVAKENKCPSFKRLVNYCKDMNVAIDKGKLKRDKVELPNLIIEIANLHKQNSSTIQYKNYMMKLLYYGKSEELAKGLKSYINKSLKDYKLEEQLKKFDFQNISTNQAMYDKFLQIDDLDTLKEYVQRVKSYLQLEEGKEFKALDKLEIEVVSNKFLNDYKKQIECILKSEDVENKKLNKDDILDVFSEGLENASYNISIPKFNELTENSNEIMFISLLKYLSKRRLSELLQNLLSYKVHRNKFNMNGKIYGAFDLDILIEMTQIYMITYNNTSINDVDEEKYVNMLNGFLEKNFKEYNKIFSQNGENERKILYADEENPVKFYQIIEADRENILDKYKDYYENHKISYEEVTRFNELEKEVAIALDKKNNIKIEVIKASKNLYKVSKSIKKLEERKAGYREKNEIEEKRLSKEKNIKTIKTIKNSIKLLKKEYTDEYKKILEYNRLKNRILFTDVRKMNSLLCDLYGKFNGLIAIYEKNLYYSLSDEDKRKVDDAVNRDNMFDFIKKKKDSWHKENIESNNGKNKENCPYGNIMLDENDYSNRNKFAHFDYLTGNDKDNDNFACQLNKLRKLLRGDRKLKNIVTKVVIATFEKHGLQIDMKFNNNHEIYRMQVERMEMQDEYLNHFEVVKIEDCFLEMIKEVLKI

SEQ ID NO: 1098 - protein, 1364 aa, Artificial
  Synthetic
MPRGMQMKISKIKNSRPGISVAENKNEESLSRQSLLYYAPVKDGKIRLESKDLEQHVTECNEKAQKLYNVITPEINFYRDENRQKMVENLARNFNAVINNALRSIRNPKEKKEQRVEKEVAFILNLSKKSIKMKKDVFVKSTDLIVKFPENNKYNKKNDKGTGSKEAYIQKMISDLVLRKLKNTLRKEVKLENGYRMQMTEIIISLMSAICLYGNAESFDPAILKAFFEKVDSDYTKYKYVEQIVKSIESQSAKLKVVEKDGRHLLISANADHRKKKYVFEFMRMYAAADEKEKRELTEHIQDLIGLYLCGKAGYENAENRFSDMTESHNCICGKIEEILNELEKPENLSQKKKENLKNTTVKVMALKYRAAVNYLADEVGKTVLGEIREKKVRSCADLYWIEYIDSTVEKLLLKSRNKDGYRYEIGFLSKHIWKEWTQYISGKYIEMGKGVYHFAIPDLSGNLEGEPISICEVKPEYRNGVSGFDYERIRAEESLEREMEKYVLFAVNNFARAVTPEEEREKSGHEDVLLMKTLSEIEESQTKEERQKKHDNNVKNAITLYADADRRILQFFGGQSRFREKEDSLINLYSGEDLYKEIRKELYAIRNITFHYTTKADKDQTQKHDLAEYLFEEEFSDITELFREKYYANNVWKYYDVEVINTIMENIYCGRKYRAAQVPAFKNIISRPELPQVMNGFVKGNSLRRLMNCPDRDVINKYWSALFFVLKELYYYDFLQEQKKPEDNVKERFFRAIEKLSGQENDDKKQKAWESFGNRIDQIGRDRSFGAICQGLMIEYMLQNSDISMVQTETDNGKANNKKQIYKHYRTLLYNCIREAFIEYLREKWEELRTPVLTVKEWSKEEFCRADGLKHLSLFDHLKKTFNDAESGSSWYMAAHFINQKYLNHLLGSIRNYLQFTEDIEDRAISLGDCVDNKREEKNLRYRNTLEILEFVAQFCERTTNVMEDYFESNQEYAEYLSGFVDYNTTKKETDIEKALYSFCKQKFKVDGKEYMAGIYYDGENLIPNRNIIRANMYGNTSCLKPCMDRITLKEIRTMYADQNKLDLVLKEGVCHTEEEQKAYREYQNEKNRIELFDVCTYTQILNDMQARLIGWSYMRERDLMYYQLGYYYTKLFWTDSISEEDARRRLVGNLVNVEDGAILYQILAFNSYNLPIIANKNNTVTLLKDEGSIGGKAITAFFKNYENAEMIYEEALDLFENMDEHAAIINTRNYIEHFKYFIKSDRSMMDLYSEIYDRFFRHDHNRKKNVPDSLKNVLADNFMIVDIDMELGSKKVGEKKKGFREHKAARIEFTDSGIRSTDMTYTIKPDIKDNKKDKKVLVPARSEVFLKQFRKILEYRIQDKIQ

SEQ ID NO: 1099 - protein, 1382 aa, Artificial; identical to SEQ ID NO: 154
  Synthetic

SEQ ID NO: 1100 - protein, 1315 aa, Artificial; identical to SEQ ID NO: 751
  Synthetic

SEQ ID NO: 1101 - protein, 1101 aa, Artificial; identical to SEQ ID NO: 73
  Synthetic

SEQ ID NO: 1102 - protein, 1360 aa, Artificial; identical to SEQ ID NO: 101
  Synthetic

SEQ ID NO: 1103 - protein, 1382 aa, Artificial; identical to SEQ ID NO: 214
  Synthetic

SEQ ID NO: 1104 - protein, 1183 aa, Artificial
  Synthetic
MQMKISKIKNSRPGISVAENKNEESLSRQSLLYYAPVKDGKIRLESKDLEQHVTECNEKAQKLYNVITPEINFYRDENRQKMVENLARNFNAVINNALRSIRNPKEKKEQRVEKEVAFILNLSKKSIKMKKDVFVKSTDLIVKFPENNKYNKKNDKGTGSKEAYIQKMISDLVLRKLKNTLRKEVKLENGYRMQMTEIIISLMSAICLYGNAESFDPAILKAFFEKVDSDYTKYKYVEQIVKSIESQSAKLKVVEKDGRHLLISANADHRKKKYVFEFMRMYAAADEKEKRELTEHIQDLIGLYLCGKAGYENAENRFSDMTESHNCICGKIEEILNELEKPENLSQKKKENLKNTTVKVMALKYRAAVNYLADEVGKTVLGEIREKKVRSCADLYWIEYIDSTVEKLLLKSRNKDGYRYEIGFLSKHIWKEWTQYISGKYIEMGKGVYHFAIPDLSGNLEGEPISICEVKPEYRNGVSGFDYERIRAEESLEREMEKYVLFAVNNFARAVTPEEEREKSGHEDVLLMKTLSEIEESQTKEERQKKHDNNVKNAITLYADADRRILQFFGGQSRFREKEDSLINLYSGEDLYKEIRKELYAIRNITFHYTTKADKDQTQKHDLAEYLFEEEFSDITELFREKYYANNVWKYYDVEVINTIMENIYCGRKYRAAQVPAFKNIISRPELPQVMNGFVKGNSLRRLMNCPDRDVINKYWSALFFVLKELYYYDFLQEQKKPEDNVKERFFRAIEKLSGQENDDKKQKAWESFGNRIDQIGRDRSFGAICQGLMIEYMLQNSDISMVQTETDNGKANNKKQIYKHYRTLLYNCIREAFIEYLREKWEELRTPVLTVKEWSKEEFCRADGLKHLSLFDHLKKTFNDAESGSSWYMAAHFINQKYLNHLLGSIRNYLQFTEDIEDRAISLGDCVDNKREEKNLRYRNTLEILEFVAQFCERTTNVMEDYFESNQEYAEYLSGFVDYNTTKKETDIEKALYSFCKQKFKVDGKEYMAGIYYDGENLIPNRNIIRANMYGNTSCLKPCMDRITLKEIRTMYADQNKLDLVLKEGVCHTEEEQKAYREYQNEKNRIELFDVCTYTQILNDMQARLIGWSYMRERDLMYYQLGYYYTKLFWTDSISEEDARRRLVGNLVNVEDGAILYQILAFNSYNPVSYTHLRAHETELHL

SEQ ID NO: 1105 - protein, 1161 aa, Artificial
  Synthetic
MKVTKVDGISHKKYIEEGKLVKSTSEENRTSERLSELLSIRLDIYIKNPDNASEEENRIRRENLKKFFSNKVLHLKDSVLYLKNRKEKNAVQDKNYSEEDISEYDLKNKNSFSVLKKILLNEDVNSEELEIFRKDVEAKLNKINSLKYSFEENKANYQKINENNVEKVGGKSKRNIIYDYYRESAKRNDYINNVQEAFDKLYKKEDIEKLFFLIENSKKHEKYKIRECYHKIIGRKNDKENFAKIIYEEIQNVNNIKELIGKVPDMSELKKSQVFYKYYLDKEELNDKNIKYAFCHFVEIEMSKLLKNYVYKKPSNISNDKVKRIFEYQSLKKLIENKLLNKLDTYVRNCGKYNYYLQDGEIATSDFIARNRQNEAFLRNIIGVSSVAYFSLRNILETENENDITGRMRGKTVKNNKGEEKYVSGEVDKIYNENKQNEVKENLKMFYSYDFNMDNKNEIEDFFANIDEAISSIRHGIVHFNLELEGKDIFAFKNIAPSEISKKMFQNEINEKKLKLKIFKQLNSANVFRYLEKYKILNYLKRTRFEFVNKNIPFVPSFTKLYSRIDDLKNSLGIYWKTPKTNDDNKTKEIIDAQIYLLKNIYYGEFLNYFMSNNGNFFEISREIIELNKNDKRNLKTGFYKLQKFEDIQEKTPKEYLANIQSLYMINAGNQDEEEKDTYIDFIQKIFLKGFMTYLANNGRLSLIYIGSDEETNTSLAEKKQEFDKFLKKYEQNNNIEIPHEINEFVREIKLGKILKYTESLNMFYLILKLLNHKELTNLKGSLEKYQSANKEETFSDELELINLLNLDNNRVTEDFELEANEIGKFLDFNENKIKDRKELKKFDTNKIYFDGENIIKHRAFYNIKKYGMLNLLEKIADKAKYKISLKELKEYSNKKNEIEKNYTMQQNLHRKYARPKKDEKFNDEDYKEYEKAIGNIQKYTHLKNKVEFNELNLLQGLLLKILHRLVGYTSIWERDLRFRLKGEFPENQYIEEIFNFDNSKNVKYKSGQIVEKYINFYKELYKDNVEKRSIYSDKKVKKLKQEKKDLYIRNYIAHFNYIPHAEISLLEVLENLRKLLSYDRKLKNAVMKSVVDILKEYGFVAKFKIGADKKIGIQTLESEKIVHLKNLKKKKLMTDRNSKELCELVKVMFEYKMEEKKSEN

SEQ ID NO: 1106 - protein, 1360 aa, Artificial; identical to SEQ ID NO: 92
  Synthetic

SEQ ID NO: 1107 - protein, 1360 aa, Artificial
  Synthetic
MQMKISKIKNSRPGISVAENKNEESLSRQSLLYYAPVKDGKIRLESKDLEQHVTECNEKAQKLYNVITPEINFYRDENRQKMVENLARNFNAVINNALRSIRNPKEKKEQRVEKEVAFILNLSKKSIKMKKDVFVKSTDLIVKFPENNKYNKKNDKGTGSKEAYIQKMISDLVLRKLKNTLRKEVKLENGYRMQMTEIIISLMSAICLYGNAESFDPAILKAFFEKVDSDYTKYKYVEQIVKSIESQSAKLKVVEKDGRHLLISANADHRKKKYVFEFMRMYAAADEKEKRELTEHIQDLIGLYLCGKAGYENAENRFSDMTESHNCICGKIEEILNELEKPENLSQKKKENLKNTTVKVMALKYRAAVNYLADEVGKTVLGEIREKKVRSCADLYWIEYIDSTVEKLLLKSRNKDGYRYEIGFLSKHIWKEWTQYISGKYIEMGKGVYHFAIPDLSGNLEGEPISICEVKPEYRNGVSGFDYERIRAEESLEREMEKYVLFAVNNFARAVTPEEEREKSGHEDVLLMKTLSEIEESQTKEERQKKHDNNVKNAITLYADADRRILQFFGGQSRFREKEDSLINLYSGEDLYKEIRKELYAIRNITFHYTTKADKDQTQKHDLAEYLFEEEFSDITELFREKYYANNVWKYYDVEVINTIMENIYCGRKYRAAQVPAFKNIISRPELPQVMNGFVKGNSLRRLMNCPDRDVINKYWSALFFVLKELYYYDFLQEQKKPEDNVKERFFRAIEKLSGQENDDKKQKAWESFGNRIDQIGRDRSFGAICQGLMIEYMLQNSDISMVQTETDNGKANNKKQIYKHYRTLLYNCIREAFIEYLREKWEELRTPVLTVKEWSKEEFCRADGLKHLSLFDHLKKTFNDAESGSSWYMAAHFINQKYLNHLLGSIRNYLQFTEDIEDRAISLGDCVDNKREEKNLRYRNTLEILEFVAQFCERTTNVMEDYFESNQEYAEYLSGFVDYNTTKKETDIEKALYSFCKQKFKVDGKEYMAGIYYDGENLIPNRNIIRANMYGNTSCLKPCMDRITLKEIRTMYADQNKLDLVLKEGVCHTEEEQKAYREYPNEKNRIELFDVCTYTQILNDMQARLIGWSYMRERDLMYYQLGYYYTKLFWTDSISEEDARRRLVGNLVNVEDGAILYQILAFNSYNLPIIANKNNTVTLLKDEGSIGGKAITAFFKNYENAEMIYEEALDLFENMDEHAAIINTRNYIEHFKYFIKSDRSMMDLYSEIYDRFFRHDHNRKKNVPDSLKNVLADNFMIVDIDMELGSKKVGEKKKGFREHKAARIEFTDSGIRSTDMTYTIKPDIKDNKKDKKVLVPARSEVFLKQFRKILEYRIQDKIQ

SEQ ID NO: 1108 - protein, 1284 aa, Artificial
  Synthetic
MIIGGINMKLTRRRISQERKNQKLTAAFYRDMDHGLLYVDSEDEDRTEYVVSSMDFERSWRGRILKNGEDNKNPFYEFVKGLVGSNEIICKPITNDNNTDINEKIKKYITEFGRNLKAPGSEVTLEKLILNIQSGTSENEVRPELEKIKDMIKKDIEKRKDELIKSITNNHIPFMLDEDKLVPSTKKMKWLYKFLNGPDKSLNLQMFDEYWIKYGYKNLEEKIIKEINSLPEKNARSISRAVSKTVREYNRNFRINYMVPENENAEADSDYEGFLLFLKAVEQHFKKYYPVKSKDSSEVRDKNLCEEKNYKFYCSYNFVKNEVKRSIINQLVSGLIQQGKLLHYFYKDGIWQQDFLNSYGLSYIQVEESFKKSLMTSLSWGINRLTSFFIDVGTDENEEKTVQNKKQKNNRKIDDILSDKSNLRAIFNDLRSNTELQKHFKEKLAFCYPIFIKVKKEKMFDDIEKLIKLVEEARESVAYLRHRCFHYKDVTITEMLKALNNNTETDKTEDIDYSVAAEYFLRDINNLYDAFREQIRSSGIADYYPADIISGCFKKCGLQFVLYSPQNSLMPSFKNIYKRGSNLYKAYQEEKEQKDKEYKRHNTNIVQEESKELSWYIEVSDTEQGKTAYRNLLQLIYYHAFLPEVRENESLITVYFAKTKEWNRKVAETKAKKKNAGKTYKDKPIRAYRYEAIPDYVGERLDDYFKILQREQMAKAKDVNEGNAENNNYIQFIRDVVVWAFGAYLEERLEKYKKDLQSSHSQKDKKDVNDALKELFPDDKDKRQFFMKCKFTDVLINDVGENNQITEMEDLETSKEQQNREIKRKDLLCFYLFLRLLDEREISGLKHQFVRYRCSLKERRLPDNRKDVDEEIVLLEELEELMELVSYTMPSVPELSGKAESGLDLVISKYFKDFFEKSALKNQDIMKLYYQSDNKTPVFRKYMALLMRSAPLQLYKDMFRNYYIITEKECQEYIKTSQDIDAFQCKLNELHKELEHVRLKTVEDKKGKIFYYLAGSDAERVKEYEDTLSKVVRYKRLQHKLTFESLYTIFKIHVDIAARMVGYTEDWERDMLFLFKSLEYNEKLNEGVVEKIFNNKDEKGHIVKKLKDNLNSEDKEKIEILCWHKEITDKNFVEIIWIRNPIAHLNHFMQTVKNPKRSLEKMINALCVLLSYDRKRQNSVTKTINDLLLNEYHVKIKWKRWVDKNCNIYYYIDEQNIENEPILHIKHLHMGEKCHVNRNADMFDRQKEWLRNGITEEVYDKSMLGCICRLFKFDYNDLYGANRQ

SEQ ID NO: 1109 - protein, 1216 aa, Artificial; identical to SEQ ID NO: 62
  Synthetic

SEQ ID NO: 1110 - protein, 1388 aa, Artificial; identical to SEQ ID NO: 103
  Synthetic

SEQ ID NO: 1111 - protein, 1358 aa, Artificial; identical to SEQ ID NO: 594
  Synthetic

SEQ ID NO: 1112 - protein, 1197 aa, Artificial
  Synthetic
MQIIKPYGRSHVEENRAAGTRRVLSLRLDPEKRMDIVEFARSHEKLVVAQWISTIDKIASKPAGENGPTEEQRAFRQRLGDAAWTLLEAKGLLPGVKQPEVKQQLAKLWKVKIAPYGTARYRAEKNRKPPSVRGRWYDHFSEGVADVANVDAAEVAKKIHEHLYIAGYRIGTGVRNRRQGHIAARAKSIAVNVLRTGLPAYGGGVGAGWMAEDRDSYAKAGNFVQEIRLAAERRERGEDKAGTLRVTSSIAGKALFEHYARLFKRADGKALSIREARERTPGLFNLHMAVKDCYSRILKNHKKDLKAHGDRRRKVSALLPSTMDGLFALLDAKRTNRDLNTLVRLGKVIHYKSSGGVEDWPSDPVHNWPADVTRSFFWTSDGQAIMKRNEAFVRVWRHVLALASRTLTDWADPDGKIRSDILLSGPIERATGDCFDNGNYARKLALLFGSRADIFQCAGDDAVQKNVLRHALEGIAGLRHSSFHFKGLGGFADALTRSQFALDENVIGAVRQLWQADVGGRAGQLLKTMRAAHFEYFLGESQNRKLLAVLSNAESALIPLPRFSKMLERAQNAWRDGKDGLRLPKPANRTDRENPARLCQYAALKLLYERAFRNWLYERSAESLNRFIDRAVERATAAARDLNARDDEDRRDIIVAKAATLGRLADGETVETFFFKLSAQTASEMRVQRGYDSDADRAREQAGYIENLKSDVVVLAFGAYLKEASFDFLLKLSPDAPKPEKPLCILDGMRRDEGDRPAENWQMTLYFLIHLVPVDEIGKLLHQMRKWESLAAKPVMADPDRRQLDKSTIADNVRKVQSVLELYLDMHDAKFDGEAALIGTGAFKKLYEPEDLFDRIFPRQFGADDDRRIPRRGLREIMRFGHLQVLRPVFQKHPIQLAKVEKFFAAEERQDEGKSVIARQQERREILHEKWARNKKGFSADDRQAYEEALAAVIRYRHLAAHVTLTDHVRLHRLLMIVLGRLVDYSGLWERDLYFVALALIYEVGCRPEDVFEKEGLEFLKNGRIVGALRKLKQTSAAHAVVDRLSRHFGAVHGKENRAVEIRNGFAHFDMLRSTNRPVDLTACVNDARNLMAYDRKLKNAVSQSIAEFLSREGLVIAWAITPDHRLGTATLETRQARHLGGSSILEDLHGNGFVQMVAALFDRCTPRRPSGGENQRGGKSAPGKSRAMQNHESHRP

SEQ ID NO: 1113 - protein, 1360 aa, Artificial; identical to SEQ ID NO: 92
  Synthetic

SEQ ID NO: 1114 - protein, 1360 aa, Artificial; identical to SEQ ID NO: 92
  Synthetic

SEQ ID NO: 1115 - protein, 1311 aa, Artificial
  Synthetic
MQMKISKIKNSRPGISVAENKNEEQLSRQSLLYYAPVKDGKIRLESKDLEQHVTECNEKAQKLYNVITPEINFYRDENRQKMVENLAKNFNAVINNALRSIRNPKEKKEQRVEKEVAFILNLSKKSIKMKKDVFVKSTDLIVKFPENNKYNKKNDKGTGSKEADIQRIISDLVLRKLKKTLRKEVKLENGYRMQMTEITISLMSAICLYGNAESFDPAILKAFFEKVDSDYTKYKYVEQIVKSIESQSAKLKVIEKDGRHLLISANADHRKKKYVFEFMRMYAAADEKEKRELTEHIQDLIGLYLCGKAGYENAENRFSDMIESHNCICGKIEEILNELEKPENLSQQKKENLKNTTVKVMALKYRAAVNYLADEVGKTVLGEIREKKVRSCADLYWIEYIDSTVEKLLLKSRNKKRYRYEIGFLSKHIWKEWTQYISGKYIEIGKGVYHFAIPDLSGALEGESVSICEVKPEYRNGVSGFDYERIRAEESLEREMEKYVLFAVNNFARAVTPEEEREKSGHEDVLLMKTLSEIEESQTKEERQKKHDNNVKNAITLYADADRRILQFFGGQSRFREKEDSLINLYSGEDLYKEIRKELYAIRNITFHYTTKAEKDQTQKHDLAEYLFEEEFSDITELFREKYYANNVWKYYDAEVINTIMENIYCGRKYRAAQVPAFKNIISRPELPQVMNGFVKGNSLRRLMNCPDRDVINKYWSALFFVLKELYYYDFLQEQKKPEDNVKERFFRAIKKLSGQEKDDEKQKAWESFGNRIDQIGRDRSFGAICQGLMIEYMLQNSDISMVQTETDNGKANNKKQIYKHYRTLLYNCISEAFIEYLREKWKELRTPVLTAKEWSKEEFCRVDGLKHLSLFDHLKETFNDAESGSSWYMAAHFINQKYLNHLLGSIRNYLQFTEDIEDRAISLGDCVDNKREEKNLRYRNTLEILEFVAQFCERTTNVMEDYFESNQEYAEYLSDFVDYNTTKKETDIEKALYSFCKQKFKVDGKEYMAGIYYDGENLIPNRNIIRANMYGNTSCLKPCMDRITLKEIRTMYADQNKLDLVLKEGVCHTEEEQKAYREYQNEKNRIELFDVCTYTQILNDMQARLIGWSYMRERDLMYYQLGYYYTKLFWTDSISEEDARRRLVGNLVNVEDGAILYQILAFNSYNLPIIANKNNTVTLLKDEGSIGGKAITAFFKNYENAEMIYKEALDLFENMDEHAAIINTRNYIEHFKYFIKSDRSMMDLYSEIYDRFFRHDHNRKKNVPDSLKNVLADNFMIVDIDMELGSKKVGEKKKGFREHKAARIEFTDSG

SEQ ID NO: 1116 - protein, 1394 aa, Artificial; identical to SEQ ID NO: 791
  Synthetic

SEQ ID NO: 1117 - protein, 1360 aa, Artificial; identical to SEQ ID NO: 92
  Synthetic

SEQ ID NO: 1118 - protein, 1092 aa, Artificial
  Synthetic
MLKIFFKDSIPHYLYFDLKFSNYYLTFACNFDLNRFEMKFSKVKIGKVPYSFYRDRKKGVLLRGEDINCQSKNLLMKYRGSHFDMSIIDITLAKEIPGRKNRNTYVESIINNIVKNNKQSYCPKLTPDEVRNSLNAKFRNKIKYYPDNTIEYKEFSLVDLICEYSLTNDIEVLKPYLDWSKWYLNRKLKYFFKSVAHNKIDLSYLISDTQSKRKRVLISLYNLGMEKRKIVYYEKLEKTYNFPTLCNRFEVIITNCDIKNQLPSNIQIKKALQEHQKTIFGTRENPLNRNDDYLAIYNNEVVKYFERYFPVKRTKRRYSLNLMKHYLSSQTIISTIRRQFENSIRVYIMQVKRIKIHNVKLKRLNSSILSRIKLNDDFISNIQIISAFATSNLRNIFNLSFYADFYDANMFIQLNLKNINKDIFKMYFDEDFNSNNSTYLALRSSLIFQENSILPYYSDIIKELFDKEFFTYPDNYKDDNNGKNLFYKDTIFKDYLEKDIDLIPKYFADILKNKGITSYYSIEDLISIFSNHKLSLNAEIKAFAPSFERIFNSGCNYQTKTHDKHFLNITNYYPKDYLNQETKEEFSARYSLLKFIYEYLFLHDFNDIRLMNVSKYIIDKNSQYAEEKHKADKYAYKSMKIMTEKQSVMMYLSNIKKMIENENIIKNHNYSYYNKGNKNYSEKFLIDIFVKAFDVFLNQFSKHIIHKTHKQTPKNTINLNIKETSINPNNSSHIRFYIFAKLLDEYNLNKLRNEIIKYKNLKILTEIIDKSYKIDERLKTDYLIEITELCLLKLRSQRKIEFNYIENWIDIKLLNYTNIDNYDKIDTQKIKSNLYYIKKYSTEKIFDFLFNQYPQYKVSYSDIIKYKEYLHNEENGHRIIDNIYYTKYNIHKSWVHKTFKAYDITEDELIFNPHSLEYKNLIHQLQEFDSLERKIHLTHLKESSQLLNEIFQKLIRYITILDRDKEYLKGEILNYNTSHFNQQIHYIRHLNYYFDKDFKYSIIDLINYTREIMTYNRAIKNSVYKSIIKIFEDNGMELKMTHNIETYKLEIQYIRPKRIYHLKTTPRKGNIYEYMVSQEYCDFCRTLMEMKS

SEQ ID NO: 1119 - protein, 1360 aa, Artificial; identical to SEQ ID NO: 92
  Synthetic

SEQ ID NO: 1120 - protein, 1385 aa, Artificial; identical to SEQ ID NO: 670
  Synthetic

SEQ ID NO: 1121 - protein, 1388 aa, Artificial; identical to SEQ ID NO: 103
  Synthetic

SEQ ID NO: 1122 - protein, 1388 aa, Artificial; identical to SEQ ID NO: 103
  Synthetic

SEQ ID NO: 1123 - protein, 1315 aa, Artificial; identical to SEQ ID NO: 751
  Synthetic

SEQ ID NO: 1124 - protein, 1412 aa, Artificial; identical to SEQ ID NO: 140
  Synthetic

SEQ ID NO: 1125 - protein, 1157 aa, Artificial; identical to SEQ ID NO: 699
  Synthetic

SEQ ID NO: 1126 - protein, 1161 aa, Artificial
  Synthetic
MKVTKVDGISHKKYIEEGKLVKSTSEENRTSERLSELLSIRLDIYIKNPDNASEEENRIRRENLKKFFSNKVLHLKDSVLYLKNRKEKNAVQDKNYSEEDISEYDLKNKNSFSVLKKILLNEDINSEELEIFRKDVEAKLNKINSLKYSFEKNKANYQKINENNVEKVGGKSKRNIIYDYYRESAKRNDYINNVQEAFDKLYKKEDIEKLFFLIENSKKHEKYKIRECYHKIIGRKNDKENFAKIIYEEIQNVNNIKELIEKVPDMSELKKSQVFYKYYLDKEELNDKNIKYAFCHFVEIEMSQLLKNYVYKRLSNISNDKIKRIFEYQNLKKLIENKLLNKLDTYVRNCGKYNYYLQVGEIATSDFIARNRQNEAFLRNIIGVSSVAYFSLRNILETENENDITGRMRGKTVKNNKGEEKYVFGEVDKIYNENKQNEVKENLKMFYSYDFNMDNKNEIEDFFANIDEAISSIRHGIVHFNLELEGKDIFAFKNIAPSEISKKMFQNEINEKKLKLKIFKQLNSANVFRYLEKYKILNYLKRTRFEFVNKNIPFVPSFTKLYSRIDDLKNSLGIYWKTPKTNDDNKTKEITDAQIYLLKNICYGEFLNKFVKNSKDFFKITDEVIKINKQINQKTGYYKYQKFENIEKTVPVEYLAIIQSRDMINNQDKEEKNTYIDFVQQIFLKGFIDYLNKNNLKYIENNNNNNDIFSRIKIKKDSKERYDKILKNYEKNNRNKEIPHEINEFVREIKLGKILKYTESLNMFYLILKLLNHKELTNLKGSLEKYQSANKEEAFSDQLELINLLNLDNNRVTEDFELEADEIGKFLDFNGNKIKDRKELKKFDTNKIYFDGENIIKHRAFYNIKKYGMLNLLEKIADKAKYKISLKELKEYSNKKNEIEKNYTMQQNLHRKYARPKKDEKFNDEDYKEYEKAIGNIQKYTHLKNKVEFNELNLLQGLLLKILHRLVGYTSIWERDLRFRLKGEFPENQYIEEIFNFDNSKNVKYKSGQIVEKYINFYKELYKDNVEKRSIYSDKKVKKLKQEKKDLYIRNYIAHFNYIPHAEISLLEVLENLRKLLSYDRKLKNAVMKSVVNILKEYGFVAKFKIGADKKIGIQTLESEKIVHLKNLKKKKLMTDRNSKELCELVKVMFEYKMEEKKSEN

SEQ ID NO: 1127 - protein, 1373 aa, Artificial; identical to SEQ ID NO: 104
  Synthetic

SEQ ID NO: 1128 - protein, 1287 aa, Artificial; identical to SEQ ID NO: 105
  Synthetic

SEQ ID NO: 1129 - protein, 1065 aa, Artificial
  Synthetic
LLFLWIIEEVIYEIIKLYKNLKEEIIMGNLFGYKRWYEVRDKEDYKIKRKVKVKRNYDGNKYILNINENNNKEKINDNKFIREFVNYKKNDNVLIEFKRKFHAGNILFKLKGKERIKRIENDDDFLKTEEVVLYIEVYGKSEKLKALGITKKKIIDEAIKQGITKDDKKIEIKRQKIEINIRDKCTNKTVDDCSVILRIIENDELETKKSIYEIFKNINMNLYKIIEKIIVNKTEKVFENRYYKEYLKEKLLEDNQINIILTNFMKIREKIESNPEIMGFVKFYFNVGGDKKKSENKKMLVEKILNINVDLTVEDIVDFIVKELKFWDITKRIEKLQEKTVNRTDEDIKKTYINTYVSLDKHEKFKKYNRNKKDTIVKSFIKDIKDNTMKQKINQILRKFKIEELIEKLRIENKNFDTEIFRIFKDHYQEMFSSEKFEEKSDEEKELYKIIYRYLKGRIEKILINGEKVRLKKMEKIEIEKILNESILSEKILKRIKQYTLEHIMYLGKLRHNDIVKMTVNTNDFSRLHAKEELDLELITFFASTNMELNKIFNGKEKITDFFGFNLNGQKITLKEKVPSFKLNILKKLNFINNENNIDEKLSHFYSFQKEGYLLRNKILHNSYGNIQETINLKGEYENIENLIKELKVNNEEISKSLNLDIIFEGKVDIINKINSLEIGEYKDKKYLPSFSKIVPEITRKFREINKDKSFDIESEKIILNAVQYVNKILYEKITSNEENEFIKTLPDKLVKKNNNKENKNSLSIEEYYKNAQVSSSKGDKKAIKKYQNKVTNAYIEYLENTFAEVINFSNFNLNFDEIKTKIEERKDSKNKIVIDSISTNINITNDTEYIISIFALLNNNTYINKIRNRFFATSVWLEKQNSTKEYDYENIISILDEIIQLNTLRNECIIENWNSNLKEFIQKMLDVEKEIGNFEIKTKKEIFEIHYEEIKKDMIVKINDNKIQKILNKYLKEITGFSSNNEYMFKNLGKLTLEERDFILPNKKLIEKNIDEIIGEKLDAIKEKILLRKVFSSKFLEKYKKEIDNLIEDTESENKNKFEKIYYP

SEQ ID NO: 1130 - protein, 1157 aa, Artificial; identical to SEQ ID NO: 699
  Synthetic

SEQ ID NO: 1131 - protein, 1168 aa, Artificial
  Synthetic
MKITKIDGISHKKYIKEGKLVKSTSEENKTDERLSELLTIRLDTYIKNPDNASEEENRIRRENLKEFFSNKVLYLKDGILYLKDRREKNQLQNKNYSEEDISEYDLKNKNSFLVLKKILLNEDINSEELEIFRKDVEAKLNKINSLKYSFEENKANYQKINENNVEKVGGKSKRNIIYDYYRESAKRNDYINNVQEAFDKLYKKEDIEKLFFLIENSKKHEKYKIRECYHKIIGRKNDKENFAKIIYEEIQNVNNIKELIEKVPDMSELKKSQVFYKYYLDKEELNDKNIKYAFCHFVEIEMSQLLKNYVYKRLSNISNDKIKRIFEYQNLKKLIENKLLNKLDTYVRNCGKYNYYLQDGEIATSDFIAGNRQNEAFLRNIIGVSSVAYFSLRNILETENKDDITGKMRGKTRIDSKTGEEKYIPGEVDQIYYENKQNEVKNKLKMFYGYDFDMDNKKEIEDFFANIDEAISSIRHGIVHFNLDLDGKDIFAFKNIVPSEISKKMFQNEINEKKLKLKIFRQLNSANVFRYLEKYKILNYLKRTRFEFVNKNIPFVPSFTKLYSRIDDLKNSLGIYWKTPKTNDDNKTKEIIDAQIYLLKNIYYGEFLNYFMSNNGNFFEISREIIELNKNDKRNLKTGFYKLQKFEDIQEKTPKKYLANIQSLYMINAGNQDEEEKDTYIDFIQKIFLKGFMTYLANNGRLSLMYIGNDEQINTSLAGKKQEFDKFLKKYEQNNNIEIPHEINEFLREIKLGKILKYTESLNMFYLILKLLNHKELTNLKGSLEKYQSANKEETFSDELELINLLNLDNNRVTEDFELEANEIGKFLDFNGNKIKDRKELKKFDTKKIYFDGENIIKHRAFYNIKKYGMLNLLEKIADKAKYKISLKELKEYSNKKNEIEKNYTMQQNLHRKYARPKKDEKFNDEDYKEYEKAIGNIQKYTHLKNKVEFNELNLLQGLLLKILHRLVGYTSIWERDLRFRLKGEFPENQYIEEIFNFDNSKNVKYKSGQIVEKYINFYKELYKDNVEKRSIYSDKKVKKLKQEKKDLYIRNYIAHFNYIPHAEISLLEVLENLRKLLSYDRKLKNAIMKSVVDILKEYGFVATFKIGADKKIGIQTLESEKIVHLKNLKKKKLMTDRNSEELCKLVKVMFEYKMEEKNLKTKKCKVI

SEQ ID NO: 1132 - protein, 1175 aa, Artificial
  Synthetic
MLSNAEHPKKRFVVDFIKRYANLERTAQVEELLHIKKLMVMFVYGEKEPEFYNKENPYKRLDETDERIFCEDAKNILEQIEQNSNNGKWKDNKKLHIQLGESFRKELFKRYKQMEDWLSEQYKVEKDGLIANKGYDLTNKNLMRAKEDLYWIIIFEENIESYFKRWNKRSLKNCRCSWIVNRLWNEWNSLICMKYIDLGKAVFNFAMPDLHDLSDGEIKLGTVLPEYQEGITSFDYEMVKAKENITRDIATSIVFAANTFSNAVIKREYREQPDKNIRNDVLVYDEEVFQNREAVQENAFKHIFQYFGGASTWHGLDFLFAQTSGVDTEKNTYVIEGKDPVTQEKFKKNFAFAIKQCIAALRNNSFHYTTDRKFVADDNILIEKQIADYLFKEEYSRLPKMFAEKYFSNNVPLFFDNEDIFKLANYLYCGESVREAQVPAFASVIKRKYIDEFLFTSDAEEKPFISMEQEEIKKIYTNEDIRNIFFSAMYFILKEIYYYGFLKSKDLMERFSKAFEQYYQNMMNNKRNKEYFAVDNFKKHLDELKNKNKNITFGEFCQQIMTDYNMQNQDLKDVMTINKENELKRKGEKEKYKHYVLILYKIMGNAFKKYLETFSNGKENVYAFLKRPKYILSDNKIISLKDFDDRSINEFINKMSQKVKIKIYQSLQNSVTKYNLYAWYMTAHFLAGKQLNLLIGDFKAFKQYIRKIKQRAENTGNAHKEMNKDIIEDIVEYCDKVIKILEFVLQFKGRITANKEDYFADEEEYAEYMLNFIDYSEFITNNKINGKVDYATALKEYCKQNMENTNSTDEIMGIYYDQKNLILNRNVVYSKLYGESHMLHHCLCGADYDYRVKGEDIQNYYDLRKDLNNVFKNGKCTSKDDQIKLKQFQNLKNKIELYDIKTYTDLVNDIIAQFVSWAYLRERDLLYFQLGYHYIKLFWKNETDTEKCKLKEQYNKLSFKDKNKNVINITEGALLHQIVAVYDYTLPIINGSREKTEHNKIALASGTSGTSLINFITNYCNEEAKTGKAETYNDGLDFFGKEINRDGFILDRKDIAHMKYYIFHEKSIMEMFADMYNGFLMYDTKLKKSVSFVSHNILARYFIIMKTEMHHASEENEKFGFDVTLYSDKFTYKYEETCEDEQKEGEEKQKKVNVDARSEEFLEIVKRILEYKECK

SEQ ID NO: 1133 - protein, 1250 aa, Artificial
  Synthetic
MKITKIDGVSHYKEKEKGVLKGKDILNGKIEKIVKKRYDATIESKIYKEFIKLRKNRIEQNNEKSILKLIKLNIDKNEKEIKTLLLNKFKIKEKNKKYDKYMLDENKLDNDIKIYESVESLYCLIKEIYLGQNNKKWNISKIDLEKIMEEDNNLIMLGYKLKKNITENDYPYLYSDKNGQESTSVYKLLKKLIEENKDRNQDIRKSQEYEKIRKNFEEYKNRKINLLVKSIKNNKINIQYINNEIKSHNNSREENIIKFFKKMIEEKNEPILKDKLKLFKLEVFFDEEFLEEIKKLLDSDDFDKSYNKKISELRGKIFNRIREKIKNNKNRDELENIYFLELKKYIENNLSHKKEKNKNNNNNTGEEKSKELYLKFLKKVLFIDDNNRISIEKLKSRIDDNFKNLLIQHVIEYGKIKYYVENDDYIRNIVKNGELKLETKDLEYIKTKETLIRKMAVLVSFAANSYYNLFGSVSEDILGTEVVKNRRTNVIKVKSYIFKEKMLNYFFDSEDFDINKTIEVLESISYSIYNIRNGVGHFNKLVLGKYKKKDINTNKRVEEDLNNNEEIKGYFIQKRGEIEKKIKERFLSNNLQYYYAKERIENYFEVYEFEILKEKIPFAPNFKRIIKKGEDLFNNKKNKKYEYFKNFDKNSAEEKKEFLKTRNFLLKELYYNNFYKEFLSKKEELKKIVIEVKEEKKNRGNNKKSGVSFQNIDDYDTKINISDYIASIHKKEMERVEKYNEEKQKDTAKYIRDFVEEIFLTGFINYLEKDERLHFLKEEFSVLCNSNNNVIDFNVNINEEKIKEFLKENDSKTLNLYLFFNMIDSKRISEFRNELIKYKQFTKKRLDEEKEFLGIKIELYETLIEFVILTREKLDTKKSEETDAWLVDKLYVKEKNECNEYEYKEYEEILKLFVDEKILISKEAPYYATNNKTPIILSNFEKTRKYGTQNLLAKIQSSYKYNEIEKQKIENYNEKKESEKKKKSNIEKLQDLKVELHKKWEQNKITEKEIKKYNDTIKEIREYNYLKNKEELQNVYLLHEILSDLLARNVAFFNKWERDFKFIVIAIKQFLRENDKEKVNEFLNPHKSDGSRDNFSVTNYRSKMKSIINNIHENFMSLLFLNNNLATGGIQMGRNNNFTWGNLRNYIAHFEYLHKEKDTISFIGQANLLIKLFSYDKKVQNHIIKSMKTLLEKYNIEIRFEISNDSEEIFEYKIKYINSKKGKMLGKNNEFEILENEFVRNVKALLEYSK

SEQ ID NO: 1134 - protein, 1399 aa, Artificial; identical to SEQ ID NO: 622
  Synthetic

SEQ ID NO: 1135 - protein, 1330 aa, Artificial
  Synthetic
MKREKNITIMKISKVNHRRTAVALNGDKSELGGILYEAPVQKDRNGNYNDVIAETGKVVNEALDKKSRLYTPFNNQKVIIDKNLQRYANNLKRCYINFVKQYVNNKSFNYKAMQFIPDIQNPKTNDAVNYRTDRDNVYNKNKYYDKQTKSKSKKFIYEKIVIPQNEQNIVISALVNCSLRKSLRKDVSYKTKSGEIKTYNLPELVKKSMRFYCLEGQREPDEKEKYEMYILFSYMKEDKRTKNTDLLVKSISNQNTKVKVEDIDGNKLLKLSIADTKKKPLWEYLIKYADSSRQRELMYDIRKKIILYVAGIEEYENIKEDSGLSKVSWSKYNISDNKMFFDINSCTDKRKQNLEIKIREANIEHYRNASSKLCDDESIFWFQHFEGVIETLFSKKSKISEERLGCAYICDYLWKDFLSYLAAKYIDLGKGVYHFTMKDKLDMLNKNEAVTDLRFGIVSEKYEKGITSFDYERIKAEEELDRNIAAYVTFAADIFAKSVIKSDYRTKKDNNSDVLQYSDKEFRNSEVIRDNAEKNILQYWGGYSRWGTENSKLPENNKVSDFGKLDVSDLCIDIKKHLAGIRNSSVHYTTKIKNESAADGSNVKILFEKDLADINIIYADKYYSNNVWMFYSLEDINKLIAFLYKEKRVIRQVQIPSFSRILKRKAMQDVINEIFKDDFDENIVNPELKEKYRNSLYFMLKEIYYNAFIIQPELKEKFKDKIKIMKSELYNKLKTIDKKEYKALYCMLSNEESALKNFADRIYSVDGDNVSFADICKILMTDYNMQNQEKKNIESMEQKKKNKGKDENYKHFPLLLHKVLKELFIEYLKQTHELEFLRNNICIKSDVTMESFESQIKGVEIYKDLKEKIDKNNSLLDWYVIAHFLMPKQLNHLIGNIKNYIQFATNIDKRAESVKNLTESGMVKRIQYYDDIVRTLEFSAQYIGKISNNINDYFNSEDEYVSFLSKYVGFINDKSEDVLTELKDFCREKINNGSQIIGIYYGGDNVIINRNVIYAQMYSNAEVFSNIYKKVTKNDIINYYEKQNDLKDVFKSGVCQNEGEQRSLCEFQQLKNRIELTELSTYADMVNDFMAQFVEWAYLRERDLMYFQLGIHYIRLFYSDNVLDEKYHKLRDNVIDIEEGALLYQIVAMYDYELRIFETDNSGNAKRIGQGGPGKSIPVFLKKYCNGTDVYECGLELFEDINQHEHIIRFRNDIAHMRYMSNQAMNIMSIVSNIYKSFFVYDTKLKKSISLVFKNILMRYGVIADLVFSYNNKNQSIKDDMDINIINIKNLKSDKYVYKIVNEDIVKQVEIEIRNQVFLEQLHNLLYFSR

SEQ ID NO: 1136 - protein, 1312 aa, Artificial
  Synthetic
MKFSKVGHVRTAVSVTDNGVEGIIYENPAVDGNYPVQNLNERFDILNRNAKALYRIFVPAKGKECDAAKTVRKKGEDLIRALLKTGGSDPTGAQLAFLKSTIIASYALSDAEAYAIGILVRQSLRQSLRREVKKDGKEIRVPDVIEGILSALVLVSDRDISGYLEKIDGLGEEAIIVFLQILNEDYNKDLQKKNTVKSLQRQNVKAQPLQEKESFLLRPADAGHPKKRYRFDFMTEYAGADQAAKEEMLVRIRQLILLFFSGKEAYEEASGKDCGVNARSFGALLPQPEEYFLGNSVFHDYYRQIDAYLSEIACYEEEEKEIEAKFKRYEDKKDSLAEIKKKKGKAGRRIDECYEKIRALASQTITDAYRQAVKEDLDGSDIFWIDYLQKDAVRQFGKGKRIPEYKLSARYLCKHAWDGWTAFLSRKYVDLGKAVYHFAMPDLYNMDPDSEVIMGEVRPEYRKGLSTFDYERIKAEENLDRDISTAVSFAVNSFSRSICGYERKEGHEDVLLLNDTQLKEDLLDDAGKRVLRFFGGIHAWESNEEISLYAADDKGYELVKPMQQMLYAVRNSAFHYTGKDDPAGYGDTALLETMFGQEEEWLGKILRKKYFSNNAHKFYKNSDITRLMDFLYKEQPVRPPQIPSFNRIMNRNSAYQHPKIVKGRSKSRVSGGEIKYTEMFKGTLFFLLKEIYYYGFLQEKDVTQRFLDFVKDPVNKSAAQNKEAYEDFLNRIGKIGENADLGQICQTIMTDYEMQNHDKRVKKGDSRDLGSYKHFRTLLYIFIRETFVEYLTKSERADLFAFIREPARLDPEPGEEDFCSGWTCTMYDGILEEEEKREMLKWYVTGHFLTPKQLNHLIGDFKTYIWYVRDIERRAADTKNRSYPDRAEDKASLAMQILRILEFAMYFCGQTSNLVDDYFSDKEDYAQTLAEVVSFKDKHYPDCRSALKAFCGRKIPVTLTDGNGKKRTEAVQCGIYHDGMNPIANRNVILASMYSSIPILGRVTDPITERDIRAYYQKQADNAKYIKTGKCDSKEEQESLREYQNVKNRTEMNDLITFADMTNDLISQLVSWAYFRERDLMYYQLGYYYTKLYYTDTVPADDLRRKLTGKGIHITDGAILYQIAALYTYGLPVFSVNKKGEAEAPSKAGSSQGASVRTFVKHYCHESMQDAPTYFDGLFLFEDISAHDDIIACRNYIDHFKYYAGPEKSILDLYSDMYDRFFDYSLNFKKSISFILPNILQRYFVTLRTGVEKEVVTRGGKERTRARIKVKDAVSDKLTYKVGEKDEPVLVDARNKVFLESVRRLLEYRITK

SEQ ID NO: 1137 - protein, 1093 aa, Artificial
  Synthetic
MTKEKRSNKWAFLLYQESAPEHYLDVLENMHIPFVLSPWHDKDINKETGEFKKAHKHGALYFDSLKSYSQVSELHDLLLKLEFIYVYKLTDILEIPNCSDNSDRLLEFIILCRGIEEILFFFWDVFDRYWDNFFEYMYEFDWYYWRTRRDLRENLVHGVLDERGIEFLIFLTRNLSKVFSGRINALQNSMLSLDGSLHFVNIRNTRIFHKRFPQRIKKYLSNPDDKIYKKAFESSNISCYATIEFDGEKYIAVNGIALDGNKNRILNEFKKVLESFDKKSVKIVDIADGVRYYLNDLKRYIEYKDFVSQNVDKKNRRMFTCCERKLFAKLREENNGVEIKDISTRQKIHLSTTKSPCAMCQREIKVNSYKIFEMKFQNPNIESSDDLEILKAEETFLNKLSTAVSKVGYTLNTLLEVNPEKDILEKYEEVEKLCTNNSIKNLCTVYSEINNNEKLLKGMIYFIQGLRQQVLHPKILWEKNVHKAEKVKEKEKIVIRFQNEGKAYNKKRIEEYFENILEKIPNYFIEKYESNNVFNIYRNFIDEIFEIIDKFDFKESNSISYLFPKFHKIYKRICKSENINDRQNGARKYLLQTIYYYYFQYEIENNKNDIFKYLNLYKSKIKAKKISYSHIIDNKDVNNKNIEILYRNIQREGMLNNRLLQMNNEWIEFMVVQFSEFLTNKKLNWILDDLSEYKKKEKLDENDKNKLLKTLKQKMNKKITYSNDSYVFISLAQFLDLKEISNLIHDIKKFIQFREKNVSKYKPEKNKLYIKELRKVLYILKVMLEHKERVIQKHYLESYDENISIIYGKDIERKDIKDIKIKIKNENQEVINQPLYKSGNDENSSWIVLYGIEQAKRNGTFKFFEGFFNLNDDIKLCKENIEKYEELYNEKEENQRKVDEYISSEENNNIDEIEEINNNKQLFYYYKNMIYGDGLKKGYDFINDIYSHYLSWAYRVERDCKIYKIKEYENKKNFNEYKFKEYKSIKNFRNEIAHFNYFQKTNKSLLELLNDFYDIFDYNLKYQRDVQKVINNIFEKYQIVRKDRGPVVFYCKTDKKLKLSENIIPKKHLKYPEIKLIHEKYVEFFKKLFEYKK

SEQ ID NO: 1138 - protein, 1184 aa, Artificial
  Synthetic
MRVSKVKVLGNEETKGRIVLMHRSPVKGQLIYSEDAGKRDRTEDIIPEQKLESFHLSILNKTFLRKEFFKKELKHEAKKNGLKGDAEDKYISEKLKEYHSLLQFIDDVLSVKYNENRKAIKFPEYLTREMIEIFLNHKFRKEVTYTNKNGASVSFLLSTLILNAIEKHSVIEMQPFVDWRNWFVETKSKFLKKSIINNCIPTNGGPISRRRETLMKWRDDYFTNAEIDLARLHKKFGTDTLMASLREVPQTEKSGNEYHRLLKSCLQSHQKKLFGKRAEGYDINRADNQLYVYNTEVVKYMEHYFPVKSSKRRNSTAEIKYYLQTDTIKCCLHHQIINAVRGLALREGKFNLHGFDDKLIPNERNVSSSILNELKTSEGFVLNMLGGCAFAANCLRNIVDATQRSDLLGFRCFEVSLKKGKSNSDLFALFFGFGREDMDDDSEWEKHLYAARYSVSEIRNRVAHYHKSAIENIYNITDFEYRENSMCSYTDTKFTTALQNEIYNTPKAFSLQLMTGKVLEYYPKEKLVSFFQKYKFSLYRSVVPFAPGFKNIMRTGVNYQNATQNSLFYDMGLTAFQDKDRYIDDVEAWNARYFFMKLIYNNLFLPRFTNDKNDLFRKTVEQVLEVNRSHMEKVGKDDRKAFGEVRQMRENETANDYMAYLQSSLRMEKNKKELEGNGAKRINFEKFILQMFVKGFDSFLKDGAFEFVHSPENCLTGSTEKERAKERNSLCEEIGNYVRLVSTVIDPGKGSHVAFYVFCKMLNSVYLSNIRNEMIKYHKVVRTDELAHLIEIIELCLLSADAVSQKTVNADKLSHFFAEGVNVDDDENVIHASMETFRKYGTRDLFHKLMLQDDRFLVSSDDYREWEEMKEKIEGKVKQRELLHAEWCEAKEKDKKSRKVKSNSRTCFEKKFMGAKAEEYYSLCKVIDKYNWLDNKLHLVHLNKLHNLVIEILGRMVGFTALFERDFQYICKSDSEYEQLYNLDFNMGLPKFKNSIKGSGKAKNSTQNIDHNATGIGNSSNLLKENSNGTHYCKNLSGDGVEDKLKRLFLYDDYRNVRNFVAHFNYLTRVEDDLGGNDAVKLSGTRYSLIELINELRNLLKYDRKLKNAVSKSFIDMFERHGMHVKMKLNHNHKLFVDSISPRKIKHLGGGYKKRGKDDKMYVQTTNHVDPLYCDMCRALLEMK

SEQ ID NO: 1139 - protein, 1240 aa, Artificial
  Synthetic
  misc_feature (925)..(1010): Xaa can be any naturally occurring amino acid
MRVSKVKVLGNEETKGRIVLMHRSPVKGQLIYSEDAGKRDRTEDIIPEQKLESFHLSILNKTFLRKEFFKKELKHEAKKNGLKGDAEDKYISEKLKEYHSLLQFIDDVLSVKYNENRKAIKFPEYLTREMIEIFLNHKFRKEVTYTNKNGASVSFLLSTLILNAIEKHSVIEMQPFVDWRNWFVETKSKFLKKSIINNCIPTNGGPISRRRETLMKWRDDYFTNAEIDLARLHKKFGTDTLMASLREVPQTEKSGNEYHRLLKSCLQSHQKKLFGKRAEGYDINRADNQLYVYNTEVVKYMEHYFPVKSSKRRNSTAEIKYYLQTDTIKCCLHHQIINAVRGLALREGKFNLHGFDDKLIPNERNVSSSILNELKTSEGFVLNMLGGCAFAANCLRNIVDATQRSDLLGFRCFEVSLKKGKSNSDLFALFFGFGREDMDDDSEWEKHLYAARYSVSEIRNRVAHYHKSAIENIYNITDFEYRENSMCSYTDTKFTTALQNEIYNTPKAFSLQLMTGKVLEYYPKEKLVSFFQKYKFSLYRSVVPFAPGFKNIMRTGVNYQNATQNRLFYDMGLTAFQDKDRYIDDVEAWNARYFFMKLIYNNLFLPRFTNDKNDLFRKTVEQVLEVNRSHMEKVGKDDRQAFGEVRQMRENETANDYMAYLQSSLRMEKNKKELEGNGAKRINFEKFILQMFVKGFDSFLKDGAFEFVHSPENCLTGSTEKERAKERNSLCEEIGNYVRLVSTVIDPGKGSHVAFYVFCKMLNSVYLSNIRNEMIKYHKVVRTDELAHLIEIIELCLLSADAVSQKTVNADKLSHFFAEGVNVDDDENVIHASMETFRKYGTRDLFHKLMLQDDRFLVSSDDYREWEEMKEKIEGKVKQRELLHAEWCEAKEKDKKSRKVKSNSRTCFEKKFMGAKAEEYYSLCXXXXXXXXXXXXXXXXXXXXXXXXXXXXXXXXXXXXXXXXXXXXXXXXXXXXXXXXXXXXXXXXXXXXXXXXXXXXXXXXXXXXXXRMVGFTALFERDFQYICKSDSEYEQLYNLDFNMGLPKFKNSIKGSGKAKNSTQNIDHNATGIGNSSNLLKENSNGTHYCKNLSGDGVEDKLKRLFLYDDYRNVRNFVAHFNYLTRVEDDLGGNDAVKLSGTRYSLIELINELRNLLKYDRKLKNAVSKSFIDMFERHGMHVKMKLNHNHKLFVDSISPRKIKHLGGGYKKRGKDDKMYVQTTNHVDPLYCDMCRALLEMK

SEQ ID NO: 1140 - protein, 1382 aa, Artificial
  Synthetic
MKLSKEKHTRSAVANEEQNIGGIIYRFPGKSIDGVKDQMLRRDKEVKKLYNVFNQIQVGTKPKKWNNDEKLYLEENERRAQQKNIKIKNYKWRESCSEYVKSSQKTINYVLFYSYGKAENKLRYMRKTKDILKKMQEAEKLSKFSGGKLEDFVAYTLRKSLVVSKYDTQEFDSVAAMVVFLECIGKNNISDHEKEIVCKLLELIRKDFSKLDPNVKGSQGANIVRSVRNQNMIVQPQGDRFLFPQVYAKENETVTNKNVEKEGLNEFLLNYANLDDEKREESLRKLRRILDVYFSAPNHYEKDMDITLSDNIEKGKFNVWEKHECGKKETGLLVDIPDVLMEAEAENIKLDAVVEKRERKVLTDRVRRQNIICYRYTRAVIEKYNSNEPLFFENNAINQYWIHHIENAVERILKNCKAGKLFKLRKGYLAEKVWKDAINLISIKYIALGKAVYNFALDDIWKDKKNKELGIVDERIRNGITSFDYEMIKAHENLQRELAVDIAFSVNNLARAVCDMSNLGNKESDFLLWKRNDIADKLKNKDDMASVSAVLQFFGGKSSWDINIFKEAYKGKKKYNYEVRFIDDLRKAIYCARNENFHFKTALVNDEKWNTELFGKIFKRETEFCLNVEKDRFYSNNLYMFYQVSELRNMLDHLYSRSVSRAAQVPSYNSVIVRTAFPEYITNVLGYQKPGYDADTLGKWYSACYYLLKEIYYNSFLQSDRALQLFEKSVKTLSWDDEEQKRAVDNFKKYFSDIKSACTSLAQVCQIYMTEYNQQNNQIKKVRSSNDSIFDQPIYQHYKVLLKKAIANAFADYLKNNKDLFGFIGKPFKANEIREIDKEQFLPDWTSRKYEALCIEVSGSQELQKWYIVGKFLNARSLNLMVGSMRSYIQYVTDIKRRAASIGNELHVSVQDVEKVEKWVQVIEVCSLLASRTSNQFEDYFNDKDDYARYLKSYVDFSNVDMPSEYSALVDFSNEEQSDLYVDPKNPKVNRNIVHSKLFAADHILRDIVEPVSKDNIEEFYSQKAEIAYCKIKGKEITAEEQKAVLKYQKLKNRVELRDIVEYGEIINELLGQLINWSFMRERDLLYFQLGFHYDCLRNDSKKPEGYKNIKVDENSIKDAILYQIIGMYVNGVTVYAPEKDGDKLKEQCVKGGVGVKVSAFHRYSKYLGLNEKTLYNAGLEIFEVVAEHEDIINLRNGIDHFKYYLGDYRSMLSIYSEVFDRFFTYDIKYQKNVLNLLQNILLRHNVIVEPILESGFKTIGEQTKPGAKLSIRSIKSDTFQYKVKGGTLITDAKDERYLETIRKILYYAENEEDNLKKSVVVTNADKYEKNKESDDQNKQKEKKNKDNKGKKNEETKSDAEKNNNERLSYNPFANLNFKLSN

SEQ ID NO: 1141 - protein, 1284 aa, Artificial; identical to SEQ ID NO: 1108
  Synthetic

SEQ ID NO: 1142 - protein, 1284 aa, Artificial; identical to SEQ ID NO: 1108
  Synthetic

SEQ ID NO: 1143 - protein, 1188 aa, Artificial
  Synthetic
MKVTKIDGLSHKKFEDEGKLVKFRNNKNINEIKERLKKLKELKLDNYIKNPENVKNKDKDAEKETKIRRTNLKKYFSEIILRKEDEKYILKKTKKFKDINQEIDYYDVKSKKNQQEIFDVLKEILELKIKETEKEEIITFDSEKLKKVFGEDFVKKEAKIKAIEKSLKINKANYKKDSIKIGDDKYSNVKGENKRSRIYEYYKKSENLKKFEENIREAFEKLYTEENIKELYSKIEEVLKKTHLKSIVREFYQNEIIGESEFSEKGEDGISILYNQIIRSNEKKEKFVKFLENIENLQLKELTKSQIFYKYFLENEELDDENIKNVFCYFVEIEVNDLLKGNVYRVSKIYENKIKNIFEYNKLKKLVINKLENKLNNYVRNCGKYNYHMENGDIATSDINMRNRQKEAFLRSMIGVSSFGYFSLRNILGVNDDDFYEIEEDLTEDERKKESSTLKKVKEDIANKSIFEKVVDKSFQKKGIYDIKENLKMFYGDSFDDADEDELKQFFVNMLNAITSIRHRVVHYNMNTNSENIFNFSDIEVSRLLKNIFEKETDKRELKLKIFRQLNSAGVFDYWESWKIKKYLENIEFKFVNKNIPFVPSFTKLYNRIDNLKGSNALNLGYINIPKRKEARDSQIYLLKNIYYGEFVEEFVNNNDNFEKIFREIIEINKNAGTNTKTKFYKLEKFETLKANTPTEYLEKLQSLHQINYDREKIEEDKDIYVDFVQKIFLKGFINYLQESGSLKYLLNLEKSEVIANKKSSYDEKLKLWQNNGSNLSKMPEEIYEYIKKIKINKINYSDRMSIFYLLLKLIDYRELTNLRGNLEKYESMNKNEIYSEELNIVNLVSLDNNKVRANFNLKPEDIGKFLKTETSIRNINQLNNFSEIFADGENVIKHRSFYNIKKYGILDLLEKIVDKADLKITKEEIKKYENLQNELKRNDFYKIQERIHKNYNQKPFLIKNNEKDFNDYKKAIENIQNYTQLKNKIEFNDLNLLQSLLFRILHRLAGYTSLWERDLQFKLKGEYPEDKYIDEIFNFDNSKNEKYKNGAIVFKYVDFLIEKKEGKRARTKKINKKSEEKGLEIRNYIAHFNYIPDATKSILEILEELRNLLKYDRKLKNAVMKSIKDIFKKYGFIIELKIPHVNNSEKIEVLNVDSEKIKHLKNNGLVTTRNSEDLCELIKMMLEYKKS

SEQ ID NO: 1144 - protein, 1155 aa, Artificial
  Synthetic
MKVTKVDGISHKKYIEEGKLVKSTSEENRTSERLSELLSIRLDIYIKNPDNASEEENRIRRENLKKFFSNKVLHLKDSVLYLKNRNEKNAVQDKNYSEEDISEYDLKNKNSFSVLKKILLNEDINSEELEIFRKDVEAKLNKINSLKYSFEENKANYQKINENNVEKVGGKSKRNIIYDYYRESAKHNDYINNVQEAFDKLYKKEDIENLFFLIENSKKHEKYKIRECYHKIIGRKNDKENFAKIIYEEIQNVNNIKELIEKVPDMSELKKSQVFYKYYLDKEELNDKNIKYAFCHFVKIEMSQLLKNYVYKRLSNISNDKIKRIFEYQNLKKLIENKLLNKLDTYVRNCGKYNYYLQDGEIATSDFIARNRQNEAFLRNIIGVSSVAYFSLRNILETENENDITGRMRGKTVKNNKGEEKYVSGEVDKIYNENKQNEVKENLKMFYSYDFNMDNKNEIEDFFANIDEAISSIRHGIVHFNLELEGKDIFAFKNIAPSEISKKMFQNEINEKKLKLKIFKQLNSANVFNFYEKDVIIKYLKNTKFNFVNKNIPFVPSFTKLYNKIEDLRNTLKFFWSVPKDKEEKDAQIYLLKNIYYGEFLNYFMSNNGNFFEISREIIELNKNDKRNLKTGFYKLQKFEDIQEKTPKEYLANIQSLYMINAGNQDEEEKDTHIDFIQKIFLKGFMTYLANNGRLSLIYIGSDEETNTSLAEKKQEFDKFLKKYEQNNNIKIPYEINEFLREIKLGNILKYTERLNMFYLILKLLNHKELTNLKGSLEKYQSANKEETFSDQLELINLLNLDNNRVTEDFELEADEIGKFLNFNGNKIKDRKELKKFDTNKIYFDGENIIKHRAFYNIKKYGMLNLLEKIADKAKYKISLKELKEYSNKKNEIEKNYTMQQNLHRKYARPKKDEKFNDEDYKEYEKAIGNIQKYTHLKNKVEFNELNLLQGLLLKILHRLVGYTSIWERDLRFRLKGEFPENQYIEEIFNFDNSKNVKYKSGQIVEKYINFYKELYKDNVEKRSIYSDKKVKKLKQEKKDLYIRNYIAHFNYIPHAEISLLEVLENLRKLLSYDRKLKNAVMKSVVDILKEYGFVAKFKIGADKKIGIQTLESEKIVHLKNLKKKKLMTDRNSEELCKLVKVMFEYKMEEKKSEN

SEQ ID NO: 1145 - protein, 1387 aa, Artificial; identical to SEQ ID NO: 93
  Synthetic

SEQ ID NO: 1146 - protein, 1247 aa, Artificial
  Synthetic
MKITKRKWGEHHPPLYFYRDEDSGRLLAQNDRKQDYTDTLFNDIAQDTFERSLRNRLLKTPEKGDKRFYSNEIVKLVEKLCQGADVAEIMKSMERSEKLRPKNEKEIKNLKKQLDGTLSEYGKRYTAPEGAMTLNDALFYLVEGNPLKQAMAKAELGKIREALIKEKENRINRVRYSIKNNKIPLRIQEDGGITPNNDRAAWLLGLMKPADPAKGITDCYPLLGELEEVFDFDKLSKTLHEKISRCQGRPRSIAMAVDEALKQYLRELWEKSPSRQQDLKYYFQAVQEYFKDNFPIRTKRMGARLRQELLKDKTSLSRLLEPKHMANAVRRRLINQSTQMHILYGKLYAYCCGEDGRLLVNSETLQRIQVHEAVKKQAMTAVLWSISRLRYFYQFEDGDILSNKNPIKDFRDKFLRDTNKYTHEDVEACKEKLQDFFPLKELQEKIKEDAKGLQETDNKQADTTDFKAIGHIVRDDRKLCNQLLAECVSCIGELRHHIFHYKNVTLIQALKRIADKVKPEELSVLRAIYLLDRRNLKKAFAKRISSMNLPLYYREDLLSRIFKKEGTAFFLYSAKIQMTPSFQRVYERGKNLRREFECERMKAEASNGQNGQDGDRLKWFRQLAAGDSADTHFNWAVEAYAESAADVENNVEFDTDVDAQRALRNLLLLIYRHHFLPEVQKDETLVTGKIHKVLERNRQLSEGQGPNQGKAHGYSVIEELYHEGMPLSDLMKQLQRRISETERESRELAQEKTDYAQRFILDIFAEAFNDFLEAHYGEEYLEIMSPRKDAEAAKKWVKESKTVDLKTSIDEKEPEGHLLVLYPVLRLLDERELGELQQQMIRYRTSLASWQGESNFSEEIRIAGQIEELTELVKLTEPEPQFAEEVWGKRAKEAFEDFIEGNMKNYEAFYLQSDNNTPVYRRNMSRLLRSGLMGVYQKVLASHKQALKRDYLLWSEKHWNVKDENGVDISSAEQAQCLLQRLHRKYAESPSRFTEEDCKLYEKVLRRLEDYNQAVKNLSFSSLYEICVLNLEILSRWVGFVQDWERDMYFLLLAWVRQGKLDGIKEKDVSGIFYKGSIICKLFNTLEGGNWAAFASIYCPGSKRTKFLKVNNDVHATAPLSHEKCQYEFLVARNMIAHLDLMRKNGWRLEAGKTCSVMEDYINRLRFLLSYDQKRMNAVTKTLQQIFDRHKVKIRFTVEKGGMLKIEDVTADKIAHLKGSRLSGIEIPSHGERFIDTLKALMVYPRG

SEQ ID NO: 1147 - protein, 1287 aa, Artificial; identical to SEQ ID NO: 105
  Synthetic

SEQ ID NO: 1148 - protein, 1382 aa, Artificial; identical to SEQ ID NO: 1140
  Synthetic

SEQ ID NO: 1149 - protein, 1387 aa, Artificial
  Synthetic
MKLTKVEKARIAVSREKKDSGRIILYTNPEDVKKTSVTTMEQQVSKRIDQANKLYQVFFKSVIPVELNKHFAEISKIAAKCRNTEEFYKKACGYSGYEWTDAKQKKRTSQISRFSYTSSGKNMYVVMDNFVKEYMVQIWQEKDFRNAAVKILCCICDGKKFASKLEKVKKESPDTLKKFIEISGKCEGNPFVDYDTSFLEKVFTLVISQMVKNCDRKSYEQDDKEKIKKSIQKEIQWLSHVQSVTERSFGREGKTYLLFKIRNPYATEERLQTVLIRMRKTLKRGRNRDIAIVLLQGLAQMNQVTFTDTVKHLYQEEEKAFCDFIDAVNRDYYRVNIVKSVRNMDVKVQPDLNDNSILKLSGLGNIKKEALSDTLLRYAASADESDQVLLDIKKLLFEYFLPENSKETSKYTTVQNLWNIPYLPKIFFDYGFENEDSDDDNECAEDIETLCDVEPQYKINQHSLKRRIRYVNYGKYLQMTKNESDRERRYWIHYIKEFVEKNYVDSGRTLSEKNCYASSMMLNCWKEIIRYLCGKYIDIGKAVFHFTNLTAMPKPKDKIIYGQLEEQYKKGISSFDYEAIKAEETLQRDIVQSVVAAAFAFSKSVIDETKMEECQETNKEDILFLSENVLGSLLKENTIKLILRFYGGESSVAQKEYFDQQEIVQEMISHLKSIRNENFHYLDGAKKDNPHKYASILWKNDEMAYQKLTKQRYYANNVGLFYRAEEIQELVQELYSQKNITEAQIPAFRTVLKRKDLPGYMEELGILFPDNTQEKSKGDFEGTLYFLMKEIYYRDFIVKDKAAAYFFKAVDQNKEQSKKEDKHTERAAENFHRYVKSLEKKYNKKEIPFGTVCQYIMMEYNQQNTTKQETEIYKHFKMLISLCIRKAFGNYIKETYRFLFHPIYSKQQGEPEYLDTLELESGVKEKNYEWFTLAHFLHPVQLNHLVGDLKSYIQYREDILRRIVFAEQRVYADQQKEVQQKVKTAKEILEVLEFVREVSGRVSNEYTDYYENEEEYAEFLYQYIDFRKREGKSAFESLKYFCQNILDSGTVVDLYADTENPKVLRNIELTRMYAGSNVKIPEYEKITEDEIKMYYQEKNSVALILSRGLCRNEKEQKKVIEFNWKKKRLTLNEITDVFSLVNDLLGKMISFSYLRERDQMYLLLGFYYMALCAENKSENHLGWKGETLDKLESSDSKFDIGGGLVLYQIVSAFNFGSKLLYISEDGRWKMAGGAFPGKYGRFENDYNHRTSLSKVIRLFENESYEREIIYWRDYVDHMKYYVNQNQSIMEIYSAFYSKVLGYSAKLRKSVVFNLQAALEKHHINPECIWMTSDGKCADIKLMKNLESQKFTYKLAKREGEKTERKICMNALNENFLKTIRTSLEYKK

SEQ ID NO: 1150 - protein, 1211 aa, Artificial
  Synthetic
MKLTKVEKARIAVSREKKDSGRIILYTNPEDVKKTSVTTMEQQVSKRIDQANKLYQVFFKSVIPVELNKHFAEISKIAAKCRNTEEFYKKACGYSGYEWTDAKQKKRTSQISRFSYTSSGKNMYVVMDNFVKEYMVQIWQEKDFRNAAVKILCCICDGKKFASKLEKVKKESPDTLKKFIEISGKCEGNPFVDYDTSFLEKVFTLVISQMVKNCDRKSYEQDDKEKIKKSIQKEIQWLSHVQSVTERSFGREGKTYLLFKIRNPYATEERLQTVLIRMRKTLKRGRNRDIAIVLLQGLAQMNQVTFTDTVKHLYQEEEKAFCDFIDAVNRDYYRVNIVKSVRNMDVKVQPDLNDNSILKLSGLGNIKKEALSDTLLRYAASADESDQVLLDIKKLLFEYFLPENSKETSKYTTVQNLWNIPYLPKIFFDYGFENEDSDDDNECAEDIETLCDVEPQYKINQHSLKRRIRYVNYGKYLQMTKNESDRERRYWIHYIKEFVEKNYVDSGRTLSEKNCYASSMMLNCWKEIIRYLCGKYIDIGKAVFHFTNLTAMPKPKDKIIYGQLEEQYKKGISSFDYEAIKAEETLQRDIVQSVVAAAFAFSKSVIDETKMEECQETNKEDILFLSENVLGSLLKENTIKLILRFYGGESSVAQKEYFDQQEIVQEMISHLKSIRNENFHYLDGAKKDNPHKYASILWKNDEMAYQKLTKQRYYANNVGLFYRAEEIQELVQELYSQKNITEAQIPAFRTVLKRKDLPGYMEELGILFPDNTQEKSKGDFEGTLYFLMKEIYYRDFIVKDKAAAYFFKAVDQNKEQSKKEDKHTERAAENFHRYVKSLEKKYNKKEISFGTVCQYIMMEYNQQNTTKQETEIYKHFKMLISLCIRKAFGNYIKETYRFLFHPIYSKQQGEPEYLDTLELESGVKEKNYEWFTLAHFLHPVQLNHLVGDLKSYIQYREDILRRIVFAEQRVYADQQKEVQQKVKTAKEILEVLEFVREVSGRVSNEYTDYYENEEEYAEFLYQYIDFRKREGKSAFESLKYFCQNILDSGTVVDLYADTENPKVLRNIELTRMYAGSNVKIPEYEKITEDEIKMYYQEKNSVALILSRGLCRNEKEQKKVIEFNWKKKRLTLNEITDVFSLVNDLLGKMISFSYLRERDQMYLLLGFYYMALCAENKSENHLGWKGETLDKLESSDSKFDIGGGIVSDSQCF

SEQ ID NO: 1151 - protein, 1161 aa, Artificial; identical to SEQ ID NO: 99
  Synthetic

SEQ ID NO: 1152 - protein, 1330 aa, Artificial
  Synthetic
MKREKNITIMKISKVNHRRMAVALNGDKSELGGILYEAPVQKDKNGNYNDVIAETGKVVNEALDKKSRLYTPFNNQKVIIDKNLQRYANNLKRCYINFVKQYVNNKSFNYKAMQFIPDIQNPKTNDAVNYRTDRDNVYNKNKYYDKQTKSKSKKFIYEKIVIPQNEQNIVISALVNCSLRKSLRKDVSYKTKSGEIKTYNLPELVKKSMRFYCLEGQREPDEKEKYEMYILFSYMKEDKRTKNTDLLVKSISNQNTKVKVEDIDGNKLLKLSIADTKKEPLWEYLIKYADSSRQRELMYDIRKKIVLYVAGIEEYENIKEDSGLSKVSWSKYNISDNKMFFDINSCTDKRKQNLEIKIREANIEHYRNASSKLCDDESIFWFQHFEGVIETLFSKKSKISEERLGCAYICDYLWKDFLSYLAAKYIDLGKGVYHFTMKDKLDMLNKNEAVTDLRFGIVSEKYEKGITSFDYERIKAEEELDRNIAAYVTFAADIFAKSVIKSDYRTKKDNNSDVLQYSDKEFRNSEVIRDNAEKNILQYWGGYSRWGTENSKLPENNKVSDFGKLDVSDLCIDIKKHLAGIRNSSVHYTTKIKNESAADGSNVKILFEKDLADINIIYADKYYSNNVWMFYSLEDINKLIAFLYKEKRVIRQVQIPSFSRILKRKAMQDVINEIFKDDFDENIVNPELKEKYRNSLYFMLKEIYYNAFIIQPELKEKFKDKIKTMKSELYNKLKTIDKKEYKALYCMLSNEESALKNFADRIYSVDGDNVSFADICKILMTDYNMQNQEKKNIESMEQKKKNKGKDENYKHFPLLLHKVLKELFIEYLKQTHELEFLRNNICIKSDVTMESFESQIKGVEIYKDLKEKIDKNNSLLDWYVIAHFLMPKQLNHLIGNIKNYIQFATNIDKRAESVKNLTESGMVKRIQYYDDIVRTLEFSAQYIGKISNNINDYFNSEDEYVSFLSKYVGFINDKSEDVLTELKDFCREKINNGSQIIGIYYGGDNVIINRNVIYAQMYSNAEVFSNIYKKVTKNDIINYYEKQNDLKDVFKRGVCQNEGEQRSLCEFQQLKNRIELTELSTYADMVNDFMAQFVEWAYLRERDLMYFQLGIHYIRLFYSDNVLDEKYHKLSDNVIDIEEGALLYQIVAMYDYELRIFETDNSGNAKRIGQGGPGKSIPVFLKKYCNGTDVYECGLELFEDINQHEHIIRFRNDIAHMRYMSNQAMNIMSIVSNIYKSFFVYDTKLKKSISLVFKNILMRYGVIADLVFSYNNKNQSIKDDMDINIINIKNLKSDKYVYKIVNEDIVKQVEIEIRNQVFLEQLHNLLYFSR

SEQ ID NO: 1153 - protein, 1388 aa, Artificial; identical to SEQ ID NO: 185
  Synthetic

SEQ ID NO: 1154 - protein, 1354 aa, Artificial
  Synthetic
LKWRKNMKLSKVTYRVKDKNAKYKKEYNVRAAVANNSENAGGVLYHVPGVDLIDLREQMLDRDRSVRLLYNIFNHIQTGTKPKKWGNDETLSVDENERKAKEQNIKIMNYKWREACSEYIEKSQSTINSVLFYSYEESGYKTKRMNDNEAIIVKMQYENRLSHFTGGKLEDFVAYTLRNSLVVSRYDNQEFDSVNAMVVFINNIGNGNISDKDKKTICKLADLIRNDFSKLNPNVQSSQGANMVRSVRNQNMVVQPQGDKVSFPLVSDEGKNTVTNKNVEKKGLNEFLLNYANLDDEERMEKLRKLRRIIDVYFSSPSHYQKDMDISLSDNIDKTKFDVWKKHETGKKNTELFVDIPDELLTAETEKIKLDAVLEKKARKRLTDSIRKQNMICYRYTRAVVEKYNSTENLFFENDSINQYWIHHIENAVERILKSCKAETLFKLRRGYLTEKVWKDAINLISIKYIALGKVIYNFTVDDIWKDKKVKNLGSIDEKIKHGITSFDYEMIKAQEALQRELAVNVAFAANNLARAVCDMTNLKDKESDFLIWNKKDIANKLKNKDDMASVSVVLQFFGGKSSWDIDAFREAYKGNKYNYEVCFIDDLRKAVYAARNESFHFKTALVNNDIWNTEFFGKLFIKETEICLDIEKDRFYSNNLPVFYSDNDLKKMLDHLYNNKVSRAAQVPSYNSVMVRKYFPENITSTLKYQKPGYDEDTLEKWYSACYYLLKEIYYNSFLQSDEALALFEESVNNLKGDNKDQELAVKNFRNNYKNIKSSCTSFSQVCQMYMTEYNQQNNQFKKVRSSKDSIVDKPIYQHYKLLLKKVIANAFASYLQHNEELFGFIGKPLKVNCLKEIDKEQFLPEWTSKKYVSLCEEVRKSPELQKWYIVGKFLNSRSLNLMAGSMRSYIQYVNDIKRRADGIGNELHVIAQNLDVVNKWVQVIEVCLLLSSRVSNEFEDYFYDKDDYAAYLKSYVDFDNSDMPSEYSALVEFSDQGKVDLYVDPSNPKVNRNIVQSKLFAADYILRDIIEPVSKDEIEDFYNQKDEITTCKIKGAELTDEEQKKILKYQKLKNRVELRDVVEYGEIINELLGQLINWSFMRERDLLYFQLGFHYNCLRNDSAKPEEYKNLVLDDISIKDAILHQIIGVYVNGVAIYAPGKDKNKLESQCVKGRVGGKIGAFCGYSLYLKLAADTLYNAGLEVFEVLPEHEDIINLRNGIDHFKFYLGGYRSIISLYSEVFDRFFTYDMKYQKNVLNLLQNILLRHNVIIEPIFESGIKKIGKDTKPCAKLSIRSIISDSFEYKIKDGNLIADAKDKRYLETIKKILFYPEVEPEVRILSSKDSFEQNNQYGYMKE

SEQ ID NO: 1155 - protein, 1101 aa, Artificial; identical to SEQ ID NO: 73
  Synthetic

SEQ ID NO: 1156 - protein, 1388 aa, Artificial; identical to SEQ ID NO: 103
  Synthetic

SEQ ID NO: 1157 - protein, 1168 aa, Artificial
  Synthetic
MKVTKVDGISHKKYIEEGKLVKSTSEENRTSERLSELLSIRLDIYIKNPDNASEEENRIRRENLKKFFSNKVLHLKDSVLYLKNRKEKNAVQDKNYSEEDISEYDLKNKNSFSVLKKILLNEDINSEELEIFRKDVEAKLNKINSLKYSFEENKANYQKINENNVEKVGGKSKRNIIYDYYRESAKRNDYINNVQEAFDKLYKKEDIEKLFFLIENSKKHEKYKIREYYHKIIGRKNDKENFAKIIYEEIQNVNSIKELIEKVPDMSELKKSQVFYKYYLDKEELNDKNIKYAFCHFVEIEMSQLLKNYVYKRLSNISNDKIKRIFEYQNLKKLIENKLLNKLDTYVRNCGKYNYYLQVGEIATSDFIARNRQNEAFLRNIIGVSSVAYFSLRNILETENENDITGRMRGKTVKNNKGEEKYVSGEVDKIYNENKQNEVKENLKMFYSYDFNMDNKNEIEDFFANIDEAISSIRHGIVHFNLELEGKDIFAFKNIVPSEISKKMFQNEINEKKLKLKIFRQLNSANVFRYLEKYKILNYLKRTRFEFVNKNIPFVPSFTKLYSRIDDLKNSLGIYWKTPKTNDDNKTKEIIDAQIYLLKNIYYGEFLNYFMSNNGNFFEISREIIELNKNDKRNLKTGFYKLQKFEDIQEKTPKEYLANIQSLYMINAGNQDEEEKDTYIDFIQKIFLKGFMTYLANNGRLSLIYIGSDEETNTSLAEKKQEFDKFLKKYEQNNNIEIPHEINEFVREIKLGKILKYTERLNMFYLILKLLNHKELTNLKGSLEKYQSANKEETFSDELELINLLNLDNNRVTEDFELEANEIGKFLDFNGNKIKDRKELKKFDTKKIYFDGENIIKHRAFYNIKKYGMLNLLEKIADKAKYKISLKELKEYSNKKNEIEKNYTMQQNLHRKYARPKKDEKFNDEDYKEYEKAIGNIQKYTHLKNKVEFNELNLLQGLLLKILHRLVGYTSIWERDLRFRLKGEFPENQYIEEIFNFDNSKNVKYKNGQIVEKYINFYKELYKDDTEKISIYSDKKVKELKKEKKDLYIRNYIAHFNYIPNAEISLLEVLENLRKLLSYDRKLKNAVMKSVMNILKEYGFVVTFKIEKDKKIRIESLKSEEVVHLKKLKLKDNDKKKEPIKTYRNSKELCKLVKVMFEYKMKEKKSEN

SEQ ID NO: 1158 - protein, 1391 aa, Artificial; identical to SEQ ID NO: 274
  Synthetic

SEQ ID NO: 1159 - protein, 1247 aa, Artificial
  Synthetic
MHVMVISLIIVEIGPIEIKANLFQREWSDIVPIVHLYLWKPPWYCLQLLTAFILSLSVRFLMKYVKPYGRSKTVLVEGKKTRLLSRRKKGNEVETSSFDAFYASDPSFVLSRLISEFDKVAAKPRQGELPSKRQFQFRSDLGAEIWEHFKLKPWFTDKPEYWAKLWKTKLHPYGREVKDDPKTAPNRRPAKDERQGRLYKKYFGITPPDQINAASLPSMIEQELFVHGTTGAGDTPGGGVGQRGKITQHARTLSSNAHSLERVKGTAAPWEAMDLEDYKNYGDVAGEIIQALKVKKEKPKSGRSAKPFTPSPAFFASILHDHYARVFQRDEVRPGSNQEPMSIKEVKQNAAYTGLFELHEAICDFYKNAARSRNRQLDSMIVALPKNMDDLFKRLRMRRVNQSLNSMIRLGKVIHYSAASSEDEDSPRDVVKNWPSDIDNSPYWLSEGMAKIKRNEAFVRVWRTAISHAAHGLRTWVAIDGHEVDGLPVDLLLQDGREFISNFFENELFQKQAGFYFGDRAKHFGTNADEREAGLKLMAFTLSRYRNSGFHFNGRGGFVRMLKPQEDQNYQGSDVFLNILNEDVARLEERNKEVLRAVQIETFTKQHELDKIYEEISQGRGSGTLAPRFNRVLQRVKNAWTKEKLPKDIDTKTALRLPDPRNHIDLKNPVLKAQYLALKLVYETGFRHWMTHKVGADLTPWIDQAVKRAHAAMKELNDQNDEFEIVTKIAGLVELGAEDSIEEFHDQLAEKAAAVSPLQSNYSNEQDKMSRQSSHIDDLRTDVFAIAFEDYLKEQGFEFLLTLPKERDTGLGAGAALIDDLPRVDTNPVGWDLYHGRLYAILHLIPAGTVNALAHQLRKWEVLDTRGEALHLKTLETNPEEKDATLRVRELLDLYLTMRDDKFTEGAWIDVGEELREVFDSEETMRRVFPTASAETDEHIPIRGLRELLRTGSHEVLGQIYQKHKITSRDLEKLGAFSKSNVENLHKSYGDLHADWVEKKKEFKEIEKYNDIAQQLDAYRSIRNFVQLNTHLRTYRLMMDVVGRFVDLAGMFERDVYFVMLALIYRAGGDSQNALETVFENEGKGMLKSGRVFAACSHFLEPEDKQHVVLTRLEIFFGKKFWDSGQPESEVGQVNRRPVKARNDFAHFNVLLVQENNKFKTPNLTHLMNRARDMVAYDRKLRNSLSKSISDLLAKSGLQISWNTDKHTLVDAKVSSLEINHLGGMGRTEKLNNAQFVAMVGELFAPE

SEQ ID NO: 1160 - protein, 1000 aa, Artificial
  Synthetic
MALKYRAAVNYLADEVGKTVLGEIREKKVRSCADLYWIEYIDSTVEKLLLKSRNKDGYRYEIGFLSKHIWKEWTQYISGKYIEMGKGVYHFAIPDLSGNLEGEPISICEVKPEYRNGVSGFDYERIRAEESLEREMEKYVLFAVNNFARAVTPEEEREKSGHEDVLLMKTLSEIEESQTKEERQKKHDNNVKNAITLYADADRRILQFFGGQSRFREKEDSLINLYSGEDLYKEIRKELYAIRNITFHYTTKADKDQTQKHDLAEYLFEEEFSDITELFREKYYANNVWKYYDVEVINTIMENIYCGRKYRAAQVPAFKNIISRPELPQVMNGFVKGNSLRRLMNCPDRDVINKYWSALFFVLKELYYYDFLQEQKKPEDNVKERFFRAIEKLSGQENDDKKQKAWESFGNRIDQIGRDRSFGAICQGLMIEYMLQNSDISMVQTETDNGKANNKKQIYKHYRTLLYNCIREAFIEYLREKWEELRTPVLTVKEWSKEEFCRADGLKHLSLFDHLKKTFNDAESGSSWYMAAHFINQKYLNHLLGSIRNYLQFTEDIEDRAISLGDCVDNKREEKNLRYRNTLEILEFVAQFCERTTNVMEDYFESNQEYAEYLSGFVDYNTTKKETDIEKALYSFCKQKFKVDGKEYMAGIYYDGENLIPNRNIIRANMYGNTSCLKPCMDRITLKEIRTMYADQNKLDLVLKEGVCHTEEEQKAYREYQNEKNRIELFDVCTYTQILNDMQARLIGWSYMRERDLMYYQLGYYYTKLFWTDSISEEDARRRLVGNLVNVEDGAILYQILAFNSYNLPIIANKNNTVTLLKDEGSIGGKAITAFFKNYENAEMIYEEALDLFENMDEHAAIINTRNYIEHFKYFIKSDRSMMDLYSEIYDRFFRHDHNRKKNVPDSLKNVLADNFMIVDIDMELGSKKVGEKKKGFREHKAARIEFTDSGIRSTDMTYTIKPDIKDNKKDKKVLVPARSEVFLKQFRKILEYRIQDKIQ

SEQ ID NO: 1161 - protein, 1284 aa, Artificial
  Synthetic
MIIGGINMKLTRRRISQERKNQKLTAAFYRDMDHGLLYVDSEDEDRTEYVVSSMDFERSWRGRILKNGEDNKNPFYEFVKGLVGSNEIICKPITNDNNTDINEKIKKYITEFGRNLKAPGSEVTLEKLILNIQSGTSENEVRPELEKIKDMIKKDIEKRKDELIKSITNNHIPFMLDEDKLVPSTKKMKWLYKFLNGPDKSLNLQMFDEYWTKYGYKNLEEKIIKEINSLPEKNARSISRAVSKTVREYNRNFRINYMVPENENAEADSDYEGFLLFLKAVEQHFKKYYPVKSKDSNEVRDKNLCEEKNYKFYCSYNFVKNEVKRSIINQLVSGLIQQGKLLHYFYKDGIWQQDFLNSYGLSYIQVEESFKKSLMTSLSWGINRLTSFFIDVGTDENEEKTVQNKKQKNNRKIDDILSDKSNLRAIFNDLRSNTELQKHFKEKLAFCYPIFIKVKKEKMFDDIEKLIKLVEEARESVAYLRHRCFHYKDVTITEMLKALNNNTETDKTEDIDYSVAAEYFLRDINNLYDAFREQIRSSGIADYYPADIISGCFKKCGLQFVLYSPQNSLMPSFKNIYKRGSNLYKAYQEEKEQKDKEYKRHNTNIVQEESKELSWYIEVSDTEQGKTAYRNLLQLIYYHAFLPEVRENESLITVYFAKTKEWNRKVAETKAKKKNAGKTYKDKPIRAYRYEAIPDYVGERLDDYFKILQREQMAKAKDVNEGNAENNNYIQFIRDVVVWAFGAYLEERLEKYKKDLQSSHSQKDKKDVNDALKELFPDDKDKRQFFMKCKFTDVLINDVGENNQITEMEDLETSKEQQNREIKRKDLLCFYLFLRLLDEREISGLKHQFVRYRCSLKERRLPDNRKDVDEEIVLLEELEELMELVSYTMPSVPELSGKAESGLDLVISKYFKDFFEKSALKNQDIMKLYYQSDNKTPVFRKYMALLMRSAPLQLYKDMFRNYYIITEKECQEYIKTSQDIDAFQCKLNELHKELEHVRLKSVEDKKGKIFYYLAGSDAERVKEYEDTLSKVVRYKRLQHKLTFESLYTIFKIHVDIAARMVGYTEDWERDMLFLFKSLEYNEKLNEGVVEKIFNNKDEKGHIVKKLKDNLNSEDKEKIGILCWHKEITDKNFVEIIWIRNPIAHLNHFMQTVKNPKRSLEKMINALCVLLSYDRKRQNSVTKTINDLLLNEYHVKIKWKRWVDKNCNIYYYIDEQNIENEPILHIKHLHMGEKCHVNRNADMFDRQKEWLRNGITEEVYDKSMLGCICRLFKFDYNDLYGANRQ

SEQ ID NO: 1162 - protein, 1284 aa, Artificial; identical to SEQ ID NO: 1161
  Synthetic

SEQ ID NO: 1163 - protein, 920 aa, Artificial
  Synthetic
MKLTKVEKARIAVSREKKDSGRIILYTNPEDVKKTSVTTMEQQVSKRIDQANKLYQVFFKSVIPVELNKHFAEISKIAAKCRNTEEFYKKACGYSGYEWTDAKQKKRTSQISRFSYTSSGKNMYVVMDNFVKEYMVQIWQEKDFRNAAVKILCCICDGKKFASKLEKVKKESPDTLKKFIEISGKCEGNPFVDYDTSFLEKVFTLVISQMVKNCDRKSYEQDDKEKIKKSIQKEIQWLSHVQSVTERSFGREGKTYLLFKIRNPYATEERLQTVLIRMRKTLKRGRNRDIAIVLLQGLAQMNQVTFTDTVKHLYQEEEKAFCDFIDAVNRDYYRVNIVKSVRNMDVKVQPDLNDNSILKLSGLGNIKKEALSDTLLRYAASADESDQVLLDIKKLLFEYFLPGNSKETSKYTTVQNLWNIPYLPKIFFDYGFENEDSDDDNECAEDIETLCDVEPQYKINQHSLKRRIRYVNYGKYLQMTKNESDRERRYWIHYIKEFVEKNYVDSGRTLSEKNCYASSMMLNCWKEIIRYLCGKYIDIGKAVFHFTNLTAMPKPKDKIIYGQLEEQYKKGISSFDYEAIKAEETLQRDIVQSVVAAAFAFSKSVIDETKMEECQETNKEDILFLSENVLGSLLKENTIKLILRFYGGESSVAQKEYFDQQEIVQEMISHLKSIRNENFHYLDGAKKDNPHKYASILWKNDEMAYQKLTKQRYYANNVGLFYRAEEIQELVQELYSQKNITEAQIPAFRTVLKRKDLPGYMEELGILFPDNTQEKSKGDFEGTLYFLMKEIYYRDFIVKDKAAAYFFKAVDQNKEQSKKEDKHTERAAENFHRYVKSLEKKYNKKEISFGTVCQYIMMEYNQQNTTKQETEIYKHFKMLISLCIRKAFGNYIKETYRFLFHPIYSKQQGEPEYLDTLELE

SEQ ID NO: 1164 - protein, 1366 aa, Artificial; identical to SEQ ID NO: 809
  Synthetic

SEQ ID NO: 1165 - protein, 1170 aa, Artificial; identical to SEQ ID NO: 911
  Synthetic

SEQ ID NO: 1166 - protein, 1315 aa, Artificial; identical to SEQ ID NO: 751
  Synthetic

SEQ ID NO: 1167 - protein, 1298 aa, Artificial
  Synthetic
MQMKISKIKNSRPGISVTENKNEEQLSRQSLLYYAPVKDGKIRLESKDLEQHVTECNEKAQKLYNVITPEINFYKDENRQKMVENLARNFNAVINNALRSIRNPKEKKERRVEKEVAFILNLSKKSIKLKKNVFVKSTDLIVKFPENNKYNKKNSKGTGSKEAYIQKMISDLVLRKLKNTLRKEVKLENGCRMQMTEITISLMSAICLYGNAESFDPAILKAFFEKVDSDYTKYKYVEQIVKSIESQSAKLKVVEKDGRHLLISANADHRKKKYVFEFMRMYAAADEKEKRELTEHIQDLIGLYLCGKAGYENAENRFSDMIESHNCICGKIEEILNELEKPENLSQQKKENLKNTTVKVMALKYRAAVNYLADEVGKTVLGEIREKKVRSCADLYWIEYIDSTVEKLLLKSRNKKRYRYEIGFLSKHIWKEWTQYISGKYIEIGKGVYHFAIPDLSGALEGESVSICEVKPEYRNGVSGFDYERIRAEESLEREMEKYVLFAVNNFARAVTPEEEREKSGHEDVLLMKTLSEIEESQTKEKRQKKHDNNVKNAITLYADADRRILQFFGGQSRFREKEDSLINLYSGEDLYKEIRKELYAIRNITFHYTTKAEKDQTQKHDLAEYLFEEEFSDITELFREKYYANNVWKYYDAEVINTIMENIYCGRKYRAAQVPAFKNIISRPELPQVMNGFVKGNSLRRLMNCPDRDVINKYWSALFFVLKELYYYDFLQEQKRPEDNVKERFFRAIKKLSGQEKGDKEQKAWESFENRIDQIGRDRSFGAICQGLMIEYMLQNSDISMVQTETDNGKANNKKQIYKHYRTLLYNCISEAFIEYLREKWKELRTPVLTAKEWSKEEFCRVDGLKHLSLFDHLKETFNDAESGSSWYMAAHFINQKYLNHLLGSIRNYLQFTEDIEDRAISLGDCVDNKREEKNLRYRNTLEILEFVAQFCERTTNVMEDYFESNQEYAEYLSGFVDYNTTKKETDIEKALYSFCKQKFKVDGKEYMAGIYYDGENLIPNRNIIRANMYGNTSCLKPCMDRITLKEIRTMYADQNKLDMVLKEGVCHTEEEQKAYREYQNEKNRIELFDVCTYTQILNDMQARLIGWSYMRERDLMYYQLGYYYTKLFWTDSISEEDARRRLVGNLVNVEDGAILYQILAFNSYNLPIIANKNNTVTLLKDEGSIGGKAITAFFKNYENAEMIYEEALDLFENMDEHAAIINTRNYIEHFKYFIKSDRSMMDLYSEIYDRFFRHDHNRKKNVPDSLKNVLADNFMIVDIDMELGSKKVGEKKKGFR

SEQ ID NO: 1168 - protein, 1104 aa, Artificial; identical to SEQ ID NO: 697
  Synthetic

SEQ ID NO: 1169 - protein, 1032 aa, Artificial
  Synthetic
MKVTKAEKLRVAVSRKLNNEDKRAVLYKTPNPGQTCGTVKKQLANRVERANKLYGVFFRSDVPETLQYHFEELVTYAAQSTSPNEFRQKASQYRECEKKDKFGKMRKYPIFRCSYAPSGKNMKKVMELYVRERMKDEWQSQAYRTAAIEILLCICNKDFSKQLSRVDARIFADFYNASKACPQPYIGKSTGVLEAAFTSVMKQMSLHAKANASNKIWWLQNQLRTIELNKKIVKISDFKYEYATEDRMRAILVRMRKSLKRGTNGDIAVALLQGIAQMNGKTLSGVLEELSANSETKEQLIKFLKAVHEDYHKTPILKAIRNQDVKVQVHEVDPVSPEGRALDLASINVSKGNERKKYKVALTQTLGNYAKSPKDATQTLKAIKGVLLDYFMWLDSDVKAEFLEDNNLWKIPNRTEEYFDNNFVPIDDKKDDKIEAIEDFASIWRQERVKNSRIKARMNYVNCGKYQQLIKQETDDFRICWISYAKDFVEKNYVSKNRQFTQGDCFSTKMLLECWKEIIRFICGKYIDIGKAVYHFAMPETMNARDSLAYGVLGEKYKEGISSFDYEAIKAEETLQRDIAKAAVAAIHAFSGSVIDDKKPVEDILFIKDEELQEHAKADDVIVKQILRFYGGFSSVEGREKLEGMALAKEVLSQLKAIRNENFHFTQGKRKNVEENIPLTKALWENEEKVYRQTVKETYYSNNVSMFYSQEVIQKLVAELYQNNNVAEAQIPAFRTIWKRKDLPEYIGSLNISWDKTEPKQVIYEGALYFLLKEIYYRDFIKSGEAKKLFFDAVMDNATEMEKSSNADSRNQEKKALANAGKNFRDYVNGLNASTLGEVCQFIQNEYNQQNRGKQEQEIYKHFKMLLPICMRKAFQRYIDEKHSFIKKPGELPQTTEDYLENVKVACPEKKIKLGRWFTFAHFIHPRELNFLIGDFKNYIQYREDVLRRSEHAGQFSDTTERDGEKAVVDHAVQKAKDILGVLEFVRHISGRVSNEFTDYYADRAEYDEYMAKYFEPDVQIEQYDLYGDAKN

SEQ ID NO: 1170 - protein, 1298 aa, Artificial; identical to SEQ ID NO: 967
  Synthetic

SEQ ID NO: 1171 - protein, 1025 aa, Artificial
  Synthetic
MLSFLSGKYIATGKAVWHFAMKEGIEDETKDLNLSRIREDVRRGLTSFDYEQIKAEEVLQRDMAVYVAFASNHLSSATVDLSILDGEEGKEDFLLLKREDLEKSRRPYLRRNLLQFFGGESTWQDFSFEKYYQEYSSANSTQYDDLSLLSDLQQIVYAARNESFHFDTRRRNPGNWNQSLISAMFAHDCKTASTLQKEKFYSNNLPMFYGEKDLLDLLRVLYGKQTARASQVPSFNKVVVRRNFSNFISDNLNWKNINFTGEGSVALKEQFDSALYYLLKEIYYNLFLQGRGSGAAFDVKGEFIKWCLDEKNGKQNAEAFKSFKSRVEEIISSKKDITLPEICQRIMTDYNLYNNGTRKVKSDSVKQNMPDSYDHFKMLLLKGLREVFASYICAEFAVLKNPRYREKPDADAFLPDYSSPTYSTLIERVKGNPELQKWYVVGRLLNPRQANFFVGVLRQYIQYTGQIRRRAVETGSRMVDTASAKALKGYANVLEVCIQLAGMTTNCLTDYFDDKDDYARHISRYLDFEGIYPGISISAQLENFCNENATDIDQSGVAGSNSANESGSDELKRLGVFYDAENPILNRNILLSKIYGTEKILVNIEKNRKITRDEIRAFYEQREKIGDYRLTGKCSTEEQQRALKKYQEIKNRVEFRDLVEYEEIVDEMQAQMIDWCYLRERDLMYFQLGFHYMCLCNSSSKAELYRGIEKDGRKIDGAILYQIAAMYINGLPIYAVEKGKIKRKSESMSAGGKIRVFLNYAGACVEQAASSKEAEAPISADAAERFYLAGMELFENTQEHDNIVALRNYIEHFHYYVHQDRSLLDLYGEIFDRFFTYDMKYQKNVCNILYNILMHHFVRPAFTFSKAEKQVGKITKDRASISLVEKKGLSSEKMTYKLASPNKKQQGNTSSADIGSAEEAKKMDLPAKSRDFLEGVAVLLSYPDEPGDVVSEERHNNRQSYTTTKTEENDNSRGKDQRRNNSGTQETNWKGRGANADNRPSGGQGKSGSFGTSLADLLKDFKFDE

SEQ ID NO: 1172 - protein, 1227 aa, Artificial
  Synthetic
MVVSTKYVVDDVVRNSSRLYSPFNSKKLIIDDKTKVVANSLRQHFKNFVKIYLNCESIDEQQMKFTPDNKYLMDNRVRISLPSDVNEEKLVEAIVNSSLRKSLNKKCNIQIKAGLRETFDIPELIKKAIKIYCIDEKRNLNDAEKLDMYALFSFMYEDKYKNRQKKLIINSISNQVTKVKVCENGNRLLKLSIADTKKKPLWDFMIEYSNSDKKKQDTMLRNIRKSIVLFVCGVENYKNIENDNKLDICSWDGYDINENQQFVCVNTNNSNDDYFISSTELRRANLDHYMKAVAKLNDDRNKFWFQHFESVIETFFSKKAKRNIERIKSAYLCEYLWRDFCSYVALKYVDLGKGVYHFTMADKLALINRNKYEKSIIFGEIESRYNNGISSFDYERIKAEELFERNISTYTTFATNIFSKAVVQDDYIKNHNKASDVLQYSDKEFSDSKVLRNDAMKRILQYWGGQSRWNNTLNKINVDTLCIDIKEHLSNIRNSSVHYTSKVSLSGDKNESIVYMLFKKDFAEIRNIFASKYYSNNVWMFYSIEKINGLMEYLYGDNSTVIDAQIPAYNNIIKRKNIADVIEKIIKKNSYKTINELELIKKYRACLYFILKEIYYNRFIKQENLKEQFIQFVDNDNNLLDDNKNAVESFRRRIHDIDNSLMSFGEMCQFIMTDYNMQNQGNKSIKSKDRQNEDKKKGIDGSYKHFPLLLYHVIKELFLKYIKTDEKIVFIREPANIGSVKTQDEFETHISTLGLYKTLKEKVDSNMSLLDWYTLSHFLMPKQLNYLIGDIKNYIQYLRNIDKRAESVGNNKAYDIDGKINNYYDIVYVLDFSLQYIGRISNEITDYFADEDEYALFMSQFVDFSSDNIVGLKTFCNEKTSNGKHTIGLYCDGANPIMNRNIAYAKMYSNDKILSRTYSKVTIKEIERYYRIQDDLKNVFENGVCKNKDQQKELCDFQKIKNHIELTEISIYTNILNDFMSQFISWSYLRERDLMYFQLGMHYLRLYYGTNELETKYNKLVGESVNIEKGALLYQIAAMYTYKLPIYKVDKNGSAVLAEKQGGTGASVTSFVTEYCKENMRDAIIYEKGLELFEDVKQHKKWSDFRNDIAHMRYISDRDKSIMDIISEIYGGFFTYDIKLKKSIPVIFKNILMRYAVDANLNFLHKENRKLKDTLINIRADKGLVSDKYTYKIGEKDTVDIEVRNDKFLLQLRKLLEYKIRVNGNVL

SEQ ID NO: 1173 - protein, 1360 aa, Artificial; identical to SEQ ID NO: 101
  Synthetic

SEQ ID NO: 1174 - protein, 1360 aa, Artificial; identical to SEQ ID NO: 101
  Synthetic

SEQ ID NO: 1175 - protein, 1382 aa, Artificial; identical to SEQ ID NO: 166
  Synthetic

SEQ ID NO: 1176 - protein, 1353 aa, Artificial; identical to SEQ ID NO: 188
  Synthetic

SEQ ID NO: 1177 - protein, 1385 aa, Artificial; identical to SEQ ID NO: 670
  Synthetic

SEQ ID NO: 1178 - protein, 1197 aa, Artificial; identical to SEQ ID NO: 1112
  Synthetic

SEQ ID NO: 1179 - protein, 1184 aa, Artificial; identical to SEQ ID NO: 874
  Synthetic

SEQ ID NO: 1180 - protein, 1105 aa, Artificial
  Synthetic
MEKDNNLIMLGYKLKKNIKEDEYPYLYKNKNKQKSTPLYTLLKKLIEKNKNSNQNIRESEEYEKIQKDFKEYKNIKINLLVKSILNNKVNIKYNTSNNNIEESNSKREKEIIEFFKKMIEEKNKSILKDKLKLFRLEVFFDEEFLEEIKKLLDNDNLDKSDNKKIAELRGKIFSRIREKIKEDKNRDILKNIYFLELKKYIENNLSHKKENNKKNNNIGEEKSKELYLKFLKKVLFIDDNNRISIEKLKSRIDDNFKNLLIQHVIEYGKIKYYVENDDYIKNIVKNGELKLETENLEYIRVRETLIRKMAVLVSFAANSFYNLFENITSDILTANINLDSDVIKIGNNRLKEKFLNYFFYSEEISDKEDFLKALKDSIYNVRNGVNHFDKMILGKYNNRLDLKDSNTIKDYFNFKKKEIKQDLKDRFISNNLQYYYTENEIKKYFEKYKFEILKTKASFAPNFKRILRKGENLSISEISDIYDFFKRYSENSDKSSEYNEFTKTRNFLLKELYYNNFYREFLSDRTKFEEAVKKVKNNKKNRIIDNRKSAGKSYDVIEDYNSSDDVLEYISRIHKSEMERIEVNTEKNRKDTSKYIRDFIEEVFLEGFIKYLDNNNFNFLKNRNKADKERKEIVRNLNIKIEGLDILNQNDSEILNLYLFFNMIDNKRISEFRNEMIKYKQFLTKRQNIKSKFLEIDIEKIEAIIEFVIITRGKLEILEGETKEQKKDNMNALFNKFYSSESEYDESLKKFIEETVLNDKKNTPFYSTDGKTPIVHSNLEKMRKYGTENFLSKVLKDEKYTLDNMKIKEKFETKVNDKFKEQKILEKVDKIKGNEKHKKLIEYYNDCRCYLHGEWIENKKNKEEFEYKEIYEKIIEEIRKYNYLENKEKLQNVYLLHEITSDLMARNVAFINKWERDFKFLSIAIKENLKDSNDIQKIEEFLNPSLDTTSDEEHFNVKNYASKLKNIQGLHNNIISLIFIKNLDGWNNKIDNFKWLGFRNYISHFNHINGENSKESFINQLNRLVLLFSYDKKVQNHITKSIKTILEKYNIDIEFKISDDSKNFFEYQISNINSKKGKMLGKENYFELLDKEFVQNVKKMLEYED

SEQ ID NO: 1181 - protein, 1228 aa, Artificial
  Synthetic
MKVSKVNHRRAAVAVNKKSVTVNGILYDAPVKKNVKTGNMSAYVSSKYVIDNVVKNSSRLYSPFSSKRIVIDREKIRIADRLKQCYVNFVKYYLSNGSLNEQQMRFNPNNTYMADSRVHFCVPSGIDIESLINSIVDSSLRKSLKRTYRFETNYGEKNTFNLPDLVKKSIKIYCTDEKRKLNDREEQEMYVLFSYMYEDKYKDRQKVLIANSISNQATKVKVCDDESRLIKLSIADTKKKPLWDFIVDYANSDKNGQYTILRNIRKSIVLFVCGVDVYRNIENNDNLDIWKWEEYGIQESQLFVKIENCYTTKGEDIALNEIRNVNLDHYMKAIGVLDDERSKFWFQHYENTIEALFSKKSKRKIERIKTAYLCEYLWKNFCSYVALKYVDLGKGVYHFTMSDKLSLMNKNTNENGIKFGEVDSRFNKGISSFDYERIKAEETIDRNISTYTTFATNIFAKSVIKDSYRQKKAGNSDALQYDDETYKNRLSKIRNSGVHYTSTSALKGNDDDSIVGMLIKKDFDDIKDVYASKYYSNNVWMFYNTDKISKMMEYLYQDDSNIRDAQIPAFNSVIKRKDMAEVIEKIVKKNSYKTIKEPYQREKYRSCLYFMLKEIYYNRFIKQDNLKDQVIQIIDSNTELIGDNSRAVDNLKKRIHDVDSQTMSFGELCQVIMTDYNMQNQENKSIKSKERQDKDRKNGIDNSYKHFPLLLHHLIKVSFLKFIKTDEKLAFIREPRITEWDKTLEQFEAQIQTVDIYNSLKMMVAENKSLLDWYTLAHFLMPKQLNHLIGDVKNYIQYLSNIDKRAGSVKNNKSASTEVKIRQYSEIVRILDFSLQYIGRVSNDVTDYFVDEDEYAAFLSKYVEFSGNDIVSMKAFCQSRTANGKHTIGLYCDGANPIMNRNIAYAKMYGNDEILSYIYNKVTKKDIEKYYVSQDNLEKVFADGKCQDVQQQNALCDFQKMKNHIELTEVSIYTDILNDFMAQFISWAYLRERDLMYFQLGLNYIRMFYGTYELEEKYYKLHGENINIEKGALLYQIVAMYSHELPIYKVDESGIAILAEKQGSSGASIKSFVTEYCKEEMKKAYTYENGLELFEDVNQHDDLSKLRNDFAHMRYMSARDKSIMDIVSEIYNGFFIYDTKLKKSVSFIFKNILMRYAVDVNIEFCHKGDNEDTNNLIRIKDEVGLYSDKYTYKVEDNDTVDIEVRNSEFLEQLKKLLEYKKESEGSEL

SEQ ID NO: 1182 - protein, 1237 aa, Artificial
  Synthetic
LKWDKLRSKRTYFRCEWGNIAPMDHLYVWKPPWYCLQLTTAFILSLSVRFLMKYVKPYGRSKTVLVEGKKTRLLSRRKKGNEVETSSFDAFYASDPSFVLSRLISEFDKVAAKPRQGELPSKRQFQFRSDLGAEIWEHFKLKPWFTDKPEYWAKLWKTKLHPYGREVKDDPKTAPNRRPAKDERQGRLYKKYFGITPPDQINAASLPSMIEQELFVHGTTGAGDTPGGGVGQRGKITQHARTLSSNAHSLERVKGTAAPWEAMDLEDYKNYGDVAGEIIQALKVKKEKPKSGRSAKPFTPSPAFFASILHDHYARVFQRDEVRPGSNQEPMSIKEVKQNAAYTGLFELHEAICDFYKNAARSRNRQLDSMIVALPKNMDDLFKRLRMRRVNQSLNSMIRLGKVIHYSAASSEDEDSPRDVVKNWPSDIDNSPYWLSEGMAKIKRNEAFVRVWRTAISHAAHGLRTWVAIDGHEVDGLPVDLLLQDGREFISDFFENELFQKQAGFYFGDRAKHFGTNADEREAGLKLMAFTLSRYRNSGFHFNGRGGFVRMLKPQEDQNYQGSDVFLNILNEDVARLEERNKEVLRAVQIKTFTKQHELDKIYEEISQGRGSGTLAPRFNRVLQRVKNAWTKEKLPKDIDTKTALRLPDPRNHIDLKNPVLKAQYLALKLVYETGFRHWMTHKVGADLTPWIDQAVKRAHAAMKELNDQNDEFEIVTKIAGLVELGAEDSIEEFHDQLAEKAAAVSPLQSNYSNEQDKMSRQSSHIDDLRTDVFAIAFEDYLKEQGFEFLLTLPKERDTGLGAGAALIDDLPRVDTNPVGWDLYHGRLYAILHLIPAGTVNALAHQLRKWEVLDTRGEALHLKTLETNPEEKDATLRVRELLDLYLTMRDDKFTEGAWIDVGEELREVFDSEETMRRVFPTASAETDEHIPIRGLRELLRTGSHEVLGQIYQKHKITSRDLEKLGAFSKSNVENLHKSYGDLHADWVEKKKEFKEIEKYNDIAQQLDAYRSIRNFVQLNTHLRTYRLMMDVVGRFVDLAGMFERDVYFVMLALIYRAGGDSQNALETVFENEGKGMLKSGRVFAACSHFLEPEDKQHVVLTRLEIFFGKKFWDSGQPESEVGQVNRRPVKARNDFAHFNVLLVQENNKFKTPNLTHLMNRARDMVAYDRKLRNSLSKSISDLLAKSGLQISWNTDKHTLVDAKVSSLEINHLGGMGRTEKLNNAQFVAMVGELFAPE

SEQ ID NO: 1183 - protein, 1385 aa, Artificial; identical to SEQ ID NO: 670
  Synthetic

SEQ ID NO: 1184 - protein, 1385 aa, Artificial; identical to SEQ ID NO: 670
  Synthetic

SEQ ID NO: 1185 - protein, 1385 aa, Artificial; identical to SEQ ID NO: 670
  Synthetic

SEQ ID NO: 1186 - protein, 1104 aa, Artificial; identical to SEQ ID NO: 697
  Synthetic

SEQ ID NO: 1187 - protein, 1385 aa, Artificial
  Synthetic
MKLSKEKHIRSAVANEEQNIGGVLYHVPGTDTIDLKDQMLIRDRDVKQLYKVFNQIQVGNKPKKWKKDEKLSPEENERRAQQKNIKMKNYKWREACTEYVESSQRTINDVLFYSYMEADKKIRNMRKNEDILKKMQEVTKLPKFSGGKLEDFVAYTLRKSLVVSKNSTQEFDSVAAMVVFLECIGKSNISDHEKEIVYKLLELIRKDFSKLDPNVKDSQGANIVRSVRNQNMIVQPQGDRFLFPQVSDKEKKTVTNKNVEKEGLNEFLLNYANLDDEKRAEILRKLRRILDVYFSAPNHYEKDMEITLSDNIDKEKFNVWKKYECGKKVTGLFVNIPDVLMEAEAENIKLDAVVEKRERKILADRVRRQNIICYRYTRAVVEKYNSNESLFFENDAINQYWIHHIENAVERILKNCKAGKLFKLRKGYLAEKVWKDAINLISIKYIALGKAVYNFALDDIWKDKKDKKDKELGIVDERIRNGITSFDYEMIKAYENLQRELAVDIAFSVNNLARAVCDMSNLKDRESDFLLWKKEDIADKLKNKDDMASVSAVLQFFGGKSSWDINIFKEAYKGKNKYNYEVRFIDDLRKAIYCARNENFHFKTALVNNEKWNTELFGKIFERETEFCLNVEKDRFYSNNLYMFYPVSELRNMLDQLYSRSVSRAAQVPSYNSVFIRKNFPEDITNVLRYQKPGYDADTLGKWYSACYYLLKEIYYNSFLQSDKALQLFEKSVKTLSWDDEEQKRAVDNFKNHFSDIKSACTSLAQVCQIYMTEYNQQNNQIKKVRSSNDSIFDKPIYQHYKVLLKKAIANAFAAYLKYNKNLFGFIGKPFKANEIREIDKEQFLPDWTSTKYESLCIEVSGSQELQKWYIVGKFLNARSLNLMAGSMRSYIQYVTDIKRRAASIGNELHVSVQDVEKVEKWVQVIEVCSLLAFRTSNQFEDYFNDKDDYARYLKSYVDFSNADMPSEYSALVDFSNEEQSDLYVDPKNPKVNRNIVHSKLFAADHILRDIVEPVSKGDIEEFYDQKAEIVYCKIKGKDITAEEQKAVLKYQKLKNRVELRDIVEYGEIINELLGQLINWSFMRERDLLYFQIGFHYNCLRNDSKKPEEYEKIEIDENSIKGAILYQIIGMYVNGVAVYAPEKGGNKLKEQCVKGGVGVKVDAFKRYSEHLGLHKETLYNAGLEIFEIIEEHEDVINLRNSIDHFKYYLGKYRSMLSIYSEVFDRFFTYDMKYQKNVLYLLQNILLRHNVIVEPVFESGVKTIGDQTKPCAKLSIKSIKSAAFEYKVKGGTLVTDAKDERYLETIRKILYYADDEDSNAKKPAIVTNADKYEKNKESDDQNKQKEKKNKDNKGKKNEETKSDAGKNNNERLSYNPFANLNFKLSN

SEQ ID NO: 1188 - protein, 1373 aa, Artificial; identical to SEQ ID NO: 104
  Synthetic

SEQ ID NO: 1189 - protein, 1360 aa, Artificial; identical to SEQ ID NO: 101
  Synthetic

SEQ ID NO: 1190 - protein, 1184 aa, Artificial; identical to SEQ ID NO: 874
  Synthetic

SEQ ID NO: 1191 - protein, 949 aa, Artificial; identical to SEQ ID NO: 43
  Synthetic

SEQ ID NO: 1192 - protein, 1101 aa, Artificial; identical to SEQ ID NO: 73
  Synthetic

SEQ ID NO: 1193 - protein, 1184 aa, Artificial; identical to SEQ ID NO: 874
  Synthetic

SEQ ID NO: 1194 - protein, 1425 aa, Artificial; identical to SEQ ID NO: 3
  Synthetic

SEQ ID NO: 1195 - protein, 1161 aa, Artificial; identical to SEQ ID NO: 458
  Synthetic

SEQ ID NO: 1196 - protein, 1177 aa, Artificial; identical to SEQ ID NO: 457
  Synthetic

SEQ ID NO: 1197 - protein, 1381 aa, Artificial
  Synthetic
MGNLFGHKRWYEVSDRGDNKIKRKVKVKRNYDGNKYILNINENNNKEKIDNNKFIREFVNYKKNDNVLIEFKRKFHAGNILFKLKGNKRSIEDTNGFLKTEEIILDKEVYGQSEKLRNEKGITKQDILKEIIDKGIDKSNDKILVKTKFGKEITINFTDEDKKNKNEYQITLKIIPENELKIKREVYDVFKIINMDLYQIIKEIIENEVEKVFKNRYYEEYLKEKLLEDNQINVILTNFMEIREKIKSNLEIMGFVKFYLNVGGDKKKSENKKMFVEKILNINVDLTEEDIVDFIVKELKFWNITKRIEKVKEFNNKSLENRRNRTYIKSYVLLDKHEKFKRDRENKKDIIVKSFIKDIKNNTMEQKINQILRKFKIKELTKKLEKNTENKNFDTEIFGIFKKHYKVNFDSKKFSNKSDEEKELYKIIYRYLKGRIEKILINEQKVRLKKMEKIEIEKILNESILSEKVLKRVKQYTLEHVMYLGKLIHNDVNMTTVNTDDFTKLHAKEELDLELITFFASTNMELNKIFNGKEKITDFFGFNLNGQKITLKEKVPNFKLNILKKLNFINNENNIDEKLSHFYSFQKEGYLLRNRILHNSYGNIQETKNLEGEYENVENLIKELKVNDEEISKSLNLDIIFEGKVDIINKINSLEIGEYKDKKYLLSFSKIVPEIMRKFREINKDKSFDIESEKIILNAVQYVNKILYEKITSNEENEFIKTLPDKLVKKNNNKENKNSLSIEEYYKNAQISSSKGDKKAIKKYQNKVTNAYIEYLENTFAEVIDFSNFNLNFDEIKTKIEERKYSKSKITVDSISTNINITNDIEYIISIFALLNSNTYINKIRNRFFATSVWLEKQNSTKEYDYKNIISILDEVLLTNLLRENNITDILDLKNAIIDAKIVENDEAYIKNYIFESNEEKLKKRLFCEELIDKEDIRKIFEDKNFKFKNFIKKTGNENFTIDFDILFNLECNSELNAKKVIGQNSQRLNLFIKNTIDEYKSKIKTSFSSEFLGKYKKEIDNLVEDTESENKNKFEKIYYPEEHKNELYIYKKNLFLNIGNPNFDKIYGLISKDIKNVDTKILFDDDIRKNKISEIDAILKNLNDKLNGYSNDYKAKYVNKLKENDDFFAKNIQNENYSSFGEFEKDYNKVSEYKKIRDLVEFNYLNKIESYLIDINWKLAIQMARFERDMHYIVNGLRELGIIKLNGYNTGISRAYPKRNGSGDFYTTTAYYKFFDEESYKKFEKICYKFGIDLSENSEINKPENESIRNYISHFYIVRNPFVDYSIAEQIDRVSNLLSYSTRYNNSTYASVFEVFKKDVDLDYDELKKKFKLIGNNDILERLMKPKKVSVLELESYNSNYVKNLIIKLLTKRKNTNDTL

SEQ ID NO: 1198 - protein, 1155 aa, Artificial
  Synthetic
MKVTKVDGISHKKYIEEGKLVKSTSEENRTSERLSELLSIRLDIYIKNPDNASEEENRIRRENLKEFFSNKVLHLKDSVLYLKNRNEKNTVQDKNYSEEDISEYDLKNKNSFSVLKKILLNEDINSEELEIFRKDVEAKLNKINSLKYSFEENKANYQKINENNVEKVGGKSKRNIIYDYYRESAKRNDYINNVQEAFDKLYRKEDIEKLFFLIENSKKHEKYKIRECYHKIIGRKNDKENFAKIIYEEIQNVNNIKELIEKVPDMSELKKSQVFYKYYLDKEELNDKNIKYAFCHFVEIEMSQLLKNYVYKRLSNISNDKIKRIFEYQNLKKLIENKLLNKLDTYVRNCGKYNYYLQVGEIATSDFIARNRQNEAFLRNIIGVSSVAYFSLRNILETENENDITGRMRGKTVKNNKGEEKYVSGEIDKIYNENKQNEVKENLKMFYSYDFNLDNKNEIEDFFANIDEAISSIRHGIVHFNLELEGKDIFAFKNIAPSEISKKIFQNEINEKKLKLKIFRQLNSANVFNFYEKDVIIKYLKNTKFNFVNKNIPFVPSFTKLYNKIDDLRNTLKFSWKIPKDKEEKDAQIYLLKNICYGEFLNKFVKNSKDFFKITDEVIKINKQRNQKTGYYKYQKFENIEKTVPVEYLAIIQSRDMINNQDKEEKNTYIDFVQQIFLKGFIDYLNKNNLKYIENNNNNNDIFSRIKIKKDSKERYDKILKNYEKNNRNKEIPHEINEFVREIKLGKILKYTESLNMFYLILKLLNHKELTNLKGSLEKYQSANKEEAFSDQLELINLLNLDNNRVTEDFELEADEIGKFLDFNGNKIKDRKELKKFDTNKIYFDGENIIKHRAFYNIKKYGMLNLLEKIADKAKYKISLKELKEYSNKKNEIEKNYTMQQNLHRKYARPKKDEKFNDEDYKEYEKAIGNIQKYTHLKNKVEFNELNLLQGLLLKILHRLVGYTSIWERDLRFRLKGEFPENQYIEEIFNFDNSKNVKYKSGQIVEKYINFYKELYKDNVEKRSIYSDKKVKKLKQEKKDLYIRNYIAHFNYIPHAEISLLEVLENLRKLLSYDRKLKNAVMKSVVNILKEYGFVAKFKIGADKKIGIQTLESEKIVHLKNLKKKKLMTDRNSKELCELVKVMFEYKMEEKKSEN

SEQ ID NO: 1199 - protein, 1432 aa, Artificial; identical to SEQ ID NO: 494
  Synthetic

SEQ ID NO: 1200 - protein, 1186 aa, Artificial
  Synthetic
MRGGHMKITKIDGISHYKKQDKGVLREKISKEDLIEKKQRDIIERRYNKQIESKIYKEFFRLKGSKRITEEKDKSIKSLYYLIKELYEGKENNLWELKNINLEILDDKESVIKGYKFKENVYFFKEGDKEYHLRTLFNNLIEKIQNENREKVRKNKEFLDLKEIFKKYKDRKIYLLLKSINNNKINIEYKKENANEEIYGINPTNDREKIFYELLKEIIEKKGEPKSILEEKLNDFDITNFLENIEKIFNEEIEVNIIKGKVLNELREYIKEKEENNSDNKLKKIYNLELKKYIENNFSYKKQKSKSKNGKNDDLYLNFLKKIMFIKEVDEKKKINKEKFKNKINSNFKNLFVQHILDYGKLLYYKENDKYIKNTGQLETKDLEYIKTKETLIRKMAVLVSFATNSYYNLFGKIENNIPTQGISDDLLLGKVESDIYINGERNRRYVFKEKMLNYFFKFEIFNDNKMVDILNSISSSIYNIRNGVNHFDKINLGQYNNLDLSEIKKYFIEKRNKIKEKVKEKFLSNNLQYYYAKEEIENYFKVYEFEILKEKIPFSPNFKRIIKKGEDLFNNKNNKKYEYFKNFDKNNDDEKKEFLRTRNFLLKELYYNNFYKEFFSERKKYEFKKIITEVKEEKKNRGNTNSKKSGVSFQSIDDYNTKISISDYIASIHKKEMERVEKYNEEKQKDTAKYIRDFVEEIFLTGFINYLEKDKRLHFLKEEFSILYNNNNNVIDFNVNINEKKIKEFLKENDSKTLNLYLFFNMIDSKRISEFRNELIKYKQFTKKRLNKEKEFLGIKIELYETLIEFVILTREKLYTEKSEETDAWLVDKLYIKDNNGYKEYEEILNLFVDEKILSLKEAPYYATDNKTPIILSNFEKTRKYGTQSLLSEIQSKYKYSKVEKENIEDHNKKEEIEKKEKSNIEELYDLKAELHKKWEKNKITENETKEYINIIKKIRKYSYLKNKEELQNVYLLHEILSDLLARNVAFFNKWERDFKFIVIAIKQFLRENDKQKVDEFLNPHKLDGSRDNFSVTNYRSKMKSVIDNIHENFMSLLFLNNNLATGGIQVGRNNNFTWGHLRNYIAHFEYLHKEKETMSFINQANLLIKLFSYDKKVQNHIIKSMKTLLEKYNIEIGFEVSNDNEEIFEYKIKYINSKKGKILGKNNKFEILEDEFLENVKTLLEYSK

SEQ ID NO: 1201 - protein, 1161 aa, Artificial
  Synthetic
MKVTKVDGISHKKYIEEGKLVKSTSEENRTSERLSELLSIRLDIYIKNPDNASEEENRIRRENLKKFFSNKVLHLKDSVLYLKNRKEKNGVQDKNYSEEDISEYDLKNKNSFSVLKKILLNGDINSEELEIFRKDVEAKLNKINSLKYSFEENKANYQKINENNVEKVGGKSKRNIIYDYYRESAKRNDYINNVQEAFDKLYKKEDIEKLFFLIENSKKHEKYKIREYYHKIIGRKNDKENFAKIIYEEIQNVNSIKELIEKVPDMSELKKSQVFYKYYLDKEELNDENIKYAFCHFVEIEMSKLLKNYVYKKPSNISNDKVKRIFEYQSLKKLIENKLLNKLDTYVRNCGKYNYYLQDGEIATSDFIARNRQNEAFLRNIIGVSSVAYFSLRNILETENENDITGRMRGKTVKNNKGEEKYVSGEVDKIYNENKQNEVKENLKMFYSYDFNMDNKNEIEDFFANIDEAISSIRHGIVHFNLELEGKDIFAFKNIAPSEISKKMFQNEINEKKLKLKIFRQLNSANVFRYLEKYKILNYLKRTRFEFVNKNIPFVPSFTKLYSRIDDLKNSLGIYWKTPKTNDDNKTKEITDAQIYLLKNIYYGEFLNYFMSNNGNFFEISREIIELNKNDKRNLKTGFYKLQKFEDIQEKTPKEYLANIQSLYMINAGNQDEEEKDTYIDFIQKIFLKGFMTYLANNGRLSLIYIGSDEETNTSLAEKKQEFDKFLKKYEQNNNIEIPHEINEFVREIKLGKILKYTESLNMFYLILKLLNHKELTNLKGSLEKYQSANKEEAFSDQLELINLLNLDNNRVTEDFELEVNEIGKFLDFNGNKIKDRKELKKFDTNKIYFDGENIIKHRAFYNIKKYGMLNLLEKISDEAKYKISIEELKNYSNKKNEIEKNHTTQENLHRKYARPRKDEKFTDEDYKKYEKAIRNIQQYTHLKNKVEFNELNLLQSLLLRILHRLVGYTSIWERDLRFRLKGEFPENQYIDEIFNFDNSKNVKYKNGQIVEKYISFYKELYKDDTEKISIYSDKKVKELKKEKKDLYIRNYIAHFNYIPNAEISLLEVLENLRKLLSYDRKLKNAVMKSVVDILKEYGFVATFKIGADKKIGIQTLESEKIVHLKNLKKKKLMTDRNSEELCELVKVMFEYKMKEKKSEN

SEQ ID NO: 1202 - protein, 1174 aa, Artificial
  Synthetic
MGSGKYRITKIARKWDKNWEKIILKRIVGDKKIKYVNENNNKDVDITDTYYNILSKNNSKFLGSKEQFIFKVNKMKRNIKNDCVIIKDYTEEEFEKFEENNNKIFKKSIIVKEQGKDVEKEKICRNFYKDEREIMKKRLKEAKNFSNIIFNICNKIFKLEYLDYTDEKVYEIFQNEIKVKDVKNLKEAFKQQEKGLETDKLLAISFNKKRNNILLEFIQQIAKQEFENQKELENWFSYGGEKYCKEIFKIYSNMSQKEKYFKLLGHRNQGIASIYDEKKETLQRRLKLGDYSKYDLKRYYQKDYKEEAIQELKDKSKEELEKEIEDIIKENYKIDELCGEISNLEFSFVDSKKENKDKMSEIIVKIKEHYKKNVNVEKELKNKEKYILSLIHNYVKGRYRKCLELQQKENVDFENLGKRIKEIFDSNEVTKKLKKSIINKVNSYKIFEMKFQNPNIESSDDLEILKAEETFLNKLSTAVSKVGYTLNILLEVSSEKDILENYNMVGELCNNNSTTEIYKVYPELEKNEKLLQGMIHFIQGLRQQSLHPKILWNFETKNLKPEKLERLKEKKSIKMRDCVVHEDSLDKKEKNEVEIKKYFEKIEEKLPNYFIEKYESNNVFNIYRNFIDKIMEVVKNFNFKENNTIDYLFPKFHKIYKRMCKSENIDDRQNGARKYLLQTIYYYYFQYEIENDKNNMSKYLNLYKNKIKVKKISYSYIIDNKAVNNKNIEILYRNIQREGMLNNRLSQMNNEWIEFIVVQFSEFLTNKKLNWILDDLSEYKKKEKLDENNKNKLLKILKQKMNKKITYSNDSYVFISLTQFLDLKEISNLIHDIKKFIQFREKNVSKYKPEKNKLYIEELRKILYISKVVLEHKERVMQKHYLESYDEDISIMYGKGIEKKDIKDIEIKIKNKNQEVINQPLYKSGNDENNSWIILYGIEQAKRNGTFKFFEGFFNLNDDIKLCKEDIEKYEKLYNEKEENQKKVDEYISKLNNDIEKINNDNNDINIEKTNNNKQLFYYYKNMIYGDGLKKGYDFINDIYSHYLSWAYRIERDYSIYKVEAYNGKIKNFRNEVAHFNYFQKTDKSLLDLLNDFYSIFDYNLKYQRDVQKVINNIFEKYQVIREDGGSVIFYCKIEKKLKLSENIIPKKHLKYPEIKLIHEKYVEFFRKLFEYKK

SEQ ID NO: 1203 - protein, 1331 aa, Artificial
  Synthetic
LNTNNKDKNNINNEDFVNQFIEYKTNNDIFKKFTRKFHMGNILFKLKAKESKNKAVLEIRNYSHFLETEKAVLEIEIYQQSEKLIEEENITKKDIIDKAIKEKITEDSNEIKMQVKLKENKSKEIKISINKETEEYHIKLKSINNDELNLKREIYEILKSINANLYIITKNAISNADFKKRNYENFLRENIMEHLKKNIGEKSKITFLKSLSNSLKKLQGNIKENDEIINFIKYYSNINGCKTVSENKKNFLEKILNTEVSVSENDIIDFIIGELKFYGIIKRIEKLQEKTADRTDEDIENTYIESYVLLDKHEKFKKYNRNKKDEIVKLFVKDIHNDKMEEKINQILSKFKIKELTKKLEKNTENKNFDTEIFGIFKKHYKVNFDSKKFENKSDEEKELYKIIYRYLKGRIEKILINEEKIKTKELKINKILDEKKLSEKVLKRVKQYTLEHIMYLGKLRHNDIVKITVNTDDFSRLHAKEELDLELITFFASTNMELNKIFEINKEKNDFFGDSFKINDTKVLLKNEVTSSKLYILKNLNFIDNENKVKKEEFISKFITIGVNERNRILHANTKEIALKGKQDNYDKVINIIKNLKISDEEVSKALNLDVVFKNKKDIITKINDIRISEENSNDIKYLPSFSKILPEILNLYRNNPKNEPFDTIETEKIVLNALIYVNKELYKKLILEDDLQENRSKNIFLQELKKTLGGTDEIDENIIENYYKNAQISASKGNNKAIKKYQKKIIECYIEYLRKNYEKQTSDKSIVINNDFEYIISIFALLNNNIVINKIRNRFFATSVWLNTSEYQNIIDILDEIMQINILKSEYITSNWKENLEEFIRKTKNKEIELHQSKKEFFDNNYKEIKKDMIVKINDNKIQKILNKYLKEITGFSSNNEYMFKNLGKLTLEERDFILSNKNNKKLIEKNIDEIIGEKLDAIKEKILLRKVFSSKFLEKYKKEIDNLVESTESKNENKFEKIYYPKEHKNELYIYKKNLFLNIGNPNFDKIYGLISKDIKNVDTKILFDDDIRKNKISEIDAILKNLNDKLNGYSNDYKAKYVNKLKENDDFFAKNIQNENYSSFGEFEKDYNKVSEYKKIRDLVEFNYLNKIESYLIDINWKLAIQMARFERDMHYIVNGLRELGIIKLNGYNTGISRAYPKRNGSGDFYATTAYYKFFDEESYKKFEKICYGFGIDLSENSEINKPENKSIRNYISHFYIVRNPFVDYSIAEQIDRVSNLLSYSTRYNNSTYASVFEVFKKDVNLDYDKLKTKFKLFDDEKNDDIKILKIEDLIESKKVSVLELESYNSDYVKNLIIELLTKIENTNDTL

SEQ ID NO: 1204 - protein, 949 aa, Artificial; identical to SEQ ID NO: 43
  Synthetic

SEQ ID NO: 1205 - protein, 1360 aa, Artificial; identical to SEQ ID NO: 101
  Synthetic

SEQ ID NO: 1206 - protein, 1161 aa, Artificial
  Synthetic
MKLTQSRQSKGAQFFRDVSKGQLVLNNNIDNTDNVIQSLPYEKSYIGRILYKSSNSDKDNDQNPFNSFVRQLVKNQNKERKLTSYINLNDKNNKKLSKDDFKNQINTHLSFYGRNLKVDADSPTLKEILLQYYDGNNDAENELKKLANYISNLAKKKTEKLKKSIKNNKIPFEPDGEKLKLTSDKMKLLFDFLKKDGVELTSYEKFQKDYKFSDLANKIESIISNDKNSVDKKPFPTKKIYQTVSDYDYDFRKKNEDNDLYLFYAKEVKNYFKRLFIDKKLSKKQYEEIKSQNYKSEKYIFGQVKRYIINQLVQGLILYGKIMHYCYDTDAKQFNVEINSDTLTYIQVEEAFKKQIYLSLSWAITRLNYFFNYGSQNEENLDKDKKEGDILLAKTFRDKFYEKVFNNNEKDDDGISPKDELYAKISTCFAINSKDNNDDDIKKLLEDCCSSVANIRHNVFHFKKENIFEILEEIKLDSQISKELLNRDILNIQKCFKEQIRSTALTDYYSFELLEKVFKNEKLEFFLYSSQYPMMPSFKKIHKRGCNISKSPNQTKEIKWLIELDSEIDNEGKLAYKNLLQLIYYHSFLPAIKKDEKLVTEFINKTKQWNKTKSIASQKAKKAKNKKINYYEFKYSNMPRFEYGIPLKDYLEELQRQQSIRENDEDKKDKDNYYVEFVQDIFVFAFDSYLLKIISAYDCYEELIHPKLKTKEESKETLEKLFNESNPILKIKTNLNPDTKFITMYPFFRLLDQRELNILLHQFIRYCSSTQKRSNTNDETLNTLTQIEELITLVQFTIPLQTKDVHFKSAMEKYFSEFFENKDPQNYDDFYLQGSKKEEDKLVKHRSMSLVARSGAMALYTKMFSSIYQINKSDYEKYKDIYTIKNNSEVTKIEEMQNRLQQLHEKLVRIKLISDTQLNDIKKYQTLAKQIKEYENLRHKLTFESLYRIHQLHVEILGRFAAFANDWERDMFFMFTALENRGKINFKLKPIFNRGKVVGNLNNKLKDDARKLFFELCWSNEIYDKDKDDNSNGDYIYDRLLIRNYCAHLNHMTQFKKNNETQPSIIGYINKLRVLLAYDIKRQNAVTKAVKEILEKHYKVKLTLKRSDDNPDKFVIANLESDEITHLKNLKNPVIIEDNDKFMISLIRKLLIFKFESANVK

SEQ ID NO: 1207 - protein, 1143 aa, Artificial
  Synthetic
MRVSKVKVKDGGKDKMVLVHRKTTGAQLVYSGQPVSNETCNILPEKKRQSFDLSIENKTLKRRDDVDKTKKGKYDIVRKIIKYGELPQSINDVDILEFLNHKFQKPVKYWKNGKEESFNLTLLIVEAVKTQDRQKLQPYYDWKTWYIQTKSDLFKKSIENNRIDLTENLSKRKKALLAWETEFTTSGKIDLTHYHKVYMTDVLCTALQKVEPSTDKKGKINTNAYHRGLKKALQTHQPAIFGTRQAPNNVNRADDRLSIYHLEVVKYLEHYFPIKTSKRRNTADDIEHYLKTQTLKTTIEKQLVNAIRANIIQQGKTNHHELKADTTSNDLIRIKTNEAFVLNLTGTCAFAANNIRNMVDNEQTNDILGKGDFIKSLLKDNTNGQLYSFFFGESLSTNKAEKETQLWGIRGAVQQIRNNVNHYKKDALKTVFNISNFENPTITDPKQQTNYADTIYKALFIKELEKIPNAFAQQLKTGGALSYYTIENLKSLLTTFQFSLCRSTIPFAPGFKKVFNGGINYQNAKQDESFYELMLERYLRKENFAEEAYNARYFLLKLIYNNLFLPGFTRDRKAFADSVGFVQMQNKKQAEKVNPKKREAYAFEAVRPMTAADSIADYMAYVQSELMQEQNKKEEKATDETRINFEKFVLQVFVKGFDSFLRAKEFDFVQVPQPQLTATASNQQKADKLNQLEASITADCKLTPQYAKADNATHIAFYVFCKLLDAGHLSNLRNELIKFRESVNEFKFHHLLEIIEICLLSADVVPTDYRDLYSSEADCLARLRPFIEQGADITNWSDLFVQSDKHSPVIHANIELSVKYGTTKLLEQIINKDPQFKTTEANFTAWNTAQKSIEQLIKQREDHHEQWVKAKNADDKEKQERKREKSNFAQKFIEKHGDDYLDICDYINTYNWLDNKMHFVHLNRLHGLTIELLGRMAGFVALFDRDFQMLDAKRISDLYQLKSFISFREITSELDKNNDITEINLIKDKEIIKRDGTPITEADRNSLKSCIQSKREYYQKTYFKEHTNPFTDRNYIAHFNYLSTNTGNHSLIKLINKLRDLLHYDRKLKNAVSKAFIDLFDKHGMILKLKLNTDHQLEVESLEPKKIYHLGSSAKDKPEYQYCTNQVMMAYCNMCRSLLEMKK

SEQ ID NO: 1208 - protein, 1186 aa, Artificial; identical to SEQ ID NO: 171
  Synthetic

SEQ ID NO: 1209 - protein, 1345 aa, Artificial
  Synthetic
MKVTKAEKLRVAVSRKLNNEDKRAVLYKTPNPGQTCGTVKKQLANRVERANKLYGVFFRSDVPETLQYHFEELVTYAAQSTSPNEFRQKASQYRECEKKDKFGKMRKYPIFRCSYAPSGKNMKKVMELYVRERMKDEWQSQAYRTAAIEILLCICNKDFSKQLSRVDARIFADFYNASKACPQPYIGKSTGVLEAAFTSVMKQMSLHAKANASNKIWWLQNQLRTIELNKKIVKISDFKYEYATEDRMRAILVRMRKSLKRGTNGDIAVALLQGIAQMNGKTLSGVLEELSANSETKEQLIKFLKAVHEDYHKTPILKAIRNQDVKVQVHEVDPVSPEGRALDLASINVSKGNERKKYKVALTQTLGNYAKSPKDATQTLKAIKGVLLDYFMWLDSDVKAEFLEDNNLWKIPNRTEEYFDNNFVPIDDKKDDKIEAIEDFASIWRQERVKNSRIKARMNYVNCGKYQQLIKQETDDFRICWISYAKDFVEKNYVSKNRQFTQGDCFSTKMLLECWKEIIRFICGKYIDIGKAVYHFAMPETMNARDSLAYGVLGEKYKEGISSFDYEAIKAEETLQRDIAKAAVAAIHAFSGSVIDDKKPVEDILFIKDEELQEHAKADDVIVKQILRFYGGFSSVEGREKLEGMALAKEVLSQLKAIRNENFHFTQGKRKNVEENIPLTKALWENEEKVYRQTVKETYYSNNVSMFYSQEVIQKLVAELYQNNNVAEAQIPAFRTIWKRKDLPEYIGSLNISWDKTEPKQVIYEGALYFLLKEIYYRDFIKSGEAKKLFFDAVMDNATEMEKSSNADSRNQEKKALANAGKNFRDYVNGLNASTLGEVCQFIQNEYNQQNRGKQEQEIYKHFKMLLPICMRKAFQRYIDEKHSFIKKPGELPQTTEDYLENVKVACPEKKIKLGRWFTFAHFIHPRELNFLIGDFKNYIQYREDVLRRSEHAGQFSDTTERDGEKAVVDHAVQKAKDILGVLEFVRHISGRVSNEFTDYYADRAEYDEYMAKYFEPDVQIEQYDLYGDAKNAKVIRNIELARMYAGDSLMSASYRKITKKEIETYYAKKDEIAQLQSQGICNSKKEQEDIVAFQKLKNRITLNEVTDLWSLVNELLGNLVSLAYLRERDEMYLFLGFYYMALRHPEGWTNEIMNSVSNEKYAVKEGLVLYQTVAVFDFGTKLLFQNDNQKWEETTGYKWQHFIDNHKESYACILPLFEIAKCETEARAVRNYVDHFKYYSNEDRSILELYGKFYTHLFGYSTRLRKSVLQILAQTLEKHGISAGIQFDGTTVKATRCDMKSVEFTYKYEEKLNEQKTVLRTISLPAKSEGFITAVCEMLKQKKG

SEQ ID NO: 1210 - protein, 1200 aa, Artificial
  Synthetic
MDADGLSIGPFAESHDSLVIGQWISTIDKIATKPKGKGKATQEQRNVRSALGAACWARLVHPDGTFGALDSERMNWARNTWERRLHPYSDKNFVTNGREKTPDSKAHWFNRFCKGLSVQEVTDPSVAGDVAQSIEEHLTKDAFRRGGGTRRSPKASASRAGLIAVRADSITKNALRFPGADIAEQREHGWTEEDIARYVAKSDPVAQIYKAVLDAEPDGQRVRWSIAAERLYAHYARVFTAPDIVLDRKDADKILRGVLALHEALRQLYRHRLKRHRRKPVHVTVLLPRDIRDALTMISRQQDNSDLNALVRLGKVIHHEAADQAGVESVAKIIGNWPEDVSRSYYWTSDGQTEIKRTEAFVRAWRGPIAHAQRTLADWVDPDRLSVKSDSAEAKPPDMLGAKFDDALAQLDDDAAITKARLLFGTRSDALGGPDPKAVLRLTKRALSKLRNAAFHFKGMGGFVQDMTLKILPSGSEDCEVLERVHALWHADQKDRMIRVKDALVGAHAEVYLNQPQMNQLWELLGAQESKIALPRFNRVIARAAHAWTSKEDRLALPDSASSKDLEAQPARRCQYVLIKMVYERGFRTWLTSRSADDLNIWIKQATDHTTEAAKEFHKHQVSKEELAQISARSAGLVKLEPGEGFAKFLFKMTALTTTEFRVQKGYTHDAGRAREQASFLDDLHCDLVALAFDTYLKDKKLGWLYRLRQDESPGNPQSSAADLPLGSVASAQDWQAVLYLVLHLIPVDDVGRLLHRWRWWSNKYDDEHLPAEGLQLAEAFTLYLDMHDAKFDGAEAITGSAAFHDLFDSDTTRKQVFPDALAAEAEGPRQIMQRGLREMLRFGDMASFAPVFAGRKVTAEQVKEWQNLDAQVAAAHETRKKVHEDYKRGLRPSTENERLLEQKYDLAAYVKAVKTITRHKRLSHHVKLTNHVRLHQIVMRVLGRLVDYAGLWERDVYFVLLALICLRGQTPRDVFQNAYGRKALRGGQIRKAVQNLEPEYKTALERHFGTGAFEEGGVVTIRNDLAHLNMMGRAARSDDARVPLDLTCQIDRTRRLMSYDRKLQNSVSKSVTDLMEREKIRLSFRLDKGKLTQATVKADLIKHFKRKELTENLHDPLFHGMVADVYGGTVGQLQNDLTDAQDIAAVVNQTFAAVKAEQDARRRPRNNRAQSQNPGGGTRRNGGKEKYGKHPKGKRTDRH

SEQ ID NO: 1211 - protein, 1315 aa, Artificial; identical to SEQ ID NO: 366
  Synthetic

SEQ ID NO: 1212 - protein, 1360 aa, Artificial; identical to SEQ ID NO: 92
  Synthetic

SEQ ID NO: 1213 - protein, 1193 aa, Artificial
  Synthetic
MKVTKIDGISHKKFEDEGKLVKFTGHFNIKNEMKERLEKLKELKLSNYVKNPENVKNKDKNKEKETKSRRENLKKYFSEIILRKKEEKYLLKKTRKFKNITEEINYDDIKKGENQQKIFDILKELLKQRINENDNEEILNFDSVKLKEAFGEDFIKKELKIKAIEESLEKNRADYRKDFVELENGKYEDVKGQNKRSIVFEYYKNPENQEKFKENIKYAFENLYTEENIKNLYSEIKEIFEKVHLKSKVRYFYQNEIIGESEFSEKDEEGISILYKQIINSVEKKEKFIEFLQKVKIKDLTKSQIFYKYFVENEELNDENIKYIFSYFVEIEVNKLLKENVYKIKRFNEGNKKRIENIFEYGKLKKLIVYKLENKLNNYVRNCGKYNYHMENGDIATSDINMKNRQTEAFLRSILGVSSFGYFSLRNILGVNDDDFYKIEKELTEDERKKNFILKKAKEDFTSKNIFKKVIDKSFEKKGIYQIKENLKMFYGDSFDNADKDELKKFFVNMLEAITSIRHRIVHYNINTNSENIFNFSDTEVSRLLKSIFEKETDKRELKLKIFRQLNSAGVFDYWENWKIKKYLENIKFEFVNKNIPFVPSFTKLYNRIDDLKAGNALKLGNHIIIPKRKEARDSQIYLLKNIYYGEFVEKFVNNNDNFEKIFREIIKINKNAGTNTETKFYKLEKFETLKANTPTEYLEKLQSLHKISYDKEKIEEDKDVYVDFVQKIFLKGFVNYLKKLDSLKSLNLLNLRKDEVITDKKSFYDEKLKLWENSGSNLSKIPEEIYEYVKKIKISNINYNDRMSIFYLLLKLIDYRELTNLRGNLEKYESMNKNKIYSEELTIINLVNLDNNKVRTNFSLEAEDIGKFLKSSITIKNIAQLNNFSEIFADGENVIKHRSFYNIKKYGILDLLEKIVDKADLKITKEEIKKYENLQNELKRNDFYKIQERIHKNYNQKPFLIKNNEKDFNDYKKAIENIQNYTQLKNKIEFNDLNLLQSLLFRILHRLAGYTSLWERDLQFKLKGEYPEDKYIDEIFNFDNSKNEKYKNGAIVFKYVDFLIEKKEGKRAGTKKINKKSEEKGLEIRNYIAHFNYIPDATKSILEILEELRNLLKYDRKLKNAVMKSIKDIFKEYGFIVEFTISHTKNGKKIKVCSVKSEKIKHLKNNELITTRNSEDLCDLVKIMLEYKKLQK

SEQ ID NO: 1214 - protein, 1162 aa, Artificial
  Synthetic
MKVTKVDGISHKKYIEEGKLVKSTSEENRTSERLSELLSIRLDIYIKNPDNASEEENRIRRENLKKFFSNKVLHLKDSVLYLKNRKEKNAVQDKNYSEEDISEYDLKNKNSFSVLKKILLNEDINSEELEIFRKDVEAKLNKINSLKYSFEENKANYQKINENNVEKVGGKSKRNIIYDYYRESAKRNDYINNVQEAFDKLYKKEDIEKLFFLIENSKKHEKYKIRECYHKIIGRKNDKENFAKIIYEEIQNVNNIKELIEKVPDMSELKKSQVFYKYYLDKEELNDENIKYAFCHFVEIEMSKLLKNYVYKKPSNISNDKVKRIFEYQSLKKLIENKLLNKLDTYVRNCGKYNYYLQDGEIATSDFIAGNRQNEAFLRNIIGVSSVAYFSLRNILETENKDDITGRMRGKTRIDSKTGEEKYIPGEVDQIYYENKQNEVKNKLKMFYGYDFDMDNKKEIEDFFANIDEAISSIRHGIVHFNLDLDGKDIFAFKNIVPSEISKKMFQNEINEKKLKLKIFRQLNSANVFRYLEKYKILNYLKRTRFEFVNKNIPFVPSFTKLYSRIDDLKNSLGIYWKTPKTNDDNKTKEIIDAQIYLLKNIYYGEFLNYFMSNNGNFFEISKEIIELNKNDKRNLKTGFYKLQKFEDIQEKTPKEYLANIQSLYMINAGNQDEEEKDTYIDFIQKIFLKGFMTYLANNGRLSLIYIGSDEETNTSLAEKKQEFDKFLKKYEQNNNIKIPYEINEFLREIKLGNILKYTERLNMFYLILKLLNHKELTNLKGSLEKYQSANKEETFSDELELINLLNLDNNRVTEDFELEANEIGKFLDFNGNKIKDRKELKKFDTNKIYFDGENIIKHRAFYNIKKYGMLNLLEKIADKAGYKISIEELKKYSNKKNEIEKNHKMQENLHRKYARPRKDEKFTDEDYESYKQAIKNIEEYTHLKNKVEFNELNLLQGLLLRILHRLVGYTSIWERDLRFRLKGEFPENQYIEEIFNFENKKNVKYKSGQIVEKYIKFYKELHQNDEVKINKYSSANIKVLKQEKKDLYIRNYIAHFNYIPHAEISLLEVLENLRKLLSYDRKLKNAVMKSVVDILKEYGFVVKFKIGADKKIGIQTLESEKIVHLKNLKKKKLMTDRNSEELCKLVKVMFEYKMEEKKSEN

SEQ ID NO: 1215 - protein, 1360 aa, Artificial; identical to SEQ ID NO: 92
  Synthetic

SEQ ID NO: 1216 - protein, 1243 aa, Artificial
  Synthetic
  misc_feature (6)..(64): Xaa can be any naturally occurring amino acid
MLQKRXXXXXXXXXXXXXXXXXXXXXXXXXXXXXXXXXXXXXXXXXXXXXXXXXXXXXXXXXXXDSKKQNKGDASSAAENSENQTTRTPKASKDWIRIVQQMYRKENIRRYRLSIKTIKAYSNEASSDTITDDEVTTVKDLTSSTELSIVEKTPYFQDESINMFWIRYIEKSVERIYNNFRSLDDYRLSVGYLSEKVWKGIFSFLSGKYIATGKAVYHFAFQELSPQKEEADTSQIVENTQTQETQNSQNSQVARNKGKNKGRKKQHQKAVSKRAMIGAAEQARNNTANIVKNTIANSTDTIDSKPRLEDSTVSLDLGKIRENLKSGLNSFDYEMLKAEEDLQRSTAVYVAFAANHLSAATVDLALLEGEEGKEDFLTLKRKDLARVVKTPLRRNILQFFGGESMWGDFCFEDYYRKPNKNQYDDLDFLDDLKTIIFAMRNESFHFETRRENKGTWNQNLITAMFEHDCAAASKLQKEKFFANNLPMFYDETTLDTLLKALYKNQTSRASQVPSFNRVVVRNDFSDFIHDNLKWNISFEENSVSRKKQFDSALYYLFKEIYYNLFLQGKGLNGKFDVKKEFINWCDDEKNGEENHHAFESFTSRVNTINGSKDDITLAEICQRIMTDYNLYNNKSHKVRSSFAKNKKADNYDHYKMLLYKGLREVFAVYINNVFHDLELYKPIYRDKPSAENFLPDYSASTYDSLVKKVQGNAELQKWYIIGRLLNPRQVNLFIGSLRQYIQYTEQIQRRAKDTKTKTAFLKSSKNYFLYEKVLEVCIQLSGTTTNRLEDYFDDEDDYARHVAMYLDFEGAYPGIDISAQLKQFCSENIDTINRETGNGPEITNIHDMNGSNELKSLGIFYDENNPILNRNILLAKIYGTERVLSKIMRDRKVTKEDILDFYSQRKLIEEYRITGKCKTKDQQKALKKYQEIKNKVELYNIVEYEEIIDEIHAQMIDWCYMRERDLMYFQLGFHYTCLNNNSSKAEWYKRIEHDARIIEGAILYQIAAMYIVGIPIYTFKDNNLLCEPESQPVWMKINRFIDYSIGCLKQSPPFSSTDREISVDEAQSIYFAGMELFENIKEHDNIVALRNYIEHFHYYAHLDRSLLDICSEIFDRFFSYDLKYQKNVVVRIYNILMHHFVKPVFAFSTGQKSVGTRKEAITKNRATITLRQGRGLYSEKMNYKVYKTNDSKNNDKEKEKKNNNSESKNNSNMIVSEKTTLDAKSRDFLDGVSMLLTYPDCLR

SEQ ID NO: 1217 - protein, 1161 aa, Artificial
  Synthetic
MKVTKVDGISHKKYIEEGKLVKSTSEENRTSERLSELLSIRLDIYIKNPDNASEEENRIRRENLKKFFSNKVLHLKDSVLYLKNRKEKNVVQDKNYSEEDISEYDLKNKNSFSVLKKILLNEDINSEELEIFRKDVEAKLNKINSLKYSFEENKANYQKINENNVEKVEGKSKRNIFYNYYKDSAKRNDYINNIQEAFDKLYKKEDIETLFFLIENSKKHEKYKIRECYHKIIGRKNDKENFAKIIYEEIQNVNNIKELIEKVRDMSELKKSQVFYKYYLDKEELNDENIKYAFCHFVEIEMSKLLKNYVYKKPSNISNDKVKRIFEYQSLKKLIENKLLNKLDTYVRNCGKYNYYLQDGEIATSDFIARNRQNEAFLRNIIGVSSVAYFSLRNILETENENDITGRMRGKTVKNNKGEEKYVSGEVDKIYNENKQNEVKENLKMFYSYDFNMDNKNEIEDFFANIDEAISSIRHGIVHFNLELEGKDIFAFKNIAPSEISKKMFQNEINEKKLKLKIFRQLNSANVFRYLEKYKILNYLKRTRFEFVNKNIPFVPSFTKLYSRIDDLKNSLGIYWKTPKTNDDNKTKEIIDAQIYLLKNIYYGEFLNYFMSNNGNFFEISREIIELNKNDKRNLKTGFYKLQKFEDIQEKTPKEYLANIQSLYMINAGNQDEEEKDTYIDFIQKIFLKGFMTYLANNGRLSLIYIGSDEETNTSLAEKKQEFDKFLKKYEQNNNIKIPYEINEFLREIKLGNILKYTERLNMFYLILKLLNHKELTNLKGSLEKYQSANKEEAFSDQLELINLLNLDNNRVTEDFELEVNEIGKFLDFNGNKIKDRKELKKFDTKKIYFDGENIIKHRAFYNIKKYGMLNLLEKIADKAKYKISIEELRNYSNKKNEIEKNHTTQENLHRKYARPRKDEKFTDEDYKKYEKAIRNIQQYTHLKNKVEFNELNLLQSLLLRILHRLVGYTSIWERDLRFRLKGEFPENQYIEEIFNFDNSKNVKYKNGQIVEKYINFYKELYKDDTEKISIYSDKKVKELKKEKKDLYIRNYIAHFNYIPNAEVSLLEVLENLRKLLSYDRKLKNAIMKSIVDILKEYGFVATFKIGADKKIEIQTLESEKIVHLKNLKKERLMTNRNSKELCKLVKIMFEYKMKEKKSEN

SEQ ID NO: 1218 - protein, 953 aa, Artificial
  Synthetic
MKLSKEKHIRSAVANEEQNIGGVLYHVLGTDTIGLKDQMLIRDRDVKQLYNVFNQIQVGDKPKKWKNDEKLSPEENERRAQQKNIKMKNYKWREACSKYVESSQRTINDVLFYSYMEADKKIRNMRKNEDILIKMQEVTKLPKFSGGKLEDFVAYTLRKSLVVSKNSTQEFDSVAAMVVFLECIGKSNISDHEKEIVCKLLELIRKDFSKLDPNVEGSQGANIVRSVRNQNMIVQPQGDRFSFPQVSDKEKKTVTNKNVEKEGLNEFLLNYANLDDEKRAEILRKLRRILDVYFSAPNHYEKDMDITLSDNIDKEKFNVWKKYECGKKVTDLFVDIPDVLMEAEAENIKLDAVVEKRERKVLAGRVRRQNIICYRYTRAVVEKYNSNESLFFENDAINQYWIHHIENAVERILKNCKAGKLFKLRMGYLAEKVWKDAINLISIKYIALGKAVYNFALDDIWKDKKDKELGIVDERIRNGITSFDYEMIKAYENLQRELSVDIAFSVNNLARAVCDMSNLKDRESDFLLWKKEDIADKLKNKDDMASVSAVLQFFGGKSSWDINIFKEAYKGKNKYNYEVRFIDDLRKAIYCARNENFHFKTALVNNEKWNTELFGKIFERETEFCLNVEKDRFYSNNLYMFYPVSELRNMLDQLYSRSVSRAAQVPSYNSVFIRKNFPEDITNVLRYQKPGYDADTLDKWYSACYYLLKEIYYNSFLQSDKALQLFEKSVKTLSWDNEEQKRAVDNFKNHFSDIKSACTSLAQVCQIYMTEYNQQNNQIKKVRSSNDSIFDQPIYQHYKVLLKKAIANAFAAYLKNNKDLFGFIGKPFKANEIREIDKEQFLPDWTSRKYESLCIEVSGSQELQKWYIVGKFLNARSLNLMAGSMRSYIQYVTDIKRRAASIGNELHVSVQDVEKVEKWVQVIEVCSLLAFRTSNQFEDYFNDKDDYARYLKS

SEQ ID NO: 1219 - protein, 1360 aa, Artificial; identical to SEQ ID NO: 92
  Synthetic

SEQ ID NO: 1220 - protein, 1143 aa, Artificial; identical to SEQ ID NO: 11
  Synthetic

SEQ ID NO: 1221 - protein, 989 aa, Artificial
  Synthetic
MKVTKVDGISHKKYIEEGKLVKSTSEENRTSERLSELLSIRLDIYIKNPDNASEEENRIRRENLKKFFSNKVLHLKDSVLYLKNRKEKNAVQDKNYSEEDISEYDLKNKNSFSVLKKILLNEDINSEELEIFRKDVEAKLNKINSLKYSFEENKANYQKINENNVEKVGGKSKRNIIYDYYRESAKRNDYINNVQEAFDKLYKKEDIETLFFLIENSKKHEKYKIRECYHKIIGRKNDKENFAKIIYEEIQNVNNIKELIEKVPDMSELKKSQVFYKYYLDKEELNDKNIKYAFCHFVEIEMSKLLKNYVYKRLSNISNDKIKRIFEYQNLKKLIENKLLNKLDTYVRNCGKYNYYLQDGEIATSDFIARNRQNEAFLRNIIGVSSVAYFSLRNILETENENDITGRMRGKTVKNNKGEEKYVSGEVDKLYNENKQNEVKENLKMFYSYDFNMDNKNEIEDFFANIDEAISSIRHGIVHFNLELEGKDIFAFKNIAPSEISKKMFQNEINEKKLKLKIFRQLNSANVFRYLEKYKILNYLKRTRFEFVNKNIPFVPSFTKLYSRIDDLKNSLGIYWKTPKTNDDNKTKEIIDAQIYLLKNIYYGEFLNYFMSNNGNFFEISREIIELNKNDKRNLKTGFYKLQKFEDIQEKTPKEYLANIQSLYMINAGNQDEEEKDTYIDFIQKIFLKGFMTYLANNGRLSLIYIGSDEETNTSLAEKKQEFDKFLKKYEQNNNIEIPHEINEFVREIKLGKILKYTESLNMFYLILKLLNHKELTNLKGSLEKYQSANKEEAFSDQLELINLLNLDNNRVTEDFELEADEIGKFLDFNGNKIKDRKELKKFDTNKIYFDGENIIKHRAFYNIKKYGMLNLLEKISDEAKYKISIEELKNYSNKKNEIEKNHTTQENLHRKYARPRKDEKFTDEDYENYKRAIKNIEEYTHLKNKVEFNELNLLQGLLLRILHRLVGYTSIWERDLRFRLKGEFPENQ

SEQ ID NO: 1222 - protein, 1161 aa, Artificial
  Synthetic
MKVTKVDGISHKKYIEEGKLVKSTSEENRTSERLSELLSIRLDIYIKNPDNASEEENRIRRENLKKFFSNKVLHLKDSVLYLKNRKEKNAVQDKNYSEEDISEYDLKNKNSFSVLKKILLNEDINSEELEIFRKDVEAKLNKINSLKYSFEENKANYQKINENNVEKVGGKSKRNIIYDYYRESAKRNDYINNVQEAFDKLYKKEDIEKLFFLIENSKKHEKYKIREYYHKIIGRKNDKENFAKIIYEEIQNVNNIKELIEKVPDMSELKKSQVFYKYYLDKEELNDENVKYVFCHFVEIEMSQLLKNYVYKRLSNISNDKIKRIFEYQNLKKLIENKLLNKLDTYVRNCGKYNYYLQVGEIATSDFIARNRQNEAFLRNIIGVSSVAYFSLRNILETENENDITGRMRGKTVKNNKGEEKYVSGEVDKIYNENKQNEVKENLKMFYSYDFNMDNKNEIEDFFANIDEAISSIRHGIVHFNLELEGKDIFAFKNIVPSEISKKMFQNEINEKKLKLKIFRQLNSANVFRYLEKYKILNYLKRTRFEFVNKNIPFVPSFTKLYSRIDDLKNSLGIYWKTPKTNDDNKTKEIIDAQIYLLKNIYYGEFLNYFMSNNGNFFEISKEIIELNKNDKRNLKTGFYKLQKFEDIQEKTPKEYLANIQSLYMINAGNQDEEEKDTYIDFIQKIFLKGFMTYLANNGRLSLMYIGNDEQINTSLAGKKQEFDKFLKKYEQNNNIEIPHEINEFVREIKLGKILKYTESLNMFYLILKLLNHKELTNLKGSLEKYQSANKEETFSDELELINLLNLDNNRVTEDFELEANEIGKFLDFNGNKIKDRKELKKFDTNKIYFDGENIIKHRAFYNIKKYGMLNLLEKISDEAKYKISIEELKNYSNKKNEIEKNHTTQENLHRKYARPKKDEKFNDEDYKEYEKAIGNIQKYTHLKNKVEFNELNLLQGLLLKILHRLVGYTSIWERDLRFRLKGEFPENQYIEEIFNFDNSKNVKYKSGQIVEKYINFYKELYKDNVEKRSIYSDKKVKKLKQEKKDLYIRNYIAHFNYIPHAEISLLEVLENLRKLLSYDRKLKNAVMKSVVDILKEYGFVATFKIGADKKIGIQTLESEKIVHLKNLKKKKLMTDRNSEELCELVKVMFEYKMKEKKSEN

SEQ ID NO: 1223 - protein, 1387 aa, Artificial; identical to SEQ ID NO: 93
  Synthetic

SEQ ID NO: 1224 - protein, 1254 aa, Artificial; identical to SEQ ID NO: 1034
  Synthetic

SEQ ID NO: 1225 - protein, 1254 aa, Artificial; identical to SEQ ID NO: 1034
  Synthetic

SEQ ID NO: 1226 - protein, 1184 aa, Artificial; identical to SEQ ID NO: 874
  Synthetic

SEQ ID NO: 1227 - protein, 1221 aa, Artificial
  Synthetic
MLIIKPYGRSHVETTAESRKRVLRLTDAPDIPQDIKDFAHTDPRLVIAQWISAIDKIATKPQGDGGATEEQRALRKKLGNAAWAHIRANGLVSELQDDEHAKYLTTLWWSKIEPYGDQNYKGKRKPPSPKGRWYKRFAGEAEPHEINAPKMVEQLHEHLYEAEYRLDPDAKKKRLGRIAARADSIEQNVLKPPAQMNATWDESDEAAYVKGVDVARTIYNLAKKLADNKDKSGKSGPRRMNPKDAGAELYVHYGRLFRDEKGNVLTIECARKQHAGLFNLHMAVKDFYTRRLKHNKRKENTPHSLPTNGDALFALLKKGQRNRDVNSLVRLGKVIHYEMSKQVWQADVPLDDPAQEQTRLNGLMKQWSSADRFKAHWPDAINDSHFWTSDGQSEIQRHEAFVRIWRHTIAFANRTLTDWVYPGDHIDHDIFEGKKIDNAVARVSDEQHRRKLDLLFGKRVPDLLAHSDGARLLTAAIQRAAYLRNRSLHFTDKRVFATALSRLSDGVSNQVKSALRTLWQADQDDQAVSLKKTMTASHSPAYFDEEKNRQLFEAIITTAPSLLVLPRFRRILARAGDPWEKEEERPILPLPANRQALEDPARLCQYSLSKMLYERPFRHWLDTRQSSAINAYIEKAIARSTWAAQEKNGGDKSEEEKALIVSKQSSLPRLDTETGGAHIRHFFFRLSAATATEMRVQKGYASNAENAKAQASYIEKLKCTVVALAFADYLAEAGFGFLLSLKPETPLRDSQCDLDGLSIPASALEEDAGQPTQDWQTVLYFLLHLVPVDEANKLLHQVRKWQVLEAKPHQGPITEKTKKPNGDPTIMGTVKALELYLSMHDAKFEGGMALVGTEGFKTFYESEAGFARVFSNPDDTSDHTVPRRGLREIMRFGHLPLLQQICSDGQVTDAQIATWQQERSATEGLSPIAIHQHAREALHATYTETTKKFPIEKVRDYAEALAFVSKHRLLAAQVTLTNHVRAHRLMMAALARLADYAGLWERDLYFVTLALMHQHNLHPTQIFCDEGLGLLAGRQAITAQRHMMSREDRNPVRADICVYFGAVHEKDNPLVNARHNLAHFNMLRGQDLNLTELVNETRQLMAHDRKLKNAVSQSIRELLGREGIELSWKMNADATPHQLHGAQLSAQRAKHLQDRKDITPPLWEELHGTEFVDMIGRLFDGTRDEQKQADVTALDIAQLHIEHKRGGQRRRESGSFSKQRQ

SEQ ID NO: 1228 - protein, 1168 aa, Artificial
  Synthetic
MKITKIDGISHKKYIKEGKLVKSTSEENKTDERLSELLTIRLDTYIKNPDNASEEENRIRRENLKEFFSNKVLYLKDGILYLKDRREKNQLQNKNYSEEDISEYDLKNKNNFLVLKKILLNEDINSEELEIFRNDFEKKLDKINSLKYSLEENKANYQKINENNIKKVEGKSKRNIFYNYYKDSAKRNDYINNIQEAFDKLYKKEDIENLFFLIENSKKHEKYKIRECYHKIIGRKNDKENFATIIYEEIQNVNNMKELIEKVPNVSELKKSQVFYKYYLNKEKLNDENIKYVFCHFVEIEMSKLLKNYVYKKPSNISNDKVKRIFEYQSLKKLIENKLLNKLDTYIRNCGKYSFYLQDGEIATSDFIVGNRQNEAFLRNIIGVSSAAYFSLRNILETENENDITGRIKGKTVKNNKGEEKYISGEIDKLYDNNKQNEVKKNLKMFYSYDFNMDSKNEIEDFFSNIDEAISSIRHGIVHFNLELEGKDIFAFKNIAPSEISKKMFQNEINEKKLKLKIFKQLNSANVFRYLEKYKILNYLKRTRFEFVNKNIPFVPSFTKLYSRIDDLKNSLCIYWKIPKANDNNKTKEITDAQIYLLKNIYYGEFLNYFMSNNGNFFEIIKEIIELNKNDKRNLKTGFYKLQKFENLQEKTPKEYLANIQSFYMIDAGNKDEEEKDAYIDFIQKIFLKGFMTYLANNGRLSLMYIGNDEQINTSLAGKKQEFDKFLKKYEQNNNIEIPHEINEFVREIKLGKILKYSESLNMFYLILKLLNHKELTNLKGSLEKYQSANKEEAFSDQLELINLLNLDNNRVTEDFELEADEIGKFLDFNGNKVKDNKELKKFDTNKIYFDGENIIKHRAFYNIKKYGMLNLLEKISDEAKYKISIEELKNYSNKKNEIEKNHATQENLHRKYARPRKDEKFTDEDYKKYEKAIRNIQQYTHLKNKVEFNELNLLQSLLLRILHRLVGYTSIWERDLRFRLKGEFPENQYIEEIFNFDNSKNVKYKNGQIVEKYINFYKELYKDDTEKISIYSDKKVKELKKEKKDLYIRNYIAHFNYIPNAEVSLLEVLENLRKLLSYDRKLKNAIMKSIVDILKEYGFVATFKIGADKKIEIQSLKSEEIVHLKKLKLKDNDKKKEPIKIYRNSKELCELVKVMFEYKMKEKKSEN

SEQ ID NO: 1229 - protein, 1135 aa, Artificial; identical to SEQ ID NO: 147
  Synthetic

SEQ ID NO: 1230 - protein, 1412 aa, Artificial; identical to SEQ ID NO: 840
  Synthetic

SEQ ID NO: 1231 - protein, 1284 aa, Artificial
  Synthetic
MIIGGINMKLTRRRISQERKNQKLTAAFYRDMDHGLLYVDSEDEDRTEYVVSSMDFERSWRGRILKNGEDNKNPFYEFVKGLVGSNEIICKPITNDNNTDINEKIKKYITEFGRNLKAPGSEVTLEKLILNIQSGTSENEVRPELEKIKDMIKKDIEKRKDELIKSITNNHIPFMLDEDKLVPSTKKMKWLYKFLNGPDKSLNLQMFDEYWTKYGYKNLEEKIIKEINSLPEKNARSISRAVSKTVREYNRNFRINYMVPENENAEADSDYEGFLLFLKAVEQHFKKYYPVKSKDSSEVRDKNLCEEKNYKFYCSYNFVKNEVKRSIINQLVSGLIQQGKLLHYFYKDGIWQQDFLNSYGLSYIQVEESFKKSLMTSLSWGINRLTSFFIDVGTDENEEKTVQNKKQKNNRKIDDILSDKSNLRAIFNDLRSNTELQKHFKEKLAFCYPIFIKVKKEKMFDDIEKLIKLVEEARESVAYLRHRCFHYKDVTITEMLKALNNNTETDKTEDIDYSVAAEYFLRDINNLYDAFREQIRSSGIADYYPADIISGCFKKCGLQFVLYSPQNSLMPSFKNIYKRGSNLYKAYQEEKEQKDKEYKRHNTNIVQEESKELSWYIEVSDTEQGKTAYRNLLQLIYYHAFLPEVRENESLITVYFAKTKEWNRKVAETKAKKKNAGKTYKDKPIRAYRYEAIPDYVGERLDDYFKILQREQMAKAKDVNEGNAENNNYIQFIRDVVVWAFGAYLEERLEKYKKDLQSSHSQKDKKDVNDALKELFPDDKDKRQFFMKCKFTDVLINDVGENNQITEMEDLETSKEQQNREIKRKDLLCFYLFLRLLDEREISGLKHQFVRYRCSLKERRLPDNRKDVDEEIVLLEELEELMELVSYTMPSVPELSGKAESGLDLVISKYFKDFFEKSALKNQDIMKLYYQSDNKTPVFRKYMALLMRSAPLQLYKDMFRNYYIITEKECQEYIKTSQDIDAFQCKLNELHKELEHVRLKTVEDKKGKIFYYLAGSDAERVKEYEDTLSKVVRYKRLQHKLTFESLYTIFKIHVDIAARMVGYTEDWERDMLFLFKSLEYNEKLNEGVVEKIFNNKDEKGHIVKKLKDNLNSEDKEKIGILCWHKEITDKNFVEIIWIRNPIAHLNHFMQTVKNPKRSLEKMINALCVLLSYDRKRQNSVTKTINDLLLNEYHVKIKWKRWVDKNCNIYYYIDEQNIENEPILHIKHLHMGEKCHVNRNADMFDRQKEWLRNGITEEVYDKSMLGCICRLFKFDYNDLYGANRQ

SEQ ID NO: 1232 - protein, 1256 aa, Artificial
  Synthetic
LLRMKREKNITIMKISKVNHRRTAVALNGDKSELGGILYEAPVQKDRNGNYNDVIAETGKVVNEALDKKSRLYTPFNNQKVIIDKNLQRYANNLKRCYINFVKQYVNNKSFNYKAMQFIPDIQNPKTNDAVNYRTDRDNVYNKNKYYDKQTKSKSKKFIYEKIVIPQNEQNIVISALVNCSLRKSLRKDVSYKTKSGEIKTYNLPELVKKSMRFYCLEGQREPDEKEKYEMYILFSYMKEDKRTKNTDLLVKSISNQNTKVKVEDIDGNKLLKLSIADTKKKPLWEYLIKYADSSRQRELMYDIRKKIILYVAGIEEYENIKEDSGLSKVSWSKYNISDNKMFFDINSCTDKRKQNLEIKIREANIEHYRNASSKLCDDESIFWFQHFEGVIETLFSKKSKISEERLGCAYICDYLWKDFLSYLAAKYIDLGKGVYHFTMKDKLDMLNKNEAVTDLRFGIVSEKYEKGITSFDYERIKAEEELDRNIAAYVTFAADIFAKSVIKSDYRTKKDNNSDVLQYSDKEFRNSEVIRDNAEKNILQYWGGYSRWGTENSKLPENNKVSDFGKLDVSDLCIDIKKHLAGIRNSSVHYTTKIKNESAADGSNVKILFEKDLADINIIYADKYYSNNVWMFYSLEDINKLIAFLYKEKRVIRQVQIPSFSRILKRKAMQDVINEIFKDDFDENIVNPELKEKYRNSLYFMLKEIYYNAFIIQPELKEKFKDKIKIMKSELYNKLKTIDKKEYKALYCMLSNEESALKNFADRIYSVDGDNVSFADICKILMTDYNMQNQEKKNIESMEQKKKNKGKDENYKHFPLLLHKVLKELFIEYLKQTHELEFLRNNICIKSDVTMESFESQIKGVEIYKDLKEKIDKNNSLLDWYVIAHFLMPKQLNHLIGNIKNYIQFATNIDKRAESVKNLTESGMVKRIQYYDDIVRTLEFSAQYIGKISNNINDYFNSEDEYVSFLSKYVGFINDKSEDVLTELKDFCREKINNGSQIIGIYYGGDNVIINRNVIYAQMYSNAEVFSNIYKKVTKNDIINYYEKQNDLKDVFKSGVCQNEGEQRSLCEFQQLKNRIELTELSTYADMVNDFMAQFVEWAYLRERDLMYFQLGIHYIRLFYSDNVLDEKYHKLSDNVIDIEEGALLYQIVAMYDYELRIFETDNSGNAKRIGQGGPGKSIPVFLKKYCNGTDVYECGLELFEDINQHEHIIRFRNDIAHMRYMSNQAMNIMSIVSNIYKSFFVYDTKLKKSISLVF

SEQ ID NO: 1233 - protein, 1170 aa, Artificial
  Synthetic
MKITKNTKNGKLEFYRDVKEGGLRDPKSKTIWTSETIKRMDINKSLKGRILAYGTSLGSSNPYSVFVDSLIRENKEISLSELKREQCKKENVQKYLSAYGRMINHGAEENTSLGNLLVEYGNGAEISEALVQIKKQILKLKRHKKKSLLDSFMNNKIPFKLTDGKLEPATDKMSRLFSLLEEDGVDKNKFEKYKTWYQYEVLKERLDLICEEHFSAAERKPRVLAKKIYSAVKLYNKEKANSDVIKNKDDAYSLFLDEIRDHFRKYFPVTGKKGLSSGGDSEKLNSLASEKNVKYYYSDKYVFQQVWRQIVNQLTAGLIQYGKLSYYFHDKENHTWQEEKLNSAGMQEIQVRETFKKQLFLSVVWSVNKLNYFFQYGGENPKMLYQVKYDEDCIAGDIIEELRKADFSRFCYDDPIKNNYIHRFMHGIKEEPEKFELLFDKMSVSYPLEEEDKNPEEILKVLQEINCSVTDLRHSTIHYQKDVVYQETQGPKYPKASEFLRRDIDNIENCFLEQIRSMSLAEYYPLDLLQKVFKDCNLNFQLYASQVPMVPSFQKVFGKGVNLYKADQKSDSLKWYMEVRKDPEAKLATLAYRNFIQLIYYHGFLPAVEKNNALVTDFINETVEWNQERSLQRQREDPKTKQINFSKYRYQGMPEFQNKSLLEYMSELQRDQSNKEKEDSQADVPEDKKKRYYTKFIQDIFAFSFGSFLNSKLNECREDLLQPRYQEMKTNEDREQRLKKLLEDLEMKTNIKNGSPTQLAMYPFLKLLDQRGLNQLLHQFIRYSASVKNSFMQDDKALNLNREIEELIALVAFTKRPLMNTEAYSKAIEMLSETFIEGEIKDYADLYYQSDQEHSVLHRNIAYMGGTGVIALYSDVLRDCYRVKKTDYVEYKKANSKENGRQFTRIGEDQKRLQDLHESLIGRYNSGQIQEYKKLLRKTHEYNVLKKRITFENMYEIYQLHTELLGRLASFAEDWERDMLFLLTGLESRGLIEDRVEKIFLKDKGGVVAKMNKNLKDNEKLLKSLYCREDQESTDFWKTFHVRNAVAHFNHFTQKSQSKGGSVVYQRSIEELINRIRGLLAYDMKRQNAVTQAVQKIFDKHQMIIKFKPVTINSDPEKWVGTWNIEFGIDCIRSKNIVHFKNLSDRICLIEAHDRNTIKAIEKLMKFKYN

SEQ ID NO: 1234 - protein, 949 aa, Artificial; identical to SEQ ID NO: 43
  Synthetic

SEQ ID NO: 1235 - protein, 1142 aa, Artificial
  Synthetic
MLRRMCMKITKIDGISHKKYKEKGKLIKSNEIEKDITEERFNDIEAKTTELFQKTLDFYVKNYENSEDQNKERREKAKNYFSKVKILVDNKKITICNENTEKMEIEDFNEYDVRSGKYFNVLNKILNGENYTEEDLEVFENDLQKRIGRIKSIKNSLEENKAHFKKESINNNIIYDRVKGNNKKSLFYEYYRISSKHQEYVNNIFEAFDKLYSNSHEAMNNLFSEITKDSKDRNIRKIREAYHEILNKNKTEFGEELYKKIQDNRNNFDKLLEIEPEIKELTKSQIFYKYYIDKVNLDETSIKHCFCHLVEIEVNQLLKNYVYSKRNINKEKLENIFEYCKLRNLVKNKLVNKLNNYIRNCGKYNAYISNNDVVVNSEKISEIRTKEAFLRSIIGVSSSAYFSLRNILNTDNTQDITNKVDKEVDKLYQENKKIELEERLKLFFGNYFDINNQQEIKVFLMNIDKIISSIRHEIIHFKMEANAQNIFDFNNVNLGNTAKNIFSNEINEEKIKFKIFKQLNSANVFDYLSNKDITEYMDKAVFSFTNRNVSFVPSFTKIYNRVQDLANSLEIKEWKIPDESEGKDAQIYLLKNIYYGKFLDKFLNEENGIFISIKDKIIELNRNQNKRTGFYKLEKFEKIEETNPKKYLEIIQSLYMINIEEIDSEGKNIFLDFIQKIFLKGFFEFIKNDYNYLLELKKVQDKKNIFDSKMSEYIAGEKTLEDMEEINEIIQDIKITEIDKILNQTDRINCFYLLLKLLNYKEITELKGNLEKYQILSKTNIYEKELMLLNIVNLDNNKVKIENFKISAEEIGKFIEEINKNKKIKTFEELRNFEKGENTGEYYNIYSDDKNIKNIRNLYNIKKYGMLDLLEKISEKTNYCIKKKDLEEYSKLRKQLEDEKTNFYEIQKYLHFKYQQKPKKILWKNNKNDYEKYKKSIENIEKYVHLKNKIEFNELNLLQSLLLKILHRLVGFTSIWERDLRFRLTGEFPDELDVEDIFDHRKRYKGTGGGICKKYDRFINTYTEYNNKMKNVKFADNNPVRNYIAHFNYLPTPKYSILKMMEKLRKLLDYDRKLKNAVMKSIKDILEEYGFKAEFIINSDKEIILNSVKSVEIIHLGKEDLKSHRNSEDLCKLVKAMLEYSK

SEQ ID NO: 1236 - protein, 1175 aa, Artificial
  Synthetic
MKVTKIDGLSHKKFEDEGKLVIIEDASQKNETLERLENLKGIKLGNYIKNPDKTKNKDNKKRRKGLKEYFSEITLRKENEKYVLLKGKKLKKINNDIKDTDIKAKDKKEEVFDILKEILKLNLLVNDAEEKIQFDSIKLKNVFGKDFVKKELQIKSIEESLEKNKADYRKEFIETENHKYENVKGKNKRSRIYEYYKKSENHKKFEDNIREAFEKLYTEENIKELYSKIEQVLKKTHLKSIVREFYKNEIIGESEFSKKNGDGISILYNQIKDSIKKEENFIEFIENIGNLELKDLTKSQIFYKYFLENEGLNDENIKFVFCYFVEIEVSDLLKGNIYKASKIYENKIKNIFEYGKLKNLIVYKLENKLNNYVRNCGKYNYHMENGDTATSDINMRNRQTEAFLRSMIGVSSFGYFSLRNILGVNDDDFYETEEDLTKAKKDITIKKIFEEVVDKSFEKKGIYSIRKNVKMFYGDSFDKANEDELKQFFVNMLNAITSIRHRVVHYNMNTNSENIFNFSDIEVSRLLKNIFEKETDKRELKLKIFRQLNSAGVFDYWESWKIKKYLENIEFKFVNKNIPFVPSFTKLYNRIDNLKGSNALNLGYINIPKRKEVRDSQIYLLKNIYYGEFVEKFVNNNDNFEKIFREIIEINKNAGTNTKTKFYKLEKFETLKANTPTEYLEKLQSLHQINYDREKIEEAKDIYVDFVQKIFLKGFINYLQKSNSLKPLNLLNLKKDEVINSEKSSYDEKLKQWENNGSNLSKMPEEIYEYIKKIQINKINYSDRMSIFYLLLKLIDHRELTNLRGNLEKYESMNKNKIYSEELNIVNLVSLDNNKVRTNFSVEAEDIGKFLKTETLIKDARQLNNFSERFSDGENVIKHRSFYNIKKYGILDLLEKIVAKANLKITKEEIKIYKNLQKELEKNDFYKIQEKIHRKYNQKPNLISRTENKKDFNDYKKAIENIQNYTQLKNKIEFNDLNLLQGLLFRILHRLTGYTSLWERDLQFKLKGEFPEDKYIDEIFNSDGNNNQKYKNGGIADKYADFLIEKEEGKRAGKNKIKKRSERERSFIIRNYIAHFNYIPDAEKSILEILEELRELLKYDRKQKNAVMKSVKDIFKEYGFIVEFGISHENNSKKIKVCDVKSEEIKHLKNNGLLTTRNSEDLCELVKMMLEYKKS

SEQ ID NO: 1237 - protein, 1184 aa, Artificial; identical to SEQ ID NO: 1138
  Synthetic

SEQ ID NO: 1238 - protein, 1396 aa, Artificial; identical to SEQ ID NO: 777
  Synthetic

SEQ ID NO: 1239 - protein, 1149 aa, Artificial
  Synthetic
MLRRMCMKITKIDGISHKKYKEKGKLIKNNDTAKDIIEERFNDIEKKTKELFQKTLDFYVKNYEKCKEQNKERREKAKNYFSKVKILVDNKKITICNENTEKMEIEDFNEYDVRSGKYFNVLNKILNGENYTEEDLEVFENDLQKRTGRIKSIKNSLEENKAHFKKESINNNIIYDRVKGNNKKSLFYEYYRISSKHQEYVNNIFEAFDKLYSNSHEAMNNLFSEITKDSKDRNIRKIREAYHEILNKNKTEFGEELYKKIQDNRNNFDKLLEIEPEIKELTKSQIFYKYYIDKVNLDETSIKHCFCHLVEIEVNQLLKNYVYSKRNINKEKLENIFEYCKLKNLIKNKLVNKLNNYIRNCGKYNAYISNNDVVVNSEKISEIRTKEAFLRSIIGVSSSAYFSLRNILNTDNTQDITNKVDKEVDKLYQENKKIELEERLKLFFGNYFDINNQQEIKVFLMNIDKIISSIRHEIIHFKMETNAQNIFDFNNVNLGNTAKNIFSNEINEEKIKFKIFKQLNSANVFDYLSNKDITEYMDKVVFSFTNRNVSFVPSFTKIYNRVQDLANSLEIKKWKIPDKSEGKDAQIYLLKNIYYGKFLDEFLNEENGIFISIKDKIIELNRNQNKRTGFYKLEKFEKIEETNPKKYLEIIQSLYMINIEEIDSEGKNIFLDFIQKIFLKGFFEFIKNNYNYLLELKKIQDKKNIFDSEMSEYIAGEKTLEDIGEINEIIQDIKITEIDKILNQTDKINCFYLLLKLLNYKEITELKGNLEKYQILSKTNVYEKELMLLNIVNLDNNKVKIENFKILAEEIGKFIEKINIEEINKNKKIKTFEELRNFEKGENTGEYYNIYSDDKNIKNIRNLYNIKKYGMLDLLEKISEKTNYCIKKKDLEEYSELRKQLEDEKTNFYKIQEYLHSKYQQKPKKILLKNNKNDYEKYKKSIENIEKYVHLKNKIEFNELNLLQSLLLKILHRLVGFTSIWERDLRFRLIGEFPDELDVEDIFDHRKRYKGTGKGICKKYDRFINTHTEYKNNNKMENVKFADNNPVRNYIAHFNYLPNPKYSILKMMEKLRKLLDYDRKLKNAVMKSIKDILEEYGFKAEFIINSDKEIILNLVKSVEIIHLGKEDLKSRRNSEDLCKLVKAMLEYSK

SEQ ID NO: 1240 - protein, 1184 aa, Artificial; identical to SEQ ID NO: 874
  Synthetic

SEQ ID NO: 1241 - protein, 1184 aa, Artificial; identical to SEQ ID NO: 874
  Synthetic

SEQ ID NO: 1242 - protein, 1184 aa, Artificial
  Synthetic
MRVSKVKVLGNEETKGRIVLMHRSPVKGQLIYSEDAGKRDRTEDIIPEQKLESFHLSILNKTFLRKEFFKKELKHEAKKNGLKGDAEDKYISEKLKEYHSLLQFIDDVLSVKYNENRKAIKFPEYLTREMIEIFLNHKFRKEVTYTNKNGASVSFLLSTLILNAIEKHSVIEMQPFVDWRNWFVETKSKFLKKSIINNCIPTNGGPISRRRETLMKWRDDYFTNAEIDLARLHKKFGTDTLMASLREVPQTEKSGNEYHRLLKSCLQSHQKKLFGKRAEGYDINRADNQLYVYNTEVVKYMEHYFPVKSSKRRNSTAEIKYYLQTDTIKCCLHHQIINAVRGLALREGKFNLHGFDDKLIPNERNVSSSILNELKTSEGFVLNMLGGCAFAANCLRNIVDATQRSDLLGFRCFEVSLKKGKSNSDLFALFFGFGREDMDDDSEWEKHLYAARYSVSEIRNRVAHYHKSAIENIYNITDFKYRENSMCSYTDTKFTTALQNEIYNTPKALSLQLMTGKVLEYYPKEKLVSFFQKYKFSLYRSVVPFAPGFKNIMRTGVNYQNATQNSLFYDMGLTAFQDKDRYIDDVEAWNARYFFMKLIYNNLFLPRFTNDKNDLFRKTVEQVLEVNRSHMEKVGKDDRQAFGEVRQMRENETANDYMAYLQSSLRMEKNKKELEGNGAKRINFEKFILQMFVKGFDSFLKDGAFEFVHSPENCLTGSTEKERAKERNSLCEEIGNYVRLVSTVIDPGKGSHVAFYVFCKMLNSVYLSNIRNEMIKYHKVVRTDELAHLIEIIELCLLSADAVSQKTVNADKLSHFFAEGVNVDDDENVIHASMETFRKYGTRDLFHKLMLQDDRFLVSSDDYREWEEMKEKIEGKVKQRELLHAEWCEAKEKDKKSRKVKSNSRTCFEKKFMGAKAEEYYSLCKVIDKYNWLDNKLHLVHLNKLHNLVIEILGRMVGFTALFERDFQYICKSDSEYEQLYNLDFNMGLPKFKNSIKGSGKAKNSTQNIDHNATGIGNSSNLLKENSNGTHYCKNLSGDGVEDKLKRLFLYDDYRNVRNFVAHFNYLTRVEDDLGGNDAVKLSGTRYSLIELINELRNLLKYDRKLKNAVSKSFIDMFERHGMHVKMKLNHNHKLFVDSISPRKIKHLGGGYKKRGKDDKMYVQTTNHVDPLYCDMCRALLEMK

SEQ ID NO: 1243 - protein, 1360 aa, Artificial; identical to SEQ ID NO: 101
  Synthetic

SEQ ID NO: 1244 - protein, 946 aa, Artificial
  Synthetic
MKLSKEKHTRSAVANEEQNIGGILYRFPGKSIDGVKDQMLRRDKEVKKLYNVFNQIQVGTKPKKWNNDEKLSPEENERRAQQKNIKIENYKWREACSKYVKSSQKTINYVIFYSYGKAENKLRYMRKNEDILKKMQEEEKLPKFSGGKLEDFVAYTLRKSLVVSKYDTQEFDSVAAMVVFLECIGKSNISDHEKEIVCKLLELIRKDFSKLDPNVKGSQGANIVRSVRNQNMIVQPQGDRFLFPQVYAKENETVTNKNVEKEGLNEFLLNYANLDDEKRAESLRKLRRILDVYFSAPNYYEKDMDITLSDNIEKGKFNVWEKHECGKKVTDLFVDIPDVLMEAGAENIKLDAVVEKRERKVLNDRVRKQNIICYRYTRAVVEKYNSNEPLFFENNAINQYWIHHIENAVERILKNCKAGKLFKLRKGYLAEKVWKDAINLISIKYIALGKAVYNFALDDIWKDKKNKELGIVDERIRNGITSFDYEMIKAHENLQRELAVDIAFSVNNLARAVCDMSNLGNKESDFLLWKRNDIADKLKNKDDMASVSAVLQFFGGKSSWDINIFKEAYKGKKKYNYEVRFIDDLRKAIYCARNENFHFKTALVNDEKWNTELFGKIFKRETEFCLNVEKDRFYSNNLYMFYQVSELRNMLDHLYSRSVSRAAQVPSYNSVIVRTAFPEYITNVLGYQKPGYDADTLGKWYSACYYLLKEIYYNSFLQSDRALQLFEKSVKTLSWDDEEQKRAVDNFKKYFSDIKSACTSLAQVCQIYMTEYNQQNNQIKKVRSSNDSIFDQPIYQHYKVLLKKAIANAFADYLKNNKDLFGFIGKPFKANEIREIDKEQFLPDWTSRKYEALCIEVSGSQELQKWYIVGKFLNAMSLNLMVGSMRSYIQYVTDIKRRAASIGNELHVSVQDVEKVEKWVQVIEVCSLLASRTSNQFEDYFNRFYQ

SEQ ID NO: 1245 - protein, 1268 aa, Artificial
  Synthetic
MKVSKVNHRRAAVAVNKKSVTVNGILYDAPVKKNVKTGNMSAYVSSKYVIDNVVKNSSRLYSPFSSKRIVIDREKIRIADRLKQCYVNFVKYYLSNGSLNEQQMRFNPNNTYMTDSRVHFCAPSGIDKESLINSIVDSSLRKSLKRTYRFETNYGEKITFNLPDLVKKSIKIYCTDEKRKLNDREEQEMYVLFSYMYEDKYKDRQKVLIANSISNQATKVKVCDDESRLIKLSIADTKKKPLWDFIVDYANSDKNGQYTILRNIRKSIVLFVCGVDVYRNIENNDNLDIWKWEEYGIQESQLFVKIENCYTTKDEDIALNEIRNVNLDHYMKAIGVLDDERSKFWFQHYENTIEALFSKKSKRKIERIKTAYLCEYLWKNFCSYVALKYVDLGKGVYHFTMSDKLSLMNKNTNENGIKFGEVDSRFNKGISSFDYERIKAEETIDRNISTYTTFATNIFAKSVIKDSYIQKKAGNSDALQYDDETYYNRKAMNPDALKRVLQYWGGQSRWKSELEELNVAELCIDIKNRLSKIRNSGVHYTSTSTLKGNDDDSIVGMLIKKDFDDIKDVYASKYYSNNVWIFYNTDKISKMMEYLYQDDSNIRDAQIPAFNSVIKRKDMAEVIEKIIKKNSYKTIKEPYQREKYRSCLYFMLKEIYYNRFIKQDDLKDQVIQIIDSNTELIGDNSRAVDNLKKRIHDVDSQTMSFGELCQVIMTDYNMQNQENKSIKSKERQDKDRKNGIDNSYKHFPLLLHHLIKVSFLKFIKTDEKLAFIREPRITEYDKTLEQFEAQIQTVDIYNSLKVMVAENKSLLDWYTLAHFLMPKQLNHLIGDIKNYIQYLSNIDKRAGSVKNNKCASTEVKIRQYSEIVRILDFSLQYIGRVSNDVTDYFVDEDEYAAFLSKYVEFSGNDTVSMKAFCQSRTANGKHTIGLYCDGANPIMNRNIAYAKMYGNDEILSYIYNKVTKKDIEKYYVSQDNLEKVFADGKCQDVQQQNALCDFQKMKNHIELTEVSIYTDILNDFMAQFISWAYLRERDLMYFQLGLNYIRMFYGTYELEEKYNKLHGENINIEKGALLYQIVAMYSHELPIYKVDESDIAILAEKQGSSGASIKSFVTEYCKEEMKKAYTYENGLEFFEDVNQHDNLSKLRNDFAHMRYMSARDKSIMDIVSEIYNGFFIYDTKLKKSVSFIFKNILMRYAVDVNIEFCHKGDNEDTNNLIRIKDEVGLYSDKYTYKVEDNDTVDIEVRNSEFLEQLKKLLEYKKESKGSEL

SEQ ID NO: 1246 - protein, 1265 aa, Artificial
  Synthetic
MRIIKPYGRSVIAKESLAERKIDLGGEPSGSKLKIYSVKELADNDKLVMAYWISVIDRIICKPIEPRKKQTEKEKQANQGAAASRAAIGDAAWEILQTELSAFQANSRYKTAKERTNDQEKLRDIWQQKIAALSSAKKQSNFFPRGRWYDIFAKDCNPFKISQGEADRIADKISKHLYQKAYKYNKSSQPVHQKPGADKRRKSCGVLNDTLKSIAVNSLLNAEMHRRRLMPIGENIWQEYCSKAGEFAAEIRNNILAAHDSDDKTKPYHLSVMALRDIVWPKVFDKASDYNSAVKGKNKHLLPIHKAVKQVYKTILKEAVLLHEKQKETFPKGSAGRDAMLAERRAKLAGILPASNEAFYALLKNKQRNSEVNSLIRLGKVIHYTASKNKEYDETNSINNFPDKEAIENSPYWSSQGQTEIKQNEAFVRVWRRALVFAAHNLKNWVDPKGELRDKEDREADILFSNFAYPEKLGYQDIAQSGRSHLEQKFALSFGDSGIAAKNAAPVENRQILLLAWSGLKALRNSAFHFKGMGSFVNGIKGLAGTAPGAAEFARELYNIDCGKRQERLKAVMQAAYFHLYFGISQIETIWQASALLSAEILPLPKLKSVLERAQKAWNRNIKPQTDEKLSLILPPYSTPQEREADEWALCQYNAAKILYENGFKTWLQNLSKNGSAELRRYIETALANTTSAARSMNAKKDEDGEFVVAKAEKVLAALPQSGTMEKFFAGLMSEITAEGRIQKQVYRNDPEKAQGFSAYLENLKCDVIAQAFSDYLSGIIDKKDLFCARERKASEVQAGNVFSRLSPVKLKKPEEEWEGILYFLLHFMPVEEAGGLRQQLKKWELAVDAGETKGQREDERKLAQSVLKAFDLYIAMHDAQFLETKDDSLAEKLGSAQGKAAEILSETYGDFYEGGEADFCKIFMPAGGQKGIGTDPLLRELREMQRFGSRGLNELFRKLGPEIKKSQVAAWLDEERARRDGQGIAQIQKEKIELHEQWIDNPKSKDWFWFDAVKKQWRLGVKAKQYQLLVNKVTRHRQLTAQVTLQNYLRLHRLIMAVLGRLVDFSRLWERDLYFVLLARLYEKQQEGEVKKQGYLKSQFRLKKDGLMKDGIYFLRSGQIVEAVKALKDEMLRGEINSVFGIGENDNSQIFLRNYFAHLAMLSNEKIAEEGIDLTQAVNKARRLMAYDRKLKNAVSKAVLDLLEREKIKLQWMKVEKTARGHDLAQADIHSDFAYHLKKSKTDKSQIKEPIYGDDYIHMLKSLF

SEQ ID NO: 1247 - protein, 1184 aa, Artificial; identical to SEQ ID NO: 683
  Synthetic

SEQ ID NO: 1248 - protein, 966 aa, Artificial
  Synthetic
MQMKISKIKNSRPGISVAENKNEESLSRQSLLYYAPVKDGKIRLESKDLEQHVTECNEKAQKLYNVITPEINFYRDENRQKMVENLARNFNAVINNALRSIRNPKEKKEQRVEKEVAFILNLSKKSIKMKKDVFVKSTDLIVKFPENNKYNKKNDKGTGSKEAYIQKMISDLVLRKLKNTLRKEVKLENGYRMQMTEIIISLMSAICLYGNAESFDPAILKAFFEKVDSDYTKYKYVEQIVKSIESQSAKLKVVEKDGRHLLISANADHRKKKYVFEFMRMYAAADEKEKRELTEHIQDLIGLYLCGKAGYENAENRFSDMTESHNCICGKIEEILNELEKPENLSQKKKENLKNTTVKVMALKYRAAVNYLADEVGKTVLGEIREKKVRSCADLYWIEYIDSTVEKLLLKSRNKDGYRYEIGFLSKHIWKEWTQYISGKYIEMGKGVYHFAIPDLSGNLEGEPISICEVKPEYRNGVSGFDYERIRAEESLEREMEKYVLFAVNNFARAVTPEEEREKSGHEDVLLMKTLSEIEESQTKEERQKKHDNNVKNAITLYADADRRILQFFGGQSRFREKEDSLINLYSGEDLYKEIRKELYAIRNITFHYTTKADKDQTQKHDLAEYLFEEEFSDITELFREKYYANNVWKYYDVEVINTIMENIYCGRKYRAAQVPAFKNIISRPELPQVMNGFVKGNSLRRLMNCPDRDVINKYWSALFFVLKELYYYDFLQEQKKPEDNVKERFFRAIEKLSGQENDDKKQKAWESFGNRIDQIGRDRSFGAICQGLMIEYMLQNSDISMVQTETDNGKANNKKQIYKHYRTLLYNCIREAFIEYLREKWEELRTPVLTVKEWSKEEFCRADGLKHLSLFDHLKKTFNDAESGSSWYMAAHFINQKYLNHLLGSIRNYLQFTEDIEDRAISLGDCVDNKREEKNLRYRNTLEILEFVAQFCERTTNVMEDYFES

SEQ ID NO: 1249 - protein, 1184 aa, Artificial; identical to SEQ ID NO: 874
  Synthetic

SEQ ID NO: 1250 - protein, 1184 aa, Artificial; identical to SEQ ID NO: 683
  Synthetic

SEQ ID NO: 1251 - protein, 1287 aa, Artificial; identical to SEQ ID NO: 105
  Synthetic

SEQ ID NO: 1252 - protein, 1153 aa, Artificial
  Synthetic
MPIIKKFGRSTSSLTERTLILGAKRTEEHGSVRKIPEFLTHDAEALLGQWASAMDKVASKPKGRDKPSAFQRSFREDLGSAIWADLTSADGPFARLDEKARDILHKKWDRRIHPYPDGTAAEHKPASPKGRLYSMFAGEVGYGAADKPAIARKIRLHLLGEELRKSGGTRPQGHAVRRANSIEKNTLPKIKATPVPDWDDADIVTYRRHGDVAKAIRVAAEVAEKEKRKVGWRLAAAEIYVHFGKVFTNGGRMLSFAEAETKHPGLTGLHRAIEDLYRQRLKRHLKDPKLHASQPGTERLVSVILPEDFDSLLRALGNRRQNRDIGALIRKGRILHYEAGARVNRDDVAWINQHWPDDTTKSRYWTSDGQTEIKRHEIFVRIWRSALAHANRTLADWLDPDGKATDIAEGGNTFEQVLAATGQATVVQTANLFGSRAAALESHEAIQDLARLVWTVYTQLRHNSFHFKGVDGFKVALTPKLAEIAPGALQFTTNLLRGDFRDSEARLRAVLRAAQVEGFLDRGRLAEIWAALHPAGEAGLGPALPRFNRIVQRVDGTGAIAELPCAVNQFDMANPAIHCRYVVTKLLYERGFRAWVAMATTDQINAWIKSAEDRTQKAKDEIHGHPEDKARMVGALRLRDGQGIMDFLSELTALTATEFRVQAGYEPNRAAAQEQAEYLFHLQCDVLALAFKEYIRAARLGWLSDTLKPDRVARGVLSDVDKLADPKATPDFEDWQAGIYAVLHLVPVDEVGRLLHQLRRWANGQPADETSVKIERLLELYLDMHDDKFEGGGPLHDHPDLQALFETPDLLAQVLPQVGATEDERRRVPLRGLREMLRFGNLRILKGVFAKAPITTAGVAKLAEYEKSRADGLGGIDHAQQIRQKRHETLAKLRMLGPDSYGDVRDYLFVTKRIIRHRRLANHVRLVNHVRVNQILMSVLGRFADCAGLFERDLYFTLLALIHELGQKPEAGFDAKALGKFEDGQILTALDRNKTPLPASIACELQRHFGLDAKGAGPNRKRRNDFAHFNLLRSKTPINLTAAMNDARALLSHDRKLKNAVSASIVTLLEREQIVAHWNMGTDHQLADAVIGTRRIVHLKSAELAENLRDKRFLTLIAQLFNGRVNNLPDDIAALDRPGIEALAARVTGGGGR

SEQ ID NO: 1253 - protein, 1165 aa, Artificial
  Synthetic
MGSGKYRITKIARKWDKNENWEKIILKRIVDNKKIKYVNENNNKDVDITDTYYSILSKNNSKFLGSEEQFIFKVNKMKRNIKNDCVIIKDYTEEEFEKFDKKIFFSRKIKVNNEDREKICRNFYEDEREIMKKRLEEAKNFNNIIFNICNKIFKLEYIDYTDEKVYEIFQKEIKFEDIKNLKEAFKQQENGLETDKLLTISFNKKRSNVLLEFIQQIVKQNFENEKELENWFSHDGEKYCKEIFKIYSNMSQKEKYSKLLGHNDESIASDSEKRETLQRRLKLGDYSKYDLKKYYQKDYKEEAIKELEDKSKEELEKEVEEIIKKNYKIDKLCDEISNLEFSFVDSKKENKDKMSEIIVKIKEHYKNNVNVEEELENKEKYILSMIHNYIKGRYRKCLELQQKENVDFENLGKRIKEIFDSNKVTEKLKKSILNKVNNYKIFETKFQNPNIESSDDLEILKAEETFLNKLSTAVSKVGYILNILLEIHFRNDILQDYNQVEKLWKSDSFQKICAIYPEINNDEKLLKGMIYFIQGLRQQVLHPKILWEKQNIYNAENIKEKEKIVSVRLQNEGEAYNKKGIQNYFENVLKKIPDYFIEKYESNNVFNIYRNFVDKIMEVVKNFNFKENNTIDYLFPKFHKIYKRMCKLENIDDRQNGARKYLLQIIYYYYFQYEIENDKNNISKYLNLYRNKIKVKKISYSYITDNKAVNNKNIEILYRNIQREGMLNNKLSQMNKEWIEFIVVQFSEFLTNKKLNWILDNLSEYKKKEKLDENDKNRLLKILKQKMNKKIIYSNDSYAFISLAQFLDLKEISNLIHDIKKFIQFREKNVSKYKPEKNKLYIKELRKVLYILKVMLEHKERVIQKHYLESYDENISIIYGKDIERKDIKDIKIKIKNENQEVINQPLYKSGNDENSSWIVLYGIEQAKRNGTFKFFEGFFNLNDDIKLCKENIEKYEELYNEKEENQRKVDEYISSEENNNIDEIKEINNNKQLFYYYKNMIYGDGLKKGYDFINDIYSHYLSWAYRVERDCKIYKIKEYENKKNFNEYKFKEYKSIKNFRNEIAHFNYFQKTNKSLLELLNDFYDIFDYNLKYQRDVQNVINNIFEKYQIVRKDGGPVVFYCKTDKKLKLSENLVPKKHSKYPEIKLIHEKYVMFFRKLFEYKK

SEQ ID NO: 1254 - protein, 1360 aa, Artificial; identical to SEQ ID NO: 92
  Synthetic

SEQ ID NO: 1255 - protein, 1161 aa, Artificial; identical to SEQ ID NO: 1206
  Synthetic

SEQ ID NO: 1256 - protein, 1197 aa, Artificial; identical to SEQ ID NO: 1112
  Synthetic

SEQ ID NO: 1257 - protein, 1161 aa, Artificial
  Synthetic
MKVTKVDGISHKKYIEEGKLVKSTSEENRTSERLSELLSIRLDIYIKNPDNASEEENRIRRENLKKFFSNKVLHLKDSVLYLKNRNEKNAVQDKNYSEEDISEYDLKNKNSFSVLKKILLNEDINSEELEIFRKDVEAKLNKINSLKYSFEENKANYQKINENNVEKVGGKSKRNIIYDYYRESAKHNDYINNVQEAFDKLYKKEDIENLFFLIENSKKHEKYKIRECYHKIIGRKNDKENFAKIIYEEIQNVNSIKELIEKVPDMSELKKSQVFYKYYLDKEELNDENIKYAFCHFVEIEMSKLLKNYVYKKPSNISNDKVKRIFEYQSLKKLIENKLLNKLDTYVRNCGKYNYYLQDGEIATSDFIARNRQNEAFLRNIIGVSSVAYFSLRNILETENENDITGRMRGKTVKNNKGEEKYVSGEVDKIYNENKQNEVKENLKMFYSYDFNVDNKNEIEDFFANIDEAISSIRHGIVHFNLELEGKDIFAFKNIAPSEISKKMFQNEINEKKLKLKIFRQLNSANVFRYLEKYKILNYLKRTRFEFVNKNIPFVPSFTKLYSRIDDLKNSLGIYWKTPKTNDDNKTKEIIDAQIYLLKNIYYGEFLNYFMSNNGNFFEISREIIELNKNDKRNLKTGFYKLQKFEDIQEKTPKEYLANIQSLYMINAGNQDEEEKDTYIDFIQKIFLKGFMTYLANNGRLSLIYIGSDEETNTSLAEKKQEFDKFLKKYEQNNNIEIPHEINEFVREIKLGNILKYTERLNMFYLILKLLNHKELTNLKGSLEKYQSANKEETFSDELELINLLNLDNNRVTEDFELEADEIGKFLDFNGNKIKDRKELKKFDTNKIYFDGENIIKHRAFYNIKKYGMLNLLEKISDEAKYKISIEELKNYSNKKNEIEKNHTTQENLHRKYARPRKDEKFTDEDYKEYEKAIGNIQKYTHLKNKVEFNELNLLQGLLLKILHRLVGYTSIWERDLRFRLKGEFPENQYIEEIFNFDNSKNVKYKSGQIVEKYINFYKELYKDNVEKRSIYSDKKVKKLKQEKKDLYIRNYIAHFNYIPHAEISLLEVLENLRKLLSYDRKLKNAVMKSVVDILKEYGFVATFKIGADKKIGIQTLESEKIVHLKNLKKKKLMTDRNSEELCKLVKVMFEYKMEEKKSEN

SEQ ID NO: 1258 - protein, 1136 aa, Artificial
  Synthetic
MRISKVKVQDNNRKVMVLMHRTTVNGALVYEGETNVRTSEILPKKKSDSFALSIDNKTLIKRDSLKDKKQKDNYDIVKKIITKRVLPIQISDEDVLPVLNHKFQNEIIYYKNNEPYSFRLASLIVEAVKERNPEKLQPYDDWKNWYISTKSSHLIQSIEQNKIDLNGTDSKRKTALQAWATKYTTSGSIDLSFYHKLYAIDTLAGALHNTEKGELDQEKNTPKNINLFHRNLKKTLQTHQKTVFGTREAPNVKNRKDEQLAIYHLEVVKYLEHYFSVKSTQRKNTQADIDYYLKAETIKSTITNQLSNAVRNYLLQKGKAEHHKFDNTTDSSRLTEIKRNEAFVLNMIDACAFAANNIRNIVDTEQTNDILGKTEYVQSLKKTNRVNKQLFKFFFGTDLPATDSHKAKTLWAMRGAVQQIRNVVIHYKQGALDTIFKIEKFEYPDFEDQSYTDTIYKTCLETELKQVPEAFAQQLKTGGVLAYYPYDDLKALLNTVSFSLCRTVVPFAPSFKKVQKQGQNYQNAQNENFYDLVLKSYLPKEKDASKEEAYNARYFLLKLIYNNLFLRNFTENRTQFSKTVNYILSQNKKQAEASKNSKAYAFEAVRQMKEEESISDYMAYIQSQLMLEKNKKEDDKSEDTHINFEKFVLQVFIKGFDDFLQDEKFKFIAKPYFQLSKDETKQTEQLNQFEQGIINECRVQSHSINTEEATHVAFFTFCKLLDATHLSNLRNELIKFKQSAKQFELSHMLEIIELTLLNADRVPADYRKLYENKTDCLNRILFFIADGIDFTKWSDLFVQTDNETPVVHANVELTVKYGTAKLLEQLIAKDVSFKLSESNFTLWDNAKDTIEVLINKRLDLHKQWEEAVRKDKEEKNKKIKPRSNFAQKFINKEGNDYSELCEYIDDYNWQVNKLHFVHLSRLHHLTIDILGRMAGFIALFDRDFQLFDASRTQDPYQLKAFVSLSNMAKDLNKQNDIAGIKGMEYVVKRDGSPITEADRNSLKDCIQNKREYFSKVFFLKGSKQFEVRNYIAHFNYLSTTAENYSLIDLLNEIRDLLSYDRKLKNAVNKAFIDLFDKQGMELKLKLNANHRFEIESVNPKLIYHLGTTLKSEDPISFYQVKLEYCNMCRALLEMKK

SEQ ID NO: 1259 - protein, 1197 aa, Artificial; identical to SEQ ID NO: 1112
  Synthetic

SEQ ID NO: 1260 - protein, 1184 aa, Artificial; identical to SEQ ID NO: 874
  Synthetic

SEQ ID NO: 1261 - protein, 1184 aa, Artificial; identical to SEQ ID NO: 874
  Synthetic

SEQ ID NO: 1262 - protein, 1048 aa, Artificial
  Synthetic
MRVFIVKITKNAKNGKVQFYRNMEQGGLRDNKIRNSDDITESAIEQLDLKKSYTGRILSADAQRGKENPFYSFVRSLTGELDDRIPIDYLRDVKFKEADRKCDIQCSISKYLSHYVKKLTCDDGSTTLESLLLDYYKKSLTDEETETKLEQIQDDISNRLSHKKENFKISFQNNSIPFEKYAVTAGDTVKFKIHPSSNKMKWFFGFLGEQGVNKERFNDYMEMYRYTNLESELNSFTDEHFSNSDNINGDYIAKKIYEIMKEYNSSLYNTEKNGRISEIQLQGYSFFLNEIRDHFKKYFPPKSNKSQGRSGNKGPRIKSLTNSKNVKYFYSKDFVYQQVWKHIVNQLVSGLIQYGKLYTYCVAPGSDYHEINSDIMQDIQIQEAIKKQLLLSVVWSVDRLNYYSNYAGDKIERMYKEDSNDILGELHKSTYFGGRGNSRFASDFAQGIISDPEKCNKLFKKLSNTFLLKQEENNSEFLIGLIHEIVDNLYEVRLKVMHYQKGALKFNDVTGTVLLETQLRRDINNVQNCFQEQIRSMNISRYYSPELINKLFTRCGLKFKLYASTPSMIPSFKKVYAKGVNLFKGDSDKELKWYLDDKGNMQSEEAVSVYRNLLQLIYYHVYIPSIGEDDRDNLVIPFIARTIKWNKEKSYEKRKNSKKNSYKNKGKKAYINVNAYRYESMPKYQPGQSLSEYMSVLQRAQSDKETTNIATGESGDERKNHFTNFVQDIFVFSFASFLSCKLEAYEEDLLRPQAQLSTVAAETEKLDHMLQDIRMEVSGGLENQAEIYAMLKLLDAKALNELLHQLIRYRTSISCSLGASNPDYFKDFSEIEELINLVAYTKPVLVKEENYIEVLEHDFSIFMEGEPSDYEDLYVQSDLNTTVLHRNIANMGYTGVMALYSNIFKNSYRVTRADYQKYKNMKTTEDKEESVIAAKQKKLQEMHEKFVKKQRISNFERQQYKDALVEVQNYNHLKRKVTFDSMYEIYQIHAQILGRLASFAEDWERDMRFMLTALVEEGKINTDIEKLFYKGRIVGKIKKGFECGCLPF

SEQ ID NO: 1263 - protein, 1161 aa, Artificial; identical to SEQ ID NO: 1206
  Synthetic

SEQ ID NO: 1264 - protein, 1179 aa, Artificial
  Synthetic
MGSGKYRITKIARKWDKNENWEKIILKRIVDNKKIKYVNENNNKDVDITDTYYSILSKNNSKFLGSEEQFIFKVNKMKRNIKNDCVIIKDYTEEEFEKFDKKIFFSRKIKVNNEDREKICRNFYEDEREIMKKRLEEAKNFNNIIFKICNEIFNLEYINYTDEKIYKIFQEKIGFEDIKNLKEVFKQQKKGLETDKLLAISFNKNRNNVLLEFIQQIVKQEFENKEELKNWFSHEGEKYCKEIFKIYSNMSQKEKYSKLLGHNDKSTASYSEKRETLQRRLKLGDYSKYDLKKYYQKDYKEKAIKELKDKNKEEFEREIEEIIKKNYKIDKLCDEISNLEFSFVESKKENKDRMSEIIVKIKEHYKKNVNVEEELKNKEKYILSLIHNYVKGRYGKCLELQQKENVDFENLGKRIKEIFDSNEVTEKLKKSIINKVNNYKIFETKFQNPNIESSDDLEILKAEETFLNKLSTAVSKVGYTLNILLDTRTTSKKMNKKKIKNPDILAGYNVTIELLPYCSFEILYNVYPEIKKDIELLKGMVLFIQEFRQKILHPSQLLGSNVKKSISIKEKDTIVKIHEDNKDNEKREMYNKEKIRSYFEDILEKIPDYFIEKYESDNVFNIYRDFGVKIMEVVKNFNFKENNTIDYLFPKFHKIYKRMCKLENIDDRQNGARKYLLQTIYYYYFQYEIENDKNNISKYLNLYRNKIKVKKISYSYITDNKAVNNKNIEILYRNIQREGMLNSRLLQMNNEWVEFIVVQFSEFLANKKLNWILDNLSEYKKKEKLDENDKNRLLKILKQKMNKKITYSNDSYAFISLAQFLDLKEISHLIHDIKKFIQFREKNVSKYKPEKNKLYIKELRKVLYILKVMLEHKERVIQKHYLESYDENISIIYGKDIERKDIKDIKIKIKNENQEVINQPLYKSGNDENSSWIVLYGIEQAKRNGTFKFFEGFFNLNDDIKLCKENIEKYEELYNEKEENQRKVDEYISSEENNNIDEIKEINNNKQLFYYYKNMIYGDGLKKGYDFINDIYSHYLSWAYRVERDCKIYKIKEYENKKNFNEYKFKEYKSIKNFRNEIAHFNYFQKTNKSLLELLNDFYDIFDYNLKYQRDVQNVINNIFEKYQIVRKDGGPVVFYCKTDKKLKLSENIIPKKHLKYPEIKLIHEKYVEFFKKLFEYKK

SEQ ID NO: 1265 - protein, 1119 aa, Artificial
  Synthetic
MKQLKEVCAYIRVSTGKQEELSPDSQLRLIKEYAQAHDMLLTHVYMEEHGISGKSSEKRPAFQEMIAACKDKSHPYDAVLLWKFSRFARNQDEATYYKSILRKKCNVDVISISEPIIEGMYGRLIEMVIEWSDEFYLVNLSGEVMRGMTQNALNGGYNSNPPIGYTKKRGEIPQVDPERAELVRHIFRMFTEQHMSRNDIASTLNRQGITTNRGGRWETRTVTYILENPFYIGKIRWNFYDRSQNRRKDTGDVILSDGQHEPIISADTFAAAGRLLAKARTTSCFGRKRSVVATKHWLSSMVLCSSCGASLGYNKGSQKKHAAPFFQCWKHIKGMCDHNSYISAAALEQMVIDAIIHFGQSFDLMYHFSDAPQADDTVYLTRELSKLSEKERRIKDAYISGIDSLEEYRENKWDELEQQLADNHKVTPIKERYQQIDMNHLLTVLQDPDQDYIVKGNSLRRLMNCPDRDVINKYWSALFFVLKELYYYDFLQEQKKPEDNVKERFFRAIEKLSGQENDDKKQKAWESFGNRIDQIGRDRSFGAICQGLMIEYMLQNSDISMVQTETDNGKANNKKQIYKHYRTLLYNCIREAFIEYLREKWEELRTPVLTVKEWSKEEFCRADGLKHLSLFDHLKKTFNDAESGSSWYMAAHFINQKYLNHLLGSIRNYLQFTEDIEDRAISLGDCVDNKREEKNLRYRNTLEILEFVAQFCERTTNVMEDYFESNQEYAEYLSGFVDYNTTKKETDIEKALYSFCKQKFKVDGKEYMAGIYYDGENLIPNRNIIRANMYGNTSCLKPCMDRITLKEIRTMYADQNKLDLVLKEGVCHTEEEQKAYREYQNEKNRIELFDVCTYTQILNDMQARLIGWSYMRERDLMYYQLGYYYTKLFWTDSISEEDARRRLVGNLVNVEDGAILYQILAFNSYNLPIIANKNNTVTLLKDEGSIGGKAITAFFKNYENAEMIYEEALDLFENMDEHAAIINTRNYIEHFKYFIKSDRSMMDLYSEIYDRFFRHDHNRKKNVPDSLKNVLADNFMIVDIDMELGSKKVGEKKKGFREHKAARIEFTDSGIRSTDMTYTIKPDIKDNKKDKKVLVPARSEVFLKQFRKILEYRIQDKIQ

SEQ ID NO: 1266 - protein, 1161 aa, Artificial
  Synthetic
MKVTKVDGISHKKYIEEGKLVKSTSEENRTSERLSELLSIRLDIYIKNPDNASEEENRIRRENLKKFFSNKVLHLKDSVLYLKNRKEKNAVQDKNYSEEDISEYDLKNKNSFSVLKKILLNEDINSEELEIFRKDVEAKLNKINSLKYSFEENKANYQKINENNVEKVGGKSKRNIIYDYYRESAKRNDYINNVQEAFDKLYKKEDIENLFFLIENSKKHEKYKIRECYHKIIGRKNDKENFAKIIYEEIQNVNNIEELIEKVPDMSELKKSQVFYKYYLDKEELNDKNIKYAFCHFVEIEMSQLLKNYVYKRLSNISNDKIKRIFEYQNLKKLIENKLLNKLDTYVRNCGKYNYYLRVGEIATSDFIARNRQNEAFLRNIIGVSSVAYFSLRNILETENENDITGRMRGKTVKNNKGEEKYVSGEVDKIYNENKQNEVKENLKMFYSYDFNMDNKNEIEDFFANIDEAISSIRHGIVHFNLELEGKDIFAFKNIVPSEISKKMFQNEINEKKLKLKIFKQLNSANVFRYLEKYKILNYLKRTRFEFVNKNIPFVPSFTKLYSRIDDLKNSLGIYWKTPKTNDDNKTKEIIDAQIYLLKNIYYGEFLNYFMSNNGNFFEISKEIIELNKNDKRNLKTGFYKLQKFEDIQEKTPKEYLANIQSLYMINAGNQDEEEKDTYIDFIQKIFLKGFMTYLANNGRLSLIYIGSDEETNTSLAEKKQEFDKFLKKYEQNNNIKIPYEINEFLREIKLGNILKYTERLNMFYLILKLLNHKELTNLKGSLEKYQSANKEETFSDELELINLLNLDNNRVTEDFELEANEIGKFLDFNGNKIKDRKELKKFDTKKIYFDGENIIKHRAFYNIKKYGMLNLLEKIADKAKYKISLKELKEYSNKKNEIEKNYTMQQNLHRKYARPKKDEKFNDEDYKEYEKAIGNIQKYTHLKNKVEFNELNLLQGLLLKILHRLVGYTSIWERDLRFRLKGEFPENQYIEEIFNFDNSKNVKYKSGQIVEKYINFYKELYKDNVEKRSIYSDKKVKKLKQEKKDLYIRNYIAHFNYIPHAEISLLEVLENLRKLLSYDRKLKNAVMKSVVDILKEYGFVAKFKIGADKKIGIQTLESEKIVHLKNLKKKKLMTDRNSEELCKLVKVMFEYKMKEKKSEN

SEQ ID NO: 1267 - protein, 1153 aa, Artificial
  Synthetic
MPIIKKFGRSTSSLTERTLILGAKRTEEHGSVRKIPEFLTHDAEALLGQWASAMDKVASKPKGRDKPSAFQRSFREDLGSAIWADLTSADGPFARLDEKARDILHKKWDRRIHPYPDGTAAEHKPASPKGRLYSMFAGEVGYGAADKPAIARKIRLHLLGEELRKSGGTRPQGHAVRRANSIEKNTLPKIKATPVPDWDDADIVTYRRHGDVAKAIRVAAEVAEKEKRKVGWRLAAAEIYVHFGKVFTNGGRMLSFAEAETKHPGLTGLHRAIEDLYRQRLKRHLKDPKLHASQPGTERLVSVILPEDFDSLLRALGNRRQNRDIGALIRKGRILHYEAGARVNRDDVAWINQHWPDDTTKSRYWTSDGQTEIKRHEIFVRIWRSALAHANRTLADWLDPDGKATDIAEGGNTFEQVLAATGQATVVQTANLFGSRAAALESHDAIQDLARLVWTVYTQLRHNSFHFKGVDGFKVALTPKLAEIAPGALQFTTNLLRGDFRDSEARLRAVLRAAQVEGFLDRGRLAEIWAALHPAGEAGLGPALPRFNRIVQRVDGTGAIAELPCAVNQFDMANPAIHCRYVVTKLLYERGFRAWVAMATTDQINAWIKSAEDRTQKAKDEIHGHPEDKARMVGALRLRDGQGIMDFLSELTALTATEFRVQAGYEPNRAAAQEQAEYLFHLQCDVLALAFKEYIRAARLGWLSDTLKPDRVARGVLSDVDKLADPKATPDFEDWQAGIYAVLHLVPVDEVGRLLHQLRRWANGQPADETSVKIERLLELYLDMHDDKFEGGVPLHDHPDLQALFETPDLLAQVLPQVGATEDERRRVPLRGLREMLRFGNLRILKGVFAKAPITTAGVAKLAEYEKSRADGLGGIDHAQQIRQKRHETLAKLRMLGPDSYGDVRDYLFVTKRIIRHRRLANHVRLVNHVRVNQILMSVLGRFADCAGLFERDLYFTLLALIHELGQKPEAVFDAKALGKFEDGQILTALDRNKTPLPASIACELQRHFGLDAKGAGPNRKRRNDFAHFNLLRSKTPINLTAAMNDARALLSHDRKLKNAVSASIVTLLEREQIVAHWNMGTDHQLADAVIGTRRIVHLKSAELAENLRDKRFLTLIAQLFNGRVNNLPDDIAALNRPGIEALAARVTGGGGR

SEQ ID NO: 1268 - protein, 1161 aa, Artificial
  Synthetic
MKVTKVDGISHKKYIEEGKLVKSTSEENRTSERLSELLSIRLDIYIKNPDNASEEENRIRRENLKKFFSNKVLHLKDSVLYLKNRKEKNAVQDKNYSEEDISEYDLKNKNSFSVLKKILLNEDINSEELEIFRKDVEAKLNKINSLKYSFEENKANYQKINENNVEKVGGKSKRNIIYDYYRESAKRNDYINNVQEAFDKLYKKEDIENLFFLIENSKKHEKYKIRECYHKIIGRKNDKENFAKIIYEEIQNVNNIEELIEKVPDMSELKKSQVFYKYYLDKEELNDKNIKYAFCHFVEIEMSQLLKNYVYKRLSNISNDKIKRIFEYQNLKKLIENKLLNKLDTYVRNCGKYNYYLRVGEIATSDFIARNRQNEAFLRNIIGVSSVAYFSLRNILETENENDITGRMRGKTVKNNKGEEKYVSGEVDKIYNENKQNEVKENLKMFYSYDFNMDNKNEIEDFFANIDEAISSIRHGIVHFNLELEGKDIFAFKNIVPSEISKKMFQNEINEKKLKLKIFKQLNSANVFRYLEKYKILNYLKRTRFEFVNKNIPFVPSFTKLYSRIDDLKNSLGIYWKTPKTNDDNKTKEIIDAQIYLLKNIYYGEFLNYFMSNNGNFFEISKEIIELNKNDKRNLKTGFYKLQKFEDIQEKTPKEYLANIQSLYMINAGNQDEEEKDTYIDFIQKIFLKGFMTYLANNGRLSLIYIGSDEETNTSLAEKKQEFDKFLKKYEQNNNIKIPYEINEFLREIKLGNILKYTERLNMFYLILKLLNHKELTNLKGSLEKYQSANKEETFSDELELINLLNLDNNRVTEDFELEANEIGKFLDFNGNKIKDRKELKKFDTKKIYFDGENIIKHRAFYNIKKYGMLNLLEKIADKAKYKISLKELKEYSNKKNEIEKNYTMQQNLHRKYARPKKDEKFNDEDYKEYEKAIGNIQKYTHLKNKVEFNELNLLQGLLLKILHRLVGYTSIWERDLRFRLKGEFPENQYIEEIFNFDNSKNVKYKSGQIVEKYINFYKELYKDNVEKRSIYSDKKVKKLKQEKKDLYIRNYIAHFNYIPHAEISLLEVLENLRKLLSYDRKLKNAVMKSVVDILKEYGFVAKFKIGADKKIGIQTLESEKIVHLKNLKKKKLMTDRNSKELCELVKVMFEYKMKEKKSEN

SEQ ID NO: 1269 - protein, 972 aa, Artificial
  Synthetic
MLGDKIEHSINESVVKHYQEACKAVEEKDIPWIKYISDHVMSVYSSKNRVDLDKLSLPYLAKNTWNTWISFIAMKYVDMGKGVYHFAMSDVDKVGKQDNLIIGQIDPKFADGISSFDYERIKAEDDLHRSMSGYIAFAVNNFARAICSDEFRKEDSQEDVLTIGLDEIPLYDNVKRKLLQYFGGASNWDDSIMDIIDDKDLAACIKENLYVARNVNFHFAGSEKVQKKHDDILEEIVRKETGDIGKHYRKVFYSNNVAVFYRDEDIIKLMNHLYQKEKPYQAQIPSYNKVISKTYLPDLIFMLLKGKNRTKISDPSIMNMFRGTFYFLLKEIYYNDFLQASNLKEMFREGLKNNVKNKKSEKPYQNFMQRFEELENMGMDFGEICQQIMTDYEQQNKQKKKTATAVMSEKDKKIRTLDNDTQKYKHFRTLLYVGLREAFIIYLKDEKNKEWYEFLREPVKREQPEEKEFVNKWKLNQYSDCSELILKDPLAAAWYVAAHFINQAQLNHLIGDIKNYIQFISDIDRRAKSTGNPVSESTEIQIERYRKILRVLEFAKFFCGQITNVLTDYYQDENDFSTHVGHYVKFEKKNMEPAHALQAFSNSLYACGKEKKKAGFYYDGMNPIVNRNITLAAMYGNKKLLENAMNPVTEQDIRKYYSLMAELDSTLKNGAVCKSEDEQKNLRHFQNLKNRIELVDVLTLSELVNDLVAQLIGWVYIRERDMMYLQLGLHYIKLYFTDSVSEDSYLRTLDLEEGSVADGAVLYQIASLYSFNLPMYVKSNKSSVYCKKHANSVGAKFDIFEKKYCNRDGTVIENGLCLFENIKLHDDLAEFRDYLAHFKYFAKLDKSILELYSKVYDSFFSYNIKLKKSVSYVFTNILLSYFINAKLSFSLCGISDYKPSRNEIVQRRSANISIESVQTDYFTYKLRSIVKNKNGVESIENDDRKCEVVNIAARDKEFVDEVCNVIKYNSDK

SEQ ID NO: 1270 - protein, 1161 aa, Artificial
  Synthetic
  misc_feature (552)..(552): Xaa can be any naturally occurring amino acid
MKLTQSRQSKGAQFFRDVSKGQLVLNNNIDNTDNVIQSLPYEKSYIGRILYKSSNSDKDNDQNPFNSFVRQLVKNQNKERKLTSYINLNDKNNKKLSKDDFKNQINTHLSFYGRNLKVDADSPTLKEILLQYYDGNNDAENELKKLANYISNLAKKKTEKLKKSIKNNKIPFEPDGEKLKLTSDKMKLLFDFLKKDGVELTSYEKFQKDYKFSDLANKIESIISNDKNSVDKKPFPTKKIYQTVSDYDYDFRKKNEDNDLYLFYAKEVKNYFKRLFIDKKLSKKQYEEIKSQNYKSEKYIFGQVKRYIINQLVQGLILYGKIMHYCYDTDAKQFNVEINSDTLTYIQVEEAFKKQIYLSLSWAITRLNYFFNYGSQNEENLDKDKKEGDILLAKTFRDKFYEKVFNNNEKDDDGISPKDELYAKISTCFAINSKDNNDDDIKKLLEDCCSSVANIRHNVFHFKKENIFEILEEIKLDSQISKELLNRDILNIQKCFKEQIRSTALTDYYSFELLEKVFKNEKLEFFLYSSQYPMMPSFKKIHKRGCNISKSXNQTKEIKWLIELDSEIDNEGKLAYKNLLQLIYYHSFLPAIKKDEKLVTEFINKTKQWNKTKSIASQKAKKAKNKKINYYEFKYSNMPRFEYGIPLKDYLEELQRQQSIRENDEDKKDKDNYYVEFVQDIFVFAFDSYLLKIISAYDCYEELIHPKLKTKEESKETLEKLFNESNPILKIKTNLNPDTKFITMYPFFRLLDQRELNILLHQFIRYCSSTQKRSNTNDETLNTLTQIEELITLVQFTIPLQTKDVHFKSAMEKYFSEFFENKDPQNYDDFYLQGSKKEEDKLVKHRSMSLVARSGAMALYTKMFSSIYQINKSDYEKYKDIYTIKNNSEVTKIEEMQNRLQQLHEKLVRIKLISDTQLNDIKKYQTLAKQIKEYENLRHKLTFESLYRIHQLHVEILGRFAAFANDWERDMFFMFTALENRGKINFKLKPIFNRGKVVGNLNNKLKDDARKLFFELCWSNEIYDKDKDDNSNGDYIYDRLLIRNYCAHLNHMTQFKKNNETQPSIIGYINKLRVLLAYDIKRQNAVTKAVKEILEKHYKVKLTLKRSDDNPDKFVIANLESDEITHLKNLKNPVIIEDNDKFMISLIRKLLIFKFESANVK

SEQ ID NO: 1271 - protein, 1354 aa, Artificial
  Synthetic
LFLWIIEEVIYEIIKLYKNLKEEIIMGNLFGYKKWYKVDKTIKDKKGKESTIKQEVRIKRNYTVDRYTLNTNNKEKNNINNEHFVNQFIEYKTKNDIFEKFTRKFHMGNILFKLKGKSQKGKIINDKDFFETKKIVLDKEVYGQSEKLRNEKGITKQDILKEIIDKGIDKSNDKILVKTKFGKEITINFTDEDKKNKNEYQITLKIIPENELKIKREVYGVFKIINMDLYQIIKEIIKNEVQKVFGNRYYEEYLREKLLKDDKIGDILTNFMEIRKKTKSNLEIMGFVKFYLNVGGDKKKSENKKIFVEKILNINVDLTVEDIVDFIVKELKFWNITKRIEKLQEKTVNRADEDIKNTYVNTYVLLDKHEKFKKYNRNKKDTIVKSFIKDIKDNTMKQKINQILRKFKIEELIEKLRIENKNFDTEIFRIFKDHYQEMFSSEKFEEKSDEEKELYKIIYRYLKGRIEKILINEQKVRLKKMEKIEVEKILNESVLSEKILKRVKQYTLEHIMYLGKLVHNNIDMTTVNTNDFSRLHAKEELDLELITFFASTNMELNKIFSRENINNDENIDFFGGDREKNYVLDKKNLNSKIEIIRDLDFIDNKNNITNNFISKFTKIGTNERNRILHASSKERDLQGTQDDYNKVINIIQNLKISDEEVSKALNLDVVFKDKKNIITKINDIEISEENNSVIKYLPSFSKVLPEILNLYKNKNKNNPFDTTETERIMLNALIYVNKELYKKLILEKNLEENESKNKFLKELKKNLGGTDEIDENIIESYYKNTQISASKGNNKAIKKYQKKIIECYIKYLEENYRELFDFSDFKMNIQEIKKQIKEINDNKTYKRITIKTSDKSIVINDDFEYIISIFALLNNNIFINKIRNRFFATSVWLNTSEYQNIIDILDEIMQLNTLRNECITENWNLNLEEFIQKMKEIEKDFDDFKIQTKKEIFNNYYEDIKNNILTEFKDDINGCDVLEKKLEKIVIFDDETKFEIDKKSNILQDEQRKLSNINKKDLKKKVDQYIKDKDQEIKSKILCRIIFNSDFLKKYKKEIDNLVESTESKNENKFEKIYYPEEHKNELYIYKKNLFLNIGNPNFDKIYGLISKDIKITDAKFLFNSDGKNIRNNKIAEIDVILKKLNNKLNGYSKEYKEKYIEKLKENNDFFAKNIQNENYNSFEEFKEDYNKVSEYKKIRDLVEFNYLNKIESYLIDINWKLAIQMARFERDMHYIVNGLKKLNFINLNGYNTGISRTYPKYNDSDSNKNCKKFYETTAYYKFFDDKSYREFEDICYEFGIDLRKNSNIQAKEERNIRNYISHFYIVRNPFADYSIAEQIDRVSNLLSYSTRYNNSTY

SEQ ID NO: 1272 - protein, 1322 aa, Artificial
  Synthetic
MVPNRRGKSMKISKVDHKRAAVSVKNKKTKGILYDDPTQGKNPIRDIGKQYDVLSNRAEGLYSILNPAKGKEKEEVKEFRNSINKLSKRLLKECSGNDPDRTVKEQTRLLTSNIMGSYIPTKGELYDDQVERLISEYLKKSLCVNVSVDGQLYYLPDILADYLKRLKDLPDNAGVAEFSGIIESTGIKKIEALLQVLNKDFRKPHRKENTIKSIEQQVKPVAVIKKGDGYYLIPSNAEHPKKKYVFSFMKEYVGSSEEEKRELLIHMRKLLVLYLCSTEKNEALLVNENSFCNELSLEESIAPELEESFDKIYELEMKSKDLRDELQILGRKKFLGDEERKKRGKLKAEKAATEGEIKKEKALIASKIDAVLVSHFRLAIKGEDIKDTDRFWIDYFDGEARKILLKGHRVDNYKLSTLWLGKKIWNNWTAYMAEKFIDYGKAVYHFVLPDLLAQDMSSISFGEVQPEYREGISSFEYERIKAKEDFERRTAVAITSAVNTFSRAVLERIPVSYDERTKQKKEENDILFVSQETYFPALYEDAGKRVLRYFGGYSTWKDNEDVRFYAEDEKGVELVDAVKRQLADLRNNTFHYTGIEGDTDTAVIRELFNHEEMQFSGTVKQKYYSNNVFRYYGQKETEELLNILYKKPAFVPSQVPSFGRLFNRDSAYVHDKMLMGKGRQRIAGKGPEEVEIFKGTFLFLLKEIYYNAFLQDETCKDRFLKLVFGGNAHIKIQNSEALKDFQSRIKNMGQNVSLGEICQQIMTDYELQNQDKRVHKSGKNDQEIYKHFRTLLYLYMREAFVDYLLHSDKAELFRFVRNPSVDEATKTIIKEDYLKDWSCNTYIGIMKDESVLKWYTMAHFLIPKQLNHLVGALKSYEVYIKDIERRAADTGNRKSWEAAEAESTKIREIIKILTFSMNFCAKTTKNIEDYFSSEEEYASTLSKFVDIKNKYVSEWSTALKIFCDTTTSVEVASNGKKNRKEMRLGIYHDGTNPIPNRNVFMAAMYGDLNLLSAVCDKARENDIKDYYRKQAELAEVFKRGKCITREEQESLREFQNKKNFIEMNDLLSYTEMVNDLNGQLVNWCYFRERDLMYMQLGVHYTKLFFTEAVPKDDIRRTIAGEGFHIKEGALLYQIAAMYTYGLPLYGFDKKGNCKITIKAGVASGGCIGAFVKNYCGESFNNPVTYNEGLYFFENIGDHDSIVETRNYIDHFKYFAGQKRSILELYSEIYERFFSYSVNFKKSVSFILPNILERYFVILRTVIKKDDRKGHPIASISVTGASSAKLTYKIAKDEGQAEIEVLVPARSDKYLATVERLLMYRAE

SEQ ID NO: 1273 - protein, 1103 aa, Artificial
  Synthetic
VKFSKVNNLKTAVTLDKNNDGKTGILYRDPARKERSVQRDIGTHVSRQIDKSKNLYRLFNASQEDEEEVPELFFANRLNETIKKQMIEKMVKSDFTADRLCSLLKKVSDEMGYAFSQQIIDSAINRFLRRNLYINAAKGLKTALMVGFGLMPQDQLTAEDKKEIEHFLSVLRDDYEHQAIIKHVEKSITHQNMLIQPNKEGLFVPAEIPQAQNRSKNEKEAFERFLLSYAVLDEKIRHDLRLRLRRLVDLYFYGESAVKQEDFDEWKDHAGHKGDTMPFSEKASDLIPIILRAQDKNLDDEAKKEAKEKAKEAKTDIFRYLREENTSRYRRCISAVKNAVNTDLYFEDMMINQFWIHHIEDAVERICDNIRKPESFRLCVGYLGEKVWKDCLNYLSIKYIAIGKTVYHYAMSSDIADSTKSVTLGKIAPDKMKGLTSFDYEQIKAEETLQRSLAVYVTFAANHLAGETVKRENKSQKEDFFTLKKGDLKDQQKPHLRRNIFQFFGGQSRWQDFPFEKYFISEYTDLDFLYDLQQILYSLRNESFHFDTRNHNMGDWNQPLIIAMFEYDCKQCSVLQKSKFYSNNLPMFYGQKDLEKILKRLYEVQAGRASQVPSFNSVFVRNNFKEFIRNNLGWNINFTEEKSTENLDKFESGLYYLLKEIYYNLFLQGKGLTGDYDVKKQFINWSRKKTDEEHKFAAINFSQRIKSLEEGEREFSFSEICQSIMTEYNLYNNNRKVKSDYVKKNHPDSYAHYKLLLYKGIREVFAHYIKTQFSLLAEPSLREKPAEEDFLPSYTTGAYKELIDRVRKNIDLQKWYILGRFLNARQANLLIGQVRHYAQYSSDVRRRAAETRNQTLQEVSKKELDGYEKVLDVCIKLSGMTSNNLEDYFDDKDDYAKHISHYLAFTEDIPGVSLSAQLEGFCLSNTDDDESEFARNGIFYDEMNPIINKNILYAKLYGTDEVLSAALKDRKVTREDIKKYHSQKEKISAYRSSGKCKTEEEQKDLKGYQELKNRVELRNIVEYEELLDELQSQLVDWCYLRERDLMYFQLGFHYLCLNGTGEAPEMYRTLEYNGRKIDGAILYQIAAMYTSGVTLYTFNEGQE

SEQ ID NO: 1274 - protein, 1145 aa, Artificial
  Synthetic
MGFVKFYLNVDGDKKKSENKKMFVEKILNINVDLTEEDIVDFIVKELKFWNITKRIEKLQEKTVNRTDRDIKNTYVNTYVLLDKHEKFKKYNRNKKDIIVKSFIKDIRDNTMKQKINQILSKFKIKELKKNLKENTENKNFDTEIFGIFKTHYQNIFSSEKFENKSDEEKELHKIIYRYLKGRIEKILINREKIRLNKIEIEKILNENVLSKKILKRVKQYSLEYIMYLGKLVHNKPVDNKSVDNNNNIDMTTVNTNYFSKLHAEEELDLELITFFASTNMELNKIFEINKGKNDFFGDSFKINDTKVLLKNDVTSSKLYILKNLNFIDNENKVKKEEFISKFITIGVNERNRILHASNKRRVPQGTQDDYKGTQDDYNKVINIIQNLKISDEEVSKALNLDVVFKDKKNIITKINDIKISEENSNDIKYLPSFSKILPKILNLYRNNPRNEPFDTIETEKIVLNALIYVNKELYKKLILEDGSQENRSKNIFLQELKKTLGGTDEINENIIENYYKNAQISASKGNNKVIKKYQKKVIECYIGYLRKNYEELFDFSDFKMNIQEIKKQIKDINDNKTYERITIKTIDRTIVINDDFEYIISIFALLNSNAVINKIRNRFFATSVWLNISKYQNIINILDEIMQINILKSEYITDNWKENLEEFIRKIKNKEIELHQSKKEFFDNNYKEIKNDIVNEFQDNEEIKKIFDNNLKEITEFRNNGAMYFKNLKELSQIEREFILDNKKLFEDKIDEIIIKKQKEVKEEILAKKIFNSEFLEKYKEEIDNLVESTESKNENKFEKIYYPEEHKNELYIYKKNLFLNIGNPNFDKIYGIISKDIKNANTEILFDNDIRKNKISEIDAILKNLNDKLNGYSNDYKAKYVNELKENDDFFAKNMQNENYSSFGEFEKDYNKVSEYKKIRDLVEFNYLNKIESYLIDINWKLAIQMARFERDMHYIVNGLRELGIIKLSGYNTGISRAYPKRNGSDGFYTTTAYYKFLDEESYKKFEKICYGFGIDLSENSEINKPENESIRNYISHFYIVRNPFVDYSIAEQIDRVSNLLSYSTRYNNSTYASVFEVFKKDVDLNYDELKKKFKLIGNNNILERLMRPKKVSVLELESYNSGYIKNLIIKLLTKIENTNDTL

SEQ ID NO: 1275 - protein, 1163 aa, Artificial
  Synthetic
MGSGKYRITKIGRDWDENKKRIILKRVVSNGKVKYINENDNVDVDITETYYGILSNNKAKFLGSNEQFIFKVNKMKRNIKNDCVIIKDYTEEEFEKLDKKIFFSRKIKVNNEDREKICRNFYEDEREIMKKRLEEAKNFNNIIFNICNKIFKLEYIDYTDEKVYEIFQKEIKFEDIKNLKEAFKQQENGLETDKLLTISFNKKRSNVLLEFIQQIVKQNFENEKELENWFSHDGEKYCKEIFKIYSNMSQKEKYSKLLGHNDESIASDSEKRETLQRRLKLGDYSKYDLKKYYQKDYKEEAIKELEDKSKEELEKEVEEIIKKNYKIDKLCDEISNLEFSFVDSKKENKDKMSEIIVKIKEHYKNNVNVEEELENKEKYILSMIHNYIKGRYRKCLELQQKENVDFENLGKRIKEIFDSNKVTEKLKKSILNKVNNYKIFETKFQNPNIESSDDLEILKAEETFLNKLSTAVSKVGYILNILLEIHFRNDILQDYNQVEKLWKSDSFQKICAIYPEINNDEKLLKGMIYFIQGLRQQVLHPKILWEKQNIYNAENIKEKEKIVSVRLQNEGEAYNKKGIQNYFENVLKKIPDYFIEKYESNNVFNIYRNFVDKIMEVVKNFNFKENNTIDYLFPKFHKIYKRMCKLENIDDRQNGARKYLLQIIYYYYFQYEIENDKNNISKYLNLYRNKIKVKKISYSYITDNKAVNNKNIEILYRNIQREGMLNNKLSQMNKEWIEFIVVQFSEFLTNKKLNWILDNLSGYKKKEKLDENDKNRLLKILKQKMNKKIIYSNDSYAFISLAQFLDLKEISNLIHDIKKFIQFREKNVSKYKPEKNKLYIKELRKVLYILKVMLEHKERVIQKHYLESYDENISIIYGKDIERKDIKDIKIKIKNENQEVINQPLYKSGNDENSSWIVLYGIEQAKRNGTFKFFEGFFNLNDDIKLCKENIEKYEELYNEKEENQRKVDEYISSEENNNIDEIKEINNNKQLFYYYKNMIYGDGLKKGYDFINDIYSHYLSWAYRVERDCKIYKIKEYENKKNFNEYKFKEYKSIKNFRNEIAHFNYFQKTNKSLLELLNDFYDIFDYNLKYQRDVQNVINNIFEKYQIVRKDGGPVVFYCKTDKKLKLSENLVPKKHSKYPEIKLIHEKYVMFFRKLFEYKK

SEQ ID NO: 1276 - protein, 1161 aa, Artificial
  Synthetic
MKVTKVDGISHKKYIEEGKLVKSTSEENRTSERLSELLSIRLDIYIKNPDNASEEENRIRRENLKKFFSNKVLHLKDSVLYLKNRKEKNAVQDKNYSEEDISEYDLKNKNSFSVLKKILLNEDINSEELEIFRKDVEAKLNKINSLKYSFEENKANYQKINENNVEKVGGKSKRNIIYDYYRESAKHNDYINNVQEAFDKLYKKEDIEKLFFLIENSKKHEKYKIREYYHKIIGRKNDKENFAKIIYEEIQNVNNMKELIEKVPDMSELKKSQVFYKYYLDKEELNDENVKYVFCHFVEIEMSKLLKNYVYKKPSNISNDKVKRIFEYQSLKKLIENKLLNKLDTYVRNCGKYNYYLQDGEIATSDFIARNRQNEAFLRNIIGVSSVAYFSLRNILETENENDITGRMRGKTVKNNKGEEKYVSGEVDKIYNENKQNEVKENLKMFYSYDFNVDNKNEIEDFFANIDEAISSIRHGIVHFNLELEGKDIFAFKNIAPSEISKKMFQNEINEKKLKLKIFRQLNSANVFRYLEKYKILNYLKRTRFEFVNKNIPFVPSFTKLYSRIDDLKNSLGIYWKTPKTNDDNKTKEITDAQIYLLKNIYYGEFLNYFMSNNGNFFEISREIIELNKNDKRNLKTGFYKLQKFEDIQEKTPKEYLANIQSLYMINAGNQDEEEKDTYIDFIQKIFLKGFMTYLANNGRLSLIYIGSDEETNTSLAEKKQEFDKFLKKYEQNNNIEIPHEINEFVREIKLGKILKYTESLNMFYLILKLLNHKELTNLKGSLEKYQSANKEETFSDELELINLLNLDNNRVTEDFELEADEIGKFLDFNGNKIKDRKELKKFDTNKIYFDGENIIKHRAFYNIKKYGMLNLLEKISDEAKYKISIEELKNYSNKKNEIEKNHTTQENLHRKYARPRKDEKFTDEDYKEYEKAIGNIQKYTHLKNKVEFNELNLLQGLLLKILHRLVGYTSIWERDLRFRLKGEFPENQYIEEIFNFDNSKNVKYKSGQIVEKYINFYKELYKDNVEKRSIYSDKKVKKLKQEKKDLYIRNYIAHFNYIPHAEISLLEVLENLRKLLSYDRKLKNAVMKSVVDILKEYGFVAKFKIGADKKIGIQTLESEKIVHLKNLKKKKLMTDRNSEELCKLVKVMFEYKMEEKKSEN

SEQ ID NO: 1277 - protein, 960 aa, Artificial
  Synthetic
LEFIQKITKQEFKNQKELENWFSQSGEKYCKEIFKIYSNMSQKEKYFKLLGHRNQGIASIYDEKKETLQRRLKLGDYSKYDLKKYYQKDYKEEAIKELKDKNKEEVEREIEALIKKNYKIDKLCDEISNLEFSFVESKKENKDKMSEIIVKIKEHYKKNVNVEEELKNKEKYIFSLIHNYVKGRYRKCLELQQKENVDFENLEKRIKEIFDSNEVTKKLKKSIINKVNSYKIFEMKFQNPNIESSDDLEILKAEETFLNKLSTAVSKVGYTLNILLEVSSEKDILENYNMVGKLCNNNSTTEIYKVYPELEKNEKLLQGMIHFIQGLRQQSLHPKILWNFETKNLKPEKLERLKEKKNIKMRDCVVHEDNLDKKEKNEVEIKKYFEKIEENLPDYFIEKYESNNVFNTYRNFVDKIMEVVKNFNFKENNTIDYLFPKFHKIYKRMCKSENIDDRQNGARKYLLQTIYYYYFQYEIENDKNNMSKYLNLYRNKIKVKKISYSYITDNKAVNNKNIEILYRNIQREGMLNNRLLQMNNEWIEFIVVQFSEFLTNKKLNWILDDLSEYKKKEKLDENDKNELLKIFKQKMNKNITYSNDSYVFISLAQFLDLKEISNLIHDIKKFIQFREKNVSKYKPEKNKLYIEELRKILYISKVVLEHKERVMQKHYLESYDEDISIMYGKGIEKKDIKDIEIKIKNKNQEVINQPLYKSGNDENNSWIILYGIEQAKRNGAFKFFEGFFNLNDDIKLCKENIEKYEKLYNEKEENQKKVDEYISKLNNDIEKINNDNNNINIEKTNNNKQLFYYYKNMIYGDGLKKGYDFINDIYSHYLSWAYRIERDYDIYKVRKYSESIKRFRNEIAHFNYFQKTNKSLLELLNNFYDIFDYNLKYQRDVQKVINNIFEKYQVIREDGGPVIFYCKIDKKLKLSENIIPKKHLKCSKIKLIHEKYVEFFKKLFEYKK

SEQ ID NO: 1278 - protein, 1184 aa, Artificial
  Synthetic
MRVSKVKVLGNEETKGRIVLMHRSPVKGQLIYSEDAGKRDRTEDIIPEQKLESFHLSILNKTFLRKEFFKKELKHEAKKNGLKGDAEDKYISEKLKEYHSLLQFIDDVLSVKYNENRKAIKFPEYLTREMIEIFLNHKFRKEVTYTNKNGASVSFLLSTLILNAIEKHSVIEMQPFVDWRNWFVETKSKFLKKSIINNCIPTNGGPISRRRETLMKWRDDYFTNAEIDLARLHKKFGTDTLMASLREVPQTEKSGNEYHRLLKSCLQSHQKKLFGKRAEGYDINRADNQLYVYNTEVVKYMEHYFPVKSSKRRNSTAEIKYYLQTDTIKCCLHHQIINAVRGLALREGKFNLHGFDDKLIPNERNVSSSILNELKTSEGFVLNMLGGCAFAANCLRNIVDATQRSDLLGFRCFEVSLKKGKSNSDLFALFFGFGREDMDDDSEWEKHLYAARYSVSEIRNRVAHYHKSAIENIYNITDFKYRENSMCSYTDTKFTTALQNEIYNTPKALSLQLMTGKVLEYYPKEKLVSFFQKYKFSLYRSVVPFAPGFKNIMRTGVNYQNATQNRLFYDMGLTAFQDKDRYIDDVEAWNARYFFMKLIYNNLFLPRFTNDKNDLFRKTVEQVLEVNRSHMEKVGKDDRQAFGEVRQMRENETANDYMAYLQSSLRMEKNKKELEGNGAKRINFEKFILQMFVKGFDSFLKDGAFEFVHSPENCLTGSTEKERAKERNSLCEEIGNYVRLVSTVIDPGKGSHVAFYVFCKMLNSVYLSNIRNEMIKYHKVVRTDELAHLIEIIELCLLSADAVSQKTVNADKLSHFFAEGVNVDDDENVIHASMETFRKYGTRDLFHKLMLQDDRFLVSSDDYREWEEMKEKIEGKVKQRELLHAEWCEAKEKDKKSRKVKSNSRTCFEKKFMGAKAEEYYSLCKVIDKYNWLDNKLHLVHLNKLHNLVIEILGRMVGFTALFERDFQYICKSDSEYEQLYNLDFNMGLPKFKNSIKGSGKAKNSTQNIDHNATGIGNSSNLLKENSNGTHYCKNLSGDGVEDKLKRLFLYDDYRNVRNFVAHFNYLTRVEDDLGGNDAVKLSGTRYSLIELINELRNLLKYDRKLKNAVSKSFIDMFERHGMHVKMKLNHNHKLFVDSISPRKIKHLGGGYKKRGKDDKMYVQTTNHVDPLYCDMCRALLEMK

SEQ ID NO: 1279 - protein, 1100 aa, Artificial
  Synthetic
MKLTKVEKARIAVSREKKDSGRIILYTNPEDVKKTSVTTMEQQVSKRIDQANKLYQVFFKSVIPVELNKHFAEISKIAAKCRNTEEFYKKACGYSGYEWTDAKQKKRTSQISRFSYTSSGKNMYVVMDNFVKEYMVQIWQEKDFRNAAVKILCCICDGKKFASKLEKVKKESPDTLKKFIEISGKCEGNPFVDYDTSFLEKVFTLVISQMVKNCDRKSYEQDDKEKIKKSIQKEIQWLSHVQSVTERSFGREGKTYLLFKIRNPYATEERLQTVLIRMRKTLKRGRNRDIAIVLLQGLAQMNQVTFTDTVKHLYQEEEKAFCDFIDAVNRDYYRVNIVKSVRNMDVKVQPDLNDNSILKLSGLGNIKKEALSDTLLRYAASADESDQVLLDIKKLLFEYFLPENSKETSKYTTVQNLWNIPYLPKIFFDYGFKNEDSDDDNECAEDIETLCDVEPQYKINQHSLKRRIRYVNYGKYLQMTKNESDRERRYWIHYIKEFVEKNYVDSGRTLSEKNCYASSMMLNCWKEIIRYLCGKYIDIGKAVFHFTNLTAMPKPKDKIIYGQLEEQYKKGISSFDYEAIKAEETLQRDIVQSVVAAAFAFSKSVIDETKMEECQETNKEDILFLSENVLGSLLKENTIKLILRFYGGESSVAQKEYFDQQEIVQEMISHLKSIRNENFHYLDGAKKDNPHKYASILWKNDEMAYQKLTKQRYYANNVGLFYRAEEIQELVQELYSQKNITEAQIPAFRTVLKRKDLPGYMEELGILFPDNTQEKSKGDFEGTLYFLMKEIYYRDFIVKDKAAAYFFKAVDQNKEQSKKEDKHTERAAENFHRYVKSLEKKYNKKEISFGTVCQYIMMEYNQQNTTKQETEIYKHFKMLISLCIRKAFGNYIKETYRFLFHPIYSKQQGEPEYLDTLELESGVKEKNYEWFTLAHFLHPVQLNHLVGDLKSYIQYREDILRRIVFAEQRVYADQQKEVQQKVKTAKEILEVLEFVREVSGRVSNEYTDYYENEEEYAEFLYQYIDFRKREGKSAFESLKYFCQNILDSGTVVDLYADTENPKVLRNIELTRMYAGSNVKIPEYEKITEDEIKMYYQEKNS

SEQ ID NO: 1280 - protein, 1107 aa, Artificial; identical to SEQ ID NO: 52
  Synthetic

SEQ ID NO: 1281 - protein, 1387 aa, Artificial; identical to SEQ ID NO: 93
  Synthetic

SEQ ID NO: 1282 - protein, 949 aa, Artificial
  Synthetic
MRIVRPYGESVAPGAGSERLLRPKKQLRDQIGDADRRIPTFAAGHDELVIAQWISTIDKIATKPKGNKEPTPRQRALREKLGKAGWDRLVDQKLLPGLPKDQDDYLGKLWWFKIHPYPKGTKAPKVVNGREIPDPRGRWYSRFVCDVAPDDIDAATVAARVHEHLHVAEYRHGTEQKHDKGRIERRARSIAKNTASLAQVTKERPTWTEDDVATYAQTAGDVATAIKQAAEAREADNRRVGADVAAEVLYPAFGKLFPNKGIKELENQSGLPALHLAIRDFYQRRLKRHKKDQPEHKMARRKVSTLLPADMAGLAAMLRHTAANRDVAALVRLGKVIHYEAAFAAGQKAADGDAPAHVLEKWPAEVKASHYWSSEGQAEIKRNEAFVRIWRHSLALAAQTLRDWASPDGSFHTDILSEKQFETLTKNLDLDHHARKLAVLLGNRAEFFLKGRGDAFQKQTLKLALQGLTQLRHNSFHFNGRGGFADALKFTRKPEITADQHMWDALGALWATDLEERGKRLIDTLEAAHLHHFFDWEHNKRLIGAVARAKLAEGAEDLPLPRFRRLLDRAANIRGKDGINLRLPKPVNRQDMEDFPALHAKYVALKLLYENPFRQWVGHRDRRDLVNKLIDRAVRRADKAAKDLHGKADADRRLIITAKAKGLGRLGEGEKLHDFAFRLSRETASEMRVQRGYDSDGERAREQAAFIEELLIDVLAQAFDHYLRKKKFDFLVDLRADEPRPKEPKCALRRPVLDAEGAAAPQWQVLLYFLLHLIPVDDIGRLVHQIRKWDITAGKAAGTTRAADDDVDRVARTLTLYLDMHDAKFTGDQALQALAPLHELYASKETFERFFLRKATDDNEYLPRRGLREILRFGHLPPLRAIFAAHKVDDDTVQKVEAAEKGPLVAAQRERERLHKLWVDQRRKLGAEDLRCYVDTLAEVTRHRHAAAH

SEQ ID NO: 1283 - protein, 1239 aa, Artificial
  Synthetic
MQMKISKIKNSRPGISVAENKNEESLSRQSLLYYAPVKDGKIRLESKDLEQHVTECNEKAQKLYNVITPEINFYRDENRQKMVENLARNFNAVINNALRSIRNPKEKKEQRVEKEVAFILNLSKKSIKMKKDVFVKSTDLIVKFPENNKYNKKNDKGTGSKEAYIQKMISDLVLRKLKNTLRKEVKLENGYRMQMTEIIISLMSAICLYGNAESFDPAILKAFFEKVDSDYTKYKYVEQIVKSIESQSAKLKVVEKDGRHLLISANADHRKKKYVFEFMRMYAAADEKEKRELTEHIQDLIGLYLCGKAGYENAENRFSDMTESHNCICGKIEEILNELEKPENLSQKKKENLKNTTVKVMALKYRAAVNYLADEVGKTVLGEIREKKVRSCADLYWIEYIDSTVEKLLLKSRNKDGYRYEIGFLSKHIWKEWTQYISGKYIEMGKGVYHFAIPDLSGNLEGEPISICEVKPEYRNGVSGFDYERIRAEESLEREMEKYVLFAVNNFARAVTPEEEREKSGHEDVLLMKTLSEIEESQTKEERQKKHDNNVKNAITLYADADRRILQFFGGQSRFREKEDSLINLYSGEDLYKEIRKELYAIRNITFHYTTKADKDQTQKHDLAEYLFEEEFSDITELFREKYYANNVWKYYDVEVINTIMENIYCGRKYRAAQVPAFKNIISRPELPQVMNGFVKGNSLRRLMNCPDRDVINKYWSALFFVLKELYYYDFLQEQKKPEDNVKERFFRAIEKLSGQENDDKKQKAWESFGNRIDQIGRDRSFGAICQGLMIEYMLQNSDISMVQTETDNGKANNKKQIYKHYRTLLYNCIREAFIEYLREKWEELRTPVLTVKEWSKEEFCRADGLKHLSLFDHLKKTFNDAESGSSWYMAAHFINQKYLNHLLGSIRNYLQFTEDIEDRAISLGDCVDNKREEKNLRYRNTLEILEFVAQFCERTTNVMEDYFESNQEYAEYLSGFVDYNTTKKETDIEKALYSFCKQKFKVDGKEYMAGIYYDGENLIPNRNIIRANMYGNTSCLKPCMDRITLKEIRTMYADQNKLDLVLKEGVCHTEEEQKAYREYQNEKNRIELFDVCTYTQILNDMQARLIGWSYMRERDLMYYQLGYYYTKLFWTDSISEEDARRRLVGNLVNVEDGAILYQILAFNSYNLPIIANKNNTVTLLKDEGSIGGKAITAFFKNYENAEMIYEEALDLFENMDEHAAIINTRNYIEHFKYFIKSD

SEQ ID NO: 1284 - protein, 1212 aa, Artificial
  Synthetic
MKISKEGHKRMSVTLKKENMQKNDADKTKGQILPLPEGEGLEKYIQKRVANTQKLYKVLGPSAVSVPNEKEKETIDCFNDFIKNIILKNVNTQPAEKRNRNAVEYMKTKGNVNTVFIDVDRKCIHKLVPLHLRGTLKKYVKIEKDGQRIEVYIPDVIEKLVFAVAHGTQFDHLIAEIEEEELIVCLHMIFKDYTKEDIIANTAKSIEKQDVKVQVLGTGEDARLQLASADNEKKKYIFLFLKKFACAVSEKERNDLLREFRELLVLFYCGTAAYEEVKEWKNGIPIWDFDFLSKMVSDISWFFSQECSEKLMEREQLRREKDKDKKRQNKSKIKDIDVEVKGILANLITERYRESIKLLQSLLGEEEYKEKCFWLEYIENDAEKILCSKKTLTENKLDTVWLCNNTWRNFLSFLCSKAVDMGKAVYHFAMPDLEQLESGEPIKAGMIKSQFQQGITSFDYERIKAEENLERSFMTAISFALNNFSAAVCPPETYEKKNKEDVLFMGDKDLREEMYPNASWHIMQYFGGISQWKDSCFEDIVMLEDADLNEEFVLEVKGAMSLIRNSAFHYAASAAQGTLDKGSYLVELFERERDNLGSKYRKKYVSNNVPMFYKVEDIDRLMHCLYGEQKVLESQIPSFRNVITRKSLPDIIVKFVKGKPYGKIQKNVETASKFHSALYFVLKEIYYNGFLQEENLMERFMVSFNNEWNKVKESSGNKKKEAAMKDFSRRINELQQNGKRLTFGELCQAIMTDYNMQNNQKKVRLNKKDNLPDEKYKHFKMLLLVCLRETFIDYLKKDVAGEKFDCAFLREPGLKENVYENLTEEQFCKGWKIDRYKNLINENGQYDSWLISWFILAHFMTPKHLNHLCGEIKSYLSYVHNIERRRFDAMRVQVEENKEKRQKYEQVLEILNLAAEYCGQVSNERTDYYESEEEYARHISMYVAFEEKNSERPLEEQLYGFCNQKADGGPASRIGIFYDGENPILNRNVVLTKLYGAERLLSECLQKERVTKAEIEKHYKHTKKLEAVFKYGTCKNQDQEKERRTYQQQKNRIELVDILKYSDLLNDFMSQLISWCYLRERDRMYFQIGLHYIRLYYGENLVEKNSKFRVLQSKEAQAGEKKGINLVDGAVLYQIAAIYTYEYPVYTLDEAGNAIVSKAAKIGSTTANGINAFWKEYCNEDASIYEVGLSLFENPLEEKELIEFRNYIDHFK

SEQ ID NO: 1285 - protein, 1082 aa, Artificial
  Synthetic
MKVTKVDGISHKKYIEEGKLVKSTSEENRTSERLSELLSIRLDIYIKNPDNASEEENRIRRENLKKFFSNKVLYLKDSILYLKNRNEKNAVQDKNYSEEDISEYDLKNKNSFSVLKKILLNEDINSEELEIFRKDVEAKLNKINSLKYSFEENKANYQKINENNVEKVGGKSKRNIIYDYYRESAKRDAYVSNVKEAFDKLYKEEDIAKLVLKIENLTKLEKYKIREFYHEIIGRKNDKENFAKIIYEEIQNVNNIKELIEKVPDMSELKKSQVFYKYYLDKEELNDKNIKYAFCHFVEIEMSKLLKNYVYKKPSNISNDKVKRIFEYQSLKKLIENKLLNKLDTYVRNCGKYNYYLQDGEIATSDFIARNRQNEAFLRNIIGVSSVAYFSLRNILETENKDDITGKMRGKTRIDSKTGEEKYIPGEVDQIYYENKQNEVKNKLKMFYGYDFDMDNKKEIEDFFANIDEAISSIRHGIVHFNLDLDGKDIFAFKNIVPSEISKKMFQNEINEKKLKLKIFRQLNSANVFRYLEKYKILNYLKRTRFEFVNKNIPFVPSFTKLYSRIDDLKNSLGIYWKTPKTNDDNKTKEITDAQIYLLKNIYYGEFLNYFMSNNGNFFEIIKEIIELNKNDKRNLKTGFYKLQKFENLQEKTPKEYLANIQSFYMIDAGNKDEEEKDAYIDFIQKIFLKGFMTYLANNGRLSLIYIGSDEETNTSLAEKKQEFDKFLKKYEQNNNIKIPYEINEFLREIKLGNILKYTERLNMFYLILKLLNHKELTNLKGSLEKYQSANKEETFSDELELINLLNLDNNRVTEDFELEADEIGKFLDFNGNKIKDRKELKKFDANKIYFDGENIIKHRAFYNIKKYGMLNLLEKISDEAKYKISIEELKNYSNKKNEIEKNHKMQENLHRKYARPRKDEKFTDEDYKKYEKAIRNIQQYTHLKNKVEFNELNLLQGLLLKILHRLVGYTSIWERDLRFRLKGEFPENQYIEEIFNFDNSKNVKYKNGQIVEKYINFYKELYKDDTEKISIYSDKKVKELKKEKKDLYIRNYIAHFNYIPNAEISLLEVLENLRKLLSYDR

SEQ ID NO: 1286 - protein, 1211 aa, Artificial
  Synthetic
MKITKRKWEDVPPLFFHRDKDSGRLIRQDDREHDYTDELFRKTTVDSIFIRSLQNRLLRSQDKEGNKIGRNEITELVENLCKGAEIQKSIDEIKDSKSNVKALCDKTLTDYGKSFAAEEGRTTLYEAILNLAKVNAIQKAMAEAELKQIHEALKKEKEDRINRVQNSIKNNKIPLKVNEDGTISANNDRASWLLELLKPVASEHDKGDRYPVLTEMEGIVSFDKLCEEVRNKIHGRKGRTRSIAMSVDEAVKEYLKELWKKHADRHRDMRYYFQAVKEYFKENFPIRTKQKGAGIRQSLLKEDTVVARLLDPKHMAKAVRRKLINQSTQMHILYGKLYEYCCREDRNLPVNSETLQLIQVLEAFKKQLMTAVLWSVSRLCYFYEFYSGDILLAEEYRRDFLNQKNDHKDIQACKEKLQDFFPLAELQEKIRECADKDINNIKDKITNDVLACNNLLEECVFCISKLRNNIFHYKNLSFTQALKHIANEIKEEDIPIILRLYKQDCENLNNAFASRISSMNIPLYYSTEFLLRIFKKQGVELSLYSAKYQMTPSFKRVYERGKNLRLEYERESMRSNIANEDGNDLQNGNWLRWFSQLKAGIVDTDAGMKGDIGDYPDTSADLGIEAETGTNTDAQRAMRNLLQLIYKYHFLPEVQKNENIVTDLIPKVLERNRKLSEVRNRSDKTYGYKEIEELYKKNKGKKDSLSELLKDLQRKVSETEKENQELAREKTDYAQRFILDIFAEAFSNFMDDRYEDEYQEIMNPKKDEEKAKKWAELFTEKADKDNRKDEPLVLKTSFDKDNIEKFLLVLYPLMRLLDDKELSELQQQMLRFRASVSGWQGSTDFNEDIAMAEKIEELAELVKLTEPESQCAEVSWKNRAIEVFEQFVEGKMAEYGAFYLQSDTLTPVPRRNMKELLRSGIMGVFKKVLLSHMQATKKDYGVYSGEHWNIDDPAGNPIKSAEQAHALLQRLHNKYTESPSQFSYEDYKLYDRTIRQLDEYNQAKKNLSFGSLYEVCRILLDMLSRWVGFVQDWERDMYFLLLAWAKQGKLHNVTETDVLEVFNEGRVICKLNKKLKDGDWYAFASIYCNNSGEKLEFLQVRNFIAHLHLLRESEWNGDEKTGCSAIEDYINKLRFLLSYDQKRMNAVTKAMQQIFEKHKVIVKFMVEKGGMLKVKDVKPGIIEHLKQTKRIEIPCHGERFTDSLLVLMKYQ

SEQ ID NO: 1287 - protein, 1221 aa, Artificial
  Synthetic
MKLSKEKHTRSAVANEEQNIGGILYRFPGKSIDGVKDQMLRRDKEVKKLYNVFNQIQVGTKPKKWNNDEKLSPEENERRAQQKNIKIENYKWREACSKYVKSSQKTINYVIFYSYGKAENKLRYMRKNEDILKKMQEEEKLPKFSGGKLEDFVAYTLRKSLVVSKYDTQEFDSVAAMVVFLECIGKSNISDHEKEIVCKLLELIRKDFSKLDPNVKGSQGANIVRSVRNQNMIVQPQGDRFLFPQVYAKENETVTNKNVEKEGLNEFLLNYANLDDEKRAESLRKLRRILDVYFSAPNYYEKDMDITLSDNIEKGKFNVWEKHECGKKVTDLFVDIPDVLMEAGAENIKLDAVVEKRERKVLNDRVRKQNIICYRYTRAVVEKYNSNEPLFFENNAINQYWIHHIENAVERILKNCKAGKLFKLRKGYLAEKVWKDAINLISIKYIALGKAVYNFALDDIWKDKKNKELGIVDERIRNGITSFDYEMIKAHENLQRELAVDIAFSVNNLARAVCDMSNLGNKESDFLLWKRNDIADKLKNKDDMASVSAVLQFFGGKSSWDINIFKEAYKGKKKYNYEVRFIDDLRKAIYCARNENFHFKTALVNDEKWNTELFGKIFKRETEFCLNVEKDRFYSNNLYMFYQVSELRNMLDHLYSRSVSRAAQVPSYNSVIVRTAFPEYITNVLGYQKPGYDADTLGKWYSACYYLLKEIYYNSFLQSDRALQLFEKSVKTLSWDDEEQKRAVDNFKKYFSDIKSACTSLAQVCQIYMTEYNQQNNQIKKVRSSNDSIFDQPIYQHYKVLLKKAIANAFADYLKNNKDLFGFIGKPFKANEIREIDKEQFLPDWTSRKYEALCIEVSGSQELQKWYIVGKFLNAMSLNLMVGSMRSYIQYVTDIKRRAASIGNELHVSVQDVEKVEKWVQVIEVCSLLASRTSNQFEDYFNDKDDYARYLKSYVDFSNVDMPSEYSALVDFSNEEQSDLYVDPKNPKVNRNIVHSKLFAADHILRDIVEPVSKDNIEEFYSQKAEIAYCKIKGKEITAEEQKAVLKYQKLKNRVELRDIVEYGEIINELLGQLINWSFMRERDLLYFQLGFHYDCLRNDSKKPERYKNIKVDENSIKDAILYQIIGMYVNGVTVYAPEKDDDKLKEQCVKGGVGVKVSAFHRYSKYLGLNEKTLYNAGLEIFEVVAEHEDIINLRNGIDHFKYYLGDYRSMLSIYSEVFD

SEQ ID NO: 1288 - protein, 1079 aa, Artificial
  Synthetic
MRITKVEVNGKKVAIQRNMKSGRLIFNEDITDRTEEILRLKQDSFYKSVINKTICKGKDAQQIKVLFEGLLYEDKQSRVNLTAVKTMDKNKLKELFTRRFRQEFSYVSSKESLEQETFDLVNLFIKALSEQNQYVDWTTFSDKMQPYTTWVSHYIEFRKTLLEKSIRQNKIYSSTSLKSQVLSQYVDAFARSDMDFNLEEVAKRYKLTDLVKKLHKTFDDNNQIKAAGIFHIKIKEALQQHERTLFNKEQQNFKQNREDKELVLFTAEVRQYIAKNFPIKKDKAKKGKRIVLSEAKILHRIKQKYQNAMTQYLLNEGKRAAYKLGDNTTSEDLTNIKIGEAFALKFLNACFFGANSLRNILEVDGDVLSSSSFRSAVDNMSQNKEAEIRHNLELFFSGISELCKNSEELGEVLWGLRGAIQRIRNNLVHFNEHSWNQILTLGDEKIEKIDKLYVETKFQDLFTQELKNIPILLKEKMLTAKIFDYYPASKLENSFDKYSLLTSVAPFAPSFKRVHTKGCDYQYSRKRDYNLQLKVYKEKDKFSEKEAENAYYNLLKIIYYQMFLPTFTKDYRLFKESTEFVLKINKQRDNQPSAFEFIRPMEEHETPSDYMGYIQSSLMQQQKKVDEQGKDNFFNRYITQIFIKGFDSYIIKNDLEFSLAPVKQEFDSEKIDLLNFKEEIDAKYIPFWVFCKVLNTKMLSELRNEMIKFSRTELSKEKREAFIEAQKIIGLALMTVDRGSSEWIKVFSRKENWQKTMEMYVSQDLLNELPYVQEDHETPILFRSVELVKKHGAEKLLSKIVGDNLVTAEDVQFYQADHDIENVIASKEAMHKKWERDRRKASENDFKKSYGAKITKISDYRWNKNKVELNYIRSLHNLAVDLISRLTGFMAIADRDFQFLCNALLARREAGFRVKSWVDLSRRVKFKSYEVDYINGEVELSNQLEETSYLIGKLEEIQAFCINGQYNGAKSVRNEIDHWDKLRGGGSQSILELYNSVRELVSYDRKLKNAVTKSLIDLLEGHGIVLTLKNKSLTEASRHDFEIKSCKPKEIRHLGNRGVTEKQVSDEYCQLVERLLKLK

SEQ ID NO: 1289 - protein, 1078 aa, Artificial
  Synthetic
MKLSKVNNTRFFKEYDKGSLYKLNETKKLDLDEHIKLRMESSQKTFRDIFTMLNKNNKYSKELSDIIKEYAIEYSKLSLGDILKINTKIKNKTIEYRSLNSFNRIYKERLKRISKKDGELFAFDVNKTKEINSFFKWLNEKYAKNFLAKNAKKSIENNRIEIADNKEKWLRSITADEDKIKLERVYKKLRFLILGEEKAQFTNNFSKDIMILNDILRKDDSKNWNEAKWYDSLNFVKRIYAQLKDDLSEEEKYDYEIIVGFLKEVIIDLKPNINGKGTLFVKMYDGFKDSSTVPLEKIINLIINKTMGKIKNYFVSNIISCGKKVYLEDTFKSSKLSGNYYELQKAYDEIRVRNITAISFATNTINNLFNKEDNFKDLDNMVIKNNNEKVEDKYKGYVDEKISLFFSLEAVKDYIENNYYAFVQQVISNLYSLRNNDFHFIKSGQNVCSDKLEKFVKIELDNYYKIINQKIDSIKLNKYYKKEELLKVFKDIQGQKNIVPFMPSFRKIKKYLELSKIDIESNIEEQQVQKNAEIYLLKEIYTTVFTNHFLKKKFTIIEEFKTCILNDNDKGKKAFTSLEGMLGGTMAEVANMLLTKYMIDNSSLTKKVKDDHLKIILNQLVAKEFEKYIEDNYKFLKEDKNNEINDLNKISEEELKQIFDYKIDKIDISFYILARLIPNSIVSDLSNSYSKFLQFTKDIAKKFKLIEGVEISHKNLLTLLGYSEDDINKIVYSLNMALEYNSTYGIKSDEGKSFINEITPFFEDGTFKDEYYEDIFVQDGKNVIYHGSIINLEKNFIYDKISKIYNDSSLDLKVKKRKDKDKKEEEMDKYISLSKDGKYKNIINIYEKIANSRDQVTEDDWKKVNEYVALKNRVLLQDISDYSTILTEIQSHLISYFYKYERDTMYFLLGLDYLRKSVKKPEINNIFSYQEKGGSVNKKLSDYLKNSMNAIFKKYYDEYIVNSSKVKIDNKTVRNSIDHFDGFKKDKSFFEIIVNTYKVLGYDRKLQNSVFKKLINILEKHRMDISKCIEFKSSSITLNKDKAKNIEVEIKVKDNSYKAFNKNEKYSKIFLEILDSET

SEQ ID NO: 1290 - protein, 958 aa, Artificial
  Synthetic
MKLSKVTYRVKDKNAKYKKEYNVRAAVANNSENAGGVLYHVPGVDLIDLKEQMLDRDRSVRLLYNIFNQIQTGTKPKKWGNDETLSVDENERKAKEQNIKIMNYKWREACSEYIEKSQSTINSVLFYSYEESGYKTKRMNDNEAIIVKMQYENRLSHFTGGKLEDFVAYTLRNSLVVSRYDNQEFDSVNAMVVFINNIGNGNISDKDKKTICKLADLIRNDFSKLNPNVQSSQGANMVRSVRNQNMVVQPQGDIVSFPLVSDEGKNTVTNKNVEKKGLNEFLLNYANLDDEERMENLRKLRRIIDVYFSSPSHYQKDMDISLSDNIDKTKFVVWKKHETGKKNTELFVDIPDELFTAETEKIKLDAVLEKQARKRLTDSIRKQNMICYRYTRAVVEKYNSTENLFFENDSINQYWIHHIENAVERILKSCKAETLFKLRRGYLTEKVWKDAINLISIKYIALGKVIYNFTVDDIWKDKKVKNLGSIDEKIKHGITSFDYEMIKAQEALQRELAVNVAFAANNLARAVCDMTNLKDKESDFLIWNKKDIANKLKNKDDMASVSVVLQFFGGKSSWDIDAFREAYKGNKYDYEVCFIDDLRKAVYAARNESFHFKTALVNNDIWNTEFFGKLFIKETEICLDIEKDRFYSNNLPVFYSDNDLKKMLDHLYNNKVSRAAQVPSYNSVMVRKYFPENITSTLKYQKPGYDEDTLEKWYSACYYLLKEIYYNSFLQSDEALALFEESVNNLKGDNKDQELAVKNFRNNYKNIKSSCTSFSQVCQMYMTEYNQQNNQFKKVRSSKDSIVDKPIYQHYKLLLKKVIANAFASYLQHNKELFGFIGKPLKVNCLKEIDKEQFLPEWTAKKYVSLCEEVRKSPELQKWYIVGKFLNSRSLNLMAGSMRSYIQYVNDIKRRADGIGNELHVIAQNLDVVDKWVQVIEVCLLLSSRVSNDKGMYIFVHA

SEQ ID NO: 1291 - protein, 1064 aa, Artificial
  Synthetic
LSIADTKKKPLWEYLIKYADSSRQRELMYDIRKKIILYVAGIEEYENIKEDSGLSKVSWSKYNISDNKMFFDINSCTDKRKQNLEIKIREANIEHYRNASSKLCDDESIFWFQHFEGVIETLFSKKSKISEERLGCAYICDYLWKDFLSYLAAKYIDLGKGVYHFTMKDKLDMLNKNEAVTDLRFGIVSEKYEKGITSFDYERIKAEEELDRNIAAYVTFAADIFAKSVIKSDYRTKKDNNSDVLQYSDKEFRNSEVIRDNAEKNILQYWGGYSRWCTENSKLPENNKVSDFGKLDVSDLCIDIKKHLAGIRNSSVHYTTKIKNESAADGSNVKILFEKDLADINIIYADKYYSNNVWMFYSLEDINKLIAFLYKEKRVIRQVQIPSFSRILKRKAMQDVINEIFKDDFDENIVNPELKEKYRNSLYFMLKEIYYNAFIIQPELKEKFKDKIKTMKSELYNKLKTIDKKEYKALYCMLSNEESALKNFADRIYSVDGDNVSFADICKILMTDYNMQNQEKKNIESMEQKKKNKGKDENYKHFPLLLHKVLKELFIEYLKQTHELEFLRNNICIKSDVTMESFESQIKGVEIYKDLKEKIDKNNSLLDWYVIAHFLMPKQLNHLIGNIKNYIQFATNIDKRAESVKNLTESGMVKRIQYYDDIVRTLEFSAQYIGKISNNINDYFNSEDEYVSFLSKYVGFINDKSEDVLTELKDFCREKINNGSQIIGIYYGGDNVIINRNVIYAQMYSNAEVFSNIYKKVTKNDIINYYEKQNDLKDVFKSGVCQNEDEQRSLCEFQQLKNRIELTELSTYADMVNDFMAQFVEWAYLRERDLMYFQLGIHYIRLFYSDNVLDEKYHKLSDNVIDIEEGALLYQIVAMYDYELRIFETDNSGNAKRIGQGGPGKSIPVFLKKYCSGTDVYECGLELFEDINQHEHIIRFRNDIAHMRYMSNQAMNIMSIVSNIYKSFFAYDTKLKKSISLVFKNILMRYGVIADLVFSYNNKNQSIKDDMDINIINIKNLKSDKYVYKIVNEDIVKQVEIEIRNQVFLERSEERRVGKECRSR

SEQ ID NO: 1292 - protein, 1130 aa, Artificial
  Synthetic
MKVSKVKVKVGAGRSSERMVFMRRTSKIGSLVYEDEQRNGKPETDDKTTSILPDKKRDSFILSIVNKTIPKKEIVKKNLGKGFVNEYYNAIAGIIDSFLEKKIVDRKHYIIVNKLTEEEIKQYLNHRFQEANYKYVRDKEEVNFNLPKLLKESAKSNSTAPLQPYKEWAEWHIETKSVRLIRSIQNNRLVIDTQEEAENMSPRKRALLKWENEFLLSHKLDLQDVEKTYLIDDLIHALHEVTYTTNDKGFINGNEYHRFLKKALQSHQQNIFGSRETPNKVNRENAELYSYNMEVVKYLEHYFPIKKTNRRNTLDTKDYYLNGINIKDRVRKQLENAVRNNLVRQGKYTLHTLTTDTANSDNLSKIKADEGFALTMLNQCAFAANNVRNIIDPTQVEDILLDRPFNESLEKFNSAQMLHLSSFFDVKEFNEPLRAIRDAVAKIRHNIIHYKVNALNVIFKIETFGSTEKQYKDTIFGSLLQADMMNVSESLAKQLMTGNVLEYYPMLELKSFFSKNSISLYRSVIPFAPGFKRVMKKGENYQNANNKDDKSKYYNLKIESFLPQESFTKEAYDARYFLLKLIYNNIFLPKFTESTDWSKSTVNGVIALNREENVRKGKKHKIAFAEIRLMDSRDTIGTYAAYLQSCAIIEANKKPDAAKDETVLLNFEKLILQIFIKGFDDFLRRYGMLKFVQQPSLQFKSGAKDETKQRKDWAKEVEGSLHAPVNDINPTESSHISFYVFCKLLDAPHLNDLRNELIKYYRSQSHRPQKIKNIKYLLSIIELCLLSVDASELNKLFTDADNSINDRLLAFLEKNKTVADYEDLYTQSDNETMVLHRTIAKAYKYGTRKVLEQVIDSDPSYRVTVSEYEEWKNLKENVEEWIACREKLHAKWVKVERVPKMKEGEMKDDMKEYVEVCSTIDRYNWLDNKVHLEHINKLHNLTIDLLGRMAGFNTLFERDLQYYCNCNEKVRSLLKPESSEGFDFSKGLPKFTEEQNSILFQTFLVEGYRDTRNFVAHFNFLNSFEDSYSKNRYSLIDVINRLRKQFKYDRKLKNAVSKAIIKLFEKHGMVLTFSFEGDHELVVKDVFPRKIIHFSKLKLDKKIEQKPKVETDMVPKEFCAMCKFLLELKK

SEQ ID NO: 1293 - protein, 1210 aa, Artificial
  Synthetic
MKLSKEKHTRSAVANEEQNIGGILYRFPGKSIDGVKDQMLRRDKEVKKLYNVFNQIQVGTKPKKWNNDEKLSPEENERRAQQKNIKIENYKWREACSKYVKSSQKTINYVIFYSYGKAENKLRYMRKNEDILKKMQEEEKLPKFSGGKLEDFVAYTLRKSLVVSKYDTQEFDSVAAMVVFLECIGKSNISDHEKEIVCKLLELIRKDFSKLDPNVKGSQGANIVRSVRNQNMIVQPQGDRFLFPQVYAKENETVTNKNVEKEGLNEFLLNYANLDDEKRAESLRKLRRILDVYFSAPNYYEKDMDITLSDNIEKGKFNVWEKHECGKKVTDLFVDIPDVLMEAGAENIKLDAVVEKRERKVLNDRVRKQNIICYRYTRAVVEKYNSNEPLFFENNAINQYWIHHIENAVERILKNCKAGKLFKLRKGYLAEKVWKDAINLISIKYIALGKAVYNFALDDIWKDKKNKELGIVDERIRNGITSFDYEMIKAHENLQRELAVDIAFSVNNLARAVCDMSNLGNKESDFLLWKRNDIADKLKNKDDMASVSAVLQFFGGKSSWDINIFKEAYKGKKKYNYEVRFIDDLRKAIYCARNENFHFKTALVNDEKWNTELFGKIFKRETEFCLNVEKDRFYSNNLYMFYQVSELRNMLDHLYSRSVSRAAQVPSYNSVIVRTAFPEYITNVLGYQKPGYDADTLGKWYSACYYLLKEIYYNSFLQSDRALQLFEKSVKTLSWDDEEQKRAVDNFKKYFSDIKSACTSLAQVCQIYMTEYNQQNNQIKKVRSSNDSIFDQPIYQHYKVLLKKAIANAFADYLKNNKDLFGFIGKPFKANEIREIDKEQFLPDWTSRKYEALCIEVSGSQELQKWYIVGKFLNAMSLNLMVGSMRSYIQYVTDIKRRAASIGNELHVSVQDVEKVEKWVQVIEVCSLLASRTSNQFEDYFNDKDDYARYLKSYVDFSNVDMPSEYSALVDFSNEEQSDLYVDPKNPKVNRNIVHSKLFAADHILRDIVEPVSKDNIEEFYSQKAEIAYCKIKGKEITAEEQKAVLKYQKLKNRVELRDIVEYGEIINELLGQLINWSFMRERDLLYFQLGFHYDCLRNDSKKPERYKNIKVDENSIKDAILYQIIGMYVNGVTVYAPEKDDDKLKEQCVKGGVGVKVSAFHRYSKYLGLNEKTLYNAGLEIFEVVAEHEDIINLRNGIDHFKYYLGDYR

SEQ ID NO: 1294 - protein, 1161 aa, Artificial
  Synthetic
MKVTKVDGISHKKYIEEGKLVKSTSEENRTSERLSELLSIRLDIYIKNPDNASEEENRIRRENLKKFFSNKVLHLKDSVLYLKNRKEKNAVQDKNYSEEDISEYDLKNKNSFSVLKKILLNEDVNSEELEIFRKDVEAKLNKINSLKYSFKENKANYQKINENNVEKVGGKSKRNIIYDYYRESAKRNDYINNVQEAFDKLYKKEDIEKLFFFIENSKKHEKYKIRECYHKIIGRKNDKENFAKIIYEEIQNVNNIKELIEKVPDMSELKKSQVFYKYYLDKEKLNDENIKYVFCHFVEIEMSKLLKNYVYKKPSNISNDKVKRIFEYQSLKKLIENKLLNKLDTYVRNCGKYNYYLQDGEIATSDFIARNRQNEAFLRNIIGVSSVAYFSLRNILETENENDITGRMRGKTIKNNKGEEKYVSGEVDKIYNENKQNEVKENLKMFYSYDFNMDNKNEIEDFFANIDEAISSIRHGIVHFNLELEGKDIFAFKNIAPSEISKKMFQNEINEKKLKLKIFRQLNSANVFRYLEKYKILNYLKRTRFEFVNKNIPFVPSFTKLYSRIDDLKNSLGIYWKTPKTNDDNKTKEIIDAQIYLLKNIYYGEFLNYFMSNNGNFFEISREIIELNKNDKRNLKTGFYKLQKFEDIQEKTPKEYLANIQSLYMINAGNQDEEEKDTYIDFIQKIFLKGFMTYLANNGRLSLIYIGSDEETNTSLAEKKQEFDKFLKKYEQNNNIEIPHEINEFVREIKLGKILKYTESLNMFYLILKLLNHKELTNLKGSLEKYQSANKEEAFSDQLELINLLNLDNNRVTEDFELEADEIGKFLDFNGNKIKDRKELKKFDTNKIYFDGENIIKHRAFYNIKKYGMLNLLEKISDEAKYKISIEELKNYSNKKNEIEKNHTTQENLHRKYARPRKDEKFTDEDYKKYEKAIRNIQQYTHLKNKVEFNELNLLQSLLLRILHRLVGYTSIWERDLRFRLKGEFPENQYIHEIFNFDNSKNVKYKNGQIVEKYISFYKELYKDDMEKISIYSDKKVKELKKEKKDLYIRNYIAHFNYIPHAEISLLEVLENLRKLLSYDRKLKNAVMKSVVDILKEYGFVATFKIGADKKIGIQTLESEKIVHLKNLKKKKLMTDRNSEELCELVKVMFEYKMKEKKSEN

SEQ ID NO: 1295 - protein, 1000 aa, Artificial
  Synthetic
VTLYFTTFRIFKKHYKVNFDSKKFSNKSDEEKELYKIIYRYLKGRIEKILINGEKVRLKKMEKIEIEKILNESILSEKILKRIKQYTLEHIMYLGKLVHNKINMATVNTNDFFRLHAKEELDLELITFFASTNMELNKIFNGKEKITDFFGFNLNGQKITLKEKVPNFKLNILKKLNFINNENNIDEKLSHFYSFQKEGYLLRNRILHNSYENIQETKNLEGEYENVENLIKKLKVNDEEISKSLNLDIIFEGKAGIINKINNLKIGEYKDKKYLPSFSKIVPEITRKFREINKDKSFDIESEKIILNAVQYVNKILYKKITSNEENEFIKTLPDKLVKKNNNKENKNSLSIEEYYKNAQISSSKGDKKAIKKYQNKVTNAYIEYLENTFAEVIDFSNFNLNFDEIKTKIEERKYSKSKITVDSISTNINITNDIEYIISIFALLNSNTYINKIRNRFFATSVWLNTQKYENIIDILDKIDILDKILSINLLRENNIADILDLKNTIIEAKIVENNEECIKNYIFENNEEELKKRLFCEELINKEDVLKIFEDKNFKFKNFIKKTGNENFTIDFDILFNLECNSELNAKKVIGQNSQRLNLFIKNTIDEYKSKIKTSFSSEFLEKYKKEIDNLVEDTESENKNKFEKIYYPEEHKNELYIYKKNLFLNIGNPNFDKIYGLISNDIKMADAKFLFDSDSKDIRNNEISKIDGILKNLNDKLNGYSKEYKEKYVKKLKESNDFFAKNIQNENYSSFEEFEKNYNKISEYKKIRDLVEFNYLNKIESYLIDINWKLAIQMARFERDMHYIVNGLKKLNFINLNGYNTGISRAYPKYNDTDSNKNCKKFYETTAYYKFFDDKSYREFEDICYEFGIDLRKNSNIQAKEERNIRNYISHFYIVRNPFVDYSIAEQIDRVSNLLSYSTRYNNSTYASVFEVFKKDVDLDYDELKKKFKLIGDNDILEKLMKSKKVSVLELESYNSDYVKNLIIKLLTKIENTNDTL

SEQ ID NO: 1296 - protein, 1075 aa, Artificial
  Synthetic
MKVTKVDGISHKKYIEEGKLVKSTSEENRTSERLSELLSIRLDIYIKNPDNASEEENRIRRENLKKFFSNKVLHLKDSVLYLKNRNEKNAVQDKNYSEEDISEYDLKNKNSFSVLKKILLNEDINSEELEIFRKDVEAKLNKINSLKYSFEENKANYQKINENNVEKVGGKSKRNIIYDYYRESAKRNDYINNVQEAFDKLYKKEDIEKLFFLIENSKKHEKYKIREYYHKIIGRKNDKENFAKIIYEEIQNVNNIKELIEKVPDMSELKKSQVFYKYYLDKEELNDKNIKYAFCHFVEIEMSKLLKNYVYKKPSNISNDKVKRIFEYQSLKKLIENKLLNKLDTYVRNCGKYNYYLQDGEIATSDFIARNRQNEAFLRNIIGVSSVAYFSLRNILETENENDITGRMRGKTVKNNKGEEKYVSGEVDKIYNENKQNEVKENLKMFYSYDFNMDNKNEIEDFFANIDEAISSIRHGIVHFNLELEGKDIFAFKNIAPSEISKKMFQNEINEKKLKLKIFRQLNSANVFNFYEKDVIIKYLKNTKFNFVNKNISFVPSFTKLYNKIDDLRNTLKFSWKIPKDKEEKDAQIYLLKNIYYGEFLNKFVKNSKDFFKITDEVIKINKQINQKTGYYKYQKFENIEKTVPVEYLAIIQSRDTINNQDKEEKNTYIDFVQQIFLKGFIDYLNKNNLKYIENNNNNDIFSRIQIKKDSKERYDKILKNYEKNNRNKEIPYEINEFVREIKLGKILKYTESLNMFYLILKLLNHKELTNLKGSLEKYQSANKEEAFSDQLELINLLNLDNNRVTEDFELEADEIGKFLDFNGNKVKDRKELKKFDTKKIYFDGENIIKHRAFYNIKKYGMLNLLEKISDEAKYKISIEELKNYSNKKNEIEKNHTTQENLHRKYARPRKDEKFTDEDYKKYEKAIRNIQQYTHLKNKVEFNELNLLQSLLLRILHRLVGYTSIWERDLRFRLKGEFPENQYIEEIFNFDNSKNVKYKNGQIVEKYINFYKELYKDDTEKISIYSDKKVKELKKEKKDLYIRNYIAHFNYIPHAEISLLEMLENLRKLLSYDRK

SEQ ID NO: 1297 - protein, 1169 aa, Artificial; identical to SEQ ID NO: 931
  Synthetic

SEQ ID NO: 1298 - protein, 1038 aa, Artificial
  Synthetic
LKWRKNMKLSKVTYRVKDKNAKYKKEYNVRAAVANNSENAGGVLYHVPGVDLIDLKEQMLDRDRSVRLLYNIFNQIQTGTKPKKWGNDETLSVDENERKAKEQNIKIMNYKWREACSEYIEKSQSTINSVLFYSYEESGYKTKRMNDNEAIIVKMQYENRLSHFTGGKLEDFVAYTLRNSLVVSRYDNQEFDSVNAMVVFINNIGNGNISDKDKKTICKLADLIRNDFSKLNPNVQSSQGANMVRSVRNQNMVVQPQGDIVSFPLVSDEGKNTVTNKNVEKKGLNEFLLNYANLDDEERMENLRKLRRIIDVYFSSPSHYQKDMDISLSDNIDKTKFVVWKKHETGKKNTELFVDIPDELFTAETEKIKLDAVLEKQARKRLTDSIRKQNMICYRYTRAVVEKYNSTENLFFENDSINQYWIHHIENAVERILKSCKAETLFKLRRGYLTEKVWKDAINLISIKYIALGKVIYNFTVDDIWKDKKVKNLGSIDEKIKHGITSFDYEMIKAQEALQRELAVNVAFAANNLARAVCDMTNLKDKESDFLIWNKKDIANKLKNKDDMASVSVVLQFFGGKSSWDIDAFREAYKGNKYNYEVCFIDDLRKAVYAARNESFHFKTALVNNDIWNTEFFGKLFIKETEICLDIEKDRFYSNNLPVFYSDNDLKKMLDHLYNNKVSRAAQVPSYNSVMVRKYFPENITSTLKYQKPGYDEDTLEKWYSACYYLLKEIYYNSFLQSDEALALFEESVNNLKGDNKDQELAVKNFRNNYKNIKSSCTSFSQVCQMYMTEYNQQNNQFKKVRSSKDSIVDKPIYQHYKLLLKKVIANAFASYLQHNKELFGFIGKPLKVNCLKEIDKEQFLPEWTAKKYVSLCEEVRKSPELQKWYIVGKFLNSRSLNLMAGSMRSYIQYVNDIKRRADGIGNELHVIAQNLDVVDKWVQVIEVCLLLSSRVSNEFEDYFYDKDDYAAYLKSYVDFDNSDMPSEYSALVEFSDQGKVDLYVDPSNPKVNRNIVQSKLFAADYILRDIIEPVSKDEIED

SEQ ID NO: 1299 - protein, 1169 aa, Artificial; identical to SEQ ID NO: 931
  Synthetic

SEQ ID NO: 1300 - protein, 1169 aa, Artificial; identical to SEQ ID NO: 931
  Synthetic

SEQ ID NO: 1301 - protein, 1161 aa, Artificial
  Synthetic
MKVTKVDGISHKKYIEEGKLVKSTSEENRTSERLSELLSIRLDIYIKNPDNASEEENRIRRENLKKFFSNKVLYLKDSVLYLKNRNEKNAVQDKNYSEEDISEYDLKNKNSFSVLKKILLNEDINSEELEIFRKDVEAKLNKINSLKYSFEENKANYEKINENNVEKVGGKSKRNIIYDYYRESAKRNDYINNVQEAFDKLYKKEDIEKLFFLIENSKKHEKYKIREYYHKIIGRKNDKENFAKIIYEEIQNVNNIKELIEKVPDMSELKKSQVFYKYYLDKEELNDKNIKYAFCHFVEIEMSKLLKNYVYKKPSNISNDKVKRIFEYQSLKKLIENKLLNKLDTYVRNCGKYNYYLQDGEIATSDFIARNRQNEAFLRNIIGVSSVAYFSLRNILETENENDITGRMRGKTVKNNKGEEKYVSGEVDKIYNENKQNEVKENLKMFYSYDFNMDNKNEIEDFFANIDEAISSIRHGIVHFNLELEGKDIFAFKNIVPSEISKKMFQNEINEKKLKLKIFRQLNSANVFNFYEKDVIIKYLKNTKFNFVNKNIPFVPSFTKLYNKIDDLRNTLKFSWKIPKDKEEKDAQIYLLKNIYYGEFLNKFVKNSKDFFKITDEVIKINKQRNQKTGYYKYQKFENIEKTVPVEYLAIIQSREMINNQDKEEKNTYIDFIQQIFLKGFIDYLNKNNLKYIENNNNNDIFSRIQIKKDSKERYDKILKNYEKNNRNKEIPHEINEFVREIKLGKILKYTESLNMFYLILKLLNHKELTNLKGSIEKYQSANKEETFSDELELINLLNLDNNRVTEDFELEADEIGKFLNFNGNKVKDRKELKKFDTKKIYFDGENIIKHRAFYNIKKYGMLNLLEKISDEAKYKISIEELKNYSNKKKEIEKNHTTQENLHRKYARPRKDEKFTDEDYESYKQAIKNIEEYTHLKNKVEFNELNLLQGLLLRILHRLVGYTSIWERDLRFRLKGEFPENQYIEEIFNFENKKNVKYKSGQIVEKYIKFYKELHQNDEVKINKYSSANIKVLKQEKKDLYIRNYIAHFNYIPHAEISLLEVLENLRKLLSYDRKLKNAVMKSVVDILKEYGFVAKFKIGADKKIEIQSLKSEEIVHLKKLKLKDNDKKKEPIKTYRNSKELCKLVKVMFEYKMEEKKSEN

SEQ ID NO: 1302 - protein, 979 aa, Artificial
  Synthetic
MDVKVQPDLNDNSILKLSGLGNIKKEALSDTLLRYAASADESDQVLLDIKKLLFEYFLPENSKETSKYTTVQNLWNIPYLPKIFFDYGFENEDSDDDNECAEDIETLCDVEPQYKINQHSLKRRIRYVNYGKYLQMTKNESDRERRYWIHYIKEFVEKNYVDSGRTLSEKNCYASSMMLNCWKEIIRYLCGKYIDIGKAVFHFTNLTAMPKPKDKIIYGQLEEQYKKGISSFDYEAIKAEETLQRDIVQSVVAAAFAFSKSVIDETKMEECQETNKEDILFLSENVLGSLLKENTIKLILRFYGGESSVAQKEYFDQQEIVQEMISHLKSIRNENFHYLDGAKKDNPHKYASILWKNDEMAYQKLTKQRYYANNVGLFYRAEEIQELVQELYSQKNITEAQIPAFRTVLKRKDLPGYMEELGILFPDNTQEKSKGDFEGTLYFLMKEIYYRDFIVKDKAAAYFFKAVDQNKEQSKKEDKHTERAAENFHRYVKSLEKKYNKKEISFGTVCQYIMMEYNQQNTTKQETEIYKHFKMLISLCIRKAFGNYIKETYRFLFHPIYSKQQGEPEYLDTLELESGVKEKNYEWFTLAHFLHPVQLNHLVGDLKSYIQYREDILRRIVFAEQRVYADQQKEVQQKVKTAKEILEVLEFVREVSGRVSNEYTDYYENEEEYAEFLYQYIDFRKREGKSAFESLKYFCQNILDSGTVVDLYADTENPKVLRNIELTRMYAGSNVKIPEYEKITEDEIKMYYQEKNSVALILSRGLCRNEKEQKKVIEFNWKKKRLTLNEITDVFSLVNDLLGKMISFSYLRERDQMYLLLGFYYMALCAENKSENHLGWKGETLDKLESSDSKFDIGGGLVLYQIVSAFNFGSKLLYISEDGRWKMAGGAFPGKYGRFENDYNHRTSLSKVIRLFENESYEREIIYWRDYVDHMKYYVNQNQSIMEIYSAFYSKVLGYSAKLRKSVYLICRLHLKSII

SEQ ID NO: 1303 - protein, 907 aa, Artificial
  Synthetic
VKFSKVNNLKTAVTLDKNNDGKTGILYRDPARKERSVQRDIGTHVSRQIDKSKNLYRLFNASQEDEEEVPELFFANRLNETIKKQMIEKMVKSDFTADRLCSLLKKVSDEMGYAFSQQIIDSAINRFLRRNLYINAAKGLKTALMVGFGLMPQDQLTAEDKKEIEHFLSVLRDDYEHQAIIKHVEKSITHQNMLIQPNKEGLFVPAEIPQAQNRSKNEKEAFERFLLSYAVLDEKIRHDLRLRLRRLVDLYFYGESAVKQEDFDEWKDHAGHKGDTMPFSEKASDLIPIILRAQDKNLDDEAKKEAKEKAKEAKTDIFRYLREENTSRYRRCISAVKNAVNTDLYFEDMMINQFWIHHIEDAVERICDNIRKPESFRLCVGYLGEKVWKDCLNYLSIKYIAIGKTVYHYAMSSDIADSTKSVTLGKIAPDKMKGLTSFDYEQIKAEETLQRSLAVYVTFAANHLAGETVKRENKSQKEDFFTLKKGDLKDQQKPHLRRNIFQFFGGQSRWQDFPFEKYFISEYTDLDFLYDLQQILYSLRNESFHFDTRNHNMGDWNQPLIIAMFEYDCKQCSVLQKSKFYSNNLPMFYGQKDLEKILKRLYEVQAGRASQVPSFNSVFVRNNFKEFIRNNLGWNINFTEEKSTENLDKFESGLYYLLKEIYYNLFLQGKGLTGDYDVKKQFINWSRKKTDEEHKFAAINFSQRIKSLEEGEREFSFSEICQSIMTEYNLYNNNRKVKSDYVKKNHPDSYAHYKLLLYKGIREVFAHYIKTQFSLLAEPSLREKPAEEDFLPSYTTGAYKELIDRVRKNIDLQKWYILGRFLNARQANLLIGQVRHYAQYSSDVRRRAAETRNQTLQEVSKKELDGYEKVLDVCIKLSGMTSNNLEDYFDDKDDYAKHISHYLAFTE

SEQ ID NO: 1304 - protein, 1170 aa, Artificial; identical to SEQ ID NO: 911
  Synthetic

SEQ ID NO: 1305 - protein, 917 aa, Artificial
  Synthetic
VKFSKVNNLKTAVTLDKNNDGKTGILYRDPARKERSVQRDIGTHVSRQIDKSKNLYRLFNASQEDEEEVPELFFANRLNETIKKQMIEKMVKSDFTADRLCSLLKKVSDEMGYAFSQQIIDSAINRFLRRNLYINAAKGLKTALMVGFGLMPQDQLTAEDKKEIEHFLSVLRDDYEHQAIIKHVEKSITHQNMLIQPNKEGLFVPAEIPQAQNRSKNEKEAFERFLLSYAVLDEKIRHDLRLRLRRLVDLYFYGESAVKQEDFDEWKDHAGHKGDTMPFSEKASDLIPIILRAQDKNLDDEAKKEAKEKAKEAKTDIFRYLREENTSRYRRCISAVKNAVNTDLYFEDMMINQFWIHHIEDAVERICDNIRKPESFRLCVGYLGEKVWKDCLNYLSIKYIAIGKTVYHYAMSSDIADSTKSVTLGKIAPDKMKGLTSFDYEQIKAEETLQRSLAVYVTFAANHLAGETVKRENKSQKEDFFTLKKGDLKDQQKPHLRRNIFQFFGGQSRWQDFPFEKYFISEYTDLDFLYDLQQILYSLRNESFHFDTRNHNMGDWNQPLIIAMFEYDCKQCSVLQKSKFYSNNLPMFYGQKDLEKILKRLYEVQAGRASQVPSFNSVFVRNNFKEFIRNNLGWNINFTEEKSTENLDKFESGLYYLLKEIYYNLFLQGKGLTGDYDVKKQFINWSRKKTDEEHKFAAINFSQRIKSLEEGEREFSFSEICQSIMTEYNLYNNNRKVKSDYVKKNHPDSYAHYKLLLYKGIREVFAHYIKTQFSLLAEPSLREKPAEEDFLPSYTTGAYKELIDRVRKNIDLQKWYILGRFLNARQANLLIGQVRHYAQYSSDVRRRAAETRNQTLQEVSKKELDGYEKVLDVCIKLSGMTSNNLEDYFDDKDDYAKHISHYLAFTEDIPGVSLSAQ

SEQ ID NO: 1306 - protein, 948 aa, Artificial
  Synthetic
MRGGYMKITKIGGISHKKYEEKGKLIKSNEIEKDVIEERFNDIEKKTKELFLKTLDSYVKNYEKCEEQNKERREKAKNYFSKVKLIIDNEKITICNENTEKMEIEDFNEYDVRNRKYFNVLNKILNGENYTEEDLEVFENDLQKKLNQIQSIKNSLEENKAHFKKESINNTTDIVKGNNKKSLFYEYYRNSSKHQEYVNNIFEAFDKLYSNSHEDINNLFLEITKDSNDRNIRKIREAYHEILNKNKTEFGEELYKKIQDSISNFDKLLEIEPEIKELTKSQIFYKYYIDKVNLDETSTKHCFCHLVEIEVNQLLRNYVYSKRNISKEKLKNIFEYCKLKNLIKNKLVNKLNNYIRNCGKYNGYISNNDVINSEKISEIRTKEAFLRSIIGVSSSAYFSLRNILNTDNTQDITNKVDKEVDKLYQENKKIELEERLKLFFGNHFDINNQQEIKAFLMNIDKIISSIRHEIIHFKMEANVQNIFDFNNINLGNKAKNIFSNEINEEKIKFKIFKQLNSANVFDYLSDENITEYMGKAVFSFTNRNIPFVPSFTKIYNKVQDLANSLEIKKWKIPNESEGKDAQIYLLKNIYYGKFLDEFLNEENGIFISIKDKIIELNRNQNKRTGFYKLEKFEKIEETNPKKYLEIIQSLYMINIEEIDSEGKNIFLDFIQKIFLKGFFEFIKNNYNYLLELKKIQDKKNIFDRKMSEYIAGEKTLEDMEEINEIIQDIKITEIDKILNQTDKINCFYLLLKLLNYKEITELKGNLKKYQILSKANVYEKELMLLNIVNLDNNKVKIENFKISAEEIGKFIEKINIEEINKNKKIKTFEELRTFEKIKNTGEYYNVYSDDKNIKNIRNLYNIKKYGMLDLLERISEKANYCIKKEDLKEYSELRKQLEDEKTDFYKIQKDLHSEYQKRPKNFSEKNNTKDYKKYKKSIRNIEKYVHLK

SEQ ID NO: 1307 - protein, 1102 aa, Artificial
  Synthetic
MQMKISKIKNSRPGISVAENKNEESLSRQSLLYYAPVKDGKIRLESKDLEQHVTECNEKAQKLYNVITPEINFYRDENRQKMVENLARNFNAVINNALRKEELLNPKEKKEQRVEKEVAFILNLSKKSIKMKKDVFVKSTDLIVKFPENNKYNKKNDKGTGSKEAYIQKMISDLVLRKLKNTLRKEVKLENGYRMQMTEIIISLMSAICLYGNAESFDPAILKAFFEKVDSDYTKYKYVEQIVKSIESQSAKLKVVEKDGRHLLISANADHRKKKYVFEFMRMYAAADEKEKRELTEHIQDLIGLYLCGKAGYENAENRFSDMTESHNCICGKIEEILNELEKPENLSQKKKENLKNTTVKVMALKYRAAVNYLADEVGKTVLGEIREKKVRSCADLYWIEYIDSTVEKLLLKSRNKDGYRYEIGFLSKHIWKEWTQYISGKYIEMGKGVYHFAIPDLSGNLEGEPISICEVKPEYRNGVSGFDYERIRAEESLEREMEKYVLFAVNNFARAVTPEEEREKSGHEDVLLMKTLSEIEESQTKEERQKKHDNNVKNAITLYADADRRILQFFGGQSRFREKEDSLINLYSGEDLYKEIRKELYAIRNITFHYTTKADKDQTQKHDLAEYLFEEEFSDITELFREKYYANNVWKYYDVEVINTIMENIYCGRKYRAAQVPAFKNIISRPELPQVMNGFVKGNSLRRLMNCPDRDVINKYWSALFFVLKELYYYDFLQEQKKPEDNVKERFFRAIEKLSGQENDDKKQKAWESFGNRIDQIGRDRSFGAICQGLMIEYMLQNSDISMVQTETDNGKANNKKQIYKHYRTLLYNCIREAFIEYLREKWEELRTPVLTVKEWSKEEFCRADGLKHLSLFDHLKKTFNDAESGSSWYMAAHFINQKYLNHLLGSIRNYLQFTEDIEDRAISLGDCVDNKREEKNLRYRNTLEILEFVAQFCERTTNVMEDYFESNQEYAEYLSGFVDYNTTKKETDIEKALYSFCKQKFKVDGKEYMAGIYYDGENLIPNRNIIRANMYGNTSCLKPCMDRITLKEIRTMYADQNKLDLVLKEGVCHTEEEQKAYREYQNEKNRIELFDVCTYTQILN

SEQ ID NO: 1308 - protein, 944 aa, Artificial
  Synthetic
MKITKIDGISHKKYIKEGKLVKSTSEENKTDERLSELLTIRLDTYIKNPDNASEEENRIRRENLKKFFSNKVLHLKDSVLYLKNRNEKNAVQDKNYSEEDISEYDLKNKNSFSVLKKILLNEDINSEELEIFRKDVEAKLNKINSLKYSFEENKANYQKINENNVEKVGGRSKRNIIYDYYRESAKRNDYINNVQEAFDKLYKKEDIEKLFFLIENSKKHEKYKIREYYHKIIGRKNDKENFAKIIYEEIQNVNNIKELIEKVPDMSELKKSQVFYKYYLDKEELNDKNIKYAFCHFVEIEMSKLLKNYVYKKPSNISNDKVKRIFEYQSLKKLIENKLLNKLDTYVRNCGKYNYYLQDGEIATSDFIARNRQNEAFLRNIIGVSSVAYFSLRNILETENENDITGRMRGKTVKNNKGEEKYVSGEVDKIYNENKQNEVKENLKMFYSYDFNMDNKNEIEDFFANIDEAISSIRHGIVHFNLELEGKDIFAFKNIVPSEISKKMFQNEINEKKLKLKIFRQLNSANVFRYLEKYKILNYLKRTRFEFVNKNIPFVPSFTKLYSRIDDLKNSLGIYWKTPKTNDDNKTKEIIDAQIYLLKNIYYGEFLNYFMSNNGNFFEISKEIIELNKNDKRNLKTGFYKLQKFEDIQEKTPKEYLANIQSLYMINAGNQDEEEKDTYIDFIQKIFLKGFMTYLANNGRFSLIYIGSDEETSTSLAEKKQEFDKFLKKYEQNNNIEIPHEINEFVREIKLGKILKYTESLNMFYLILKLLNHKELTNLKGSLEKYQSANKEEAFSDQLELINLLNLDNNRVTEDFELEADEIGKFLDFNGNKIKDRKELKKFDTNKIYFDGENIIKHRAFYNIKKYGMLNLLEKISDKAKYKISIEELKNYSNKKNEIEKNHTTQENLHRKYARPTSPHRAQRCNCNRQLHQNTRMGQKFPTR

SEQ ID NO: 1309 - protein, 984 aa, Artificial
  Synthetic
MKVTKVGGISHKKYTSEGRLVKSESEENRTDERLSALLNMRLDMYIKNPSNTETKENKKRIGKLKKFFSNKMVYLKDNTLSLKNGKKENIDREYSETDISEYDVRDSKNFAVLKKIYLNENVNSEELEVFRKDIKKKLNKINSLKYSFEKNKANYQKINENNIEKVEGKSKRNIIYDYYRESAKRDAYVSNVKEAFDKLYKEEDIAKLVLKIENLTKLEKSKIREFYHEIIGRKNDKENFAKIIYEEIQNVNNMKELIEKVPDMSELKKSQVFYKYYLDKEELNDENVKYVFCHFVEIEMSKLLKNYVYKKPSNISNDKVKRIFEYQSLKKLIENKLLNKLDTYVRNCGKYNYYLQDGEIATSDFIARNRQNEAFLRNIIGVSSVAYFSLRNILETENKDDITGKMRGKTRIESKTGEEKYIPGEVDQIYYENKQNEVKNKLKMFYGYDFDMDNKKEIEDFFANIDEAISSIRHGIVHFNLDLDGKDIFAFKNIVPSEISKKMFQNEINEKKLKLKIFRQLNSANVFRYLEKDRILDYLRSTRFEFVNKNIPFVPSFTKLYDRIDDLKISLNIYWKTPKTNDDIKTKEITDAQIYLLKNIYYGKFLDYFMSRNGNFFEISREVIKLNKNNKKNVKTGFYKLQKFENLEARSPKEYLAKVQSLYIINVANQDEEEKNTYIDFIQKVFLKGFITYLANNRRLSLMYIGSDEEVNNSLAEKKQEFDKFWRKYEENNDIEIPDEINEFLKEIKLGKILKNSAKLNIFYLILKLLNNKEFTNLKGNLEKYHSANEVNIFSDELELINFLNLDNNKVKEDFEFEADEIGKFLNFNGNKIKNREELKKFDTTKMYFYKENIIKYRAYYNIKKYGMLNLLEKIADKAGYKISIEELKKYSNKKNEIEKNHKMQENLHRKYARPRKDEKFTDEDYESYKQAIKNIEEYTHLKNKVEFNELNLLQGLLLRILHRLVGYTSIWERDLRFRLKGEF

SEQ ID NO: 1310 - protein, 937 aa, Artificial
  Synthetic
MRIIKPYGRSVVEKAGPGRLARAVSLHPDPARGVELDNRKSVVEFAASHDRLVIAQWISTIDKIARKPVGEAAATPQQAEFRRRLGDAAWTLIERRALLTGLNDPAVKARLRRLWEFKIAPYKTARAVAKTGTRPPRLKGWWFRRFAGDVEEVDKVDADAVALAIHEHLYSAQYQMRVDDRTRLSGLIAARAESIAGNVLQPHAAARDKDGGWSEDDQRRYAAAGDVAREIRSAAEARERGDGKIGPRRVTSEVAGAALFEHYARLFRGADGKAMGVAQARDQESGLFNLHMAVKDCYARILKGHGKDLAKHGEGRRRVSTLLPPTSVDLFRLLDAMLDNRDLNALVRLGKVIHYESAGAGVDRPADVVDHWPADVADSDYWTSDGQARIKRNEALVRVWRHVLALASRTLTDWADPKGMIGGDILLKDSVETAIANFDAESYKRKIEVLFGGRAALFDGDGDEAFEKDVLRFALHGVAALRNAAFHFKGVGGFAEALKTLGPRQDPRVTAAVDGLWRTDEEGRGRRLLATMRGAHFESFFDQRQNRRLAQALSRASEESLPLPRFAVMLRRAENAWDRLGLPKTANRADLEAPARHCQYVALKLLYERPFRAWLAERDAATLNRFIVCAVERATKAARMLNPGASRELAEAITAKAADLGRLGNDDSVEDFFFRLSAETAGEARVQRGYESDAENARAQASHIENLKADLVALAFRDYLQKADFEFALKLRGDEPLPTKPMCALDEADFVEGEASSAEPPCELYFLLHLVPVDEVGKLLHQLRKWQILAPPAPAATGGPTTAATVAEIRLALELYLDMHDAKFEGGAALVGVEPFKRLFEGDGLFGRIFERPAGDRPGAEDDRRLPRRGLREIMRFGHLRPLLPIFDKQPIRADEVAAYLDAEQVPDGGKSEIARRQERREALHEKWARRRREFSD

SEQ ID NO: 1311 - protein, 1107 aa, Artificial
  Synthetic
MKLSKEKHTRSAVANNGDIKSAEVNNGNTKSEEVNNGDIRSAVANEEQNIGGILYRFPGKSIDGVKDQMLRRDKEVKKLYNVFNQIQVGTKPKKWNNDEKLSPEENERRAQQKNIKMKNYKWREACSKYVESSQRIINDVIFYSYRKAENKLRYMRKNEDILKKMQEAEKLSKFSGGKLEDFVAYTLRKSLVVSKYDTQEFDSVAAMVVFLECIGKNNISDHEREIVCKLLELIRKDFSKLDPNVKGSQGANIVRSVRNQNMIVQPQGDRFLFPQVYAKENETVTNKNVEKEGLNEFLLNYANLDDEKRAESLRKLRRILDVYFSAPNHYEKDMDITLSDNIEKEKFNVWEKHECGKKETGLFVDIPDVLMEAEAENIKLDAVVEKRERKVLNDRVRKQNIICYRYTRAVVEKYNSNEPLFFENNAINQYWIHHIENAVERILKNCKAGKLFKLRKGYLAEKVWKDAINLISIKYIALGKAVYNFALDDIWKDKKNKELGIVDERIRNGITSFDYEMIKAHENLQRELAVDIAFSVNNLARAVCDMSNLGNKESDFLLWKRNDIADKLKNKDDMASVSAVLQFFGGKSSWDINIFKEAYKGKKKYNYEVRFIDDLRKAIYCARNENFHFKTALVNDEKWNTELFGKIFERETEFCLNVEKDRFYSNNLYMFYQVSELRNMLDHLYSRSVSRAAQVPSYNSVIVRTAFPEYITNVLGYQKPGYDADTLGKWYSACYYLLKEIYYNSFLQSDRALQLFEKSVKTLSWDDKKQQRAVDNFKDHFSDIKSACTSLAQVCQIYMTEYNQQNNQIKKVRSSNDSIFDQPVYQHYKVLLKKAIANAFADYLKNNKDLFGFIGKPFKANEIREIDKEQFLPDWTSRKYEALCIEVSGSQELQKWYIVGKFLNAMSLNLMVGSMRSYIQYVTDIKRRAASIGNELHVSVQDVEKVEKWVQVIEVCSLLASRTSNQFEDYFNDKDDYARYLKSYVDFSNVDMPSEYSALVDFSNEEQSDLYVDPKNPKVNRNIVHSKLFAADHILRDIVEPVSKDNIEEFYSQKAEIAYCKIKGKEITAEEQKAVLKYQKLKNRVELRDIVEYGEIINELLGQLINW

SEQ ID NO: 1312 - protein, 1156 aa, Artificial
  Synthetic
MKITKNTKNGKLEFYRDVKEGGLRDPKSKTIWTSETIKRLDINKSLKGRILAYGTSLGSSNPYSVFVDSLIRENKEISLSELKREQCKKENVQKYLSAYGRMINHGAEENTSLGNLLVEYGNGAEISEALVQIKKQILKLKRHKKKSLLDSFMNNKIPFKLTDGKLEPATDKMSRLFSLLEEDGVDKNKFEKYKTWYQYEVLKERLDLICEEHFSAAERKPRVLAKKIYSAVKLYNKEKANSDVIKNKDDAHSLFLDEIRDHFRKYFPVTGKKGLSSGGDSEKLNSLASEKNVKYYYSDKYVFQQVWRQIVNQLTAGLIQYGKLSYYFHDKENHTWQEEKLNSAGMQEIQVRETFKKQLFLSVVWSVNKLNYFFQYGGENPKMLYQVKYDEDCIAGDIIEELRKADFSRFCYDDPIKNNYIHRFMHGIKEEPEKFELLFDKMSVSYPLEEEDKNPEEILKVLQEINCSVTDLRHSIIHYQKDVVYQETQGPKYPKASEFLRRDIDNIENCFLEQIRSMSLAEYYPLDLLQKVFKDCNLNFQLYASQVPMVPSFQKVFGKGVNLYKADQKSDSLKWYMEERKDSEAKLATLAYRNFIQLIYYHGFLPAVEKNNALVTDFINKTVEWNKERSLQRQSEDPGTKYINISKYRYQGMPEFQNKSLLEYMSELQRDQSNKEKEDSQAGVPEDKKKHYYTKFIQDIFAFSFGSFLNSKLNECREDLLQPRYQEMKTNEDREQRLKKLLEDLEMKTNIKNGSPTQLAMYPFLKLLDQRGLNQLLHQFIRCSASVKSGFMQDDKALNLNREIEELIALVAFTKRPLMNTEAYSKAIEMLSETFIEGEIKDYADLYYQSDQEHSVLHRNIAYMGGTGVIALYSDVLRDCYRVKKTDYVAYKKANSKENGRQFTRIGEDQKRLQDLHESLIGRYNSGQIQEYKKLLRKTHEYNALKKRITFETMYEIYQLHTELLGRLASFAEDWERDMLFLLTGLESRGLIEDRVEKIFLKDKGGVVAKMNKNLKDNEKLLKSLYCREDQESTDFWKTFHVRNAVAHFNHFTQKSQSKGGSVVYQRSIEELINRIRGLLAYDMKRQNAVTQAVQKIFDKHQMIIKFKPVTINSDPEKWVGTWNIEFGIDCIRSKNIVHFKNLSDRICLIEAHDRN

SEQ ID NO: 1313 - protein, 1126 aa, Artificial
  Synthetic
  misc_feature (698)..(750): Xaa can be any naturally occurring amino acid
MKVSKVKHTRMAVSAAQGVPEGILYPDPNVKNSDGQWAKPQVMDIGEHFDTISENAKELYNILNPEIPKKRYGKVHPILRSKIGGYFKKLVEFNDQDNINVLEEQLKFIDGCSDNMSSYFFFYKDKKKPNVKALVNTYLRKTLRKNVKSEEGDSAKKIYLPTVAEKLIDALCFDETTTKAERPGVYQERIKIFRKKNDKELKTFLKSLNNDYNRTQQKARVINSIKKQNVKAKVIEKEGLCLLQPSFADHSKKHVIFDFMLRFAVGTEKERSNLLNYMRGLIVLYVCGVNVYNGLFTDDFILKDFSAPLISEDLVFCEKASILLKKGKAKNQKDFLKKAYEHELVEHYQAALKVFEAEAVRDLPECVDKKQRVEAVKKKIQNESFWLDFIEQEVKGTINLSRPYSEYKNNALYLCRKVWKKWTAFMAEKYIDLGKAVYHFAMPDMPSDNKEPVKYGIVRKEYENGLTSFDYERIKAVENMERNVSIAVTFAVNNFSRSVLKNPAGDTTDVLFLNSGQLDGSLYENKGHRILRYFGGASIWADNNTVSEAAKNRGDALFKEIKEQLESLRNGSYHYTQKFDDVKSNIVPAMLDSEKAWIGPIIRKKYYSNNTHWFYPEDKLNGLMVILYKTPAVRGDQVPAFSRLYNRNTLFEEERIFTPQFRGKINSLGNEKAEIFKGAAFFLFKEIYYYSFLKDNCXXXXXXXXXXXXXXXXXXXXXXXXXXXXXXXXXXXXXXXXXXXXXXXXXXXXXMEDISEEATLGELAQVIMTDYNLQNQMKETAQIVSTNKVKASKEKYKAFPMILYKFMRLTFLDFLGKNKDKFGFLYECEPGEQTEQIGIKEADFCAENDGQRVELFRKLTLEEEGQKSVAPWYVLGHMIPPAQLNHLYGDLRSYICYLRNIDRRADQTGNDNRVVTDAYRKEADYFERVLEVLEFCRFFCGKTSKQYTDYYPKGTYAGEVFKYVDVKNYLGAAADASDEEILAAFCDQKAGIKNPDGTDQKIKIFHDGENLILNRNMVLASLYGTDRIIQNAADKVTEDDIFEYYKLWNTLMRENTGVQMGEKERCEKNRELQNRKNHIELVDIKIYSDILNDLMIQMVSWAYFRERDQLYLALGTQYLRLYYGDH

SEQ ID NO: 1314 - protein, 902 aa, Artificial
  Synthetic
MKLTKVEKARIAVSREKKDSGRIILYTNPEDVKKTSVTTMEQQVSKRIDQANKLYQVFFKSVIPVELNKHFAEISKIAAKCRNTEEFYKKACGYSGYEWTDAKQKKRTSQISRFSYTSSGKNMYVVMDNFVKEYMVQIWQEKDFRNAAVKILCCICDGKKFASKLEKVKKESPDTLKKFIEISGKCEGNPFVDYDTSFLEKVFTLVISQMVKNCDRKSYEQDDKEKIKKSIQKEIQWLSHVQSVTERSFGREGKTYLLFKIRNPYATEERLQTVLIRMRKTLKRGRNRDIAIVLLQGLAQMNQVTFTDTVKHLYQEEEKAFCDFIDAVNRDYYRVNIVKSVRNMDVKVQPDLNDNSILKLSGLGNIKKEALSDTLLRYAASADESDQVLLDIKKLLFEYFLPGNSKETSKYTTVQNLWNIPYLPKIFFDYGFENEDSDDDNECAEDIETLCDVEPQYKINQHSLKRRIRYVNYGKYLQMTKNESDRERRYWIHYIKEFVEKNYVDSGRTLSEKNCYASSMMLNCWKEIIRYLCGKYIDIGKAVFHFTNLTAMPKPKDKIIYGQLEEQYKKGISSFDYEAIKAEETLQRDIVQSVVAAAFAFSKSVIDETKMEECQETNKEDILFLSENVLGSLLKENTIKLILRFYGGESSVAQKEYFDQQEIVQEMISHLKSIRNENFHYLDGAKKDNPHKYASILWKNDEMAYQKLTKQRYYANNVGLFYRAEEIQELVQELYSQKNITEAQIPAFRTVLKRKDLPGYMEELGILFPDNTQEKSKGDFEGTLYFLMKEIYYRDFIVKDKAAAYFFKAVDQNKEQSKKEDKHTERAAENFHRYVKSLEKKYNKKEISFGTVCQYIMMEYNQQNTTKQETEIYKHFKMLISLCIRKAFGNYIKETYRFLFHP

SEQ ID NO: 1315 - protein, 957 aa, Artificial
  Synthetic
MTESHNCICGKIEEILNELEKPENFLSKKKENLKNTTVKVMALKYRAAVNYLADEVGKTVLGEIREKKVRSCADLYWIEYIDSTVEKLLLKSRNKDGYRYEIGFLSKHIWKEWTQYISGKYIEMGKGVYHFAIPDLSGNLEGEPISICEVKPEYRNGVSGFDYERIRAEESLEREMEKYVLFAVNNFARAVTPEEEREKSGHEDVLLMKTLSEIEESQTKEERQKKHDNNVKNAITLYADADRRILQFFGGQSRFREKEDSLINLYSGEDLYKEIRKELYAIRNITFHYTTKADKDQTQKHDLAEYLFEEEFSDITELFREKYYANNVWKYYDVEVINTIMENIYCGRKYRAAQVPAFKNIISRPELPQVMNGFVKGNSLRRLMNCPDRDVINKYWSALFFVLKELYYYDFLQEQKKPEDNVKERFFRAIEKLSGQENDDKKQKAWESFGNRIDQIGRDRSFGAICQGLMIEYMLQNSDISMVQTETDNGKANNKKQIYKHYRTLLYNCIREAFIEYLREKWEELRTPVLTVKEWSKEEFCRADGLKHLSLFDHLKKTFNDAESGSSWYMAAHFINQKYLNHLLGSIRNYLQFTEDIEDRAISLGDCVDNKREEKNLRYRNTLEILEFVAQFCERTTNVMEDYFESNQEYAEYLSGFVDYNTTKKETDIEKALYSFCKQKFKVDGKEYMAGIYYDGENLIPNRNIIRANMYGNTSCLKPCMDRITLKEIRTMYADQNKLDLVLKEGVCHTEEEQKAYREYQNEKNRIELFDVCTYTQILNDMQARLIGWSYMRERDLMYYQLGYYYTKLFWTDSISEEDARRRLVGNLVNVEDGAILYQILAFNSYNLPIIANKNNTVTLLKDEGSIGGKAITAFFKNYENAEMIYEEALDLFENMDEHAAIINTRNYIEHFKYFIKSDRSMMDLYSEIYDRFFRHDHNRKKNVPDSAVKTFWQTIL

SEQ ID NO: 1316 - protein, 1095 aa, Artificial
  Synthetic
MKVSKVDNINHYKTKEKSALIKENNIKEDLTTYTVNKIDERLLKSISHKNSKTDIYAYKDILDKFDFKKEITEINNNLQQILKQDYVEKIIGSEEGLNTIEKNLSNKDRTISTYEDIVLRTTKNYLLNNNSIDNDKFKELAMYALKFLVYRKNIQKPRIEKSLKNNKIYTEYTKNKNFILSFTKEENNVIQIDEDKIDKLLEKYEFNTCIEEIVKIDYKFNSNINKDFIIKLKNEINNKIYTNKKQLLNNVDNNLIELNGFYSELKQYFNNELSKQNNTIQINLHNIFNKNVIKNIIKSRIKNKITQHYILKGKLKYYGILEKNADTYELSLIKSKESVKKQFLTSIVMAGSKLKLIYDRDNKCNNKDIYKIENLDNDLEENLTKLIIGLYDFDYKDLCKEMFKCLILLRNNFVHFKNFTLEEMTKAISDSDTNGIQFEEIFKLLNKDVKKAKENIKLNIQNMNIFECDDDIINFNLIEEINLCPNLCSYSYPSFSNVYKKGLDMNKFFKNKYKIYKEKGEWTDTKYLGYKNYLKLVYKYKFLNSIHNIKLSESITQILKQNKEANNNTQGYKYNEIDKLWKAYCKNNKDKDAHIHSFFKDIQRKEMEKASLNEQNEAEKNQYTDFIRDVYANCFNRWITSKCKNKNNIDKNNVLEKINIKGLEKFNIDYTKDEEKIYLIYYSLFKLLDNYQIGQIQAHLKKYYAINNNNNNLSFFENLNSYAELAKISTPIFNLYIENNIDKQKKKGNIEDLNNYIIDTMKNFFKEDDILEDELYLQEDKKTPIYHKGITDLILSGRQELFKKQYQNFITKDDIKEYKELSKEIEKIQKEREKKHRSIVINKYALEKCDKLVKEYEALVKKIQKYDEYKNKVTFVNFSKLAKLQYEILSRYIGYALDWERDMQFLLLGINNDSVNKDKINKINSIFDGYVCNNLTDKISKNIGEEFKEFLWRIYSKEKNLISKKDIKSIFEIRNNIAHMDILRNNNKSMLSYILSIQNLMSYDRKKRNAITKSIIEIFERNNMDIAFDITNYGSKNLKLKYLKSKKSQHLKGKIKSEKNEKEKNKNRTKTYTTKVEFYVQNKTYMDMLNKFIDR

SEQ ID NO: 1317 - protein, 904 aa, Artificial
  Synthetic
LKWRKNMKLSKVTYRVKDKNAKYKKEYNVRAAVANNSENAGGVLYHVPGVDLIDLREQMLDRDRSVRLLYNIFNHIQTGTKPKKWGNDETLSVDENERKAKEQNIKIMNYKWREACSEYIEKSQSTINSVLFYSYEESGYKTKRMNDNEAIIVKMQYENRLSHFTGGKLEDFVAYTLRNSLVVSRYDNQEFDSVNAMVVFINNIGNGNISDKDKKTICKLADLIRNDFSKLNPNVQSSQGANMVRSVRNQNMVVQPQGDKVSFPLVSDEGKNTVTNKNVEKKGLNEFLLNYANLDDEERMEKLRKLRRIIDVYFSSPSHYQKDMDISLSDNIDKTKFDVWKKHETGKKNTELFVDIPDELLTAETEKIKLDAVLEKKARKRLTDSIRKQNMICYRYTRAVVEKYNSTENLFFENDSINQYWIHHIENAVERILKSCKAETLFKLRRGYLTEKVWKDAINLISIKYIALGKVIYNFTVDDIWKDKKVKNLGSIDEKIKHGITSFDYEMIKAQEALQRELAVNVAFAANNLARAVCDMTNLKDKESDFLIWNKKDIANKLKNKDDMASVSVVLQFFGGKSSWDIDAFREAYKGNKYNYEVCFIDDLRKAVYAARNESFHFKTALVNNDIWNTEFFGKLFIKETEICLDIEKDRFYSNNLPVFYSDNDLKKMLDHLYNNKVSRAAQVPSYNSVMVRKYFPENITSTLKYQKPGYDEDTLEKWYSACYYLLKEIYYNSFLQSDEALALFEESVNNLKGDNKDQELAVKNFRNNYKNIKSSCTSFSQVCQMYMTEYNQQNNQFKKVRSSKDSIVDKPIYQHYKLLLKKVIANAFASYLQHNEELFGFIGKPLKVNCLKEIDKEQFLPEWTSKKYVSLCEEVRKSPELQKWYIVGKFLNSRSLNLMAGSM

SEQ ID NO: 1318 - protein, 927 aa, Artificial
  Synthetic
MRITKPYGRTHVERDPSGKTRRVLRPRSSSNTNYDIEQFALTHDELVIAQWVSTIDKISTKPRGKNGPTDEQRWFRKRLGDAAWSLLIQEKLLPGAEEPTRREDLHKLWGSKIEPYGSAPYKPSKFKPAPPTKGRWFVRFAGACSIADASIDDIVRQVKVHLYQSGFRLGSSVTKKSGGHISLRAKSITANVAGSDSSSTRGLISWNAADCARYALVGNVAQEIRAAAEKRERREDGATNAMLTHDVAGQVLFDHYARLFPAANGSALTISQARETEPGLFYLHMAVKDCYARILKRPRKEKNQNSRRTKSGGPAGPRHLSDKNRNAHNTRSALFMRLPVNMESLFALVENKLANRDLNALVRLGKVIHYDASWQGRQQSPTPLGAVDDADKTNAISQNWSADISLSHYWTSQGQNEIKFNESFVRVWRHTIAIASRTLVDWADPKRRIEAPNVDILLEGAIKEATGAKFDADGYAHKTPLLFGNRSILFENGDDQFRREILRFALEGLAHLRHNSFHFKGLGSFIDALVQLTPSTNQRCLDAVRDLWTDDSASRVRQQIETMSAARFDYFFAPDQAQKLADAMSSVDVGTIPLPRFNRLLERVQNAWSEGESRLGFPLPANRVALENPALMCQYTALKLVYEHAFRAWLQRCSPSTLNNLIERAIARTTSAARELNAAEGGAWRELIVARAAHIGRVDDDGGIEAFFFNLSAETASEMRVQRGYEGDSDKAREQSAYIEKFKCDVIALAFDLFLRTEKLDFVLTLAIDAAIPTVPLCDLSRFASTKGVAEPQPWQPALYFLMHLVPVDDVGRLLHQIRKSDVLAEGDLDTRRVPSRPGGPRTSLQKHIQHLLEVFELYLDMHDAKHSGGFSLVGTQPLRGLFEQPGLFDKVFPEETSGQGDDVRIPRRGLREVMRFGHLTALRNIF

SEQ ID NO: 1319 - protein, 986 aa, Artificial
  Synthetic
MKVTKAEKLRVAVSRKLNNEDKRAVLYKTPNPGQTCGTVKKQLANRVERANKLYGVFFRSDVPETLQYHFEELVTYAAQSTSPNEFRQKASQYRECEKKDKFGKMRKYPIFRCSYAPSGKNMKKVMELYVRERMKDEWQSQAYRTAAIEILLCICNKDFSKQLSRVDARIFADFYNASKACPQPYIGKSTGVLEAAFTSVMKQMSLHAKANASNKIWWLQNQLRTIELNKKIVKISDFKYEYATEDRMRAILVRMRKSLKRGTNGDIAVALLQGIAQMNGKTLSGVLEELSANSETKEQLIKFLKAVHEDYHKTPILKAIRNQDVKVQVHEVDPVSPEGRALDLASINVSKGNERKKYKVALTQTLGNYAKSPKDATQTLKAIKGVLLDYFMWLDSDVKAEFLEDNNLWKIPNRTEEYFDNNFVPIDDKKDDKIEAIEDFASIWRQERVKNSRIKARMNYVNCGKYQQLIKQETDDFRICWISYAKDFVEKNYVSKNRQFTQGDCFSTKMLLECWKEIIRFICGKYIDIGKAVYHFAMPETMNARDSLAYGVLGEKYKEGISSFDYEAIKAEETLQRDIAKAAVAAIHAFSGSVIDDKKPVEDILFIKDEELQEHAKADDVIVKQILRFYGGFSSVEGREKLEGMALAKEVLSQLKAIRNENFHFTQGKRKNVEENIPLTKALWENEEKVYRQTVKETYYSNNVSMFYSQEVIQKLVAELYQNNNVAEAQIPAFRTIWKRKDLPEYIGSLNISWDKTEPKQVIYEGALYFLLKEIYYRDFIKSGEAKKLFFDAVMDNATEMEKSSNADSRNQEKKALANAGKNFRDYVNGLNASTLGEVCQFIQNEYNQQNRGKQEQEIYKHFKMLLPICMRKAFQRYIDEKHSFIKKPGELPQTTEDYLENVKVACPEKKIKLGRWFTFAHFIHPRELNFLIGDFKNYIQYREDVLRRSEHAGQFSDTTERDGEKAVVDHAVQKAKDILGVLEFV

SEQ ID NO: 1320 - protein, 1018 aa, Artificial
  Synthetic
MGNLFGHKRWYEVSDRGDNKIKRKVKVKRNYDGNKYILNINENNNKEKIDNNKFIREFVNYKKNDNVLIEFKRKFHAGNILFKLKGNKRSIEDSNDFLKTEEVVLDKEIYGQSEKLRNEKGITKQGILKEIIDKGINESNDSILIKTKFGKEIKINFTDESKKNKNEYQITLKVIPENELKIKREVYDVFKMINMDLYQIIKEIIENKVEKLFENRYYEEYLREKLLEDNQINVILTNFMKIREKTKSNSEIMGFVKFYLNVGGDKKKSENKKMFVEKILNTNVDLTEEDIVDFIVKELKFWNITKRIEKVKEFNNKSLENRRNRTYIKSYVLLDKHEKFKRDRENKKDKIVKLFVKDIHNDKMEEKINHILSEFKIKELIEKLKENTENKNFDTEIFGIFKKHYKVNFDSKKFSNKSDEEKELYKIIYRYLKGRIEKILINGEKVRLKKMEKIEIEKILNESILSEKILKRVKQYTLEHIMYLGKLVHNKINMATVNTNDFFRLHAKEELDLELITFFASTNVELNKIFSRKDEYEENIDFFGEGAFSKEKRKKITLNKKSLNSKIKMIRELEFIDNKNEIIQENFFNKFIKIGANERNRILHASNKRRVPKGTQDDYNKVINIIQNLKISDEEVSKALNLDVVFKDKKNIITKINDIQISEENNSIIKYLPSFSKVLPEILNLYKNKNKNNPFDTTETERIMLNALIYVNKELYKKLILEKNLEENESKNKFLKELKKNLGGTDETDENIIENYYKNTQISASKGNNKAIKKYQKKVIECYIKYLEENYRELFDFSDFKMNIEEIKKKIKNINDNKTYRGEIVIKFNDRNIEIKNDFEYVISIFALLNSNAVINKIRNRFFATSVWLNTSEYQNIIDVLDEIMQLNTLRNECITENWNLNLEEFIQKMKDIEKEFEDFKIQTKKYIFNTNYEGIKSNVLNKFIGFSDVQKILEEKLNKLIEFENDNEIKKKINSNSLDIDERKNLMPNIDQKKGGIDLIKEIDELIVIEKNNIEKN

SEQ ID NO: 1321 - protein, 1285 aa, Artificial
  Synthetic
MKLTRRRISGNSVDQKITAAFYRDMSQGLLYYDSEDNDCTDKVIESMDFERSWRGRILKNGEDDKNPFYMFVKGLVGSNDKIVCEPIDVDSDPDNLDILINKNLTGFGRNLKAPDSNDTLENLIRKIQAGIPEEEVLPELKKIKEMIQKDIVNRKEQLLKSIKNNRIPFSLEGSKLVPSTKKMKWLFKLIDVPNKTFNEKMLEKYWEIYDYDKLKANITNRLDKTDKKARSISRAVSEELREYHKNLRTNYNRFVSGDRPAAGLDNGGSAKYNPDKEEFLLFLKEVEQYFKKYFPVKSKHSNKSKDKSLVDKYKNYCSYKVVKKEVNRSIINQLVAGLIQQGKLLYYFYYNDTWQEDFLNSYGLSYIQVEEAFKKSVMTSLSWGINRLTSFFIDDSNTVKFDDITTKKAKEAIESNYFNKLRTCSRMQDHFKEKLAFFYPVYVKDKKDRPDDDIENLIVLVKNAIESVSYLRNRTFHFKESSLLELLKELDDKNSGQNKIDYSVAAEFIKRDIENLYDVFREQIRSLGIAEYYKADMISDCFKTCGLEFALYSPKNSLMPAFKNVYKRGANLNKAYIRDKGPKETGDQGQNSYKALEEYRELTWYIEVKNNDQSYNAYKNLLQLIYYHAFLPEVRENEALITDFINRTKEWNRKETEERLNTKNNKKHKNFDENDDITVNTYRYESIPDYQGESLDDYLKVLQRKQMARAKEVNEKEEGNNNYIQFIRDVVVWAFGAYLENKLKNYKNELQPPLSKENIGLNDTLKELFPEEKVKSPFNIKCRFSISTFIDNKGKSTDNTSAEAVKTDGKEDEKDKKNIKRKDLLCFYLFLRLLDENEICKLQHQFIKYRCSLKERRFPGNRTKLEKETELLAELEELMELVRFTMPSIPEISAKAESGYDTMIKKYFKDFIEKKVFKNPKTSNLYYHSDSKTPVTRKYMALLMRSAPLHLYKDIFKGYYLITKKECLEYIKLSNIIKDYQNSLNELHEQLERIKLKSEKQNGKDSLYLDKKDFYKVKEYVENLEQVARYKHLQHKINFESLYRIFRIHVDIAARMVGYTQDWERDMHFLFKALVYNGVLEERRFEAIFNNNDDNNDGRIVKKIQNNLNNKNRELVSMLCWNKKLNKNEFGAIIWKRNPIAHLNHFTQTEQNSKSSLESLINSLRILLAYDRKRQNAVTKTINDLLLNDYHIRIKWEGRVDEGQIYFNIKEKEDIENEPIIHLKHLHKKDCYIYKNSYMFDKQKEWICNGIKEEVYDKSILKCIGNLFKFDYEDKNKSSANPKHT

SEQ ID NO: 1322 - DNA, 3411 bp, Artificial
  Synthetic
atgagaatatcaaaagtaaaagtacaggacaataaccgaaaggtgatggtattgatgcatcgtacaacagttaatggggccttggtctatgaaggtgaaacgaatgtaagaacttcggaaattcttcccaaaaagaaatcagatagttttgctttgagtattgacaacaaaacgcttatcaaacgagattctctaaaagataaaaagcaaaaagacaactatgacatagtcaaaaagattattaccaaacgagtgttacctatacaaatttcggatgaagatgtgttacctgttttgaatcataaatttcaaaacgaaataatctattacaaaaacaatgaaccatacagctttcggctcgcttctttgattgtagaagcggtgaaagagagaaatcccgaaaaactacaaccttatgatgattggaaaaactggtatatttcgaccaaaagctctcacctgattcaatcgattgaacaaaataaaattgatttgaacggaactgacagtaaacgcaaaacagccttgcaagcttgggcaaccaaatatactacaagtggaagtatcgatttatcattttatcataaattgtatgctatcgatactttggcgggtgcgcttcataacacagaaaaaggagagcttgatcaagaaaaaaatactccaaaaaatataaacctttttcaccgcaacttaaaaaagacattgcaaacacatcaaaaaacagtgttcggtacgcgtgaagcgcctaacgtgaaaaaccgaaaagacgagcaattagccatttatcatttggaagtagtgaaatacctcgaacattacttttctgttaaatccactcaacgaaaaaatacacaagctgatattgactattatttgaaagcagagactataaaaagtaccataaccaatcaattgtcgaatgccgtaagaaactacctgctgcaaaaaggcaaagccgaacatcacaaatttgacaacactactgatagttcccggctgacagaaattaaaagaaatgaagcttttgtacttaatatgattgatgcttgtgcttttgctgctaataatattcggaatattgttgatacggagcaaacgaacgacattttgggtaagacagaatatgtacaaagcttgaagaaaacaaacagagtcaataaacaattgttcaaattcttctttggaacagatttgccggcgacagatagccataaagcaaaaacattatgggcaatgcgtggagctgtacaacaaattcgtaacgtggtgattcattataaacaaggtgcattggataccatctttaagatagaaaagtttgaatatccagattttgaagatcaatcttatactgataccatttataaaacttgtttggaaacggagctgaaacaagtgcccgaagcttttgcacaacaactcaaaacagggggcgtgcttgcctactatccttacgatgatttgaaggcgctgctcaatacagtgtccttttctttgtgtcgtacagtagtaccttttgccccaagctttaagaaagtgcaaaaacagggacaaaactatcagaatgctcaaaatgaaaacttctacgacttagtacttaaaagttatttgccaaaggaaaaggatgcgagtaaggaggaggcgtataatgcccgctatttcttgctaaagctaatttacaacaatttgtttttgcgaaactttaccgagaatagaacacaattttccaaaacggtaaattatattctctcgcagaacaagaaacaggcagaagcctcaaaaaatagtaaagcctatgcttttgaagccgtaaggcaaatgaaggaagaggaaagcatctccgattatatggcgtatatacaaagtcaactgatgcttgaaaaaaataaaaaagaagatgataaatcggaagatacccatatcaattttgaaaagtttgtattgcaggtatttatcaaaggctttgatgattttctacaggacgagaagtttaaatttatagctaaaccttattttcaactgtcgaaagatgaaacaaaacaaactgagcaattgaaccaattcgaacaaggaatcatcaacgaatgtcgggttcaatcgcattccataaatacggaagaggctacgcatgttgctttctttaccttctgtaaactgcttgatgcaacccacctaagcaatctgcgcaacgaattgataaagtttaaacagtcggcaaaacaatttgaattgagtcatatgcttgagataatcgaattgactttgctcaatgcagatagagttcctgcggattatagaaaattgtatgaaaataaaacagattgcttaaaccgtatacttttttttatagcagatggcattgattttaccaaatggtccgatttgtttgtacagaccgataacgaaacaccagtggtacatgccaatgtggaacttacagtgaaatatggcacagccaaactattggaacaattgattgcaaaagatgtctcattcaagttgtcagaatcaaactttaccttgtgggataatgcgaaggataccattgaagtactgattaataaacgattagatttacataaacaatgggaagaagcagttagaaaagacaaagaagaaaaaaacaagaagataaaaccgagatcaaattttgctcagaagtttatcaataaagaagggaatgattattccgaattatgtgaatatattgatgattacaattggcaggttaacaaactgcattttgtacatcttagccgtttgcaccatcttacgatcgatattctgggacggatggcaggatttatcgcattatttgatcgagattttcaattatttgatgcatctcgaactcaagacccttatcaattaaaagcttttgtcagtttaagtaatatggcaaaagatttaaacaaacaaaatgatattgccggcattaaaggtatggagtatgttgtaaaaagagatggatcaccaattacagaagccgatagaaattcgcttaaggattgcattcaaaacaaaagggagtatttttcaaaagtcttttttctaaaaggaagcaaacaatttgaagttcgtaattatattgcacatttcaattatctgtcaacaacagccgaaaattattctttaattgatttactaaacgaaataagagatctattgagctacgatcgcaaattgaaaaatgctgtcaacaaagcctttattgatttatttgataaacaagggatggaattgaagttgaaattgaatgccaatcaccgctttgagatagagagtgtgaacccgaagttgatctatcatcttggaacaaccctgaaaagcgaggatcctataagcttctaccaggttaaactcgaatattgcaatatgtgcagagcattattagaaatgaaaaaataa

SEQ ID NO: 1323 - DNA, 3765 bp, Artificial
  Synthetic
atggaaggggagggtgttatgaaactgacaaggcgcaggataggtcaggaaagaaaaggtgaaaaaataaaggctgcattttatcgtaatatatcccgtggtttgttatatttggattccgaaaattgtgattatacggaatgcgttgtagaagccatggactttgaacgttcatgccgcggacgtatcttgaaaaacgcagataacgaaaaaaaccctttttataaaatagttaaaggattgaccgataaagatacaggcatattttatgaggccattgttgatgatggtaatgatatagatatattaataaataacaatataacaagatatgggaaggaattacaagctccgggttcaactgtttcatttgaagaattaataagagaaattcaatcaggtacatcaaaaagcgaaataatattggaattagaaaaaattaaaagaatgattcaagatgatatacaaaagagtaaagaccggcttataaagtcaattgctaataatcgtatccctttctctttacaaagcaacggactggttccttcaagtaaaaaaatgaagtggctgtataaaatactggacgataacaatatccttaagaagtattgggacaagtacgaatatgaaaaactggagtcaactttaatcaaagctattgaggatttacaatataagaatgcccgtttaatttcccgaactgtttccggagccatacgggattatcatagaagtctaaaaacgagatatactaattcttctttggaggggaaggcacgaagcgagcatgagattaactccacagaaaacaacagcgaaaaagaggaattcttattgtttcttaaggctgtagagcagcattttaaaaaatatttccctgttaaaggaaaacattctacagatgcttacgataaagcactgtgtcaggcagaaaattataaattatactgtaagttcaattttgttaaaaaagaagttaatcgctcaatcatgaatcagttagtatcgggactaattcagcatggaaaactaatacactattttaataatgacggaacgtgggatgttgattttctcaattcgcacggactttcatatattcaagttgaagaagctttcaagaagtctcttatggcttctctttcttggggaattaaccgcttgacgtcattttattatgatattaatgatacaagaataaatagtaatgaagaaagtatagtggatgatattttactagaaagtaagagacacaaagaattaagacggaactattataatgatttaagatctaatgacataaagcagaaatactttagagaaaaactagctgcttgttattcgataatagcaaaagatgataaagataaaatcagcgatgatataaataaactaatcggtttggttgaaaggattcggaagagtgttgctcatataagacatagtagttttcactacaaaaaagtaactttaccagagatgcttaatgcagtaaatattaactatatcagagtagaagaattctttgcacgtgacatagaaaacctatacaatgcattccgtgaaaagatacgaagtctgggtattgtcgaatattattccggcagtgatattgcggagtgttttgaaaaatgcggtattaaatttactctctattcgccgcagaattctttgattccatcatttaaaaagatatacaaaaaaggtgtaaacctcaataaaggatatagagcaaaggaaaatcaaaaggagccgaacaaacataataaacatgatgagcaggtcaatagaaaagatttattatggtatcttgagataccaaataatgaacaaggtctgcttgcatataaaaatcttttacaaattatttattatcattcgttcttgcccgaggttcagaaaaacgaattattgattacaaactttatcaataatacaaaggaatggaatcgtgtagaagcaaaaaaaatatcagaaagaagaggaaaaaagaataaaagcagcaagcataataatgaaaaagattttaaagcatatcgttatgaggcaattccggattatcagggagaatctctggacgactatctaaaaatcattcaaagagagcagatggcacaggcaaacgagatggatgaaggtaccaccgaccataattattatatacggtttatgcaagatgttgtcgtatgggcattcggtgattatttagaaaaactaatgggaagatatcgggattttttacagaaacctgctttacaggatgttgatatatatgatgcgttagaagagctgctccccgaagataaagaaaaagggaagtttcccatggcttgcagatttaacatgaaaacagatgagaatggaaatactatagtttatacatttgagcagattaaagatcaaataaaaaacaggaaagacctattgtgtttctacctgtttttacgccttttggatgcaagggaaatcgctaaattacagcatcaatttatacgctatcgctgttcattaatagaacgaaggcttcctgacggtcgcagtaatcagattgaagatgaaatagaactgtttaaagaattggaagaattaatggagcttgttcgttatactatacctgaagtccatagtttgtacgggaaaaagaaatcagtgtttaatgtaatgatacaattgcatttcaaagaattctttgaagtgaaagccttgaaaaacccggaagtagtgaatctttattatcaattggataagaaaacacctataccaagaaagcacatggcactgttaatacggtcagttccacttcctttgtataaaaacatgtttaaaaactattattgtattaccgaaaatgactttaaggaatacattcagacaagcgaagtaattgaagaaattcaaaacaaacaaaaagaactacataaaatgcttgaacgggctagattaaaatctcctaatattgaaaaaatgaaggataaaaacttatggtatattgaggataagaatgttgttgagaaagtaatagaatatgaagagaatcttagaataatagcaagatataatcaaataaagcgtaagatcacatttgaatctctttatagaatttttcaaattcatgttgatctttgtgcacgtttaattggctatacccaagattgggaacgggatatgtatttcttgttaaagagtttagagaacaagggaataatacgaaataatattcttgatagaatatttagtaggaatatagtaagggaactaaataatattctcaatactaatgagaaaggaatattatataagttatgttggcataaggaacttacaatagatgatatgtataataaaatggacattagaaattccattgcacatttaaatcattttacgcaatcttggaattttgataaaccatcactgattgaaatgattaatgctttacgtgtcttactacactatgaccgtaaacgccaaaatgcagtattaaaaaccataaatgacttgctcttaaaggattatcgtattaaaattgagtgggagagaaaggtacatgatacaggtgaaataaaatttgatattaatggtgatgtaataaatgagccaattatacatctgaaaaacattcataaaggtgcaaagtgcaaagtttataataaagcttatatgattgagaaacaaagagaatggctatgcaacggtatccgggaagaaatatatgataaaaactttcttgaatgcattgaacgtctgtttaaattcaattattaa

SEQ ID NO: 1324 - protein, 1062 aa, Artificial
  Synthetic
MNFEENGNKYLFGAFLNTAYDNYNEVISHIYDVIRRITNNNPTEQKSSSQALASEEPISSEEKEKMFFVCTILIAGNATSRKIESILKRAFPFWDDFIEIHASLSAQLDKTESIFQLQKNCVEELFTALESWRNYTTHYIHPEAIASPTINLLLKSCFNQGIKEIKKRFNTKDEQLTHLYEPELFHNKETNKDEIKCYHPANYYRFANENGLLTEKGLAFFTCLFLYKRESYLLLNQLKGFKRADEERYRMTLEAFTVMRFRAPKQLLKLQQQQLDKVSLGISMINELAKCPKELYDCLENEKRRQFEVYPDTETTLYEQEAIGELIRYKDRYENLMLKALEHSSECKYMGFYLSLGKCYMKCYEKHYIDGTTDNRYIVHSLYGFGRLQNASTDHKNHLSSFGEELQTHSQLPVCHFATEDDAADSPTSVPYISESYPSYVLNNNNIGIKWLNSSEKTEYPNFNLNEGKVSCPAPDYWLSKYELPAMAFYAYLKEKHKNKLQEYPSIKELIDQSHPEATKTSSSTIKDRLEERLKRYKVDATKKLKRLAEKPDGVQSGRLADELARDILWLQPSSPKEGGKDKLTGANFQALQYALARYDFMRTELPRILTAARLTGSNNAHPFLDKINPQDYSRLTAYYAGYLTQKIVYIDKQLEKLARGKVNIQFHPTRKLIRQSQTDSVEHEKETVFLPRNIFTEKIEQALCQIQGNFKLNIEKARISGKKLNASKLILIYLELYLKDEVPEFYNAKRKYPCLCYPLTPSEKYTLKEYQDTEERSKRIDRLKCFYNFKEVAEKVYLHKELSEDENKRYRKYIEVQKVIDNEKIIRLRKVQDITLYLWTRLFIEENPEQIFFSKNEKPENSLFKLREMNNAILDNTTSRKININTPNGNVSIEDEFKIKDYGRVTALTTEKLPQSLIKFIAILNKPLNKKDRPLLSYDYIYHETNAFYRYRPEIIKMAQDIENKIINDLKINVKPQAESYYNFRRTIQKLENKSRDINIELLIKIRNAFCHNEYKELDNDQYKYLNSLFKLSSDIKQTDTLAYLLYILFETEYQKVMILK

SEQ ID NO: 1325 - protein, 1062 aa, Artificial; identical to SEQ ID NO: 1324
  Synthetic

SEQ ID NO: 1326 - protein, 1138 aa, Artificial
  Synthetic
METQENELFENRRRTLADDPQYFGAYLNLARLNIFSINNYLAKEFQQTELKDDELIQNGFICIPSQKNRNDNKLFERLIRLMPVIKQFDAARLPEDEQQSGQAEGKDIKAMAKTLKALFKDMQEFRNDYTHFYATDKQECRKLTVLPETATFLKASFARAIEYSKSRFKDVLSEDDYSIVAGKELVSDDNTITTEGLVFLTSLFLDRENAFQFIGKVQGLKGTQFKSFIATREVLMAYCVRLPHDKLISDNPIQALLFDMLNELNKCPKKLYNVLSEEVKKEFRPELSESGIENMLANSFNDEEREKLLDEIEYKEYIEQLTIRVRHSNRFHYFAMRFIDEQELWPGIRFQIDLGKYTLTQYDKQVLGESIPRSVVENTRAFGRLSNFLTADPDSLEQRIDVDHRANGFEQFAPHYNADINKIGIAFTEKEQLPYIVRTKNAETNRVKYSFKQPQPDAFISLHELAKAILLEQLQPGESEKLIRAFCSTAENKLFNPEFIESIKWKLPDWKPFQKQCDTKKSRAYITKRNMFAYAPRDRKKLLDELLAPYGLNRKQVPERILNYWLNIEEVHDARSVNERLLLMKRDGLQRLKQLEKHRKDPSIRIPKVGEMATFLARDIVDMMIDGTKKKKITSIYYDKMQECLAFYADAEKKQQFIDLVCELDLNDMGGHPFLKNLNLESIGKTSEFYSRYLEAKVQKDVSEYNYKKCREVTKNVSWMVKTFETKVWNEEIKKNLTEYRIPADKRNIPYSILQWEKEASTLEEWLHAINHGKQEGDRKRPIDLPTDLFDARLCELMKAQLQEKGQSPTETAKYNELLKQWWSLREDETQPFYNGARHYVIKEEAVCFTPGAQPRLTSCYADAVEEAYNRLSAERNIARRNDKRLPPIQKQEMEKTFKRALYDTEKEIRLLGEQDRILLLMAEQLSPGKETLKLKTVAQELTRSREIKKEFSYISNYNTQGERLKKEEVPPQLTLTVTGIMQLKNSNDLNRFAHDRRMPELVAYLPNATVDADKLRYELMDYNKARLTVFDAVFKLEKALIDQDREGVITLFTDEQGEAKQSRMQHKPYLQWLLNKGVITQPESCYLNMLRNSFSHNQFPHIAVALNGTEVVPVKNIASTIAGAYKQKIETIIGKIG

SEQ ID NO: 1327 - protein, 1047 aa, Artificial
  Synthetic
METEVTAQNNSLTLTNNPYYFAHYANMARHNAYIVLNEINEKIYNNKVKIPEDGLSECKLVNSFSKKNKKADEYARIIKLLTEHYPFIRFYADSSKEMGNIPLKAYLDILDKIRNENNHYNHTAERKEISKIQELFLFAKEKAKGRMIEFSPEDFDHLNNSKYYAMTEDGSLTNTGIYFFLCLFLEKKHAFQFLSRIKGFKHREQKSHRATLETFTQLCCRLPYPKLESSDVALDMLNEIARCPNALYGVLENKDKETFKVEFKNGATNNEMEVPEPVMKRHDDRFPYFALRYFDKSQALDGITSHLQLGRRIVSDPHQKKIGAEVRTHEILKDMRTAHQLAYFETDAAKEFYTNIPVVEHYAPQYRIVGNRIGLFFDYECWGKYTVPKENVKPDAIISIHDLGALYFYNRLYKEGSVKQSPKELMKSYLENMNRLFDDVKKGNIKPVNDGEKLTPLFKIKDKEDEYEIRLENLKELSALLQTELDKRGYGIEVKNLPDVCREYLLGYKESSAKDKAKRRFKRMLRETQFALKKVERVLIQETSLLASGLKVGEMAQELARDIVFLIKPKIVKKIIKSGTDAGKEVECKQKINNMEFDVLQKMLAFYPVYKEEIEHFLWTMVNKRDPNAFSHPFLFRALLKIKTCRNLNDFYKEYYLHKQRWIEGVSKSITPEVLRDNEYFLKLENGNAFPHNYNGEAIFIPSGFFNKEITRAMVQIGYKIENPEKGANAAYWIKQYFEGKSQPFYNLPRYYNESLGGKEPVYIERDKLKKQILEGDFNRLTEDEQKRRKVLAKRIRENESEILTNQTNDRVMYLMAMELIDSENPLKKNEIVSVGYNIKEGTNLLDNNKVSWNIQGRRVVAELPIKRYGEYRRFLKDRRLENLLKYYPEGKELQLGTLKSGEVEEKGKKYTNSNLVDELELFDLKRNELMEQVYLFEKILCTNYADKIKAVLPDKERNKPYIEHYHCLMYAKNEMKLFKEVGELEHEHFNELRNKISHNQMPYTDWLMERVIANKEEPMITNRIVDLILSIYKELNSQLVIITNSK

SEQ ID NO: 1328 - protein, 1199 aa, Artificial
  Synthetic
MNTFIDSFIRRVQIQNQNQSWPKRPKYVRPVENIRPDDLAFQSHFTAYLNMARQNCCIILGHLSQSLGFKASSVKDTTLTSSPLLGQNGLLSPKKEVSDLIRGRLLSAFPMLDPMIRYRKAVDKEKDDYARIIITSEDVSEMLRDLLDVLSYYRDMASHVVFNDDRSVSAEFASKEKKVAECLNYMMTVSLRIVKDRFSLAVSDLDFYNRNRYMMVNRKPLLNAGFAHAVRTEDYRLTLMGLVLLCCQFIEKQYASMFFDALDKHSNGARFYGIADAMPMVNVGTKDKPKKIPMYTGDEAQKQVQKQRMALREAYSVYRVRIPKERLESTRSDMALALDILNELGKCPEELFEHLSPEDRESFKNEEGVLMKRYSDRFPQLALRWLDENEKFNNLRFHVTFGKYRWLFCQDKKCADGSVRPRWLQKELNGFGRIQTVERKRTGLEPGWDGTGLIRKFEEVVTDEVQKEPYITDFRTQYLFNRDKIGISLSEYMPGIGDIHSGKEWGKHAGVPDFYLSVYDIPAMLFLTWLLGKNSSAVEKLLANCKAAYMKLFDDLAKGKWEGERNVSDYCAGEGTVRYTLRWYDVPMKIRRKMPLLGGDRDFEEKKSFETLAQEALTRMLQRTENQLEKFDRDLAAARDLKANKQGKDRFVDIRAGSLATFLARDIVRLMPVSDNGRNKPTGLNYSIVQKAIATYKPSEGGLDTLTGVFRDARIIGVKGGSHPFLERLLVEKKPSSVLALYRHYLEYRKEYLKKALEDENKAELKNLPFLKSGRQKYAVDQADYARRLAESYRNCPIYLPTGIFTDMLKDQLAKIDVMKPVLENDKVNASYLIAQYFEKVEHDSEQPLYRLKRNYRVFDLLEFTDEPKYWRLNERSDKAGKYGLAKRNIFWNRMGEYYKGLKKFYKGYESKRTAVDWREKLKIVEAEHAMWNRLKDASGEARLKMKDGVFYSRLLSARKEYDDCERALRRLKVQDIVLFLAARETLILPKDKVFRLKNLSLSEGNKNILSSAIDEFSVDVVWTEKEGAAKVTHSASIKENDVVIKNYGRMFRLLHDDRVKTLLPHIYDSALSENITGDRITVKDNKVIIDKSLFDEDLMNYDLRRHEICEIILRFEAASIKRFGLDGRVDFKAALDALTGRSLLNDEDARILSAIRNAYNHNKYPAKGTDVKVNVMALPKLTEDLLRIFSDTGNNRVR

SEQ ID NO: 1329 - protein, 1081 aa, Artificial
  Synthetic
MQAQSLFDEYKHLFGTYSVMSIMNIITVLNHIHQIAGLKRNELGDDDNIYSHPVLKYIAPENNSTTLPEKRDLIKELLLEYLPFLEAMKDCYKEVKVEKDKRNNKYVKDKKQVFIRNYSDIYCIYWTLYNIFSTLINYRDKSCHYRFIPSKDQEEYSKRTEYDTVRIINKYYTYALRKTKEKYGYTTEQLSFIQNNRYTDDKKVNFNFFLSMQSSNNNLSHVGVAQLICLFLQKKDVDNFLENLPIYDNRYCLGIDEHMIIKRSLALHSIKLPKERLNSEKKDMAIAMDMLNELKRCPKELFNTLPFDKQERFRIISSDHKEVLLMRSTDRFVPLILQYIDCNKKFKDIRFHVNMGKLRYLFSPNKLCIDNQERVRMLEHLLNGYGRIDEVEYLRKAPNGTFGNTNIPIKGFGEIERDSADSNNYPYIVDTHTHYILNNNKVEFCFCEDSKNKNVFPTIEKEINGKWYVEKTAPHCRISFFEIPAMAFHMFLCGSEKTEKLIKDVYNNYISLFNALKNGALTEENYKDFNIPECDMPKKILDFLKGKAEGKSIDGYVKNILKKELKDTRKRIEQAPSEKDQMPSKRNKIGTKSYKRVLTGKLADFLAKDIVKYQPTLCAGDDYGIDRMTGMNYRIMQATIATYNDDDDFDTFYNVFKMAGLVDGDERKNHPFLKKVLLSKPQNTVAFNIKYLKEKEIYLRNIEKKNIIPPFVNRERNKWCERDCEYYRILGENLLDLPIELPRQMFYKDIRAQLEPLMPEIDFSQTNTTYLIAEYLKRVRGDDFQEFYSWERNYRYIDFLKCIRDDNGRICAQYTTTEERESLWEDSKNRTAEYKRSEEQKNEKKDKNFEDSLEERISSSHIKFQNTEKHIRRYKVQDALLFMIAEKQFGKYLDDIKAKNFKLKDIMPDTDKGILSETMPIDFTFTKKNIKYNIHAKNLKFKEYGDLFILANDKRLESLWKILATDTVNKEEISEEFAKYDFCRPDITKLVLDFEKDVLEKYPEIIEEAEKEYKKFDFKFILDWLINKKKLNYGIRNKLLLIRNAFNHNSYPDKKYAEVRELPEIATNLKKTFDENAKKYE

SEQ ID NO: 1330 - protein, 1081 aa, Artificial; identical to SEQ ID NO: 1329
  Synthetic

SEQ ID NO: 1331 - protein, 1199 aa, Artificial; identical to SEQ ID NO: 1328
  Synthetic

SEQ ID NO: 1332 - protein, 1254 aa, Artificial
  Synthetic
MGNYQQNWKKRRTGSQPNAMSDQLRPVFAAYLNMARANLYSVLRYISVQCGLEVNQNEDSMHELPIAKFASNKRPEVRQKAFLLLMRNIPILQQMTQSGLTQGKPADGDRPAKEKHLAVEQEDLQRVLQNLIRVVNFKRNLFTHADHYDTDEEIEKELQREVALSGPLNTAFKGSKREVKRIFCYTEKDMNFVDQDEHMKRIPMKDKNGNIMQDEKGKDMYIFVERSNWYFRLYDTTPDPVTEMPLAQKLTTVGLVFILCKLLHKKYATQLVQKTGLFRTRAQSGNSPFEKNENEVMFNIFCAHRIRLPKGRVESTVSNYALGLDILNELQKCPSELFETLSPEDKECFQVKRKDNETQPDPDDDVNLFRRYGDRFPYLAMRYIDAMRGYQDDYKVLEDIVFQVSLGKYRFSFYNRASLDTTEKDRVRVLQKEINGFGPIDKMEQKRKEKYKTIIRPISDDPKHLYDADTAETQPYLTDQHTAYAITGNRIGITWNERIQKPQSNEMRSSIRLRWPENEQNKVINIEKLDNDNCFLPNLPVSTVNIAPRAWLSVHDLPALIFLRLLGGDPEAVIKDTYNRFVLLLNSIKNGQLKPQDNKEKLLAILSAEPYKLRLSEIPKKLLDYLSSKGPKTQDEANQAFTKWVNKQLDGDVGIIEKLRIRIEQFKQDLNVVGDKQNRIGRKGYVDIRPGSLARYITKDIMAMTRPDESRKNNGKPSGLDFGVLQAAIATFKADEIALAKTSLGGMIKSAINVNNHPFLNSVLSQQVTDTIDLYIKYQTAKLKFFKSLRKGEKGNYKDQWFLREAYRNHAAQTSEYMQGEKGLASLYLETLQLPDGLFTDAIHKQLLNNEKTKDNVEFLAALADREKTGGVSHLINLYFEKVIGDKPQSFYREMKRHYKVIDWEMFKYDDEHPILLTTIPPMIYSSPEKIATLLRKGDAKESPIVQDIDQISDNIKRKISKKWESKPRYAPISREEKLELKAKLIHQMRKLQQNERNIRRYRNQDMLLFEMAKKILLSGGAVIKTNGQLERGIDQFKLQDILPPAMRQGSDKDLLEQKVEFRLTINLNDEYGKPIKGSDDKPMQRTISQPEIKIKNYGDFYTFLYDSRIGTLLSQLTENGDIKRDDLETEFDHYDRQRQEVFRLLQKIERQIIKSHPALANSNAGKPGSEFYDENGKPYRNSFSSLLLLCKQYLSEGGEPTDVSNLLTEIRNAFSHNRYVKSQDKQLDIRTLSLPEVADHILNWLRNHQYKNE

SEQ ID NO: 1333 - protein, 1251 aa, Artificial
  Synthetic
MEEFNFKLKETDYTRLYSEQTDCKRHVVGAYANLALHNMTTVVNSIRQAVGLDTITDDTIKDAFSRDSFKGLDAGNQLKLQNKLFRHFPFLRRMKLEQHGTLDYSKVINVMKDFIKLMSIIRDDFSHYCPYSNKSQQTENSSIKKNASKKLDEIFTNSVSQNLHTAEENEVRDSVQNSKTQQDKKASTPLVSIPMRDNAGLTDAGIVFFLCCFLEKHSAFEFLEEIEFTEGLNPANALYVKEILCMNRIRMTRSQIDSQMSDTALALDMMNELRKCPKPLYDVLDPSSRNYFKDDANLQWEEDNPTQTDSQSPDSHNITDLRAKSVPRSTFVRWQNRFPEMALCFIDLKRLFPTIRFQLRLGNYRYRFYTHTAQQSLDGRERLRILQKELHGFGRIDEIEQTIKKEWGQYIEKNTTDPKPKDQPDRTPYITHQRPQYNINPVSHSIGLCWDFPDEKTYYIPEFPPKKQDDHTQQQKCPSENLAPQCYLNTDELPALLFYQYIRDKYRPDEDSSAENIIWKCYSNLHTLFSQLADNKAISINELNKWELRPSDIPAKIRKLMEGHERSEKEIRVSLRRSIEHQLTLIKKTTKTRIAKYKAATDKEKQTDQKTTRFRPPILTGRLAQQLIDDIVWWLPTDSPCRSRLTSEKYNILQASIALLGQWTAPSDPSQQTVTIDDLQQMMERIGLLGPDGHPFLSQVFKQPNQSAGIFYHNYLSAEQDHIETLWQDFDLNLDQLISQAHAKLPFVHIDRPKWNVDKSNNLPQLAQEYLTHPLQLPLGLFAQPIAQLLRDIAKGEATETWKQLTAEIDRLTQKGQPSTLKLIELYHKNIEEDDFQNFYNSSPNAGFQHHYELFKKLYNEKGRSVEEVFNLLRGKDKSEEWAEDQTALMRKQAKQVEQTEHAIRRCQIEDIVMLYAARNILSPKNDQTPNGTDTSQPQKYKLKHVQKDDELLERTIDFDWVVDIEGQQKTIRQQNMKMKDYGKFYKFASDGERLESLLAHLGGNEFQRADIEAEYANYDVSRSQVFRYVYMLESKAYQLLAKRKDNPIDLLDDKNSTRDAFWFVSKEGIRNGFRGFKENLFNEYKANDPDAKALVDAICNFTGTSIEEWDANQDTLMKQVKSLLTNENPNEKDKALILQVKDYCMKKKIARKAIRNNFGELIEILLRGDEPIFTDDDKYIIQHIRNAFGHNHYLKKEDEYNTVFRGKEAKLKLPEVAKTIKDWMGEKTTKALSLTPDTQRALPPKSQAAE

SEQ ID NO: 1334 - protein, 1400 aa, Artificial
  Synthetic
MPVWGATPSTPSYSHFCRCRSHPQYPMFCPAAKCRRHPPPHAVRRKPHSGPPLAIEYHSLHSLQVNNVQPTPNSISLKKKNLHPMGLICIFANPKPILYPNRKTRKSIRMDNQQSRNTDGGQPYGKTQARRKERRIQSTDFSIGLTGKHIFGAYFNMARTNFEKTLYYILPIVGIRGKYKESDIDKMLHALYLIHSGQSDKLTGEQKGWKKKLTLTVEQQTRLQRLLFKHFPVLNPIMADTANYRAYLELNKKKSSVQSEDETFEQLKGISLADCLELFSLISDTLTECRNFYTHQDPYNEPVALEEQYKHQSLIAIKLNKVIEASRRVLKDREGLTTGEVEFLTGIDHRIQVDKKDENGNTITENGRIQKAFVEYDDFYFKVSGTRTIGLASYPALSDFGLLYFCVLFLSKHYAKLLIDESRLFEFSPFNENENFILQEMLSIYRIRTPQPHRIDSHDDKATLAMDIFSELRRCPIELYNLLDKDHGQPFFHDEVKRPNSFTPEVSKRLRFNDRFPHLALRYIDMAELFQRIRFQLQLGSFRYKFYDKLCTDGQTRVRRIQKDINGYGRLQEVDDKRWERWGDLIQKAEEHPVKLEHEELYLDLDQFVQDTAESTPYITDRRPSYNIHANRIGLFWEESKDTRGFKYFDKDKVYIPELTITNDGKASIKMPPPRCTLSVHDLPALLFYEYLRSQTDAEYKSAEKIIIDTEAAYRKFFSAVSKGEIKPFESPDAFDDFLRDYYPQILYNDIPEKIRLYLSSLEPTHNGKPETMRQRLVRLALDQLTQRQQQVMLRLKHFNDNAKRIGTKDNKLGKKGFADIRHGVLARYLVQDMMEWQPTKDGEGHDKLTSLNHNVLTAFLATYGTPQASLADSDTPKLTLHEVLQKACLVGGNNPHPFLNKVLTYNCRNIEEFYKNYLTAEESHLQKYINTLRNDPSDQALEALPFIHHTRARFRERDQAEIQALAARYTTIQLPDGLFASKIFNLLKEQYTDNPDLQQALNFDGPDHLNPTYNATYLIAQFYRHELKDTSQPFYNTDQQHTTQRQGQAPETFDFRRAYDLFAELNNEKPLFLTSDQIQSRLTTKRLDKSGKPLPQRDSNGKPQRDPQGNIIYQRKIMREIDKYVDDLSARDFKCKQFEVPERREAKREKLKRMVNETKNTERTLRRYRTQDMVLFLLAKQMFIKLLNAQDTPVDAELMCLSKVCNDNFLRQALTFRVPITVGDQKVIYVEQGNMSLVNYGEFFRLLTDERLPTLLKNIVDDLVPDAQGDLVISYNNLWSELAAYDRQRSTAFQLIQQIEALALKSNANLYNPDSTEFWGKGNNGPFAKRNSFSALIALIDRINTTQLTDDERRLLIAIRNSFAHNSYDLDLKQIDGIKKLPEVAKSILEHLKSVVGKG

SEQ ID NO: 1335 - protein, 1175 aa, Artificial
  Synthetic
MTEQNERPYNGTYYTLEDKHFWAAFLNLARHNAYITLTHIDRQLAYSKADITNDEDILFFKGQWKNLDNDLERKARLRSLILKHFSFLEGAAYGKKLFESQSSGNKSSKNKELTKKEKEELQANALSLDNLKSILFDFLQKLKDFRNYYSHYRHPESSELPLFDGNMLQRLYNVFDVSVQRVKRDHEHNDKVDPRRHFNHLVRKGKKDRYGNNDNPFFKHHFVDREEKVTEAGLLFFVSLFLEKRDAIWMQKKIRGFKGGTEAYQQMTNEVFCRSRISLPKLKLESLRTDDWMLLDMLNELVRCPKSLYDRLREEDRARFRVPVDILSDEDDTDGTEEDPFKNTLVRHQDRFPYFALRYFDLKKVFTSLRFHIDLGTYHFAIYKKNIGEQPEDRHLTRNLYGFGRIQDFAEEHRPEEWKRLVRDLDYFDTGDKPYITQTTPHYHIEKGKIGLRFVPEGQHLWPSPEVGATRTGRSKYAQDKRFTAEAFLSVHELMPMMFYYFLLREKYSDEASAERVQGRIKRVIEDVYAVYDAFARGEIDTRDELDACLADKGIRRGHLPRQMIAILSQEHKDMEEKVRKKLQEMIADTDHRLDMLDRQTDRKIRIGRKNAGLPKSGVIADWLVRDMMRFQPVAKDTSGKPLNNSKANSTEYRMLQRALALFGGEKERLTPYFRQMNLTGGNNPHPFLHETRWESHTNILSFYRSYLKARKAFLQSIGRSDRVENHRFLLLKEPKTDRQTLVAGWKSEFHLPRGIFTEAVRDCLIEMGLDEVGSYKEVGFMAKAVPLYFERACKDRVQPFYNYPFNVGNSLKPKKGRFLSKEERIKEWESGKERFRDLEAWSHGAARRIEDAFVGIEYASPGNKKKIEQLLQDLSLWETFESKLKVKADKINIAKLKKEILEAKEHPYLDFKSWQKFERELRLVKNQDIITWMMCRDLMEENKVEGLDTGTLYLKDIRTDVHEQGSLNVLNRVKPMRLPVVVYRADSRGHVHKEQAPLATVYIEERDTKLLKQGNFKSFVKDRRLNGLFSFVDTGALAMEQYPISKLRVEYELAKYQTARVCAFEQTLGLEESLLTRYPHLPDKNFRKMLESWSDPLLDKWPDLHGNVRLLIAVRNAFSHNQYPMYDETLFSSIRKYDPSSPDAIEERMGLNIAHRLSEEVKQAKEMVERIIQA

SEQ ID NO: 1336 - protein, 1119 aa, Artificial
  Synthetic
MEDDKKTTGSISYELKDKHFWAAFLNLARHNVYITINHINKLLEIREIDNDEKVLDIKALWEKVNGDLNKTERLRELMTKHFPFLETAIYTKNKEDKKEVKQEKQAEAQSLESLKDCLFLFLEKLQEARNYYSHYKYSEFSKEPEFEEGLLEKMYNIFDDNIQLVIKDYQHNKDINPDEDFKHLDRKGQFKYSFADNEGNITESGLLFFVSLFLEKKDAIWMQQKLRGFKDNRESKKKMTHEVFCRSRMLLPKLRLESTQTQDWILLDMLNELIRCPKSLYERLQGKYRKKFNIPFDPADEDYDAEQEPFKNTLVRHQDRFPYFALRYFDYNEIFTNLRFQIDLGTYHFSIYKKLIGGQKEDRHLTHKLYGFERIQEFAKQNRPDEWKAIVKDLDTYETSNERYISETTPHYHLENQKIGIRNKKKKKKKNIWPSLETNTTVNERSKYNLGKSFKAEAFLSVHELLPMMFYYLLLTKEEPNNKEINASKVEGIIEKKIRDMYKLYDTFANGEINSKEELKEYLKGKDIEIVHLPKQMIAILESKPKDMVKEAKRKQRKMVKDTKKLLAALEKQTQGEIEDGGRNIRLLKSGEIARWLVNDMMRFQPVQKDNEGNPLNNSKANSTEYQMLQRSLALYNKEEKPTRYFRQVNLINSSNPHPFLKWTKWEECNNILSFYRSYLTKKIEFLNKLKPEDWEKNQYFLKLKEPKTNRETLVQGWKNGFNLPRGIFTEPIREWFKRHQNDSEEYKKVEALDRVGLVTKVIPLFFKEEYFKEDAQKEINNCVQPFYSFPYNVGNIHKPDEKDFLPSEERKKLWGDKKYKFKGYKAKVKSKKLTDKEKEEYRSYLEFQSWNKFERELRLVRNQDIVTWLLCTELIDKLKVEGLNVEELKKLRLKDIDTDTAKQEKNNILNRVMPMQLPVTVYEIDDSHNIVKDRPLHTVYIEETKTKLLKQGNFKALVKDRRLNGLFSFVDTSSEAELKSKPISKSVVEYELGEYQNARIETIKDMLLLEETLIKKYKTLPTNKFKKMLKGWLEGKDEADKARFQNDVDLLVAVRNAFSHNQYPMRNRIAFANINPFSLSSANTSEEKKLDIANQLKDKTHKTIEKIIKIEKPIETKE

SEQ ID NO: 1337 - protein, 1135 aa, Artificial
  Synthetic
MNTVPASENKGQSRTVEDDPQYFGLYLNLARENLIEVESHVRIKFGKKKLNEESLKQSLLCDHLLSVDRWTKVYGHSRRYLPFLHYFDPDSQIEKDHDSKTGVDPDSAQRLIRELYSLLDFLRNDFSHNRLDGTTFEHLEVSPDISSFITGTYSLACGRAQSRFADFFKPDDFVLAKNRKEQLISVADGKECLTVSGLAFFICLFLDREQASGMLSRIRGFKRTDENWARAVHETFCDLCIRHPHDRLESSNTKEALLLDMLNELNRCPRILYDMLPEEERAQFLPALDENSMNNLSENSLNEESRLLWDGSSDWAEALTKRIRHQDRFPYLMLRFIEEMDLLKGIRFRVDLGEIELDSYSKKVGRNGEYDRTITDHALAFGKLSDFQNEEEVSRMISGEASYPVRFSLFAPRYAIYDNKIGYCHTSDPVYPKSKTGEKRALSNPRSMGFISVHDLRKLLLMELLCEGSFSRMQSDFLRKANRILDETAEGKLQFSALFPEMRHRFIPPQNPKSKDRREKAETTLEKYKQEIKGRKDKLNSQLLSAFDMDQRQLPSRLLDEWMNIRPASHSVKLRTYVKQLNEDCRLRLQKFRKDGDGKARAIPLVGEMATFLSQDIVRMIISEETKKLITSAYYNEMQRSLAQYAGEENRHQFRAIVAELRLLDPSSGHPFLSATMETAHRYTEDFYKCYLEKKREWLAKTFYRPEQDENTKRRISVFFVPDGEARKLLPLLIRRRMKEQNDLQDWIRNKQAHPIDLPSHLFDSKIMELLKVKDGKKKWNEAFKDWWSTKYPDGMQPFYGLRRELNIHGKSVSYIPSDGKKFAYCYTHLMEKTVQDKKRELRTAGKPVPPDLAADIKRSFHRAVNEREFMLRLVQEDDRLMLMAINKMMTDREEDILPGLKNIDSILDEENQFSLAVHAKVLEKEGEGGDNSLSLVPATIEIKSKRKDWSKYIRYRYDRRVPGLMSHFPEHKATLDEVKTLLGEYDRCRIKIFDWAFALEGAIMSDRDLKPYLHESSSREGKSGEHSTLVKMLVEKKGCLTPDESQYLILIRNKAAHNQFPCAAEMPLIYRDVSAKVGSIEGSSAKDLPEGSSLVDSLWKKYEMIIRKILPILDPENRFFGKLLNNMSQPINDL

SEQ ID NO: 1338 - protein, 1142 aa, Artificial
  Synthetic
MENNNNTKESTYTLDNKHFWAAFLNLARHNVYITVNHINKTLELKNKKDQEIIIDNDQDILAIKTLWENVNGDLNKTERLRELMIKHFPFLETAIYSKNKEDNEEVKQEKQAAAQSFKSLKHCLILFLEKLQEARNYYSHYKYSESTKEPMLEKELLKKMYNIFDENIQLVKKDYQHNKDINPDEDFKHLDRTEEEFNYYFTKDKKGNITESGLLFFVSLFLEKKDAIWMQQKLRGFKDNREDKKKMTHEVFCRRRILLPKLRLESTQTQDWILLDMLNELIRCPKSLYERLQGADRKKFNVPFDPADEDYDAEQEPFKNTLVRHQDRFPYFALRYFDYNEIFTNLRFQIDLGTYHFSIYKKRIGGLEEDRHLTHKLYGFERIQEFDKQNRNDEWKAIVKDLDTYETSNEPYISETTPHYHLENQKIGIRFRNGNNDIWPSLETYGENNEKSKYKLDKQYQAEAFLSVHELLPMMFYYLLLKKENTDNGKKNKKVRTKKKGNKNNEQEKHKIEEIIENKIKDIYTLYDAFANGEINSKDELEKYLKGKDIKIVHLPKQMIAILESKPKDMVKEAKRKQKEMVKDTKKLLATLEKQTQREIEDDGRNVRLLKSGEIARWLVNDMMRFQPVQRDEKGEPLNNSKANSTEYQMLQRSLALYSKEEKPTRYFRQINLIESSNPHPFLKWTKWEECNNILSFYHRYLTKKIEFLNELKPADWKNNQYFLKLKEPKTNRETLVRGWKNGFNLPRGIFTKPIKDWFKRHENDSEEYKKVEALDRVGLVTKVIPLFFKEEYSKEDTQKEINNCVQPFYSFPYNVGNIHKLEEKNFLHREERRELWGEKKDKFKGYKEKVKSKKLTDKEKEEYRSYLEFQSWNKFERELRLVRNQDIVTWLLCTELIDKLKVDELNIEELQKLRLKDIDTDTAKKEKNNILNKIMPMQLPVTVYEVDDSYKIVKDKPLHTIYIEEKETKLLKQGNFKALVKDRRLNGLFSFVDTSSEECFKDKPISKLVVEYELGEYQEARIEIIKDMLALEETLINKYKKNLPTYKFSDMLNSWLEGKDGADKARFQNDVKLLTAVRNAFSHNQYPMRNRIAFANINPYSLSSANNSEEKGLGIANQLKDITHRIIGKIKEIEMQIENKK

SEQ ID NO: 1339 - protein, 1135 aa, Artificial
  Synthetic
MNTVPASENKGQSRTVEDDPQYFGLYLNLARENLIEVESHVRIKFGKKKLNEESLKQSLLCDHLLSVDRWTKVYGHSRRYLPFLHYFDPDSQIEKDHDSKTGVDPDSAQRLIRELYSLLDFLRNDFSHNRLDGTTFEHLEVSPDISSFITGTYSLACGRAQSRFADFFKPDDFVLAKNRKEQLISVADGKECLTVSGLAFFICLFLDREQASGMLSRIRGFKRTDENWARAVHETFCDLCIRHPHDRLESSNTKEALLLDMLNELNRCPRILYDMLPEEERAQFLPALDENSMNNLSENSLNEESRLLWDGSSDWAEALTKRIRHQDRFPYLMLRFIEEMDLLKGIRFRVDLGEIELDSYSKKVGRNGEYDRTITDHALAFGKLSDFQNEEEVSRMISGEASYPVRFSLFAPRYAIYDNKIGYCHTSDPVYPKSKTGEKRALSNPRSMGFISVHDLRKLLLMELLCEGSFSRMQSDFLRKANRILDETAEGKLQFSALFPEMRHRFIPPQNPKSKDRREKAETTLEKYKQEIKGRKDKLNSQLLSAFDMDQRQLPSRLLDEWMNIRPASHSVKLRTYVKQLNEDCRLRLQKFRKDGDGKARAIPLVGEMATFLSQDIVRMIISEETKKLITSAYYNEMQRSLAQYAGEENRRQFRAIVAELRLLDPSSGHPFLSATMETAHRYTEDFYKCYLEKKREWLAKTFYRPEQDENTKRRISVFFVPDGEARKLLPLLIRRRMKEQNDLQDWIRNKQAHPIDLPSHLFDSKVMELLKVKDGKKKWNEAFKDWWSTKYPDGMQPFYGLRRELNIHGKSVSYIPSDGKKFADCYTHLMEKTVRDKKRELRTAGKPVPPDLAAYIKRSFHRAVNEREFMLRLVQEDDRLMLMAINKIMTDREEDILPGLKNIDSILDKENQFSLAVHAKVLEKEGEGGDNSLSLVPATIEIKSKRKDWSKYIRYRYDRRVPGLMSHFPEHKATLDEVKTLLGEYDRCRIKIFDWAFALEGAIMSDRDLKPYLHESSSREGKSGEHSTLVKMLVEKKGCLTPDESQYLILIRNKAAHNQFPCAAEIPLIYRDVSAKVGSIEGSSAKDLPEGSSLVDSLWKKYEMIIRKILPILDPENRFFGKLLNNMSQPINDL

SEQ ID NO: 1340 - protein, 1175 aa, Artificial
  Synthetic
MTEQNERPYNGTYYTLEDKHFWAAFLNLARHNAYITLTHIDRQLAYSKADITNDEDILFFKGQWKNLDNDLERKARLRSLILKHFSFLEGAAYGKKLFESQSSGNKSSKKKELTKKEKEELQANALSLDNLKSILFDFLQKLKDFRNYYSHYRHPESSELPLFDGNMLQRLYNVFDVSVQRVKRDHEHNDKVDPHRHFNHLVRKGKKDRYGNNDNPFFKHHFVDREEKVTEAGLLFFVSLFLEKRDAIWMQKKIRGFKGGTETYQQMTNEVFCRSRISLPKLKLESLRTDDWMLLDMLNELVRCPKSLYDRLREEDRARFRVPIDILSDEDDTDGAEEDPFKNTLVRHQDRFPYFALRYFDLKKVFTSLRFHIDLGTYHFAIYKKNIGEQPEDRHLTRNLYGFGRIQDFAEEHRPEEWKRLVRDLDYFETGDKPYITQTTPHYHIEKGKIGLRFVPEGQHLWPSPEVGATRTGRSKYAQDKRLTAEAFLSVHELMPMMFYYFLLREKYSEEASAERVQGRIKRVIEDVYAVYDAFARGEIDTLDRLDACLADKGIRRGHLPRQMIAILSQEHKDMEEKVRKKLQEMIADTDHRLDMLDRQTDRKIRIGRKNAGLPKSGVIADWLVRDMMRFQPVAKDTSGKPLNNSKANSTEYRMLQRALALFGGEKERLTPYFRQMNLTGGNNPHPFLHETRWESHTNILSFYRSYLKARKAFLQSIGRSDREENHRFLLLKEPKTDRQTLVAGWKSEFHLPRGIFTEAVRDCLIEMGLDEVGSYKEVGFMAKAVPLYFERACKDRVQPFYNYPFNVGNILKPKKGRFLSKEKRAEEWESGKERFRDLEAWSQSTARRIEDAFAGIKYASPGNKKKIEQLLQDLSLWETFESKLKVKADKINLAKLKKEILEAKEHPYLDFKSWQKFERELRLVKNQDIITWMMCRDLMEENKVEGLDTGTLYLKDIWTDVHEQGSLNVLNRVKPMRLPVVVYRADSRGHVHKEQAPLATVYIEERDTKLLKQGNFKSFVKDRRLNGLFSFVDTGGLAMEQYPISKLRVEYELAKYQTARVCAFEQTLELEESLLTRCPHLPDKNFRKMLESWSDPLLDKWPDLHRKVRLLIAVRNAFSHNQYPMYDEAVFSSIRKYDPSSPDAIEERMGLNIAHRLSEEVKQAKEMAERIIQA

SEQ ID NO: 1341 - protein, 1199 aa, Artificial; identical to SEQ ID NO: 1328
  Synthetic

SEQ ID NO: 1342 - protein, 1081 aa, Artificial; identical to SEQ ID NO: 1329
  Synthetic

SEQ ID NO: 1343 - protein, 1057 aa, Artificial
  Synthetic
MTIKEQSHFAAYYNMARHNMYETLCYISKISGIQEGEDNKESKIEDMQLLRVLTTKGHPEEKIRIEKLIYKHLPLFRPAVEDLRKKSKENVKSPELLAKVIKNWAKVITYYRDKFTHYVFIDKRHENKEFLNAEMSVANDLNQIFTASARVIKERFGLSTELEFLTKGRYRTQTIDGKRSTKLNPNFIYSLQDKNERLNKMGLIFLACQLIEKKYASMLFDQQGYMGRDIYFDFTPAQCKYIREVFSAHRIVLPRGRMDVERNEITIAMDMFNELGKCPKELFEIISKEEQKRFRTKSETTGEEVLLMRHSDRFATLALQYIDNRKVFEKIRFQLSLGKYRYKFYDKTCVDGDTHVRILQKELNGFGRINEIELLKEEKWGGLIRKFEDAKIDTAETKPYITDQYPQYLFNGNRIGIYFNSAHGKAMRNGAYIPDIESGAHCIQPICWISNYELPALIFHHILTKDEKKSLTEKIIIDCVERYKKLFNDIAEGKVARTGNATSDFEMISKEYGIEKSDIPRELQDYFNGTERDGIEQYAKAQIREMIEENRIRLEQFNSKLKKIEDGEVKYGKRDYTEIRTGELAQYLAKDIVMFMPKAKYKPTSKNYNVMQALLATFNGSESGSTLDEVDDMFDNIKACYWKNESDNHPFLEYVLGEEPKDIIAFYKIYLELRGEYLDKCIKKMDLATIPFIHTERKRWEKRDEKFFKELAQRYATQPIELPRGLYDRAIKEYLKSKSILEDVIAQEQCNVTYLIARYMQDVLKDDSQQFYSLPRHYSCLSEKDKYLSLTEREAIAKSDALNNFKKREREKENENRRGNRRYNKGENKNTIKDRDTEEKFNSLYRKMDNNERILRRYKVQDMLLYLLACDIIKGIMREDFGYKLSMITDGKNSNFFDYKMPEFKTTITLKEGKKFTIKQQYLKIKNYGDFLKFIFDLRIDSLLSNGTKVEIDRNILEDELSNYDGSRPKVFETLLMIEKIVVEKHKELKDLEHITFGDVLNVIKMEEGEKKILRLIRNAFSHNYYPTIKDVNYDNMPEVAESLKDILEKESKKLTN

SEQ ID NO: 1344 - protein, 1057 aa, Artificial
  Synthetic
MTIKEQSHFAAYYNMARHNMYETLCYISKISGIQEGEDNKESKIEDMQLLRVLTTKGHPEEKIRIEKLIYKHLPLFRPAVEDLRKKSKENVKSPELLAKVIKNWAKVITYYRDKFTHYVFIDKRHENKEFLNAEMSVANDLNQIFTASARVIKERFGLSTELEFLTKGRYRTQTIDGKRSTKLNPNFIYSLQDKNERLNKMGLIFLACQLIEKKYASMLFDQQGYMGRDIYFDFTPAQCKYIREVFSAHRIVLPRGRMDVERNEITIAMDMFNELGKCPKELFEIISKEEQKRFRTKSETTGEEVLLMRHSDRFATLALQYIDNRKVFEKIRFQLSLGKYRYKFYDKTCVDGDTHVRILQKELNGFGRINEIELLKEEKWGGLIRKFEDAKIDTAETKPYITDQYPQYLFNGNRIGIYFNSAHGKAMRNGAYIPDIESGAHCIQPICWISNYELPALIFHHILTKDEKKSLTEKIIIDCVERYKKLFNDIAEGKVARTGNATSDFEMISKEYGIEKSDIPRELQDYFNGTERDGIEQYAKAQIREMIEENRIRLEQFNSKLKKIEDGEVKYGKRDYTEIRTGELAQYLAKDIVMFMPKAKYKPTSKNYNVMQALLATFNGSESGSTLDEVDDMFDNIKACYWKNESDNHPFLEYVLGEEPKDIIAFYKIYLELRGEYLDKCIKKMDLATIPFIHTERKRWEKRDEKFFKELAQRYATQPIELPRGLYDRAIKEYLKSKSILEDVIAQEQCNVTYLIARYMQDVLKDDSQQFYSLPRHYSCLSEKDKYLSLTEREAIAKSDALNSFKKREREKENENRRGNRRYNKGENKNTIKDRDTEEKFNSLYRKMDNNERILRRYKVQDMLLYLLACDIIKGIMREDFGYKLSMITDGKNSNFFDYKMPEFKTTITLKEGKKFTIKQQYLKIKNYGDFLKFIFDLRIDSLLSNGTKVEIDRNILEDELSNYDGSRPKVFETLLMIEKIVVEKHKELKDLEHITFGDVLNVIKMEEGEKKILRLIRNAFSHNYYPTIKDVNYDNMPEVAESLKDILEKESKKLTN

SEQ ID NO: 1345 - protein, 1081 aa, Artificial; identical to SEQ ID NO: 1329
  Synthetic

SEQ ID NO: 1346 - protein, 1081 aa, Artificial; identical to SEQ ID NO: 1329
  Synthetic

SEQ ID NO: 1347 - protein, 1253 aa, Artificial
  Synthetic
MLEIQIEKEKRGWFWAMNLTMALNNLETIAKRALNVLGKPYPASQSEDEQTNALKQALDELQKQPLICQTKIERVFFRSLPHLNKFRQFIEMGGEKSSASYVEKSSSRADAEATQRQSGRDFTSDDLFQLARYYLKSLVELRNYFAHSEHQYPKLPESLDIKGVRFPSSFENALFNANVRTVKDRFYKDDRKDAREIENGFLCFRPKKTVKNRETVDNPEFKFRLTERNDANGRRYPTQAGLAFFVARFLEKRYVDLLFETTDANGVPVLPLHRPQDVDGVEFSLAPRRVYGLNAARLPRRRVETTARPESSNETLGLDLIGYLARCPKRVYEFLSETDRRKFRVAADESNPSEGLRTRSEKRFARLAALCLDRMNCFENLRFQVDMGQYYSATHRRRLIDGTTIDDRRVGKRVFWFERIQNAVDYYRAERLKPESKYFVPTDEAETPPETDYRVDAYPRYRVKNQQLGLRLVDASQKNAPPKLIPWTHSAKRGSAPKTRMKRPEFWLSQYELPALLFVALHGKAQDAQNVIADYQKNWRRFLEDVRDGKFDFGGGRALRETRQTFESQYGLRFDDLPDSTRALFRSTASDSKELEKKRVDAAEQTLPERQIDRLLDETRRRLAVLESETREVFQLGKRKRPSLSVGRVASCLVRDLMRFQYATSEKSFGKIPSSPDFIALQTSLACFESRQNELLEIFKAAKLIPSNFVAPNDAEEAFFFADAQNAERSLHPFLGAVVADAANLRDWKSFYRAYLTCRLNWLRGCAPQELRHTRYGNRRLEKLKKMRKSGKRQTVAQQMATRLLEQPINLPRGLFTDLVRAVVQERFGDQLAKATQNGATSTNASWLIGKVRDWSDDASQGFYSWRRDYRNVASFKRLFELCGPTVSTSPLAFRALNSTSPLDFRALKEAFDANFDANYAAAEFAKTDHKTDREDWERFIREAEAELREEALEATRGRSQRRPFIPREKIEERASKKRKKFADEQKAKRRAAEHAKIRRLSDAERDIRHAEIQDYVLLLAASYFLFEGDLAKIRLADVYAIVDDATGTVSTNPLRKLRPCEVLVDVPGSGTCKIRGEMNVKNSGNFQRFLTDGRLPSFLRSLRLMQAENAEELSYIDLANEFAASDRLQRGRIFAAIYRFENACFSVFPELKDKKRGGYVSFATILTSVFPNDEETQYRLLVIRNKFMHQEYPIYDASQTKDKQRWTPIFDRWNREMWAKYDPKHGRALCQCAVDWAEPYFDEATKLVESRR

SEQ ID NO: 1348 - protein, 1138 aa, Artificial; identical to SEQ ID NO: 1326
  Synthetic

SEQ ID NO: 1349 - protein, 1171 aa, Artificial
  Synthetic
MNLLEKTNAAESCFNHTINDQKYYFAGYLNLAQNNIKTLEKAYGEHFLCSGNNPIINDLTNTNSLIDWDFKMKFLSQYLPAISYLNLETDLNESFEKRKKEFTKNLSFLFNAIDLLRNFYSHYYHAPLIDELNSERLIFLDKIFVAVCINVKKKRMKDDKTKQLLKATLIDELDLLLKAKKEELLKKKKEGKKVSTDAISMKNSVLNDAFNHLIQLEKNSKKEIPGRYYTSLLNDNNKYTENGINISISGLLFLLSMFLTKKQNEDVRSRIFGFKGTIESDKGISKSNNSFRNMATNWVFSYLSFKGMKKQLGSTFNKESLLVQIVDELSKVPHEVYQTLSPSRQEMFLEDMNEYLKDGNKKHCLEDSIVVHPVIKKRYEDKFNYFAIRYLDEFVDFPSLRFQVNVGNYVHDRRKKTIDGTNTETDRMVKEEIRAFGKLSFISKLKADYFAKDLPSDISWEMYPNPSYNFSANNIPVYIDLFKSSVAGAADVGKDHKGYQAKLDLDEDGKKRNRNEGKPDKKEIAEILFGKKNKQILFEKPTVLLSLNELPAMLYEVLIENGDKQDIGKRIEDKIVEKIIAHYNLLDQYDGTTELPGSVIPRKLRMGGNEKSINIDKLLRAVKRELEITQEKLDLIKTNQKKFKSKEKDEKGNSRQHVFYTNELGQEATWIANDMKRFMPKEVKEKWRGYHHSNLQKLLALYDQTRNEAVKCITCFWNFDQQTSWGKGIKEAFYKSTFEEFYKAYLEHRMDVYKTLENNLIAGKGYSKLFNKEKKKAFILFDEHLYTIPDINTQKERLKSTLFILPRGIFDSKPTFIKGIKYEEDPSCFADWYQFANATGNQYQRFYDLPRSYTSLFEETKKNNEGLIENKKGLSAKEQLDFFKMRQDLKIKKIKTQDLFLFMIVRDLYKKVFDHTLPLEIGLRDMYQTPAERQANYDLAVKQSQRTEGDNSDNLYNYNFLWNLTIPFEYDKIKEPQVKLKDVGKFYKFAADEKVQTILSYSDREWSKLDLEKELELMPTSYEVIRREQLLRDIQQFEKRILENYPSDGNAHPADLEKEDKDKKCFPNFNLYLLKGIIIKNNLASEEERQWFEQVHLDKTPFYPEVETKSSIIQSAYLLLLIRNKMLHNQLPSKQNFEFMTTLYPFEGYESYSTYLLFVTKKTIECLSSAM

SEQ ID NO: 1350 - protein, 1062 aa, Artificial; identical to SEQ ID NO: 1324
  Synthetic

SEQ ID NO: 1351 - protein, 1171 aa, Artificial; identical to SEQ ID NO: 1349
  Synthetic

SEQ ID NO: 1352 - protein, 1119 aa, Artificial
  Synthetic
MEDDKKTTESIRYELKDKHFWAAFLNLARHNVYITVNHINKMLEEGEINRDGYENTLENSWNEIKDINKKDRLSKLIIKHFPFLEATTYRRNPTDTTKQKEEKQAEAQSLESLKESFFVFIYKLRDLRNHYSHYKHSKSLERPKFEEDLLKKMYNIFNASIRLVKEDYQYNKNINPKKDFKHLDRKRKGKFYYSFADNKGNITESGLLFFVSLFLEKKDAIWVQKKLEGFKCSNESYQKMTNEVFCRSRMLLPKLRLESTQTQDWILLDMLNELIRCPKSLYERLQGNDREKFRVPFDPVDEDYDAEQEPFKNTLVRHQDRFPYFALRYFDYNEIFTNLRFQIDLGTYHFSIYKKLIGGQKEDRHLTHKLYGFERIQEFDKQNRPDEWKAIVKDSDTFKKKEEKEEEKPYISETTPHYHLENKKIGIAFKNHNIWPSTQTELTNNKRKKYNLGTSIKAEAFLSVHELLPMMFYYLLLKTENTKNDNKVEGKKETKKQEKHNIEAIIESKIKDMYALYDAFANGEINSEKELEEYLKGKDIEIVHLPKQMIAILKNKHKDMVEKAEDKQEKMKLATENRLKTLDKQLKGKIQNGKKYNSAPKSGEIASWLVNDMMRFQPVQRDENGEPLNNSKANSTEYQLLQRTLAFFGSEHERLAPYFKQTNLIESSNPHPFLNDTEWEKCSNILSFYRSYLKAKKNFLESLKPEDWEKNQYFLMLKEPKTNRKTLVQGWKNGFNLPRGIFTEPIRKWFMEHWKNIKVDDSKRVGLVAKVIPLFFSEKYKDSVQPFYNYPFNVGDVNKPKEEDFLHRKDRIELWDKKKVGFKGYKAKEKPKEMTDEEKKEHRSYLEFQSWKKFERELRLVRNQDIVTWLLCTELIDKLKVEGLNVEELQKLRLKDINTDTAKKEKNNILNRVMPMELPVTVYEVNKASNIIKNKPLHTIYIKEAKTKLLKQGNFKALVKDRRLNGLFSFVDTSSKAESESNTISKSRVEYELVEYQKARIEIIKDMLALEKTLIDKYNSLDTDNFNKMLTDWLELKGEPDKASFQNDVDLLIAVRNAFSHNQYPMRNRIAFANINPFSLSSADTSEEKGLGIANQLKDKTHKTIEKIIEIEKPIETKE

SEQ ID NO: 1353 - protein, 1150 aa, Artificial
  Synthetic
MMEKENVQGSHIYYEHTDKCFWAAFYNLARHNAYLTIAHINSFVNSKKGINNDDKVLDIIDDWSKFDNDLLMGARLNKLIFKHFPFLKAPLYELAKQEALKQYKKEQQKYGKKGKKKEVFIQEAMANAFKMEDVRKTLREFLKQLEDLRNHFSHYNYNSPAEKTEVKFDNGFCNKLYYVFDAALQMVKDDNRMNPEINMQTDFEHLVRLGRNRKIPNTFKYNFTNSDGTINNNGLLFFVSLFLEKRDAIWMQKKIKGFKGGTENYMRMTNEVFCRNRMVIPKLRLETDYDNHQLMFDMLNELVRCPLSLYKRLKKEDQDKFRVPIEFLDEANEADNPYQENANSDENPTEETDPLKNTLVRHQHRFPYFVLRYFDLNEVFKQLRFQINLGCYHFSIYDKTIGERTEKRHLTRTLFGFDRLQNFSVKLQPQHWKNMVKHLDTEESSDKPYLSDAMPHYQIENEKIGIHFLKTDTEKKETVWPSLEVEEVSSNRNKYKSEKNLTADAFLSTHELLPMMFYYQLLSSEEKTRAAAGDKVQGVLQSYRKKIFDIYDDFANGTINSMQKLDERLAKDNLLSGNMPQQMLAILEHQEPDMEQKAKEKRDRLITETEERIDKLNAQFKQKVRIGKRRADLPKVGCIADWLVNDMMRFQPAKRSADNTGVPGSKANSTEYRLLQEALAFYSTYKDRLEPYFRQVNLIGGTNPHPFLHNVKWQKCNHLLSFYYAYLNAKKRYLSHLSPADWQKHQHFLLLKVRKDIQNEKKDWKKSLVAGWKNGFNLPRGLFTESIKTWFSTYADKVQITDTKLFENRVGLIAKLIPLYYDKVYNDKPQPFYQYPFNINDRYKPEDARKQFTAASSKLWNEKKTRYKNAQPEQLKKKKDLQYLDFLSWKKLERELRMLRNQDMMVWLMCKDLFAQCTVEGVEFADLKLSQLEVDVTVQDNLNVLNNVSSMILPLSVYPLDAQGNIRRNSKPLYTVYVQEKNTKLLKQGNFKSLLKDRRLNGLFSFIPAEGEDLQQHPLTKNRLEYELSIYQTMRISVFEQTLQLEKAILTRNKTLCGNNFNNLLNSWSEHRTDKKTLQPDIDFLIAVRNAFSHNQYPMSTNTVMEDIEKFNIRTSRLADKDGLGIASQLAKKTKDAASRLQNIINGGTN

SEQ ID NO: 1354 - protein, 1062 aa, Artificial; identical to SEQ ID NO: 1324
  Synthetic

SEQ ID NO: 1355 - protein, 1047 aa, Artificial; identical to SEQ ID NO: 1327
  Synthetic

SEQ ID NO: 1356 - protein, 1140 aa, Artificial
  Synthetic
MENDQQILENRRRTLANDPQYFGGYLNMARLNIYNISNHLATSFEQKALHEEGQIPASFLCNKSIKKINWNHVYSKARRFLPILKIFDADSLPKEERETSDKEGKDFTAMNETLKLVFDELQAFRNDYSHYYSTEKADSRKLTISVELADFLTVNFKRAIAYTKVRMKDVLADDDYAVVESKQIVTPDNQITTEGLVFLTCIFLEREQAFQFIGKVQGLKGTQFNSFIATREVLLAYCVKLPHDKFVSEDLRQALTLDIINELNRCPKTLYEVITEEEKQQFRPELDAQGIDNLIANSTNEEEREKILDEIDYEDYIESLTKRVRHSNRFPYFAMRYIEEKNVFDKLRFHIDLGKYEVEKYNKQFDGEATERKVVENAKAFGKLSSFTNQETVELKIDSAQRTNGFEQFAPHYNADNNKIGLSNKESEARLLTKAKPESKVSYNLKQPLPQAFLSLHELPKIILLEYLQKGKAEEMINDFIKVNDSQLMNMQFIDEIKEQLPADWNEFGKRSDSKKKKAYTNAARQYLLQRKATLNKVLANYQLNDKQVPTRILNYWLNVKEVDDSRSVSDRIKLMKRDCMSRLKVMEKHKVDKSARTPKVGEMATFLAKDIVDMIVSTDKKQKITSFYYDKMQECLALYADNEKKATFIHIVTNELKLLEKDGHPFLANINLRQIRKTSQLYELYLVEKANKQVKKMNPKTQRTNNVDESWMMKSFYAKEWNEEMGKQLTVVKLPANKTNIPFTIRQWEEKEKHNLQAWLHNITKGKTSKDGKKAVDLPTNLFDDTLCELLREALINEGIDATPTTKYNELLKHWWTAREDSTQDFYLSERQYDIYDEKVCFTINSSAHFADYYAPALSKAYSRLRAERDVARRTDKRLPPVERKDVERVFKNTIAETEKEIRMLQEEDRMAVLMLEQLMDNQQQLKLSKMDSLLNETKRIEQVINTQLSFDQKGKEIKDKTNLEIVKTIVAERKQKNYTEMRKYVHDRRLPELFEYIDGNELPLDMLLNELRAYNTAKQVVFDTVFALEKKIIETDPEGLKQLNVSKDGQIQTGNIQHKPYVQWLENKGLITDKDKQFINMVRNSFSHNQFPQRSTVELLMPVWQNTNIALQIAREYQQLIVDIIEKSLHPHKQHQMV

SEQ ID NO: 1357 - protein, 1168 aa, Artificial
  Synthetic
METKQQVGKGISYDHRRPDDKHYFGGFLNLAQNNIDGVIQEFAMRLNREYDPENKNQSLFSYFNINASFTDWERGVNILKEYWPMMEFIDRPATDKQFEAEKPENREAAKRKYFLATLGALLTSIKDLRHYYTHYYHPPVHLNDDLFLFLDHALLYTAFDVKKTKMKDDKTRQLLNQNLSLELEKLKKLKVEELKKKKEKGIKVNLQDEKGILNAIYNDAFAHIITKEKDSDKDKLETRYKSILPQDEAAETGINISISGLIFLLSLFLSRKEIEQLKSNIEGYKGKVLNIETEVDRKHNSLKYMATHWVFSILAFKGLKQRLTNSFEKESLLIQMMDELNKVPDELYQTLSETAKKEFLEDINEYVSEGDDNEKATYVVHPVIRKRYESKFNYFAIRYLDEFAQFPTLKFQIFVGQYLHDNRPKTLASNGMTAQRMIKEKINLFGNLSEVTKHKSDFFEKESAAQGWEFFPNPSYNWAGNNIPVYIDMIGKEGKAKEIQVQINKYRKQLNPAPQRDKRISKKEIIEQLYKEKVVYGDPTLMLSANELMALLYELIVNGKSGAELENKIVEQIIARYEQIEAYDPTTQQLPTNQMPHKLQKSRKDSKVTDTDKLLKTIDKEIDEGNKKLELIACHRKEWEEAEQRKKSGKRNNPGTKSRKHLFYASEMGEEATWIANDLKRFMPKPARAEWKGTHHSELQRLLAFYSTQRLEAWQLVESVWTANTHSFWEENFKEAFYKPEFENFYGAYIEIRTKILTTCRSILENNPEATMNNDTEKEWDKVFTLFDKRLYRTSTTDEQKKQLLTKPFAFPRGLFDDKPTFLPGSKPNENPERFAAWYSYGYTYSGKFQSFYDMPRNYSDWYKKLKEDGKLPRLDKKTEQEKILRFRMDCDLNIKHIRFQDIYVKLMVDSLYKAVFGQQPEFDLSHLYDTRSERYENNTIAQRQKSRQEGDNSDNAINENYVWNKTFAISLYNGRITESQVKLKDVGKFRRFATDPRVQTLISYDDTRTWTKLEIENELDNKADAYEPIRRTQSLKAIQQLEKNILKKNGFNGKQHPEELKHNGNPNFRKYIANGLLKHRTDIRQEELALISDTEFQEIGLERIRQTNPLIQKAYLLILLRNKFGHNQLPDQEHFRLMRSIYPYNQQESYSAYFNHVITQIIEELNT

SEQ ID NO: 1358 - protein, 1094 aa, Artificial
  Synthetic
MEANEQNQENRRRTLTNDPQYFGGYLNMARLNIYNINNHIAADFGQAVLPEEGQIPSGFLCNKEIKKLNWNHIYAKTRRFLPILKVFDIESLPKEEQVNSDKEGKDFAAMSDTLKVVFSELQDFRNDYSHYYSTEKGENRKLTISAELTDMLTINFKRAIAYTKVRMKDVLTDADYELVETKQVVTTGNIITTEGLVFLTCMFLEREHAFQFIGKIQGLKGTQFNSFIATREVLMSFCVKLPHDKFVSENLEQALTLDIINELNRCPKTLYGVITDEEKMQFRPELDELDIEKLIANSTNDDERERILDEIGYEEYIEGLTKRVRYNNRFPYFAMRFIEEKNVFDKLRFHIDLGKYEVDRYTKQLAGEQTERVVQENVKAFGKLSSFTDPELIQQKIDNQQRTDGFEQFAPHYNADNNKIGLSNKESIAILIPKSKPESKVGNNLKQPLPQAFLSLHELPKIILLDYLQKGKAEELINDFILLNDTRLMDITFIEEVKLKLPANWNEFAKRSDAKKKKAYSDAAMEYLLQRKATLNDVLITYNLNDKQIPTRILNYWLNIKDVEDNRSVSDRIKLMKRDCMSRLKVLEKHKLDKSVKTPKVGEMATFLAKDIVDMMVSKEKKQKITSFYYDKMQECLALFADTEKKALFIHIVTNELKVLEGDGHPFLTNINLQQIRKTSQFYELYMNAKVQYLIQFYKPSKDKVDKRGRPTTEVKLPPLDKRSNIPFTIRQWDEKEKYNLNAWLRNVTVGKNTKDGKKAVNLPTNLFDETLCDLLSQQLDARTVNYNPAANYNELLKLWWKTRDDATQDFYQSEREYDIYEEKVEFKIDSSGHFADYYKKALSKAYNRLKAEREIARRTNKRLPPIEHKQVERVFKNTIAETEKEIRMLQEEDRMAVLMLEQLMDDSGNLKLSTIKTSLNNTTQIKQKILNKTIVAERKQKNYTELRKYVHDRRLPNLFEYVEADEILLEWLLDELMAYNAAKQQVFDTIFMLEKRIIETDPQELKSLFTNEKGQVQTGNIQHKPYVQWLKNKGLINHNEKLFINMVRNCFSHNQFPQRETMELLISEWGAGKIATQILTVYNQLITNIINKI

SEQ ID NO: 1359 - protein, 1175 aa, Artificial
  Synthetic
MTEQNERPYNGTYYTLEDKHFWAAFLNLARHNAYITLTHIDRQLAYSKADITNDEDILFFKGQWKNLDNDLERKARLRSLILKHFSFLEGAAYGKKLFESQSSGNKSSKKKELTKKEKEELQANALSLDNLKSILFDFLQKLKDFRNYYSHYRHPESSELPLFDGNMLQRLYNVFDVSVQRVKRDHEHNDKVDPHRHFNHLVRKGKKDRYGNNDNPFFKHHFVDREEKVTEAGLLFFVSLFLEKRDAIWMQKKIRGFKGGTETYQQMTNEVFCRSRISLPKLKLESLRTDDWMLLDMLNELVRCPKSLYDRLREEDRARFRVPIDILSDEDDTDGAEEDPFKNTLVRHQDRFPYFALRYFDLKKVFTSLRFHIDLGTYHFAIYKKNIGEQPEDRHLTRNLYGFGRIQDFAEEHRPEEWKRLVRDLDYFETGDKPYITQTTPHYHIEKGKIGLRFVPEGQHLWPSPEVGATRTGRSKYAQDKRLTAEAFLSVHELMPMMFYYFLLREKYSEEASAERVQGRIKRVIEDVYAVYDAFARGEIDTLDRLDACLADKGIRRGHLPRQMIAILSQEHKDMEEKVRKKLQEMIADTDHRLDMLDRQTDRKIRIGRKNAGLPKSGVIADWLVRDMMRFQPVAKDTSGKPLNNSKANSTEYRMLQRALALFGGEKERLTPYFRQMNLTGGNNPHPFLHETRWESHTNILSFYRSYLKARKAFLQSIGRSDREENHRFLLLKEPKTDRQTLVAGWKSEFHLPRGIFTEAVRDCLIEMGLDEVGSYKEVGFMAKAVPLYFERACKDRVQPFYNYPFNVGNILKPKKGRFLSKEKRAEEWESGKERFRDLEAWSQSTARRIEDAFAGIKYASPGNKKKIEQLLQDLSLWETFESKLKVKADKINLAKLKKEILEAKEHPYLDFKSWQKFERELRLVKNQDIITWMMCRDLMEENKVEGLDTGTLYLKDIRTDVQEQGSLNVLNHVKPMRLPVVVYRADSRGHVHKEEAPLATVYIEERDTKLLKQGNFKSFVKDRRLNGLFSFVDTGALAMEQYPISKLRVEYELAKYQTARVCAFEQTLELEESLLTRYPHLPDKNFRKMLESWSDPLLDKWPDLHRKVRLLIAVRNAFSHNQYPMYDEAVFSSIRKYDPSSPDAIEERMGLNIAHRLSEEVKQAKETVERIIQA

SEQ ID NO: 1360 - protein, 1165 aa, Artificial
  Synthetic
MKNQNTLPSNPTDILKDKPFWAAFFNLARHNVYLTVNHINKLLDLEKLYNKDKHKEIFEHEDIFNISDDVMNDVNSNGKKRKLDIKKIWANLDTDLTRKYQLRELILKHFPFIQPAIIGAQTKERTTIDKDKRSTSTSNDSLKPTGEGDINDPLSLSNVKSIFFRLLQMLEQLRNYYSHVKHSKSATMPNFDEGLLKSMYNIFIDSVNKVKEDYSSNSVIDPNTSFSHLISKDEQGEIKPCRYSFTSKDGSINASGLLFFVSLFLEKQDSIWMQKKIPGFKKTSENYMKMTNEVFCRNHILLPKMRLETVYDKDWMLLDMLNEVVRCPLSLYKRLAPADQNKFKVPEKSSDNANRQEDDNPFSRILVRHQNRFPYFALRFFDLNEVFTTLRFQINLGCYHFAICKKQIGDKKEVHHLTRTLYGFSRLQNFTQNTRPEEWNTLVKTTEPSSGNDGKTVQGVPLPYISYTIPHYQIENEKIGIKIFDGDTAVDTDIWPSVSTEKQLNKPDKYTLTPGFKADVFLSVHELLPMMFYYQLLLCEGMLKTDAGNAVEKVLIDTRNAIFNLYDAFVQEKINTITDLENYLQDKPILIGHLPKQMIDLLKGHQRDMLKAVEQKKAMLIKDTERRLERLNKQPEQKPNVAAKNTGTLLRNGQIADWLVKDMMRFQPVKRDKEGNPINCSKANSTEYQMLQRAFAFYTTDSYRLPRYFEQLHLINCDNSHLFLSRFEYDKQPNLIAFYAAYLEAKLEFLNELQPQNWASDNYFLLLRAPKNDRQKLAEGWKNGFNLPRGLFTEKIKTWFNEHKTIVDISDCDIFKNRVGQVARLIPVFFDKKFKDHSQPFYTYNFNVGNVSKITEANYLSKEKRENLFKSYQNKFKNNIPAEKTKEYREYKNFSSWKKFERELRLIKNQDILTWLMCKNLFDEKIKPKKDILEPRIAVSYIKLDSLQTNTSTAGSLNALAKVVPMTLAIHIDSPKPKGKAGNNEKENKEFTVYIKEEGTKLLKWGNFKTLLADRRIKGLFSYIEHDDINLEKYPLTKYQVDSELDLYQKYRIDIFKQTLDLEAQLLDKYSDLNTDNFNQMLSGWSEKEGIPRNIKQDVAFLIGVRNGFSHNQYPDSKRIAFSRIKKFNPKTSSLQESEGLNIAKQMYEEAQQVVNKIKNIESFD

SEQ ID NO: 1361 - protein, 1011 aa, Artificial
  Synthetic
MTEQNERPYNGTYYTLEDKHFWAAFFNLARHNAYITLAHIDRQLAYSKADITNDEDILFFKGQWKNLDNDLERKARLRSLILKHFSFLEGAAYGKKLFESQSSGNKSSKNKELTKKEKEELQANALSLDNLKSILFDFLQKLKDFRNYYSHYRHPESSELPLFDGNMLQRLYNVFDVSVQRVKRDHEHNDKVDPHRHFNHLVRKGKKDRYGNNDNPFFKHHFVDREGTVTEAGLLFFVSLFLEKRDAIWMQKKIRGFKGGSETYQQMTNEVFCRSRISLPKLKLESLRTDDWMLLDMLNELVRCPKSLYDRLREEDRARFRVPVDILSDEDDTDGTEEDPFKNTLVRHQDRFPYFALRYFDLKKVFTSLRFHIDLGTYHFAIYKKNIGEQPEDRHLTRNLYGFGRIQDFAEEHRPEEWKRLVRDLDYFETGDKPYITQTTPHYHIEKGKIGLRFVPEGQHLWPSPEVGATRTGRSKYAQDKRFTAEAFLSVHELMPMMFYYFLLREKYSDEASAERVQGRIKRVIEDVYAVYDAFARGEIDTLDRLDACLADKGIRRGHLPKQMIAILSQEHKDMEEKVRKKLQEMIADTDHRLDMLDRQTDRKIRIGRKNAGLPKSGVIADWLVRDMMRFQPVAKDTSGKPLNNSKANSTEYRMLQRALALFGGEKERLTPYFRQMNLTGGNNPHPFLHETRWESHTNILSFYRSYLKARKAFLQSIGRSDRVENHRFLLLKEPKTDRQTLVAGWKSEFHLPRGIFTEAVRDCLIEMGLDEVGSYKEVGFMAKAVPLYFERACKDRVQPFYDYPFNVGNSLKPKKGRFLSKEKRAEEWESGKERFRDLEAWAHSAARRIEDAFVGIEYASRENKKKIEQLLQDLSLWETFESKLKVKTDKINIAKLKKEILETKEHPYLDFKSWQKFERELRLVKNQDIITWMMCRDLMEENKVEGLDTGTLYLKNIRTDVQEQGSLNVLNHVKPMACPWSCTEPTAEAMYTRSRLLWRRSISKKGTPSC

SEQ ID NO: 1362 - protein, 1119 aa, Artificial
  Synthetic
MTEQNERPYNGTYYTLEDKHFWAAFLNLARHNAYITLTHIDRQLAYSKADITNDEDILFFKGQWKNLDNDLERKARLRSLILKHFSFLEGAAYGKKLFESQSSGNKSSKKKELTKKEKEELQANALSLDNLKSILFDFLQKLKDFRNYYSHYRHPESSELPLFDGNMLQRLYNVFDVSVQRVKRDHEHNDKVDPHRHFNHLVRKGKKDRYGNNDNPFFKHHFVDREEKVTEAGLLFFVSLFLEKRDAIWMQKKIRGFKGGTETYQQMTNEVFCRSRISLPKLKLESLRTDDWMLLDMLNELVRCPKSLYDRLREEDRARFRVPIDILSDEDDTDGTEEDPFKNTLVRHQDRFPYFALRYFDLKKVFTSLRFHIDLGTYHFAIYKKNIGEQPEDRHLTRNLYGFGRIQDFAEEHRPEEWKRLVRDLDYFETGDKPYITQTTPHYHIEKGKIGLRFVPEGQHLWPSPEVGATRTGRSKYAQDKRLTAEAFLSVHELMPMMFYYFLLREKYSEEVSAEKVQGRIKRVIEDVYAVYDAFARGEIDTLDRLDACLADKGIRRGHLPRQMIAILSQEHKDMEEKVRKKLQEMIADTDHRLDMLDRQTDRKIRIGRKNAGLPKSGVIADWLVRDMMRFQPVAKDTSGKPLNNSKANSTEYRMLQRALALFGGEKERLTPYFRQMNLTGGNNPHPFLHETRWESHTNILSFYRSYLKARKAFLQSIGRSDREENHRFLLLKEPKTDRQTLVAGWKSEFHLPRGIFTEAVRDCLIEMGYDEVGSYKEVGFMAKAVPLYFERACKDRVQPFYDYPFNVGNSLKPKKGRFLSKEKRAEEWESGKERFRLAKLKKEILEAKEHPYHDFKSWQKFERELRLVKNQDIITWMMCRDLMEENKVEGLDTGTLYLKDIRTEVQEQGSLNVLSHVKPMRLPVVVYRADSRGHVHKEEAPLATVYIEERDTKLLKQGNFKSFVKDRRLNGLFSFVDTGGLAMEQYPISKLRVEYELAKYQTARVCAFEQTLELEESLLTRYPHLPDKNFRKMLESWSDPLLDKWPDLQREVRLLIAVRNAFSHNQYPMYDETLFSSIRKYDPSSPDAIEERMGLNIAHRLSEEVKQAKEMAERIIQA

SEQ ID NO: 1363 - protein, 1199 aa, Artificial; identical to SEQ ID NO: 1328
  Synthetic

SEQ ID NO: 1364 - protein, 1057 aa, Artificial; identical to SEQ ID NO: 1344
  Synthetic

SEQ ID NO: 1365 - protein, 1165 aa, Artificial
  Synthetic
MKNQNSLPSNPTDILEDKPFWAAFFNLARHNVYLTVNHINKLLDLEKLYNKDKHKEIFEHEDIFNISDDVMNDANSNGKKRKLDIKKIWDDLDTDLTRKYLLRELILKHFPFIQPAIIGTQTKERTTIDKDKKRTSTSNDSLKQTGEGDINDPLSLSNVKSMFFRLLQMLEQLRNYYSHVKHSKSATMPNFDEGLLKSMYNIFIDSVNKVKEDYSSNSVIDPNTSFSHLIYKDKYGEIKPCRYPFTSKDGSINASGLLFFVSLFLEKQDSIWMQKKIPGFKKASENYMKMTNEVFCRNHILLPKMRLEAVYDKDWMLLDMLNEVVRCPLSLYKRLTPADQNKFKVPEKSSDNANQQEDDNPFSRILVRHQNRFPYFVLRFFDLNEVFTTLRFQINLGCYHFAIYKKQIGDKKEVHHLTRTLYGFSRLQNFTQNTRPEEWNTLVKTTEPSSGNDGKMVQGVPLPYISYTIPHYQIENEKIGIKIFGEDTAVDTDIWPSVSTEKQLNKPDKYTLTPGFKADVFLSVHELLPMMFYYQLLLCEGMLKTDAGNAVEKVLIDTRNAIFNLYDAFVQEKINTITDLENYLQDKPILIGHLPKQMIDLLKGHQRDMLKAVEQKKAMLIKDTERRLERLNKQPEQKPNVAAKNTGTLLRNGQIADWLVNDMMRFQPVKRDKEGNPINCSKANSTEYQMLQRAFAFYTTDSYRLPRYFEQLHLINCDNSHLFLSRFEYDKQPNLIAFYAAYLEAKLEFLNELQPQNWASDNYFLLLRAPKNDRQKLAEGWKNGFNLPRGLFTEKIKTWFNEHKTIVDISDCDIFKNRVGQVARLIPVFFDKKFKDHSQPFYRYNFNVGNVSKPTEANYLSKGKREELFKSYQNKFKNNIPAEKTKEYREYKNFSSWKKFERELRLIKNQDILTWLMCKNLFDEKIKPQKDILEPRIAVSYIKLDSLQTNTSTAGSLNALAKVVPMTLAIHIDSPKPKGKARNNEKENKEFTVYIKEEGTKLLKWGNFKTLLADRRIKGLFSYIEHDDINLEKYPLTKYQVDSELDLYQKYRIDIFKQTLDLEAQLLDKYSDLNTDNFYQMLIGWRKKEGIPRDIKEDTDFLKDVRNAFSHNQYPDSKKIAFSRIRKFNPKELILEEKKGLSIAKQMYEEVEKVVNRIKEIELFD

SEQ ID NO: 1366 - protein, 1165 aa, Artificial; identical to SEQ ID NO: 1365
  Synthetic

SEQ ID NO: 1367 - protein, 1119 aa, Artificial
  Synthetic
MKEEEIPVVSTYNKDDKHFWAAFLNLARHNVYITINHINKLLEIREIDNDEKVLDIKALWQKVNKDLNQKARLRELMTKHFPFLETAIYSKNKEDKEEVKQEKQATAQSFKSLEHCLFLFLEKLQEARNYYSHYKYSESTKEPVLEKELLKKMYNIFDNNIQLVIKDYQHNKDINPDEDFKHLDRTEKEFNYYFTQDKKGKITESGLLFFVSLFLEKKDAIWMQQKLTGFKDNRENNKQMTHEVFCRSRILMPKLRLESTQTQDWILLDMLNELIRCPKSLYERLKGEDRKKFEVPFDSTDEDYDAEQDPFKNTLIRHQDRFPYFILRYFDYNEIFKNLRFQIDLGTYHFSIYKKLIGGQKEDRHLTHKLYGFERIQEFTKQHRPDDWKAIVKDFDTYETSEEPYISETTPHYHLENQKIGIRFKNDNDKIWPSLETNGENNEKSKYKLDKQYQAEAFLSVHELLPMMFYYLLLKKEEPNNDKKNASRVEGFIKREIRDIFKLYDAFANDEINNIDDLKKYYKDKNVEIRHLPKQMIAILESKPKDMAKEAKRKQKEMVKDTKKLLATLEKQTQKEKEDDGRNVKLLKSGEIARWLVNDMMRFQPVQKDNEGKPLNNSKANSTEYQMLQRSLALYNKEEKPTRYFRQVNLIESSNPHPFLKWTKWEECNNILTFYHRYLTKKIEFLNKLKPEDWKKNQYFLKVKEPKTNRETLVQGWKNGFNLPRGIFTEPIREWFERHQNDSEEYKKVEKLNKAGLVTKVIPLFFKEEPFKEDTKKEINDWVQPFYSFPYNVGNIHKPKEEDFLHREERIELWDKKKDKFKGYKEKIKSKKLTEKEKEEFRSYLEFQSWNKFERELRLVRNQDIVTWLLCKELIDKLKIDELNIEELKKLRLNNIDTDTAKKEKNNILNRVMPMELPVTVYEVNKAGNIIKDKPLHTIYIKESKTKLLKQGNFKALVKDRRLNGLFSFVKTNSEAESKRNPISKLRVEHELREYQKARIEIIKDMLALEKTLIDNYNSLDTDNFHNMLTGWLELKGEVNKAKFNNDVRLLTAVRNAFSHNQYPMYDENLFVNIERFSLSSSKILESKGLSIAVKLKEEVSKIVKKIQEEEDGKKEKET

SEQ ID NO: 1368 - protein, 1119 aa, Artificial; identical to SEQ ID NO: 1367
  Synthetic

SEQ ID NO: 1369 - protein, 1253 aa, Artificial; identical to SEQ ID NO: 1347
  Synthetic

SEQ ID NO: 1370 - protein, 1057 aa, Artificial; identical to SEQ ID NO: 1344
  Synthetic

SEQ ID NO: 1371 - protein, 1199 aa, Artificial; identical to SEQ ID NO: 1328
  Synthetic

SEQ ID NO: 1372 - protein, 1081 aa, Artificial; identical to SEQ ID NO: 1329
  Synthetic

SEQ ID NO: 1373 - protein, 1128 aa, Artificial
  Synthetic
MEILTIPEVIKCRTLSDDPQYFGGYLNMARLNVLNISNHIAKEFKLPLLPEEAHLKNSFLCKKENKKIDWNHVYARTIRFLSVMKVFDAESLPKEEQKTIDWEGKDFASMCDTLNIVFSELQEFSNDYSHYYSTEKETKRKTTVSDELALFLRTNFKRAIEYTKVRFKGILNDEDYQLVVSKKMLETNHTITHEGLVFLTSMFLEREYAFRFIRKIHGLSGPKDNSFIATCEVLMAFCLKLPQEQFRSDNRRQAISLELMNELKKCPKVLYHVITEEWKQKLKSVPEELETKNLHYNTKKEAIIEFEDYDLYIESLTKQVRYNNRFSEFALKYIDETGIFSEFRFQIDLGKILVDEYLKNFNDERVQRCIIENAKAFGKLNDYTNETKVMSLIVNGPPLKSFDRFAPHYNIESNKIGISTHEVTAKLVPNSKGEPAKKLHQPLPEAFLSLHELPKIILLEYLQKGEPEKLINEFILVNNSKLMNMSFIEEVKNQLPKEWDKFQRRTNAKHELAYDENTLAFLLQRKQILNKTLLAYQLNDKQIPTRILDYWLNISDADEERAISNRLKSIKRDCMSRLKALSKFNENGNRNKIPGIGEMATFLAKDIIEMVVSEGKKRKITSFYYDKMQECLALFGDPDKKQLFIHIVTKELKLNDPGGHPFLDKLDLQKINSTTGFYEIYLQEKGHKMVPENNPKTGKVIYTDHSWMALTFYKIEFNDKVDMLMTVVKLPLKKLNIPFTLRQLSGKTNNTLKQWLNNLTQGKKRNDGKRPINLPTNLFDERLAELLRKDLDNKKIVYWPYANWNELFKTWWSSRNDGLQSFYNAEREYRIFDEKVNFYPNRKENFADYYQHALKLAFQKKQSKRILEQMYDQHLPDILFDQVEKTFRHTIAETEKEIRILQEEDHIMLLMLESLLDDGSKQQLKLSEIRTHLNRTTNIRQVVKGKLSFDDSGELIKDNTKPEIVRTVSVTDQRKKLHQLPKLIFDSRLPELLEYFPDEEIQMESLKKEFDTYNTTRQVVLNLSFNLEKMIIEKGRLDRINELLSSATGDLLTGHIGHKTYLTWLKNRGIIDNDTFIFMNMVQYCFSHNQYPQKKTMARLISRWDQHRFALQIEATYIQKIAGIIEDL

SEQ ID NO: 1374 - protein, 1168 aa, Artificial; identical to SEQ ID NO: 1357
  Synthetic

SEQ ID NO: 1375 - protein, 1140 aa, Artificial; identical to SEQ ID NO: 1356
  Synthetic

SEQ ID NO: 1376 - protein, 1057 aa, Artificial; identical to SEQ ID NO: 1344
  Synthetic

SEQ ID NO: 1377 - protein, 1057 aa, Artificial; identical to SEQ ID NO: 1344
  Synthetic

SEQ ID NO: 1378 - protein, 1081 aa, Artificial; identical to SEQ ID NO: 1329
  Synthetic

SEQ ID NO: 1379 - protein, 1140 aa, Artificial; identical to SEQ ID NO: 1356
  Synthetic

SEQ ID NO: 1380 - protein, 1168 aa, Artificial; identical to SEQ ID NO: 1357
  Synthetic

SEQ ID NO: 1381 - protein, 1057 aa, Artificial; identical to SEQ ID NO: 1344
  Synthetic

SEQ ID NO: 1382 - protein, 1199 aa, Artificial; identical to SEQ ID NO: 1328
  Synthetic

SEQ ID NO: 1383 - protein, 1149 aa, Artificial
  Synthetic
MMEKENVQGSHIYYEPTDKCFWAAFYNLARHNAYLTVAHINSFVNSKKGINNDDKVLDVIDAWSKFDADLLMGARLNKLILKHFPFLKAPLYKQTKKEASKQYKEENPSADKQKIEKESAKTAMANTLELENVRKILREFLQQLEDLRNHFSHYNYNSPDEKTEVKFDNSFCNKLYYVFDAALQMVKDDNRMNPEINMQTDFEHLVRLGPNGEISHSFKYKFIEPDGTINNNGLLFFVSLFLEKRDAIWMQKKIKGFKGGTENYMRMTNEVFCRNRMVIPKLRLETDYDNHQLMFDMLNELVRCPLSLYKRLKKEDQDKFQVPIEFLDEDNEADNQYQENANSDENPTEETDPLKNTLVRHQHRFPYFVLRYFDLNEVFKQLRFQINLGCYHFSIYDKTIGERTEKRHLTRTLFGFDRLQNFSVKLQPQHWKNMVKHLDTEESSDKPYLSDAMPHYQIENEKIGIHFLKTDTEKKETVWPSLEVEEVSSNRNKYKSEKNLTADAFLSTHELLPMMFYYQLLSSEEKTRAAAGDKVQGVLQSYRKKIFDIYDDFANGTINSMQKLDERLAKDNLLSGNMPQQMLAILEHQEPDMEQKAKEKLDLLITETEERIDKLNAQFKQKVRIGKRRAGLPKVGSIADWLVNDMMRFQPAKRSADNTGVPGSKANSTEYRLLQEALAFYSTYKDRLEPYFRQVNLIGDTNPHPFLHRVDWKKCNHLLSFYHDYLEAKKRYLSNLSPADWQKHQHFLLLKVRKDIQNEKKDWKKSLVAGWKNGFNLPRGLFTESIKTWFSTHADKVQITDTKLFENRVGLIAKLIPLYYDKVYNDKPQPFYQYPFNINDRYKPEDAHKQFTAASSKLWNEKKMLYKNAQPDSSDKIEYPQYLDFLSWKKLERELRMLRNQDMMVWLMCKDLFAQCTVEGVEFADLKLSQLEVDVTVQDNLNVLNNVSSMILPLSVYPSDAQGNILRNSKPLHTVYVQEKNTKLLKQGNFKSLLKDRRLNGLFSFIAAEGEDLQQHPLTKNRLEYELSIYQTMRISVFEQTLQLEKAILTRNEMLCGNNFNNLLNSWSEYRTDKKTLQPDIDFLIAVRNAFSHNQYPMSTNTVMQGIEKFNIRTSRLAEKDGLGIASQLAKKTKDAASRLQNIINGGTN

SEQ ID NO: 1384 - protein, 1300 aa, Artificial
  Synthetic
MNNSVNSFALVNESSGRGKYVAGTYFEIAIHNFFKTIDFVLRRVNIRKSDKQWADGFAHLGNWTDERMGKVLEQLALAEMSPTQLSRLSRLLYHHFPFFSPIMADAADHQVYLRVNEIKEIEQEITESDKKIKKNPVNKELVQSINEARIRLKAAHNSLERQLASTTAKEVLAKLAVMAYAMNFYRNQYSHKCHFETLNEKTLQEENEQNLAFWLEVIFKGARSIILDRKEHSQEDTKFLTQDGNLHYNVNKSKKSTRNPNFYFSPGKKNGQKWLITDFGRYYFCSLFLQRSDAIEFGKNVGLYTDSPFKLSNEERNKLQLEEKHRALEEQKIVDKEGDGHKVNPRIISNTESVQNTIIQEMLDVYRLRIPREGRIDAMMNEGTLIMDILNELRRCPKSVYETFSPADKKKFNKVGTNPDGSKSEMKLIRYHDRFPYLALRMIDQTNAIGDIRFHLRLGLFRYRFYNKKTISGELVNPVRTIQKEVNGFGRWQDVEEGRKSLYGKYFQNRIINDDGLEQPVPDSLQSLPYITDWHASYNIHACRIGMAWNLSQMEDALYLPPLTFDDGNNRNRKAPLDMPAPMCYMSIYDIPALLFYNYLYKRYHAERYTSAGILTAESIIKNKYNALNVFFEFVTSGADLNSIKKKQIDLGLADNELPDKIRCFIGTKKLFNIDGKPLLDKNTREQLLKEWRPEAELRRHTINRLKAIIEEDTYRIESLGKKREKIEVGGRNNRYGRKGRADIRPGAIARYITKSLMLWQPAMPVAGGGKLTSANHQALAKYLEEYGSNDESLNNLHSIFQRAGLIGGTHPHPFINKVLKQKPMSILQLYTFYLEVEKAYAERMLAEVKTNTDDITLPPFAHPNGLRWSTTLTEAAKRYTTVPNEQNDASTDSHRAVMSLPDGLFTSHIISLLRQALPHNSELEPMRKILEGNNNMLGAAYIIRFWFDQVEGDAPQAFYNNDGDQYRRFYKTLSLLNPHRMKNRQLIPDYFSESEIKELLQIMKKKNRDQLRSAVMKAYGLKENKAEDIKQRQNAFLEMLHDVSDSEQALHRYRIQDICLFLSGRSFLVDILTKSMGGNIEKKTLEKAKEMHLRDFGFDNEFEFLDNAKIPYVFKIGNMTISMPAMSFKNYGTIFRLLGDERLKQLLEGLSAMNIYEVTFNDLTTEFASYDQKRIEVMKLAQDIEQMAIAGNIYLNDPDDPRFYVKDKDGNSTNLAMRNNFNSLVHLLSHYFEFADFFTELRNTIAHNRYPKKYKDAEDKNRNPYSEDLPAAGYEGVLPPNIFASMKQILEDKVSEKTN

SEQ ID NO: 1385 - protein, 1310 aa, Artificial
  Synthetic
MGKDYKTQQPKKVRRQQKTNFSINLTGKHVFGAYFNMARTNFVKTINYIMPIAGVRGSYSENQINKMLHALFLIQAGRSGELTNEQRQWEKKLRLNTEQQTRLQKLLFKHFPVLGPMMADVADHKAFLNKKKSKVQTEEDKFAQLKGVSLADCLDVICLMADALTECRNFYTHKAPYNAPSQLAAQYQHQEMIAKKLDKVVVACRRVLKDREGLSVNEVEFLTGIDHLHQEVVKDESGNVKKKNGKVMKTFVEYDDFYFKISGKRLVKGFTVAVKDDKPVNIDTMLPALSDFGLLYFCVLFLSKPYAKLFIDEVRLFEFSPFTDTENMIMSEMLSIYRIRTPRLHKIDSRDNKATLAMDIFGELRRCPIELYELLDKNMGQPFFHDEVKHPNSHTPEVSKRLRYNDRFPTLALRYIDENELFKHIRFQLQLGAFRYRFYDKEDCIDGIVRVRRIQKDINGYGRLQEVADKRIEKWGDLIQKREEHAVKLEHEELYIDLDQFVEDTADSTPYVTDRRPSYNIHANRIGLYWEDSQNPKSYKIFDENGMYIPELVVTEDEKAPIKMPAPRCTLSVYDLSAMLFYEYLHEQQDVDTPSAERIIIDCEDDYRRFFKAVAEGTLTPFKKTKEFREYLEREYPKLRMADIPEKLQLYLTSKGLTHDNKPETVHERMIRLTREHLEEREIHVQRRLEHYQEDRKMIGEKENKYGKKSFADVRHGALARYLAQSMMEWQPTKLKDKEKGHDKLTGLNYNVLTAYLATYGHPQVSEEDFVSLTLEQVLTNAHLLGGNNPHPFIGKVLALGNRNIEELYLHYLEEELKHIRSRKQSLLSNPSDKALSALPFVHYDRVRFHERTDEEMRALAARYTTIQLPDGLFTPYILEILKKHYTENTELQNALRQDATAKINPTNNAAYLITLFYKTVLKDDAQPFYISGKAYTRNKDGEKAEAFSFKRSYELFSVLNNNKKKTFPYELLPLFLTSDEIQERLSAKLLDDNGNPIPEAGKRGKPATDIQGNTIWQRQIKQKINGYVNSLSDKDLKISMNQSWKKKEEERAAKREAMQSRLTKQINEVKGNERTLRRYKTQDMVLFLMAKELFATIISDQGNEVNWKQMRLSKVCNEAFLRQTLTIRVPVTVGNTTIYVEQENMSLKNYGEFYRFLTDDRLMSLLNIIVETLKPNEDGELVIRHTDLMSELASYDQYRSTIFKLIQNIENLIIKENAALNDPDADGFWVRKDLPKRNNFASLLELLNQLNNVDLTDDERKLLVAIRNAFSHNSYNIDFSLIRDVKHLPEVAKGILQHLQSVLGVEQTK

SEQ ID NO: 1386 - protein, 1113 aa, Artificial
  Synthetic
MESLIQQEENKARNLIDDPQYFGGYLNMARHNIFSINNHLASYFGTSGLSNEEQIPDSFLLSADKRRNQETKELIKENLLFERTLRFMPIFRIFDTERLPKEVRLNTENMEKDFDEMRKCLKQVFSELNIFRNDYTHYFSTNTETTRKLQVTPELEEFLSRSFKLAIAFTKQRMRDVLKEEDYSLVEKKVMVLPEERVITTEGIVFLACMFLEREYAFQFIGKVVGLKGTHRNEFIATREVLMAYCVKLPHDKFISEDSKQALILDIANELNKCPLTLYDVITEDGRKQFRPELTDDAKKSVIENCINEDLEVDYDEYIQILTKKVRYKNRFPYFAFQYIEETKLLDNFRFSIDLGQFVLAEYEKRMAGEPTSRIVVENVKAFKYLKEVTDEDVVLGLMKSNPPSNRFLQFSPHYNSDNNKIGISSKPQTSVVKSKGKIDSKIEYKIKQPLPRAFVSIHELPKIILLDYLSKGSVVKIINSFIRTNKSIILDVDKIKEIKEKLPNNEVWFPFRRMTDSKKHSAYSEKQKAEILRRKKLLNEILSSYSLNIKQIPSRIIDYWLNIIDVRKERSFSDRIKLMKRDCADRYKAVKRNEKDKTVAIPKIGEMATFLAKDIVAMIVDEDKKSKITSFYYDKMQECLALYANIEKKNLFIHLVTNELKLNEKGGHPFLKRINLNSITRTKELYEIYLSEKAYKLNSKENDESWMSMTFYHLEWNEKAKKKMTKVVYPVNDEQIPYTIKQWNKPQQPLFDRFTNEQGKSSDWVRLKPLDLPTNLFDEEICVQLRSRLQEAKIPFDNISNYSELLKLWWKSRDDSTQPFYLLERQYNIYDESVRFTLNSKNKFKDYYQAALKKVFNQKKAEREAKRRFNKRLPDIQFKDVERVFKHAIAETEKQIRIIQEEDRIMLLMLEKLMDDQQLKLGKAETLLSSTVPVKQKIGDKTNSSRVIVAQRKQKHYTVLRKYQYDRRLPELFKYTTEKEELKLEWLEDELKAYNKGKLKVFDLVFSLEKRIIEVAKQDIIALLDKSGSNDSKFNVDHKPYIKWLENMELINSKEAGFMKKIRNSFSHNQFPECQTVELMISLKSDIPIATQIVNEYERLILRISSQIEKMK

SEQ ID NO: 1387 - protein, 1133 aa, Artificial
  Synthetic
MEKELIVNENRERTLKDDPQYFGGYLNMARLNIFNISNHIAKRFGFTILPNEERISSSFLCNKALKNADWNHIHSRTKRFLPIIKVFDAESLPKTEYDFLMWEGKNFALMTDTLKSVFSEIQEFRNDYSHFYSTEKGTIRKTKISPQLASFLEVNFKRAIEYSKIRLKDVLREEDFNLVERLKVCNNGSEITTEGLVFLICMFLEREHAFQFIGKVKGLKGTQYPSFIATRETLMSFCVKLPHDKFVSEDPKQSLILDIVNELNRCPKTLYEIISEEDRKQFRPELDIKSVDNLLKNSGKEELLDTMEFEEYMESLTKRVRHSNRFPYFALRFIEEMKLLNNMQLHIHLGKFELQKYDKQLNNEPFERAIIEDAKAFGYLKDFNDENDIKGEIVSGKDSEGFAQFSPSYFLKYNKIGIRYKRDIPHLIVDKNNSKGAYNLKQPLAKAFLSAYELPKIILMEYLQKGRAGELIDDFIQLNDNKIMTWDFIENIKSQLPDWKTFNKKSFGLKDKKGYQTEELKELNTRKNQLNKLLAPEGLNHNRIPERITDYWLNIGDVKKKRSFSDHIKLMKREGMERLKQLEKFKKEGKGKIPKVGEMATFLASDIVNMVINEERKNKITSFYYDKMQQCLALYADSEKKALFIQIIKELKLNEEGGHPFLKKIDLQKISKTSQLYELYLTEKVNKPIREEVFKYDRKKGYKVTKIILRDKSWMGEMFYTTEKSEKTGKDITIVRMPENKTEIPFTIRRWEEKQKTDLKVWFHNVTKGKDKTKDGPKAISLPTDIFDDEICTLIKIQLDKINVKYKENLKYNELLKLWWWKSREDDVQNFYHSKRLYKVYDEEINFTPDTKSTFVEYYEKALNSAFEKLSKARKKERKTHRALPDINKKEVEKVFKRAIGETEKDIRILQEEDRISILMLEMLMDNATLKLKNISYLLNDTTRIQQSITAHLSFDENGESIKEGTKPTITKTIIADRKQKNYTVLRKFIFDRRMPELFEYYASNEVALDWVTDELRAYNTAKQYVFDNVFNLEQKLIEKDETGIKAMYTNKEGTPITGNIQYKPYVRWLENKGLINKNQKRFLTMTRNCFAHNQFPQKKTVLRIVPNLTDNNIALQIADAYKNITDEILTKL

SEQ ID NO: 1388 - protein, 1081 aa, Artificial; identical to SEQ ID NO: 1329
  Synthetic

SEQ ID NO: 1389 - protein, 1199 aa, Artificial; identical to SEQ ID NO: 1328
  Synthetic

SEQ ID NO: 1390 - protein, 1090 aa, Artificial
  Synthetic
MNIPALVENQKKYFGTYSVMAMLNAQTVLDHIQKVADIEGEQNENNENLWFHPVMSHLYNAKNGYDKQPEKTMFIIERLQSYFPFLKIMAESQREYSNKKNKQNRVEVNSNDIFEVLKRAFGVLKMYRDQTNHYKTYDEKLIDGCEFLTRTELPLSGMINSYYTVALRNIKERYGYKTEDLAFIQDNRYKFVKDAYGKRKSQVNTGFFLSLQDYNGDTTKKLHLSGVGIALLICLFLDKQYINLFLSRLPIFSSYNAQSEERRIIIRSFGINSIKLPKDRIHSEKSNKSVAMDMLNEVKRCPDELFTTLSAEKQSRFRIISDDHNEVLMKRSSDRFVQLLLQYIDYGKLFKNIRFHVNMGKLRYLLKADKKCIDGQTRVRVIEQPLNGFGRLDEVEVLRKQENGTFGKSGIRIRDFENMKRDDDNPADYPYIVDAYTHYMLENNKVEMYISKDDNPAPLLPGIEDDRYAVKTIPSCRMSTLEFPAMAFHMFLLGSERTERRIKDVYDKYKKLFMAMHKEEVTAENIASFGIAERDLPKKILDIINGNAQGKDVDAYIKATIDDMIADTEHRIKKLKDDRKAVRSADNKMGKRCFKRISTGKLADFLAKDIVMFQPSIYDGENKITGLNYRIMQSAIAVYDSGDDYEAKQQFRLMFENAQLIGKGITEAHPFLYKVFARSVPANAVDFYERYLIERKYYLTALFNEIKKGNKVDIPFIRRNQNKWKTPVMKTLGRIYNEDLPVELPRQMFDDEIKSHLKSLSQMSGIDFDNANVTYLIAEYMKRVLGDDFQNFYQWNRNYRYMDMLKGEYDSKGTLLCNFTSVEEREALWKEREDRSGSYRKLATKKIKSNRLTRNASTDEVNSILDKRLSNSRNEYQKDEKIIRRYKVQDALLFLLAKKTLTEMADFDGNKFKLKEIMPDTEKGILSEIMPMTFTFEKGGERYTITSEGMKLKNYGDFFVLANDKRLCKLLKIVGSNSVSKEDIMEEFKKYDQCRPEIASIVFNLEKWAFDTYPELSAKVDREEQVDFKFILNVLLNKKNINNEQSYILRKIRNAFDHNNYPDKGLVEIKALPEIAMSIKKTFGEYAIMK

SEQ ID NO: 1391 - protein, 1324 aa, Artificial
  Synthetic
MATFRFTDKSVSATYYNMARDNFHQTMVEILSKVGVKGEMEQKIDNQLDELQKDLENPQKESKFKLSNEKQVKLRKLLFEHFPILGPIMASVLFRNLNKSDNKQLQTKKSNVVDGDVHDVSLSECLKVLVVLAKCLTDTRNYFTHYNPFNSQEALCKMYERQKKVSAYLDQVFTASRRINKNRKGLTSVEMQFITSEAYKALKDDNDHFILDEKGRKKIGKNRDYYFSIVGESFIHKEDAQFIQKVFDGVQIFEADSKNNALSDFGLLYLCSCFISRHYARLFVDKAGLFTHSPYSRINNGVLNQATKENNIILEMLSIYRIRMFKGNRLDIHDTKTSIALDMLNELNRCPMPLYEHLSPEGKMAFEDKVTRPNENTPDVSLRLRHTDRFPTLALKMIDATDILPKIRFQVQLGTYRFRFYEKDCIDGNRQLRCLSKEINGFGRLQDIEELRKRVWENTTSGEQEENKIQVKEYVSTLLEDEETTLDLLQPLGDKPGNNPYITDHQASYNIHNNRIGLYWESTNPAKNHYLCGNGLTYLPTLNYKVVDSGGKILQKADIDQPSPLCSLSTYELGSLLFYHFIYKTYGGKKLGMRTAEQIIIDKYNNLIRFFKEIEAHGRSSFYATVPGKKTDEELQMKLDDYALSISEIPDKLRIYLRNMFVTYPSSTSSKLVGERLVKVYWRLQHFKEDRKKIGDKDNKYAKKGYADIRHGQIARYLAESIVDWLPEAARARTILTGLNFNKLQAALATFDGSEGHQFSDIQFLMRQAHLLSQECEGEGLAQVTIEGHPFLNQIIDMNPQNIEVFYSRYLEHEKRHLTKFLEVEVYNKKNNSYKYLPIDNRYIPTGKEVFTFKDDIDLRAIPFIHPNRDKWKKRNDVFCKQLAKRYQEHIELPDGLFTREVIKLLRLAPECEVMFDNGFKEEDCNMSHLVNLYLERVLKDQSQSYYGLGDKRFYRSYRLFDILYGKVVRNEQLPYYLSCDEIMEKIGSKEGRNKVKKEIDSLVARMTNRDRGNCKTLEEAKKKKEDILVDAINQVKKNEKTIRRFKTQDIILFLIAKQVLIQTDETIKNNAQSQSEKFVADESKTICLGSTNPISYEQKEDLESKHRSGLARMRLADVFEGDSLNIPLDQTYYHTISWILKDSDGNEVKDAKGSRIKVVRTVRITQEDMSIKNYGRIFQILSDKRLDDLLKMLIQYVESNAPINGNSYSIAYNDVTSEFANFDHLRPEVFKEIHRLESEAFPKLEDKQSELTYSFNGLMGLLFQENAAKSIINIRNAFVHGSYRVNNIIWEGPDSQSAELVAPNVSRKMKDRISPKDSKETKY

SEQ ID NO: 1392 - protein, 1300 aa, Artificial; identical to SEQ ID NO: 1384
  Synthetic

SEQ ID NO: 1393 - protein, 1162 aa, Artificial
  Synthetic
METTENLKSYNCQNSFKRIFDFKGEIAPIAEKACRNFEVKAKNKVNREQRLHYFAIGHTFKHIDTEKLFKKTLNEELREKIPTQFLALQAFDKSFCDELEKIIIDKDNKKKYQGIIPDIRNINSHYVHDFQNIRLDTLSSCMVSFIKESFELAITQTYLKEKEISYTQLIEQGNVDKVLVAFMHDKFYPLDDKGINLLEEAQRSLDEYKTIREKFKSLSKEDAIDSLLFVEVDNDFDWKLYGVHPVFKITTGKYLSFYACLFLLSMFLYKSEAEKLIGKIKGFKKQEKTEEKSKRRIFSFFSKKFSSQDIDSEENHLVKFRDLIQYLNHYPLAWNKELELESQHPAMTDKLKAKIIEMEIKRSFPAYSNNERFHVFAKYQIWGKKYFGKSIEQEYIEQSFTEKEVEGFNYEIDASPELKDANEKLDKLKAVTGLYGAKKDRNTKEIKKTEGIINRIIREKAPNPVKEKLKNRIEKNLLFVSYGRNQDRFMDFAIRYLAETKYFGEDAQFKTYRFYSTEEQDDELLKLKETQSKKEYDKQKYHQGKPVHFTTFKDHLEHYESWDTPFVIENNAVQVKLTFATEIKKIVSVQRGLMVYFLEDALTKESDKIENAGKLLLEGYYAFHQKEFSQCKSVLEQSSSISPEEKTAFKKLLPKRLLYHYSPAVQNGKPQNTLVLLLERATDAEKRYGNLLTKAKAEGNYDDFVKCNKGKQFKLQFIRKAWHLMFFKERYMQQAAFWGHHKRFHIAKDEFNDFSRFMFAFDEVPHYKVYLAEMFEKKGFFDNPGFKTLFRDGVSLDDLYLKTKKAYEAWLSKQVIRVQEENKYALGNYEHFFDDEMFYINISHFINYLEAKSGLKRDERGLMKFTALDNVKFLIPEYYYADKLEKAEYKTCGKLYNKLKSSKLEDALLFEMAMHYLKIDKQIVQKAKSHATEILKQDVEFDIRDLNSNHLYHLMVPFNKIESYIGLIKLKEEQEESKFKTSFLANIVSYIELVKEKKEIKSIYKTFSANPAKRILTFDELNKIDGHLISSSVKFTKLALTLEQYYVNKCMLSVIADHRIEYGEIKDLKKYYNTKTRNKAFHFGVPESSYDNIISKIEQEFVRNEIKSTQPHKFEELSKPLKSICSLFMDTIHNNYFDPIERDGKKKHKDAEQKYFDTVISK

SEQ ID NO: 1394 - protein, 1171 aa, Artificial; identical to SEQ ID NO: 1349
  Synthetic

SEQ ID NO: 1395 - protein, 1103 aa, Artificial
  Synthetic
MENKEQNKRTWDDDPQYFGSYLNMARLNIFNISNHLAEKFGLTVLDDEGKITISFLGDKENKKYKTKQGLIYSNLTRYMPIAKVFDFEKLPENERNKVKNNFGKDFNRLSDTLKIVFKELNEFRNDYSHYYSTEKQDKRKLEISSELNDFLILNFSRAVSYTKERFKDVFSDEDFKIASQTIVVNNDKTITQDGIVFLTSMFLDRENAFRFINKIIGLKGTQTNEFKAKREVLLFFCVKLPHDKFVSENTELAFSLDLINELNKCPKTLYNVITEEGKQLFRSTLETEQIKNVLQNSVPDTIDDYENYIESITKKVRNENRFSYFALKYIDQKELFKNWRFQIDLGKIVLDEYYKQLNGKDEVRTVIENAKAFGRLQDLNDEENTLKKINTGENKTCFDQFAPHYNFDDKNNKIGISKNEITSKFISKKTDKKVKFNLLQPLPEAFLSIHELPKIILLEYLEQGKTEQLINDFIEINNSKIINREFIETIKSKLSEFNVFHKRSQGRKEKRAYSEGALKYLLERKEKLNRILAEHNLNVKQIPTRILDYWLNIEDVQEKTAISGRIKLMKRDCMDRLKAIKKKNPPKIGEMATFLAKDVVDMIIGEEKKKKITSFYYDKMQECLALFADKEKKELFIQICNELKLNNETDGHPFLKNINLNDFRYTSDLYKKYAEEKRLYLENNFYKKGWNEKVKKDLTMVVLPHDKSKIPFSIRQLEKEKTSFDKWLQYVTKGKETTDKKKPVDLPVNLFDDTLKELLKAELSKNNIEFDNDANSNELFKTWWNQCRKDDVQEFYTAEREYTFEKGKLTFKINSKSKFEEYINQEFIENIFKSKSQKRENENNTGRKLPPLRIKEVTKNVVKKIGNTEKEIRMLQEEDRLMLLMFEQLTKKELNLKLKNTDELLNEQIEIRENISGKLVFDDFGQLIEEKKSQKTIAKNIVETRKRKEYSVLKKYVFDRRLPELFEYFEDEDIPMEKIKLELDSYTKAKDIIFDLAFKLEEAIIKKDESGIKELNKDPEGNIQSGNIQHKPYLHWLLKNDLISEKEFTFMNMVRNTFSHNQFPQKKTMELFIRHWDKQNLAMQIAEVYNQKIVEIAAKCKDM

SEQ ID NO: 1396 - protein, 1129 aa, Artificial
  Synthetic
METNQQTHENRRRTLTNDPQYFGGYLNMARLNIYNINNHVATDFKRKPLPEEGQIPDALLCNKTIKNLNWNHVHTRALRFLPILKVFDSESLPKDERKNSDTEGKDFTSMSDTLKVVFSELQEFRNDYSHYYSTEKGDSRKLIVSPELANFLTINFKRAITYTKARMKDVLTDADYALVENLQMVATDNKITTEGLVFLIAMFLEREQAFQFIGKIQGLKGTQFNSFIATREVLMSFCVKLPHDKFVSENQEQALTLDIINELNRCPKTLYSIITDKEKQQFRPELDAQGIENLIANSTNNEERERILDEIDYQDYIEGLTKRVRYNNRFSYFAMRYIDEKNIFDKLRFHIDLGKYEVDNYTKQFAGEQAERKVLENAKAFGKLSSFTDPELSQQRIDKQQQTAGFEQFAPRYHADNNKIGLSNKENIATLTAKSKAGSKVEHNLKQPLPQAFLSLHELPKIILLEYLQKGQAEELINDFILLNDTRLMDITFIEEVKSQLPDGWNEFNKRSDAKKKKAYSDSTLRYLHQRKTILNTILSKYNLNDKQIPTRILNYWLNIKEVDDKRSVSDRIKLMKRDCMTRLKAVEKHKLNKSVKIPKVGEMATFLAKDIVDMIVSEEKKKKITSFYYDKMQECLALFTNAEKKALFIHIVTNELKLLENDGHPFLQNINLQQIRKTSQFYQAYLIEKGNKMVPRLNPKTNKTSKVDESWMMKQFYVKEWKEEIAKQLTVVKLPANKSRIPFTIRQWDEKEKYDLNTWLRHVTVGKNNDGKKAVNLPTNLFDEALCDLLREQLDTKIVNYNPAANYNELLKIWWKTRNDDTQQFYQSEREYNIYNEKVRFKIDSSAHFADYYKNALSRAFTRLKAERETARQSNKRLPPLEYKQVERVFKNTIAETEKEIRMLQEEDRMAVLMLERLMDNSPNLRLSKIETLLNDTTPIREKISATLSFDASGERISGKSNPTVTKTLVAERKQKNYTELRKYRYDRRLPELFEYVQADEIPLEWLLEELSAYNNAKQQVFDTVFTLEKKIIGTDPDGLKSLFTGANGELQTGNIQHKPYVQWLTNKGLINKEEKQFINMVRKCFSHNQFPQRKTMELLIPAWNEKKLALQIATVYNQLIADLTNKI

SEQ ID NO: 1397 - protein, 1094 aa, Artificial; identical to SEQ ID NO: 1358
  Synthetic

SEQ ID NO: 1398 - protein, 1047 aa, Artificial
  Synthetic
MEEQFLQKERNMGDNPYYFCHFINMAHHNVNLILEEIYNSVYEKYTQDKEENIKAICNSMISKSRKNPDEKAKMMNMCIRHFPFLDYYKEKDQNSDVLTILLNQFLVPLHGLRNQFSHYKHPQEAYCISGFDLLFEQAKTGAQMRMKYSDEDISKVKSKVVNHDSILTERGILFFICLFLDKRNIYLFLSKIKGFRDRRPDEKYKSATLEVFSQYYCHVPYRKLDSSDVALDMLNELNRCPKALYDVLSDEDRERFIVDNVENADNRDEISDEDDEEMPRSVMKRSDDRFPYFALRYFEKQNNLDEISFHLYLGRKEAKPAHEKVINGEMRTHKILKDIHVFGRLENYRNEEICNAIKNREDIEFYAPSYRIVENRIGLLLRRQNDFTLEEANEEKIFEGNLCPDVILSTHELGALFFYNYLHKKGWIESAPYLYIRNFISDFKRFIEDIKNGKLTPVESEDDFYLIKKKKRDETKDNDKKSIAVQERRREKLKEKLKGYHLEPDWIPDACREYMLGYKADQKDYYTKQRFCSMKKETDSRIKQIEAIRKREDNSIIRQTRVGEIAQELARDIVFLIPPYKNEKGADTKINNMEFDVLQKMLAYFPLNKKDIYPFLKNIRNWDKHPFLKYTLHTEHQSLLDFYQDYLNCKKRWISKNIRYDKQKGNYLVDANKTEQECRYFLKTDKLRTAKEKEYFEEPDKPVYLPTGFFVDPIVEAMRKNGYELKENSNIVGCLKIYFVSKIQPMYDLSRYYTYYDGKEERSMQLDDLKVFIKEKFGNKRTDDNTIRFLKKAAKRIRENESEILVRQMDDCALFLMVNDLLEGGKFNDEDIENIGYNKHHNLLDHEYDMCETIYGRKVTARLPIKRYGEFRRFMKDRRLQNLVKYYPGDHETPIPSGIPESGKAMEKNKKYTYSNLCDELEIYDKERDNVLNLIYEVDKILVDHFPDKIMKEEDGYYEHYHCLDFAKKEFGLESDVELLSQDNFKDLRNALYHNQIPYNDWVADKISKDTEEPMYVRRIFSFIRTVYSRLLDQIKIKIEKDEYKCK

SEQ ID NO: 1399 - protein, 1129 aa, Artificial
  Synthetic
METNQQTHENRRRTLTNDPQYFGGYLNMARLNIYNINNHIATDFKQATLPEEGQIPAAFLCNKTIKNLNWNHVHTRAVRFLPILKVFDSESLPKDERENSDTEGKDFTSMSDTLKVVFSELQDFRNDYSHYYSTEKGDSRKLIVSPELANFLTVNFQRAIAYTKARMKDVLTDTDYALVENLQMVAPDNKITTEGLVFLIAMFLEREQAFQFTGKIQGLKGTQFNSFIATREVLMSFCVKLPHDKFVSENLEQALTLDIINELNRCPKTLYSVITDKEKQQFRPELDAQGIDNLIANSTNDDERETILDEIDYQDYIEGLTKRVRYSDRFSYFAMRYIDEKNVFDKLRFHIDLGKYEVDNYTKQFAGEQAERKVLENANAFGKLSSFTDPELIQQRIDKQQHTAGFDQFAPHYNADNNKIGLSTKENIATLIAKSKASSKVEHNLKQPLPQAFLSLHELPKIILLEYLQKGQAEELINDFILLNDTRLMDITFIEEVKSQLPANWDEFSKRSDAKKKKAYSDSTLKYLRQRKTTLNTILSKSNLNDKQIPTRILNYWLNIKEVDDKRSVSDRIKLMKRDCMTRLKAVEKHKLNKSVKIPKVGEMATFLAKDIVDMIVSEEKKQKITSFYYDKMQECLALFANAEKKALFIHIVTNELKLFENGGHPFLQNINLQQIRKTSQFYQAYLVEKGNKMVPRLNPKTNKTSKVDESWMMKQFYVKEWKEEIAKQLTVVKLPANKSRIPFTIRQWDEKEKYDLNVWLQHVTVGKNKDGKKAVNLPTNLFDEALCNLLREQLDTKIVNYNPAANYNELLKIWWKTRNDDTQQFYQSEREYDIYNEKVRFKIDSSTHFADYYKNALSRAYTRLKAERETARQTNKRLPPLEYKQVERVFKNTIAETEKEIRMLQEEDRMAVLMLEQLMDNSPNLRLSKIETLLNDTTPISEKISAKLSFDASGERITDKSNPTATKTLVAERKQKNYTELQKYRYDRRLPELFEYVQADEIPLEWLLDELSAYNSAKQQVFDTVFALEKKIIQTEPDELKSLFTGANGELQTGNIQHKPYVQWLTNKGLINKEEKQFINMVRKCFSHNQFPQRTTMELLIPAWNEKKLALQIATVYNQLIADLTDKI

SEQ ID NO: 1400 - protein, 1168 aa, Artificial; identical to SEQ ID NO: 1357
  Synthetic

SEQ ID NO: 1401 - protein, 985 aa, Artificial
  Synthetic
MGAIENKHIFAAYANLAIDGLIKTLNFIAKKLDTQKQLSSWDIKHVITLIDSIFDQNPQNNLEQVVEGYLPWIKPIIEMKTPKKGERQSDKLCIEYKTIITAFASLLNDVRNYYTHYYHDPICIYPGGYDIPSSLNCIYDSAINIIKERFQAEEKEMKHLRNYTLVNNNGLSEKGYAFFISKFLERKYSYLFLKKLSGFKRGDSLQYRLTLEVFTALSTKPPVERLRTTKDTKQDRALDILNELSKIPIELYQTLEPKYREMYNETLQPTDAEDPYGLPDRSRIRFRSRFEAFALHFLDKQADFKEIGFYTYLGNYFHNGYQKTRVDRETKDRYINFQLAGFCKNIQDISAKKLSEALNVKSIDISTDSIPDINSFEPYLVQSTPHYIVNGNNIGIKVLPEGKDTYPTIDEKGAKMPIADFWLSKYELPAMLFYTYLRNNNIHKSHCPLSVKDIIERSIHKSTKQKHPEERSELMLRRVMKAIFWTDSKLNEVERIKSQKSAFGKRQHEILKAGRIAETLVRDMLWLQPSKNNGRDKVTEPNFQAIQVSLAYFGIRRNDLTEIFTRAGLINSSNPHPFLAQIGTNYTSLIEFYIAYLKERKVYFSRIQKKILQGKLNIQCHPLRDLQREPNKPQEKEEAIFLPRGLFNEAIINCLKKSKLKQLIESPTREKSPALNVSYLIQNYFRTYFEDQSQEFYAQPRNYRLFDKLSPNKGKSKSYLSLEQRIKKMEELRPSKIPVAEANKLLEKEDRLYRKNYNEICDNESIIRLYQIQDILLFMMTKEYLPSDLYNRINKYKLENVKGILNERVSYLIDLNPLKIQGEDIKIKDYGKLFYIHHDTRINSLNKVLSKVKRNNSISSSVKIQPYENYKRECLDFEEAQIQIIPIIHSFEIAMVSMFPDLKKATPGNYYDFNELITEYEKRTKQKIDSSFLIKTRNMFLHDKYEAECIKEISDDLVYAKKIIAEFKMKIENIKLEDLSNDSSA

SEQ ID NO: 1402 - protein, 1175 aa, Artificial
  Synthetic
MTEQNEKPYNGTYYTLEDKHFWAAFFNLARHNAYITLAHIDRQLAYSKADITNDEDILFFKGQWKNLDNDLERKARLRSLILKHFSFLEGAAYGKKLFESQSSGNKSSKKKELTKKEKEELQANALSLDNLKSILFDFLQKLKDFRNYYSHYRHPESSELPLFDGNMLQRLYNVFDVSVQRVKRDHEHNDKVDPHRHFNHLVRKGKKDKYGNNDNPFFKHHFVDREEKVTEAGLLFFVSLFLEKRDAIWMQKKIRGFKGGTEAYQQMTNEVFCRSRISLPKLKLESLRTDDWMLLDMLNELVRCPKSLYDRLREEDRARFRVPVDILSDEDDTDGTEEDPFKNTLVRHQDRFPYFALRYFDLKKVFTSLRFHIDLGTYHFAIYKKNIGEQPEDRHLTRNLYGFGRIQDFAEEHRPEEWKRLVRDLDYFETGDKPYITQTTPHYHIEKGKIGLRFVPEGQLLWPSPEVGATRTGRSKYAQDKRFTAEAFLSVHELMPMMFYYFLLREKYSEEASAERVQGRIKRVIEDVYAVYDAFARGEIDTLDRLDACLADKGIRRGHLPRQMIAILSQEHKDMEEKVRKKLQEMIADTDHRLDMLDRQTDRKIRIGRKNAGLPKSGVIADWLVRDMMRFQPVAKDTSGKPLNNSKANSTEYRMLQRALALFGGEKERLTPYFRQMNLTGGNNPHPFLHETRWESHTNILSFYRSYLKARKAFLQSIGRSDRVENHRFLLLKEPKTDRQTLVAGWKGEFHLPRGIFTEAVRDCLIEMGLDEVGSYKEVGFMAKAVPLYFERACKDRVQPFYDYPFNVGNSLKPKKGRFLSKEKRAEEWESGKERFRDLEAWSHSAARRIEDAFAGIENASRENKKKIEQLLQDLSLWETFESKLKVKADKINIAKLKKEILEAKEHPYLDFKSWQKFERELRLVKNQDIITWMMCRDLMEENKVEGLDTGTLYLKDIRTDVQEQGSLNVLNHVKPMRLPVVVYRADSRGHVHKEQAPLATVYIEERDTKLLKQGNFKSFVKDRRLNGLFSFVDTGGLAMEQYPISKLRVEYELAKYQTARVCAFEQTLELEESLLTRYPHLPDKNFRKMLESWSDPLLDKWPDLHRKVRLLIAVRNAFSHNQYPMYDEAVFSSIRKYDPSSPDAIEERMGLNIAHRLSEEVKQAKETVERIIQV

SEQ ID NO: 1403 - protein, 1135 aa, Artificial
  Synthetic
MNTVPASENKGQSRTVEDDPQYFGLYLNLARENLIEVESHVRIKFGKKKLNEESLKQSLLCDHLLSVDRWTKVYGHSRRYLPFLHYFDPDSQIEKDHDSKTGVDPDSAQRLIRELYSLLDFLRNDFSHNRLDGTTFEHLEVSPDISSFITGTYSLACGRAQSRFADFFKPDDFVLAKNRKEQLISVADGKECLTVSGLAFFICLFLDREQASGMLSRIRGFKRTDENWARAVHETFCDLCIRHPHDRLESSNTKEALLLDMLNELNRCPRILYDMLPEEERAQFLPALDENSMNNLSENSLNEESRLLWDGSSDWAEALTKRIRHQDRFPYLMLRFIEEMDLLKGIRFRVDLGEIELDSYSKKVGRNGEYDRTITDHALAFGKLSDFQNEEEVSRMISGEASYPVRFSLFAPRYAIYDNKIGYCHTSDPVYPKSKTGEKRALSNPQSMGFISVHDLRKLLLMELLCEGSFSRMQSGFLRKANRILDETAEGKLQFSALFPEMRHRFIPPQNPKSKDRREKAETTLEKYKQEIKGRKDKLNSQLLSAFDMNQRQLPSRLLDEWMNIRPASHSVKLRTYVKQLNEDCRLRLRKFRKDGDGKARAIPLVGEMATFLSQDIVRMIISEETKKLITSAYYNEMQRSLAQYAGEENRRQFRAIVAELHLLDPSSGHPFLSATMETAHRYTEDFYKCYLEKKREWLAKTFYRPEQDENTKRRISVFFVPDGEARKLLPLLIRRRMKEQNDLQDWIRNKQAHPIDLPSHLFDSKIMELLKVKDGKKKWNEAFKDWWSTKYPDGMQPFYGLRRELNIHGKSVSYIPSDGKKFADCYTHLMEKTVQDKKRELRTAGKPVPPDLAADIKRSFHRAVNEREFMLRLVQEDDRLMLMAINKMMTDREEDILPGLKNIDSILDEENQFSLAVHAKVLEKEGEGGDNSLSLVPATIEIKSKRKDWSKYIRYRYDRRVPGLMSHFPEHKATLDEVKTLLGEYDRCRIKIFDWAFALEGAIMSDRDLKPYLHESSSREGKSGEHSTLVKMLVEKKGCLTPDESQYLILIRNKAAHNQFPCAAEMPLIYRDVSAKVGSIEGSSAKDLPEGSSLVDSLWKKYEMIIRKILPILDPENRFFGKLLNNMSQPINDL

SEQ ID NO: 1404 - protein, 1119 aa, Artificial
  Synthetic
MTEQNERPYNGTYYTLEDKHFWAAFFNLARHNAYITLTHIDRQLAYSKADITNDEDILFFKGQWKNLDNDLERKARLRSLILKHFSFLEGAAYGKKLFESQSSGNKSSKKKELTKKEKEELQANALSLDNLKSILFDFLQKLKDFRNYYSHYRHPESSELPLFDGNMLQRLYNVFDVSVQRVKRDHEHNDKVDPHRHFNHLVRKGKKDRYGNNDNPFFKHHFVDREGTVTEAGLLFFVSLFLEKRDAIWMQKKIRGFKGGTETYQQMTNEVFCRSRISLPKLKLESLRTDDWMLLDMLNELVRCPKSLYDRLREEDRARFRVPVDILSDEDDTDGTEEDPFKNTLVRHQDRFPYFALRYFDLKKVFTSLRFHIDLGTYHFAIYKKNIGEQPEDRHLTRNLYGFGRIQDFAEEHRPEEWKRLVRDLDYFETGDKPYITQTTPHYHIEKGKIGLRFVPEGQHLWPSPEVGATRTGRSKYAQDKRFTAEAFLSVHELMPMMFYYFLLREKYSDEASAERVQGRIKRVIEDVYAVYDAFARDEINTRDELDACLADKGIRRGHLPRQMIAILSQEHKDMEEKVRKKLQEMIADTDHRLDMLDRQTDRKIRIGRKNAGLPKSGVIADWLVRDMMRFQPVAKDTSGKPLNNSKANSTEYRMLQRALALFGGEKERLTPYFRQMNLTGGNNPHPFLHETRWESHTNILSFYRSYLKARKAFLQSIGRSDRVENHRFLLLKEPKTDRQTLVAGWKGEFHLPRGIFTEAVRDCLIEMGYDEVGSYKEVGFMAKAVPLYFERACKDRVQPFYDYPFNVGNSLKPKKGRFLSKEKRAEEWESGKERFRLAKLKKEILEAKEHPYHDFKSWQKFERELRLVKNQDIITWMICRDLMEENKVEGLDTGTLYLKDIRTDVQEQGSLNVLNHVKPMRLPVVVYRADSRGHVHKEEAPLATVYIEERDTKLLKQGNFKSFVKDRRLNGLFSFVDTGGLAMEQYPISKLRVEYELAKYQTARVCAFEQTLELEESLLTRYPHLPDKNFRKMLESWSDPLLDKWPDLHRKVRLLIAVRNAFSHNQYPMYDEAVFSPIRKYDPSSLDAIEERMGLNIAHRLSEEVKQAKEMVERIIQV

SEQ ID NO: 1405 - protein, 1128 aa, Artificial
  Synthetic
  misc_feature (610)..(624): Xaa can be any naturally occurring amino acid
MDILDLSTDLQQAYFATYLNMAQNNVFITMKDIVERLCLKQTFFKDGKEIIQAFERDNCKDATILQDVYLVTLSADKQEQLKRKLLRSFPFLVPMISTDRFYAFFNKHELYYANEQHAEDTNTDVTIRKEDELLKNSSILTIVHKLQTTLNVLSFYRNNASHTMSINDDKALEIISDSNKTAIALDCVFKQACGVIKERFSLKGNEHEGANLQFIHNARVTPKYTGKKDQKIQVPNFDYAHCFYYKNNEEYTMSRMAVVYLICMFIEKSYATQFFSQIGREFYKGIYKNENYKMYMREIYSCYRIRMPKNTTNPYEDNVMLAMDILNEITKCPNELFNCLNRKDQQKFEKETTENSDFPERVLLRRSADRFPELALKWIDSNKVFNKLRFNVIYGKYHDIFKDELQETPGEKKCCDGIKRKRWLSKELTAFGRIDELEKQRTDKALNWDGIDLVKKFEADPEADKPWITDMRCQYVIGDGSIGIKMVQGNTILPSIKGKELKEIKTPSPDFLLSVYELPALVFLTILKPDVAENLIVGYREKYVSFLNKLKNGEIQPVDSEAALKEIIEKQGFEWKNIPEKIKKYLLKRRANFTKYAKKILDDEIQSTKXXXXXXXXXXXXXXXVDPKRFLPGKIAKWLTVDIVYFCKYEVGSDKPTGMNYNVMQSKLATFAKSNQFDDILQMFNSLDMCKGGVAEHPFLDKVLELKPKNVEQFFGMYLKEKKAYLEEVQSQNQYKTLHFLHPNKRKWQEPNIVNLVNDYLKLPLQLPKGLFDAVIKSIISKDCPTLKENDTTSYMINAYMHSKDDDIQEFYKFCRTYPVFEKLDKVNNGEIKYRTKDELHFKTANNSDQKFDSKDLFKQELAKYIRICKANPKKYRDFDAKTATTKLNHLFNNYDNTEKAITRYSVQDFLLMLIAEKLLLNQQIKKDKKRNNEKIEISIDSFKLKGIAPDSDKGLLSETVEIPIQLPKPNGYTVTWTTKIKDYSRIYKLYNDRRFLSLLGLLPKGNYPAEDIMREFENYDRNCIEAFKRILNFERKALKITSVKAANDQYVAENGRSNFYTILDALLNHLGFCGAERDKYLMINYFRDKYAHYQYPEEGLTLTSLKDASNKMFDKLNDLVDEINNKI

SEQ ID NO: 1406 - protein, 1128 aa, Artificial
  Synthetic
MEILTIPEVIKCRTLSDDPQYFGGYLNMARLNVLNISNHIAKEFKLPLLPEEAHLKNSFLCKKENKKIDWNHVYARTIRFLSVMKVFDAESLPKEEQKTIDWEGKDFASMCDTLNIVFSELQEFSNDYSHYYSTEKETKRKTTVSDELALFLRTNFKRAIEYTKVRFKGILNDEDYQLVVSKKMLETNHTITHEGLVFLTSMFLEREYAFRFIRKIHGLSGPKDNSFIATCEVLMAFCLKLPQEQFRSDNRRQAISLELMNELKKCPKVLYHVITEEWKQKLKSVPEELETKNLHYNTKRETKIEFEDYDLYIESLTKQVRYNNRFSEFALKYIDETGIFSEFRFQLDLGKILVDEYLKNFNDERVQRCIIENAKAFGKLNDYTNETKVMSLIVNGPPLKSFDRFAPHYNIESNKIGISTHEVTAKLVPNSKGEPAKKLHQPLPEAFLSLHELPKIILLEYLQKGEPEKLINEFILVNNSKLMNMSFIEEVKNQLPKEWDKFQRRTNAKHELAYDENTLAFLLQRKQILNKTLLAYQLNDKQIPTRILDYWLNISDADEERAISNRLKSIKRDCMSRLKALSKFNENGNRNKIPGIGEMATFLAKDIIEMVVSEGKKRKITSFYYDKMQECLALFGDPDKKQLFIHIVTKELKLNDPGGHPFLDKLDLQKINSTTGFYEIYLQEKGHKMVPENNPKTGKVIYTDHSWMALTFYKIEFNDKVDMLMTVVKLPLKKLNIPFTLRQLSGKTNNTLKQWLNNLTQGKKRNDGKRPINLPTNLFDERLAELLRKDLDNKKIVYWPYANWNELFKTWWSSRNDGLQSFYNAEREYRIFDEKVNFYPNRKENFADYYQHALKLAFQKKQSKRILEQMYDQHLPDILFDQVEKTFRHTIAETEKEIRILQEEDHIMLLMLESLLDDGSKQQLKLSEIRTHLNRTTNIRQVVKGKLSFDDSGELIKDNTNSEIVRTVSVTDQRKKLHQLPKLIFDSRLPELLEYFPDEEIQMESLKKEFDTYNTTRQVVLNLSFNLEKMIIEKGRLDRINELLSSATGDLLTGHIGHKTYLTWLKNHGIIDNDTFIFMNMVQYCFSHNQYPQKKTMARLISRWDQHRFALQIEATYIQKIAGIIEDL

SEQ ID NO: 1407 - protein, 1140 aa, Artificial; identical to SEQ ID NO: 1356
  Synthetic

SEQ ID NO: 1408 - protein, 1168 aa, Artificial; identical to SEQ ID NO: 1357
  Synthetic

SEQ ID NO: 1409 - protein, 1126 aa, Artificial
  Synthetic
METLLTPTENKYRTINDDPQYFGGYLSMARLNVFNISNHIAKEFGQSLLEEEGHIKNSFLCDKNNKKVNWNHVHAKARRFLSILKVFDAESLPKEELKIIEWEGKDFSLMGDTLKIVFRELQEFRNDYSHFYSTEKGTSRKIKVSEELAEFLKTNFRRAIEYTKERFKGGLIEEDFNLVASRKVVRDDLAITTEGLVFLASMFLEREYAFQFIGKITGLKGTQNNSFIATREVLMAFCLKLPHDRFQSDNTRQAFSLDLINELNRCPKVLYNVITEEGKQLFRPQLEDLEIKNLIKNSTNNEEEIDNYDEYIEALTKRIRHTNRFSDFALQFIDETDVFKKFRFQIDLGKLLVDEYDKSFNGEEVERKIIVNAKAFRKLNSYGTEDETLKLIENGQGSKRFEQFAPHYNTENNKIGLSGKELIAKLRPNSKGEAGKKLHQPLPEAFLSLKELPKIILLNYLLPDEPEKLINDFILVNNSKLMNMSFIKEVKSLLPKEWNEFKKRSDTKKQRAYNEKALAYLLHRKQILNQVLAAYQLNDKQIPRRILDYWLNIVDVVEGRSVSDRIKMMKRDCMSRLKAMAKFKEDRNRNKIPKIGEMATFLAKDIVDMVVGEEKKQKITSFYYDKMQECLALFADPEKKQLFIHTVINELKLNEQGGHPFLHKLNLQQIKNTSGFYEIYLQEKGQKMVSEKNFRTGRTIETDKSWMALTFYKKEWDEKVGKQLTVVRLPENKSNIPFSLRLLEEKTVYTLEQWLHNVTKGKKQNDTRQPVNLPTNLFDERLTVLLRGELDKKQISYAPNANYNELFKIWWKSRNDSVQSFYKAEREYEIFGEKVNFMPDSKERFADYYQHALTAAWQKKRKERIQQQKQDRRLPDISFDQVEKTFKQTIAETEKEIRIVQEEDRMMLLMLETLMENGKDLKLKLSGIDTLLNATTEVKQLVSGKLSFNGSGELIKGKTNPEISKTITVARKRKDYSMLRKFVFDRRLPELFEYFAEEEIPIEVLKDELDAYNKAKHEVFDTVFELEEKIITLDADGIRQLFIDDAGQPVTGNIQHKPYVIWLKNNGTIDDNTLTFLNMVRNCFSHNQYPQKKTMELLIGQWEPNRFALTIAQTYKRKINSIMKHL

SEQ ID NO: 1410 - protein, 1135 aa, Artificial
  Synthetic
MNTVPASENKGQSRTVEDDPQYFGLYLNLARENLIEVESHVRIKFGKKKLNEESLKQSLLCDHLLSVDRWTKVYGHSRRYLPFLHYFDPDSQIEKDHDSKTGVDPDSAQRLIRELYSLLDFLRNDFSHNRLDGTTFEHLEVSPDISSFITGTYSLACGRAQSRFADFFKPDDFVLAKNRKEQLISVADGKECLTVSGLAFFICLFLDREQASGMLSRIRGFKRTDENWARAVHETFCDLCIRHPHDRLESSNTKEALLLDMLNELNRCPRILYDMLPEEERAQFLPALDENSMNNLSENSLNEESRLLWDGSSDWAEALTKRIRHQDRFPYLMLRFIEEMDLLKGIRFRVDLGEIELDSYSKKVGRNGEYDRTITDHALAFGKLSDFQNEEEVSRMISGEASYPVRFSLFAPRYAIYDNKIGYCHTSDPVYPKSKTGEKRALSNPRSMGFISVHDLRKLLLMELLCEGSFSRMQSDFLRKANRILDETAEGKLQFSALFPEMRHRFIPPQNPKSKDRREKAETTLEKYKQEIKGRKDKLNSQLLSAFDMDQRQLPSRLLDEWMNIRPASHSVKLRTYVKQLNEDCRLRLRKFRKDGDGKARAIPLVGEMATFLSQDIVRMIISEETKKLITSAYYNEMQRSLAQYAGEENRRQFRAIVAELRLLDPSSGHPFLSATMETAHRYTEDFYKCYLEKKREWLAKTFYRPEQDENTKRRISVFFVPDGEARKLLPLLIRRRMKEQNDLQDWIRNKQAHPIDLPSHLFDSKIMELLKVKDGKKKWNEAFKDWWSTKYPDGMQPFYGLRRELNIHGKSVSYIPSDGKKFADCYTHLMEKTVRDKKRELRTAGKPVPPDLAADIKRSFHRAVNEREFMLRLVQEDDRLMLMAINKMMTDREEDILPGLKNIDSILDEENQFSLAVHAKVLEKEGEGGDNSLSLVPATIEIKSKRKDWSKYIRYRYDRRVPGLMSHFPEHKATLDEVKTLLGEYDRCRIKIFDWAFALEGAIMSDRDLKPYLHESSSREGKSGEHSTLVKMLVEKKGCLTPDESQYLILIRNKAAHNQFPCAAEMPLIYRDVSAKVGSIEGSSAKDLPEGSSLVDSLWKKYEMIIRKILPILDPENRFFGKLLNNMSQPINDL

SEQ ID NO: 1411 - protein, 1119 aa, Artificial
  Synthetic
MTEQNEKPYNGTYYTLEDKHFWAAFLNLARHNAYITLTHIDRQLAYSKADITNDEDILFFKGQWKNLDNDLERKARLRSLILKHFSFLEGAAYGKKLFESQSSGNKSSKKKELTKKEKEELQANALSLDNLKSILFDFLQKLKDFRNYYSHYRHPESSELPLFDGNMLQRLYNVFDVSVQRVKRDHEHNDKVDPHRHFNHLVRKGKKDRCGNNDNPFFKHHFVDREGTVTEAGLLFFVSLFLEKRDAIWMQKKIRGFKGGTEAYQQMTNEVFCRSRISLPKLKLESLRTDDWMLLDMLNELVRCPKSLYDRLREEDRARFRVPVDILSDEDDTDGTEEDPFKNTLVRHQDRFPYFALRYFDLKKVFTSLRFHIDLGTYHFAIYKKNIGEQPEDRHLTRNLYGFGRIQDFAEEHRPEEWKRLVRDLDYFETGDKPYITQTTPHYHIEKGKIGLRFVPEGQHLWPSPEVGATRTGRSKYAQDKRFTAEAFLSVHELMPMMFYYFLLREKYSEEASAERVQGRIKRVIEDVYAVYDAFARDEINTRDELDACLADKGIRRGHLPRQMIGILSQEHKDMEEKVRKKLQEMIADTDHRLDMLDRQTDRKIRIGRKNAGLPKSGVIADWLVRDMMRFQPVAKDTSGKPLNNSKANSTEYRMLQRALALFGGEKERLTPYFRQMNLTGGNNPHPFLRETRWESHTNILSFYRSYLKARKAFLQSIGRSDRVENHRFLLLKEPKTDRQTLVAGWKSEFHLPRGIFTEAVRDCLIEMGYDEVGSYKEVGFMAKAVPLYFERACKDRVQPFYDSPFNVGNSLKPKKGRFLSKEKRAEEWESGKERFRLAKLKKEILEAKEHPYHDFKSWQKFERELRLVKNQDIITWMMCRDLMEENKVEGLDTGTLYLKDIRTDVHEQGSLNVLNRVKPMRLPVVVYRADSRGHVHKEQAPLATVYIEERDTKLLKQGNFKSFVKDRRLNGLFSFVDTGGLAMEQYPISKLRVEYELAKYQTARVCAFEQTLELEESLLTRYPHLPDENFRKMLESCSDPLLDKWPDLHGKVRLLIAVRNAFSHNQYPMYDEAVFSSIRKYDPSSPDAIEERMGLNIAHRLSEEVKQAKEMAERIIQA

SEQ ID NO: 1412 - protein, 1119 aa, Artificial
  Synthetic
MTEQNERPYNGTYYTLEDKHFWAAFLNLARHNAYITLAHIDRQLAYSKADITNDEDILFFKGQWKNLDNDLERKARLRSLILKHFSFLEGAAYGKKLFESQSSGNKSSKKKELTKKEKEELQANALSLDNLKSILFDFLQKLKDFRNYYSHYRHPESSELPMFDGNMLQRLYNVFDVSVQRVKRDHEHNDKVDPHRHFNHLVRKGKKDRCGNNDNPFFKHHFVDREGTVTEAGLLFFVSLFLEKRDAIWMQKKIRGFKGGTEAYQQMTNEVFCRSRISLPKLKLESLRTNDWMLLDMLNELVRCPKSLYDRLREEDRARFRVPVDILSDEDDTDGTEEDPFKNTLVRHQDRFPYFALRYFDLKKVFTSLRFHIDLGTYHFAIYKKNIGEQPEDRHLTRNLYGFGRIQDFAEEHRPEEWKRLVRDLDYFETGDKPYITQTTPHYHIEKGKIGLRFVPEGQLLWPSPEVGATRTGRSKYAQDKRFTAEAFLSVHELMPMMFYYFLLREKYSEEVSAEKVQGRIKRVIEDVYAVYDAFARDEINTRDELDACLADKGIRRGHLPRQMIAILSQEHKDMEEKVRKKLQEMIADTDHRLDMLDRQTDRKIRIGRKNAGLPKSGVIADWLVRDMMRFQPVAKDTSGKPLNNSKANSTEYQMLQRALALFGGEKERLTPYFRQMNLTGGNNPHPFLHETRWESHTNILSFYRSYLEARKAFLQSIGRSDRVENHRFLLLKEPKTDRQTLVAGWKSEFHLPRGIFTEAVRDCLIEMGYDEVGSYKEVGFMAKAVPLYFERACKDRVQPFYDSPFNVGNSLKPKKGRFLSKEKRAEEWESGKERFRLAKLKKEILEAKEHPYHDFKSWQKFERELRLVKNQDIITWMMCRDLMEENKVEGLDTGTLYLKDIRTDVHEQGSLNVLNRVKPMRLPVVVYRADSRGHVHKEQAPLATVYIEERDTKLLKQGNFKSFVKDRRLNGLFSFVDTGGLAMEQYPISKLRVEYELAKYQTARVCAFEQTLELEESLLTRYPHLPDENFRKMLESWSDPLLDKWPDLHRKVRLLIAVRNAFSHNQYPMYDEAVFSSIRKYDPSSPDAIEERMGLNIAHRLSEEVKQAKETVERIIQV

SEQ ID NO: 1413 - protein, 1135 aa, Artificial
  Synthetic
MNTVPASENKGQSRTVEDDPQYFGLYLNLARENLIEVESHVRIKFGKKKLNEESLKQSLLCDHLLSVDRWTKVYGHSRRYLPFLHYFDPDSQIEKDHDSKTGVDPDSAQRLIRELYSLLDFLRNDFSHNRLDGTTFEHLEVSPDISSFITGTYSLACGRAQSRFADFFKPDDFVLAKNRKEQLISVADGKEYLTVSGLAFFICLFLDREQASGMLSRIRGFKRTDENWARAVHETFCDLCIRHPHDRLESSNTKEALLLDMLNELNRCPRILYDMLPEEERAQFLPALDENSMNNLSENSLNEESRLLWDGSSDWAEALTKRIRHQDRFPYLMLRFIEEMDLLKGIRFRVDLGEIELDSYSKKVGRNGEYDRTITDHALAFGKLSDFQNEEEVSRMISGEASYPVRFSLFAPRYAIYDNKIGYCHTSDPVYPKSKTGEKRALSNPRSMGFISVHDLRKLLLMELLCEGSFSRMQSGFLRKANRILDETAEGKLQFSALFPEMRHRFIPPQNPKSKDRREKAETTLEKYKQEIKGRKDKLNSQLLSAFDMDQRQLPSRLLDEWMNIRPASHSVKLRTYVKQLNEDCRLRLRKFRKDGDGKARAIPLVGEMATFLSQDIVRMIISEETKKLITSAYYNEMQRSLAQYAGEENRRQFRAIVAELRLLDPSSGHPFLSATMETAHRYTEDFYKCYLEKKREWLAKTFYRPEQDENTKRRISVFFVPDGEARKLLPLLIRRRMKEQNDLQDWIRNKQAHPIDLPSHLFDSKVMELLKVKDGKKKWNEAFKDWWSTKYPDGMQPFYGLRRELNIHGKSVSYIPSDGKKFADCYTHLMEKTVQDKKRELRTAGKPVPPDLAADIKRSFHRAVNEREFMLRLVQEDDRLMLMAINKMMTDREEDILPGLKNIDSILDKENQFSLAVHAKVLEKEGEGGDNPLSLVPATIEIKSKRKDWSKYIRYRYDRRVPGLMSHFPEHKATLDEVKTLLGEYDRCRIKIFDWAFALEGAIMSDRDLKPYLHESSSREGKSGEHSTLVKMLVEKKGCLTPDESQYLILIRNKAAHNQFPCAAEMPLIYRDVSAKVGSIEGSSAKDLPEGSSLVDSLWKKYEMIIRKILPILDPENRFFGKLLNNMSQPINDL

SEQ ID NO: 1414 - protein, 1175 aa, Artificial; identical to SEQ ID NO: 1359
  Synthetic

SEQ ID NO: 1415 - protein, 1175 aa, Artificial
  Synthetic
MTEQNERPYNGTYYTLEDKHFWAAFFNLARHNAYITLAHIDRQLAYSKADITNDEDILFFKGQWKNLDNDLERKARLRSLILKHFSFLEGAAYGKKLFESQSSGNKSSKKKELTKKEKEELQANALSLDNLKSILFDFLQKLKDFRNYYSHYRHPESSELPLFDGNMLQRLYNVFDVSVQRVKRDHEHNDKVDPHRHFNHLVRKGKKARCGNNDNPFFKHHFVDREEKVTEAGLLFFVSLFLEKRDAIWMQKKIRGFKGGTEAYQQMTNEVFCRSRISLPKLKLESLRTDDWMLLDMLNELVRCPKSLYDRLREEDRARFRVPVDILSDEDDTDGTEEDPFKNTLVRHQDRFPYFALRYFDLKKVFTSLRFHIDLGTYHFAIYKKNIGEQPEDRHLTRNLYGFGRIQDFAEEHRPEEWKRLVWDLDYFETGDKPYITQTTPHYHIEKGKIGLRFVPEGQHLWPSPEVGATRTGRSKYAQDKRLTAEAFLSVHELMPMMFYYFLLREKYSEEASAERVQGRIKRVIEDVYAVYDAFARGEIDTLDRLDACLADKGIRRGHLPRQMIAILSQEHKDMEEKVRKKLQEMIADTDHRLDMLDRQTDRKIRIGRKNAGLPKSGVIADWLVRDMMRFQPVAKDTSGKPLNNSKANSTEYRMLQRALALFGGEKERLTPYFRQMNLTGGNNPHPFLHETRWESHTNILSFYRSYLKARKAFLQSIGRSDRVENHRFLLLKEPKTDRQTLVAGWKGEFHLPRGIFTEAVRDCLIEMGLDEVGSYKEVGFMAKAVPLYFERASKDRVQPFYDYPFNVGNILKPKKGRFLSKEKRAEEWESGKERFRDLEAWSQSTARRIEDAFAGIKYASPGNKKKIEQLLQDLSLWETFESKLKVKADKINLAKLKKEILEAKEHPYLDFKSWQKFERELRLVKNQDIITWMMCRDLMEENKVEGLDTGTLYLKDIRTDVQEQGSLNVLNHVKPMRLPVVVYRADSRGHVHKEEAPLATVYIEERDTKLLKQGNFKSFVKDRRLNGLFSFVDTGALAMEQYPISKLRVEYELAKYQTARVCAFEQTLELEESLLTRYPHLPDKNFRKMLESWSDPLLDKWPDLHRKVRLLIAVRNAFSHNQYPMYDEAVFSSIRKYDPSSPDAIEERMGLNIAHRLSEEVKQAKETVERIIQA

SEQ ID NO: 1416 - protein, 1175 aa, Artificial
  Synthetic
MTEQNEKPYNGTYYTLEDKHFWAAFFNLARHNAYITLAHIDRQLAYSKADITNDEDILFFKGQWKNLDNDLERKARLRSLILKHFSFLEGAAYGKKLFESQSSGNKSSKKKELTKKEKEELQANALSLDNLKSILFDFLQKLKDFRNYYSHYRHPESSELPLFDGNMLQRLYNVFDVSVQRVKRDHEHNDKVDPHRHFNHLVRKGKKDRYGNNDNPFFKHHFVDREGTVTEAGLLFFVSLFLEKRDAIWMQKKIRGFKGGTETYQQMTNEVFCRSRISLPKLKLESLRTDDWMLLDMLNELVRCPKSLYDRLREEDRARFRVPVDILSDEDDTDGAEEDPFKNTLVRHQDRFPYFALRYFDLKKVFTSLRFHIDLGTYHFAIYKKNIGEQPEDRHLTRNLYGFGRIQDFAEEHRPEEWKRLVRDLDYFETGDKPYITQTTPHYHIEKGKIGLRFVPEGQHLWPSPEVGATRTGRSKYAQDKRFTAEAFLSVHELMPMMFYYFLLREKYSDEASAERVQGRIKRVIEDVYAVYDAFARGEIDTLDRLDACLADKGIRRGHLPRQMIAILSQEHKDMEEKVRKKLQEMIADTDHRLDMLDRQTDRKIRIGRKNAGLPKSGVIADWLVRDMMRFQPVAKDTSGKPLNNSKANSTEYRMLQRALALFGGEKERLTPYFRQMNLTGGNNPHPFLHETRWESHTNILSFYRSYLKARKAFLQSIGRSDRVENHRFLLLKEPKTDRQTLVAGWKGEFHLPRGIFTEAVRDCLIEMGYDEVGSYKEVGFMAKAVPLYFERACKDRVQPFYNYPFNVGNSLKPKKGRFLSKEKRAEEWESGKERFRDLEAWSQSAARRIEDAFAGIENASRENKKKIEQLLQDLSLWKAFESKLKVKADKINIAKLKKEILEAKEHPYHDFKSWQKFERELRLVKNQDIITWMMCRDLMEENKVEGLDTGTLYLKDIRTDVHEQGSLNVLNRVKPMRLPVVVYRADSRGHVHKEQAPLATVYIEERDTKLLKQGNFKSFVKDRRLNGLFSFVDTGALAMEQYPISKLRVEYELAKYQTARVCAFEQTLELEESLLTRYPHLPDKNFRKMLESWSDPLLDKWPDLHRKVRLLIAVRNAFSHNQYPMYDEAVFSSIRKYDPSSPDAIEERMGLNIAHRLSEEVKQAKEMAERIIQA

SEQ ID NO: 1417 - protein, 1199 aa, Artificial; identical to SEQ ID NO: 1328
  Synthetic

SEQ ID NO: 1418 - protein, 1057 aa, Artificial; identical to SEQ ID NO: 1344
  Synthetic

SEQ ID NO: 1419 - protein, 1047 aa, Artificial; identical to SEQ ID NO: 1398
  Synthetic

SEQ ID NO: 1420 - protein, 1168 aa, Artificial; identical to SEQ ID NO: 1357
  Synthetic

SEQ ID NO: 1421 - protein, 1094 aa, Artificial; identical to SEQ ID NO: 1358
  Synthetic

SEQ ID NO: 1422 - protein, 1094 aa, Artificial; identical to SEQ ID NO: 1358
  Synthetic

SEQ ID NO: 1423 - protein, 1168 aa, Artificial; identical to SEQ ID NO: 1357
  Synthetic

SEQ ID NO: 1424 - protein, 1140 aa, Artificial; identical to SEQ ID NO: 1356
  Synthetic

SEQ ID NO: 1425 - protein, 1135 aa, Artificial
  Synthetic
MNTVPASENKGQSRTVEDDPQYFGLYLNLARENLIEVESHVRIKFGKKKLNEESLKQSLLCDHLLSVDRWTKVYGHSRRYLPFLHYFDPDSQIEKDHDSKTGVDPDSAQRLIRELYSLLDFLRNDFSHNRLDGTTFEHLEVSPDISSFITGTYSLACGRAQSRFADFFKPDDFVLAKNRKEQLISVADGKECLTVSGLAFFICLFLDREQASGMLSRIRGFKRTDENWARAVHETFCDLCIRHPHDRLESSNTKEALLLDMLNELNRCPRILYDMLPEEERAQFLPALDENSMNNLSENSLNEESRLLWDGSSDWAEALTKRIRHQDRFPYLMLRFIEEMDLLKGIRFRVDLGEIELDSYSKKVGRNGEYDRTITDHALAFGKLSDFQNEEEVSRMISGEASYPVRFSLFAPRYAIYDNKIGYCHTSDPVYPKSKTGEKRALSNPRSMGFISVHDLRKLLLMELLCEGSFSRMQSDFLRKANRILDETAEGKLQFSALFPEMRHRFIPPQNPKSKDRREKAETTLEKYKQEIKGRKDKLNSQLLSAFDMNQRQLPSRLLDEWMNIRPASHSVKLRTYVKQLNEDCRLRLRKFRKDGDGKARAIPLVGEMATFLSQDIVRMIISEETKKLITSAYYNEMQRSLAQYAGEENRRQFRAIVAELRLLDPSSGHPFLSATMETAHRYTEDFYKCYLEKKREWLAKTFYRPEQDENTKRRISVFFVPDGEARKLLPLLIRRRMKEQNDLQDWIRNKQAHPIDLPSHLFDSKVMELLKVKDGKKKWNEAFKDWWSTKYPDGMQPFYGLRRELNIHGKSVSYIPSDGKKFADCYTHLMEKTVRDKKRELRTAGKPVPPDLAAYIKRSFHRAVNEREFMLRLVQEDDRLMLMAINKMMTDREEDILPRLKNIDSILDKENQFSLAVHAKVLEKEGEGGDNSLSLVPATIVIKSKRKDWSKYIRYRYDRRVPGLMSHFPEHKATLDEVKTLLGEYDRCRIKIFDWAFALEGAIMSDRDLKPYLHESSSREGKSGEHSTLVKMLVEKKGCLTPDESQYLILIRNKAAHNQFPCAAEIPLIYRDVSAKVGSIEGSSAKDLPEGSSLVDSLWKKYEMIIRKILPILDPENRFFGKLLNNMSQPINDL

SEQ ID NO: 1426 - protein, 1175 aa, Artificial
  Synthetic
MTEQNEKPYNGTYYTLEDKHFWAAFLNLARHNAYITLAHIDRQLAYSKADITNDEDILFFKGQWKNLDNDLERKARLRSLILKHFSFLEGAAYGKKLFESQSSGNKSSKKKELTKKEKEELQANALSLDNLKSILFDFLQKLKDFRNYYSHYRHPESSELPLFDGNMLQRLYNVFDVSVQRVKRDHEHNDKVDPHRHFNHLVRKGKKDRCGNNDNPFFKHHFVDREGTVTEAGLLFFVSLFLEKRDAIWMQKKIRGFKGGTETYQQMTNEVFCRSRISLPKLKLESLRTDDWMLLDMLNELVRCPKSLYDRLREEDRARFRVPVDILSDEDDTGGTEEDPFKNTLVRHQDRFPYFALRYFDLKKVFTSLRFHIDLGTYHFAIYKKNIGEQPEDRHLTRNLYGFGRIQDFAEEHRPEEWKRLVRDLDCFETGDKPYITQTTPHYHIEKGKIGLRFVPEGQHLWPSPEVGATRTGRSKYAQDKRLTAEAFLSVHELMPMMFYYFLLRENYSDEASAERVQGRIKRVIEDVYAVYDAFARGEIDTLDRLDACLADKGIRRGHLPRQMIAILSQEHKDMEEKVRKKLQEMIADTDHRLDMLDRQTDRKIRIGRKNAGLPKSGVIADWLVRDMMRFQPVAKDTSGKPLNNSKANSTEYRMLQRALALFGGEKERLTPYFRQMNLTGGNNPHPFLHETRWESHTNILSFYRSYLKARKAFLQSIGRSDREENHRFLLLKEPKTDRQTLVAGWKSEFHLPRGIFTEAVRDCLIEMGYDEVGSYKEVGFMAKAVPLYFERACKDRVQPFYDYPFNVGNSLKPKKGRFLSKEKRAEEWESGKERFRDLEAWSHSAARRIEDAFVGIEYASWENKKKIEQLLQDLSLWETFESKLKVKADKINIAKLKKEILEAKEHPYLDFKSWQKFERELRLVKNQDIITWMMCRDLMEENKVEGLDTGTLYLKDIRTEVQEQGSLNVLNRVKSMRLPVVVYRADSRGHVHKEQAPLATVYIEERDTKLLKQGNFKSFVKDRRLNGLFSFVDTGGLAMEQYPISKLRVEYELAKYQTARVCAFEQTLELEESLLTRYPHLPDKNFRKMLESWSDPLLDKWPDLHRKVRLLIAVRNAFSHNQYPMYDEAVFSSIRKYDPSSLDAIEERMGLNIAHRLSEEVKQAKEMVERIIQV

SEQ ID NO: 1427 - protein, 1168 aa, Artificial
  Synthetic
MKANNQIVKGISYDHLKPDDKHYFGGFLNLAQNNIDGVIQEFTMRLNLKYDPENKNQSLFSYFDINASFTDWERGVNILKEYWPVMEFIDRPATDKQFESEKPENREAAKRKYFIATLRILLKSIKELRHYYTHYYHPPVQLSEDLFRFLDHTLLYTAFDVKKTKMKDDKTRQLLNQNLSLELEKLKKLKVEELKKKKEKGIKVNLQDEKGILNAIYNDAFAHIITKEKDSDKDELETRYKSTLPQDETAEAGINISISGLIFLLSLFLSRKEIEQLKSNIEGYKGKVLNIETEVDRKHNSLKYMATHWVFSILAFKGLKQRLTNSFKKESLLIQMMDELNKVPDELYQTLSETSKKEFLEDINEYVSEGDDDEKATYVVHPVIRKRYESKFNYFAIRYLDEFAQFPTLKFQIFVGQYLHDNRPKTLASNGMTAQRMIKEKINLFGNLSEVTKHKSDFFEKESAVQGWEFFPNPSYNWAGNNIPVYIDLIGKEGKAKEIQVQINKYRKQLNPAPQRDKRISKKEIIEQLYKEKVVYGDPTLMLSANELMALLYELIVNGKSGAELENKIVEQIIARYEQIEAYDPTTQQLPTNQMPHKLQKSRKDSKVTDTDKLLKTIDKEIDEGNKKLELIACHRKEWEEAEQRKKSGKRNNPGTKSRKHLFYASEMGEEATWIANDLKRFMPKPARAEWKGTHHSELQRLLAFYSTQRLEAWQLVESVWTANTHSFWEENFKEAFYKPEFENFYGAYIEIRTKILTTCRSILENNPEATMNNDTEKEWDKVFTLFDKRLYRTSTTDEQKKQLLTKPFAFPRGLFDDKPTFLPGSKPNENPERFAAWYSYGYTYSGKFQSFYDMPRNYSDWYKKLKEDGKLPRLDKKTEQEKILRFRMDCDLNIKHIRFQDIYVKLMVDSLYKAVFGQQPEFDLSHLYDTRSERYENNTIAQRQKSRQEGDNSDNAINENYVWNKTFAISLYNGRITESQVKLKDVGKFRRFATDPRVQTLISYDDTRTWTKLEIENELDNKADAYEPIRRTQSLKAIQQLEKNILKKNGFNGKQHPEELKHNGNPNFRKYIANGLLKHRTDIRQEELALISDTEFQEIGLERIRQTNPLIQKAYLLILLRNKFGHNQLPDQEHFRLMRSIYPYNQQESYSAYFNHVITQIIEELNT

SEQ ID NO: 1428 - protein, 1140 aa, Artificial
  Synthetic
MENDQQILENRRRTLANDPQYFGGYLNMARLNIYNISNHLAASFEQKVLPEEGQIPASFLCNKSIKKINWNHVYSKARRFLPILKVFDADSLPKEERETTDKEGKDFTAMNETLKLVFDELQAFRNDYSHYYSTEKADSRKLTISVELADFLTVNFKRAIAYTKVRMKDVLADDDYTMVESKQIVTPDNLITTEGLVFLTCMFLEREQAFQFIGKVQGLKGTQFNSFIATREVLLAYCVKLPHDKFVSEDLGQALTLDIINELNRCPKTLYEVITEEEKQQFRPELDAQGIDNLIANSTNEEEREKILDEIDYEDYIESLTRRVRHSNRFSYFAMRYIEEKNVFDKLRFHIDLGKYEVDKYNKQFDGEATECKVVENAKAFGKLSSFTNQETVELKIDSAQRTNGFEQFAPHYNADNNKIGLSNKESEARLLTKAKPESKVSYNLKQPLPQAILCLHELPKIILLEYLQKGKAEEMINDFIKVNDSQLMSMQFIDEIKEQLPADWNEFGKRSDSKKKKAYTNAALQYLLQRKATLNKVLANYQLNDKQVPTRILNYWLNIKEVDDSRSVSDRIKLMKRDCMSRLKVVEKHKLDKSARTPKVGEMATFLAKDIVDMIVSTDKKQKITSFFYDKMQECLALYADTDKKATFIHIVTNELKLLEKGGHPFLANINLRQIRKTSQLYELYLVEKANKQVKKMNPKTQRTSNVDESWMMKSFYAKEWNEEMGKQLTVVKLPVNKTNIPFTIRQWEEKEKHNLQAWLHNITKGKTSKDGKKAIDLPTNLFDDTLCELLREALINQGIDATPTTKYNELLKQWWTAREDSTQDFYLSERQYDIYDEKVCFTINSSAHFADYYAPALNKAYSRLRAERDVARRTDKRLPPVERKDVERVFKNTIAETEKEIRMLQEEDRMAVLMLEQLMDNQQQLKLSKMDSLLNETKRIEQTINTQLSFDHKGKEIKDKTNSEIVKTIVAERKQKNYTEMRKYVHDRRLPELFEYIDGNELPLDVLLNELRAYNTAKQMVFDTVFALEKKIIETDPEGLKQLNVGKNGQIQTGNIQHKPYVQWLENKGLITDHQKQFINMVRNSFSHNQFPQRSTVELLMPEWQNTDIALQIAREYQQLIVDIIEKSLHPHKQHQMV

SEQ ID NO: 1429 - protein, 1129 aa, Artificial; identical to SEQ ID NO: 1396
  Synthetic

SEQ ID NO: 1430 - protein, 1119 aa, Artificial
  Synthetic
MTEQNERPYNGTYYTLEDKHFWAAFFNLARHNAYITLAHIDRQLAYSKADITNDEDILFFKGQWKNLDNDLERKARLRSLILKHFSFLEGAAYGKKLFESQSSGNKSSKKKELTKKEKEELQANALSLDNLKSILFDFLQKLKDFRNYYSHYRHPESSELPLFDGNMLQRLYNVFDVSVQRVKRDHEHNDKVDPHCHFNHLVRKGKKDRCGNNDNPFFKHHFVDREGKVTEAGLLFFVSLFLEKRDAIWMQKKIRGFKGGTETYQQMTNEVFCRSRISLPKLKLESLRTDDWMLLDMLNELVRCPKSLYDRLREEDRARFRVPVDILSDEDDTDGTEEDPFKNTLVRHQDRFPYFALRYFDLKKVFTSLRFHIDLGTYHFAIYKKNIGEQPEDRHLTRNLYGFGRIQDFAEEHRPEEWKRLVRDLDYFETGDKPYITQTTPHYHIEKGKIGLRFVPEGQHLWPSPEVGATRTGRSKYAQDKRLTAEAFLSVHELMPMMFYYFLLREKYSDEASAERVQGRIKRVIEDVYAVYDAFARDEINTRDELDACLADKGIRRGHLPRQMIAILSQEHKDMEEKVRKKLQEMITDTDHRLDMLDRQTDRKIRIGRKNAGLPKSGVIADWLVRDMMRFQPVAKDTSGKPLNNSKANSTEYRMLQRALALFGGEKERLTPYFRQMNLTGGNNPHPFLHETRWESHTNILSFYRSYLKARKAFLQSIGRSDRVENHRFLLLKEPKTDRQTLVAGWKSEFHLPRGIFTEAVRDCLIEMGHDEVGSYKEVGFMAKAVPLYFERACKDRVQPFYDYPFNVGNSLKPKKGRFLSKEDRAEEWESGKERFRLAKLKKEILEAKEHPYLDFKSWQKFERELRLVKNQDIITWMMCRDLMEENKVEGLDTGTLYLKDIRTEVQEQGSLNVLNRVKPMRLPVVVYRADSRGHVHKEQAPLATVYIEERDTKLLKQGNFKSFVKDRRLNGLFSFVNTGGLAMEQYPISKLRVEYELAKYQTARVCAFEQTLELEESLLTRYPHLPDKNFRKMLESWSDPLLDKWPDLHRKVRLLIAVRNAFSHNQYPMYDEAVFSSIRKYDPSSPDAIEERMGLNIAHRLSEEVKQAKKMAERIIQA

SEQ ID NO: 1431 - protein, 1175 aa, Artificial
  Synthetic
MTEQNEKPYNGTYYTLEDKHFWAAFFNLARHNAYITLTHIDRQLAYSKADITNDEDILFFKGQWKNLDNDLERKARLRSLILKHFSFLEGAAYGKKLFESQSSGNKSSKKKELTKKEKEELQANALSLDNLKSILFDFLQKLKDFRNYYSHYRHPESSELPLFDGNMLQRLYNVFDVSVQRVKRDHEHNDKVDPHRHFNHLVRKGKKDRCGNNDNPFFKHHFVDREEKVTEAGLLFFVSLFLEKRDAIWMQKKIRGFKGGTEAYQQMTNEVFCRSRISLPKLKLESLRTDDWMLLDMLNELVRCPKSLYDRLREEDRARFRVPVDILSDEDDTDGAEEDPFKNTLVRHQDRFPYFALRYFDLKKVFTSLRFHIDLGTYHFAIYKKNIGEQPEDRHLTRNLYGFGRIQDFAEEHRPEEWKRLVRDLDYFETGDKPYITQTTPHYHIEKGKIGLRFVPEGQHLWPSPEVGATRTGRSKYAQDKRFTAEAFLSVHELMPMMFYYFLLREKYSDEASAERVQGRIKRVIEDVYAVYDAFARGEIDTLDRLDACLADKGIRRGHLPRQMIAILSQKHKDMEEKVRKKLQEMIADTDHRLDMLDRQTDRKIRIGRKNAGLPKSGVIADWLVRDMMRFQPVAKDTSGKPLNNSKANSTEYRMLQRALALFGGEKERLTPYFRQMNLTGGNNPHPFLHETRWESHTNILSFYRSYLKARKAFLQSIGRSDRVENHRFLLLKEPKTDRQTLVAGWKGEFHLPRGIFTEAVRDCLIEMGYDEVGSYKEVGFMAKAVPLYFERASKDRVQPFYDYPFNVGNSLKPKKGRFLSKEKRAEEWESGKERFQDLEAWSHSAARRIEDAFAGIENASRENKKKIEQLLQDLSLWEAFESKLKVKADKINIAKLKKEILEAKEHPYHDFKSWQKFERELRLVKNQDIITWMMCRDLMEENKVEGLDTGTLYLKDIRTEVQEQGSLNVLNHVKPMRLPVVVYRADSRGHVHKEQAPLATVYIEERDTKLLKQGNFKSFVKDRRLNGLFSFVDTGGLAMEQYPISKLRVEYELAKYQTARVCVFEQTLELEESLLTRYPHLPDKNFRKMLESWSDPLLAKWPELHEKVRLLIAVRNAFSHNQYPMYDEAVFSPIRKYDPSSPDAIEERMGLNIAHRLSEEVKQAKEMVERIIQA

SEQ ID NO: 1432 - protein, 981 aa, Artificial
  Synthetic
MADKTAELCLFYNLALNRVNDLVRKYEKDDTLHIEDVNWETFGGFRNVSTYLHLQVFMWKEPLSASFTTLSTADKKRIHELLRKLVDLRNYQSHYYHDASVLKFPQELIDFIYSRYANARNALELKYPEFVTWFHDLNEDKVIFKNSKGEEREDVYRHFYFFNANGNIEPEGKNFFLSFFLLKGEMSKFLKKRSRCKRDNGEKYQVKTRLYTYYCHRDGSNRFFLEGKEEYMDTEERLRRQGNTLLNYLKSRPLVDLKYLPPAPPPQLLSKKEVEERKNRAESQAEEEKTYIRRTDKFASLVVRYFMDRAFLGYEQEPCFYWHVKSLDLEEVQKQKQENRVYDAEGAYYYQKESRWSPHFVPGEFPVFVNGHIKFRLGPEGMEYAISTGELKNMLYLLLNSPRKNMTEIQDALLRYGTQFSNAMRELTTEHNIRYEAYPLVFEKGRDSVLLSKMHRKVLDKEKFDAAIYTAALEKALDSRLRWVEYNCKPEVYTLYTRNRMNRILLSCFNWYLPDDAKLKPTEVNKLSIYNFVSDNSYTSDATRESIVVGIQQKLNRAQFGAFALLRTASGLQDAYLKMLGKLRDSLLVEKQQLLAGTHGHVLKLGARLGLALPGTDVSRNGTDRMQELKQTIRSKPILVRNGFFKQYFMPEEPAAARRNSISARLWKNRLLTQNLVQGQYKLQNQSEFINHPEYGLADIAPDILALVGDHFDACMMEHTQGSRQTFAQLVDRFEALYTGSKSPEKRKQIADAINYSRVLKEIQAQDALLLQVFFEYHNRKLPLNRRELKYKPLSTLFEEEYELQIDASYKVQLKYKQLDDLSTHWNRTKIEQLFKNEAYWNLAIIAELDAKGKKSMQEKIRIVMDRVWNDSYHYIKAFLHIEKEAVEIQKKEGIPATELISRSQAIRSPGLPRIEGKVLLSTFAGLDEGKINRFIQLRNAAFHAGIPEECVKYEKVKDDLYAATGVKKPVVKPKKYEKKK

SEQ ID NO: 1433 - protein, 1169 aa, Artificial
  Synthetic
MDTNAPKRYTMETEPWYYGGYLNMARHNMFLISNEIVTKLKLGFAKKKADTAEAEPLSPKLLKDDGALPSSFLTDKDYLEKNNPRRIYALLRRFLPLAALFATDTTSDEYSEKELDIAQMSDILKELFAELNRFRNDYSHYYSVDREDRRKTELDEQVAVFLRNTFYYAIHLARKRFEGVIDARHFQFVEKEIAPGIVRADGKVTTRGLVFFCCLFLDKENAFHFINKVSGFKNTSTFDFLATREVFSVLCAKMPHDRFISENPEQALQLDILNYLNRAPAELYQALSAEAKKPFQPQLGKDERYNMTQNSIPEHIEEESYENYLESISVKRRHTDRFPEFALKFLDRSDTFDFYFQLHLGKSIFRAYPKTLLGETPEEPNRSISGDIKTFRNLHTFLGNHEEEREQVKAQITAEADFLKEFSGEYAEYFTQYAPHFHIVNNKIGILPYSNKKYHEKLYRPLAPLAFLSVHELPKVALLEILEPGSAARCIHECIQKSTIQVLNNDFIEEVKQSLAFDKEIKRQFWDDKLPHIEPAAADKKAFDDIRNKLDQEKKGRNRQSATQNLNNRRKALFYAQYVARVNERKEKLNTILAEYGLNHRQIPGRILDYWLRIVEVETAAAIKNRIRAERKECKQRIKALDAGKGPKIGEMASYLARDIVNLVIDEKRKAKISSFYYDQLQECLALYADAAKKQRFLDICTKELQLFDTANGHPFLADLPFNKIHKTKDLYRKYIERKGTAQRMGKVWNRKEKCFKSEKKEDSWLCNTFYSKVKAKDKTEIQIPESGKGVPLSYRRLAREESPLPAWLHSVTKGNVEKADSKPIDLPLNLFDDCLNRLLTAELGDRLQAGEKYNYSKLLAIWRPEIQPFYNWEREYVLFKDEPYEGRVAFKPGAKATFREYYEPVLDSVYRKRKRVDPQIQEVQVRRVFKKAIDENEKQLRFYQAKDRILMLMLDRMATEKLNISLAEIYPGSATSPLNVQTTISEKIGDKYNKYISYTRKRKDYALFRRFITDRRMHGLFAWYTQDTIAFEDLKKELDDYEKLRPQVLEMCFTLEQAIISHMSKDELDAMAEKANAKAAEKNRRNTHVEHGLYMDWLRKYAIITFEEETFYREIRNKFSHNEFPRADRLPKAVRESSDGITITHSIVTYYLQELQKLMEEKGVFTAL

SEQ ID NO: 1434 - protein, 1169 aa, Artificial; identical to SEQ ID NO: 1433
  Synthetic

SEQ ID NO: 1435 - protein, 981 aa, Artificial; identical to SEQ ID NO: 1432
  Synthetic

SEQ ID NO: 1436 - protein, 1128 aa, Artificial
  Synthetic
MEILTIPEVIKCRTLSDDPQYFGGYLNMARLNVLNISNHIAKEFKLPLLPEEAHLKNSFLCKKENKKIDWNHVYARTIRFLSVMKVFDAESLPKEEQKTIDWEGKDFASMCDTLNIVFSELQEFSNDYSHYYSTEKETKRKTTVSDELALFLRTNFKRAIEYTKVRFKGILNDEDYQLVVSKKMLETNHTITHEGLVFLTSMFLEREYAFRFIRKIHGLSGPKDNSFIATCEVLMAFCLKLPQEQFRSDNRRQAISLELMNELKKCPKVLYHVITEEWKQKLKSVPEELETKNLHYNTKRETKIEFEDYDLYIESLTKQVRYNNRFSEFALKYIDETGIFSEFRFQLDLGKILVDEYLKNFNDERVQRCIIENAKAFGKLNDYTNETKVMSLIVNGPPLKSFDRFAPHYNIESNKIGISTHEVTAKLVPNSKGEPAKKLHQPLPEAFLSLHELPKIILLEYLQKGEPEKLINEFILVNNSKLMNMSFIEEVKNQLPKEWDKFQRRTNAKHELAYDENTLAFLLQRKQILNKTLLAYQLNDKQIPTRILDYWLNISDADEERAISNRLKSIKRDCMSRLKALSKFNENGNRNKIPGIGEMATFLAKDIIEMVVSEGKKRKITSFYYDKMQECLALFGDPDKKQLFIHIVTKELKLNDPGGHPFLDKLDLQKINSTTGFYEIYLQEKGHKMVPENNPKTGKVIYTDHSWMALTFYKIEFNDKVDMLMTVVKLPLKKLNIPFTLRQLSGKTNNTLKQWLNNLTQGKKRNDGKRPINLPTNLFDERLAELLRKDLDNKKIVYWPYANWNELFKTWWSSRNDGLQSFYNAEREYRIFDEKVNFYPNRKENFADYYQHALKLAFQKKQSKRILEQMYDQHLPDILFDQVEKTFRHTIAETEKEIRILQEEDHIMLLMLESLLDDGSKQQLKLSEIRTHLNRTTNIRQVVKGKLSFDDSGELIKDNTNSEIVRTVSVTDQLKKFHLRPRFISDSRLPELFEYFPDKEIQMESLKNEFDTYNAARQVVLNLSFNLEKMIIEKGRLDRINQLLTSATGDLLTGHIGHKTYLTWLKNHGIIDNDTFIFMNMVQYCFSHNQYPQKKTMARLISRWDQHRFALQIEATYIQKIAGIIEDL

SEQ ID NO: 1437 - protein, 1140 aa, Artificial; identical to SEQ ID NO: 1356
  Synthetic

SEQ ID NO: 1438 - protein, 1168 aa, Artificial; identical to SEQ ID NO: 1357
  Synthetic

SEQ ID NO: 1439 - protein, 1047 aa, Artificial; identical to SEQ ID NO: 1398
  Synthetic

SEQ ID NO: 1440 - protein, 1175 aa, Artificial
  Synthetic
MTEQNEKPYNGTYYTLEDKHFWAAFLNLARHNAYITLTHIDRQLAYSKADITNDEDILFFKGQWKNLDNDLERKARLRSLILKHFSFLEGAAYGKKLFESQSSGNKSSKKKELTKKEKEELQANALSLDNLKSILFDFLQKLKDFRNYYSHYRHPESSELPLFDGNMLQRLYNVFDVSVQRVKRDHEHNHKVDPHRHFNHLVRKGKKDRCGNNDNPFFKHHFVDREEKVTEAGLLFFVSLFLEKRDAIWMQKKIRGFKGGTETYQQMTNEVFCRSRISLPKLKLESLRTDDWMLLDMLNELVRCPKSLYDRLREEDRARFRVPVDILSDEEDTDGTEEDPFKNTLVRHQDRFPYFALRYFDLKKVFTSLRFHIDLGTYHFAIYKKNIGEQPEDRHLTRNLYGFGRIQDFAEEHRPEEWKRLVRDLDYFETDDKPYITQTTPHYHIEKGKIGLRFVPEGQHLWPSPEVGATRTGRSKYAQDKRFTAEAFLSVHELMPMMFYYFLLRENYSDEASAERVQGRIKRVIEDVYAVYDAFARGEIDTLDRLDACLADKGIRRGHLPRQMIAILSQEHKDMEEKVRKKLQEMIADTDHRLDMLDRQTDRKIRIGRKNAGLPKSGVIADWLVRDMMRFQPVAKDTSGKPLNNSKANSTEYRMLQRTLALFGGEKERLTPYFRQMNLTGGNNPHPFLHETRWESHTNILSFYRSYLKARKAFLQSIGRSDRVENHRFLLLKEPKTDRQTLVAGWKGEFHLPRGIFTEAVRDCLIEMGYDEVGSYKEVGFMAKAVPLYFERVCKDRVQPFYDYPFNVGNSLKPKKGRFLSKEKRAEEWESGKERFRDLEAWSHSAARRIEDAFAGIENASRENKKKIEQLLQDLSLWKAFESKLKVRGDKINLAKLKKEILEAKEHPYLDFKSWQKFERELRLVKNQDIITWMMCRDLMEENKVEGLDTGTLYLKDIWTDVHEQGSLNVLNRVKPMRLPVVVYRADSRGHVHKEQAPLATVYIEERDTKLLKQGNFKSFVKDRRLNGLFSFVDTGALAMEQYPISKLRVEYELAKYQTARVCAFEQTLELEESLLTRCPHLPDKNFRKMLESWSDPLLDKWPDLHRKVRLLIAVRNAFSHNQYPMYDETIFSSIRKYDPSSPDAIEERMGLNIAHRLSEEVKQAKEMVERIIQA

SEQ ID NO: 1441 - protein, 981 aa, Artificial; identical to SEQ ID NO: 1432
  Synthetic

SEQ ID NO: 1442 - protein, 1169 aa, Artificial; identical to SEQ ID NO: 1433
  Synthetic

SEQ ID NO: 1443 - protein, 1135 aa, Artificial
  Synthetic
MNTVPASENKGQSRTVEDDPQYFGLYLNLARENLIEVESHVRIKFGKKKLNEESLKQSLLCDHLLSVDRWTKVYGHSRRYLPFLHYFDPDSQIEKDHDSKTGVDPDSAQRLIRELYSLLDFLRNDFSHNRLDGTTFEHLEVSPDISSFITGTYSLACGRAQSRFAVFFKPDDFVLAKNRKEQLISVADGKECLTVSGFAFFICLFLDREQASGMLSRIRGFKRTDENWARAVHETFCDLCIRHPHDRLESSNTKEALLLDMLNELNRCPRILYDMLPEEERAQFLPALDENSMNNLSENSLDEESRLLWDGSSDWAEALTKRIRHQDRFPYLMLRFIEEMDLLKGIRFRVDLGEIELDSYSKKVGRNGEYDRTITDHALAFGKLSDFQNEEEVSRMISGEASYPVRFSLFAPRYAIYDNKIGYCHTSDPVYPKSKTGEKRALSNPQSMGFISVHDLRKLLLMELLCEGSFSRMQSDFLRKANRILDETAEGKLQFSALFPEMRHRFIPPQNPKSKDRREKAETTLEKYKQEIKGRKDKLNSQLLSAFDMDQRQLPSRLLDEWMNIRPASHSVKLRTYVKQLNEDCRLRLRKFRKDGDGKARAIPLVGEMATFLSQDIVRMIISEETKKLITSAYYNEMQRSLAQYAGEENRRQFRAIVAELRLLDPSSGHPFLSATMETAHRYTEGFYKCYLEKKREWLAKTFYRPEQDENTKRRISVFFVPDGEARKLLPLLIRRRMKEQNDLQDWIRNKQAHPIDLPSHLFDSKVMELLKVKDGKKKWNEAFKDWWSTKYPDGMQPFYGLRRELNIHGKSVSYIPSDGKKFADCYTHLMEKTVRDKKRELRTAGKPVPPDLAADIKRSFHRAVNEREFMLRLVQEDDRLMLMAINKMMTDREEDILPGLKNIDSILDEENQFSLAVHAKVLEKEGEGGDNSLSLVPATIEIKSKRKDWSKYIRYRYDRRVPGLMSHFPEHKATLDEVKTLLGEYDRCRIKIFDWAFALEGAIMSDRDLKPYLHESSSREGKSGEHSTLVKMLVEKKGCLTPDESQYLILIRNKAAHNQFPCAAEMPLIYRDVSAKVGSIEGSSAKDLPEGSSLVDSLWKKYEMIIRKILPILDPENRFFGKLLNNMSQPINDL

SEQ ID NO: 1444 - protein, 1175 aa, Artificial
  Synthetic
MTEQNEKPYNGTYYTLEDKHFWAAFFNLARHNAYITLTHIDRQLAYSKADITNDEDILFFKGQWKNLDNDLERKARLRSLILKHFSFLEGAAYGKKLFESQSSGNKSSKNKELTKKEKEELQANALSLDNLKSILFDFLQKLKDFRNYYSHYRHPESSELPLFDGNMLQRLYNVFDVSVQRVKRDHEHNDKVDPHRHFNHLVRKGKKDKYGNNDNPFFKHHFVDREEKVTEAGLLFFVSLFLEKRDAIWMQKKIRGFKGGTETYQQMTNEVFCRSRISLPKLKLESLRTDDWMLLDMLNELVRCPKSLYDRLREEDRARFRVPVDILSDEDDTDGTEEDPFKNTLVRHQDRFPYFALRYFDLKKVFTSLRFHIDLGTYHFAIYKKNIGEQPEDRHLTRNLYGFGRIQDFAEEHRPEEWKPLARDLDYFETGDKPYITQTTPHYHIEKGKIGLRFVSEGQHLWPSPEVGATRTGRSKYAQDKRFTAEAFLSVHELMPMMFYYFLLREKYSEEASAERVQGRIKRVIEDVYAVYDAFARGEINTRDELDACLADKGIRRGHLPRQMIAILSQKHKDMEEKVRKKLQEMIADTDHRLDMLDRQTDRKIRIGRKNAGLPKSGVIADWLVRDMMRFQPVAKDTSGKPLNNSKANSTEYRMLQRALALFGGEKERLTPYFRQMNLTGGNNPHPFLHETRWESHTNILSFYRSYLKARKAFLQSIGRSDRVENHRFLLLKEPKTDRQTLVAGWKGEFHLPRGIFTEAVRDCLIEMGYDEVGSYKEVGFMAKAVPLYFERASKDRVQPFYDYPFNVGNSLKPKKGRFLSKEKRAEDWESGKERFQDLEAWSHSAARRIEDAFAGIENASRENKKKIEQLLQDLSLWEAFESKLKVKADKINIAKLKKEILEAKEHPYHDFKSWQKFERELRLVKNQDIITWMMCRDLMEENKVEGLDTGTLYLKDIRTEVQEQGSLNVLNHVKPMRLPVVVYRADSRGHVHKEQAPLATVYIEERDTKLLKQGNFKSFVKDRRLNGLFSFVDTGGLAMEQYPISKLRVEYELAKYQTARVCVFEQTLELEESLLTRYPHLPDKNFRKMLESWSDPLLAKWPELHEKVRLLIAVRNAFSHNQYPMYDEAVFSPIRKYDPSSPDAIEERMGLNIAHRLSEEVKQAKEMVERIIQA

SEQ ID NO: 1445 - protein, 1175 aa, Artificial
  Synthetic
MTEQNERPYNGTYYTLEDKHFWAAFFNLARHNAYITLAHIDRQLAYSKADITNDEDILFFKGQWKNLDNDLERKARLRSLILKHFSFLEGAAYGKKLFESQSSGNKSSKNKELTKKEKEELQANALSLDNLKSILFDFLQKLKDFRNYYSHYRHPESSELPLFDGNMLQRLYNVFDVSVQRVKRDHEHNDKVDPHRHFNHLVRKGKKDRYGNNDNPFFKHHFVDREGTVTEAGLLFFVSLFLEKRDAIWMQKKIRGFKGGSETYQQMTNEVFCRSRISLPKLKLESLRTDDWMLLDMLNELVRCPKSLYDRLREEDRARFRVPVDILSDEDDTDGTEEDPFKNTLVRHQDRFPYFALRYFDLKKVFTSLRFHIDLGTYHFAIYKKNIGEQPEDRHLTRNLYGFGRIQDFAEEHRPEEWKRLVRDLDYFETGDKPYITQTTPHYHIEKGKIGLRFVPEGQHLWPSPEVGATRTGRSKYAQDKRFTAEAFLSVHELMPMMFYYFLLREKYSDEASAERVQGRIKRVIEDVYAVYDAFARGEIDTLDRLDACLADKGIRRGHLPKQMIAILSQEHKDMEEKVRKKLQEMIADTDHRLDMLDRQTDRKIRIGRKNAGLPKSGVIADWLVRDMMRFQPVAKDTSGKPLNNSKANSTEYRMLQRALALFGGEKERLTPYFRQMNLTGGNNPHPFLHETRWESHTNILSFYRSYLKARKAFLQSIGRSDRVENHRFLLLKEPKTDRQTLVAGWKSEFHLPRGIFTEAVRDCLIEMGLDEVGSYKEVGFMAKAVPLYFERACKDRVQPFYDYPFNVGNSLKPKKGRFLSKEKRAEEWESGKERFRDLEAWAHSAARRIEDAFVGIEYASRENKKKIEQLLQDLSLWETFESKLKVKTDKINIAKLKKEILETKEHPYLDFKSWQKFERELRLVKNQDIITWMMCRDLMEENKVEGLDTGTLYLKNIRTDVQEQGSLNVLNHVKPMRLPVVVYRADSRGHVHKEQAPLATVYIEERDTKLLKQGNFKSFVKDRRLNGLFSFVDTGGLAMEQYPISKLRVEYELAKYQTARVCAFEQTLELEESLLTRYPHLPDKSFREMLESWSDPLLDKWPDLQREVRLLIAVRNAFSHNQYPMYDETIFSSIRKYDPSSPDAIEERMGLNIAHRLSEEVKQAKEMAERIIQA

SEQ ID NO: 1446 - protein, 1135 aa, Artificial
  Synthetic
MNTVPASENKGQSRTVEDDPQYFGLYLNLARENLIEVESHVRIKFGKKKLNEESLKQSLLCDHLLSVDRWTKVYGHSRRYLPFLHYFDPDSQIEKDHDSKTGVDPDSAQRLIRELYSLLDFLRNDFSHNRLDGTTFEHLEVSPDISSFITGTYSLACGRAQSRFADFFKLDDFVLAKNRKEQLISVADGKECLTVSGLAFFICLFLDREQASGMLSRIRGFKRTDENWARAVHETFCDLCIRHPHDRLESSNTKEALLLDMLNELNRCPRILYDMLPEEERAQFLPALDENSMNNLSENSLNEESRLLWDGSSDWAEALTKRIRHQDRFPYLMLRFIEEMDLLKGIRFRVDLGEIELDSYSKKVGRNGEYDRTITDHALAFGKLSDFQNEEEVSRMISGEASYPVRFSLFAPRYAIYDNKIGYCHTSDPVYPKSKTGEKRALSNPRSMGFISVHDLRKLLLMELLCEGSFSRMQSDFLRKANRILDETAEGKLQFSALFPEMRHRFIPPQNPKSKDRREKAETTLEKYKQEIKGRKDKLNSQLLSAFDMNQRQLPSRLLDEWMNIRPASHSVKLRTYVKQLNEDCRLRLRKFRKDGDGKARAIPLVGEMATFLSQDIVRMIISEETKKLITSAYYNEMQRSLAQYAGEENRRQFRAIVAELRLLDPSSGHPFLSATMETAHRYTEDFYKCYFEKKREWLAKTFYRPEQDENTKRRISVFFVPDGEARKLLPLLIRRRMKEQNDLQDWIRNKQAHPIDLPSHLFDSKVMELLKVKDGKKKWNEAFKDWWSTKYPDGMQPFYGLRRELNIHGKSVSYIPSDGKKFADCYTHLMEKTVRDKKRELRTAGKPVPPDLAADIKRSFHRAVNEREFMLRLVQEDDRLMLMAINKMMTDREEDILPGLKNIDSILDKENQFSLAVHAKVLEKEGEGGDNSLSLVPATIEIKSKRKDWSKYIRYRYDRRVPGLMSHFPEHKATLDEVKTLLGEYDRCRIKIFDWAFALEGAIMSDRDLKPYLHESSSREGKSGEHSTLVKMLVEKKGCLTPDESQYLILIRNKAAHNQFPCAAEMPLIYRDVSAKVGSIEGSSAKDLPEGSSLVDSLWKKYEMIIRKILPILDPENRFFGKLLNNMSQPINDL

SEQ ID NO: 1447 - protein, 1175 aa, Artificial
  Synthetic
MTEQNERPYNGTYYTLEDKHFWAAFFNLARHNAYITLAHIDRQLAYSKADITNDEDILFFKGQWKNLDNDLERKARLRSLILKHFSFLEGAAYGKKLFESQSSGNKSSKKKELTKKEKEELQANALSLDNLKSILFDFLQKLKDFRNYYSHYRHPESSELPLFDGNMLQRLYNVFDVSVQRVKRDHEHNDKVDPHRHFNHLVRKGKKDKYGNNDNPFFKHHFVDREGKVTEAGLLFFVSLFLEKRDAIWMQKKIRGFKGGTEAYQQMTNEVFCRSRISLPKLKLESLRTDDWMLLDMLNELVRCPKSLYDRLREEDRARFRVPVDILSDEDDTDGTEEDPFKNTLVRHQDRFPYFALRYFDLKKVFTSLRFHIDLGTYHFAIYKKNIGEQPEDRHLTRNLYGFGRIQDFAEEHRPEEWKRLVRDLDYFETGDKPYITQTTPHYHIEKGKIGLRFVPEGQHLWPSPEVGATRTGRSKYAQDKRLTAEAFLSVHELMPMMFYYFLLREKYSEEVSAERVQGRIKRVIEDVYAVYDAFARDEIDTLDRLDACLADKGIRRGHLPRQMIAILSQEHKDMEEKIRKKLQEMIADTDHRLDMLDRQTDRKIRIGRKNAGLPKSGVIADWLVRDMMRFQPVAKDTSGKPLNNSKANSTEYRMLQRALALFGGEKERLTPYFRQMNLTGGNNPHPFLHETRWESHTNILSFYRSYLEARKAFLQSIGRSDRVENHRFLLLKEPKTDRQTLVAGWKSEFHLPRGIFTEAVRDCLIEMGLDEVGSYKEVGFMAKAVPLYFERACKDRVQPFYNYPFNVGNSLKPKKGRFLSKEDRAEEWERGKEQFRDLEAWSHGAARRIEDAFVGIEYASRENKKKIEQLLQDLSLWETFESKLKVKTDKINIAKLKKEILEAKEHPYLDFKSWQKFERELRLVKNQDIITWMMCRDLMEENKVEGLDTGTLYLKDIRTDVQEQGSLNVLNHVKPMRLPVVVYRADSRGHVHKEQAPLATVYIEERDTKLLKQGNFKSFVKDRRLNGLFSFVDTGGLAMEQYPISKLRVEYELAKYQTARVCAFEQTLELEESLLTRYPHLPDKNFREMLESWSDPLLDKWPDLQREVRLLIAVRNAFSHNQYPMYDETLFSSIRKYDPSSPDAIEERMGLNIAHRLSEEVKQAKEMAERIIQV

SEQ ID NO: 1448 - protein, 1135 aa, Artificial; identical to SEQ ID NO: 1403
  Synthetic

SEQ ID NO: 1449 - protein, 1168 aa, Artificial; identical to SEQ ID NO: 1357
  Synthetic

SEQ ID NO: 1450 - protein, 1003 aa, Artificial
  Synthetic
MGAIENKHIFAAYANLAIDGLIKTLNFIAKKLDTQKQLSSWDIKHVITLIDSIFDQNPQNNLEQVVEGYLPWIKPIIEMKTPKKGERQSDKLCIEYKTIITAFASLLNDVRNYYTHYYHDPICIYPGGYDIPSSLNCIYDSAINIIKERFQAEEKEMEHLRRYTRKKGRVVLKTEDDHFYYTLANNNDLSEKGYAFFISMFLERKYSYLFLKKLSGFKRGDSLQYRLTLEVFTALSTKPPVERLRTTKDTKQDRALDILNELSKIPIELYQTLEPKYREMYNETLQPTDAEDPYGLPDRSRIRFRSRFEAFALHFLDKQADFKEIGFYTYLGNYFHNGYQKTRVDRETKDRYINFQLAGFCKNIQDISAKKLSEALNVKSIDISTDSIPDINSFEPYLVQSTPHYIVNGNNIGIKVLPEGKDTYPTIDEKGAKMPIADFWLSKYELPAMLFYTYLRNNNIHKSHCPLSVKDIIERSIHKSTKQKHPEERSELMLRRVMKAIFWTDSKLNEVERIKSQKSAFGKRQHEILKAGRIAETLVRDMLWLQPSKNNGRDKVTEPNFQAIQVSLAYFGIRRNDLTEIFTRAGLINSSNPHPFLAQIGTNYTSLIEFYIAYLKERKVYFSRIQKKILQGKLNIQCHPLRDLQREPNKPQEKEEAIFLPRGLFNEAIINCLKKSKLKHLIESPTREKSPALNVSYLIQNYFRAYFEDQSQEFYAQPRNYRLFDNLSPNKGKSKSYLSLEQRIKKMEELRPSKIPVAEANKLLEKEDRLYRKNYNEICDNESIIRLYQIQDILLFMMTKEYLPSDLYNRINKYKLENVKGILNERVSYLIDLNPLKIQGEDIKIKDYGKLFYIHHDTRISSLNKVLSKVKRNNSISSSVKIQPYENYKRECLDFEEAQIQIIPIIHSFEIAMVSMFPDLKKATPGNYYDFNELITEYEKRTKQKIDSSFLIKTRNMFLHDKYEAECIKEISDDFVYAKKIIAEFKMKIENIKLEDFSNDSSA

SEQ ID NO: 1451 - protein, 1081 aa, Artificial; identical to SEQ ID NO: 1329
  Synthetic

SEQ ID NO: 1452 - protein, 1008 aa, Artificial
  Synthetic
MDTPNFSERIPVSLQSHPYYFAHYLNMARHNAYVILEYVNRELIKPGKNLDEDNLIQSTVLKDGYFDRKPDELSHRNRLLVQHFPFLREAENEGARTCNPVSYKLKTALAALNQWRNNASHYPLNQNHEKDFDLQPFFSFAIEACKKRMREVFQPDDFYLLETNEKQFYTLHNENGFTEKGLYCFICFFLEKKYAFQFLAGIKGFKNTTDNKFRATLETFTEHCCRLPKPKLDSSDIKLDMLGELSRCPAPLFDLLDIEERKKFIREPEEVKPDESGDREEVQQVLMKRYDDRFPYFALRYFEEKNLLKGISFHIHIGRWIKSEHTKKIMGAERDRRLLKDIRTFGELKEFSPEHAPDYWLRDGITPDDVDQFSPQYRIVGNRIGIKLNYNGHNRWSVPDKEINVKPDAIISTYEFLNLFLYEHLYQKKLTGLSPAEFIQDYLDRFNNFLSEFKAGHIRPVGDFSLEKRRGQGDEPDLTARRKSLQKELDRFVLKGKDLPDKIREYLLGYKQKSEKKQAKWILGGMIKETVYWRNKAEQSPEKMRSGDMAQQLARDIIFLTPPHTVKEHKQKLNSLEYDVLQYALAYFSSNREKLYSFFKEHQLTVKGDRAHPFLYKIRLDECQGILDFFIVYMQQKEKWLGWLDRNLKSPRLNEEEFFNTYSYFIKTDTKRAIEMDYESCPNYLPRGIFNEPIAKALQKAGVKIKDEDNASYALSVYSNGKTQPFYNKERYYNKGIFRMEELPEKLQPKELLGKIQWTIKSSGKDTEEFRSLQNLKNRILNTEKEIRYVQSTDRALWIMVADLFPETFELRPDDLECIGHDLSDDLLSRPYQMKEKVYNYTITDYLPIKRYGEFRRFLKDRRLENLLTYFEEGVPLHREALVAELEAYDLQRKNLLEIIYRFEKLVFDRHRHELTFSGEGENQYVNHWDYLDFVARKYGLSAEVKELNSERFTELRNKMLHNQIPYQLWIKEAIAAREENTVCGRIMGMIGEIYERMTTEIEKQMQV

SEQ ID NO: 1453 - protein, 1085 aa, Artificial
  Synthetic
MKKELNREDVFTGGKTPELTIYYNIAYFRMAGLINALCGNKLERDKDALEQFMKAFINGKQKLTDMQFVKLCDYLWKGYKYDKNRSEYSLTENDKTMVLKMVAKLQDIRNFQSHIWHDNKVLVFDADLVQFIKNKHLEAIDAQRQRFSKETEVYEKENRELKKKKNKELLFDIHDGLGYITGEGRNFFLSFFLTRGEMTRFLKQRKGCKRDDTPEYKIKHLVYRHFTHRDGATRTHYGYEDNMLDQLPDKQEFLTTRHTYRLINYLNDIPEEVTNPELFPLFNTISNGILIKESVGTYIAFINKMPLLSDFEFSEVWGKDGKPYTNLVEFYHKTQPGFKFRTDLNSFHKIILNLIRDENYTGFFTTQLNLFMAHREELILVISKPLITPNDLLLIEEHYRYKLKANDFVREKLGEWKEKIEKGKWEKANEQKDKLINLLGGVIEITFYDFYWQKDEKPRNENRFMEFAIRFMADFNLLPDCEWEVEPLQIENDLIANRTATPDLKKSGSQFMNQLTDNYRLKFNDGQIAFRYQNQVFIMGHKAVKNLLIACFDGKEKMLNGFMPALLADLKKITNEHILKNHQALNTLSLLNNDSIPSYISRQWGEAEPITDMKKKAIARMDYITQQFEALIENHHYLNRADKNRQIMRCYKFFEWQYPQNSQFKFLRRNEYHRMSIYHYCLDKEQHKYDKKGHNYLYNRLIKESHNESGNIEQHLPYQIRTMLNDAKDFNDYFLRILNATHKILTDWKNQLKQGREPNNYYLSRLGFTGGLTQKVVHTRLLPFSIHPGIPVSFFYRTEMNQNPSFNLSAKVWNSESPFRVGLKESNYQYAKYLGLFNEIKTQRKIIGKMNQLIAEDALLWQIAKKYLDKCHPKFSEIINQQVNGKQPLNVKAIHDTELTIDFPVDKNLYQVVVKMKQLDDFMFIDSKPVLEKTIRYMIKNSLRDKEYQQRVFIETNPGVFKIPYNEVVEAMRTINHQALTWARLLLDWESKTVKTIPEADKKAKLQEAYNKRQPAFFNFNDICRYADDGKQLKDLRNKTFHTEVPETWTYDEMRENKTIKMVLGINETTFLKKDYAIENARTIE

SEQ ID NO: 1454 - protein, 1103 aa, Artificial
  Synthetic
MENQELKTRTMKSEPYYYGAFLNMARLNIFNISNHLSNKLNILPTLSSEEHIANAFFTDKNTKIKWEHTYDILRRFIPIVKVFDTESLPKGEVGNNTGKDFSKMSDTLKIIFKELNEFRNDYSHYYSTEKEDKRKITISDELANFLNENFKRAIAYTKKRFKGVFTEKDFELANNIQLFNKDKEITEFLEREYAFQFISKIEGLKGTQKSEYRATREVFMAYCVNLPHDKFISEDAKQSFSLDIISELNRCPQTLFNVITEKEQEKFRPTINQQEKNNIINNSVPYDIEDYEEYVNSITKKIRYDNRFPFFALKFIDETQVFEKIRFQIDLGEILLDEYTKQLANNEEKRQVVQNAKAFGRLNDFIDENNVLENINKQNGSASFIQYAPNYNFDNNKIGIDTTGKRIMPILTKQTDNNKKVKNKLKQPLPKAFLSIHELPKIILLEYLEKGKAEKLINDFLLINESQLLNYKYIEEIKNKLNNFDVFQKRSQRKKLQTAYNKTNIEELQSRKEELNKILKEYKLNDKQIPTRILEYWLNIEDVTPNEAISDRIKLMKRDCVDRLRDIKKGKAPKIGEMATFIAKDIVDMIISKDIKQKISSFYYDKIQECLALYNVSEKRDLFLTICNELRLLDADKGHPFLKNINLNRINYTSDFYVKYLQEKGHKLIKETNYRTGKLVEKDKSWMFLNFYYLKKNETLNKMMTIVQLPDDKSKLPFTIAQLDKPKNTFEEWINNITKGKTKTDKEKPIDLPTNIFDKEIEEILKNKLSEEKIAFTENANYNQLFKLWWTDCRKDNVQKFYDAEREYVIYDEHVKFIPNTKPKFENYYNESFPIVLTRLKRDREEARKLNRKLPPIEKSQVEKVFKQAIGSTEKEIRLLQEEDRIMLLMFEQLLETDNNLNLKLNNAESLLNEQITIKEKISLKLSFNEQEDKKEIIKTIIDKRKRKDFSILRKFKYDKRLPELCEYFETDDISHSDLKKELDEYNKAKEQILANAFMLEKTIIEKDKDGIKALFLNDNGEKKYGNVQHKPYLTWLKNKGLINDNEYLFINMVRNTFSHNQFPQKRTIQIFIDKNRGNPITFAETIKNAYNKKIEEIIVKIK

SEQ ID NO: 1455 - protein, 1098 aa, Artificial
  Synthetic
MENDKKLEESACYTLNDKHFWAAFLNLARHNVYITVNHINKTLGEGEINRDGYETTLENTWNEIKDINKKARLRELIIKHFPFLEAATYQQRSTDSTKQKEEKQAEAQSLESLKHCLFPFLKKLQKSRDHYSHYKHSKSLERPKFEEDLQKKMYNIFDVSIRLVKEDYKHNTDINLKEDFKHLNRTGKFKYSFADNKGNITESGLLFFISLFLEKKDAIWMQKKLKGFKDSREKYQKMTNEVFCRSRILLPKLRLESTQTQDWILLDMLNELIRCPKSLYERLREKERKEFKVPIEIADEDYDAEQEPFRNTLVRHQDRFPYFALRYFDYNEIFTNLRFQIDLGTYHFSIYKKLIGGNKEDRHLTHKLYGFERIQEFAKQNRPDEWKALVKDLDTFNKEEEKLYISETTPHYHLENEKIGIVFKNHNIWPSTQTELTNNNRKKYNLGVSIKAEAFLSVHELLPMMFYYLLLKTKNTHNGNEVEAKKKGTKNKKQEKHKIEAIIESKIKDIYNLYDAFANGEINSIEELEEHCKGKDIEIGHLPKQMIAILKDEHKDMAKKAETKQEKMILATENRLKTLDKKLKGKIRNGKRCNSALKSGEIASWLVNDMMRFQPVQRDEEGKPLNNSKANSTEYQLLQRTLAFFGSEHERLDPYFKQMNLIGDNNPHPFLNDTEWEKCNNILSFYRSYLKARKNFLESLKPEDWEKNQYFLMLKEPKTNRKTLVQGWKNGFNLPRGIFTEPIRKWFMEHWKSIKVDDLKRVGLVAKVIPLFFSEKYKDSVQPFYNYPFNIGNINKPEEKDFLDYEKRKKLWDKKQAKFKGKTDKEKREDPSYPDFKSWKKFERELRLVRNQDIVTWMLCMELFEEQKVDGLNTGQIHLKDIVTNVDEEGNNNILNQIKPMQLPITVYDKENSPKRKPLHTIYIEETGTKLLKQGNFKALVKDRRLNGLFSFVKTSSEAESKSKPISKLRVEYELGAYQKARIDIIKDMLALEKTLIDNDENLPTNKFSDMLKSWLKGKGEANKARLQNDVDLLVAVRNAFSHNQYPMYNSEVFKGMKLLSLSSDIPEKEGLGIAKQLKDKIKETIERIIEIEKEIRN

SEQ ID NO: 1456 - protein, 1175 aa, Artificial
  Synthetic
MTEQNERPYNGTYYTLEDKHFWAAFFNLARHNAYITLAHIDRQLAYSKADITNDEDILFFKGQWKNLDNDLERKARLRSLILKHFSFLEGAAYGKKLFESQSSGNKSSKKKELTKKEKEELQANALSLDNLKSILFDFLQKLKDFRNYYSHYRHPESSELPLFDGNMLQRLYNVFDVSVQRVKRDHEHNDKVDPHRHFNHLVRKGKKDRYGNNDNPFFKHHFVDREEKVTEAGLLFFVSLFLEKRDAIWMQKKIRGFKGGTETYQQMTNEVFCRSRISLPKLKLESLRTDDWMLLDMLNELVRCPKSLYDRLREEDRARFRVPVDILSDEDDTDGTEEDPFKNTLVRHQDRFPYFALRYFDLKKVFTSLRFHIDLGTYHFAIYKKNIGEQPEDRHLTRNLYGFGRIQDFAEEHRPEEWKRLVRDLDYFETGDKPYITQTTPHYHIEKGKIGLRFVPEGQHLWPSPEVGATRTGRSKYAQDKRFTAEAFLSVHELMPMMFYYFLLREKYSEEASAERVQGRIKRVIEDVYAVYDAFARGEIDTLDRLDACLADKGIRRGHLPRQMIAILSQEHKDMEEKVRKKLQEMIADTDHRLDMLDRQTDRKIRIGRKNAGLPKSGVIADWLVRDMMRFQPVAKDTSGKPLNNSKANSTEYRMLQRALALFGGEKERLTPYFRQMNLTGGNNPHPFLHETRWESHTNILSFYRSYLKARKAFLQSIGRSDRVENHRFLLLKEPKTDRQTLVAGWKGEFHLPRGIFTEAVRDCLIEMGLDEVGSYKEVGFMAKAVPLYFERACKDRVQPFYDYPFNVGNSLKPKKGRFLSKEKRAEEWESGKERFRDLEAWSHSAARRIEDAFAGIENASRENKKKIEQLLQDLSLWKAFESKLKVRGDKINIAKLKKEILEAKEHPYHDFKSWQKFERELRLVKNQDIITWMMCRDLMEENKVEGLDTGTLYLKDIRTDVHEQGSLNVLNRVKPMRLPVVVYRADSRGHVHKEQAPLATVYIEERDTKLLKQGNFKSFVKDRRLNGLFSFVDTGGLAMEQYPISKLRVEYELAKYQTARVCAFEQTLELEESLLTRCPHLPDKNFREMLESWSDPLLDKWPDLHGNVRLLIAVRNAFSHNQYPMYDEAVFSSIRKYDPSFPDAIEERMGLNIAHRLSEEVKQAKETVERIIQA

SEQ ID NO: 1457 - protein, 1127 aa, Artificial
  Synthetic
MNTHQEELQSWITRKRLPDTEMKKYWAAYMNLARLNFFKTLMFISNSIGDLKPAKDNNGKGNTEVNMHNMGILTALLGPEDEEKARLLIFKHFPFLRTFCIEKELSLSKQRTILIDMACIIGRYRNMYSHSIFISDDNEKVLESEKRCSEYLQSILTVSTRIIKERYRSNKNDAQRGMIDDKSLKFISENKVKFVYDENGERITAPNKKYYLSTIDKDNTHLSYFGKLMLTCILLEKKYATDFLTQCHFLDAFNDSEVAPKLSERRLMLEVMTALRIRLAEKKLSNEKSEVQISLDILNELKKCPFELYELLGSEDKRLFTIVADTGETILLRRHEDRFPQLALSWIDSSKAFDHLRFQVNAGKLRYLFRDNKHCIDGQARMRALEEPLNGYRRLMEFEEERIQKQSGEIRSLWPGLDILNKDETPRNDASVLPYISDYRVRYLFDGDNIGISIGDFTPSITKTDETKYRVTGKTADCCLSKYELPGLLFYHLLTLRHGDNKRSIKNAEDIIIDAIKRYKRLFSDVKEGILKPIKEENANQLGNRIWNSYGIDIKDIPDKIIDYLLVRECNEDEKFTAWKNGLISEMLQSTKNRIKRFEKDSEAVISSDNKPGKKNHVSLKPGAYASFIANDIVFFQECGATEKMTGLNFNVMQSRLATFTKDGSTSFNILLQTLKNAHLVSTTYGKGDHPFLYRVIKQQPSDIVQFYKIYLNEKVLYLQSDIPDNAIFLHGERKRWENRNEQYYRDLAERYLQRPIQLPRQLFESHIRQLLLSDCIKGERGNDLKEAINSAASQGRCNTTYMIMEYFADYLCDGTQFFYGLFDGDLSHEYNYRFYSLISNNIENSKKLVLTLKKGNNSKESPFISALERGIHWSKMNPLMKKGLKNDSSEGDFVHAAKRAYKEMTETERMFRRYAVQDEVLFLAAKITIRRALGLSEQYNCLLGDIKPQGGSLLEQTIPSITTKHTINTGNKKQKPKQVQILQKNVKLKDFGKVFKLLNDRRIFDLLFNKGNEAVSMTDLCEELERYDRHRVDVFDSVLKYESKITKGYTNKELMNESGQIDFKAIQAFDKQNTTADKEDLRLIRNAFSHNQYPQYNNEPILFDKDIPEIADEISIIAKDIEENTK

SEQ ID NO: 1458 - protein, 1113 aa, Artificial
  Synthetic
MPLRFKNAEERKPVLGAYAAMARNNAYIILSDIMERLHIEQPPLPDPAHPGQCLDKESHLDKLSLFPQNNDLMPETMDKAMKLLCSHFPFLQTEGDLRIMNAPDGREQEKIPITYEEKCRTLLDALAVLTYLRDANLHYLFNDRRAEHLEYRLPESKTCHLLRLVLKAAPRKISERYKGTGLMPDGALDFFIKKQYVREGRSFKFNMNWLFSPQREPEKREMDVYRKVELAGGVERVLVANPDGTPARFNRLSLFGEVLLISLFTEKRYIPDFLKACGLLTDNGFTETTQDGTLSQQRLIREIVAAYSIRLPKRRLDITMDADQVMLDIFNELAKCPDELYSVLPEAKKRELEAVNIDEETVIKKRHSDRFVPLLLRFIDANELFPSIRFQVNSGYLRFLHHEKAAYMDGVERPRILQDAVNGFGRIQEVERKRSASDTYLGFPLYAPSPDDDVTMPLPCITESASRYIVNGECIGLSISGDRTPVIIQDGGKYRVRSPQPDCWISRYELQAMGFYLYLSQKYDLPVSAEKIIVDKVNEYRSFFQGVANGTITSLKGVTLAEKDIPGKLLNYLNGKTDSSDFNRYKKNLIQSLLEKTVNRLKRFLEDMAMVGSKENRIGKRSFVRVLPGKLASYLADDIVFFQSYPAGHPEKRLTGQQFSILQGLLATFPPDIEDSCRRAGLLSGETAHPFLKAVFDSIPAKDRNTLVFYEIYLKRKIAFLKGPIPDSAPFLHPGKVKWQKKDAAYYKALAQRYLDGGKDGSNTGILLPRGLFDQAITDVLTKRCPGWSRAIQNTDHANTAFKIITYLLDGQADDYQWFYYEEDRLQEYRFSQLIISQNAVRNGWKDLKAILQEEGVKLKGNYYKELEGRISALRRIPPERLARNTMKREELRQALRSSYDRMCDNEKSIRRIIVQDIVLFLLARWRLDPREKLNMSMIGQDESKLMNQVVTVDTLYKGQYRIRQNDVRIKDQGVLFKTLNDKRIDSLLDQLTVGEGEVIDLEDLIAELTRYDDRRIPVVAKIMEYEKRVLKNHPELRDRRGRMDFKSVQRADEASSPQKKVVLRTVRNAFSHNAYPDRVVKAEGEEGIEIYNPIIPGMADGISGTTNKLVDE

SEQ ID NO: 1459 - protein, 1175 aa, Artificial; identical to SEQ ID NO: 1335
  Synthetic

SEQ ID NO: 1460 - protein, 1135 aa, Artificial; identical to SEQ ID NO: 1337
  Synthetic

SEQ ID NO: 1461 - protein, 1146 aa, Artificial
  Synthetic
MESIIGLGLSFNPYKTADKHYFGSFLNLADNNLKAVFAEFKERISDKSKDEDISNLIEKHFIDNMSIVDYEKNISILNGYLPIIDFLDDELENNLNTRVKNFKKSFIILAEALETLRNYYTHFYHDPITFGDNKEPLLELLDEVLLKTILDVKKKYLKTDKTKEILKDSLREEMDLLVIRKTDELREKKKTNPKFKFSTDPTQIRNSIFNDAFQGLLYEDKENNGKTQVSYRAKTKLNPKDIHKQEERDFEIPLSTSGIVFLMSLFLSKKEIEDFKSNIKGFKGKVVKDENHNSLKYMATHRVYSILAFKGLKYRIKTDTFSKVTLMMQMIDELSKVPDCVYQNLSETKQKDFIEDWNEYLKDNEENTENLENSRVVHPLIRKRYEDKFNYFAIRFLDEFANFKTLKFQVFMGYYIHDQRTKTIGTTNITTERTVKEKINVFGKLSKMDNLKKHFFSQLSDEENTDWEFFPNPSYNFLTQADNSPANNIPIYLELKNQQIIKEKDDIKAEVNNSQNRNPNKPSKRDLLNKISNTNEDFYQGDPTAILSLNEIPALLHLFLVQPDNKTGQQIENIIRIKIEKQFNSIKNPSKDDKGVPKSLFADTNVRVNAIKLKKDLGEELDMLNKKQIVFKENQKASSNYDELLKKHQFTPKNKRPALRKYVFYNSEKGEEATWLANDIKRFMPKGFKTKWKGYQHSELQRKLAFYDRHTKQDIKELLSGCEFDHFLLDINACFKEDDFEDFFSKYLKNRIETLNIILKQLHDFKNEPTPLKGVFKNCLKFLKQKNYVTENPEIIKKRILAKPAFLPRGIFDERPTMKKGKNPLIDRDEFAKWFVEYLENKDYQKFYNSEEYRIRDADFKKNAVIKKQKLKDFYTLQMVNYLLKEVFGKDEMNLQLSELFQTRQERLKLQGIAKKQMNKETGDSSENTRNQTYIWNKDVPVSFFNGKVTIDKVKLKNIGKYKRYERDERVKTFIGYEVDEKWMMYLPHNWKDRYSVKPINVIDLQIQEYEEIRSHELLKEIQNLEQYIYDHTTDKNTLLQDGNPNFKMYVLNGLLTGIKQVNIADFIVLKQNTNFDKIDFTGIASCSELEKKTIILIAIRNKFAHNQLPNKTIYDLANEFLKKEKRETYANYYLKVLKKMISDLA

SEQ ID NO: 1462 - protein, 1129 aa, Artificial
  Synthetic
METNQQTHENRRRTLTNDPQYFGGYLNMARLNIYNINNHVATDFKRKPLPEEGHIPDALLCNKTIKNLNWNHVHTRALRFLPILKVFDSESLPKDERENSDTEGKDFTSMSDTLKVVFSELQDFRNDYSHYYSTEKGDSRKLIVSPELANFLTVNFQRAIAYTKARMKDVLTDTDYALVENLQMVAPDNKITTEGLVFLIAMFLEREQAFQFTGKIQGLKGTQFNSFIATREVLMSFCVKLPHDKFVSENLEQALTLDIINELNRCPKTLYSVITDKEKQQFRPELDAQGIDNLIANSTNDDERETILDEIDYQDYIEGLTKRVRYSDRFSYFAMRYIDEKNVFDKLRFHIDLGKYEVDNYTKQFAGEQAERKVLENANAFGKLSSFTDPELIQQRIDKQQHTAGFDQFAPHYNADNNKIGLSTKENIATLIAKSKASSKVEHNLKQPLPQAFLSLHELPKIILLEYLQKGQAEELINDFILLNDTRLMDITFIEEVKSQLPANWDEFSKRSDAKKKKAYSDSTLKYLRQRKTTLNTILSKSNLNDKQIPTRILNYWLNIKEVDDKRSVSDRIKLMKRDCMTRLKAVEKHKLNKSVKTPKVGEMATFLAKDIVDMIVSEEKKQKITSFYYDKMQECLALFANAEKKALFIHIVTNELKLLENDGHPFLQNINLQQIRKTSQFYQAYLIEKGNKMVPRLNPKTNKTSKVDESWMMKQFYVKEWKEEIGKQLTVVKLPANKSRIPFTICQWDKKESHDLNTWLQHVTVGKNKDGKKAVNLPTNLFDEALCDLLREQLDTKIVNYNPAANYNELLKIWWKTRNDDTQQFYQSEREYDIYNEKVRFKIDSSAHFADYYKNALSRAFTRLKAERETARQTNKKLPPLEYKQVERVFKNTIAETEKEIRMLQEEDRMAVLMLERLMDNSPNLRLSKIETLLNDTTHISEKISATLSFDASGERISGKLKQTVTKTLIAERKQKNYTELRKYRYDRRLPELFEYVQADEIPLEWLLEELSAYNNAKQQVFDTVFALEKKIVGTDPDGLKSLFTNPKGEPLKGNIQHKPYVQWLTNKGLINKEEKQFINMVRKCFSHNQFPQRKTMELLIPAWNEKKLALQIATVYNQLIADLTDKI

SEQ ID NO: 1463 - protein, 1168 aa, Artificial; identical to SEQ ID NO: 1357
  Synthetic

SEQ ID NO: 1464 - protein, 1047 aa, Artificial; identical to SEQ ID NO: 1398
  Synthetic

SEQ ID NO: 1465 - protein, 1047 aa, Artificial; identical to SEQ ID NO: 1327
  Synthetic

SEQ ID NO: 1466 - protein, 1047 aa, Artificial; identical to SEQ ID NO: 1327
  Synthetic

SEQ ID NO: 1467 - protein, 1175 aa, Artificial
  Synthetic
MTEQNEKPYNGTYYTLEDKHFWAAFLNLARHNAYITLAHIDRQLAYSKADITNDEDILFFKGQWKNLDNDLERKARLRSLILKHFSFLEGAAYGKKLFESQSSGNKSSKKKELTKKEKEELQANALSLDNLKSILFDFLQKLKDFRNYYSHYRHPESSELPLFDGNMLQRLYNVFDVSVQRVKRDHEHNDKVDPHRHFNHLVRKGKKDRCGNNDNPFFKHHFVDREGTVTEAGLLFFVSLFLEKRDAIWMQKKIRGFKGGTEAYQQMTNEVFCRSRISLPKLKLESLRTDDWMLLDMLNELVRCPKSLYDRLREEDRARFRVPVDILSDEDDTDGAEEDPFKNTLVRHQDRFPYFALRYFDLKKVFTSLRFHIDLGTYHFAIYKKNIGEQPEDRHLTRNLYGFGRIQDFAEEHRPEEWKRLVRDLDYFETGDKPYITQTTPHYHIEKGKIGLRFVPEGQHLWPSPEVGATRTGRSKYAQDKRFTAEAFLSVHELMPMMFYYFLLREKYSEEVSAEKVQGRIKRVIEDVYAVYDAFARDEINTRDELDACLADKGIRRGHLPRQMIAILSQEHKDMEEKVRKKLQEMIADTDHRLDMLDRQTDRKIRIGRKNAGLPKSGVIADWLVRDMMRFQPVAKDTSGKPLNNSKANSTEYRMLQRALALFGGEKERLTPYFRQMNLTGGNNPHPFLHETRWESHTNILSFYRSYLKARKAFLQSIGRSDRVENHRFLLLKEPKTDRQTLVAGWKGEFHLPRGIFTEAVRDCLIEMGYDEVGSYKEVGFMAKAVPLYFERACKDRVQPFYDYPFNVGNSLKPKKGRFLSKEKRAEEWESGKERFRDLEAWSQSTARRIEDAFAGIKYASWENKKKIEQLLQDLSLWEAFESKLKVKADKINIAKLKKEILEAKEHPYLDFKSWQKFERELRLVKNQDIITWMMCRDLMEENKVEGLDTGTLYLKDIRTDVQEQGSLNVLNRVKPMRLPVVVYRADSRGHVHKEQAPLATVYIEERDTKLLKQGNFKSFVKDRRLNGLFSFVDTGGLAMEQYPISKLRVEYELAKYQTARVCAFEQTLELEESLLTRYPHLPDKNFREMLESWSDPLLDKWPDLQREVRLLIAVRNAFSHNQYPMYDETLFSSIRKYDPSSPDAIEERMGLNIAHRLSEEVKQAKEMAERIIQV

SEQ ID NO: 1468 - protein, 1184 aa, Artificial
  Synthetic
MERIFGHCCPHHDSVCFVRFLGTMVSNQDGRENVLDILYIADRTRKLKPMNTVPASENKGQSRTVEDDPQYFGLYLNLARENLIEVESHVRIKFGKKKLNEESLKQSLLCDHLLSVDRWTKVYGHSRRYLPFLHYFDPDSQIEKDHDSKTGVDPDSAQRLIRELYSLLDFLRNDFSHNRLDGTTFEHLEVSPDISSFITGTYSLACGRAQSRFADFFKPDDFVLAKNRKEQLISVADGKECLTVSGLAFFICLFLDREQASGMLSRIRGFKRTDENWARAVHETFCDLCIRHPHDRLESSNTKEALLLDMLNELNRCPRILYDMLPEEERAQFLPALDENSMNNLSENSLNEESRLLWDGSSDWAEALTKRIRHQDRFPYLMLRFIEEMDLLKGIRFRVDLGEIELDSYSKKVGRNGEYDRTITDHALAFGKLSDFQNEEEVSRMISGEASYPVRFSLFAPRYAIYDNKIGYCHTSDPVYPKSKTGEKRALSNPRSMGFISVHDLRKLLLMELLCEGSFSRMQSDFLRKANRILDETAEGKLQFSALFPEMRHRFIPPQNPKSKDRREKAETTLEKYKQEIKGRKDKLNSQLLSAFDMDQRQLPSRLLDEWMNIRPASHSVKLRTYVKQLNEDCRLRLRKFRKDGDGKARAIPLVGEMATFLSQDIVRMIISEETKKLITSAYYNEMQRSLAQYAGEENRRQFRAIVAELRLLDPSSGHPFLSATMETAHRYTEDFYKCYLEKKREWLAKTFYRPEQDENTKRRISVFFVPDGEARKLLPLLIRRRMKEQNDLQDWIRNKQAHPIDLPSHLFDSKIMELLKVKDGKKKWNEAFKDWWSTKYPDGMQPFYGLRRELNIHGKSVSYIPSDGKKFADCYTHLMEKTVRDKKRELRTAGKPVPPDLAADIKRSFHRAVNEREFMLRLVQEDDRLMLMAINKMMTDREEDILPGLKNIDSILDEENQFSLAVHAKVLEKEGEGGDNSLSLVPATIEIKSKRKDWSKYIRYRYDRRVPGLMSHFPEHKATLDEVKTLLGEYDRCRIKIFDWAFALEGAIMSDRDLKPYLHESSSREGKSGEHSTLVKMLVEKKGCLTPDESQYLILIRNKAAHNQFPCAAEMPLIYRDVSAKVGSIEGSSAKDLPEGSSLVDSLWKKYEMIIRKILPILDPENRFFGKLLNNMSQPINDL

SEQ ID NO: 1469 - protein, 1129 aa, Artificial
  Synthetic
METNQQTHENRRRTLTNDPQYFGGYLNMARLNIYNINNHVATDFKRKPLPEEGHIPDALLCNKTIKNLNWNHVHTRALRFLPILKVFDSESLPKDERENSDTEGKDFTSMSDTLKVVFSELQDFRNDYSHYYSTEKGDSRKLIVSPELANFLTVNFQRAIAYTKARMKDVLTDTDYALVENLQMVAPDNKITTEGLVFLIAMFLEREQAFQFTGKIQGLKGTQFNSFIATREVLMSFCVKLPHDKFVSENLEQALTLDIINELNRCPKTLYSVITDKEKQQFRPELDAQGIDNLIANSTNDDERETILDEIDYQDYIEGLTKRVRYSDRFSYFAMRYIDEKNVFDKLRFHIDLGKYEVDNYTKQFAGEQAERKVLENANAFGKLSSFTDPELIQQRIDKQQHTAGFDQFAPHYNADNNKIGLSTKENIATLIAKSKASSKVEHNLKQPLPQAFLSLHELPKIILLEYLQKGQAEELINDFILLNDTRLMDITFIEEVKSQLPANWDEFSKRSDAKKKKAYSDSTLKYLRQRKTTLNTILSKSNLNDKQIPTRILNYWLNIKEVDDKRSVSDRIKLMKRDCMTRLKAVEKHKLNKSVKIPKVGEMATFLAKDIVDMIVSEEKKQKITSFYYDKMQECLALFANAEKKALFIHIVTNELKLFENGGHPFLQNINLQQIRKTSQFYQAYLVEKGNKMVPRLNPKTNKTSKVDESWMMKQFYVKEWKEEIAKQLTVVKLPANKSRIPFTIRQWDEKEKYDLNVWLQHVTVGKNKDGKKAVNLPTNLFDEALCNLLREQLDTKIVNYNPAANYNELLKIWWKTRNDDTQQFYQSEREYDIYNEKVRFKIDSSTHFADYYKNALSRAYTRLKAERETARQTNKRLPPLEYKQVERVFKNTIAETEKEIRMLQEEDRMAVLMLEQLMDNSPNLRLSKIETLLNDTTPISEKISAKLSFDASGERITDKSNPTATKTLVAERKQKNYTELQKYRYDRRLPELFEYVQADEIPLEWLLDELSAYNSAKQQVFDTVFALEKKIIQTEPDELKSLFTGANGELQTGNIQHKPYVQWLTNKGLINKEEKQFINMVRKCFSHNQFPQRTTMELLIPAWNEKKLALQIATVYNQLIADLTDKI

SEQ ID NO: 1470 - protein, 1094 aa, Artificial; identical to SEQ ID NO: 1358
  Synthetic

SEQ ID NO: 1471 - protein, 1168 aa, Artificial; identical to SEQ ID NO: 1357
  Synthetic

SEQ ID NO: 1472 - protein, 1057 aa, Artificial; identical to SEQ ID NO: 1344
  Synthetic

SEQ ID NO: 1473 - protein, 1127 aa, Artificial
  Synthetic
MNTHQEELQSWITRKRLPDTEMKKYWAAYMNLARLNFFKTLMFISNSIGDLKPAKDNNGKGNTEVNMHNMGILTALLGPEDEEKARLLIFKHFPFLRTFCIEKELSLSKQRTILIDMACIIGRYRNMYSHSIFISDDNEKVLESEKRCSEYLQSILTVSTRIIKERYRSNKNDAQRGMIDDKSLKFISENKVKFVYDENGKRITAPNKKYYLSTIDKDNTHLSYFGKLMLTCILLEKKYATDFLTQCHFLDAFNDSEVAPKLSERRLMLEVMTALRIRLAEKKLSNEKSEVQISLDILNELKKCPFELYELLGSEDKRLFTIVADTGETILLRRHEDRFPQLALSWIDSSKAFDHLRFQVNAGKLRYLFRDNKHCIDGQTRMRVLEEPLNGYRRLMEFEEERIQKQSGEIRSLWPGLDILNKDETPRNDASVLPYISDYRVRYLFDGDNIGISIGDFTPSITKTDETKYRVTGKTADCCLSKYELPGLLFYHLLTLRHGDNKRSTKNAEDIIIDAIKRYKRLFSDVKEGILKPIKEGNANQLGNRIWNSYGIDIKDIPDKIIDYLLVRECNEDEKFTAWKNGLISEMLQSTKNRIKRFEKDSEAVISSDNKPGKKNHVSLKPGAYASFIANDIMFFQECGATEKMTGLNFKVMQSRLATFTKDGSTSFNILLQTLKNAHLVSTTYGKGDHPFLYRVIKQQPSDIVQFYKIYLNEKVLYLQSDIPDNAIFLHGERKRWENRNEQYYRDLAERYLQRPIQLPRQLFESHIRQLLLSDCIKGERGNDLKEAINSAASQGRCNTTYMIMEYFADYLCDGTQFFYGLFDGDLSHEYNYRFYSLISNNIENSKKLVLTLKKGNNSKESPFISALERGIHWSKRNPLMKKGLKNDSSEGDFVHAAKRAYKEMTETERMFRRYAVQDEVLFLAAKITIRRALGLSEQYNCLLGDIKPQGGSLLEQTIPSITTKHTINTGNKKQKPKQVQILQKNVKLKDFGKVFKLLNDRRIFDLLFNKGNEAVSMTDLCEELERYDRHRVDVFDSVLKYESKITKGYTNKELMNESGQIDFKAIQAFDKQNTTADKEDLRLIRNAFSHNQYPQYNNEPILFDKDIPEIADEISIIAKDIEENTK

SEQ ID NO: 1474 - protein, 1047 aa, Artificial; identical to SEQ ID NO: 1398
  Synthetic

SEQ ID NO: 1475 - protein, 1168 aa, Artificial; identical to SEQ ID NO: 1357
  Synthetic

SEQ ID NO: 1476 - protein, 1168 aa, Artificial; identical to SEQ ID NO: 1357
  Synthetic

SEQ ID NO: 1477 - protein, 1168 aa, Artificial; identical to SEQ ID NO: 1357
  Synthetic

SEQ ID NO: 1478 - protein, 1129 aa, Artificial; identical to SEQ ID NO: 1396
  Synthetic

SEQ ID NO: 1479 - protein, 1013 aa, Artificial
  Synthetic
MEILTIPEVIKCRTLSDDPQYFGGYLNMARLNVLNISNHIAKEFKLPLLPEEAHLKNSFLCKKENKKIDWNHVYARTIRFLSVMKVFDAESLPKEEQKTIDWEGKDFASMCDTLNIVFSELQEFSNDYSHYYSTEKETKRKTTVSDELALFLRTNFKRAIEYTKVRFKGILNDEDYQLVVSKKMLETNHTITHEGLVFLTSMFLEREYAFRFIRKIHGLSGPKDNSFIATCEVLMAFCLKLPQEQFRSDNRRQAISLELMNELKKCPKVLYHVITEEWKQKLKSVPEELETKNLHYNTKRETKIEFEDYDLYIESLTKQVRYNNRFSEFALKYIDETGIFSEFRFQLDLGKILVDEYLKNFNDERVQRCIIENAKAFGKLNDYTNETKVMSLIVNGPPLKSFDRFAPHYNIESNKIGISTHEVTAKLVPNSKGEPAKKLHQPLPEAFLSLHELPKIILLEYLQKGEPEKLINEFILVNNSKLMNMSFIEEVKNQLPKEWDKFQRRTNAKHELAYDENTLAFLLQRKQILNKTLLAYQLNDKQIPTRILDYWLNISDADEERAISNRLKSIKRDCMSRLKALSKFNENGNRNKIPGIGEMATFLAKDIIDMVVSEGKKRKITSFYYDKMQECLALFGDPDKKQLFIHIVTKELKLNDPGGHPFLDKLDLQKINSTTGFYEIYLQEKGHKMVPENNPKTGKVIYTDHSWMALTFYKIEFNDKVDMLMTVVKLPLKKLNIPFTLRQLSGKTNNTLKQWLNNLTQGKKRNDGKRPINLPTNLFDERLAELLRKDLDNKKIVYWPYANWNELFKTWWSSRNDGLQSFYNAEREYRIFDEKVNFYPNRKENFADYYQHALKLAFQKKRSKRILEQMYDQHLPDILFDQVEKTFRHTIAETEKEIRILQEEDHIMLLMLESLLDDGSKQQLKLSEIRTHLNRTTNIRQVVKGKLSFDDSGELIKDNTNSEIVRTVSVTDQLKKFHLRPRFISDSRLPELFEYFPDKEIQMESLKNEFDTY

SEQ ID NO: 1480 - protein, 1168 aa, Artificial; identical to SEQ ID NO: 1357
  Synthetic

SEQ ID NO: 1481 - protein, 1129 aa, Artificial; identical to SEQ ID NO: 1396
  Synthetic

SEQ ID NO: 1482 - protein, 1140 aa, Artificial
  Synthetic
MENDQQILENRRRTLANDPQYFGGYLNMARLNIYNISNHLAASFEQKVLPEEGQIPASFLCNKSIKKINWNHVYSKARRFLPILKVFDADSLPKEERETTDKEGKDFTAMNETLKLVFDELQAFRNDYSHYYSTEKADSRKLTISVELADFLTVNFKRAIAYTKVRMKDVLADDDYTMVESKQIVTPDNLITTEGLVFLTCMFLEREQAFQFIGKVQGLKGTQFNSFIATREVLLAYCVKLPHDKFVSEDLGQALTLDIINELNRCPKTLYEVITEEEKQQFRPELDAQGIDNLIANSTNEEEREKILDEIDYEDYIESLTRRVRHSNRFSYFAMRYIEEKNVFDKLRFHIDLGKYEVDKYNKQFDGEATECKVVENAKAFGKLSSFTNQETVELKIDSAQRTNGFEQFAPHYNADNNKIGLSNKESEARLLTKAKPESKVSYNLKQPLPQAFLSLHELPKIILLEYLQKGKAEEMINDFIKVNDSQLMSMQFIDEIKEQLPADWNEFGKRSDSKKKKAYTNAALQYLLQRKATLNKVLANYQLNDKQVPTRILNYWLNIKEVDDSRSVSDRIKLMKRDCMSRLKVVEKHKLDKSARTPKVGEMATFLAKDIVDMIVSTDKKQKITSFFYDKMQECLALYADTDKKATFIHIVTNELKLLEKGGHPFLANINLRQIRKTSQLYELYLVEKANKQVKKMNPKTQRTSNVDESWMMKSFYAKEWNEEMGKQLTVVKLPVNKTNIPFTIRQWEEKEKHNLQAWLHNITKGKTSKDGKKAIDLPTNLFDDTLCELLREALINQGIDATPTTKYNELLKQWWTAREDSTQDFYLSERQYDIYDEKVCFTINSSAHFADYYAPALNKAYSRLRAERDVARRTDKRLPPVERKDVERVFKNTIAETEKEIRMLQEEDRMAVLMLEQLMDNQQQLKLSKMDSLLNETKRIEQTINTQLSFDHKGKEIKDKTNSEIVKTIVAERKQKNYTEMRKYVHDRRLPELFEYIDGNELPLDVLLNELRAYNTAKQMVFDTVFALEKKIIETDPEGLKQLNVGKNGQIQTGNIQHKPYVQWLENKGLITDHQKQFINMVRNSFSHNQFPQRSTVELLMPEWQNTDIALQIAREYQQLIVDIIEKSLHPHKQHQMV

SEQ ID NO: 1483 - protein, 1119 aa, Artificial
  Synthetic
MTEQNERPYNGTYYTLEDKHFWAAFLNLARHNAYITLTHIDRQLAYSKADITNDEDILFFKGQWKNLDNDLERKARLRSLILKHFSFLEGAAYGKKLFESQSSGNKSSKKKELTKKEKEELQANALSLDNLKSILFDFLQKLKDFRNYYSHYRHPESSELPLFDGNMLQRLYNVFDVSVQRVKRDHEHNDKVDPHRHFNHLVRKGKKDRYGNNDNPFFKHHFVDREGTVTEAGLLFFVSLFLEKRDAIWMQKKIRGFKGGTETYQQMTNEVFCRSRISLPKLKLESLRTDDWMLLDMLNELVRCPKSLYDRLCEEDRACFRVPVDILSDEDDTDGAEEDPFKNTLVRHQDRFPYFALRYFDLKKVFTSLRFHIDLGTYHFAIYKKNIGEQPEDRHLTRNLYGFGRIQDFAEEHRPEEWKRLVRDLDYFETGDKPYITQTTPHYHIEKGKIGLRFVPEGQHLWPSPEVGATRTGRSKYAQDKRLTAEAFLSVHELMPMMFYYFLLREKYSDEASAERVQGRIKRVIEDVYAVYDAFARGEIDTLDRLDACLADKGIRRGHLPRQMIAILSQEHKDMEEKVRKKLQEMIADTDHRLDMLDRQTDRKIRIGRKNAGLPKSGVIADWLVRDMMRFQPVAKDTSGKPLNNSKANSTEYRMLQRALALFGGEKERLTPYFRQMNLTGGNNPHPFLHETRWESHTNILSFYRSYLKARKAFLQSIGRSDRVENHRFLLLKEPKTDRQTLVAGWKSEFHLPRGIFTEAVRDCLIEMGHDEVGSYKEVGFMAKAVPLYFERACKDRVQPFYDYPFNVGNSLKPKKGRFLSKEDRAEEWESGKERFRLAKLKKEILEAKEHPYLDFKSWQKFERELRLVKNQDIITWMMCRDLMEENKVEGLDTGTLYLKDIRTDVYEQGSLNVLNRVKPMRLPVVVYRADSRGHVHKEQAPLATVYIEERDTKLLKQGNFKSFVKDRRLNGLFSFVDTGGLAMEQYPISKLRVEYELAKYQTARVCAFEQTLELEESLLTRYPHLPDESFREMLESWSDPLLDKWPDLHRKVRLLIAVRNAFSHNQYPMYDEAVFSSIRKYDPSSPDAIEERMGLNIAHRLSEEVKQAKEMAERIIQA

SEQ ID NO: 1484 - protein, 1199 aa, Artificial; identical to SEQ ID NO: 1328
  Synthetic

SEQ ID NO: 1485 - protein, 1057 aa, Artificial; identical to SEQ ID NO: 1344
  Synthetic

SEQ ID NO: 1486 - protein, 1110 aa, Artificial
  Synthetic
MKSNEQTYENKRRTLTNDPQYFGGYLNMVRLNIYNISNHIASDFGQAQLPEEGQIPTSFLCNKGIKKLNWNHVYTKTRRFLPILKVFDAESLPKEERENYEKEGKDFAAMSDTLKVVFTELQAFRNDYSHYYSTEKGENRKLTVSGELADFLTINFKRAIAYTKVRMKDVLTDADYELVENRQIVVDNNTITTEGLVFLISMFLEREQAFQFIGKIQGLKGTQFNSFIATREVLMSFCVKLPHDKFVSEDLEQALTLDIINELNRCPKTLYKVSTEEAKLQFRPELDAQGIDNLLANSTNIDECEKILDEINYEDYIEGLTKRVRHNNRFSYFAMRYIDEKNVFEKLRFHIDLGKYEVDTYTKQLAGEQTERVVFENVKAFGKLNSFTDSESVQQRIDKQQRTGGFEQFAPHYNAENNKIGLSSKEEVALLLPKSKPDTKVAYNLKQPLPQAFLSLHELPKVILLEYLQKGKSEQMINDFILLNDTRLMDMTFIEEVKSKLPFGWNEFTKRSDAKKKKAYSNATMKYLLQRKTIVNDVLIDYNLNHKQIPTRILDYWLNIKDVEDSRSVSDRIKLMKRDCMTRVKVLEKHKLDKSVKTPKVGEMASFLAKDIVDMIVSKEKKQKITSFYYDIMQECLALFADAEKKALFIHIVTNELKLFENGGHPFIQNINLQQLHKTSQFYEAYLKEKGNKQVSKFNPKTNKTSKVDDSWMMQQFYTKEWNDEIKKQLTVVKLPANKTHIPFTIRMWEEKEKYNLETWLHNVTVGKNIKDGKKAVNLPTNLFDEALCILLRKQLDTLAPNYNPAANYNELLKLWWKTRNDDTQDFYRAEREYSIYDEKIVFKINSSGHFADYYQKALGKVYSRLKAERETARRTNNRLPPIEHKQVERVFKNTIAETEKEIRMLQEEDRMAVLMLEQLMDNSQNLKLNRIESLLNDTTRIEQKVLSKTIVAERKQKNYTELRKYIHDRRLPELFEYVEADEIQLEWLQNELKEYNTAKQQVFDKVFMLEKKIIETDREGVIEVMINTDGVLQKGTIQHKPYVQWMKRKGLIADHEEQFINEVRNCFSHNQFPHRKTMELLIPEWAEGKLALQIVTVYSQLIADIVDKI

SEQ ID NO: 1487 - protein, 1140 aa, Artificial; identical to SEQ ID NO: 1482
  Synthetic

SEQ ID NO: 1488 - protein, 1168 aa, Artificial; identical to SEQ ID NO: 1357
  Synthetic

SEQ ID NO: 1489 - protein, 1047 aa, Artificial; identical to SEQ ID NO: 1398
  Synthetic

SEQ ID NO: 1490 - protein, 1140 aa, Artificial; identical to SEQ ID NO: 1356
  Synthetic

SEQ ID NO: 1491 - protein, 1110 aa, Artificial; identical to SEQ ID NO: 1486
  Synthetic

SEQ ID NO: 1492 - protein, 1171 aa, Artificial
  Synthetic
METNNTTITRRYGLKETPWYFGAYLNMARHNMFLLVNHVTEKFAYLNEKPLTSDEDIVKDDHLLAKIFDPDKSVYETERMKVYKYLTSRHYLPCIRVFHEGQGDVTDTNPIVDYEGLHAFLRSAFNLLNAWRNAFTHYLAIDDNGNRLQERSLVIEQDMKGCLERLFARAPDFSFKRFEATHEEKDFDHLSFYRLFSEDNDLQLSEQGFYFFINLFLERGYAMKFLKKFRGFKNETTPSFRATLQAFTAYTPRVPDVRLDTEDSRQTLLLEMLNELNRCPGEIYKRLKEEDKQKLVPHKGRAEEASHVLATTDYRDISDEDIDGLLSDISPLYRGGDRFPYFAARYIDEFDLLPNIRFQITLGKLQVDAYEKNIAGEIIERRVVRTVHAYGKLSDFTNRQNEVLEILQQQSVAGEGSYFQQYAPHYNMENNQLSFYLFNEEDQDKVKYPSQLPGNTSGNAPTGFLSLNDLPKLALLGMDKNKLIAEQVIRDFININRGLILNFEALEKLRARLSLVPKEFTRRVVNEKSIKGRDGMPDYLNKKKEARLLQSLRLSREELCRLESDELKRRIRNSKQLEYANQIRYVHFLENRKKELQEHLPEGLRVDQLPEQVVRHLLNINDHSSEKIIHHKIKAIYDDCRIRLRRIETQELKPEEERNLKLGELATFLSRDIIDMVVDQEVKQKITSPYYNKLQTKISYFSVSREEIIALCNELQLFQRESGHVFLSREMIMQSRGIVDFYKHYLTDKLEWIKNTLLSDNPRGGRYTLPEKAILPLSFFKIREKAGSGDFRQWLERKKQMPVSLPHSLFDKELEDRLSWRLHKENISFNEGDKFTIRLEKMLEGDMQPFYNFPRIYEVNGEPAEIDGSSLDGKTLKSRYGNSVEQSEKEIRFIRTRDRILRLFCEHILETYSNDKNTPFHTFQLSSIYPSSETSPLNRPFSFKQPIIRKGNEAYITVIARDTEQQLKEVSEYSLLTTDEEKDAFTGQKGHEWTIKDFGRFKRLSADRRIPSLSDYFEFKEVPFKLLEYQLKEYDKYREEIFDITFEIERHACDVALEDITRLELNKRQADGSKNFNNVQFGIYLQWIGDNDLLSSDEINRLRNIRNKFSHSEFPTYWDAIPKITEEAVARFEDNYRISGRIEQLDISLSKLIAEDYRSIANKILQRGNAS

SEQ ID NO: 1493 - protein, 1137 aa, Artificial
  Synthetic
MENQASREKTNYNLNETPWYFGAYLNMARHNMFVLINHLTEKFKYLGFNKIDDDCEIIKDNILTSIFNPNNSNYEAERFKVYKYLVKRHYLPFVKIFHEKNGVQLDSNPIVDYHRLNQFINISFTHINKFRNSYTHYLAVDNDKNIIKERKKAIDNLIVEDLKKLFKHAPDFALQRFKDSQEENNFNHLDLYSILENNKLTEHGFYFFTNLFLNQTYAIQFLKKISGFKNETIPAFKATLQTFTAYAVKTPDIRLDNDDRNQSLLLEMMNELQKCPNELYRYLSEEDQKKFQPTLDTNSKTNFILNSIDYNAIHDDDIDSLLSETTSLRRSTNRFPYFALRFLEENNFLNNIRFQINIGKLHVRSYPKTIAHEKINRRIQKQIKGFGKLSDFENKEAEVLEKLNFNNDNCYFDQYSPHYNIVNNKIGFFLFESGEKTVIQKEQKLVKPTGFISIHDLPKIVMLSILKPNEVENTIKRFIDINTSDILNISKLDAIKSNLTLTPVAFTKRREKLKSITTENGYEFLNNDIERKIFSENKLNHDSILTYENKKINKKDKEHISQIKYKLLLKNRKQNLQKALTQKILVDQLPQKVVDYLLNLESIAEKKLIHAKIKSIKDEAKSKLRWIKKEVELPKEDQKIKLGEIATFIARDILNMIISLEVKEKFTSAYYNKLQNKIAYFSGSKKEIIAMCKELQLFNKIIGHVFLTKDQIEQSKGIIDFYQTYLESKISWIDQKLFRKGKEGGYIIPDNTNVPFTISSFKTNIAAQDFNNWLANKKKLPINLPTSLFDKNLCESLCKKLKTNKIDYKETDKFSILFAKSLKNDKQPFYDFKRVYECSQTGESVLVNTQNIHGKAIKSKYGKRAEENEKIIRFILTQDRVVKRMCEFILAQNTTENLQLDLSSFIPLSNQTPLNSAFSFKHVINLEKGKMLTIIAEDNEHQRSEVEEFNKLTSVEDQQKYSKQKGYQWTMKDFGRFKRFVSDKRIFNLLSFLETDTVTFDFITYQFREYDKIRSAVFQQTFELEEYIATNDLENLINEEFKRRRDFEEVQFKVYLKVLENKTDSNTIEILQNIRNKFSHSEFPILDEKETIKKITSKQIDTFEKEKHRKGGVESLDLSISTKYLALYTEKINSIIK

SEQ ID NO: 1494 - protein, 1003 aa, Artificial
  Synthetic
MGAIENKHIFAAYANLAIDGLIKTLNFIAKKLDTQKQLSSWDIKHVITLIDSIFDQNPQNNLEQIVEGYLPWIKPIIEMKTPKKGERQSDKLCIEYKTIITAFASLLNDVRNYYTHYYHDPICIYPRGYDIPSSLNCIYDSAINIIKERFQAEEKEMEHLRRYTRKKGRVVLKTEDDHFYYTLVNNNGLSEKGYAFFISMFLERKYSYLFLKKLSGFKRGDSLQYRLTLEVFTALSTKPPVERLRTTKDTKQDRALDILNELSKIPIELYQTLEPKYREMYNETLQPTDAEDPYGLPDRSRIRFRSRFETFALHFLDKQADFKEIGFYTYLGNYFHNGYQKTRVDRETKDRYINFQLAGFCKNIQDISAKKLSEALNVKSIDISTDSIPDINSFEPYLVQSTPHYIVNGNNIGIKVLPEGKDTYPTIDEKGAKMPIADFWLSKYELPAMLFYTYLRNNNIHKSHCPLSVKDIIERSIHKSTKQKHPEERSELMLRRVMKAIFWTDSKLNEVERIKSQKSAFGKRQHEILKAGRIAETLVRDMLWLQPSKNNGRDKVTEPNFQAIQVSLAYFGIRRNDLTEIFTRAGLINSSNPHPFLAQIGTNYTSLIEFYIAYLKERKVYFSRIQKKILQGKLNIQCHPLRDLQREPNKPQDKEEAIFLPRGLFNEAIINCLKKSKLKQLIESPTREKSPALNVSYLIQNYFRTYFEDQSQEFYAQPRNYRLFDKLSPNKGKSKSYLSLEQRIKKMEELRPSKIPVAEANKLLEKEDRLYRKNYNEICDNESIIRLYQIQDILLFMMTKEYLPSDLYNRINKYKLENVKGILNERVSYLIDLNLLKIQGEDIKIKDYGKLFYIHHDTRISSLNKVLSKVKRNNSISSSVKIQPYENYKRECLDFEEAQIQIIPIIHSFEIAMVSMFPDLKKATPGNYYDFNELITEYEKRTKQKIDSSFLIKTRNMFLHDKYEAECIKEISDDFVYAKKIIAEFKMKIENIKLEDLSNDSSA

SEQ ID NO: 1495 - protein, 1135 aa, Artificial
  Synthetic
MNTVPASENKGQSRTVEDDPQYFGLYLNLARENLIEVESHVRIKFGKKKLNEESLKQSLLCDHLLSVDRWTKVYGHSRRYLPFLHYFDPDSQIEKDHDSKTGVDPDSAQRLIRELYSLLDFLRNDFSHNRLDGTTFEHLEVSPDISSFITGTYSLACGRTQSRFADFFKPDDFVLAKNRKEQLISVADGKECLTVSGLAFFICLFLDREQASGMLSRIRGFKRTDENWARAVHETFCDLCIRHPHDRLESSNTKEALLLDMLNELNRCPRILYDMLPEEERAQFLPALDENSMNNLSENSLNEESRLLWDGSSDWAEALTKRIRHQDRFPYLMLRFIEEMDLLKGIRFRVDLGEIELDSYSKKVGRNGEYDRTITDHALAFGKLSDFQNEEEVSRMISGEASYPVRFSLFAPRYAIYDNKIGYCHTSDPVYPKSKTGEKRALSNPRSMGFISVHDLRKLLLMELLCEGSFSRMQSDFLRKANRILDETAEGKLQFSALFPEMRHRFIPPQNPKSKDRREKAETTLEKYKQEIKGRKDKLNSQLLSAFDMDQRQLPSRLLDEWMNIRPASHSVKLRTYVKQLNEDCRLRLQKFRKDGDGKARAIPLVGEMATFLSQDIVRMIISEETKKLITSAYYNEMQRSLAQYAGEENRHQFRAIVAELRLLDPSSGHPFLSATMETAHRYTEDFYKCYLEKKREWLAKTFYRPEQDENTKRRISVFFVPDGEARKLLPLLIRRRMKEQNDLQDWIRNKQAHPIDLPSHLFDSKVMELLKVKDGKKKWNEAFKDWWSTKYPDGMQPFYGLRRELNIHGKSVSYIPSDGKKFADCYTHLMEKTVRDKKRELRTAGKPVPPDLAAYIKRSFHRAVNEREFMLRLVQEDDRLMLMAINKIMTDREEDILPGLKNIDSILDKENQFSLAVHAKVLEKEGEGGDNSLSLVPATIEIKSKRKDWSKYIRYRYDRRVPGLMSHFPEHKATLDEVKTLLGEYDRCRIKIFDWAFALEGAIMSDRDLKPYLHESSSREGKSGEHSTLVKMLVEKKGCLTPDESQYLILIRNKAAHNQFPCAAEIPLIYRDVSAKVGSIEGSSAKDLPEGSSLVDSLWKKYEMIIRKILPILDPENRFFGKLLNNMSQPINDL

SEQ ID NO: 1496 - protein, 1175 aa, Artificial
  Synthetic
MTEQNEKPYNGTYYTLEDKHFWAAFFNLARHNAYITLAHIDRQLAYSKADITNDEDILFFKGQWKNLDNDLERKARLRSLILKHFSFLEGAAYGKKLFESQSSGNKSSKKKELTKKEKEELQANALSLDNLKSILFDFLQKLKDFRNYYSHYRHPESSELPLFDGNMLQRLYNVFDVSVQRVKRDHEHNDKVDPHRHFNHLVRKGKKDRCGNNDNPFFKHHFVDREEKVTEAGLLFFVSLFLEKRDAIWMQKKIRGFKGGTEAYQQMTNEVFCRSRISLPKLKLESLRTDDWMLLDMLNELVRCPKSLYDRLREEDRARFRVPVDILSDEDDTDGTEEDPFKNTLVRHQDRFPYFALRYFDLKKVFTSLRFHIDLGTYHFAIYKKNIGEQPEDRHLTRNLYGFGRIQDFAEEHRPEEWKRLVRDLDYFETGDKPYITQTTPHYHIEKGKIGLRFVPEGQHLWPSPEVGATRTGRSKYAQDKRFTAEAFLSVHELMPMMFYYFLLREKYSDEASAERVQGRIKRVIEDVYAVYDAFARGEIDTLDRLDACLADKGIRRGHLPRQMIAILSQEHKDMEEKVRKKLQEMMADTDHRLDMLDRQTDRKIRIGRKNAGLPKSGVIADWLVRDMMRFQPVAKDTSGKPLNNSKANSTEYRMLQRALALFGGEKERLTPYFRQMNLTGGNNPHPFLHETRWESHTNILSFYRSYLKARKAFLQSIGRSDRVENHRFLLLKEPKTDRQTLVAGWKGEFHLPRGIFTEAVRDCLIEMGYDEVGSYKEVGFMAKAVPLYFEWACKDRVQPFYDYPFNVGNSLKPKKGRFLSKEDRAEEWESGKERFRDLEAWSHSAARRIEDAFAGIEYASPGNKKKIEQLLQDLSLWETFESKLKVKADKINIAKLKKEILEAQEHPYLDFKSWQKFERELRLVKNQDIITWMMCRDLMEENKVEGLDTGTLYLKDIRTEVQEQGSLNVLNRVKPMRLPVVVYRADSRGHVHKEQAPLATVYIEERDTKLLKQGNFKSFVKDRRLNGLFSFVDTGGLAMEQYPISKLRVEYELAKYQTARVCVFEQTLELEESLLTRCPHLPDKNFRKMLESWSDPLLDKWPDLHGNVRLLIAVRNAFSHNQYPMYDEAVFSSIRKYDPSSLDAIEERMGLNIAHRLSEEVKQAKEMVERIIQV

SEQ ID NO: 1497 - protein, 1184 aa, Artificial
  Synthetic
MERIFGHCCPHHDSVCFVRFLGTMVSNQDGRENVLDILYIADRTRKLKPMNTVPASENKGQSRTVEDDPQYFGLYLNLARENLIEVESHVRIKFGKKKLNEESLKQSLLCDHLLSVDRWTKVYGHSRRYLPFLHYFDPDSQIEKDHDSKTGVDPDSAQRLIRELYSLLYFLRNDFSHNRLDGTTFEHLEVSPDISSFITGTYSLACGRAQSRFADFFKPDDFVLAKNRKEQLISVADGKECLTVRGLAFFICLFLDREQASGMLSRIRGFKRTDENWARAVHETFCDLCIRHPHDRLESSNTKEALLLDMLNELNRCPRILYDMLPEEERAQFLPALDENSMNNLSENSLNEESRLLWDGSSDWAEALTKRIRHQDRFPYLMLRFIEEMDLLKGIRFRVDLGEIELDSYSKKVGRNGEYDHTITDHALAFGKLSDFQNEEEVSRMISGEASYPVRFSLFAPRYAIYDNKIGYCHTSDPVYPKSKTGEKRALSNPRSMGFISVHDLRKLLLMELLCEGSFSRMQSGFLRKANRILDETAEGKLQFSALFPEMRHRFIPPQNPKSKDRREKAETTLEKYKQEIKGRKDKLNSQLLSAFDMDQRQLPSRLLDEWMNIRPASHSVKLRTYVKQLNEDCRLRLRKFRKDGDGKARAIPLVGEMATFLSQDIVRMIISEETKKLITSAYYNEMQRSLAQYAGEENRRQFRAIVAELRLLDPSSGHPFLSATMETAHRYTEDFYKCYLEKKREWLAKTFYRPEQDENTKRRISVFFVPDGEARKLLPLLIRRRMKEQNDLQDWIRNKQAHPIDLPSHLFDSKIMELLKVKDGKKKWNEAFKDWWSTKYPDGMQPFYGLRRELNIHGKSVSYIPSDGKKFADCYTHLMEKTVRDKKRELRTAGKPVPPDLAADIKRSFHRAVNEREFMLRLVQEDDRLMLMAINKMMTDREEDILPGLKNIDSILDKENQFSLAVHAKVLEKEGEGGDNSLSLVPATIEIKSKRKDWSKYIRYRYDRRVPGLMSHFPEHKATLDEVKTLLGEYDRCRIKIFDWAFALEGAIMSDRDLKPYLHESSSREGKSGEHSTLVKMLVEKKGCLTPDESQYLILIRNKAAHNQFPCAAEMPLIYRDVSAKVGSIEGSSAKDLPEGSSLVDSLWKKYEMIIRKILPILDPENRFFGKLLNNMSQPINDL

SEQ ID NO: 1498 - protein, 1140 aa, Artificial; identical to SEQ ID NO: 1482
  Synthetic

SEQ ID NO: 1499 - protein, 985 aa, Artificial; identical to SEQ ID NO: 1401
  Synthetic

SEQ ID NO: 1500 - protein, 1129 aa, Artificial; identical to SEQ ID NO: 1469
  Synthetic

SEQ ID NO: 1501 - protein, 1168 aa, Artificial; identical to SEQ ID NO: 1357
  Synthetic

SEQ ID NO: 1502 - protein, 1149 aa, Artificial; identical to SEQ ID NO: 1383
  Synthetic

SEQ ID NO: 1503 - protein, 1122 aa, Artificial
  Synthetic
MEDDKKTTDSISYELKDKHFWAAFLNLARHNVYITVNHINKILEEDEINRDGYENTLENSWNEIKDINKKDRLSKLIIKHFPFLEATTYRQNPTDTTKQKEEKQAEAQSLENLKESFFVFIYKLRDLRNHYSHYKHSKSLERPKFEEDLQKKMYNIFNASIRLVKEDYQYNKNINPKKDFKHLNRKRKGKFYYSFADNEGNITESGLLFFVSLFLEKKDAIWVQKKLEGFKCSNESYQKMTNEVFCRSRMLLPKLRLESTQTQDWILLDMLNELIRCPKSLYERLREEYREKFRVPFEIADEDYDAEQEPFKNTLVRHQDRFPYFALRYFDYNEIFTNLRFQIDLGTYHFSIYKKLIGGQKEDRHLTHKLYGFERIQEFDKQNRPDEWKAIIKDSDTFKKKEEKEEEKPYISETTPHYHLENKKIGIAFKNHNIWPSTQTELTNNKRKKYNLGTSIKAEAFLSVHELLPMMFYYLLLKTENTKNDNKVEGKKETKKQEKHKIEAIIESKIKDMYALYDAFANGEINSEDELKEYLKGKDIEIVHLPKQMIAILKNEHKDMAEKAEAKQEKMKLATENRLKTLDKQLKGKIQNGKRYNSAPKSGEIASWLVNDMMRFQPVQRDENGEPLNNSKANSTEYQLLQRTLAFFGSEHERLAPYFKQTKLIESSNPHPFLNDTEWEKCNNILSFYRSYLKARKNFLESLKPEDWEKNQYFLMLKGPKTNRKTLVQGWKNGFNLPRGIFTEPIRKWFMEHWKNIKVDKSKRVGLVAKVIPLFFSEKYKDSVQPFYNYPFNVGDVNKPKEEDFLHREERIKIWKEKKNKFKGYKAKKKFKEMTDKEKEEHRSYLEFQSWNKFERELRLVRNQDIVTWLLCTELIDKLKIDELNIKELKKLRLKDINTDTAKKEKNNILNRVMPMELPVTVYEVNKGGYIIKNKPLHTIYIKEAKTKLLKQGNFKALVKDRRLNGLFSFVKTPSEAESESNPISKSRVESELGKYQNARLDIIEDMLALEKTLIDNYNSLDTDNFHNMLTAWLELKGEANKARFQNDVDLLVAVRNAFSHNQYPMYNENLFGNIERFSLSSSNIIESKGLDIAAKLKEEVSKAAKKIQNEEDNKKEKEKET

SEQ ID NO: 1504 - protein, 1141 aa, Artificial
  Synthetic
MAQTRWKQSKTPAIKPVMAAYLNMARHNMYRVMLHISRQMQIVENKEEAEIAAFSVWQKLSSGTPTEQMKMIKLLQRHFPVLKPVFDVEKKKNVENAAISASPKEIKRIFTTILTALNRLRNEYSHYSPVPRKTEGEEKMIAYLYRCMDGSAREVRNRFSLTVKDPKGAKETAKVLEVNKAVFDIFQDAFRKEKVKALDKSGKVIKDNKGRTQFEFRDKEDYYYALKDANAALSDMGIVFFTCLFLEKRYAAMFLDAIKPWPQDFNEIERKAVLEVFTVYHIHLPKEKYDSTRPEYALGLDMLNELQKCPKELFDILSAKSRDALSVDIKADRPDVVTDDGVTVKDGKVQMRRVRDRFAPLALQYLDSQKAFNDIRFMVRLGHYRFKFYKKQCVADNAPDTLRVLQKEINGFGRLDEMEAARKKNYTPLFKATCVKTNDKGIEVHELVPDAPDSAPYITDTKAHYLIDNNRVGLRIDNPSFLPSLRGEKGAPIQSAGDISLLSPQAWLSTYELPGLVFYQYLYDTYDGHGKHLPSAEEIIKSYILAYKRLFVDLGEGSFDGWDEYAYAPLTLGDLPQKIKGFILHPSATIDPRFQDKANNRIDDMIKRTEAEIAGFYTKMKKLSDKSNKLGKKKYVDLQPGSIASRLVRDILFFTPVSEEKAKITSANFNSLQSALALSELGTNRIKDILRGLNHPFVMEAFENYRVEDFHLFDFWKVYLNKRLDYLKGLDREKLEEVPFLHSSRTRWQKRDEKYIKLLAGRYEQFELPRSLFTAPTRVLLDEVALHFESGSDRDLSMGNLINLFFSKVLSDNNQPFYRWERHYDVFDKLAGVKSGISLVHQFFKPEQLAKKMRERKTLKPSLYMCEKAVNSVNQNLKKGERRLNIHSSTDLKDFRVIAVAKENLKKAYQDYDDNERILRRFAIQDKVMYLMAKSILLGIEGIEMGSLDRFKLKDILPGKNNTILDILVPFSIVLEIDGIKVLIRQKEKVKIKRYGEFFRYNTDTRLRSLLPLLGKTLGADAEINVELDRETLEEELFAYDRERVVVMRMVLSLEQSILSRSTGDVPEMDRENFNNLVSKVGHIPYKSHGQILINIRNSFCHNEYARDIVLPEGTPLPQVAETISKLFETERKRRPNQCQE

SEQ ID NO: 1505 - protein, 1254 aa, Artificial; identical to SEQ ID NO: 1332
  Synthetic

SEQ ID NO: 1506 - protein, 1081 aa, Artificial; identical to SEQ ID NO: 1329
  Synthetic

SEQ ID NO: 1507 - protein, 1260 aa, Artificial
  Synthetic
VRHQGARTPDARQPRHGRHGRNVLSRSPLTTDYCGRAAVRPALFVSPLGHKRQSLISRYPSIPNSFMKNDYNSNSPKKTVAPKHFALPEAMGGETPLNEDEKKLKAVAGTYFERAMNNAAQTLRYIFNNKLQLTPTPDFKDLEKTLRGLAENSALADPLKHDEFRKLVFHHIPLFKALEDYRTRPPKPQKGSFSQPKEVRKLYSAADILIDLADMVGALNHYRNTYTHANHSCSQQTKAALQQREGEIAKWMENVFDSAVRMTKERCGFSADQMKFLQCGFGSRRKRDGKKFVLNDQFFFALTRNGLEVTPAGRLFLCCCFLPSHYVWDFLGRVNLERTTPFDQNQRDILSRALNVFHLRLPQENRIESDTSEGGLLLDVFAELGRCPLREVFDHISPQGQKQFRPKPDDRSPDGEEVLLARYDDRFPQLALRLIDQLGILDLVDKNGNKKEGIRFQQRLGSFRFRFYDKRCVDGASRLRTLQKEINGFGKWHELESRRRSRWAGIIRESAQPDQESEGGFAPDTADSQPYVTDCAPRYNIHNNRIGMTWGLDDGLFLPDLPKAAENPGSVAVEQPVPKCSMSIFDLPALLFYRHLIFKKGNIANLATPAKVIQDCCNNLHELFELAEQGASPDALKKFAVDKGIADSSIPVRLLNYINGNPCGPQDRLAAHAAQVLQEVVELCENRLDQLKEAQKCDIKYGKKGCRQVRYGHMAQYLGKSIMRWQPPRPGGQNKLTGLNYQTLVKALATSGQSWNDREVNQLFQNSELLGSDHPHPFLAEALRGTQNLGHFYSRYLAREKTFALKMKAELEARPAEALRQVPFAKPDAAKWKDCQSHPDYIKDYARRLLHTPAGGKETPAILLLPDGLFDAHVRKAITAFLPNTELCQMANEKVPGNNEKVPGNECCYKYGISKLIAQYFEQVQNDYAQPFYNADMPDFGRAYSLTTKLYGQKVGNSHQPYYMNSANLKTAVAKCGAETVRRAVDMKAAQTEESAKRKLRSILNNEKAIRRLMTQDKVLFLTAKELLYSLLTHEWFNYYTKPANTSVLQQINSVQLQSADSDFLRQCSQIIGDDQLPTFRFKLKNSDVTITQENLSLRNMGNVYRVQRDPRWQTLQKLLEKLEQTEVQYGAITAEFKNHEENSVKAVELSQRLEHEAYSDAIGRGETIDEETSHNFRKLLVCHPTLSKYQCDEIVLVRNKFNHNQYVDPSISKDKIFIERNMNGKKVPNLAKAMYETMKEAVEHPEDIIRKEVGEVSGG

SEQ ID NO: 1508 - protein, 1176 aa, Artificial
  Synthetic
MNIIDTYMPINSAEKIDKLIEALKGIPGAMNPNNRNYIFQNIGKAKLQIYFNDKYPESIFTEDSVSLPEISSSVSVGKSSIETKEEEQPIPVPKETLGSKKYIYGTYIEMAFHNLFLNIEHIYAIVTGKSIMEEAKAKFIPKGKHPFFDGDFANESLVWKPMFNTFRNSNSEDTLKIEEMLNRHFPFLVPFRDYIQQSKYYNKLTSVDILERLSQTLRVLRNVYAHYKITLYDNQRNVYLQNEKLIFECLDRCFLGARRIVKERFAFDDRAMHCTEQYEFHIDKSKRDERNRPIKIKKEIPGFRYKLYTANQAEKHITSFGLVFLTSLFLEKKYSKVMSDKLRVVAKQDESVVCEMLAVYRLRLNSQRINVTKKTEALALDIINEVQRCPKELFDILPPSKQAMFRVKSDTEDEHEVLMIRHSNRFAQLVMKYIDDAHLFDNLRFQVSLGRYFYKFYDKKCIDSHENTRVRAICKNVNGFGRIEEIEKMRQGCWDDVLRQYEDVHKNTSDEKPYVTDHHAQYIITGNRIGMRFMDDAVKCYLPELTTDGVRNLPPTCWMSTYELPALMFLLHLTDDATRIEDIIRSTVNNYTRFFNDIELGKLLPTDDVATLEATLNKDYGISSLKDIPQNMVDYLLGHNTEARDKFVESANATLDRLIAQTEYKISKYKDEKKLLGVNHKENKIGKKSYVQSKPGALAFFLAKDIMFFQPNDEQGRNKLTGLNFRILQAVLATFKNGETDELKRTLESAHIIGKRDDDMCNPIVQRLWSDSVHPSCTQDFYEMYLIERLSYLKECKRRGNLERLSFLYPNRMKWQIHDEEFSRSQAGRYLHDSYGNVKCDKAIELPRGLFEKHIREELKSIPLMKALAEDTSKNISYLIYGYFMKVMNDDCQNFYEAERSYQLFNVLYKKSPRDSKQYRTTDDIRLMLNRKHTTSIHKDIKQYLERLNPKNYKKESEKIQGLLRRLKDNETILKTYKVQDMLLLLIAKKIFMSNVDDPVQAAAFEQIRLRDIQNGETLTHKIKMCVRVCSKNGYGKVIKKDDLMLKHYANFYHILSDRRLPTLLDLVRGSVVEHSYIESELSGYDKVRPGILEEVFGYEKEYYQQNPDAEATDFGYIVNQSADLSQEKRNSLRNIRNSFAHNTYPKYKDVQIAGEIELPKKAIAISEKFKNDIKK

SEQ ID NO: 1509 - protein, 1128 aa, Artificial
  Synthetic
MISESNLRPILGAYINLARNNFFTTLKHINTAVGASGGVDDNEAQMYLMSILKSTLTPEQEDRARRLFFLHFPFLKYLSSDKEDLTVSFGRMRTEIISCANVLSWYRNIYSHSRAKERRSDPKKSDVANNYERLRWDELRVCRLMAQTATVSARIIKERYSTKNESQKGMLADDSMNFINRDRYRPSRGSDGRRTMILNESHFLYPMRKGDPLPCGENPERLSVSGKIQLICLFLEKKYITEFLSQTKFLSDFSDNAQAPLLSKRRLALDTISALRVRLPESRIQSDRDETQVALDILGELKKCPAEIYELLSAKDKSVFSVQSSTGETVLLRRSSDRFVPLALSFLDTTEAFPNLRFQVNAGTFRYLFKEDKKCVDGQERMRVLQEPLNCFGRIQEVEAVRKAKDGRLWKEYRILGFKESARNDKSCLPYISDVYTRYVVNGDNIGMRLDGTSIPEIKLRDDGIRYDVPCLQADCTISRFNLQAMLFYHLLRPMAKNAVPSAEELVCRSVEAYKHFFSDIVEGHLVPISGPDAEKRLLKILFDSYGIKLYDIPEKLKDYLLCVPDRKNRFEKHKKNLIKKMLEDTQRRLERIIEQRSTIEENGSENKPGKKGYVQIKPGGLASYLAEDIALLQDCEDKLTGLNYAVMQGTMATFSTHEPNGKGDLIKIFKNAGLISIDGKAGSHPFLWAVMKEPTVTGTVNLYIKYLRAKIDYLKKSVADNAPFLHSERKRWEERNVEYYKDLAKRYLSQPVALTGSVFEGPVKDILMNLKNEDLSNTIEKSVSNGRCNMAYMIQQFQDIVLEDTPQRFYGLVEGDMEHDPNYKLYGLARKYPRETIIIRDKPDTGTVFKATLNRAILWVREHPEETAPTRMQNGPRPAFEEIQARIRAAYKEFTETEKLIRRLATQDTLLFMASSSLIKKILGLPREDTSMKQYQIGLPEEKGILDMRLPKVVKNVRFDWKDSTRNDDPLAHKNASIEAEDICIKDYGDIFRIINDRRVASLVHHLNISSISIDDLRKELDCYDNRRVDIFRDIFEYEDKVLGSVSVLPETLDFDAVQKCDTTNSPEDKFAAGIIRNSFCHNFYPTRTAGSKQKKVQDVVIIDSPIPDVAESMASRLANFSKKTQK

SEQ ID NO: 1510 - protein, 1003 aa, Artificial
  Synthetic
MGAIENKHIFAAYANLAIDGLIKTLNFIAKKLDTQKQLSSWDIKHVITLIDSIFDQNPQNNLEQVVEGYLPWIKPIIEMKTPKKGERQSDKLCIEYKTIITAFASLLNDVRNYYTHYYHDPICIYPGGYDIPSSLNCIYDSAINIIKERFQAEEKEMEHLRRYTRKKGRVVLKTEDDHFYYTLANNNDLSEKGYAFFISMFLERKYSYLFLKKLSGFKRGDSLQYRLTLEVFTALSTKPPVERLRTTKDTKQDRALDILNELSRIPIELYQTLEPKYREMYNETLQPTDAEDPYGLPDRSRIRFRSRFEAFALHFLDKQADFKEIGFYTYLGNYFHNGYQKTRVDRETKDRYINFQLAGFCKNIQDISAKKLSEALNVKSIDISTDSIPDINSFEPYLVQSTPHYIVNGNNIGIKVLPEGKDTYPTIDEKGAKMPIADFWLSKYELPAMLFYTYLRNNNIHKSHCPLSVKDIIERSIHKSTKQKHPEERSELMLRRVMKAIFWTDSKLNEVERIKSQKSAFGKRQHEILKAGRIAETLVRDMLWLQPSKNNGRDKVTEPNFQAIQVSLAYFGIRRNDLTEIFTRAGLINSSNPHPFLAQIGTNYTSLIEFYIAYLKERKVYFSRIQKKILQGKLNIQCHPLRDLQREPNKPQDKEEAIFLPRGLFNEAIINCLKKSKLKQLIESPTREKSPALNVSYLIQNYFRTYFEDQSQEFYAQPRNYRLFDKLSPNKGKSKSYLSLEQRIKKMEELRPSKIPVAEANKLLEKEDRLYRKNYNEICDNESIIRLYQIQDILLFMMTKEYLPSDLYNRINKYKLENVKGILNERVSYLIDLNPLKIQGEDIKIKDYGKLFYIHHDTRINSLNKVLSKVKRNNSISSSVKIQPYENYKRECLDFEEAQIQIIPIIHSFEITMVSMFPDLKKATPGNYYDFNELITEYEKRTKQKIDSSFLIKTRNMFLHDKYEAECIKEISDDFVYAKKIIAEFKMKIENIKLEDLSNDSSA

SEQ ID NO: 1511 - protein, 1127 aa, Artificial
  Synthetic
LQKQDKLFVDRKKNAIFAFPKYITIMENKKKPEPIYYELTDKHFWAAFLNLARHNVYTTVNHINKLLEIAELKNDEDVLNIKDSWNKQAEKLDKKVRLRDLIMKHFPFLEAAAYEITNSKSPNNKEQREKEQSEALSLNNLKNVLFIFLEKLQVLRNYYSHYKYSEESPKPIFETSLLKNMYKVFDANVRLVKRDYMHHENIDMQRDFTHLNRKKQVGRTKNIIDSPNFHYHFADKEGNMTIAGLLFFVSLFLDKKDAIWMQKKLKGFKDGRNLREQMTNEVFCRSRISLPKLKLENVQTKDWMQLDMLNELVRCPKSLYERLREKDRESFKVPFDIFSDDYNAEEEPFKNTLVRHQDRFPYFVLRYFDLNEIFEQLRFQIDLGTYHFSIYNKRIGDEDEVRHLTHHLYGFARIQDFAQQNQPEVWRKLVKDLDYFETSQKPYISKTAPHYHLENEKIGIKFCSTHNNLFPSLKREKTCNGRSKFNLGTQFTAEAFLSVHELLPMMFYYLLLTKDYSRKESADKVEGIIRKEISNIYAIYDAFANNEINSIADLTCRLQKTNILQGHLPKQMISILEGRQKDMEKEAERKIGEMIDDTQRRLDLLCKQTNQKIRIGKRNAGLLKSGKIADWLVSDMMRFQPVQKDTNNAPINNSKANSTEYRMLQHALALFGSESSRLKAYFRQMNLVGNANPHPFLAETQWEHQNNILSFYRKYLEARKKYLKGLKPQNWKQYQHFLMLKEQKSNRNTLVAGWKNGFNLPRGIFTEPIRKWFEEHNNSEGLYDQILSFGRVGFVAKAIPLYFAEECKDCVQPFYDYPFNVGNKLKPKKGQFLDKKDRVELWQKNKELFKNYPSEKKKTDLAYLDFLSWKKFERELRLIKNQDIVTWLMFKELFKTTTVEGLKIGEIHLRDIDTNTANEESNNILNRIMPMKLPVKTYETDNKGNILKERPLATFYIEETETKVLKQGNFKVLAKDRRLNGLLSFAETTDIDLEKNPITKLSVDHELIKYQTTRISIFEMTLGLEKKLIDKYSTLPTDSFRNMLERWLQCKANRPELKNYVNCLIAVRNAFSHNQYPMYDATLFAEVRKFTLFPSVDTKKIELNIAPQLLEIVGKAIKEIEKSENKN

SEQ ID NO: 1512 - protein, 1094 aa, Artificial; identical to SEQ ID NO: 1358
  Synthetic

SEQ ID NO: 1513 - protein, 1168 aa, Artificial; identical to SEQ ID NO: 1357
  Synthetic

SEQ ID NO: 1514 - protein, 1140 aa, Artificial; identical to SEQ ID NO: 1356
  Synthetic

SEQ ID NO: 1515 - protein, 1184 aa, Artificial
  Synthetic
MERIFGHCCPHHDSVCFVRFLGTMVSNQDGRENVLDILYIADRTRKLKPMNTVPASENKGQSRTVEDDPQYFGLYLNLARENLIEVESHVRIKFGKKKLNEESLKQSLLCDHLLSVDRWTKVYGHSRRYLPFLHYFDPDSQIEKDHDSKTGVDPDSAQRLIRELYSLLDFLRNDFSHNRLDGTTFEHLEVSPDISSFITGTYSLACGRAQSRFAVFFKPDDFVLAKNRKEQLISVADGKECLTVSGFAFFICLFLDREQASGMLSRIRGFKRTDENWARAVHETFCDLCIRHPHDRLESSNTKEALLLDMLNELNRCPRILYDMLPEEERAQFLPALDENSMNNLSENSLDEESRLLWDGSSDWAEALTKRIRHQDRFPYLMLRFIEEMDLLKGIRFRVDLGEIELDSYSKKVGRNGEYDRTITDHALAFGKLSDFQNEEEVSRMISGEASYPVRFSLFAPRYAIYDNKIGYCHTSDPVYPKSKTGEKRALSNPQSMGFISVHDLRKLLLMELLCEGSFSRMQSDFLRKANRILDETAEGKLQFSALFPEMRHRFIPPQNPKSKDRREKAETTLEKYKQEIKGRKDKLNSQLLSAFDMDQRQLPSRLLDEWMNIRPASHSVKLRTYVKQLNEDCRLRLRKFRKDGDGKARAIPLVGEMATFLSQDIVRMIISEETKKLITSAYYNEMQRSLAQYAGEENRRQFRAIVAELRLLDPSSGHPFLSATMETAHRYTEGFYKCYLEKKREWLAKIFYRPEQDENTKRRISVFFVPDGEARKLLPLLIRRRMKEQNDLQDWIRNKQAHPIDLPSHLFDSKVMELLKVKDGKKKWNEAFKDWWSTKYPDGMQPFYGLRRELNIHGKSVSYIPSDGKKFADCYTHLMEKTVRDKKRELRTAGKPVPPDLAADIKRSFHRAVNEREFMLRLVQEDDRLMLMAINKMMTDREEDILPGLKNIDSILDEENQFSLAVHAKVLEKEGEGGDNSLSLVPATIEIKSKRKDWSKYIRYRYDRRVPGLMSHFPEHKATLDEVKTLLGEYDRCRIKIFDWAFALEGAIMSDRDLKPYLHESSSREGKSGEHSTLVKMLVEKKGCLTPDESQYLILIRNKAAHNQFPCAAEMPLIYRDVSAKVGSIEGSSAKDLPEGSSLVDSLWKKYEMIIRKILPILDPENRFFGKLLNNMSQPINDL

SEQ ID NO: 1516 - protein, 1090 aa, Artificial
  Synthetic
MNIPALVENQKKYFGTYSVMAMLNAQTVLDHIQKVADIEGEQNENNEDLWTHPVMEHLKDAKNGYDKQPEKTMFIIERLQSYFPFLKIMAENQRKHSNGKYKQNRVEVNSNDIYNVLNKIIRVLKMYRDLTNHYKTYDKKLVDGPGFLTGTEQPLSGMISKYYTVALRNTKERYGYKSEDLAFIQDNIYKFTKDAYGKRKSQVNTGFFLSLQDYNGDTTEKLHLSGVGIALLICLFLDKQYINIFLSKLPIFSSYNAQSEERRIIIRSFGINSIKQPKDRIHSEKSNKSVAMDMLNEVKRCPDDLFTTLSAEKQSRFRIISDDHNEVLMKRSTDRFVPLLLQYIDYGKLFDHIRFHVNMGKLRYLLKADKTCIDGQTRVRVIEQPLNGFGRLEEAETMRKQENGTFGNSGIRIRDFENMKRDDANPANYPYIVDTYTHYILENNKVEMFISGEENSAPLLPVIEDDRYVVKTIPSCRMSSLEIPAMAFHLFLFGSEKTEKLIVDVHNRYKRLFKAMQKEEVTVQNIASFGIAESDLPQKIIDLISGNAHGKDVEAFIRLTVDDMLADTERRIKRFKDDRKSIRSADNKMGKRGFKQISTGKLADFLAKDIVLFQPSVNDGENKITGLNYRIMQSAIAVYDSGDDYEAKQQFKLMFEKARLIGKGTTEPHPFLYKVFARSIPANAVEFYERYLIERKFYLTGLCNEIKKGNRVDVPFIRRDQNKWKTPAMKTLGRIYSEDLPVELPRQMFDNEIKSHLKSLPQMEGIDFNNANITYLIAEYMKRVLDDDFQTFYQWNRNYHYMDMLKGEYDRKGSLQNCFTSVEERECLWKERVPRTEQYRRLASNKIKSNRQMRNASSEEIETILDKRLSNSRNEYQKSEKVIRRYRVQDALLFLLAKKTLTVLADFDGERFKLKEIMPDAEKGILSEIMPMSFTFEKGGKKYTITSEGMKLKNYGDFFVLASDKRIGNLLELVGSDTVSKEDIMEEFKKYDQCRPEISSIVFNLEKWAFDTYPELPARVDRKEKVDFWSILDVLSNNKDINNEQSYILRKIRNAFDHNNYPDKGIVEIKALPEIAMSIKKAFGEYAIMK

SEQ ID NO: 1517 - protein, 1101 aa, Artificial
  Synthetic
VRESYLVFYHLHYTFSIKILFTMEKYKIVNLKPTMALYANIALNTIEKLCDNQTDSISTSKKELAEEVKGWNTERQITVARKLYTNFYFIERLFSDTEFKANKNQTDRVNEEQSIQTLQAKEVITWLNLLFDIRCYCTHNIHSEPLVSNYHESSVKSLLENLYQEAVNHSKTSVPDKFRDACSLFETCTKESKYERTTKHRDKYRQINNTYFSFTAQVFIICLFLDRDSVNEFLEAIEIAHLPDGSEEARTNFRLLNPGEPYPEELRAPYKQVLYARDIYTYWAARGHRSHLSLAADSVLKEKYFSILEHLKRIPQERLEGDERVYSFDIREKNKFMEWALEFWETEYKACGAGGKEINWKWARHASVEDKKAVKQKTAERQQQPGKVSERIQPLRRHEKVVWQIPDDENSRLNDRGDESGFPYYFEKDDKGEYSQALFQCIQGKGEGRRIIIGLMSRKTLCSILEAYLTLFPLDDKVEINFPDRKKDFFVEITKACINYVANKYPELTGRKEKHIVTRPEIENRIAYLQQKYKQQEEETNLHKRIITIADTWNQMITCAARTNPTHALDDKGVTGGKNGYQEIIKYLSFMSPAPITYIQREDEEDNSYRSREYKKTQKIREEKASDLITLLKQLGGTKTKNNYYQQINNSLNHGIDKRLSNTLNKKDVASCHTIAELFRQCMEYRMCTLKVYSDKLKSGLFNPELWKPNTEMRWLGLRDTRTPQAAQNEEQPPKPLQTGILNVDRHQHTAVGMPSELRELISKELFTKWFGEAKQPLHQGLYPSPGNNVLLIPDFYALQNHSVWESMSGPQKKRLYQIRREDTLLSHFAYYYALKAGLPPHNMELIGKDFQDLSLQMPIAHPENGILLANISFYYRHYKQNRYRLPAKLTVGLINLLVERGLIECGSEIPHNTLVLRPKNELTDEDKLTHFGERAYETLSKEEQISKINEKLSVMSSDNVFIPVKGERKYFITELLNSYTICRKVFINRIFHLENVVINKYSLQKKNDKNYLSFKELSETLRTYNILNDDEVAKLVQLRNAAFHTDVPSADLLIPDNEKLIKLTKTHPTKEYIDIFGTGFDLINKCLDSLEKDKVKKYKH

SEQ ID NO: 1518 - protein, 1129 aa, Artificial; identical to SEQ ID NO: 1396
  Synthetic

SEQ ID NO: 1519 - protein, 1183 aa, Artificial
  Synthetic
MPETCRNFIINCTEISGKLHRTVLISSRKFHQRRKEKKMRHQQNAQYGACQWRDRASAKKRTYLSGDYKKDMAMLRIFGNIRNPQTRKDEFKNEVPQFITYLTLALQNVSEIIGTDLSNLRDESSVKTALEENGRLFEVASFLWMYRVEEPGRDYDRIKKGEYADRAKEIVVALWKLRNMFVHPYERNAARALIVSPEFYRFIEGELYSEAREHALGPGRKSEKIFKLKLFNPHDDARTTFEFTRKGLIFLTCLGLYRHDASEFIQQFPDLQLPPREWQVEQGYRAKPSESELVELRKKGGAVKSILDAFTWYSMRASRMDIDVANSDYLNFANILVYLNKVPSAAYNYLLLDDEAKRLTKRAAASQESEENKRFKYLLQERKKDRFLTLALAYLEDFHKLDCIRFKRLDITVRPDRKRYMFGPIPEGTVNERGEPLNDANGMDRHYAIQNGSAQFEFVPEQHYGPIQIKRLRGAVSEGEIMRLLLVMFDNGIRRKKPNDVIKEYLIAYHRILERMLNAGDTGAFTFDDPLFRADFKTVSGKGDDVFTKGRFVGEMKPFFSENVTRYFVGDELRPTPEALQKKLVKRFEAMQGRAEDFLLKMNRLTDWRKLDLEARKDKAFPVCSIGELKYPPRTCKVNDAQLVKWVLRYINLFLAKEEKFRQLPRGLRHRGVRDFEFQLLHTDIGRFGVNPDALWRTLEKRSSINGEDGALKMLEDREQELFRSEQNRCRGKRDRNGRPLRPGHTLTMLATAAAELYRESSESFRSEYSVPLSDEDKDLLPYVCPTYGVRAGLPLDQKSLVKTVLGIDLDTWSRAYDYATGRNFENRRLSNAHDLIVSQVPMPNAFAIRCVKPGENGEPFKFNPEFRTFMPYERGKMSLRGYYDATPLIVAVKRFDEQSSLGKGGHERANAEIRCSGTEGIETREWTDDGDIGSGKEPPRSRPSFARGDVNKAIQAIQLAERQDKVLLACAKAYWDRYMGEEVTATQNETGKKDQQKKNKIKNFHLAEAADIGEFFSLPIDDTVNGVKIRMMPNDFARPAYGVVTTHVKELVEGVKPLPGTDSVYSFYDLWLELRNLQHKENRVRLDFLPAAVKFNAWVNIPANLESLPNDDPEKTPRILSHCNKALRLLRLRGNVEPLSEEEYLLLAKFEPRLRHPARKGLDLVHFDTDAVRAIYKRFGFL

SEQ ID NO: 1520 - protein, 1129 aa, Artificial
  Synthetic
METNQQTHENRRRTLTNDPQYFGGYLNMARLNIYNINNHIATDFKQATLPEEGQIPAAFLCNKTIKNLNWNHVHTRAVRFLPILKVFDSESLPKDERENSDTEGKDFTSMSDTLKVVFSELQDFRNDYSHYYSTEKGDSRKLIVSPELANFLTVNFQRAIAYTKARMKDVLTDTDYALVENLQMVAPDNKITTEGLVFLIAMFLEREQAFQFTGKIQGLKGTQFNSFIATREVLMSFCVKLPHDKFVSENLEQALTLDIINELNRCPKTLYSVITDKEKQQFRPELDAQGIDNLIANSTNDDECERILDEIDYQDYIEGLTKRVRYSDRFSYFAMRYIDEKNVFDNLRFHIDLGKYEVDNYTKQFAGEQAERKVLENANAFGKLSSFTDPELIQQRIDKQQHTAGFDQFAPHYNADNNKIGLSNKENIAILTAKSKADSKVEHNLKQPLPQAFLSLHELPKIILLEYLQKGQAEELINDFILLNDTRLMDITFIEEVKSQLPANWDEFSKRSDAKKKKAYSDSTLKYLRQRKTTLNTILSKSNLNDKQIPTRILNYWLNIKEVDDKRSVSDRIKLMKRDCMTRLKAVEKHKLNKSVKIPKVGEMATFLAKDIVDMIVSEEKKQKITSFYYDKMQECLALFANAEKKALFIHIVTNELKLFENGGHPFLQNINLQQIRKTSQFYQAYLVEKGNKMVPRLNPKTNKTSKVDESWMMKQFYVKEWKEEIGKQLTVVKLPANKSQIPFTIRQWDEKEKYDLNTWLQHVTVGKNKDGKKAVNLPTNLFDEALCDLLREQLDTKIVNYNPAANYNELLKIWWKTRNDDTQQFYQSEREYDIYNEKVRFKIDSSAHFADYYKNALSRAFTRLKAERETARQTNKRLPPLEYKQVERVFKNTIAETEKEIRMLQEEDRMAVLMLEQLMDNSPNLRLSKIETLLNDTTPISEKISAKLSFDASGERITDKSNPTVTKTLVAERKQKNYTELQKYRYDRRLPELFEYVQADEIPLEWLLDELSAYNSAKQQVFDTVFALEKKIVGTDPDELKSLFTNPKGEPQKGNIQHKPYVQWLTNKGLINKEEKQFINMVRKCFSHNQFPQRKTMELLIPAWNEKKLALQIATVYNQLIADITDKI

SEQ ID NO: 1521 - protein, 1047 aa, Artificial; identical to SEQ ID NO: 1398
  Synthetic

SEQ ID NO: 1522 - protein, 1140 aa, Artificial; identical to SEQ ID NO: 1482
  Synthetic

SEQ ID NO: 1523 - protein, 1118 aa, Artificial
  Synthetic
MEDDKKTKESTNMLDNKHFWAAFLNLARHNVYITINHINKLLEIREIDNDEKVLDIKALWQKVNGDLNKTERLRELMTKHFPFLETAIYTKNKEDKKEVKQEKQAKAQSFDSLKHCLFLFLEKLQEARNYYSHYKYSESTKEPMLEKELLKKMYNIFDDNIQLVIKDYQHNKDINPDEDFKHLDRTEEDFNYYFTRNKKGNITASGLLFFVSLFLEKKDAIWMQQKLRGFKDNRESKKKMTHEVFCRSRMLLPKLRLESTQTQDWILLDMLNELIRCPKSLYERLQGDDRKKFNVPFDPADEDYDAEQEPFKNTLVRHQDRFPYFALRYFDYNEVFTNLRFQIDLGTYHFSIYKKLIGGQKEDRHLTHKLYGFERIQEFAKQNRPDEWKAIVKDLDTYETSNERYISETTPHYHLENQKIGIRFRNGNKEIWPSLKTNGENNEKSKYKLDKQYQAEAFLSVHELLPMMFYYLLLKKEKPNNDEINASIVEGFIKREIRDIYKLYDAFANGEINNIDDLKKYCEDKGIPKRNLPKQMIAILESKPKDMVEEAERKQRKMVKDTKKLLAALEKQTQGEIEDGGRNIRLLKSGEIARWLVNDMMRFQPVQKDNEGNPLNNSKANSTEYQMLQRSLALYNKEEKPTRYFRQVNLINSSNPHPFLKWTKWEECNNILSFYRSYLTKKIEFLNELKPEDWEKNQYFLKLKEPKTNRETLVQGWKNGFNLPRGIFTEPIREWFKRHQNDSKEYEKVEALKRVGLVTKVIPLFFKEEYFKEDAQKEINNCVQPFYGFPYNVGNIHKPKEEDFLHREERIELWDKKKDKFKGYKAKKKFKEMTDKEKEEHRSYLEFKSWNQFERELRLVRNQDIVTWLLCMELIDKLKVEGLNVEELQKLRLKDIDTDTAKQEKNNILNRVMPMQLPVTVYEIDDSHNIVKDRPLHTVYIEETKTKLLKQGNFKALVKDRRLNGLFSFVDTSSEAELKSKPISKLRVEYELGEYQNARIEIIEDMLALEGALIEKDKNLPTDNFSDMLNGWLEGKDESDKARFQNDVKLLVAVRNAFSHNQYPMRNRIAFANINPFSLSSADISEEKGLNIANQLKDKTKETIDKIIEIEKPIETKE

SEQ ID NO: 1524 - protein, 1148 aa, Artificial
  Synthetic
MDNSTSKSFKRFFEFKGNVAPIAEKANRNFNIKNLNPINTQQRLHYFAIGHVFKSIDTEKIFTVLLDEVAKVKKPTKFSALQNTEFTFINELKCLMSDIRNINSHFIHDFEKIKIDSIDKNIIEFLKQSFELAVLQTCMDEKNINYEEFTGGGNPEKEIVDFLCDKFYPKIDNSKDLSEHQKLISDFKKKSKDEAINEILFINVSSDYNWNIFETHTVFKISKGKYLSFEACLFLLAMFLYKGEANQLISKIKGFKRNDDNKFMSKRNLFTFFSKKFSSQDIDSEENHLVKFRDLVQYLNHYPTVWNKYLELGSNNPIMTERLKEKIIELEIKRCFPELASNSSFNQFAINYIFKNGKIIECENNNIYLDIINKNDEVRKIYFSIKNNEFNRSEFKDNSFKMFALKYVVKEYYKENKAYADYLTKQIKDKEKTFDEELITNKKVEKLKKQISQNLNFIFYGRNQDRFMEFATRYLAETGYFGKDAKFKMYEFFTTDEQIEEIDRLKRTISKKEFDKLKFHQGKLVHCSTYADHIAKYKNWDTPFVVENNAVQLTVCFDNGQRKILSIQRNLMPYFLEDALYNMQNDKIEGAGKILIENYYNYHKEGFEKSRLTLKQNDTISLLEKATFKKILPKRLLHRYSPAVQNNLPENSTYKQILTKTKEAEERYVKLLEKAKKDGYEEDFLKRNKGKQFKLRFIRKAWNILFFKDHYLKQVQFSGHHRRFNISREEFNDFSKWMFAFDETPKYKDYLMILFEQKGFLEISNFRTLFVNSSSLDGLYGKTKAIYEGWMQNNNTNEKNPDKYSLKNYEKFFTDELFYINVSHFIAYLDIINKIRRNEKGGIIYPCLENEKHLITEYYYKVKLEENELKNCKKLFNKLMSAKLEDALLYEISMYYLGIDNTIVQKARTNVTNLLNQDVVFNINDANSNHLYDLSIPFNKIDSYVELIKHKEDQENDKKNKKTSFLGNMPSYIVNVICKETKNKESCSICNKYINFKKLDFDDLNKINNHILSNSVKFTQVALSFEEYFIFNEKKSIIKNNRIDVDEFSFWNAYFSDSGLTRKKAFHFGVPKESYDDIIARMENKFVKEQIRPSLPLDYNSFNKQQKSICDALLKSIHSSYFNHREKDKKKKRNEANNMYYKEVILKK

SEQ ID NO: 1525 - protein, 1121 aa, Artificial
  Synthetic
MDMDENINYYDFNNIEDKHFFAGYYNLANDNFYNVLKELKYISDKKLDITEINKASYSELDTRLNKLQRFLPFIPSLVVDKEIKDQKFEITTLLKFLWSEIEKQRNFYTHYAHNRPEFILESNQQILNHYFIKAVELIKKSVKDELCRNSIREHFSVEFNELKVLQKRYIEEKIRNSKSNSEKKKYSLDEESINNGIFNKLFKPYIIKDKVTGILSINNYRLLFDSSGYLTKHGHLFLLSLFLKRDQMESLMDKIEGYKASHKLYFHLTRRIYSHFCFKGIKRQIVSQHSKTKLMLQMADELGKIPEELYNLLNNNEKAEFIVDINEYYKDNDQNGENPDEKRVIHDVVRRRYKQTDKSFSDTYGTNKTIDKFEYFALRFFDEDSKLKNIKFMIDWGNVIIDKRSKNILDMQTERIIKKRVTVFENINTVIDKKIELVNSNNCNGQILIDEENSTCLIEGYPFPANPSYYFQGHNIPIYLSYNNKKEADCEDTEINKVRNAVLKNTLGDNVFPNKPNALLSLYELPAMLHVYFNHANKEKEVFKLLINKYFKYKKDLNFKENINDNQLVHLKKIKNNKILLEKNEYTFNRQKLVSDINKEIIKTEIKINEFNKCKLEYHDIKNKRKYLMYNSEKGLVATFLADEILRWMPRNLKENWKGYHHSELQKLLSFFQIEKNNINHLIIFDDKFDFLRDIFKKSNSLEDLYINYLNGKIEKLKSFLSILDIKEKKVLKKGLCDIWVFFKQSKYNIKNINSYSEELLKKPILLGRGIFDDTPTFYPSDLKDNPKANWFETVKKNQSYQSFYNLLEDKLKPVSGESSVEKRRRIEKYRSIEYQKIKDIYTLEMFKHLYKEIFGNEEIMENITLTDFYQSPAERKKMIANASSQNNRNQGNCSKNKYNELGIWNKVTPCNFENGRVVAPQIKLKEIGKFEQLLLDDKVKAILSYNDQIWQKQELERELESYRIVREEKLFKIIHNLEKVILEIETLHREDKSHPIIFNNGEYPNFRKYIENSKIFNWSQEDKNIINCFNSELLENSFPEIIVNANPRLQKAILLIYIRNKFAHNQLPSKHVHNFCKKISCINDERVTTYAEFYLMIVENFILDQNFIKTKQVYNNNSIS

SEQ ID NO: 1526 - protein, 1169 aa, Artificial; identical to SEQ ID NO: 1433
  Synthetic

SEQ ID NO: 1527 - protein, 981 aa, Artificial; identical to SEQ ID NO: 1432
  Synthetic

SEQ ID NO: 1528 - protein, 981 aa, Artificial; identical to SEQ ID NO: 1432
  Synthetic

SEQ ID NO: 1529 - protein, 1169 aa, Artificial; identical to SEQ ID NO: 1433
  Synthetic

SEQ ID NO: 1530 - protein, 1189 aa, Artificial
  Synthetic
MVEFDKNRKYIYAAYCNMAQHNFISTLKHIAKCLSLDLELTDKSKKIIDELKDKVNSLTQDKKLKFYELLNKHFPFLAPMIDSDKSAKDYNEIKAINDILPQIGTVVDFYRDYTTHYDPDEEKSVDYLHPSEQTLVPRLKELLKAEIRTVQQRFNYVEDEVLFIKNKEMDKERYRYCLFKKLCRTDKKVFSRRGLVFFISLFLEKKYINEMLNKTKDFYAKDDLFNDKRKHIIFESLAVYRIRLPRNRYESQQDDVGLALDMVNELQRCPKELFDLLSTEDQIKFRPDASDEDSSKTAIMIRHADRFPKLAMNYIDQCNVFNSIRFQVNLGKYRYAFYNKKCIDGLNHVRSLQKELHGFGKLNEIEKARLDTWGNLIRDFEDIKTNTIDTMPYINDQRASYIINNNRIGLYWEDKDDVNEPKLVLPKLPNEPTAKNLRQQKANGERIVLLQSPKCFMSTHELPALIFYHIIRKKHQKTDSPDVESIIIKWVEGFRNFIQEVMDGKITSQNAQERANQLGINYAQHLPKKIQEYLDANQDNNNAITANLQKKLKNRLTTHIDETKKLIEKYNNVKHVDSKKNKRGTKRFVEIKQGRLGAWLAQDIIALQPAPADGNNKLTGLNFQLLQSALSIYDNFDNLKRLLIAAHLIQSKGNHPFLSEIVSKSPQTIGDFYQAYLKAKLNWLNSLLSEEDLIKYPFLTRGVNKWKFRDEEYYKSIMQQYLELPAELPRGLFETAIKDILIDCFGRGFVRGNNREEANVAFLIAKYFKKVFNDDYQEFYTQPDGNYKRHYYFFKLLLQSDKDYGKTVKEIEDILRTDMSLTLLSKTTIENDDDSDNSDNSDLKEYFEEINKKLAKSLAKDPTLDKRHRIEDIISKSETLSKLPNSQQKKLLRISSKRHGVPINDGLVKKHIKKITSNSEKEEELKKLSHALHKLKSTERLIRRYRVQDIIIFMMAREILFENDKNLFENRFEEFKLKNIRPIRRQEGVGALEIKVPFAITLHIKGSNESVVIRQKSIKLKNYGDFHKFLYDNRIETLIPYLRDDANAVKVTIDRDELEHEFETYDKVRLDVFESVHKIERLILERYPELHDKRSSLYYFEKKGVEKPIPKKNNFRQLIECEPQFAVLDKDDCLNIRNSFSHNSYNSKDHEKVNIPSGKIGEIAELISERMKTCLNNFEKKTRQENDSE

SEQ ID NO: 1531 - protein, 1140 aa, Artificial; identical to SEQ ID NO: 1482
  Synthetic

SEQ ID NO: 1532 - protein, 1129 aa, Artificial; identical to SEQ ID NO: 1396
  Synthetic

SEQ ID NO: 1533 - protein, 1081 aa, Artificial; identical to SEQ ID NO: 1329
  Synthetic

SEQ ID NO: 1534 - protein, 1081 aa, Artificial
  Synthetic
MQAQSLFDEYKHLFGTYSVMSIMNIITVLNHIHQIAGLKRNELGDDDNIYSHPVLKYIAPENNSTTLPEKRDLIKELLLEYLPFLEAMKDCYKEVKVEKDKRNNKYVKDKKQVFIRNYSDIYCIYWTLYNIFSTLINYRDKSCHYRFIPSKDQEEYSKSTEYDTVRIINKYYTYALRKTKEKYGYTTEQLSFIQNNRYTDDKKVNFNFFLSMQSSNNNLSHVGVAQLICLFLQKKDVDNFLENLPIYDNRYCLGIDEHMIIKRSLALHSIKLPKERLNSEKKDMAIAMDMLNELKRCPKELFNTLPFDKQERFRIISSDHKEVLLMRSTDRFVPLILQYIDCNKKFKDIRFHVNMGKLRYLFSPNKLCIDNQERVRMLEHLLNGYGRIDEVEYLRKAPNGTFGNTNIPIKGFGEIERDSADSNNYPYIVDTHTHYILNNNKVEFCFCEDSKNKNVFPTIEKEINGKWYVEKTAPHCRISFFEIPAMAFHMFLCGSEKTEKLIKDVYNNYISLFNALKNGALTEENYKDFNIPECDMPKKILDFLKGKAEGKSIDGYVKNILKKELKDTRKRIEQAPSEKDQMPSKRNKIGTKSYKRVLTGKLADFLAKDIVKYQPTLCAGDDYGIDRMTGMNYRIMQATIATYNDDDDFDTFYNVFKMAGLVDGDERKNHPFLKKVLLSKPQNTVAFNIKYLKEKEIYLRNIEKKNIIPPFVNRERNKWCERDCEYYRILGENLLDLPIELPRQMFYKDIRAQLEPLMPEIDFSQTNTTYLIAEYLKRVRGDDFQEFYSWERNYRYIDFLKCIRDDNGRICAQYTTTEERESLWEDSKNRTAEYKRSEEQKNEKKDKNFEDSLEERISSSHIKFQNTEKHIRRYKVQDALLFMIAEKQFGKYLDDIKAKNFKLKDIMPDTDKGILSETMPIDFTFTKKNIKYNIHAKNLKFKEYGDLFILANDKRLESLWKILATDTVNKEEISEEFAKYDFCRPDITKLVLDFEKDVLEKYPEIIEEAEKEYKKFDFKFILDWLINKKKLNYGIRNKLLLIRNAFNHNSYPDKKYAEVRELPEIATNLKKTFDENAKKYE

SEQ ID NO: 1535 - protein, 1081 aa, Artificial; identical to SEQ ID NO: 1329
  Synthetic

SEQ ID NO: 1536 - protein, 1047 aa, Artificial; identical to SEQ ID NO: 1398
  Synthetic

SEQ ID NO: 1537 - protein, 1140 aa, Artificial; identical to SEQ ID NO: 1356
  Synthetic

SEQ ID NO: 1538 - protein, 1094 aa, Artificial; identical to SEQ ID NO: 1358
  Synthetic

SEQ ID NO: 1539 - protein, 1081 aa, Artificial; identical to SEQ ID NO: 1329
  Synthetic

SEQ ID NO: 1540 - protein, 1168 aa, Artificial; identical to SEQ ID NO: 1357
  Synthetic

SEQ ID NO: 1541 - protein, 1140 aa, Artificial
  Synthetic
MNLSIKPNYRKYNDETDKAFFASYLNTAKQNVFITFRDISERLGLGFDLNDDDNMMNAGLWKKLRDNAEPDVSWKIIQKIEEKFPYANYLAKNYAYFKRKERQAKPEDYSKVFAIFIQQLYDFRNSYTHAVHDPVETPKEIIAGMQLLFDAGRRGIKKRFKLGAKDMMHLVRLERTGKGKDAKTIERSDFHYSFVDDKDKLSEKGLAYFICLWLQRKDAQTFLKKLEGFKRSEKPGEKATLETYTFYSLRLPQPKLKSDNNSAGLLLDMVNELRRCPKHLYPLLSEDDKERFLKKAEEIETEDEYEALPILKRSSNRFYYFALKYFDTVFKDAKFHVDLGNYCFHVYNKDVDGQNRIRRWIKKMTAFGNLDDFSDEKRPQQWIDKIQRIEDRDFEKEDIYLTQTTPHYHINGKNIGLKFRHSYSELVKDNKIWPELPDFDKEHAKTTLPRTKAPDCWLSLYELPAMVFYHLLLQDNTASTSVEEIIRLHVKSMDLFFMDIENGVLNPGMNNSGFAEEISKRGLEKYFIPKPLIEYLTSATTKTFEDRADKMLEALIAETKQMLKKINNQKDNFAQKPGSKDYVEMKSGNMADFLARDIIRLQKPLAGMKGKPNSTEFQVLQAKLAFFGANKDSLDATFNNLQLTNSENPHPFLHQIRVDTCKGILDFYVKYLKKREWYLGYCKSKEQYHDYHFLKMGRRRKEHSETYYKNLANELRTQNVQNLPRGLFLKPILNILSSTEKTKVLAGELKQLSRVNTAYIIEKYFTQILDDSPQEFYTYNRSYEFLNKIYDDRKKNGMPLKQKFLTIDELKDKAQRINEDTYDNEILRAMDDKIEVEAKKTKRNGKRLSKDEINELKEKYWTRYKAFGENEKQIRLAKTCDMVLFMLVDHTLRRSFVINEGFVKKKKETNDIKPVEFGNEYKLSQIKAESDKGILELQTEAKIEMPYSYETNMDSLLKIAGAKSKLSDLQSKTILREQIKIKNYGDFRALMKDRRISSLLPYLAKDPIYFEALQKELELYQEVRVEVMDTIHNFERKAIALKGIIKGSDKAFISHEQILDGFPGYDPAKRMKIEKLRNAFCHSQYPAYLLYKDEINGDGINKLKDYTADEPIVLHNSPALQFKKIIQKYYDDIIQFDITG

SEQ ID NO: 1542 - protein, 1181 aa, Artificial
  Synthetic
MENLPLRSFKRFFDFKGNVAPIAEKAVRNFTLKKENPDNLKQRLHYFAIGHTFKNIDTKNIFEYTLNEETRESMPTKFLALQQDNFTIDKDLEKLPSNIRNKDLGSLLSDIRNINSHYVHDFEKLKLDNIDDKIIEFLKQSFELALINTILKEKEISYEDFISNESEKEIVDFLVDKFYPLNDQRKDLDELAQKSLDNYIEFRDDFKNKTKDDAINAILFVNVETEYEWKIYGEHHIFNITKGSYLSFEACLFLLSMFLYKGEANTLISKIKGFKRNDDNKYRSKRNLFSFYSKKFSSQDINSEENHLIKFRDIVQYLNHYPTIWNKDLELESNNPLMTDKLKEKIIEMEVARCFPDLNSDIEFNEFAIQYLFYKKESENHNKNLYLDIINKNDEVRKIYYSIKNDSLNLREFKDNTFKMYALKYVVNKYFKDNKKLTNLKHKRFYGKKEREFKDELITNNKTEKLKIQISKNKLFVSYGRNQERFIDFAMCFLAKTNYFGKDAEFKIYQFYSSEEQNEELNTLKQKLTKKQYDKLKYHRGKLVHFSTFENHLGKYDNWDTPFVIENNAVQVRVTFLSGIQKIVSIQRNLLTYFLEDALFNYSTNKLEDAGKRLISGYFTHHLKEFSESKLILEQKTSISQDEKTSLKKILPKRLLHHYSPAIQNFIPKFSTFELLLEKVKIQENRYLELFKKVEGEEMIYKKSNPHDKNVSLVKDFLKRNKGRQFKLNFIRKACHLMYFKESYLKQVEVSGHHKRFHISKDEFNDFSKWMFAFDEVPAYKLYLAELFESKGFFDNPEFKSLFESSTSLSNMYENTKDVYENWLLTLKQSEKDKDKYKLSNYEKFFADDLFYINVSHFLKYLESTCVIARNEQGNIIYKSLENEKHLILGYYYKNKLEKAEYKTCGKLYNKLKSIKLEDALLFELAMYYLKIDKSISQKARTDITTLLSQDVIFEIKDSNSNHLFDIEIPFNKIDAYVELITFKEEQEDDPRFSKTSFIGNLPAYIEKVKDNKDIQQVYYNYNTTKNLTYDDLYTINNHIISNSVKFTKVALLLEKYFIWKDEIKIKNGYNIDFENVIGLKNYFDKEKKKNEIIRNKAFHFGVPDKSYDVIIKEIEQKFIKEEVKPTTPSNYHDLSKQLKWICKAFLDTIHNDYFVNGKGDKSKKRADAENKYFYKVINKT

SEQ ID NO: 1543 - protein, 1057 aa, Artificial; identical to SEQ ID NO: 1344
  Synthetic

SEQ ID NO: 1544 - protein, 1148 aa, Artificial; identical to SEQ ID NO: 1524
  Synthetic

SEQ ID NO: 1545 - protein, 1121 aa, Artificial; identical to SEQ ID NO: 1525
  Synthetic

SEQ ID NO: 1546 - protein, 1003 aa, Artificial; identical to SEQ ID NO: 1450
  Synthetic

SEQ ID NO: 1547 - protein, 1003 aa, Artificial; identical to SEQ ID NO: 1494
  Synthetic

SEQ ID NO: 1548 - protein, 1103 aa, Artificial
  Synthetic
MENKEQNKRTWDNDPQYFGSYLNMARLNIFNISNHLAKKFGLTVLEDEGKITISFLGDKENKKYKTKQGLIYSNLTRYMPIAKVFDFEKLPENERNKVKNNFGKDFNRLSDTLKIVFKELNEFRNDYSHYYSTEKQDKRKLEISSELNDFLTLNFSRAVSYTKERFKDVFSDEDFKIASQTIVVNNDKTITQDGIVFLTSMFLDRENAFRFINKIIGLKGTQTNEFKAKREVLLFFCVKLPHDKFVSENTELAFSLDLINELNKCPKTLYNVITEEEKQLFRPTLETEQIKNVLQNSVPDTIDDYENYIEGITKKVRNENRFSYFALKYIDQKELFKNWRFQIDLGKIVLDEYYKQLNGKDEVRTVTENAKAFGRLQDLNDEENTLKKINTGENKTCFDQFAPHYNFDDKNNKIGISKKEITSRFISQKTDKKVKFNLLQPLPEAFLSIHELPKIILLEYLEQGKTEQLINDFIEINNAKIINREFIETIKSKLSEFNVFHKRSQGRKEKRAYSEGALKYLLERKEKLNQILAEHNLNVKQIPARILDYWLNIEDVQEKTAISGRIKLMKRDCMDRLKAIKKKNPPKIGEMATFLAKDVVDMIISEEKKKKITSFYYDKIQECLALFADKEKKELFIQICNELKLNNESDGHPFLKNINLNEFRYTSDLYKKYAEEKRLYLENNFYKKERNEKAKKDLTVVVLPHDKSKIPFSIRQLEKEKTSFDKWLEYVTKGKETTDKKKPVDLPVNLFDDTLKRLLKTELSKNNIEFDNDANNNELFKTWWSQCREDDVQKFYTAEREYTFEKGKLTFKINSKSKFEEYINQEFIENVFKSKSRKRENENNTGRKLPPLRIKEVTKNIVKKIGNTEKEIRMLQEEDRLMLLMFEQLTKKELNVKLKNTDDLLNEQIEIGENISGKLVFDEFGQLIEEKKNQKTIAKNIVETRKRKEYSVLKKYVFDKRLPELFEYFEEENIPMEKIKLELDSYTKAKDIIFDLAFKLEETIIKKDESGIKELNKDPEGNIQSGNIQHKPYLHWLLKNDLISEKEFTFMNMVRNTFSHNQFPQKKTMELFIRHWDKQNLAMQIAEVYNQKIVEIAAKCKEM

SEQ ID NO: 1549 - protein, 1065 aa, Artificial
  Synthetic
MRDPSSEEMKVSTEAVLAAYLNTAKNNLFIIINDVSKSLGLGFHDKNDNILNAALFKHLSNSNSPDVQLQIINKLNRCIPALKDLAIKHANDARNNNEENNNVQEVTTPGSTDYSEIFKKYIRLVLDYRNFYSHAEHDIVTVEKSIIKGLEMLFDKSRRTVKERFNLPENEVQHLVRLGKDKKEAPGFKYSFWADQGTGISQKGFLFFVSLFLEKKDAQEMLKKHTGFKRSDQVHQKATLETFTIYCLKPPKNRLRSESQEDAIVLDMFNELSKCPNELFETLSKEDKSKFIKLDDQPSDDNEYSSLPILRRSGNRFYYFGLKYLEEKLNGIKFQIDLGDYCYHTYNQTINGIDHKRKYIKKVTSFGKLAEFSPDNRPEKWGEMIQTIDTLNTSPKDVYITDTFPHFHINGQNIGITFTDAIKPVNKWGDLPTYDSDRKQPKRNNIIPHCWLSLYELPAIIFYDLIKNNAAPEKGYKSVEEIIKNYYNNLRKFFSYIVKSNINTEEDFERTLAEYNLNKKDIPKAIINHYRTHSQNRNNGLSSYDSILEETKKRLKKAENLRKGTYKINEKGNKIILRPNNKNYNEVKPGKIADFLARDMILFQKPDPDSKNNGKANPVEFKLLQAGLAFFDDRKETSRLYAILKKCNLIGSHNPHPFIDDKIINNSKSLLEFYIEYLKRKEDYLEKHKTDIHFLHKDKMALNNLVDKLINKYRDKDYTIFNLPRGLFLEPIKEILKNEYNKNFDSISSASYIIEKYFTDEVKDTPQEFYNYKRIYRILNKLNNENDKGHSIQEMAADKDKFIKNIPVLCRKNARNNKCDFTPNECAEKLNSTNCKYLKEFKEYLENEKQIRLHKTCDMVLFLILQEYLSTLHGYAIEAKEFRLEDILPTNDKYLSKTVNNVKLTIGTKTIVKDSIKIKNYGDFRTIINDRRLEKLFKYKASDEIEYDEIKEEFEKYDKARRTVFEKIINFEKFVIAKLEIGKDGGKYINHKKILENLQNQNLNGINAGIYEEIGTIRNAFCHSEYPDPDKLKLSIDKYNPGESSVAEGLLKMIGDDYDAIMSVL

SEQ ID NO: 1550 - protein, 1085 aa, Artificial; identical to SEQ ID NO: 1453
  Synthetic

SEQ ID NO: 1551 - protein, 1008 aa, Artificial; identical to SEQ ID NO: 1452
  Synthetic

SEQ ID NO: 1552 - protein, 1168 aa, Artificial; identical to SEQ ID NO: 1357
  Synthetic

SEQ ID NO: 1553 - protein, 1140 aa, Artificial; identical to SEQ ID NO: 1482
  Synthetic

SEQ ID NO: 1554 - protein, 1199 aa, Artificial; identical to SEQ ID NO: 1328
  Synthetic

SEQ ID NO: 1555 - protein, 1094 aa, Artificial; identical to SEQ ID NO: 1358
  Synthetic

SEQ ID NO: 1556 - protein, 1047 aa, Artificial; identical to SEQ ID NO: 1398
  Synthetic

SEQ ID NO: 1557 - protein, 1129 aa, Artificial; identical to SEQ ID NO: 1399
  Synthetic

SEQ ID NO: 1558 - protein, 1047 aa, Artificial; identical to SEQ ID NO: 1327
  Synthetic

SEQ ID NO: 1559 - protein, 1073 aa, Artificial
  Synthetic
MCNNSQGNHITQNNKSFLGIFLNQARLNAYITLCQISDQLGVRTVDEDSLSEMPILKFLEEPAENTVKSRRTTELIEKHFPMLKIIYDWQKEKGKEDDFKDHSKKYKKILTCLLKAINCKRNEYCHAYSNDTLADKDVDVKELCRYLDNCFDTSVNRVKDTRSLDEEDVFHLRRKTAEGKGKNKRVIDNPEFYYHFMDEQGRLGEKGLSYLATLFLEKKDAYELLKQQTGFKRDDKPKYKATLECFCCYRIKLPKPVMTSDVDRNGLALDMLNELKKCPKELFDLLSKERQQEFRVATDASDDNDDADEILMMRHSDRFPYLAVRYCDENEVFRNLRFQIDLGRYYFKFYEKQTIDGNTYPRALDKRLKTFGRIKEVKNKVQQQWGEIIKSPDDVNDEQNEPYKANTTPHYHLVDNQIAFIIAGDCALPDINQPDGKIKLQKPDAWLSIYELPGMIFHGLKCRFQETERLIEIYIKKQRKICEKICKTGVIPEGAGEFLPEALKDIEANAVKQSNYAKKKLQRMLDETQRRIRALRTTQQRAADKSNKPGKKKYFDIRAGKLADFLARDIIALQKFDPAKEGRDKLTSINYQVLQATLAYYGAKKDTITDMFKRIGLLDGDNPHPFLKEIDPAKYNSIVRFYEAYLMAKRSYLEHCKEKGKFDEQFLRPSRQRYARDKRELKTIARQLLDNPVNIPKNFFRDKIKQVVCNEDPSLKDRQMNTAYMIQAWFEKTKGTQQPFYGYERTYPVVLKAKQYGKKAKNKPIEAFLEKITPEISYKELKELIETEIPDSGEYEPESLKKNLLDACRDFKNNERLLRRFKVQDIVTFMTVENTLKDQLSFEGNVVKLEDITPSEDSPFNKPVLCSTDISVSFNIRKKYESAYVEFITERFTSSYEKQGNRVILTYRINSENRKLKDLGKYRRYFYDRRLPGLLLWKYPPNAKGGPEIKYADLEEEIKAYEKYRKQIAQWLYVLEKSTVDHFKLEIEPKENYIPFNAVIDSVKCGLPESGDECDTLLNIRNAVNHNQFPVWREAIENAPGQTIAEKMLYITETCVKHITDHITESDKDVVYA

SEQ ID NO: 1560 - protein, 1075 aa, Artificial
  Synthetic
MYDKSQENHVEQKDKSLFGVYLNQARLNAYITLCHISELLGVKTVDEDSISIMPVLEFLENEKDAIKSQSVFRLIEKHFPMLKIIYDWQKEKGKVDDLKEHSEKYKKILTCMLKALNDKRNEYCHAKTEEVKKKYDVNELIRYLDGCFDASVRRIKENHRLAENEVTHLRRFTEGKDENGRPLYNPDFHYQFKDENGELNEKGLYFLTAIFLEKRDAHEFLKKQKYFMNDSKPKYRATLESFYCFRIKLPKPVMESNVDKNGLALDMLNELKKCPKELFELISKEQRKDFRVMDSEDSDEDSNEALMRRYSDRFPYFALRYCDENQVFDNLRFQIDLGRYYFKFYEKETIDGNKYPRALDKRLKTFGRIREVKEKVEKEWNDIIKAPDEIVEGQEEPYKQKSIPHYNIVDNQIGFVLLENGKEKQLPDIKQADGKIELQKPDAWLSIYELPGVIFHGLNYELNNKFKKTESLIEQYIKKQREICEEVYKTGKIPQKAGEFLPEALKDIEKSNTENYSRKKLDRMLKDTDQRIKAIKKTKERAADKSNKPGKKMFIDIKAGKLADFLARDIMAMQKFDPDKKGKDKLTSINFQVLQATLAYYGAKKDTIGDMFKRIGLIDGDNPHPFLNQINPAKYNSIADFYITYLDSKEQYLKNCKKDGDFENYQFLRPSRQHYAGKRELKTIAKQLLDNPVNIPKGFFEKEIEKFILAQNPSAKKEKMNTAYMIQAWFEINCGGQQPFYSYGRTYPVVLKAAEYRKKRQNTKIDKTLRLITPKLNYMDIKKIVTEMPEGKYEPENLKKNLYEGYKDFEKNERILRRYKVQDMVTFMTVEKRLKDQLSIKGNPLRLEAVTPKGKSLFKKPIPCNTDVSVSFNTNVKHETGYVNYIREKYDGSYICPGKKIILKYRVISENAKLKDIGKYRRYFYDRRLPGLLIWKYRPNTSDGTEIKYADIEEEIKAYEKHRKEIAQQMYMLEKGVIDQFSLEIEPGENYIPFEKIIETIKANLVGFDEKCETVRKIRNAVYHNQFPVREEAIHSAQGEEIAEKMRSVTESYVEQIMTNIESNVKGFENVASSC

SEQ ID NO: 1561 - protein, 1160 aa, Artificial
  Synthetic
MKTLGALSSHNYNNKKYYFSGLLNTAQYNFNLALQEVNDRLGKKGKNPGKTMIKNIFDQKDSFSTQERAMYYLEEFFPWIFLVMKQSGINIPTEEQETKLHKEEIQLIQEHLISLYELLDDLRNEQTHYMHDPVIIPEEVSKMLDALLLQILKNTRKKCKDDEYRTFIVKKYQEEFQKEIKVQVKDRFGKEKEKIVTGEVKENYVINRCFRKWIQKEGEEETLRYSTVQEEQGKYVWSSSGFVFFLSLFLRRKELEDVMNHVPYFKDSRKLLFYLTRKTFSSYCFRDLRKSLRSDYSNDSLLMQMIEELYKCPGELYEVLLKEQKQEFIEDINEYYKDNPEFEGSANEAQVIHPVIRKRYQDKFPYFALRFIDEYFNFPTLRFQLVLGEYVTDRRTKELQGTALFTDRVISQRISYVGKLSEAEMNKKREGYTETGWKEYPNPYYKIENNRIPLYIEFSKNEELIFKEKKFKYNTLAKWENREIDKRTGEFNQVNKQRRITQLEEFKIDNPKKMKTPNVFLSIYELPALLHALLIEKKTEAEIEDIIKAKIKKQLTEIAEGRRNLSGLPKGIKKMRNCNSDFEKKKLISDIDNEIKKGEKILEEVQQWLNPVINKKGTGKQENNKPFFSNTYRGKYATWLAYDIKRFTGKDHIQNWKGYQFSELQTLLSLYTLRKEELKNFLEKDLQLTSHPFLKEALKAVNLEDFMGAYLRGRQFFLEKAKKQIGIKGVKKSIFQYFEERKYKIYSSNLDYWEELWKHPVNLDRGLFDERGTVYNKNKELNDLQNRAAWFSFAETNPKQQFYHFPRIYSDEDITKPVTDRYGKTKEKLILFKLSPQKGFMEQIPSDLKKKYQEDKGKVEHPEVQKEKKYEEKKHPGINAFIKNAYKNEQKIRRISRNDIFLYEMVKYMLNKISPATEFSSLDKVWLTRIEREKQATEAREQSFKEKGDTSENKIRQDYLLSFPITLTLFNDIIKEKVKIKDIGRFRKLEKDERVQTMISYYTSGLWKNDQPSLTIKELEAELESYHKIRLQEIFKEVHKLEKEIYEFTPEEDKSKLLARESFPKFKYYISFYFIPKEDQEVFNEIQFDKYKNLEQIPGRKPEYDPYYLLIFIRNKFAHNQLPAEPIYKTALTFLPNNFNTLAEYYHKLFILLNNKNYNN

SEQ ID NO: 1562 - protein, 1118 aa, Artificial
  Synthetic
MEDDKKTTESTNMLDNKHFWAAFLNLARHNVYITINHINKLLEIREIDNDEKVLDIKALWQKGNKDLNQKARLRELMTKHFPFLETAIYTKNKEDKKEVKQEKQAEAQSLESLKDCLFLFLEKLQEARNYYSHYKYSESTKEPMLEEGLLEKMYNIFDDNIQLVIKDYQHNKDINPDEDFKHLDRKGQFKYSFADNEGNITESGLLFFVSLFLEKKDAIWMQQKLTGFKDNRESKKKMTHEVFCRSRMLLPKLRLESTQTQDWILLDMLNELIRCPKSLYERLRGDDREKFRVPLDPIDEDYDAEQEPFKNTLVRHQDRFPYFALRYFDYNEIFTNLRFQIDLGTYHFSIYKKLIGGQKEDRHLTHKLYGFERIQEFDKQNRPDEWKALVKDLDTYETSNERYISETTPHYHLENQKIGIRNKKKKKKKNIWPSLEINTTVNERSKYNLGKSFKAEAFLSVHELLPMMFYYLLLTKEEPNNKEINASKVEGIIEKKIRDMYKLYDAFANGEINSKEELKEYLKGKDIEIVHLPKQMIAILESKPKDMVKEAKRKQKEMVKDTKKLLATLEKQTQGEIEDGGRNIRLLKSGEIARWLVNDMMRFQPVQKDNEGNPLNNSKANSTEYQMLQRSLALYNKEEKPTRYFRQVNLINSSNPHPFLKWTKWEECNNILSFYRSYLTKKIEFLNKLKPEDWEKNQYFLKLKEPKTNRETLVQGWKNGFNLPRGIFTEPIREWFKRHQNNSEEYKKVEALDRVGLVTKVIPLFFKEEYFKEDTQKEINNCVQPFYSFPYNMGNIHKPKEEDFLHREERIELWDKKKDKFKGYKAKVKSKKLTDKEKEEYRSYLEFQSWNKFERELRLVRNQDIVTWLLCTELIDRLKIDELNIEELQKLRLKDIDTDTAKQEKNNILNRIMPMQLPVTVYEIDDSHKIVKDKPLHTVYIEETETKLLKQGNFKALVKDRRLNGLFSFVDTSSETELKSKPISKLRVEYELGEYQNARIETIKDMLLLEETLIEKYKTLPTNKFSAMLNGWLEGKDEADKARFQNDVKLLTAVRNAFSHNQYPMRNRIAFANINPFSLSSANTSEEKGLDIANQLKDKTHKTIEKIIEIEKPIETKE

SEQ ID NO: 1563 - protein, 1184 aa, Artificial
  Synthetic
MERIFGHCCPHHDSVCFVRFLGTMVSNQDGRENVLDILYIADRTRKLKPMNTVPASENKGQSRTVEDDPQYFGLYLNLARENLIEVESHVRIKFGKKKLNEESLKQSLLCDHLLSVDRWTKVYGHSRRYLPFLHYFDPDSQIEKDHDSKTGVDPDSAQRLIRELYSLLDFLRNDFSHNRLDGTTFEHLEVSPDISSFITGTYSLACGRAQSRFADFFKPDDFVLAKNRKEQLISVADGKECLTVSGLAFFICLFLDREQASGMLSRIRGFKRTDENWARAVHETFCDLCIRHPHDRLESSNTKEALLLDMLNELNRCPRILYDMLPEEERAQFLPALDENSMNNLSENSLNEESRLLWDGSSDWAEALTKRIRHQDRFPYLMLRFIEEMDLLKGIRFRVDLGEIELDSYSKKVGRNGEYDRTITDYALAFGKLSDFQNEEEVSRMISGEASYPVRFSLFAPRYAIYDNKIGYCHTSDPVYPKSKTGEKRALSNPQSMGFISVHDLRKLLLMELLCEGSFSRMQSDFLRKANRILDETAEGKLQFSALFPEMRHRFIPPQNPKSKDRREKAETTLEKYKQEIKGRKDKLNSQLLSAFDMDQRQLPSRLLDEWMNIRPASHSVKLRTYVKQLNEDCRLRLRKFRKDGDGKARAIPLVGEMATFLSQDIVRMIISEETKKLITSAYYNEMQRSLAQYAGEENRRQFRAIVAELHLLDPSSGHPFLSATMETAHRYTEDFYKCYLEKKREWLAKTFYRPEQDENTKRRISVFFVPDGEARKLLPLLIRRRMKEQNDLQDWIRNKQAHPIDLPSHLFDSKVMELLKVKDGKKKWNEAFKDWWSTKYPDGMQPFYGLRRELNIHGKSVSYIPSDGKKFADCYTHLMEKTVRDKKRELRTAGKPVPPDLAADIKRSFHRAVNEREFMLRLVQEDDRLMLMAINKMMTDREEDILPGLKNIDSILDEENQFSLAVHAKVLEKEGEGGDNSLSLVPATIVIKSKRKDWSKYIRYRYDRRVPGLMSHFPEHKATLDEVKTLLGEYDRCRIKIFDWAFALEGAIMSDRDLKPYLHESSSREGKSGEHSTLVKMLVEKKGCLTPDESQYLILIRNKAAHNQFPCAAEMPLIYRDVSAKVGSIEGSSAKDLPEGSSLVDSLWKKYEMIIRKILPILDPENRFFGKLLNNMSQPINDL

SEQ ID NO: 1564 - protein, 1119 aa, Artificial
  Synthetic
MTEQNEKPYNGTYYTLEDKHFWAAFLNLARHNAYITLAHIDRQLAYSKADITNDEDILFFKGQWKNLDNDLERKARLRSLILKHFSFLEGAAYGKKLFESQSSGNKSSKKKELTKKEKEELQANALSLDNLKSILFDFLQKLKDFRNYYSHYRHPESSELPLFDGNMLQRLYNVFDVSVQRVKRDHEHNDKVDPHRHFNHLVRKGKKDKYGNNDNPFFKHHFVDREGKVTEAGLLFFVSLFLEKRDAIWMQKKIRGFKGGTETYQQMTNEVFCRSRISLPKLKLESLRTDDWMLLDMLNELVRCPKSLYDRLREEDRARFRVPVDILSDEDDTDGTEEDPFKNTLVRHQDRFPYFALRYFDLKKVFTSLRFHIDLGTYHFAIYKKNIGEQPEDRHLTRNLYGFGRIQDFAEEHRPEEWKRLVRDLDYFETGDKPYITQTTPHYHIEKGKIGLRFVPEGQHLWPSPEVGATRTGRSKYAQDKRFTAEAFLSVHELMPMMFYYFLLREKYSDEASAERVQGRIKRVIEDVYAVYDAFARGEIDTLDRLDACLADKGIRRGHLPRQMIAILSQEHKDMEEKIRKKLQEMMADTDHRLDMLDRQTDRKIRIGRKNAGLPKSGVIADWLVRDMMRFQPVAKDTSGKPLNNSKANSTEYRMLQRALALFGGEKERLTPYFRQMNLTGGNNPHPFLHETRWESHTNILSFYRSYLKARKAFLQSIGRSDRVENHRFLLLKEPKTDRQTLVAGWKGEFHLPRGIFTEAVRDCLIEMGHDEVASYKEVGFMAKAVPLYFERACKDRVQPFYDYPFNVGNSLKPKKGRFLSKEKRAEEWESGKERFRLAKLKKEILEAKEHPYHDFKSWQKFERELRLVKNQDIITWMMCRDLMEENKVEGLDTGTLYLKDIRTDVHEQGSLNVLNRVKPMRLPVVVYRADSRGHVHKEQAPLATVYIEERDTKLLKQGNFKSFVKDRRLNGLFSFVDTGGLAMEQYPISKLRVEYELAKYQTARVCAFEQTLELEESLLTRYPHLPDENFRKMLESWSDPLLDKWPDLHRKVRLLIAVRNAFSHNQYPMYDEAVFSSIRKYDPSSPDAIEERMGLNIAHRLSEEVKQAKEMAERIIQA

SEQ ID NO: 1565 - protein, 1171 aa, Artificial; identical to SEQ ID NO: 1349
  Synthetic

SEQ ID NO: 1566 - protein, 1171 aa, Artificial; identical to SEQ ID NO: 1349
  Synthetic

SEQ ID NO: 1567 - protein, 985 aa, Artificial
  Synthetic
MGAIENKHIFAAYANLAIDGLIKTLNFIAKKLDTQKQLSSWDIKHVITLIDSIFDQNPQNNLEQVVEGYLPWIKPIIEMKTPKKGERQSDKLCIEYKTIITAFASLLNDVRNYYTHYYHDPICIYPRGYDIPSSLNCIYDSAINIIKERFQAEEKEMEHLRNYTLVNNNGLSEKGYAFFISKFLERKYSYLFLKKLSGFKRGDSLQYRLTLEVFTALSTKPPVERLRTTKDTKQDRALDILNELSRIPIELYQTLEPKYREMYNETLQPTDAEDPYGLPDRSRIRFRSRFEAFALHFLDKQADFKEIGFYTYLGNYFHNGYQKTRVDRETKDRYINFQLAGFCKNIQDISAKKLSEALNVKSIDISTDSIPDINSFEPYLVQSTPHYIVNGNNIGIKVLPEGKDTYPTIDEKGAKMPIADFWLSKYELPAMLFYTYLRNNNIHKSHCPLSVKDIIERSIHKSTKQKHPEERSELMLRRVMKAIFWTDSKLNEVERIKSQKSAFGKRQHEILKAGRIAETLVRDMLWLQPSKNNGRDKVTEPNFQAIQVSLAYFGIRRNDLTEIFTRAGLINSSNPHPFLAQIGTNYTSLIEFYIAYLKERKVYFSRIQKKILQGKLNIQCHPLRDLQREPNKPQEKEEAIFLPRGLFNEAIINCLKKSKLKHLIESPTREKSPALNVSYLIHNYFRAYFEDQSQEFYAQPRNYRLFDKLSPNKGKSKSYLSLEQRIKKMEELRPSKIPVAEANKLLEKEDRLYRKNYNEICDNESIIRLYQIQDILLFMMTKEYLPSDLYNRINKYKLENVKGILNERVSYLIDLNPLKIQGEDIKIKDYGKLFYIHHDTRISSLNKVLSKVKRNNSISSSVKIQPYENYKRECLDFEEAQIQIIPIIHSFEIAMVSMFPDLKKATPGNYYDFNELITEYEKRTKQKIDSSFLIKTRNMFLHDKYEAECIKEISDDFVYAKKIIAEFKMKIENIKLEDLSNDSSA

SEQ ID NO: 1568 - protein, 1220 aa, Artificial
  Synthetic
MSTRYTNQKKVEENINYVFSNKGIFAAVAEKTLTNYKSKFNEGQTIQPNLHYFAVGHTFKNIDTKRIFDYQLSEDEMDILPTKYFSLQQNKFSFPIDGQTKTDKLYLLLDNIRNINAHFIHDFNFLKVDNIDENIICFLIDSFELALIKGVFAKKYGNKKHELGLDFLSNDLKDEILEEILENLDDELIVFMKEIFYQTLYVVDKKEWRNKELNQEKKDFLDSHLSSKEDWINWILFNCVEEDIDWFLNNYGDSDPHPDSKNHKHKVLTIEKGKHLSFEGSLFMMTMFLYANEANYLIPKLKGYKKNGTPQDASKLEVFRFFAKKFKSQDVDSEHKQYVKFRDMIQYVGKYPTVWNKHIHLDNYYVNELKVSILENEITQLFEQDIQNYFETKYGLQKFAKAKGDMHYAFVEVAKSYLQKKTISYKGKYQDDSIAILETLAEQITNKRQLKNIEVKLLRFSDTDYQSLSSIEKTKKQRLDKSKKMFLDKIKESKKTINKTTEKFAKRVEDNLLYISNGRNSDRFMVFACRFLAEINYFGKDAQFKMYENYYSEEEQNALKDKKQNLTQKDFDKLHYHWGKLTHFETFENHVKKYPNWDMPFVVQNNAIYVKIPGINFIKNTAFCIRRNVINYLLEHALGENYKDQQGREWLFDYYEYKTEATDNAKRILTESKPIEASSKTQLKKLLPKKLLPKHSPLETENKENIFRKYLEQAEESEKLYENQKDKAKAEKKLDLFVNKNKGKQFKLRFIFKAWQLMYFKKQYQIEKERYAELEKLDGIPKNYEHEFGHHKKFNINRKEFNLFSKWLFAMDEVPEYKNSLKELLDDKNFFVNSEFQKLFESSSNINQFYESTKSKFKNWLNDQQVQNIRKTIQPENYYKMMEVGNFHINLSHFIAFGVSHDFIEKSGKNILRPITSHAKYLNTKIYDIDLEHSDASNLEKNIFRKLYKIRLEDCLLYEIALRYFQPNLNLRQKSYEQLNKLLVQKISIAIKANNSQTYQVLVPFKDLEKFAQLKAIDDNTQNKFSLLRRLPEYLSQVNERNENVSGLKDMVEAFGVDKSISLADMSMLYNHLITQQGRYTNCIMALEEYFIWKEKFTIEKQESKKFKNRIVVTEIPVLKDYFKRDEQRNNAFHMDLPINETYKSTFKAIEKQFVATEVDKAYTKLDDCPSMLKNTLKVFMNQMHDEIKLGYKPNDTKDGIKQKRTVAENTFFKQLLKGY

SEQ ID NO: 1569 - protein, 1146 aa, Artificial
  Synthetic
MEIKEKTEKRFLAVFLNKGNMGPIAEKAVKNFDTINQHDVSLKERIHHFAIGHAFRNVDKAIFEYELVESKEKLLPSRFINLQLDRFPSTKRLFDVIKNIRNCNGHYVHAFDKLSINEMDKRENNSDTNRVEAKIIDFLKEAFEFSVMIHYLKENELHYEDFKATTDKDTKLVTYLCNKFFPNIVHQEDVRESFIKLNFKEALDELLFIEVDEDFEWKIDGVHKVFDIKQGKYLSFVGQLFLLSLFLYKHEANQLISKIKGFKRNDDEHHYKRDIFTFFSKKVSSQDIHSEEKHLIQFRDIIQYLNHFPTEWNEYLSPKRLNLSMTDQLEKYIIETEIFSVFPKYKNCKRELFLKYAISRLFPDKLDLFDAHSLTMDDKLKKDFDYEIDASPELKNVDLKLTIRLKPHDFNKQIKRKRKLEKEVNPNKLKLQKKVQEDKLLVMYGRNQDRFMEFAVRFLAEESYFGKDAEFKMYRFYSSDEQNDFLRKQKEESSKKEIDGNKYHQGRLTHYITYSEHKERYPSWDNSFVFQNNAFQLILSLSNGEKRKFSIQRKLLIYLLEDALYGSSGSIEGKGKQLVEDYFLNYLMPDFEEAKNTYSGETLNAKHRQLLPKRLLYTYHPPVQNNGVGNSHPFEKILNETEQQEKRYLALQQKAKSLGIEEEFLKRNKGKQFKLRFIRKAWHLMYFKESYQKQAEVLGHHKGFHITKDEFDDFSKWMFAFDEVPQYKVYLKRLLESKQFLDNSEFAHLFDQGRSLNDFYVTTKKEFERRLKENLFQLDKNTESGQYDEILSKKLVYINVSHFINYLKFKDKIKEQNGVIRYAALDNIKYLIKEYYYADVLPKEQYKENGKLFNKLRTAKLEDALLYELAMKYLKTDKHIVQKVRTNVVDILTSKVIFDIKDAWGNHLYNLVVPFSKLETLAVLLRYKTSQEEIDDNNRTSYLGNIYQLLTFLKDKINNCKDDDKKKSNKYGDILRIVECFNKHNVQRKLTFEDLNSINNYIISGAVEFSKIHMELEKYFILKYKIESPKFIDIKKIKNEKGVQIFEIYYESIPEIRRKAYHFGVPERFIYEQENKKTEAKFIQEEVKPQGVLEFKDLSRETKTVCRVFMNILHANLFVRDKNKSDEEKKNDFEKRYFKEVIQNVK

SEQ ID NO: 1570 - protein, 1133 aa, Artificial
  Synthetic
MKENNTEQRIHYTLEATPWYFGAYLNIARHNIYLISNEIGRKLKPERKLCKEEQIADSFLVKKDFIEKQNVNLIYVNLVRFLPLAKMFSTDILDDQLPEKELNISEWTSILKVLFSEINSFRNNYSHYYSSETLSERKVKVHTDFADHIKDIFSLAVLSAEQRFRGVLPGSSFRFVEKEILPQLFNDRCEISARGLIFFISLFLDKENAFHLFNKVSGFKNTTTFDFLATREVFSVLCIKLPHDKFISENPDQAQQLDILNYLNRAPKELFQALSEEGRKQFLPDLSELVKSSIIENSMSDDVEEYRYEEYIQAISSKKRSKDRFPEFALKYLDQSDSFKFSFHILLGKSKIRGYKKPLLGALPEENNRSIIRDMTTFGQLKTYLGEDARDRIVLERMFCELFKGDDIEYFTQYAPFYHIANNKIGILSHKNRKYSSMLYRPLQADAFLSIHELPKVALLEVLDKGSASAIIDAFLEKNIRHILNETFIRDIKRQLSFDGALYRFCFDEKLSVVQPADLDAEIEEVEMRLAVTRDANELKKLNVKRRSLRYAKYVREVNKRKKVVNQLLAEYDLNVRQIPARILDYWLDIRIVRKETTFQNRIKAERKVCKKRLKDLGKGKGPRIGEMASYLARDIVDLVLDRGIKDKITSFYYDILQSSLALYADPDKKRLFLDVCSRELGLFDKKKGHPFLGNINFDRIRKIKDLYKIYLEFKGVKERTHGSNKYGKHRTKAIQDNWLYNTFYTIQENKKTGKDETVIKLPEDSSLVPVTYLRFNEDRSDLDTWLSTVVQGSEHNPNPKAVDLPTNLFDEQLVMLLKEKVGIKEDSGKKYNFSKLLSLLRNDTQPFYNDKREYILFKDTPYEVRVAFDPLSSRKFSEHYQEAMNQSFRIRKKMDKRIQLNQVRRLFKKAIDENEKQIRFYQAKDRIILLMLKDMIGRDLDFSLNAVSPQAPQNPLNTPVDLSEIIHSKTITHTCKRKDFSIFRKLLSDRRLSGLFQYFDSDIIPYEILRKELSDYERYKEQVFKTVFELEKQIIAVMSEEELNNLKATSGTNIQHKPYLDWLADYGILTREERAFCIEVRNKLSHNQFPDKAVMDTFVGQPDSTQTNIKQIVSAYITIVNTLIATKLLAKR

SEQ ID NO: 1571 - protein, 1057 aa, Artificial; identical to SEQ ID NO: 1344
  Synthetic

SEQ ID NO: 1572 - protein, 1081 aa, Artificial; identical to SEQ ID NO: 1329
  Synthetic

SEQ ID NO: 1573 - protein, 1168 aa, Artificial; identical to SEQ ID NO: 1357
  Synthetic

SEQ ID NO: 1574 - protein, 1094 aa, Artificial
  Synthetic
MEANEQNQENRRRTLTNDPQYFGGYLNMARLNIYNINNHIAADFGQAVLPEEGQIPSGFLCNKEIKKLNWNHIYAKTRRFLPILKVFDIESLPKEEQVNSDKEGKDFAAMSDTLKVVFSELQDFRNDYSHYYSTEKGENRKLTISAELTDMLTINFKRAIAYTKVRMKDVLTDADYELVETKQVVTTGNIITTEGLVFLTCMFLEREHAFQFIGKIQGLKGTQFNSFIATREVLMSFCVKLPHDKFVSENLEQALTLDIINELNRCPKTLYGVITDEEKMQFRPELDELDIEKLIANSTNDDERERILDEIGYEEYIEGLTKRVRYNNRFPYFAMRFIEEKNVFDKLRFHIDLGKYEVDRYTKQLAGEQTERVVQENVKAFGKLSSFTDPELIQQKIDNQQRTDGFEQFAPHYNADNNKIGLSNKESIAILIPKSKPESKVGNNLKQPLPQAFLSLHELPKIILLDYLQKGKAEELINDFILLNDTRLMDIKFIEEVKLKLPANWNEFAKRSDAKKKKAYSDAAMEYLLQRKATLNDVLITYNLNDKQIPTRILNYWLNIKDVEDNRSVSDRIKLMKRDCMSRLKVLEKHKLDKSVKTPKVGEMATFLAKDIVDMMVSKEKKQKITSFYYDKMQECLALFADTEKKALFIHIVTNELKVLEGDGHPFLTNINLQQIRKTSQFYELYMNAKVQYLIQFYKPSKDKVDKRGRPTTEVKLPPLDKRSNIPFTIRQWDEKEKYNLNAWLRNVTVGKNTKDGKKAVNLPTNLFDETLCDLLSQQLDARTVNYNPAANYNELLKLWWKTRDDATQDFYQSEREYDIYEEKVEFKIDSSGHFADYYKKALSKAYNRLKAEREIARRTNKRLPPIEHKQVERVFKNTIAETEKEIRMLQEEDRMAVLMLEQLMDDSGNLKLSTIKTSLNNTTQIKQKILNKTIVAERKQKNYTELRKYVHDRRLPNLFEYVEADEILLEWLLDELMAYNAAKQQVFDTIFMLEKRIIETDPQELKSLFTNEKGQVQTGNIQHKPYVQWLKNKGLINHNEKLFINMVRNCFSHNQFPQRETMELLISEWGAGKIATQILTVYNQLITNIINKI

SEQ ID NO: 1575 - protein, 1214 aa, Artificial
  Synthetic
LILSFIIFNFIVIINQHTLNTYTRKYMKDKSFSTISSAINETITTDNIKYPEQLNLILSKRLRPKNELQPLWAAYFNMARYNMYTTLVHIATATGLSDEDNMENRMDKMRILNEPVEPEIEHRLRKLLCRHFPFAVWMICSPIRKKDSKEDSADEDYRVISVKELRDCLKTVSYTLNYFRNYYSHTRHVETRSEDIIAASRNSEKQTGIFLNKVCTVATRRVKSRFSDKSNKGQAGMIDDQSMKFITEGKVKFRNNNGIKETIYNPDHFLYPLFLNRSSALRDGTNPERLSTVGKIQLICLLLDKKYITEFLDQSGFLSAFNNDAPAPKLSERRLILEVLSDLRIRLPQRKIDATCNDIQVALDMLNELKKCPKELFELLEAKDKATFSILSSTGEHILLRRSSDRFTQLALQWFDVNKAFSRIRFHMNAGIFRYLFNDSKTCIDGKTRLRVLQEPLNCFGRIQEVEDSRESNRDGNDGPWRGFEIKGFDEAARNDVNCLPYINDSRTRYLITEDNIGIRFSGDDEACGNYFPRIDEKNGKYKVTCLPAQCMISIYELQAMLFLHLLNPGNDGGIAPVEKIIIDKVESYRRFFSDIKNGLLTPSGLTESSLNDKLTSTYGISLSDIPDKMKDYLLKKNNKGRGFNAYRDRLIETLKEETEYRIKRLEENLNATNSDTNKPGKPGYVQIKPGSLASFISKDIVFFQECNADQKMTGLNFSVMQGLIATFGSQEGATTDDLRMAFRKSGLIAANGSCGTHPFLAIAFNAGAKNTVDLYKEYLNARKSYLSGIIPDNAPFLHADRIRWAVNDDAYYKDYAERCLQRPVILPRRLFEASIRENLLALNGENANALKKVIIGAGGHCNSAFMIDSYFYYVKNDSPQVFHGACEGDMLHTYGHRFFQVVRRNLKNAEAILSKLKKDSNTHNTYIGALSDAICWAKENPIKPTFSVGRSRLNNHSENEIAAMIKRAFNEYMATEKTLRRYVIQDELLFLAAMKTIKSKLGVPDSEWKLGSIGSKSGSILDKELPLIQTPAKFSNIKRRPNKTITKDLVELVIEQHNVSIKDYGEIYRILADERLYGLLKYHKNETVLASDLKNEIEKYDEKRVKVFEDIMNYEKKITNGVTDRQLCESMDHAKDIDFKVMQTFDTMNDNLTKMELRSIRNAFCHNSYPDVNAFDNSSGTTKRIRIHNAYIPGTAEKISEIVNDISSKTKAK

SEQ ID NO: 1576 - protein, 1168 aa, Artificial; identical to SEQ ID NO: 1357
  Synthetic

SEQ ID NO: 1577 - protein, 1152 aa, Artificial
  Synthetic
MNDYATRRPLGLRPAFAQKPRTYLNGDFVRDMKELRIRGSIRNPQTRRDETKDETPQFIAYLTIALQNIGEILGKDVDLSGFRKSDAVKQALKDSGKIYEVASFLWLHRADKTGRDFPDYAEKAESIVLKIWELRNMFVHSTHDKASKVLIVEPSFYQFVEGELFSKARRENALGLGRKSEKVFKLRLFNPNNDAKTKYEFTRKGMIFLVCLALYRHDAAEFLQQFPDMQLPPLEWQMERGLAPQMSEEQLVALRKKGGSVKAILDAFTYFSMRSSRTDIDVANKEYLNFANILLYLNKVPSAAFPYLSLDSEAKRLADAASGSNESEENRRFKYVLQERKKDRFLTLALAYLEDFHKLDCIRFKRLDVSVHEGRSKFWFGPIPEGSKNERGEEIQDANGMDRHYVVGGGVAQFEFEPKEHYGAIRIAALRGGIGENEIMRLLLVLHDGAIRRNDPNRALETYLSAYHRILERMLNAQSTDELTLDDAQFRADFNAVRGREPSAELPRETFVEDMRPFFSPSLTRFFVGDERKPATDQLQARLRRRLSALSGRSRDFLLKLDRLTEWKALDEAEKERRGKPTFKIGELRFPPRTCRFTDAQLIRRVLLYLNANLSQADKFRQLPRGKRHRGMKDFDFQLLHADIGRFGTNPAGLWKTLERRESLNAEGGALELLKEREGELFREEQRRCRGKRDKNGRPLRPGHTLTMLAFAATELFAEVCDGMAEDYCKPLAEEDAGVLPYVCRAFGVRTGQPLDRTALVKTVLGIDLASWGKAYDYDAKRPRETPRSLEDARNLVASQIPVPNDIARRCVEKGTRFNPAFRDFDPWGGGKMKLRAFYDVSPLLATMERHDAERKGARTAAREEHFWSNDDLFPYAADGVETRVRPETAPTLENGEPVPTEPGKTPPRHRPSFLRGDVNKAIQGILLAERQDKVLLACAREYWNRYMSAEVPGSEQKEKIAQTFNFSDAADIWEFFRMSMDDAFGDVTVRVMPNDFARPAYGTVLAHLPELVPMTKPLSGTQGVYAFYDLWLSLRDLQRKESDLRFDLIPATAKFDVLAEPVPRFRGREKDEKKEMYDALMHDHLFEHYCKALKIINSQPLTREEFDAILELGNRLRHPVRDGVSLSTMEKDGRLSRARAALRRFGCLRTR

SEQ ID NO: 1578 - protein, 1003 aa, Artificial
  Synthetic
MGAIENKHIFAAYANLAIDGLIKTLNFIAKKLDTQKQLSSWDIKHVITLIDSIFDQNPQNNLEQVVEGYLPWIKPIIEMKTPKKGERQSDKLCIEYKTIITAFASLLNDVRNYYTHYYHDPICIYPGGYDIPSSLNCIYDSAINIIKERFQAEEKEIEHLRRYTRKKGRVVLKTEDDHFYYTLVNNNDLSEKGYAFFISMFLERKYSYLFLKKLSGFKRGDSLQYRLTLEVFTALSTKPPVERLRTTKDTKQDRALDILNELSRIPIELYQTLEPKYREMYNETLQPTDAEDPYGLPDRSRIRFRSRFEAFALHFLDKQADFKEIGFYTYLGNYFHNGYQKTRVDRETKDRYINFQLAGFCKNIQDISAKKLSEALNVKSIDISTDSIPDINSFEPYLVQSTPHYIVNGNNIGIKVLPEGKDTYPTIDEKGAKMPIADFWLSKYELPAMLFYTYLRNNNIHKSHCPLSVKDIIERSIHKSTKQKHPEERSELMLRRVMKAIFWTDSKLNEVERIKSQKSAFGKRQHEILKAGRIAETLVRDMLWLQPSKNNGRDKVTEPNFQAIQVSLAYFGIRRNDLTEIFTRAGLINSSNPHPFLAQIGTNYTSLIEFYIAYLKERKVYFSRIQKKILQGKLNIQCHPLRDLQREPNKPQDKEEAIFLPRGLFNEAIINCLKKSKLKQLIESPTREKSPALNVSYLIQNYFRTYFEDQSQEFYAQPRNYRLFDKLSPNKGKSKSYLSLEQRIKKMEELRPSKIPVAEANKLLEKEDRLYRKNYNEICDNESIIRLYQIQDILLFMMTKEYLPSDLYNRINKYKLENVKGILNERVSYLIDLNPLKIQGEDIKIKDYGKLFYIHHDTRISSLNKVLSKVKRNNSISSSVKIQPYENYKRECLDFEEAQIQIIPIIHSFEIAMVSMFPDLKKATPGNYYDFNELITEYEKRTKQKIDSSFLIKTRNMFLHDKYEAECIKEISDDFVYAKKIIAEFKMKIENIKLEDLSNDSSA

SEQ ID NO: 1579 - protein, 1168 aa, Artificial; identical to SEQ ID NO: 1357
  Synthetic

SEQ ID NO: 1580 - protein, 1047 aa, Artificial; identical to SEQ ID NO: 1398
  Synthetic

SEQ ID NO: 1581 - protein, 1216 aa, Artificial
  Synthetic
MDNRLSKNRALLAAYLNMAQQNIYITLLHISQLMGVEETKDLSNRMYDFQILQELKTGKKGAESEQMIKSERVQKIILLLHRHFPFLQAFVETKHLQQKKNKEEGKNAQKNKKGNAIPNNKGQLEFTVSESEKQSISPNEYRTILCNTFRLINDLRNEYTHFSPGKRTDKEKESHKNTQKEMLSYLYLCLDGGRRVVKERFKDTFKEKDFNFLTQGPRYSLQKERGKTKAEERPNFYYRLKDDQGLFSYVGILLFISLFLHKRYISEMLTQSGLFYTPRYWKGQPVDVELERRIISEIFSIYRIRLPKERIESTRPDYALGLDMLNELQKCPDELYETFSPEDQAEFRVKREYDESGEGTEGGEVLLKRFDDRFPYFAIRYLDENLVFDDIRFQVSIGKYRYKFYNKLCIDVVSPHEDDCYRLRSLQKDINGFGRLNEVEYERMLRYGSHIHAEKPKGDDTPYLTDHYTSYVFNGNRIGLLFNQENGRHDLEETRGTRLYLPSLTFDSSAEGKDAHCVAPIAWLSTYELPALIFHHLLCHHYGLERTATEAIIKDCVGLYHRLFTDIRDGKLLPGEALGIRAGESLSQEISQIRKGKPLPQNISEKIETFLTTHYCTERVCLHIQDIPKKLIDYLIGKRLDQDMAGLFKQRSRELVNKMLESTQVRLKKFTEEWTRQGNRDNKFGKKSYVDIRPGRLADYLAKDLLFFQPYDDEKKNKVTGLNYQVLQAALAIYNHSLDELSRLFENARLLVPEGPKMEHPFLRSVLKKKPNSTLQFYAYYLIEKIKYLEGRLADSNETFADLFRYKQRQKWQTRDCQWYRALAGRYMAEMMEEGTMNFKPIELPRGLFEQPIKQLLATILTQRTGSDSQALLKIVESPRCNVSYLIAQYFTLILHDDSQPFYRPDKRFKRTYKYFNILNNRKERNKLVQVYQTLDEMEAYFKDTESLEKQHKNYLNSPEAKKHPAPEARLKKYLSEYRKNETTIRRYRVQDMLIFLMAKILLLEKGGLKAGELKQYKLSLIQPTTGQNERQNILSLQVPFSITIKLNDGTERTITQEAIKVKNCGDFFRFLYDGRVISLLPYTQEDIPLERSLLDKELEGYDKERIPIFKSVHRMEEEILRLCPELNNPQSPKYKYTTDIGKEKIVKENFRAMLTELHNRGLLPENEIEMMVEIRNSFAHNRYASVTLKGKEIPIIAISIQRKFDGVVGRTIGKK

SEQ ID NO: 1582 - protein, 1125 aa, Artificial
  Synthetic
MEDDKKTKESTNMLDNKHFWAAFLNLARHNVYITVNHINKVLELKNKKDQDIIIDNDQDILAIKTHWEKVDGDLNKTERLRELMTKHFPFLETAIYTKNKEDKEEVKQEKQAKAQSFDSLKHCLFLFLEKLQEARNYYSHYKYSESTKEPMLEKELLKKMYNIFDDNIQLVIKDYQHNKDINPDEDFKHLDRTEEEFNYYFTRNKKGNITASGLLFFVSLFLEKKDAIWMQQKLRGFKDNRESKKKMTHEVFCRSRMLLPKLRLESTQTQDWILLDMLNELIRCPKSLYERLQGEDREKFKVPFDPADEDYDAEQEPFKNTLVRHQDRFPYFALRYFDYNEIFTNLRFQIDLGTYHFSIYKKLIGGQKEDRHLTHKLYGFERIQEFAKQNRPDEWKAIVKDLDTYETSNERYISETTPHYHLENQKIGIRFRNGNKEIWPSLETNGENNEKRKYKLDKQYQAEAFLSVHELLPMMFYYLLLKKEEPNNDKKNASIVEGFIKREIRDIYKLYDAFANGEINNIDDLEKYCEDKGIPKRHLPKQMVAILYDEHKDMVKEAKRKQKEMVKDTKKLLATLEKQTQGEIEDGGRNIRLLKSGEIARWLVNDMMRFQPVQKDNEGNPLNNSKANSTEYQMLQRSLALYNKEEKPTRYFRQVNLINSSNPHPFLKWTKWEECNNILSFYRSYLTKKIEFLNKLKPEDWEKNQYFLKLKEPKTNRETLVQGWKNGFNLPRGIFTEPIREWFKRHQNNSEEYEKVEALDRVGLVTKVIPLFFKEEYFKEDAQKEINNCVQPFYSFPYNVGNIHKPDEKDFLPSEERKKLWGDKKDKFKGYKAKVKSKKLTDKEKEEYRSYLEFQSWNKFERELRLVRNQDIVTWLLCTELIDKLKVEGLNVEELQKLRLKDIDTDTAKQEKNNILNRIMPMQLPVTVYEIDDSHKIVKDRPLHTVYIEETKTKLLKQGNFKALVKDRRLNGLFSFVDTSSEAELKDKPISKSVVEYELGEYQNARIETIKDMLLLEETLIKKYKTLPTNKFKKMLKGWLEGKDEADKARFQNDVKLLVAVRNAFSHNQYPMRNRIAFANINPFSLSSANTSEEKGLGIANQLKDKTKETIEKIIKIEKPIETKE

SEQ ID NO: 1583 - protein, 1175 aa, Artificial
  Synthetic
MTEQNERPYNGTYYTLEDKHFWAAFFNLARHNAYITLAHIDRQLAYSKADITNDEDILFFKGQWKNLDNDLERKARLRSLILKHFSFLEGAAYGKKLFESQSSGNKSSKKKELTKKEKEELQANALSLDNLKSILFDFLQKLKDFRNYYSHYRHPESSELPLFDGNMLQRLYNVFDVSVQRVKRDHEHNDKVDPHRHFNHLVRKGKKDRYGNNDNPFFKHHFVDREGKVTEAGLLFFVSLFLEKRDAIWMQKKIRGFKGGTETYQQMTNEVFCRSRISLPKLKLESLRTDDWMLLDMLNELVRCPKSLYDRLREEDRARFRVPVDILSDEDDTDGTEEDPFKNTLVRHQDRFPYFALRYFDLKKVFTSLRFHIDLGTYHFAIYKKNIGEQPEDRHLTRNLYGFGRIQDFAEEHRPEEWKRLVRDLDYFETGDKPYITQTTPHYHIEKGKIGLRFVPEGQHLWPSPEVGATRTGRSKYAQDKRLTAEAFLSVHELMPMMFYYFLLREKYSEEASAERVQGRIKRVIEDVYAVYDAFARDEINTRDELDACLADKGIRRGHLPRQMIAILSQEHKDMEEKVRKKLQEMMADTDHRLDMLDRQTDRKIRIGRKNAGLPKSGVIADWLVRDMMRFQPVAKDTSGKPLNNSKANSTEYRMLQRALALFGGEKERLTPYFRQMNLTGGNNPHPFLHETRWESHTNILSFYRSYLEARKAFLQSIGRSDRVENHRFLLLKEPKTDRQTLVAGWKGEFHLPRGIFTEAVRDCLIEMGLDEVGSYKEVGFMAKAVPLYFERACKDRVQPFYDYPFNVGNSLKPKKGRFLSKEKRAEEWESGKERFRDLEAWSHSAARRIEDAFVGIEYASPGNKKKIEQLLQDLSLWEAFESKLKVRADKINIAKLKKEILEAKEHPYLDFKSWQKFERELRLVKNQDIITWMMCRDLMEENKVEGLDTGTLYLKDIRTEVQEQGSLNVLNRVKPMRLPVVVYRADSRGHVHKEQAPLATVYIEERDTKLLKQGNFKSFVKDRRLNGLFSFVNTGGLAMEQYPISKLRVEYELAKYQTARVCAFEQTLELEESLLTRYPHLPDKNFRKMLESWSDPLLDKWPDLHRKVRLLIAVRNAFSHNQYPMYDEAVFSSIRKYDPSSPDAIEERMGLNIAHRLSEEVKQAKKMAERIIQA

SEQ ID NO: 1584 - protein, 1313 aa, Artificial
  Synthetic
MEKKQKHQQPIKNQNSENHYAGSKPTKKYQRRSPNSIQPEANSKKLRPVFAAYLNMARANLYAVLRHISVITGLNVNKDEEHMEQLPVSRFANQKHPEVRQKVYTLLYKHIPCLKHMSQAYIKKGKLDLDGNPIVEEHKTVTQSDLQKLLQNIIRTLNYQRNEFTHADHYNTENEREAEFKRQSDLFRPLSCAFIGAKRETSRIFNYNADDMFFIDQKERMERTNELNEDGKPIYREHEDWYFRLFTRSAKYIRNDQGDIEINDDDGIIGENESLQLTSAGLIFLICKFLHKKYATQFAQQTGLFRTRGQSGNSPFSIRENEVMFNIFCAHRIRLPKGRIESNTDKSALGLDMLNELQKCPKELFETFSPADRSLFQIVRNGNTNTPNPDDDVNLFRRNNDRFAQLALKYIDSLRTDPTELSDTFEGPLKTIVFQIAIGKYRYKFYNRASLDTDVKDRVRVLQKEVNGFGPLSKIEELRDGDNHKGQYSSIIRRVSNNEKQLYSPDTADTKPYLTDHHASYAITGNRIGLMWDTTRENGVLNPDTLCYLPKLPLPELNPKNNSWSVDKSVIESNAVPRAWLSIYDLPALIFLHLLGGNPEKVIKEKYKNLKKLFNDIAHNKFKPIFSGEVESKCVKRKQQIECLKKQLELILAEKYKGVELKDIPAKLTEYLTIGAVSNCDSVDVQFTKWIRHQLNGYPSQIDNNGHVAIRAYKGLIASLEDRIAKFNQDLKIIGDKQNRLGRKSYVDVRPGSLARYLSKDIVRMTIADNGKDNGGKPTGLDFAVLQSSIATYNNNNEIFKKTLLGQMLQHAIPLENHPFLCNMMGMKIKDTISFYLTYQKQKLKWLKKRAEKEDFLQNAHFMYFMRESYRNFLATSPDLVISSDGNENHVKGLAERYLDTLYLPDGLFTNAIRKQLAENEDTRENPFIVAALKDEIKGHSAAYLLNVYFTHVLNDKSQTFYRNQGDLYKRHYKLLDILYPNSKGYLTENDLAVKLKKCDGNQSNIRKKINSHVENLEIVVKKYDRSEGRKVSYYAPADEETKNNERIKLMHQLRDLQHNEQVIRRYRNEDMLLFLMAQKLLLKGGFVFKNKADAGGMQKFRLQDITPPAYNVDNKKSLLDIPIDFSITFGLNDENGHIITGEDGKQIKRTIRQKDIKIKNYGDFFAFLYDSRIGGLLSQLPLSSDDIIERSDLDKELDIYDRKRLKVFAVLQAIERKIINEHPELADTNAGGIGFYDEGGKPYRNSFSGLLSLCKQYMANEKDLNDMGYGIVDIRNAFSHNRYTSDNNKHINISKMNLPQVAELILKWLEKA

SEQ ID NO: 1585 - protein, 1148 aa, Artificial
  Synthetic
MNSNFKASGRPNGRSNGFRGAGPVKKREYLTGDFARDMKSLRIKGPVRNPQTRKEIYVDETPQFITYLTLALQNISEIIGKGKDLSNFSDESSVKTALEESGRLFEVASFLWMYRVEEPGRDYDRIKKGEYADRAKEIVVALWKLRNMFVHPYEKNAAKALIVSPEFYRFIEGELYSEAREHALGPGRKSEKTFKLKLFNPHDDARATFEFTRKGLIFLTCLALYRHDASEFIQQFPDLQLPPREWQVEQGYRARPSESELVELRKKGGAVKSILDAFTWYSMRASRTDIDVVNSDYLNFANILLYLNKVPSAAYNYLSLDEEARRLAEKAAASQESEENKRFRYLLQERKKDRFLTLALAYLEDFHRLDCIGFKRLDITVRPDRKRYMFGPIPEGTVNERGEPLSDANGMDRHYAIQNGSAQFEFVPEQHYGPIQIKHLRGAVSEGEIMRLLLVMFDNGIRRKNPNDVIKEYLTAYHRILERMLNAGDTSAFTFDDPQYRADFKTVSGKGDDVFTKDRFVGEMKPFFSENVTRYFVGNELRPSPEALQKKLVKRFEAMQGRAEDFLLKMDRLTDWRKLDMEARKDKGFPVCAIGELKYPPRTCKVNDAQLVKWVLRYINLFLAKEEKFRQLPRGLRHRGVRDFEFQLLHTDIGRFGVNPDALWRTLEKRSSINGEGGALEMLKDRERKLFRSEQDRCRDKRDRNGRPLRVGHTLTMLATAAAELYREISESFRSEYSVPLSDEDKDLLPYVCPTYGVRAGLPLDQKSLVKTVLGIDLDTWSRAYDYATGRNFENRQLADARDLIVTQVPMPNAFAIRCVKPGENGEPFKFNPEFRAFMPYERGKMSLRRYYDAAPLIVAVKRFDEQSSLGMGGHKRANAEIRCSGTEGIETREWTDDGDIGSGKGPPRSRPSFARGDVNKAIQAIQLAERQDKVLLACAKAYWDRYMGEEVTATQNETGKKDQQKKNKIKNFHLSEAADIGEFFSLPMEDTVNGVKIRMMPNDFARPAYGVVTTHVKELVEDAKPLPGTDGVYSFYDLWLALRNLQHEENRIRLDFLPAAVKFNACVNIPPDLESLPNDDPEKAPRILSHCNKALRIRGNVKPLSEEEYLLLARFEPRLRHPAIKGLDLIHFDTDAVRAIYKRFGFM

SEQ ID NO: 1586 - protein, 1214 aa, Artificial
  Synthetic
MSSKNESYNKQKTFNHYKQEDKYFFGGFLNNADDNLRQVGKEFKTRINFNHNNNELASVFKDYFNKEKSVAKREHALNLLSNYFPVLERIQKHTNHNFEQTREIFELLLDTIKKLRDYYTHHYHKPITINPKIYDFLDDTLLDVLITIKKKKVKNDTSRELLKEKLRPELTQLKNQKREELIKKGKKLLEENLENAVFNHCLIPFLEENKTDDKQNKTVSLRKYRKSKPNEETSITLTQSGLVFLMSFFLHRKEFQVFTSGLERFKAKVNTIKEEEISLNKNNIVYMITHWSYSYYNFKGLKHRIKTDQGVSTLEQNNTTHSLTNTNTKEALLTQIVDYLSKVPNEIYETLSEKQQKEFEEDINEYMRENPENEDSTFSSIVSHKVIRKRYENKFNYFAMRFLDEYAELPTLRFMVNFGDYIKDRQKKILESIQFDSERIIKKEIHLFEKLSLVTEYKKNVYLKETSNIDLSRFPLFPNPSYVMANNNIPFYIDSRSNNLDEYLNQKKKAQSQNKKRNLTFEKYNKEQSKDAIIAMLQKEIGVKDLQQRSTIGLLSCNELPSMLYEVIVKDIKGAELENKIAQKIREQYQSIRDFTLDSPQKDNIPTTLIKTINTDSSVTFENQPIDIPRLKNAIQKELALTQEKLLNVKEHEIEVDNYNRNKNTYKFKNQPKNKVDDKKLQRKYVFYRNEIRQEANWLASDLIHFMKNKSLWKGYMHNELQSFLAFFEDKKNDCIALLETVFNLKEDCILTKGLKNLFLKHGNFIDFYKEYLKLKEDFLNTESTFLENGLIGLPPKILKKELSKRFKYIFIVFQKRQFIIKELEEKKNNLYADAINLSRGIFDEKPTMIPFKKPNPDEFASWFVASYQYNNYQSFYELTPDIVERDKKKKYKNLRAINKVKIQDYYLKLMVDTLYQHLFNQPLDKSLSDFYVSKAEREKIKADAKAYQKRNDSSLWNKVIHLSLQNNRITANPKLKDIGKYKRALQDEKIATLLTYDARTWTYALQKPEKENENDYKELHYTALNMELQEYEKVRSKELLKQVQELEKKILDKFYDFSNNASHPEDLEIEDKKGKRHPNFKLYITKALLKNESEIINLENIDIEILLKYYDYNTEELKEKIKNMDEDEKAKIINTKENYNKITNVLIKKALVLIIIRNKMAHNQYPPKFIYDLANRFVPKKEEEYFATYFNRVFETITKELWENKEKKDKTQV

SEQ ID NO: 1587 - protein, 1109 aa, Artificial
  Synthetic
MESEKQFRTIFNNKGNIGPIAEKAKRNFDLILKNEHSKTERIYHFCIGHTFKNIDKSIFESKLNENLKKFQPTKYITLQKDFFTFETELYELIKRIRDCNSHYVHTFDKLSEENIEKSDKIIPFIKDAFQFSIISNYIKENNLSFEKFNENENSHKEIVKSIINKFFPNGEMQKNVRDKFSKLNLKEVIDELLFITVDEDFEYNLIENHPIFTIKKGKYLSNIAHLFILSLFLYKNEANQLISKIRGFKRNDDEFHHKRDIFTFFSKKLTSQDINNEEKNLINFRDIIQYLNKYPTAWNKNIEPERQFTTMTNSLEKYVIETEIFRSFPTFKGKEEHNYFLKYVITNLFKKKKHLFDLDEYKISKELEVKLHQEYYLSPELKDANFRLDQLKNKKNTNSFEEEKIEEEIEELSEKENSILEKLKKRIKENKLLMSYGRNQDRFMEIALRFLAENNYFGKNAKFKLYQFYTTDEQIDYLAKAKKEKTKKEYDKIKYHQGKVVDYVTYKEHLKKYPDWDFPFAIQNNSIQIKIQLTNKEWKLFSIQRKLFIYLLEDALYGNDKKIDNRGNILLSNYFLSNLIPEFNQLKNSLADDIITTEHRKLFPKRLLAKYQEPIRNNTEQYNPFLEILVETKKQENRYDNLFKKSKELGLEDEFQKKNKGKQFKLRFLHKAWNLMYFRKIYDKQVEENGHHKRFNITKEEFNDFCRWIFAFDEVTEYKKYLEQLFTEKRFFDDEDFKTLFFSSDSLNEMYNKTKENFGLWINGRYKKKERKGDYEKLLAKDIIYINISHFINYLKQKKKITIENELIKYSASENIPFLINSFYYKEILPKDEYKENGKLFNELRTTKLEDALLYEIAMQYLKLDKTIINKAKENVTKILTSTIEFDIKDANNKHLYNLVVPFSKIENLAVLFKLISNSKDTFLTKIYTSTKLLFPELEYEKEESDNKKIRENLLEKKELSFESLNAINNLIISSSVKVSKVFMALEKYFIIKIDTKIPYGKDYVNVYDIHLDNNNTFENEYNENDTRNNVAHFDIPKINYDIFIKNIEAKFITNEIKPLKAKSFEDLNQNIKDVCSIFLNILHSNLYPRGKGNKKTEMEQKYFNQSLK

SEQ ID NO: 1588 - protein, 1199 aa, Artificial; identical to SEQ ID NO: 1328
  Synthetic

SEQ ID NO: 1589 - protein, 1215 aa, Artificial
  Synthetic
MDYTAKSDFKKIFENKGYVGALAEKSSNNFEYIYKNTVNRNSRLFYFAVGHKFKNLPVPASILFRKEYDEQTGDFRCNDFTYLQEKNFRDVNGEDLLKETIRGIRNLNSHYVHLFDPLIIDNKSKPVALFLKDAFRMATLVQFLDREDAWKRLWKEAGSAFPEGDYSAEQINPKLLEKYVRYISNSSFKARYKQFLYEKFRQDKKKQGSRANGDGASSSNASGFPEEWSIDACLDNLLFTEVQQEIEWKLYNKYPIINIGVGTYISFIGMLFLLSMFLYKDEADLLISKISGYKKNDDDEMRCKRNIMSFFSKKLSSQDYDSEEKHLIYFRDIIQYLNKYPTEWNKKVDLDNETDSLFSAALKQKIEEMEINRLFPYMRDDVDFKHFAVERLFRKKHVEPLKPIYSALIEKNELLGTIYRQVESHNLLGGEYKGFEFKEYVLQYVLNTFFPGKTDWSEYRNKTFEKEETHEAKLNTNKEVAKLKERLKQKLFYTSYGRNQDRFMEMAIRYLATEEYFGKDAKFKMYKFKTVEEQTDYLEAVENDKSMSKQELDKQKFHNGKLTYYATYSEHCKKYPEWDMPFVIENNSFKVQLKLSQTEISETEVSIQRSLLVYLLQDCLFPPEGPNKTSGESLFQEYYKGYKDRLETACQAFENKSVEQLTSIKKLLPRRAVKRQFSDEPMQQPTHTLYKILEEARRQEERYEQLLAYKRATARSIQSSEVYDHFIHKNKGKQFKLRFIRKAWNLMYFKDIYKNSLSTCGQHHKSFHITRDEYNDFCRYLFAMDTVPDYKSRLRMLLDQKSFFADKAFERLFNEGHSLDEYYRKTKVLFKEWADKQQSVAVPEEKYRLKNYKNFSEKAILYINLSDFIAFLIEKKRLQTNAEHKLCLPALRNIEHLIPGFYSVEGETTSRSMCKKLMANRLEDCLLYELAICYLQKEKEKEKEKEKKKEIKQLNRRGVDVILNTNQVLTIEIKPDKGKTKPDKDKTQGEVYYIEMPFNHIEKYVGIVSLKIKKEEKGHRSFLSDLPGYIKLVNDKLVNEKNRPNGRGSKELERISRIYQNYLERGNKILLEEYNSIQRHIVTEAGKFISLYMELEKYFIYNNKMQLLIIEGERNRITFEEIPELKALVGRERRNTAFHFGIPKGKLYTEIMKDIENGVIEQIVKPMNCKDYRSIPDEKRAVLDKLYECQKKDGKPKKRSIDEENRYFEKMIRKK

SEQ ID NO: 1590 - protein, 1184 aa, Artificial; identical to SEQ ID NO: 1515
  Synthetic

SEQ ID NO: 1591 - protein, 1140 aa, Artificial; identical to SEQ ID NO: 1482
  Synthetic

SEQ ID NO: 1592 - protein, 1129 aa, Artificial
  Synthetic
METNQQTHENRRRTLTNDPQYFGGYLNMARLNIYNINNHIATDFKQATLPEEGQIPAAFLCNKTIKNLNWNHVHTRAVRFLPILKVFDSESLPKDERENSDTEGKDFASMSDTLKVVFSELQEFRNDYSHYYSTEKQDSRKLTVSPELANFLTVNFQRAIAYTKARMKDVLTDADYALVENLQMVAPDNKITTEGLVFLIAMFLEREQAFQFTGKIQGLKGTQFNSFIATREVLMSFCVKLPHDKFVSENLEQALTLDIINELNRCPKTLYSVITDKEKQQFRPELDAQGIDNLIANSTNDDERERILDEIDYQDYIEGLTKRVRYSNRFSYFAMRYIDEKNVFDKLRFHIDLGKYEVDNYTKQFAGEQAERKVLENAKAFGKLSSFTDPELIQQRIDKQQHTAGFDQFAPHYNADNNKIGLSTKENIATLIAKSKASSKVEHNLKQPLPQAFLSLHELPKIILLEYLQKGQAEELINDFILLNDTRLMDITFIEEVKSQLPADWDEFSKRSDAKKKKAYSDSTLKYLRQRKTTLNTILSKSNLNDKQIPTRILNYWLNIKEVDDKRSVSDRIKLMKRDCMTRLKAVEKHKLNKSVKTPKVGEMATFLAKDIVDMIVSEEKKQKITSFYYDKMQECLALFANAEKKALFIHIVTNELKLLENDGHPFLQNINLQQIRKTSQFYQAYLIEKGNKMVPRLNPKTNKTSKVDESWMMKQFYVKEWKEEIGKQLTVVKLPANKSRIPFTICQWDKKESHDLNTWLQHVTVGKNKDGKKAVNLPTNLFDEALCDLLREQLDTKIVNYNPAANYNELLKIWWKTRNDDTQQFYQSEREYDIYNEKVRFKIDSSAHFADYYKNALSRAFTRLKAERETARQTNKKLPPLEYKQVERVFKNTIAETEKEIRMLQEEDRMAVLMLERLMDNSPNLRLSKIETLLNDTTHISEKISATLSFDASGERISGKLKQTVTKTLIAERKQKNYTELRKYRYDRRLPELFEYVQADEIPLEWLLEELSAYNNAKQQVFDTVFALEKKIVGTDPDGLKSLFTNPKGEPLKGNIQHKPYVQWLTNKGLINKEEKQFINMVRKCFSHNQFPQRKTMELLIPAWNEKKLALQIATVYNQLIADLTDKI

SEQ ID NO: 1593 - protein, 1047 aa, Artificial; identical to SEQ ID NO: 1327
  Synthetic

SEQ ID NO: 1594 - protein, 1138 aa, Artificial; identical to SEQ ID NO: 1326
  Synthetic

SEQ ID NO: 1595 - protein, 1168 aa, Artificial
  Synthetic
MKANNQIVKGISYDHLKPDDKHYFGGFLNLAQNNIDGVIQEFTMRLNLKYDPENKNQSLFSYFDINASFTDWERGVNILKEYWPVMEFIDRPATDKQFESEKPENREAAKRKYFIATLRILLKSIKELRHYYTHYYHPPVQLSEDLFRFLDHTLLYTAFDVKKTKMKDDKTRQLLNQNLSLELEKLKKLKVEELKKKKEKGIKVNLQDEKGILNAIYNDAFAHIITKEKDSDKDELETRYKSTLPQDETAEAGINISISGLIFLLSLFLSRKEIEQLKSNIEGYKGKVLNIETEVDRKHNSLKYMATHWVFSILAFKGLKQRLTNSFEKESLLIQMMDELNKVPDELYQTLSETAKKEFLEDINEYVSEGDDNEKATYVVHPVIRKRYESKFNYFAIRYLDEFAQFPTLKFQIFVGQYLHDNRPKTLASNGMTAQRMIKEKINLFGNLSEVTKHKSDFFEKESAAQGWEFFPNPSYNWAGNNIPVYIDMIGKEGKAKEIQVQINKYRKQLNPAPQRDKRISKKEIIEQLYKEKVVYGDPTLMLSANELMALLYELIVNGKSGAELENKIVEQIIARYEQIEAYDPTTQQLPTNQMPHKLQKSRKDSKVTDTDKLLKTIDKEIDEGNKKLELIACHRKEWEEAEQRKKSGKRNNPGTKSRKHLFYASEMGEEATWIANDLKRFMPKPARAEWKGTHHSELQRLLAFYSTQRLEAWQLVESVWTANTHSFWEENFKEAFYKPEFENFYGAYIEIRTKILTTCRSILENNPEATMNNDTEKEWDKVFTLFDKRLYRTSTTDEQKKQLLTKPFAFPRGLFDDKPTFLPGSKPNENPERFAAWYSYGYTYSGKFQSFYDMPRNYSDWYKKLKEDGKLPPLDKKTEQEKILRFRMDCDLNIKYIRFQDIYVKLMVDSLYKAVFGQQPEFDLSHLYDTRYERYENNTIAQRQKNRQEGDNSDNAINENYVWNKTFAISLYNGRITEPQVKLKDVGKFRRFAADPRVQTLISYDDTRTWTKLEIENELDNKADAYEPIRRTQSLKAIQQLEKDILKKNGFDGKQHPEELKHNGNPNFRKYIANGLLKHRTDIRQEELALISDTEFQEIGLERIRQTNPLIQKAYLLILLRNKFGHNQLPDQEHFRLMRSIYPYNQQESYSAYFNQVITQIIEELNT

SEQ ID NO: 1596 - protein, 1129 aa, Artificial; identical to SEQ ID NO: 1469
  Synthetic

SEQ ID NO: 1597 - protein, 1126 aa, Artificial
  Synthetic
MEDDKKTKESISYELEDKHFWAAFLNLARHNVYITVNHINKVLELKNKKDQDIIIDNDQDILAIKTHWEKVDGDLNKTERLRELMTKHFPFLETAIYSKNKEDKEEVKQEKQAKAQSFDSLKHCLFLFLEKLQEARNYYSHYKYSESTKEPMLEKELLKKMYNIFDDNIQLVIKDYQHNKDINPDEDFKHLDRTEEDFNYYFTRNKKGNITESGLLFFVSLFLEKKDAIWMQQKLTGFKDNRESKKKMTHEVFCRRRMLLPKLRLESTQTQDWILLDMLNELIRCPKSLYERLQGVDREKFKVPFDPADEDYDAEQEPFKNTLVRHQDRFPYFALRYFDYNEVFTNLRFQIDLGTYHFSIYKKLIGGQKEDRHLTHKLYGFERIQEFAKQNRPDEWKAIVKDLDTYETSNERYISETTPHYHLENQKIGIRFKNGNNDIWPSLETNGENNEKRKYKLDKQYQAEAFLSVHELLPMMFYYLLLKKEKPNNDEINASIVEGFIKREIRDIYKLYDAFANGEINNIDDLEKYCEDKGIPKRHLPKQMVAILYDEHKDMVKEAKRKQKEMVKDTKKLLAALEKQTQEKTEDGGRNIRLLKSGEIARWLVNDMMRFQPVQKDNEGNPLNNSKANSTEYQMLQRSLALYNKEEKPTRYFRQVNLINSSNPHPFLKWTKWEECNNILSFYRSYLTKKIEFLNKLKPEDWEKNQYFLKLKEPKTNRETLVQGWKNGFNLPRGIFTEPIREWFKRHQNDSEEYEKVEALKRVGLVTKVIPLFFKEEYFKEDAQKEINNCVQPFYGFPYNVGNIHKPKEEDFLHREERIELWDKKKDKFKGYKAKKKFKEMTDKEKEEHRSYLEFKSWNQFERELRLVRNQDIVTWLLCMELIDKLKVEGLNVEELQKLRLKDIDTDTAKQEKNNILNRVMPMQLPVTVYEIDDSHNIVKDRPLHTVYIEETKTKLLKQGNFKALVKDRRLNGLFSFVDTSSEAELKSNPISKSVVEYELGEYQNARIETIKDMLLLEETLIKKDKNLPTNNFSDMLNGWLEGKDEADKVRFQNDVKLLVAVRNAFSHNQYPMRNRIAFANINPFSLSSANTSEEKGLGIANQLKDKTKETIEKIIKIEKPIETKE

SEQ ID NO: 1598 - protein, 1003 aa, Artificial; identical to SEQ ID NO: 1450
  Synthetic

SEQ ID NO: 1599 - protein, 1184 aa, Artificial
  Synthetic
MERIFGHCCPHHDSVCFVRFLGTMVSNQDGRENVLDILYIADRTRKLKPMNTVPASENKGQSRTVEDDPQYFGLYLNLARENLIEVESHVRIKFGKKKLNEESLKQSLLCDHLLSVDRWTKVYGHSRRYLPFLHYFDPDSQIEKDHDSKTGVDPDSAQRLIRELYSLLDFLRNDFSHNRLDGTTFEHLEVSPDISSFITGTYSLACGRAQSRFADFFKPDDFVLAKNRKEQLISVADGKECLTVSGLAFFICLFLDREQASGMLSRIRGFKRTDENWARAVHETFCDLCIRHPHDRLESSNTKEALLLDMLNELNRCPRILYDMLPEEERAQFLPALDENSMNNLSENSLNEESRLLWDGSSDWAEALTKRIRHQDRFPYLMLRFIEEMDLLKGIRFRVDLGEIELDSYSKKVGRNGEYDRTITDHALAFGKLSDFQNEEEVSRMISGEASYPVRFSLFAPRYAIYDNKIGYCHTSDPVYPKSKTGEKRALSNPRSMGFISVHDLRKLLLMELLCEGSFSRMQSDFLRKANRILDETAEGKLQFSALFPEMRHRFIPPQNPKSKDRREKAETTLEKYKQEIKGRKDKLNSQLLSAFDMDQRQLPSRLLDEWMNIRPASHSVKLRTYVKQLNEDCRLRLQKFRKDGDGKARAIPLVGEMATFLSQDIVRMIISEETKKLITSAYYNEMQRSLAQYAGEENRHQFRAIVAELRLLDPSSGHPFLSATMETAHRYTEDFYKCYLEKKREWLAKTFYRPEQDENTKRRISVFFVPDGEARKLLPLLIRRRMKEQNDLQDWIRNKQAHPIDLPSHLFDSKVMELLKVKDGKKKWNEAFKDWWSTKYPDGMQPFYGLRRELNIHGKSVSYIPSDGKKFADCYTHLMEKTVRDKKRELRTAGKPVPPDLAAYIKRSFHRAVNEREFMLRLVQEDDRLMLMAINKIMTDREEDILPGLKNIDSILDKENQFSLAVHAKVLEKEGEGGDNSLSLVPATIEIKSKRKDWSKYIRYRYDRRVPGLMSHFPEHKATLDEVKTLLGEYDRCRIKIFDWAFALEGAIMSDRDLKPYLHESSSREGKSGEHSTLVKMLVEKKGCLTPDESQYLILIRNKAAHNQFPCAAEIPLIYRDVSAKVGSIEGSSAKDLPEGSSLVDSLWKKYEMIIRKILPILDPENRFFGKLLNNMSQPINDL

SEQ ID NO: 1600 - protein, 1118 aa, Artificial
  Synthetic
MTEQNERPYNGTYYTLEDKHFWAAFFNLARHNAYITLAHIDRQLAYSKADITNDEDILFFKGQWKNLDNDLERKARLRSLILKHFSFLEGAAYGKKLFESQSSGNKSSKKKELTKKEKEELQANALSLDNLKSILFDFLQKLKDFRNYYSHYRHPESSELPLFDGNMLQRLYNVFDVSVQRVKRDHEHNDKVDPHRHFNHLVRKGKKDRCGNNDNPFFKHHFVDREGTVTEAGLLFFVSLFLEKRDAIWMQKKIRGFKGGTETYQQMTNEVFCRSRISLPKLKLESLRTDDWMLLDMLNELVRCPKSLYDRLHEEDRARFRVPVDILSDEDDTDGTEEDPFKNTLVRHQDRFPYFALRYFDLKKVFTSLRFHIDLGTYHFAIYKKNIGEQPEDRHLTRNLYGFGRIQDFAEEHRPEEWKRLVRDLDYFETGDKPYITQTTPHYHIEKGKIGLRFVPEGQHLWPSPEVGATRTGRSKYAQDKRLTAEAFLSVHELMPMMFYYFLLREKYSDEASAERVQGRIKRVIEDVYAVYDAFARDEINTRDELDACLADKGIRRGHLPRQMIAILSQEHKDMEEKIRKKLQEMIADTDHRLDMLDRQTDRKIRIGRKNAGLPKSGVIADWLVRDMMRFQPVAKDTSGKPLNNSKANSTEYRMLQRALALFGGEKERLTPYFRQMNLTGGNNPHPFLHETRWESHTNILSFYRSYLKARKAFLQSIGRSDRVENHRFLLLKEPKTDRQTLVAGWKSEFHLPRGIFTEAVRDCLIEMHDEVGSYKEVGFMAKAVPLYFERACKDRVQPFYDYPFNVGNSLKPKKGRFLSKEDRAEEWESGKERFRLAKLKKEILEAKEHPYLDFKSWQKFERELRLVKNQDIITWMMCRDLMEENKVEGLDTGTLYLKDIRTEVQEQGSLNVLNRVKSMRLPVVVYRADSRGHVHKEQAPLATVYIEERDTKLLKQGNFKSFVKDRRLNGLFSFVDTGGLAMEQYPISKLRVEYELAKYQTARVCAFEQMLELEESLLTRYPHLPDKNFRKMLESWSDPLLDKWPDLHRKVRLLIAVRNAFSHNQYPMYDEAVFSSIRKYDPSSLDAIEERMGLNIAHRLSEEVKQAKEMVERIIQV

SEQ ID NO: 1601 - protein, 1146 aa, Artificial; identical to SEQ ID NO: 1461
  Synthetic

SEQ ID NO: 1602 - protein, 1000 aa, Artificial
  Synthetic
MEEANRYIYGAYFNMARDNFLNTIKLLADKMKLGATSGFGKDGNEVNDINELFGDKNTYANIENVVEFYFPWIKALEGRFSLDKGDRNLNDMKMFYKSVLTAFFTAVDSLRNKYTHYSHKDLNIREIKIECTLGGKDYCIGLLNALDCIYDSAVNLLKLRFMADEDEVAHLRRCKAVNKKVVVRTEKDGFYYRLSDNGEVTEKGVIFIASMFLNRKYGFLFLKQLEGFKRSDEKRYRLTLEAFLAFSNIKPVDRLKSDKLDRASLGLDMLNELTKIPKELSETLSVDCLYKYLASDGEDDLRSRIRYQDRFVPLALEFISQSDEFKDFRFYTYVGNYVYKGYIKRLIDGTDKERYLSDRLCGFYKSVNDASSDAIAQKYGVEIKDSNEPDYMLPDSFRPHVLRATPHFVINNNNIGIKICGNDCLPVVNGKGVESPEPDYWLSIYELPAMLFYAYLREKNGKLLKDYKSIRELIEDVEKKADEKNDRDKGALMARHIDKEIIWTQTKLDEVKRLEEKKVAAYGKKGRVVLKSGRMADLLAHDMVRLQPATKGSDKITGANFQALQVSLAYFKRDILADVFSRAMLTTGNHRHPFLYRIDVSHCSSLRDFYVAYLGERRKYFEDVAKKITKNKLNTPCHILRRLQREGSGEEAGKDVKPKFLPRGIFTGSIKSCLEKSALNINIRNARNDVKPAINAAYLIFMYYKEIEKGEFQGFYGEKRRYDILEEGKPLDLDERKKALASIKPAKIDVSEANMPMSKEEHLMRKRYHAVCNNESAIRMYQVQDILLLLMAKDIFKKALSEVVMSKKIGLENLNGIFDAPVNFVKNFDNIKLTATGIKIKDYGKVCRLGTDFKFNSLIKAFHKVYSKSVEMDYSDYLKEEEEFEKYRLNMVKLCREVERGITEDLHLSLDGKSHLSFNDDVIKSYNDKYNVFNGDDLTFFINARNMFMHGDYKYECVKYVVSEHFKGSLNDVSFAKETYGHFCNLLESMRKKTGLRIDI

SEQ ID NO: 1603 - protein, 1146 aa, Artificial
  Synthetic
MPCRKTQEVVPYQHWTNLDKKGKPMSNNITDGSRNDVSRPPQEIDIGGSRMRALAERLEIVIPKDKGTKKKKDEVKYFTLYLNYAVSNLREITGIKGDDETKIKQQLEALSDEKMQRLADFLWAFRFDEPQRDFGARREKKFDHDYKRLAPLVALKFFALRNYFAHLDRNGNEALVCGRDMYVLLEGILRPKAEKKCMGAGCQAGKLYKMHLLNLRGPRKPQQPMESRKYEFTRRGIMFFVCMALYKDDAEEFLSCFADMRVPNRRRDSIDGLSEAEVEKLGRKKPTKRAFLKAFTFFSYRRGRVSLDGEDANFLNFANIIGYLNKVPRASFDYLSLDTEKKLLADLASRSTESEENKLFKYDLSKQIRAKDRFVSLAAAWCEDFNVLPCLRFKRLDITPSLGRHRYLFGAENDNAVHLDRHYIIEDGAIRFEWVPTAHYGDVKVGHLRSCIGEAEFRRLLFCALRKPAETNAMLDEYFAAYHKVLELMLDASDNESRSIFSNAELAEAVQKVSGLTLDEIGDDPERLQPFFPKNLWRFFFSWDAAQGDDDLRANVAAKIDGRIKWCSDFLVRVANFRKWNAENFWKARDQRGPQGACPKAMLVNPPRNCRVSDASCVARVIAYLDYHLAPDRKFRQLSLGEQHSHPGRADTHNYEYQLVQSAIGRYSLDQISAVGGMKDGKAKSGIVLQLRPELELSAARLKDKVSALHDNHRASMGKSLRNAQRRGLVTGFAYMEAERALKSKKLIDLAEAAAELLKEELLREAEGLAATAGDTLKILCRKFGVRTGLPLDKDALVKTILGIDMDKWTHAFDYGHGHPYVDRKLTEGEHVAAQIPLPNGMAERVMRSQSRVFGGLIGESGVDWAKAFASLDGRDVSLLGFYDVSPLVGYIKSHPNHTDEYPDPSAPGINTWADVDPRAIKPDFSRGGINNAIRAIKTARNQDRLLLKFALQYWEAFKKNRAYDERKTAYEKAITVRDYFNGTFTYALRGGVGLRLSRNDVFSPTFAHVVENAAAISELLRKENPTACEFSFYDVAQLFARKQRESRNLRMELLPDLEKFAARCPVPQEEYARIDAQVCKENERRLARRAMEYSYYSKVMPTLTEAEYNLVADVRNAVMHSTLLVTDDDAYRTAKAVLGRFVSAR

SEQ ID NO: 1604 - protein, 1121 aa, Artificial
  Synthetic
VKKKEEETPVVSTYNKDDKHFWAAFLNLARHNVYITINHINKLLEIREIDNDEKVLDIKALWQKVNKDLNQKARLRELMTKHFPFLETAIYSKNKEDKEEVKQEKQATAQSFKSLEHCLFLFLEKLQEARNYYSHYKYSESTKEPVLEKELLKKMYNIFDNNIQLVIKDYQHNKDINPDEDFKHLDRTEKEFNYYFTQDKKGKITESGLLFFVSLFLEKKDAIWMQQKLRGFKDNRENNKQMTHEVFCRSRMLLPKLRLESTQTQDWILLDMLNELIRCPKSLYERLKGEDRKKFEVPFDSTDEDYDAEQDPFKNTLIRHQDRFPYFILRYFDYNEIFKNLRFQIDLGTYHFSIYKKLIGGQKEDRHLTHKLYGFERIQEFTKQHRPDDWKAIVKDFDTYETSEEPYISETTPHYHLENQKIGIRFKNDNDKIWPSLETNGENNEKSKYKLDKQYQAEAFLSVHELLPMMFYYLLLKKEEPNNDKKNASRVEGFIKREIRDIFKLYDAFANDEINNIDDLKKYCKDKNVEIRHLPKQLITILESKPKDMAKEAKRKQKEMVKDTKKLLATLEKQTQKEKEDDGRNVKLLKSGEIARWLVNDMMRFQPVQKDNEGNPLNNSKANSTEYQMLQRSLALYNKEEKPTRYFRQVNLINSSNPHPFLKWTKWEECNNILSFYRSYLTKKIEFLNKLKPEDWEKNQYFLKLKEPKTNRETLVQGWKNGFNLPRGIFTEPIREWFKRHQNDSKEYEKVEALKRVGLVTKVIPLFFKEEYFKEDAQKEINDWVQPFYSFPYNVGNIHKPKEEDFLHREERIELWDKKKDKFKGYKEKIKSKKLTEKEKEEFRSYLEFQSWNKFERELRLVRNQDIVTWLLCKELIDKLKIDELNIDELKKLHLNNIDTDTAKKEKNNILNRVMPMELPVTVYKVNKAGNIIKNKPLHTIYIKESKTKLLKQGNFKALVKDRRLNGLFSFVKTNSEAESKRNPISKLRVEHELREYQKARIEIIKDMLALEKTLIDNYNSLDTDNFHNMLTGWLELKGEVNKAKFNNDVKLLTAVRNAFSHNQYPMYDENLFVNIERFSLSSSKILESKGLSIAVKLKEEVSKIVKKIQEEEDGKKEKET

SEQ ID NO: 1605 - protein, 1146 aa, Artificial; identical to SEQ ID NO: 1461
  Synthetic

SEQ ID NO: 1606 - protein, 1057 aa, Artificial; identical to SEQ ID NO: 1344
  Synthetic

SEQ ID NO: 1607 - protein, 1146 aa, Artificial; identical to SEQ ID NO: 1461
  Synthetic

SEQ ID NO: 1608 - protein, 1057 aa, Artificial; identical to SEQ ID NO: 1344
  Synthetic

SEQ ID NO: 1609 - protein, 1062 aa, Artificial; identical to SEQ ID NO: 1324
  Synthetic

SEQ ID NO: 1610 - protein, 1171 aa, Artificial; identical to SEQ ID NO: 1349
  Synthetic

SEQ ID NO: 1611 - protein, 1062 aa, Artificial
  Synthetic
MYKGKFNQRNSGNNSKRMRKPQFLPSNPVIALQKLCNTPQHETKVEEEKKYFLLYLNYAVNNLQRLVADDRIETRMKNEKSQPDKSEVLPENLFEVDDKVVDGKKKYGVRSRLEKADDATILKLANFLWLFNVDEPERDFKDFRKLTIMLVTRIYALRNLFAHTDKGNSDPLLADHEFYVLMEGIFKSAANNNAMSEGVRMDKLYKLKLLTKHTDLEKDDPNYNAAQAYEFTRKGIIFLTCLALYKDEAHEFCQLFVDMRLPAYCPKWREKCSEMEDCNVIEKTCNAAKAKAMITMFTYFSCRRGRTVLNAQTQDYMCFSDIVTYLNKVPAAAYDYSERMAAEGKTDPLASERTKLAALAATSTESEENKHFKYDLQRRFQERFLSFAAGYCEDFGLIPALHFKRLDVSQKLGRKRYCFGSDRNDELQVRMDRHYAIARDSIGFEYLPKTHYGDIKIGSLRGTVSENELKQLLYLCGKIDVNKGVDAYFAAYHRVLEKMLNHPDGEDFRFEDFVDDFCTIAGVSQEKLLEDRRKILEPYFPPNLRRFFFGDDMQLTQEELREQLCRRLEVMAFQAEDFLTRLRSFNQWREEDKNTRAKNPPDCSVKVINFSNHSGRIPDSELIRWVFNYINLFLKPEDKFRQLPRGEQHHPGTRDCEYQLLHAAIGKYSLDQKGCPALLRKLRPDCPLTGVGNGEIKTVNWNGTFYAKLCSIKDAGRKKLKDNPRYDANGKPVRFTWSLFMLAEAAAVCYKDFCQEELHKWKTCDAYSVGIDELRAICRRFGVRPGMPLDRESLIKTILKIDLEKWRHAFDYSSGKPYGDRVLSSVEHIVPQVSLPAGFGQRLIAGDCPKPFRGFFREDGIFDFNRAMRATLNFPVALRGYYDTKPLVDGMRAIITADGKGKTAKKSALDKAARAIARSHCQDLLLREIAFKYRDRAFRNEQALSYTVKHDKGGSIYEYFSSEDTMKIGKFTVRFLPNVVTRPAFSLMTDKAVVETLIRVNKWEGTEFDFYRLVEALKVLQASDRNKRLELLPYLAEFDKRVKTDDLVYEGKTSEGDVRLAE

SEQ ID NO: 1612 - protein, 1147 aa, Artificial
  Synthetic
MRHQQNAQYGACQWRDRASAKKRTYLSGDYKKDMATLRIFGNIRNPQTRKDEFKDEVPQFITYLTLALQNVSEIIGKRKDLSNLRDESSVKTALEESGRLFEVASFLWMYRVEEPGRDYDRIKKGEYADRAKEIVVALWKLRNMFVHPYERNAARALIVSPEFYRFIEGELYSEAREHALGPGRKSEKIFKLKLFNPHDDARTTFEFTRKGLIFLTCLGLYRHDASEFIQQFPDLQLPPREWQVEQGYRAKPSESELVELRKKGGVVKSILDAFTWYSMRASRMDIDVANSDYLNFANILVYLNKVPSAAYNYLLLDDEAKRLTKRAAASQESEENKRFKYLLQERKKDRFLTLALAYLEDFHKLDCIRFKRLDITVRPDRKRYMFGPIPEGTVNERGEPLSDANGMDRHYAIQNGSAQFEFVPEQHYGPIQIKRLRGAVSEGEIMRLLLVMFDNGIRRKNPNDVIKEYLIAYHRILERMLNAGDTGAFTFDDPLFRADFKTVSGKGDDVFTKGRFVGEMKPFFSENVTRYFVGDELRPTPEALQKKLVKRFEAMQGRAEDFLLKMNRLTDWRKLDLEARKDKAFPVCTIGELKYPPRTCKVNDAQLVKWVLRYINLFLAKEEKFRQLPRGLRHRGVRDFEFQLLHTDIGRFGVNPDALWRTLEKRSSINGEDGALKMLEDREQELFRSEQNRCRGKRDRNGKPLRPGHTLTMLATAAAELYREFSESFRSEYSVPLSDEDKDLLPYVCPTYGVRAGLPLDQKSLVKTVLGIDLDTWSRAYDYATGRNFENRRLSNAHDLIVSQVPMPNAFAIRCVKPGENGEPFKFNPEFRTFMPYERGKMSLRGYYDATPLIVAVKRFDEQSSLGKGGHERANAEIRCSGTEGIETREWTDDGDIGSGKEPPRSRPSFARGDVNKAIQAIQLAERQDKVLLACAKAYWDRYMGEEVTATQNETGKKDQQKKNKIKNFHLAEAADIGEFFSLPIDDTVNGVKIRMMPNDFARPAYGVVTTHVKELVEGVKPLPETDSVYSFYDLWLELRNLQHKENRVRLDFLPAAVKFNACVNIPTNLESLPNDDPEKTPRILSHCNKALRLLRLRGNVEPLSEEEYLLLAKFEPRLRHPARKGLDLVHFDTDAVRAIYKRFGFL

SEQ ID NO: 1613 - protein, 1168 aa, Artificial
  Synthetic
MKANNQIVKGISYDHLKPDDKHYFGGFLNLAQNNIDGVIQEFTMRLNLKYDPENKNQSLFSYFDINASFTDWERGVNILKEYWPVMEFIDRPATDKQFESEKPENREAAKRKYFIATLRILLKSIKELRHYYTHYYHPPVQLSEDLFRFLDHTLLYTAFDVKKTKMKDDKTRQLLNQNLSLELEKLKKLKVEELKKKKEKGIKVNLQDEKGILNAIYNDAFAHIITKEKDSDKDELETRYKSTLPQDETAEAGINISISGLIFLLSLFLSRKEIEQLKSNIEGYKGKVLNIETEVDRKHNSLKYMATHWVFSILAFKGLKQRLTNSFKKESLLIQMMDELNKVPDELYQTLSETSKKEFLEDINEYVSEGDDDEKATYVVHPVIRKRYESKFNYFAIRYLDEFAQFPTLKFQIFVGQYLHDNRPKTLASNGMTAQRMIKEKINLFGNLSEVTKHKSDFFEKESAVQGWEFFPNPSYNWAGNNIPVYIDLIGKEGKAKEIQVQINKYRKQLNPAPQRDKRISKKEIIEQLYKEKVVYGDPTLMLSANELMALLYELIVNGKSGAELENKIVEQIIARYEQIEAYDPTTQQLPANQMPHKLQKSRKDSEVIDTDKLLKAIDKEIDEGNKKLELIACHRKEWEEAEQRKESEKRNNPGTKSRKYLFYASEMGEEATWIANDLKRFMPIPARAEWKGTHHSELQRLLAFYNTQRLEAWQLVESVWTANTHSFWEENFKEAFYKPEFENFYGAYIKIRTKILTTCRNFVENNPEVTINKHTRKEWDKVFTLFDKRLFRINTTDEQKKQLLAKPFAFPRGLFDDKPTFLPGSKPNENPERFAAWYSYGYIYSGKFQSFYDMPRDYSDWYKKLKEDGKLPPLDKKTEQEKILRFRMDCDLNIKYIRFQDIYVKLMVDSLYKAVFGQQPEFDLSHLYDTRYERYENNTIAQRQKNRQEGDNSDNAINENYVWNKTFAISLYNGRITEPQVKLKDVGKFRRFAADPRVQTLISYDDTRTWTKLEIENELDNKADAYEPIRRTQSLKAIQQLEKDILKKNGFDGKQHPEELKHNGNPNFRKYIANGLLKHRTDIRQEELALISDTEFQEIGLERIRQTNPLIQKAYLLILLRNKFGHNQLPDQEHFRLMRSIYPYNQQESYSAYFNQVITQIIEELNT

SEQ ID NO: 1614 - protein, 1003 aa, Artificial; identical to SEQ ID NO: 1494
  Synthetic

SEQ ID NO: 1615 - protein, 1003 aa, Artificial
  Synthetic
MGAIENKHIFAAYANLAIDGLIKTLNFIAKKLDTQKQLSSWDIKHVITLIDSIFDQNPQNNLEQVVEGYLPWIKPIIEMKTPKKGERQSDKLCIEYKTIITAFASLLNDVRNYYTHYYHDPICIYPRGYDIPSSLNCIYDSAINIIKERFQAEEKEMEHLRRYTRKKGRVVLKTEDDHFYYTLVNNNGLSEKGYAFFISMFLERKYSYLFLKKLSGFKRGDSLQYRLTLEVFTALSTKPPVERLRTTKDTKQDRALDILNELSKIPIELYQTLEPKYREVYNETLQPTDAEDPYGLPDRSRIRFRSRFEAFALHFLDKQADFKEIGFYTYLGNYFHNGYQKTRVDRETKDRYINFQLAGFCKNIQDISAKKLSEALNVKSIDISTDSIPDINSFEPYLVQSTPHYIVNGNNIGIKVLPEGKDTYPTIDEKGAKMPIADFWLSKYELSAMLFYTYLRNNNIHKSHCPLSVKDIIERSIHKSTKQKHPEERSELMLRRVMKAIFWTDSKLNEVERIKSQKSAFGKRQHEILKAGRIAETLVRDMLWLQPSKNNGRDKVTEPNFQAIQVSLAYFGIRRNDLTEIFTRAGLINSSNPHPFLAQIGTNYTSLIEFYIAYLKERKVYFSRIQKKILQGKLNIQCHPLRDLQREPNKPQDKEEAIFLPRGLFNEAIINCLKKSKLKQLIESPTREKSPALNVSYLIQNYFRTYFEDQSQEFYAQPRNYRLFDKLSPNKGKSKSYLSLEQRIKKMEELRPSKIPVAEANKLLEKEDRLYRKNYNEICDNESIIRLYQIQDILLFMMTKEYLPSDLYNRINKYKLENVKGILNERVSYLIDLNPLKIQGEDIKIKDYGKLFYIHHDTRISSLNKVLSKVKRNNSISSSVKIQPYENYKRECLDFEEAQIQIIPIIHSFEIAMVSMFPDLKKATPGNYYDFNELITEYEKRTKQKIDSSFLIKTRNMFLHDKYEAECIKEISDDFVYAKKIIAEFKMKIENIKLENLSNDSSA

SEQ ID NO: 1616 - protein, 1168 aa, Artificial; identical to SEQ ID NO: 1357
  Synthetic

SEQ ID NO: 1617 - protein, 1094 aa, Artificial; identical to SEQ ID NO: 1358
  Synthetic

SEQ ID NO: 1618 - protein, 1175 aa, Artificial
  Synthetic
MTEQNERPYNGTYYTLEDKHFWAAFLNLARHNAYITLAHIDRQLAYSKADITNDEDILFFKGQWKNLDNDLERKARLRSLILKHFSFLEGAAYGKKLFESQSSGNKSSKKKELTKKEKEELQANALSLDNLKSILFDFLQKLKDFRNYYSHYRHPESSELPLFDGNMLQRLYNVFDVSVQRVKRDHEHNDKVDPHCHFNHLVRKGKKDKYGNNDNPFFKYHFVDREGKVTEAGLLFFVSLFLEKRDAIWMQKKIRGFKGGTETYQQMTNEVFCRSRISLPKLKLESLRTDDWMLLDMLNELVRCPKSLYDRLREEDRARFRVPVDILSDEDDTDGTEEDPFKNTLVRHQDRFPYFALRYFDLKKVFTSLRFHIDLGTYHFAIYKKNIGEQPEDRHLTRNLYGFGRIQDFAEEHRPEEWKRLVRDLDYFETGDKPYITQTTPHYHIEKGKIGLRFVPEGQHLWPSPEVGATRTGRSKYAQDKRFTAEAFLSVHELMPMMFYYFLLREKYSDEASAERVQGRIKRVIEDVYAVYDAFARDEINTLDRLDACLADKGIRRGHLPRQMIAILSQEHKDMEEKIRKKLQEMMADTDHRLDMLDRQTDRKIRIGRKNAGLPKSGVIADWLVRDMMRFQPVAKDTSGKPLNNSKANSTEYRMLQRALALFGGEKERLTPYFRQMNLTGGNNPHPFLHETRWESHTNILSFYRSYLKARKAFLQSIGRSDRVENHRFLLLKEPKTDRQTLVAGWKGEFHLPRGIFTEAVRDCLIEMGLDEVGSYKEVGFMAKAVPLYFERACKDRVQPFYNYPFNVGNILKPKKGRFLSKEKRAEEWESGKERFRDLEAWSQSTARRIEDAFAGIKYASPGNKKKIEQLLQDLSLWETFESKLKVKADKINLAKLKKEILEAKEHPYLDFKSWQKFERELRLVKNQDIITWMMCRDLMEENMVEGLDTGTLYLKDIRTDVQEQGSLNVLNHVKPMRLPVVVYRADSRGHVHKEEAPLATVYIEERDTKLLKQGNFKSFVKDRRLNGLFSFVDTGALAMEQYPISKLRVEYELAKYQTARVCAFEQTLELEESLLTRYPHLPDKNFRKMLESWSDPLLDKWPDLHRKVRLLIAVRNAFSHNQYPMYDEAVFSSIRKYDPSSPDAIEERMGLNIAHRLSEEVKQAKETVERIIQA

SEQ ID NO: 1619 - protein, 1224 aa, Artificial
  Synthetic
MDIRLSKNRALLAAYLNMAQQNVYVTLLHISQLMGVEETKDLSNRMYDFQILQELKTGKKGAESEQMVKSERVQKIILLLYRNFPFLKAFVEAKYKQQEKNNGGKNKGGGKNTQKNKKTPDNTSNEEQLEFTESELGKLPIPPHEYRTILCDVFRLINDLRNEYTHFSPEKRTGGAKESHEKCQKKMLSYLYLCLDGGRRVVKERFKDTFQEKDFNFLTQGPRYSLQKDGDKKKAEERPNFYYRLKDDQGLFSYVGILLFISLFLHKRYISEMLAQSGLFYTPRYWKGQPVNVELERRIISEIFSIYRIRLPKERIDSTRPDYALGLDMLNELQKCPNELYETFSPKDQAEFRVKREYDESGEGTEEGEVLLKRFEDRFPYFAIRYLDENRVFDDIRFQVSIGKYRYKFYNKLCIDVVSSNRNDDCYRLRSLQKEINGFGRLNEVEYERILRYGSHIHVEKPEGDDTPYLTDHHTSYLFNGNRIGLLFNQENGRHDLEEIRGNCLYLPHLTFASSSEGKDARRVPPIAWLSTYELPALIFHHLLCRHYGLERTATESIIKECVGLYHRLFTDIRDGKLLPGEALGIQAEESTRSEISRIKKGEPLPQNISEKIETFLSTHYCTEQVCLHIQDIPKKIIDYLIGKNIDQDMSGLFKQRSRERINKMYESTKIRLKKFKTDLDLQGNGDNKFGKKRYTDIRPGQLADYLAKDLLFFQPYDDEKKNKVTGLNYQILQAALAIYNHNLDELRRLFKNARLLVPENPKMEHPFLGSVLHKSPRTTLQFYAYYLLEKISYLKKRLDDPNETFADLFRYKQRQKWQTRDSQWYRALAGRYMAEMMEEGTMNFKPVELPRGLFERPIKRLLTNILTKRTDSDSQALLKIVESPRCNVSYLIAQYFTLILHDDSQPFYHPNKRYKRTYQYFNILNNRKERNKLVQVYYTLDEMEAYFKDTESLKKRYKDYLTSSEAKKHPAPEQRLKKYLSEYRKNETTIRRYRVQDMLVFLMAKILLLEKGGLEAGELEQYKLSHIQPTTGQNSGQNILSLQVPFNITVKLDDGTERSITQEVIKVKNYGDFFRFLYDDRVASLLPYTQEDIPLERALLEKELEGYDRERIPIFKSVHCMEKEILRLCPELNDPQSSQYKYTTDIGTEKIVKENFRAMLTELCSRGLLPENEIEMMVEIRNSFSHNRYACVNLKGKNIPMIAISIQRKFDGVVGRTIGKNKN

SEQ ID NO: 1620 - protein, 1119 aa, Artificial
  Synthetic
MTEQNERPYNGTYYTLEDKHFWAAFLNLARHNAYITLTHIDRQLAYSKADITNDEDILFFKGQWKNLDNDLERKARLRSLILKHFSFLEGAAYGKKLFESQSSGNKSSKKKELTKKEKEELQANALSLDNLKSILFDFLQKLKDFRNYYSHYRHPESSELPLFDGNMLQRLYNVFDVSVQRVKRDHEHNDKVDPHRHFNHLVRKGKKDRYGNNDNPFFKHHFVDREEKVTEAGLLFFVSLFLEKRDAIWMQKKIRGFKGGTEAYQQMTNEVFCRSRISLPKLKLESLRTDDWMLLDMLNELVRCPKSLYDRLREEDRACFRVPVDILSDEDDTDGAEEDPFKNTLVRHQDRFPYFALRYFDLKKVFTSLRFHIDLGTYHFAIYKKNIGEQPEDRHLTRNLYGFGRIQDFAEEHRPEEWKRLVRDLDYFETGDKPYITQTTPHYHIEKGKIGLRFVPEGQHLWPSPEVGATRTGRSKYAQDKRLTAEAFLSVHELMPMMFYYFLLREKYSEEASAERVQGRIKRVIEDVYAVYDAFARGEIDTLDRLDACLADKGIRRGHLPRQMIAILSQEHKDMEEKVRKKLQEMIADTDHRLDMLDRQTDRKIRIGRKNAGLPKSGVIADWLVRDMMRFQPVAKDTSGKPLNNSKANSTEYRMLQRALALFGGEKERLTPYFRQMNLTGGNNPHPFLHETRWESHTNILSFYRSYLKARKAFLQSIGRSDRVENHRFLLLKEPKTDRQTLVAGWKSEFHLPRGIFTEAVRDCLIEMGHDEVGSYKEVGFMAKAVPLYFERACKDRVQPFYDYPFNVGNSLKPKKGRFLSKEKRAEEWESGKERFRLAKLKKEILEAKEHPYLDFKSWQKFERELRLVKNQDIITWMICRDLMEENKVEGLDTGTLYLKDIRTDVQEQGSLNVLNRVKPMRLPVVVYRADSRGHVHKEQAPLATVYIEERDTKLLKQGNFKSFVKDRRLNGLFSFVDTGALAMEQYPISKLRVEYELAKYQTARVCAFEQTLELEESLLTRCPHLPDKNFRKMLESWSDPLLDKWPDLHRKVRLLIAVRNAFSHNQYPMYDEAVFSSIRKYDPSFPDAIEERMGLNIAHRLSEEVKQAKETVERIIQA

SEQ ID NO: 1621 - protein, 987 aa, Artificial
  Synthetic
VKMEDDKKTKESISYELEDKHFWAAFLNLARHNVYITVNHINKVLELKNKKDQDIIIDNDQDILAIKTHWEKVDGDLNKTERLRELMTKHFPFLETAIYSKNKEDKEEVKQEKQAKAQSFDSLKHCLFLFLEKLQEARNYYSHYKYSESTKEPMLEKELLKKMYNIFDDNIQLVIKDYQHNKDINPDEDFKHLDRTEEDFNYYFTRNKKGNITESGLLFFVSLFLEKKDAIWMQQKLTGFKDNRESKKKMTHEVFCRRRMLLPKLRLESTQTQDWILLDMLNELIRCPKSLYERLQGVDREKFKVPFDPADEDYDAEQEPFKNTLVRHQDRFPYFALRYFDYNEVFTNLRFQIDLGTYHFSIYKKLIGGQKEDRHLTHKLYGFERIQEFAKQNRPDEWKAIVKDLDTYETSNERYISETTPHYHLENQKIGIRFKNGNNDIWPSLETNGENNEKRKYKLDKQYQAEAFLSVHELLPMMFYYLLLKKEKPNNDEINASIVEGFIKREIRDIYKLYDAFANGEINNIDDLEKYCEDKGIPKRHLPKQMVAILYDEHKDMVKEAKRKQKEMVKDTKKLLAALEKQTQEKTEDGGRNIRLLKSGEIARWLVNDMMRFQPVQKDNEGNPLNNSKANSTEYQMLQRSLALYNKEEKPTRYFRQVNLINSSNPHPFLKWTKWEECNNILSFYRSYLTKKIEFLNKLKPEDWEKNQYFLKLKEPKTNRETLVQGWKNGFNLPRGIFTEPIREWFKRHQNDSEEYEKVEALKRVGLVTKVIPLFFKEEYFKEDAQKEINNCVQPFYGFPYNVGNIHKPKEEDFLHREERIELWDKKKDKFKGYKAKKKFKEMTDKEKEEHRSYLEFKSWNQFERELRLVRNQDIVTWLLCMELIDKLKVEGLNVEELQKLRLKDIDTDTAKQEKNNILNRVMPMQLPVTVYEIDDSHNIVKDRPLHTVYIEETKTKLLKQGNFKALVKDRRLNGLFSFVDTSSEAE

SEQ ID NO: 1622 - protein, 1093 aa, Artificial
  Synthetic
MEKQSKYLFAAYLNMARHNAFITLSYISTSIGGTEGSEDNLSDMLPVRVLTDRKAEPEKIKRTMELLDKHFPFLKPMLNKELRPDEKSDKKEVGTMASPENYQTVLKTAFKELNSQRNQYTHFKHERKDFDRNLIEYMKNCFDGAKRVAKERFKLEDRDIEHLNRFRKKKENVDNKKSKYEEDPRFHYKFDDENGKLTDKGLAFFICLFLERKYAMLFLPQIHGFKQSGQKGIDEGKRATKKLFSIYSVQIPKLRIDSESSKMTLGIDMLNELKKCPDELFDLLSKEHQDRFRVSTDDKPKEKDGGEDEDLVLQKRYGNRFPYLALSYIDQQELFQNVRFQVSLGTYRYEFYGKQGVDNIERVRILQKKLHGFGRLDEIEKKRKEGWKALIRPFEKIEKDTADQLPYITDSYARYMISNNRVGMYWDIKDSNEAGDYLPKLTEEGAINKAPTCWLSIYELPALIFHSLLNKNGDKNCTQNIIREYARKYIKFFKDIQDGELKPSTKENIAKDIKEGYNIEFTQVPKELQDYLTGKKVNIDDRFEKLAEERIRQMLERGNRRIERIKRDITTIQDIKLNRVGKKRFVEIKSGVLADFLAEDLLLFQPTKDEGKDKLTGMNFQVLQATIAYYGRYKAEMKQIFKNCNLLDSAIAHPFLAKVMNKTHNDIVDFYTTYLIERGNYLSNCLKKQNYKNYHFLYPEREKWQQRNNDYYKKLAGKHLKLPIELPRGLFNDAIKKFLENNVSMQQALEKGRCNTVYLIQNYFEAVRKDSWQQFYDFKRCYKCFDLLHGIKKGNKLQSVYFSTAEFIAKLKTFDSDVDKYTNSQYNKEKERLRNAGKYRELKTFEEEKEVTIEKTKNKLTRLQKDFEKNEKLLRLSKVQDMLLFWMAKNILVDKVLELDEIEKYKLKDIMPDSEKDILSKQTSFSITLNLKDGIKKTIRQKQIKLKNFGNFFRFVRDRRIASLLPHIAADEIDRDTLEKELENYDDHRKEIFRFIHQFEEKVIKDKSLQETSPNFIKILEHCPEMKGINKKQMRLMRNAFCHNTYPSVKDLRQKEEKADEEMIQAESLLYEGASIPDIANRMKEIFEGLITN

SEQ ID NO: 1623 - protein, 1136 aa, Artificial
  Synthetic
METVNENKKRTPEDDSQYFGAYLNLARLNIYAINNHLAKEFKRAGLEEDGYIKNSFICNDNIKHLNYNYLFEKLVRLMPVVKQFDAARLPEKEREKAEAEGKSLVEMAKTLRAVFDDIQQFRNDYTHYYSVEWGDIRKVVISEETAGFLKKSFERAVEYTKVRFAGVLDESDFKAVEKKSLVTKSNTGKNRITTEGLVFLTSMFLDRENAFLFIGKVKGLKDTRYKPFIAMREALMAYCVKLPHDKLISDDPKKALFLDMLNELNRCPKQLYNVLDEDAKKEFRPALSDESLKNVFENSVDEEALDELGYQKYIELLTMRVRHDNRFYYHTMRFIDEQNLLPDFYFQIDLGKYILADYQKTILGEETPRIIMENAKAFGRLGSFTSPDEVGKQIDSNGLGKGFEQFAPHYNADFNKIGIAFKRDLPIVLKKEGSHIPCNLKQPHPEAFLSLHELSKIVLLECLEKGESLQLIKEHLGTADDKLFNIEFIEQIKSELPEWEVFRKQCDTKKAKAYSSRKTPSYPKERKEKLDEVLKPHGLNRKRIPERILNYWLNIEDVGAERSITERILLMKRDGLKRLKQLEKHRSNPEVGIPKVGEMATFIARDIVGMIIDKERKNKITPIYYDMMQGCLAYYADREKKRRFIGLVKELKLNESDGHPFLKNLDFEKIHKTSEFYKLYLEEKVYKQEKFFNYRKNKEQTKEVSWVTKTFEKKKRNEKAERLDTTFELPEDKSSLPYSIRQWEEKEEYDLRAWLRNIKKGRQSGDRKRPIDLPTDLFDERLRKLLSERLEEQGQTVKEGAKYKELFKCWWETKRGDNVQSFYNGTRCYTIKGEQVSFEPDSESSFVSYYRTPLNKAYKRLHAQREEEREKNKKLPSLREPDMEKVFKRTLSETERDIRMLAYQDCVLLLMAEQLGSGEETEHLKLSGINKELNKISDVKREFSYTPYYDELGKVPPKGAELPAVRLTVTAKMKLKNIKDLNRFAYDRRIPELVAYLPGAAIDADSLRHELTDYNKARQTVFDTVFRLEKEIVKKDHEGLIKLNVDDKGPLPGNIQHRPYMQWLINEEIISEDERFRLNMIRNCFSHNQFPHEVAIRNKDSMALPGIASKIAEQYEQRIAEIIEEINKKGGHNPDC

SEQ ID NO: 1624 - protein, 1125 aa, Artificial
  Synthetic
MEDDKKTTESTNMLDNKHFWAAFLNLARHNVYITVNHINKVLELKNKKDQDIIIDNDQDILAIKTHWEKVDGDLNKTERLRELMTKHFPFLETAIYTKNKEDKEEVKQEKQAKAQSFDSLKHCLFLFLEKLQEARNYYSHYKYSESTKEPMLEKELLKKMYNIFDDNIQLVIKDYQHNKDINPDEDFKHLDRTEEDFNYYFTRNKKGNITASGLLFFVSLFLEKKDAIWMQQKLRGFKDNRESKKKMTHEVFCRRRMLLPKLRLESTQTQDWILLDMLNELIRCPKSLYERLQGEDREKFKVPFDPADEDYDAEQEPFKNTLVRHQDRFPYFALRYFDYNEIFTNLRFQIDLGTYHFSIYKKLIGGQKEDRHLTHKLYGFERIQEFAKQNRPDEWKAIVKDLDTYETSNERYISETTPHYHLENQKIGIRFRNGNNDIWPSLETNGENNEKSKYKLDKQYQAEAFLSVHELLPMMFYYLLLKKEEPNNDKKNASIVEGFIKREIRDIYKLYDAFANGEINNIDDLEKYCEDKGIPKRHLPKQMVAILYDEPKDMVKEAKRKQKEMVKDTKKLLATLEKQTQGEIEDGGRNIRLLKSGEIARWLVNDMMRFQPVQKDNEGNPLNNSKANSTEYQMLQRSLALYNKEEKPTRYFRQVNLINSSNPHPFLKWTKWEECNNILSFYRSYLTKKIEFLNKLKPEDWEKNQYFLKLKEPKTNRKTLVQGWKNGFNLPRGIFTEPIREWFKRHQNDSKEYEKVEALKRVGLVTKVIPLFFKEEYFKEDAQKEMNNCVQPFYGFPYNVGNIHKPKEEDFLHREERRKLWDKKKDKFKGYKAKVKSKKLTDKEKEEYRSYLEFQSWNKFERELRLVRNQDIVTWLLCTELIDKMKVEGLNVEELQKLRLKDIDTDTAKQEKNNILNRIMPMQLPVTVYEIDDSHNIVKDRPLHTVYIEETKTKLLKQGNFKALVKDRRLNGLFSFVDTSSEADLKDKPISKSVVEYELGEYQNARIETIKDMLLLEETLIKKYKTLPTNKFSAMLNGWLEGKDEADKARFQNDVKLLVAVRNAFSHNQYPMRNRIAFANINPFSLSSADTSEEKKLDIANQLKDKTKETIEKIIEIEKPIETKE

SEQ ID NO: 1625 - protein, 1174 aa, Artificial
  Synthetic
MTEQNERPYNGTYYTLEDKHFWAAFFNLARHNAYITLAHIDRQLAYSKADITNDEDILFFKGQWKNLDNDLERKARLRSLILKHFSFLEGAAYGKKLFESQSSGNKSSKKKELTKKEKEELQANALSLDNLKSILFDFLQKLKDFRNYYSHYRHPESSELPMFDGNMLQRLYNVFDVSVQRVKRDHEHNDKVDPHRHFNHLVRKGKKDKYGNNDNPFFKHHFVDREEKVTEAGLLFFVSLFLEKRDAIWMQKKIRGFKGGTEAYQQMTNEVFCRSRISLPKLKLESLRTDDWMLLDMLNELVRCPKSLYDRLREEDRARFRVPVDILSDEDDTGGTEEDPFKNTLVRHQDRFPYFALRYFDLKKVFTSLRFHIDLGTYHFAIYKKNIGEQPEDRHLTRNLYGFGRIQDFAEEHRPEEWKRLVRDLDYFETGDKPYITQTTPHYHIEKGKIGLRFVPEGQHLWPSPEVGATRTGRSKYAQDKRLTAEAFLSVHELMPMMFYYFLLREKYSEEVSAEKVQGRIKRVIEDVYAVYDAFARDEINTRDELDACLADKGIRRGHLPRQMIAILSQEHKDMEEKVRKKLQEMIADTDHRLDMLDRQTDRKIRIGRKNAGLPKSGIIADWLVRDMMRFQPVAKDTSGKPLNNSKANSTEYRMLQRALALFGGEKERLTPYFRQMNLTGGNNPHPFLHETRWESHTNILSFYRSYLKARKAFLQSIGRSDRVESHRFLLLKEPKTDRQTLVAGWKSEFHLPRGIFTEAVRDCLIEMGYDEVGSYKEVGFMAKAVPLYFERACKDRVQPFYDYPFNVGNSLKPKKGRFLSKEKRAEEWESGKERFRDLEAWSHSAARRIEDAFVGIEYASWENKTKIEQLLQDLSLWKAFESKLKVKADKINIAKLKKEILEAKEHPYHDFKSWQKFERELRLVKNQDIITWMMCRDLMEENKVEGLDTGTLYLKDIRTDVQEQGSLNVLNRVKPMRLPVVVYRADSRGHVHKEAPLATVYIEERDTKLLKQGNFKSFVKDRRLNGLFSFVDTGGLAMEQYPISKLRVEYELAKYQTARVCAFEQTLELEESLLTRCPHLPDKNFRKMLESWSDPLLDKWPDLHRKVRLLIAVRNAFSHNQYPMYDEAVFSSIRKYDPSSLDAIEERMGLNIAHRLSEEVKQAKEMAERIIQV

SEQ ID NO: 1626 - protein, 1175 aa, Artificial
  Synthetic
MTEQNERPYNGTYYTLEDKHFWAAFFNLARHNAYITLAHIDRQLAYSKADITNDEDILFFKGQWKNLDNDLERKARLRSLILKHFSFLEGAAYGKKLFESQSSGNKSSKKKELTKKEKEELQANALSLDNLKSILFDFLQKLKDFRNYYSHYRHPESSELPMFDGNMLQRLYNVFDVSVQRVKRDHEHNDKVDPHRHFNHLVRKGKKDKYGNNDNPFFKHHFVDREEKVTEAGLLFFVSLFLEKRDAIWMQKKIRGFKGGTEAYQQMTNEVFCRSRISLPKLKLESLRTDDWMLLDMLNELVRCPKSLYDRLREEDRARFRVPVDILSDEDDTGGTEEDPFKNTLVRHQDRFPYFALRYFDLKKVFTSLRFHIDLGTYHFAIYKKNIGEQPEDRHLTRNLYGFGRIQDFAEEHRPEEWKRLVRDLDYFETGDKPYITQTTPHYHIEKGKIGLRFVPEGQHLWPSPEVGATRTGRSKYAQDKRLTAEAFLSVHELMPMMFYYFLLREKYSEEVSAEKVQGRIKRVIEDVYAVYDAFARDEINTRDELDACLADKGIRRGHLPRQMIAILSQEHKDMEEKVRKKLQEMIADTDHRLDMLDRQTDRKIRIGRKNAGLPKSGIIADWLVRDMMRFQPVAKDTSGKPLNNSKANSTEYRMLQRALALFGGEKERLTPYFRQMNLTGGNNPHPFLHETRWESHTNILSFYRSYLKARKAFLQSIGRSDRVESHRFLLLKEPKTDRQTLVAGWKSEFHLPRGIFTEAVRDCLIEMGYDEVGSYKEVGFMAKAVPLYFERACKDRVQPFYDYPFNVGNSLKPKKGRFLSKEKRAEEWESGKERFRDLEAWSHSAARRIEDAFVGIEYASWENKTKIEQLLQDLSLWKAFESKLKVKADKINIAKLKKEILEAKEHPYHDFKSWQKFERELRLVKNQDIITWMMCRDLMEENKVEGLDTGTLYLKDIRTDVQEQGSLNVLNRVKPMRLPVVVYRADSRGHVHKEEAPLATVYIEERDTKLLKQGNFKSFVKDRRLNGLFSFVDTGGLAMEQYPISKLRVEYELAKYQTARVCAFEQTLELEESLLTRCPHLPDKNFRKMLESWSDPLLDKWPDLHRKVRLLIAVRNAFSHNQYPMYDEAVFSSIRKYDPSSLDAIEERMGLNIAHRLSEEVKQAKEMAERIIQV

SEQ ID NO: 1627 - protein, 1231 aa, Artificial
  Synthetic
MENNPSNIFSKPTVSPKTRRSEGCEKPDSHSAELRPVYAAYLNMAQMNLFNTLKAIEGKLGIVTPDAKEDYMEGMKIVGFDKDKNIKEVEVRVKAFKELLKRIPVLQSLSGYQIKDDVKTVSFEDVAELLLAIVKIVHYYRNEYSHTHHYYTDAEKAEEADFEKRIMQPLDLAFKSAKRNMAKVHGYGKKELDFIDGNERQEVTGKGRDKKVKYYTDYYFRLGNDDFTRLSDVGIAFIVCKLLNKKYAIQFLQQSKIMTPRSQGGLSPFSQEENEVMANIFCAERIRLPKGRMEVESLDRKAALGLDMLNELQKCPKELFDTFCQDDKELFKVVQDEEEQQSDLEDGALMRRNDDRFPVLALRYIDEQKVLNGMAFQVSLGNYRYQFYNKTTIDPSDPNRVRILQKEINGFGPMHLVESKFKEKYGKDGFNLIRESQSEAPADTASTKPYLTDKRASYVIHNNRVCIMLKEKGSPLDKDCCYLPDLPVPKEENGTQKVNRSGDEKEKDWPHTCWLSIYDLPALVFLHLLGGNPGQVIRDYVGKIRSLLNDIAEEKCVPPCCDELSPTDGSQRKKTITKPKEVVDIWLKEQYNLPLSSVPEKIVDYLAGVSGGSMEEERHKAEDGFSKWAKSAVEKEIGDTELRQKRFQNDKKRVGSKANRIGKKSYVEIRPGRLADFLAKDIMKMQPADAEKNHCGKLTGQNYQIMQAAIATFKGDGRECRLTGLGELFVKAGLVGKDNQQKHPFLDKVLTNEITDTLDFYEKYLEEKKYYLEQLLCSEKYSEAYFLHGGLNDYKPKDRDYIKLLAGRYKDTFQLPDGLFADAISECLKKEDNVEIRNAAEGENRNNAAYLLRVYFTNKYDDDSQPFYFQTDGRFKRHYKVFDTIEGKKDATYRTVEEIRAMLRKGAADKAPVRRAIAEHLNTMQMPGKPQWINGKKKPSWREATPDEKKAEAKKCQMQLRYCQQNERAIRRYKAEDMLMFMMAKRLLLESDNVLKKGNLTGLEAFKLRDIKPIGCKNGPQDNILNQQIDFSAAIDLFVEEVVHYTDKKGEEGTRFKTVNKDKKVIRQSGLKIKNIGDFYRFIFDSRLGSLLSQIEGDTFEREMVEKELDTYDNRRKDGFKTAHEIERVIIGKNKEQIETRFKNEKAAGLESKKIVYNKFGELLKYCELTSDIQAKIVDIRNMLAHNKYMDNIERIVDKDDMTLPQVLEEIIEWLQDNSKKITHTDESTNT

SEQ ID NO: 1628 - protein, 1127 aa, Artificial
  Synthetic
LQKQDKLFVDRKKNAIFAFPKYITIMENKEKPEPIYYELTDKHFWAAFLNLARHNVYTTINHINRRLEIAELKDDGYMMGIKGSWNEQAKKLDKKVRLRDLIMKHFPFLEAAAYEMTNSKSPNNKEQREKEQSEALSLNNLKNVLFIFLEKLQVLRNYYSHYKYSEESPKPTFETSLLKNMYKVFDANVRLVKRDYMHHENIDMQRDFTHLNRKKQVGRTKNIIDSPNFHYHFADKEGNMTIAGLLFFVSLFLDKKDAIWMQKKLKGFKDGRNLREQMTNEVFCRSRISLPKLKLENVQTKDWMQLDMLNELVRCPKSLYERLREKDRESFKVPFDIFSDDYDAEEEPFKNTLVRHQDRFPYFVLRYFDLNEIFEQLRFQIDLGTYHFSIYNKRIGDEDEVRHLTHHLYGFARIQDFAPQNQPEEWRKLVKDLDHFETSQKPYISKTAPHYHLENEKIGIKFCSTHNNLFPSLKREKTCNGRSKFNLGTQFTAEAFLSVHELLPMMFYYLLLTKDYSRKESADKVEGIIRKEISNIYAIYDAFANGEINSIADLTCRLQKTNILQGHLPKQMISILEGRQKDMEKEAEHKIGEMIDDTQRRLDLLCKQTNQKIRIGKRNAGLLKSGKIADWLVSDMMRFQPVQKDTNNAPINNSKANSTEYRMLQHALALFGSESSRLKAYFRQMNLVGNANPHPFLAETQWEHQTNILSFYRNYLEARKKYLKGLKPQNWKQYQHFLILKVQKTNRNTLVTGWKNSFNLPRGIFTQPIREWFEKHNNSKRIYDQILSFGRVGFVAKAIPLYFAEECKDCVQPFYDYPFNVGNKLKPKKGQFLDKKDRVELWQKNKELFKNYPPEKRKTDLAYLDFLSWKKFERELRLIKNQDIVTWLMFKELFKTTTVEGLKIGEIHLRDIDTNTANEESNNILNRIMPMKLPVKTYETDNKGNILKERPLATFYIEETETKVLKQGNFKVLAKDRRLNGLLSFAETTDIDLEKNPITKLSVDHELIKYQTTRISIFEMTLGLEKKLIDKYSTLPTDSFRNMLERWLQCKANRPELKNYVNSLIAVRNAFSHNQYPMYDATLFAEVKKFTLFPSVDTKKIELNIAPQLLEIVGKAIKEIEKSENKN

SEQ ID NO: 1629 - protein, 1175 aa, Artificial
  Synthetic
MTEQNERPYNGTYYTLEDKHFWAAFFNLARHNAYITLAHIDRQLAYSKADITNDEDILFFKGQWKNLDNDLERKARLRSLILKHFSFLEGAAYGKKLFESQSSGNKSSKKKELTKKEKEELQANALSLDNLKSILFDFLQKLKDFRNYYSHYRHPESSELPLFDGNMLQRLYNVFDVSVQRVKRDHEHNDKVDPHRHFNHLVRKGKKDRYGNNDNPFFKHHFVDREGKVTEAGLLFFVSLFLEKRDAIWMQKKIRGFKGGTETYQQMTNEVFCRSRISLPKLKLESLRTDDWMLLDMLNELVRCPKSLYDRLREEDRARFRVPVDILSDEDDTDGTEEDPFKNTLVRHQDRFPYFALRYFDLKKVFTSLRFHIDLGTYHFAIYKKNIGEQPEDRHLTRNLYGFGRIQDFAEEHRPEEWKRLVRDLDYFETGDKPYITQTTPHYHIEKGKIGLRFVPEGQHLWPSPEVGATRTGRSKYAQDKRLTAEAFLSVHELMPMMFYYFLLREKYSEEASAEKVQGRIKRVIEDVYAVYDAFARDEINTRDELDACLADKGIRRGHLPRQMIAILSQEHKDMEEKIRKKLQEMMADTDHRLDMLDRQTDRKIRIGRKNAGLPKSGVIADWLVRDMMRFQPVAKDTSGKPLNNSKANSTEYRMLQRALALFGGEKERLTPYFRQMNLTGGNNPHPFLHETRWESHTNILSFYRSYLKARKAFLQSIGRSDRVENHRFLLLKEPKTDRQTLVAGWKSEFHLPRGIFTEAVRDCLIEMGHDEVASYKEVGFMAKAVPLYFERACKDRVQPFYDYPFNVGNSLKPKKGRFLSKEDRAEEWESGKERFRDLEAWSQSAARRIEDAFAGIENASRENKKKIEQLLQDLSLWKAFESKLKVRGDKINIAKLKKEILEAKEHPYHDFKSWQKFERELRLVKNQDIITWMMCRDLMEENKVEGLDTGTLYLKDIRTEVQEQGSLNVLNRVKPMRLPVVVYRADSRGHVHKEQAPLATVYIEERDTKLLKQGNFKSFVKDRRLNGLFSFVDTGGLAMEQYPISKLRVEYELAKYQTARVCAFEQTLELEESLLTRYPHLPDKNFRKMLESWSDPLLDKWPDLQREVRLLIAVRNAFSHNQYPMYDEAVFSSIRKYDPSSPDAIEERMGLNIAHRLSEEVKQAKEMAERIIQA

SEQ ID NO: 1630 - protein, 1149 aa, Artificial; identical to SEQ ID NO: 1383
  Synthetic

SEQ ID NO: 1631 - protein, 1145 aa, Artificial
  Synthetic
METLTIPEVIKCRTLSDDPQYFGGYLNMARLNIFNISNHIAKEFDLPLLAEEGHLKNSFLCKKEHNKVNWNHVYSRTKRFLAVLKVFDAETLPKEEQKTINWEGKDFASMSDILKIVFGELQEFRNDYSHYYSTEKGTIRKTAVSAEMALFLTTNFRRAIEYTKERFKGVLNDEDYQLVASKKVLEANSTITTEGLVFLISMFLEREYAFRFIGIITGLKGTQNNSFIATREVLMAFCLKLPHDRFQSDNPRQAFSLDLINELNRCPKVLYNAITEEGKQKLRSIPGELENKNLHDNNTKKEAKIEAEAYELYIESLTRQIRYSNRFPDFALKFIDETDIFSEFRFQIDLGKLLVDEYLKFFNGEHVQRRIVENAKAFGKLIDFNDEAKVMTRIGNGHFSKRFEQFAPFYNTEDNKIGISRHHVTAKLGPDSKGEPEKKLLQPLPEAFLSLHELPKVILLDYLQKGEPEKLINDFILINNSKLMNMSFIEAVKTQLPPEWDEFQRRTGSKNEMPYNEKTLAYLLQRKQILNKILAEFQLNDKQIPGRILDYWLNIADVEEERAVSDRIKSIKRDCMSRLRALGKFKIDRNRNKIPKIGEMATFLAKDIVDMVVSEGKKHKITSFYYEKMQDCLSLFADPLKRQLFIHIITNELRLNDSGGHPFLFKLNMRQINCTSDFYEIYLQEKGHKMVPEKNLKTGKVVNTDHSWMALTFYKLEFNDKVDKLMTVVKLPLNKLNLPFTLRQLNAKTTYTLEQWLKNLTLGKKPDDGKHPVNLPTNLFDEKLSDLLRQDLDNNKIAYRPYANWNELFKIWWISRNDSLQRFYNAEREYHIFNEKVNFYPNRKENFADYYQHAVKVAFQKKRNERIIEQRINKYLPDILFEQVEKTFKHTIAETEKEIRILQEEDRIMLLMLEGLMEDGNKQQLKLSEIKTLQNATINIRQLVPGKLSFDDSGEAIKDSTNPEIVRTVSVSIKRIEYNLLPKYVADGRLPELFEYFPDEEIQMERLKTEFDTYNKVRQVVLDLSFKLEKMIIEKGHKDRINQLCTGATGELLTGNICHHTYLTWLKDKEMIDNETFIFMNMVQHCFSHNQYPQKKTMERIINHWEPDRFALTIAATYNQKIAGILEDIGTFPFIRSRKTMPDVV

SEQ ID NO: 1632 - protein, 1003 aa, Artificial
  Synthetic
MGAIENKHIFAAYANLAIDGLIKTLNFIAKKLDTQKQLSSWDIKHVITLIDSIFDQNPQNNLEQIVEGYLPWIKPIIEMKTPKKGERQSDKLCIEYKTIITAFASLLNDVRNYYTHYYHDPICIYPGGYDIPSSLNCIYDSAINIIKERFQAEEKEMEHLRRYTRKKGRVVLKTEDDHFYYTLANNNDLSEKGYAFFISMFLERKYSYLFLKKLSGFKRGDSLQYRLTLEVFTALSTKPPVERLRTTKDTKQDRALDILNELSKIPIELYQTLEPKYREMYNETLQPTDAEDPYGLPDRSRIRFRSRFETFALHFLDKQADFKEIGFYTYLGNYFHNGYQKTRVDRETKDRYINFQLAGFCKNIQDISAKKLSEALNVKSIDISTDSIPDINSFEPYLVQSMPHYIVNGNNIGIKVLPEGKDTYPTIDEKGAKMPIADFWLSKYELPAMLFYTYLRNNNIHKSHCPLSVKDIIERSIHKSTKQKHPEERSELMLRRVMKAIFWTDSKLNEVERIKSQKSAFGKRQHEILKAGRIAEMLVRDMLWLQPSKNNGRDKVTEPNFQAIQVSLAYFGIRRNDLTEIFTRAGLINSSNPHPFLAQIGTNYTSLIEFYIAYLKERKVYFSRIQKKILQGKLNIQCHPLRDLQREPNKPQEKEEAIFLPRGLFNEAIINCLKKSKLKQLIESPTREKSPALNVSYLIQNYFRTYFEDQSQEFYAQPRNYRLFDKLSPNKGKSKSYLSLEQRIKKMEELRPSKIPVAEANKLLEKEDRLYRKNYNEICDNESIIRLYQIQDILLFMMTKEYLPSDLYNRINKYKLENVKGILNERVSYLIDLNPLKIQGEDIKIKDYGKLFYIHHDTRISSLNKVLSKVKRNNSISSSVKIQPYENYKRECLDFEEAQIQIIPIIHSFEIAMVSMFPDLKKATPGNYYDFNELITEYEKRTKQKIDSSFLIKTRNMFLHDKYEAECIKEISDDFVYAKKIIAEFKMKIENIKLEDLSNDSSA

SEQ ID NO: 1633 - protein, 1175 aa, Artificial
  Synthetic
MTEQNERPYNGTYYTLEDKHFWAAFLNLARHNAYITLAHIDRQLAYSKADITNDEDILFFKGQWKNLDNDLERKARLRSLILKHFSFLEGAAYGKKLFESQSSGNKSSKKKELTKKEKEELQANALSLDNLKSILFDFLQKLKDFRNYYSHYRHPESSELPMFDGNMLQRLYNVFDVSVQRVKRDHEHNDKVDPHRHFNHLVRKGKKDRCGNNDNPFFKHHFVDREGTVTEAGLLFFVSLFLEKRDAIWMQKKIRGFKGGTEAYQQMTNEVFCRSRISLPKLKLESLRTDDWMLLDMLNELVRCPKSLYDRLREEDRARFRVPVDILSDEDDTGGTEEDPFKNTLVRHQDRFPYFALRYFDLKKVFTSLRFHIDLGTYHFAIYKKNIGEQPEDRHLTRNLYGFGRIQDFAEEHRPEEWKRLVRDLDYFETGDKPYITQTTPHYHIEKGKIGLRFVPEGQHLWPSPEVGATRTGRSKYAQDKRFTAEAFLSVHELMPMMFYYFLLREKYSDEASAERVQGRIKRVIEDVYAVYDAFARGEIDTRDELDACLADKGIRRGHLPRQMIAILSQEHKDMEEKVRKKLQEMIADTDHRLDMLDRQTDRKIRIGRKNAGLPKSGVIADWLVRDMMRFQPVAKDTSGKPLNNSKANSTEYRMLQRALALFGGEKERLTPYFRQMNLTGGNNPHPFLHETRWESHTNILSFYRSYLKARKAFLQSIGRSDREENHRFLLLKEPKTDRQTLVAGWKSEFHLPRGIFTEAVRDCLIEMGYDEVGSYKEVGFMAKAVPLYFERACKDRVQPFYDYPFNVGNSLKPKKGRFLSKEKRAEEWESGKERFRDLEAWSHSAARRIEDAFVGIEYASWENKKKIEQLLQDLSLWETFESKLKVKADKINIAKLKKEILEAKEHPYLDFKSWQKFERELRLVKNQDIITWMMCRDLMEENKVEGLDTGTLYLKDIRTEVQEQGSLNVLNRVKPMRLPVVVYRADSRGHVHKEQAPLATVYIEERDTKLLKQGNFKSFVKDRRLNGLFSFVDTGALAMEQYPISKLRVEYELAKYQTARVCAFEQTLELEESLLTRYPHLPDESFREMLESWSDPLLDKWPDLQREVRLLIAVRNAFSHNQYPMYDETIFSSIRKYDPSSPDAIEERMGLNIAHRLSEEVKQAKEMAERIIQA

SEQ ID NO: 1634 - protein, 1119 aa, Artificial
  Synthetic
MTEQNERPYNGTYYTLEDKHFWAAFLNLARHNAYITLTHIDRQLAYSKADITNDEDILFFKGQWKNLDNDLERKARLRSLILKHFSFLEGAAYGKKLFESQSSGNKSSKKKELTKKEKEELQANALSLDNLKSILFDFLQKLKDFRNYYSHYRHPESSELPLFDGNMLQRLYNVFDVSVQRVKRDHEHNDKVDPHRHFNHLVRKGKKDKYGNNDNPFFKHHFVDREEKVTEAGLLFFVSLFLEKRDAIWMQKKIRGFKGGTEAYQQMTNEVFCRSRISLPKLKLESLRTDDWMLLDMLNELVRCPKSLYDRLREEDRARFRVPVDILSDEDDTDGTEEDPFKNTLVRHQDRFPYFALRYFDLKKVFTSLRFHIDLGTYHFAIYKKNIGEQPEDRHLTRNLYGFGRIQDFAEEHRPEEWKRLVRDLDYFETGDKPYITQTTPHYHIEKGKIGLRFVPEGQLLWPSPEVGATRTGRSKYAQDKRFTAEAFLSVHELMPMMFYYFLLREKYSEEVSAEKVQGRIKRVIEDVYAVYDAFARDEINTRDELDACLADKGIRRGHLPRQMIAILSQEHKDMEEKVRKKLQEMIADTDRRLDMLDRQTDRKIRIGRKNAGLPKSGVIADWLVRDMMRFQPVAKDTSGKPLNNSKANSTEYRMLQRTLALFGGEKERLTPYFRQMNLTGGNNPHPFLHETRWESHTNILSFYRSYLKARKAFLQSIGRSDRVENHRFLLLKEPKTDRQTLVAGWKGEFHLPRGIFTEAVRDCLIEMGHDEVASYKEVGFMAKAVPLYFERASKDRVQPFYNYPFNVGNSLKPKKGRFLSKEERAEEWESGKERFRLAKLKKEILEAKEHPYLDFKSWQKFERELRLVKNQDIITWMMCRKLVEENKVEGLDTGTLYLKDIRTDVQEQGNLNVLNRVKPMRLPVVVYRADSRGHVHKEQAPLATVYIEERDTKLLKQGNFKSFVKDRRLNGLFSFVDTGGLAMEQYPISKLRVEYELAKYQTARVYVFEQTLELEESLLTRYPHLPDKSFREMLESWSDPLLDKWPDLQRKVRLLIAVRNAFSHNQYPMYDEAVFSPIRKYDPSSPDAIEERMGLNIAHRLSGEVKLAKEMVERIIQA

SEQ ID NO: 1635 - protein, 1300 aa, Artificial
  Synthetic
MCIFAKLNIQMPSNNNSLNQFITTMDNNETSIKQFVLLGEDNSQYRDYAGSYFTKANLNFYRTMKTVFRRSGIMKDNRLGNVEWRDDNMETALSSFDITTISATQMSSLSDHLFRNLPMFGPIMSHDKNAFLSPLKRAKKTFDKAKKDLKNAKKTHQDEVKYEKLKKEAEKEYNQQKENFKNEMYGTEAKDMWDKLINIAGALLYYRNLYTHKNPYSTEDDENKQKEREIKIAKWMNSVFEGEKGILIERKKYKYEDTLFLIDHQKETDRMEKRGNKYVERDNFYFKIKILDENNKCLGLTDFGRFFFCSLFLRRSDSELYAKSVKLFENSPYCLTEQELKIKQAEENKRASTESQKSDHQVNPKTIDKTESAQINIIREMMQMHRIRIPREKKIDFTPSESMLLMDILNELRRCPQELYDTFNQTDKLKFVVDNPNEDPESDSKITLTRSKDRFAHLALRLIDHTDALGSIRFHLRLGLFRFRFYDKKLIDNSETLRRVHKEINGFGKWHVVESLRREKWGKYNQKFELNDDGLLQFVPDSAESDPYITDWQTTYNIHANRIGLFWNGNSQSEDYYIPELKTMVDENSKVIAPVEMKIPLCSLSIYDLPAILFYTYIFNLYNGNRLGLPNAEKIIKNKYTALNEFFGFAKKSESTPEELIKKQEELNLHDSEIPERLLYLMGKIKTPKGKMAEWKPNSKRNNHAKELLKKIIEEDEWRIKSFKDKKNKIEDKNRYGRKDYSDIRHGVLAKYLVESMMMWQPGKQKAETKISSANYRALRDYLSNYNNSSNNLQYVLEAAHLIDSENPHPFIDKVKGSNIELYYTNYLHEELKHARGILAKLEDNNYTGDKKDIIPPFAKPESDKWNKKSNTIQSCAAKYLEHPLQLPDGLFTQAIIDLLKAADIDETIKNDATKDSNATYIIRYWFDKVGQDSPQLFYDSTLFKRSYKFIDKCFLQKDEGNQTIKHFLTEKEILDNIKIFRGETGSLAGKLYPKDKLEESKKSIINQLNEVKDKEKAIRRYRVQDIALFLLARKRLAELLSKSENSNRNEARIETSLSQNNISKKANNLKLKDFGFDEDFHFLSGSEDNGDGLLFEYEYIVDNDANKKIMIVQEGLSLKNYGNIYRVLGDNRIKTLMQLLYEIKKDKVEDGTITFTFAELVKELTNNDKLHHEFYRLFQNIEQEAYDGTGGFDANKKNKEVLDNPDDEQFFFVRQRKNGEVTTKEAVRNSFKKLIELLKQYSTDEGIIVQLRNDAIHDRYPKPDAEMELKETGVTESLIAYLNNLIKKNQKQLKNQEQR

SEQ ID NO: 1636 - protein, 1171 aa, Artificial; identical to SEQ ID NO: 1349
  Synthetic

SEQ ID NO: 1637 - protein, 1310 aa, Artificial
  Synthetic
MGKDYKTQQPKKVRRQQKTNFSINLTGKHVFGAYFNMARTNFVKTINYIMSIAGIRGSYSESQINKMLHALFLIQAGRSGELTKEQRQWEKKLRLNTEQQTRLQKLLFKHFPVLGPMMADVADHKAFLNKKKSKVQTEEDKFAQLKGVSLADCLDVICLMADALTECRNFYTHKAPYNAPSQLAAQYQHQEMIAKKLDKVVVACRRVLKDREGLSVNEVEFLTGIDHLHQEVVKDESGNVKKKNGKVMKTFVDYDDFYFKISGKRLVKGFTVAVKDDKPVNIDTMLPALSDFGLLYFCVLFLSKPYAKLFIDEVRLFEFSPFTDTENMIMSEMLSIYRIRTPRLHKIDSRDNKATLAMDIFGELRRCPIELYELLDKNMGQPFFHDEVKHPNSHTPEVSKRLRYNDRFPTLALRYIDETELFKRIRFQLQLGAFRYRFYDKEDCIDGIVRVRRIQKDINGYGRLQEVADKRIEKWGDLIQKREEHAVKLEHEELYIDLDQFVEDTADSIPYVTDRRPSYNIHANRIGLYWEDSQNPKSYKIFDENGMYIPELVVTEDEKAPIKMPAPRCTLSVYDLSAMLFYEYLHEHQDVDTPSAERIIIDCEDDYRRFFKAVAEGTLTPFKKTKEFREYLEREYPKLRMADIPEKLQLYLTSKGLTHDNKPETVHERMIRLTREHLEEREIHVQRRLEHYQEDRKMIGEKENKYGKKSFADVRHGTLARYLAQSMMEWQPTKLKDKEKGHDKLTGLNYNVLTAYLATYGHPQVSEDDFVPLTLEQVLTNAHLLGGNNPHPFIGKVLALGNRNIEELYLHYLEEELKHIRSRKQSLLSNPSDKALSALPFVHYDRVRFHERTDEEMRALAARYTTIQLPDGLFTPYILEILKKHYTENTELQNALRQDAPSKINPTNNAAYLITLFYKTVLKDDAQPFYISGKAYTRNKDGEKAEAFSFKRSYELFSVLNNNKKKTFPYELLPLFLTSDEIQERLSAKLLDDNGNPIPEAGKRGKPATDIQGNTIWQRQIKQKINGYVNSLSDKDLKISMNQSWKKKEEERAAKREAMQSRLTKQINEVKGNERTLRRYKTQDMVSFLMAKELFATIISDQGNEVNWKQMRLSKVCNEAFLRQTLTFRVPVTVGNTTIYVEQENMSLKNYGEFYRFLTDDRLMSLLNNIVETLKPNEDGELVIRHTDLMSELAAYDQYRSTIFKLIQNIEDLIIKENAALNDPDADGFWVRKDLPKRNNFASLLELLNQLNNVDLTDDERKLLVAIRNAFSHNSYNIDFSLIRNVKHLPEVAKGILQHLQSVLGVEITK

SEQ ID NO: 1638 - protein, 1181 aa, Artificial
  Synthetic
METKNKIDNEKTLQNNPEYFGSYLNMARHNIFLLINHLTKTFKYLPFELLKDDEDISKVEKNILLNVFDISKKEYEDERQKVYNYLIKRHHLPIIKYLGKIEGNDLVDFDKIHQFITIAFQEVNNYRNDYTHFLAIDDNNNVSPRKLDIDEKIKTDTKLLFENAPSVSYLRNFETQKEDDYKHILSNYSLFSNENVFTEHGLYFFINLFLERKYAIKLLKKIRGFKNETTPSFRATLQVFTSYCIKLPDTRLGNEFPKQTILMEMLSELNKCPKELFNHLTVGDKEKFEPKMNEEQKINILLNSVNYEDIDDEDLDTIVKDIISLKRYEDRFPNFALRFLEETNAFEQIRFQITLGKLVIKRYDKTINGIEQDRRVIKTINAFGKLSDFIGKEDEILKLIKQGIEDENIVFEQYSPHYNMNNNKIGFKIFDEESEKLQLPFVFKNKREESEFQNNPSGFISIHDLHKIVLSDLLTNNNHLAEKKIIEFVNDSNSKIFDISILNEIKEKVHYVPESFTKRNFDKKKMQERGDKKVHFVSEQKEKALLKKHKLSREQLLAMSKDDFKNKTKNKKELETFSQIKYHNYLEQRRVELQKHLPSSILVNQLPERLIDYLMNITEVDSEKRIHLKIRDIKDEAKLLLKESKSEPEEGQIIKLGEYATFIARDILNMIIDKDVKQKITQPYYNKIQNKISFFSINKEELIAIFNELQIFDTIKGHVFLKINHISNSKGLKEFYTTYLEAKKSWIKEKLLKGGKTGGYRLNNYGVKLPYSFTIIKIQCEEFNFNKWLANKNLLPVNIPNSLLDNFVNNELKKKLTLGKTDFNQTDTLSVLLRKMIIKDTQPYYDYDREYNLNKKSILVKGVNGLTSKEIKSKYDKNVEANEKIIRFYQTRDRILKLMCDFLISEDKTIGLQNEFLLKNIYPNSEISILDNTASFKQQLRKEVEVGDLYFTVVAEDTEKQIANINAWKKLEANQRKKWTDLKTKEEQELFLQNCNEDEKLIYHGQKGYQWTFKDYGRFKRFVKDKRLVDLSKYFETTIIPFDLLEYQIMEYDRIREKVFELVFKLEKAIFEKDSEGLITIELNKRPKDFNQVQFDVYLSWLQQKNISFSKNIVKWSRNKFSHTEFPNFDSIPRITNEQIEDFNYYKNVFGGKDHINISIAQKIIVEFESEINNIIAQINR

SEQ ID NO: 1639 - protein, 1175 aa, Artificial
  Synthetic
MTEQNERPYNGTCYTLEDKHFWAAFLNLARHNAYITLAHIDRQLAYSKADITNDEDILFFKGQWKNLDNDLERKARLRSLILKHFSFLEGAAYGKKLFESQSSGNKSSKKKELTKKEKEELQANALSLDNLKSILFDFLQKLKDFRNYYSHYRHPESSELPLFDGNMLQRLYNVFDVSVQRVKRDHEHNDKVDPHRHFNHLVRKGKKDRYGNNDNPFFKHHFVDREEKVTEAGLLFFVSLFLEKRDAIWMQKKIRGFKGGTETYQQMTNEVFCRSRISLPKLKLESLRTDDWMLLDMLNELVRCPKSLYDRLREEDRARFRVPVDILSDEDDTDGTEEDPFKNTLVRHQDRFPYFALRYFDLKKVFTSLRFHIDLGTYHFAIYKKNIGEQPEDRHLTRNLYGFGRIQDFAEEHRPEEWKRLVRDLDYFETGDKPYITQTTPHYHIEKGKIGLRFVPEGQHLWPSPEVGATRTGRSKYAQDKRLTAEAFLSVHELMPMMFYYFLLREKYSEEASAEKVQGRIKRVIEDVYAVYDAFARDEINTRDELDACLADKGIRRGHLPRQMIAILSQEHKDMEEKVRKKLQEMIADTDHRLDMLDRQTDRKIRIGRKNAGLPKSGVIADWLVRDMMRFQPVAKDTSGKPLNNSKANSTEYRMLQRALALFGGEKERLTPYFRQMNLTGGNNPHPFLHETRWESHTNILSFYRSYLKARKAFLQSIGRSDRVENHRFLLLKEPKTDRQTLVAGWKGEFHLPRGIFTEAVRDCLIEMGYDEVGSYKEVGFMAKAVPLYFERASKDRVQPFYDYPFNVGNSLKPKKGRFLSKEKRAEEWESGKERFRDLEAWSHSAARRIEDAFVGIEYASRENKKKIEQLLQDLSLWKAFESKLKVKADKINIAKLKKEILEAKEHPYHDFKSWQKFERELRLVKNQDIITWMMCRDLMEENKVEGLDTGTLYLKDIRTDVHEQGSLNVLNRVKPMRLPVVVYRADSRGHVHKEQAPLATVYIEERDTKLLKQGNFKSFVKDRRLNGLFSFVDTGGLAMEQYPISKLRVEYELAKYQTARVCAFEQTLELEESLLTRYPHLPDKNFRKMLESWSDPLLDKWPDLHGNVRLLIAVRNAFSHNQYPMYDEAVFSSIRKYDPSSPDAIEERMGLNIAHRLSEEVKQAKEMVERIIQV

SEQ ID NO: 1640 - protein, 1175 aa, Artificial
  Synthetic
MTEQNERPYNGTYYTLEDKHFWAAFFNLARHNAYITLAHIDRQLAYSKADITNDEDILFFKGQWKNLDNDLERKARLRSLILKHFSFLEGAAYGKKLFESQSSGNKSSKKKELTKKEKEELQANALSLDNLKSILFDFLQKLKDFRNYYSHYRHPESSELPLFDGNMLQRLYNVFDVSVQRVKRDHEHNDKVDPHRHFNHLVRKGKKDRCGNNDNPFFKHHFVDREGTVTEAGLLFFVSLFLEKRDAIWMQKKIRGFKGGTETYQQMTNEVFCRSRISLPKLKLESLRTDDWMLLDMLNELVRCPKSLYDRLREEDRARFRVPVDILSDEDDTDGTEEDPFKNTLVRHQDRFPYFALRYFDLKKVFTSLRFHIDLGTYHFAIYKKNIGEQPEDRHLTRNLYGFGRIQDFAEEHRPEEWKRLVRDLDYFETGDKPYITQTTPHYHIEKGKIGLRFVPEGQHLWPSPEVGATRTGRSKYAQDKRLTAEAFLSVHELMPMMFYYFLLREKYSEEVSAEKVQGRIKRVIEDVYAVYDAFARGEIDTLDRLDACLADKGIRRGHLPRQMIAILSQEHKDMEEKVRKKLQEMIADTDHRLDMLDRQTDRKIRIGRKNAGLPKSGVIADWLVRDMMRFQPVAKDTSGKPLNNSKANSTEYRMLQRALALFGGEKERLTPYFRQMNLTGGNNPHPFLHETRWESHTNILSFYRSYLKARKAFLQSIGRSDRVENHRFLLLKEPKTDRQTLVAGWKGEFHLPRGIFTEAVRDCLIEMGLDEVGSYKEVGFMAKAVPLYFDRACKDRVQPFYNYPFNVGNSLKPKKGRFLSKEKRAEEWESGKERFRDLEAWSHGAARRIEDAFVGIEYASPGNKKKIEQLLQDLSLWETFESKLKVKADKINIAKLKKEILEAKEHPYLDFKSWQKFERELRLVKNQDIITWMMCRDLMEENKVEGLDTGTLYLKDIRTDVHEQGSLNVLNRVKPMRLPVVVYRADSRGHVHKEQAPLATVYIEERDTKLLKQGNFKSFVKDRRLNGLFSFVDTGALAMEQYPISKLRVEYELAKYQTARVCAFEQTLELEESLLTRYPHLPDKNFRKMLESWSDPLLDKWPDLHGNVRLLIAVRNAFSHNQYPMYDETLFSSIRKYDPSSPDAIEERMGLNIAHRLSEEVKQAKEMAERIIQA

SEQ ID NO: 1641 - protein, 1216 aa, Artificial; identical to SEQ ID NO: 1581
  Synthetic

SEQ ID NO: 1642 - protein, 1119 aa, Artificial
  Synthetic
MTEQNERPYNGTYYTLEDKHFWAAFFNLARHNAYITLAHIDRQLAYSKADITNDEDILFFKGQWKNLDNDLERKARLRSLILKHFSFLEGAAYGKKLFESQSSGNKSSKKKELTKKEKEELQANALSLDNLKSILFDFLQKLKDFRNYYSHYRHPESSELPLFDGNMLQRLYNVFDVSVQRVKRDHEHNDKVDPHCHFNHLVRKGKKDRCGNNDNPFFKHHFVDREEKVTEAGLLFFVSLFLEKRDAIWMQKKIRGFKGGTEAYQQMTNEVFCRSRISLPKLKLESLRTDDWMLLDMLNELVRCPKSLYDRLREEDRARFRVPIDILSDEDDTDGAEEDPFKNTLVRHQDRFPYFALRYFDLKKVFTSLRFHIDLGTYHFAIYKKNIGEQPEDRHLTRNLYGFGRIQDFAEEHRPEEWKRLVRDLDYFETGDKPYITQTTPHYHIEKGKIGLRFVPEGQHLWPSPEVGATRTGRSKYAQDKRLTAEAFLSVHELMPMMFYYFLLREKYSDEASAERVQGRIKRVIEDVYAVYDAFARDEINTRDELDACLADKGIRRGHLPRQMIAILSQEHKDMEEKVRKKLQEMIADTDHRLDMLDRQTDRKIRIGRKNAGLPKSGVIADWLVRDMMRFQPVAKDTSGKPLNNSKANSTEYRMLQRALALFGGEKERLTPYFRQMNLTGGNNPHPFLHETRWESHTNILSFYRSYLKARKAFLQSIGRSDRVENHRFLLLKEPKTDRQTLVAGWKSEFHLPRGIFTEAVRDCLIEMGHDEVGSYKEVGFMAKAVPLYFERACKDRVQPFYDYPFNVGNSLKPKKGRFLSKEDRAEEWESGKERFRLAKLKKEILEAKEHPYHDFKSWQKFERELRLVKNQDIITWMMCRDLMEENKVEGLDTGTLYLKDIRTDVQEQGSLNVLNRVKPMRLPVVVYRADSRGHVHKEEAPLATVYIEERDTKLLKQGNFKSFVKDRRLNGLFSFVDTGALAMEQYPISKLRVEYELAKYQTARVCAFEQTLELEESLLTRYPHLPDESFREMLESWSDPLLDKWPDLHRKVRLLIAVRNAFSHNQYPMYDEAVFSSIRKYDPSSPDAIEERMGLNIAHRLSEEVKQAKEMAERIIQA

SEQ ID NO: 1643 - protein, 1175 aa, Artificial; identical to SEQ ID NO: 1402
  Synthetic

SEQ ID NO: 1644 - protein, 1168 aa, Artificial; identical to SEQ ID NO: 1357
  Synthetic

SEQ ID NO: 1645 - protein, 1265 aa, Artificial
  Synthetic
MTNNRNNKGGNSAYRNNKSNPDYEKLIPVPFLANDKPVWANYLNMARQNIYITLCHITRVLGLPLTESSNLEATLMQIPVITLLNKDNGKAEQKEKAIRMLDKHFPFLTPMVEKYIMLTCKDRQSKDKTPKVYYEVFSIILPLINLLRNKYTHYRLEDKMLDNKENIIDKSILKNMAILSQLLSYCFVGATRITKERFGAKSNAEGGTLNERDFYFLNGLTPRENPWRYYQAYKKDKEGNTIKTRKPNGQEIATKMTYERADFKYAIYNLKDANGMPLKERRLTNVGLLMLVCLFLEKRYASEFADQTEFFTRRNTKTYKPEQSEVTIMREIISVYRMRLPKERMQSTRDNSALGLDMLNELKKCPRPLFDTLSPADQNLFRVAVTENENTQNDETIENGMMLMLRRTDRFPSLALRFIDTNQVFKSIRFQVHLGNYRYKFYEKKWIDGNDGKDRVRILQKELNGFGRLDEIEVTRNNKWGDLIRKIDQPREDTFETAPYVTDHHATYLFNNNRIGLLWNTQDHIALSNGIYLPSLLEKNRILSEDEKLKDLKDQHGNGIAECVEPMCWLSVYDIPAAIFLIHLLHKNGQTFESAGKTVEDIIKATYNNYQQFLKGIAGGTITSMDDLQTQGIGIKPCDIPVKLREYLNGKQTNIKEDFVYLGYERLLDMYERNEKRLERFQRDNDTYGSKENKIGKKAYIDIRPGTLARHIADDIMFFVPTDKNNNKVRITGQNFNIMQAAIAQYTGNIVQLRTLLQKGEIINCERQHPFMHKVLATKPCSFAALYTAYLKAKRAYLANLIKEYQKARKKTNDIKTLKKQFVKDYSKLAALSFLHVDRQKWAERNEDYYKQLAERYATIELPHGIFLNAIHDAIMQLPESKNMDIDKEKDNVSGLILKYFKASGDASQPFYGNKFKRNYKYLDMMVKPEWSYSGPQPSLEKHYYSISEMANMQKQWGQTKELREKRVAVYAKAVDKKTNHLLEKARAKFGNDIRKLERREKSIQRECNEEKKAAIEKLQHCRTSYSANEREIRRYKVQDILIFLMAIDHLTAAMGTKGNFSSYKLRNIGCASESSDILSMLMPFSMTLEIPSLIKDEPAKVITIKQDDLKLKNYGDFFRFIYDRRIRTLLQNVKENEFTRQQIEEELECYNRMRIPVFKQVLSTEEKIWKQLPSEQLHKKADDKEHPVNIDFKYLMQFVNIKESNIEIIKAIRNAFSHNQYPTDSAVARLVFDKKQIPELAKEITKLLHNKTNQINLKDMEDKQ

SEQ ID NO: 1646 - protein, 1146 aa, Artificial; identical to SEQ ID NO: 1461
  Synthetic

SEQ ID NO: 1647 - protein, 1119 aa, Artificial
  Synthetic
MTEQNERPYNGTYYTLEDKHFWAAFFNLARHNAYITLTHIDRQLAYSKADITNDEDILFFKGQWKNLDNDLERKARLRSLILKHFSFLEGAAYGKKLFESQSSGNKSSKKKELTKKEKEELQANALSLDNLKSILFDFLQKLKDFRNYYSHYRHPESSELPLFDGNMLQRLYNVFDVSVQRVKRDHEHNDKVDPHRHFNHLVRKGKKDRYGNNDNPFFKHHFVDREEKVTEAGLLFFVSLFLEKRDAIWMQKKIRGFKGGTEAYQQMTNEVFCRSRISLPKLKLESLRTDDWMLLDMLNELVRCPKSLYDRLREEDRACFRVPVDILSDEDDTDGAEEDPFKNTLVRHQDRFPYFALRYFDLKKVFTSLRFHIDLGTYHFAIYKKNIGEQPEDRHLTRNLYGFGRIQDFAEEHRPEEWKRLVRDLDYFETGDKPYITQTTPHYHIEKGKIGLRFVPEGQHLWPSPEVGATRTGRSKYAQDKRLTAEAFLSVHELMPMMFYYFLLREKYSDEASAERVQGRIKRVIEDVYAVYDAFARDEINTRDELDACLADKGIRRGHLPRQMIGILSQEHKDMEEKVRKKLQEMIADTDHRLDMLDRQTDRKIRIGRKNAGLPKSGVIADWLVRDMMRFQPVAKDTSGKPLNNSKANSTEYRMLQRALALFGGEKERLTPYFRQMNLTGGNNPHPFLHETRWESHTNILSFYRSYLKARKAFLQSIGRSDRVENHRFLLLKEPKTDRQTLVAGWKGEFHLPRGIFTEAVRDCLIEMGLDEVGSYKEVGFMAKAVPLYFERACKDWVQPFYNYPFNVGNSLKPKKGRFLSKEKRAEEWESGKERFRLAKLKKEILEAKEHPYLDFKSWQKFERELRLVKNQDIITWMICRDLMEENKVEGLDTGTLYLKDIRTDVQEQGSLNVLNRVKPMRLPVVVYRADSRGHVHKEQAPLATVYIEERDTKLLKQGNFKSFVKDRRLNGLFSFVDTGALAMEQYPISKLRVEYELAKYQTARVCAFEQTLELEESLLTRCPHLPDKNFRKMLESWSDPLLDKWPDLHRKVRLLIAVRNAFSHNQYPMYDEAVFSSIRKYDPSFPDAIEERMGLNIAHRLSEEVKQAKETVERIIQA

SEQ ID NO: 1648 - protein, 1171 aa, Artificial
  Synthetic
MALKQWRQSKTPNLKPVFSAYLNMARHNCYKSLLHVSKLMQISESNEEENITMFSLWDKLVKGTPTEKLKIIQLLQKHFPMMQGIFDIEKRTNISIATNPKEIKRTLHAFFHVLNSLRNEYTHFSPDPRNTTNDAVIIPYLYRCMDGAAREIKKRFSLTIKKAISLNNEESSQIHDVNKAVEYIFQCDFRKAKVNDLDKNGKVLYQKNGKIKTKMVDKEDYFYSLKESSETVQDDASKKGNLRKKIVLSDIGIIFFTCLFLEKRYIKNFLDAIKPWPNVFNEIQKKAVFEVFSVFHIHLHREKYDSCRPEYALGLDMLNELQKCPAELFDILSDKDRDRLSVDIHAQGDNIVQNDGVTVKSGKVLMKRMRDRFAPFALQYIDRQNIFKDIRFMVHLGNYRFKFYKKRCLADDGEDTLRTLQKEINGFGRIQEIEMERKKNYSSFFKEATTKVNEYNKNVQELKADTTDSAPYMTNSTAHYLFDGNRVGLRLFNSESDMKSFVPNVKIQGRPATKASEIKLLSPDAWISTYELPGMIFYLRLYKEYMGKTNGYPSAEDILKSYIDAYHRIFDDIKNGTFKGWDDILYQPLTKKDLPIKIKRYIDQPNSTQSAYFHKKSRTRIKIMYYWTLRELKCFDTKLEKMKSKDNKFKKKDYVDLRPGDIAKWLTRDILYFMEDFDEKGTITSANFNSLRSALTLSDTSKEKVYGMISSFKHPFLAKALETYDKEHNEECFRIFDFYRAYLTKRADYLKQIQKIKGNELLKLAFLHSTRKRWKDRGITAIKDLAMTYEQFELPRGIFTPLAKKILVEKCGLSLDTETEKKKLGMANLINFYFESVLKDKNQDFYRWSRHYKIFDLLETNTSKNSQAHNFLLPEQLTTKMRKNKEFEINNLIRNKAKKAIEAEIKYKKNNPTYIDYFNENFKSTTEVAKNILHNAYKNYDDNERILRRYAIQDRLMFLMAKDLLLGIEGIGKGALRSFRLGDIMPNKDKTILDLLVPFTVTLNIDGISVSIRQKDAIKIKRYGEFYRYNSDTRLKSLLPYLIHKVGNKAEINIDIDREELEAELNQYDHERIEIMRKVQSLERSIIAKVGGEKNVEKEIRENFNNLITQKGNIPYERQGKILVNIRNSFCHNEYAKDIDFPENIPLPQIADTIVSLFEAERKNRPKGETM

SEQ ID NO: 1649 - protein, 1090 aa, Artificial
  Synthetic
MNIPALVENQKKYFGTYSVMAMLNAQTVLDHIQKVADIEGEQNENNENLWFHPVMSHLYNAKNGYDKQPEKTMFIIERLQSYFPFLKIMAESQREYSNKKNKQNRVEVNSNDIFEVLKRAFGVLKMYRDQTNHYKTYDEKLIDGCEFLTKTEQPLSGMINSYYTVALRNIKERYGYKTEDLTFIQDNRYKFVKDAYGKRKSQVNTGFFLSLQDYNGDTTKKLHLSGVGIALLICLFLDKQYINLFLSRLPIFSSYNAQSEERRIIIRSFGINSIKLPKDRIHSEKSNKSVAMDMLNEVKRCPDELFTTLSTEKQSRFRIISNDHNEVLMKRSSDRFVQLLLQYIDYGKQFKNIRFHVNMGKLRYLLKADKECIDGQTRVRVIKQPLNGFGRQDEVEALRKQENGTFGKSGIRIRDFENMKRDDDNPADYPYIVDTYTHYMLENNKVEMYISKDDNPAPLLPEIEEDRYAVKTIPSCRMSTLEFPAMAFHMFLLGSERTERRIKDVYDRYKKLFEAMHKEEVTAENISSFGIAERDLPKKILDIINGNAQGRDVDAYIKTTIDDMIADTEHHIKQLKDDRKAVRSADNKMGKRNFKKISTGKLAGFLAKDIVMFQPSTNDGENKITGLNYRIMQSAIAVYDSGDDYEAKKQFKQMFEKARLIGKGITEAHPFLYKVFARSVPANAVDFYERYLIERKDYLTGLFNEIKKGNKVDIPFIRRDQNKWKTPVMKTLGRIYNEDLPVELPRQMFDDEIKSHLKSLSQMSGIDFDNANVTYLIAEYMKRVLGDDFQNFYQWNRNYRYMNILKGEYDSKGTLLCNFTSVEEREALWKEREDRSGSYRKLAAKKIKSNRLTRNASTDEVNSILDKRLSNSRNEYQKNGKIIRRYKVQDALLFLLAKKSLTEMADFDGNKFKLKEIMPDTEKGILSEIMPMTFTFEKGGERYTITSKGMKLKNYGDFFVLANDKRLCRLLKIVGSNTVSKEDIMEEFKKYDQCRPEIASIVFNLEKWAFDTYPELSAKVDREEQVDFKFILNVLLNKKNINNEQSYILRKIRNAFDHNNYPDKGLVEIKALPEIAMSIKKTFGEYAMMK

SEQ ID NO: 1650 - protein, 1123 aa, Artificial
  Synthetic
MKIPQIIEDNKHLFGTYSTMALANIRNILDHIATLACIENDFNADSDDFWHHPCIEIINPQNLCNDVTKADFVTEKLKSHFPFVVIMAEAKRQKDIAWAKNQAKKAFENRDFQKQQEFNKKQKSLLSITNADIYRMLNNLFRVLTSYRHYTSHYLINYIYFNEGSNLLKYNEQPLSYNLNDYFTIALRDTAQKYSYSPEALSFIQSSRYKIENRRKILDTDFFLSIQHRNGDSNPKNLHISGVGVALLICLFLEKKYVNVFLQKLPIYGTYKKQSMEANIIRQTFGIHTAKLPKERIVSEKSDFSIGMDMLNELKRCPKALFSTLSYADQNAFRIVSSDMNDVLQVRHTDRFAQLSLEYIDRRELFSDIRFHLNMGKLRYLKTADKHCIDGISRVRVLEDKINAFGRIHEFEARRKELGFVECYEQGGRAISTNTNIEIRDFEHVKRDDSNPDSYPYIIDTYTHYILENNKIGMHIGDYWPDLIKLDEHKWTVYNENPTCFMSSLELPAMMFHMMLCGSDATESLIKAEVDKYKKLFGAMANGTLTKENISGFGIAEENIPQKVIDCVNGKTSGKGLDKQIKKEIDEMLADTNLRIERLKSDKRSVASTQNKMGKRGFRSIQPGKLADWLAADIVKHQPSLLKGVDYGTDRITGMNYRVMQSTIATFNATTPEHSLEELKKVFSAAQLIQCEKKEHPFLYKALDRNPQNTIDLYEFYLSAKQSYYKSMRRNIENGENVKLPYLNTDRNKWMRRGSVYYSTMGEIYLKDMPIELPRQMFDKKIKEALAKLPSMKDVDMQHCNVTFLIAEYLKKELKDDSQPFYQWNRNYRFTDMMICEENRSTRALSTHFIPVALREEIWEKRSELRAAYKEWALPRLSKNRDTERLSPAQKSELLDARIAKCRNEYQKNEKIIRRYKVQDALMFMMVKDMFGKGVFTAESKEFALSAITPDAKRGILSEVIPIDFKFSIDGKTYTIHSNGMKIKNYGDFYKLINDKRMKSILKIITHNVIDKDLLEKEFSSYDDKRPEAIEIVFEFEKAAYSKYPELEELVLSENHFDFGTLLRELQAKKVLSQNDGHYLSQIRNAFSHNSYPRNLRITSNIPEIAQEMINIFRITTPLKTKK

SEQ ID NO: 1651 - protein, 1109 aa, Artificial
  Synthetic
MESEKQFRTIFNNKGNIGPIAEKAKRNFDLILKNEHSKTERIYHFCIGHVFKNIDKSIFESKLNENLKKFQPTKYITLQKDFFTFETELYELIKRIRDCNSHYVHTFDKLSEENIEKSDKIIPFIKDAFQFSIISNYIKENNLSFEKFNENENSHKEIVKSIINKFFPNGEMQKNVRDKFSKLNLKKVIDELLFITVDEDFEYNLIENHPIFTIKKGKYLSNIAHLFILSLFLYKNEANELISKIRGFKRNDDEFHHKRDIFTFFSKKLTSQDINNEEKNLINFRDIIQYLNKYPTAWNKNIEPERQFTTMTNSLEKYVIETEIFRSFPTFKGKEEHNYFLKYVITNLFKKKKHLFDLDEYKISKELEVKLHQEYYLSPELKDANFRLDQLKNKKNTNSFEEEKIEEEIEELSEKENSILEKLKKRIKENKLLMSYGRNQDRFMEIALRFLAENNYFGKNAKFKLYQFYTTDEQIDYLAKAKKEKTKKEYDKIKYHQGKVVDYVTYKEHLKKYPDWDFPFAIQNNSIQIKIQLPNNEWKLFSIQRKLFIYLLEDALYGNDKKIDNRGNILLSNYFLSNLIPEFNQLKNSLADNSITTEHRKLFPKRLLAKYQEPIRNTTEQYNPFLEILVETKKQENRYDNLLKKSKELDLEDKFQKKNKGKQFKLRFLRKAWNLMYFRKIYDKQVEENGHHKRFNITKEEFNDFCRWIFAFDEVTEYKKYLEQLFTEKRFFDDEDFKTLFFSSDSLNEMYNKTKENFEHWINGRYKKKERKGDYEKLLAKDIIYINISHFINYLKQKKKITTENELIKYNASENIPFLIDSFYYKEILPKEEYKENGKLFNELRTTKLEDALLYEIAMQYLKLDKTIINKAKENVTEILTSTIEFDIKDANKKHLYNLVVPFSKIENLAVLFKLMPNNKDTFLTKIYTSTKLLFPELEYEKEESDNKKIRENLLEKKELSFESLNAINNIIISSSVKVSKVFMALEKYFIIKIDTRIPYGKDYVNVYDIHLDDNNTFENEYNENDTRNNVAHFDIPKINYDIFIKNIEAKFITNEIKPLKEKSFEDLNQNIKDVCSIFFKILHSNLYPRGKGNKKTEMEQKYFNQFLE

SEQ ID NO: 1652 - protein, 1063 aa, Artificial
  Synthetic
MFDNEQKNLEKEPYWGVFLNQARLNAYIALRDISERLEENAADEDSLSEWPVLKYLDNDTDAVKSRRIFDLVEKHFSMLKIIYGGEKEGDLVKRSKEYKIILKCLFRALNFYRNKFCHMYSGNRARKYNEKELIKYLEDCFDASVRKIKELRRLDEKDVLHLRRKIAEGKDANKRVIDNPQFRYPFKNEKGELNEKGLYFLASIFLDKKEAHEFLKKQEYFKNDSEPKYRATLESFYHYRIKLPRPVIESDVDKNGLALDMLNELKKCPKELFDLLSKEQQEKFRVVDSEDADEEGNEILMRRYSDRFPYLALRYCDENQVFERIRFQIDLGRYYFKFYPKETIDGKTQQRSLDKRLKIFGRIKDVKSKVEQEWSGIIKSPDTIEENPNEPYKLKTTPRYNIVDNQIGFVITGDKNLPDVKRPDGRIELEKPDGWLSIYELPGMLFHGLKYGFDKTERMIKIYIEKQRKICKEICEKGTITPDDGESMPEALKGGAKAAKRNYSEKKLERMLQDTEQRIRAIQTTQKRMDEPGNKPGKKKFFDIRAGKLADFLARDIMALQRFDPAKHGKDKLTAINFQVLQATLAFYGAKKDVIEDMFKGIGLLEGDNPHPFLNQIDPAQYNSIAGFYQAYLQKKRSYLEDYRKEEEYDEQFLRPKRQRYAQEKREIKTVARQLLDNPVNVPKNFFKKEIEEFVFSQDPSLKKSKMNTAYMIQALFEKHYGRQQPFYSYNRTYPVVSKAIEYGKKGKNKKIAKVLMAIEPKLNYMEIKKIVNEMPDGQYEPENLKRNLYEGYKDYEKDERIIRRCKVQDVVSFMMVEETLKDQLDFNGNVLTLEKITPWEASPFKKPVLCHTIISIPFNTKGGHTDKDYVDFIKNNFEGSYDCEPNKIILKYKVTSKDTKLKDIGKYRMYSHDRRLPGLLIWKYRPNDQNGNEIKFTEIEQEIKAFERRRIEIAQCLYTLEKKVIDSWFTQDELGEEHIPFNKVIDVIKAKMPNFEDKCNVLLKIRNAINHNQFPVYEQAIQTAPGKEIAGKMLRITESYIEQIMAKIDPDFGRTEDAESSR

SEQ ID NO: 1653 - protein, 1119 aa, Artificial
  Synthetic
MTEQNEKPYNGTYYTLEDKHFWAAFLNLARHNAYITLTHIDRQLAYSKADITNDEDILFFKGQWKNLDNDLERKARLRSLILKHFSFLEGAAYGKKLFESQSSGNKSSKKKELTKKEKEELQANALSLDNLKSILFDFLQKLKDFRNYYSHYRHPESSELPMFDGNMLQRLYNVFDVSVHRVKRDHEHNDKVDPHRHFNHLVRKGKKDRYGNNDNPFFKHHFVDREGTVTEAGLLFFVSLFLEKRDAIWMQKKIRGFKGGTETYQQMTNEVFCRSRISLPKLKLESLRTDDWMLLDMLNELVRCPKSLYDRLREEDRARFRVPIDILSDEDDTDGTEEDPFKNTLVRHQDRFPYFALRYFDLKKVFTSLRFHIDLGTYHFAIYKKNIGEQPEDRHLTRNLYGFGRIQDFAEEHRPEEWKRLVRDLDYFETGDKPYITQTTPHYHIEKGKIGLRFVPEGQHLWPSPEVGATRTGRSKYAQDKRFTAEAFLSVHELMPMMFYYFLLREKYSEEASAEKVQGRIKRVIEDVYAVYDAFARDEIDTLDRLDACLADKGIRRGHLPRQMIAILSQEHKDMEEKVRKKLQEMIADTDHRLDMLDRQTDRKIRIGRKNAGLPKSGVIADWLVRDMMRFQPVAKDTSGKPLNNSKANSTEYRMLQRALALFGGEKERLTPYFRQMNLTGGNNPHPFLHETRWESHTNILSFYRSYLKARKAFLQSIGRSDREENHRFLLLKEPKTDRQTLVAGWKSEFHLPRGIFTEAVRDCLIEMGYDEVGSYKEVGFMAKAVPLYFERACKDRVQPFYDYPFNVGNSLKPKKGRFLSKEKRAEEWESGKERFRLAKLKKEILEAKEHPYLDFKSWQKFERELRLVKNQDIITWMMCRDLMEENMVEGLDTGTLYLKDIRTDVQEQGSLNVLNRVKPMRLPVVVYRADSRGHVHKEEAPLATVYIEERDTKLLKQGNFKSFVKDRRLNGLFSFVDTGGLAMEQYPISKLRVEYELAKYQTARVCAFEQTLELEESLLTRYPHLPDKNFRKMLESWSDPLLDKWPDLHRKVRLLIAVRNAFSHNQYPMYDEAVFSSIRKYDPSSLDAIEERMGLNIAHRLSEEVKQAKEMVERIIQA

SEQ ID NO: 1654 - protein, 1108 aa, Artificial
  Synthetic
MTLKYKEPSSLKPVLGAYAAMARNNAFLTVMDIMDQIHVRQKELFDRNGKKADPESSIWMLDLFPRNGRLLPEQEARASRLLRSHFPFLDLTADLRDTEDGQGSVIKGNCSYEDLCGAFLAIIEVLTHLRDVNLHYKINDEKVSDFYFRRAEVQSGLILRDILKAAPRKIKDRFRGTDLLDEDSMRFFLNDNYIRQGKKYTFNHRWEFNPQRRPLPSEGRVLKGGQPVIDKFTGKPRSFERLSAFGEILLIALFTEKRYIPDFLRDCGFDENFESSAPDGKMSRQRIAREIISAYSIRLPERKLDIEAGATQIMLDMLNELSRCPSELYDVLPENEKRAFDITGSDGSPVLMKRYSDRYVPQVLKYFDTTEAFKTLRFQVNTGQLRYEFHGLKEYMDGVGRIRIVQEGINGFGRIQEMEAMRTGSDSYLGFPLLETDEDGKMTDMPYITDSAARYVLNGDLIGLSVNGDSLPVIETVTAGADTRYKVRNRQPDCWLSRFELPALAFYSYLSRKHHVKPTAEDIIADAVRDYRDFFSGVAEGRITSMDGVRIPRNGIPDKLLHYLEGTPEASGFQEFKESVVSRLVTDTQERLSHLKTDLETMEARDNKIGKRSFVRIRPGKLAEFLAEDIVRFQGYHEGHPEARLTGQQYSVLQGMLATFADGLQAACRRAGLMDGDSAHPFLSRVFSLHGQGMASTVDFYRAYLEERLAYLKGAIPDTAPFLHPERKKWTAEKDAVYYRALAGRYLKDEKTGEDVGIFLPRGLFEKPVLDIINAYCPKTADVIRKAERANMAFIILTYIENELDDQNQGFYYEEGRLKEYGFCRKVAKEKEEHGPRRLYSILRKEKEAHPDGLYFKALKEEVGGFRDDGRKAAPLDRDTETLAGELKKSYRRMCDNEKAIRRYMVQDITMFLLARSLVSKAGGSVNLWSVGPEGKGLLDQRVDVVTRFRKYLIRQEGIKIKDYGEIYKILKDKRIDTLLLSQDRDGDKVVQLEDIKEELVTYNRKRAPVVKTIQEYEKGVYEANSDLFAGKGERFGFKDILEADRESSPLKKEAIRQVRNAFSHNQYPKRTVSTGEGRMELFKPDLPNMAKEIHENTGKLINGEKES

SEQ ID NO: 1655 - protein, 1175 aa, Artificial; identical to SEQ ID NO: 1496
  Synthetic

SEQ ID NO: 1656 - protein, 1199 aa, Artificial; identical to SEQ ID NO: 1328
  Synthetic

SEQ ID NO: 1657 - protein, 1253 aa, Artificial; identical to SEQ ID NO: 1347
  Synthetic

SEQ ID NO: 1658 - protein, 1003 aa, Artificial; identical to SEQ ID NO: 1450
  Synthetic

SEQ ID NO: 1659 - protein, 1149 aa, Artificial
  Synthetic
MMEKENVQGSHIYYEPTDKCFWAAFYNLARHNAYLTVAHINSFVNSKKGINNDDKVLDVIDAWSKFDNDLLMGARLNKLILKHFPFLKAPLYKQTKKEASKQYKEENPSADKQKIEKESAKTAMANTLELENVRKTLHAFLQQLEDLRNHFSHYNYNSPDEKTEVKFDDGFCNKLYYVFDAALQMVKDDNRMNPEINMQTDFEHLVRLGPNGEISHSFKYKFIEPDGTINNNGLLFFVSLFLEKRDAIWMQKKIKGFKGGTENYMRMTNEVFCRNRMVIPKLRLETDYDNHQLMFDMLNELVRCPLSLYKRLKKEDQDKFRVPIEFLDEDNEADNPYQENANSDENPTEETDPLKNTLVRHQHRFPYFVLRYFDLNEVFKQLRFQINLGCYHFSIYDKTIGERTEKRHLTRTLFGFDRLQNFSVKLQPQHWKNMVKHLDTEESSDKPYLSDAMPHYQIENEKIGIHFLKTDTEKKETVWPSLEVEEVSSNRNKYKSEKNLTADAFLSTHELLPMMFYYQLLSSEEKTRAAAGDKVQGVLQSYRKKIFDIYDDFANGTINSMQKLDERLAKDNLLRGNMPQQMLAILEHQEPDMEQKAKEKLDLLITETEERIDKLDTQSKQKVRIGKRRAGLPKVGSIADWLVNDMMRFQPAKRNADNTGVPDSKANSTEYRLLQEALAFYSAYKDRLEPYFRQVNLIGDTNPHPFLHNVKWQKCTHLLSFYHDYLEAKKQYLYHLSPADWQKHQYFLLLKVRKDIQNEKKDWKKSLVAGWKNGFNLPRGLFTESIKTWFSTHADKVQITDTKLFENRVGLIAKLIPLYYDKVYNDKPQPFYQYPFNINDRYKPEDTHKKFTAASSELWQKKKALYKNVQPDSSNKIEYPQYLDFLSWKKLERELRMLRNQDMMVWLMCKDLFAQCTVEGVEFADLKLSQLEVDVTVQNNLNVLNNVSSMILPLSVYPSDAQGNILRNSKPLYTVYVQENNTKLLKQGNFKSLLKDRRLNGLFSFITAEGEDLQQHPLTKNRLEYELSIYQTMRISVFEQTLQLEKAILTRNETLCGNNFNNLLNSWSEHRTDKKTLQPDIDFLIAVRNAFSHNQYPMSTLEVMQDIEKFNIQPPKLEEKDGLGIASQLAKKTKDAASHLQNIIYGGTN

SEQ ID NO: 1660 - protein, 1003 aa, Artificial; identical to SEQ ID NO: 1450
  Synthetic

SEQ ID NO: 1661 - protein, 1003 aa, Artificial; identical to SEQ ID NO: 1578
  Synthetic

SEQ ID NO: 1662 - protein, 1090 aa, Artificial
  Synthetic
MNIPALVENQKKYFGTYSVMAMLNAQTVLDHIQKVADIEGEQNENNENLWFHPIMSHLYNAKNGYDKQPEKTMFIIERLQSYFPFLKIMAESQREYSNKKNKQNRVEVNSNDIFEVLKRAFGVLKMYRDQTNHYKTYDEKLIDGCEFLTRTELPLSGMINSYYTVALRNIKERYGYKTEDLAFIQDNRYKFVKDAYGKRKSQVNTGFFLSLQDYNGDMTKKLHLSGVGIALLICLFLDKQYINLFLSRLPIFSSYNAQSEERRIIIRSFGINSIKQPKDRIHSEKSNKSVAMDMLNEVKRCPDELFTTLSAEKQSRFRIISDDHNEVLMKRSSDRFVQLLLQYIDYGKLFKNIRFHVNMGKLRYLLKADKECIDGQTRVRVIEQPLNGFGRLDEVEVLRKQENGTFGKSGIRIRDFENMKRDDDNPADYPYIVDTYTHYMLENNKVEMYISKDDNPAPLLPEIEDNRYAVKTIPSCRISTLEFPAMAFHMFLLGSERTERRIKDVYDRYKKLFEAMHKEEVTAENIASFGIAERDLPKKILDIINGNAQGKDVDAYIKATIDNMIADTEHRIKKLKDDRKAVRSVDNKMGKRSFKRISTGKLADFLAKDIVMFQPSKNYGENKITGLNYRIMQSAIAVYDSGDNYEAKQQFRLMFENAQLIGKGITEAHPFLYKVFARSVPANAVDFYERYLIERKYYLTALFNEIKKGNKVDIPFIRRNQNKWKTPVMKTLGRIYNEDLPVELPRQMFDDEIKSHLKSLSQMSSIDFDNANVTYLIAEYMKRVLGDDFQNFYQWNRNYRYMDMLKGEYDSKGTLLCNFTSVEEREALWKEREDRSGSYRKLATKKIKSNRLMRNASTDEVNSILDKRLSNSRNEYQKNEKIIRRYKVQDALLFLLAKKSLTEMADFDGNKFKLKEIMPDTEKGILSEIMPMTFTFEKGGERYTITSEGMKLKNYGDFFVLANDKRLCKLLKIVDSDTVSKEDIMEEFKRYDQCRPEIASIVFNLEKWAFDTYPELSAKVDREEQVDFKFILNVLLNKKNINNEQSYILRKIRNAFDHNNYPDKGLVEIKALPEIAMSIKKTFGEYAIMK

SEQ ID NO: 1663 - protein, 1168 aa, Artificial; identical to SEQ ID NO: 1357
  Synthetic

SEQ ID NO: 1664 - protein, 1119 aa, Artificial
  Synthetic
MTEQNEKPYNGTYYTLEDKHFWAAFLNLARHNAYITLTHIDRQLAYSKADITNDEDILFFKGQWKNLDNDLERKARLRSLILKHFSFLEGAAYGKKLFESQSSGNKSSKKKELTKKEKEELQANALSLDNLKSILFDFLQKLKDFRNYYSHYRHPESSELSMFDGNMLQRLYNVFDVSVQRVKRDHEHNDKVDPHRHFNHLVRKGKKDRYGNNDNPFFKHHFVDREGTVTEAGLLFFVSLFLEKRDAIWMQKKIRGFKGGTETYQQMTNEVFCRSRISLPKLKLESLRTDDWMLLDMLNELVRCPKSLYDRLREEDRARFRVPVDILSDEDDTDGTEEDPFKNTLVRHQDRFPYFALRYFDLKKVFTSLRFHIDLGTYHFAIYKKNIGEQPEDRHLTRNLYGFGRIQDFAEEHRPEEWKPLARDLDYFETGDKPYITQTTPHYHIEKGKIGLRFVSEGQHLWPSPEVGATRTGRSKYAQDKRFTAEAFLSVHELMPMMFYYFLLREKYSEEASAERVQGRIKRVIEDVYAVYDAFARGEINTRDELDACLADKGIRRGHLPRQMIAILSQKHKDMEEKVRKKLQEMIADTDHRLDMLDRQTDRKIRIGRKNAGLPKSGVIADWLVRDMMRFQPVAKDTSGKPLNNSKANSTEYRMLQRALALFGGEKERLTPYFRQMNLTGGNNPHPFLHETRWESHTNILSFYRSYLKARKAFLQSIGRSDRVENHRFLLLKEPKTDRQTLVAGWKSEFHLPRGIFTEAVRDCLIEMGYDEVGSYKEVGFMAKAVPLYFERASKDRVQPFYDYPFNVGNSLKPKKGRFLSKEKRAEEWESGKERFRLAKLKKEILEAKEHPYLDFKSWQKFERELRLVKNQDIITWMICRDLMEENKVEGLDTGTLYLKDIRTDVQEQGSLNVLNRVKPMRLPVVVYRADSRGHVHKEQAPLATVYIEERDTKLLKQGNFKSFVKDRRLNGLFSFVDTGALAMEQYPISKLRVEYELAKYQTARVCAFEQTLELEESLLTRCPHLPDKNFRKMLESWSDPLLDKWPDLHRKVRLLIAVRNAFSHNQYPMYDEAVFSSIRKYDPSFPDAIEERMGLNIAHRLSEEVKQAKETVERIIQA

SEQ ID NO: 1665 - protein, 1175 aa, Artificial; identical to SEQ ID NO: 1496
  Synthetic

SEQ ID NO: 1666 - protein, 1267 aa, Artificial
  Synthetic
MEKQRRRQTRDFSIRLTGKYVFGAYFNMAQANFVKTIVHILPIVGIGGNYQENQVGKMLHALWLITAGKAQELDSQEKEWEKKLRLNPEKQLQLQKLLFKHFPVLNPMMADVANYRAYLKDQKSKVKTDKDTFEQMRGVSVADCLEMFYLMAVTLNDCRNFYTHKNPYNSEEELKKQYKHQERIAQKLDKVVVASRRVYKEREGLLPTEMEFLTGIDHMHPVVVKDENGQVVKDKNEKVIKQFKEYDDFYFRITGERTINENSKEKAVALSDFGLLYFCVQFLSKPYAKLFMDEARLFEFSPFTDEENIILQEMLCIYRIRMPKPHRIDSKDSKTALAMDIFQELRRCPMKLYNLFDKNAQGFFHDVVRRQNSHTDDVSKRLRHGDRFPHLALRLIDEEGIFKRIRFQLRLGSFRFKFYDKKCIDGRERVRRIQKEINGYGRLQEVNDKRFEKWGDMIQQHEEKSVKLEHEDLYLDLDQFPQDTAESSPYITDRRPAYNIHANRIGLFWEDSQNPNDFVYFDVNKMYMPELKVSDGKAPIKMPAPRAFLSVHELPAMLFYEYLRTQQKEKLPSAEQIIIDCEAYYRRFFNDVETGRLKPFPKAKDFRQHLAEEYPNLRFSDIPQKILLYLCSQGWRYENRPETSQERLLRKTIQHLEEREVRIQRRLERYKEDREQIGSDDNKFEKKGFVDVRHGALARYLAKSLMEWQPSKDGKGHDKLTGINYNVLTSYLATLGSFASQTDETEVSSLWQVMKDANLIDGNNPHPFIGKVLQKCNRNIEELYLHYLEEEIEHIRSCHKNLKEKLFQGLSCLPFVHHERLRYHGLWNEEMRALAGRYESVQLPDGLFTRYILEILQKHYADNADLQKALNLKVPEKSNPNRNITFLISRFYELELHDAPQPYYISDKPLAMDNDGRQEEYSFKRAYELFSILDNKKQLTSDEIQKRLTAKLLDNEGRPIPELGKRGKAAMDTQENIIWQRKIAKEIESYINSLSDKDLKIPLNCKKEKKEEERNKRKEALANRLKSQIKDIKNTERQILRYRTQDMVLFLMAKDAFVRIMDEQGNDVNWDNLCLAKVCDDGFLRQAFTFQIPVLIGDETIYIEQENMSMVNYGELRQILADDRLESLLKNIAENIEPNTKGKKIIRYTDLMSELAAYDRIRSTVFKLIQQIEQFVLDKFDYLADPTKEDFWENKSLPKRNSFKAMIELIDRLNDKPLTPSERSLIIAIRNAFGHNTYKVDLSQIRDVRHLPEVARGILKHLETLVG

SEQ ID NO: 1667 - protein, 1085 aa, Artificial; identical to SEQ ID NO: 1453
  Synthetic

SEQ ID NO: 1668 - protein, 1025 aa, Artificial
  Synthetic
MKHFPFLEAAAYEMTNSKSPNNKEQREKEQSEALSLNNLKNVLFIFLEKLQVLRNYYSHYKYSEESPKPIFETSLLKNMYKVFDANVRLVKRDYMHHENIDMQRDFTHLNRKKQVGRTKNIIDSPNFHYHFADKEGNMTIAGLLFFVSLFLDKKDAIWMQKKLKGFKDGRNLREQMTNEVFCRSRISLPKLKLENVQTKDWMQLDMLNELVRCPKSLYERLREKDRESFKVPFDIFSDDYDAEEEPFKNTLVRHQDRFPYFVLRFFDLNEIFEQLRFQIDLGTYHFSIYNKLIGDEDEVRHLTHHLYGFARIQDFAPQNQPEEWRKLVKDLDHFETSQKPYISKTAPHYHLENEKIGIKFCSTHNNLFPSLKREKTCNGRSKFNLGTQFTAEAFLSVHELLPMMFYYLLLTKDHPKGEGINKIEKIIRTEISNIYAIYDAFANGEINSIADLTCRLQKTNILQGHLPKQMISILGGRQKDMEKEAERKIGEMIDDTQRRLDLLCKQTNQKIRIGKRNAGLLKSGKIADWLVSDMMRFQPVQKDTNNAPINNSKANSTEYRMLQHALALFGSESSRLKAYFRQMNLVGNANPHPFLAETQWEHQTNILSFYRNYLEARKKYLKGLKPQNWKQYQHFLILKVQKTNRNTLVTGWKNSFNLPRGIFTQPIREWFEKHNNSKRIYDQILSFDRVGFVAKAIPLYFAEEYKDNVQPFYDYPFNIGNKLKPQKGQFLDKKERVELWQKNKELFKNYPSEKKKTDLAYLDFLSWKKFERELRLIKNQDIVTWLMFKELFNMATVEGLKIGEIHLRDIDTNTAKAESNNILNRIMPMKLPVKTYEINNKGKMEMEKPLATFYIEETETKVLKQGNFKALVKDRRLNGLFSFAETTDLNLEEHPISKLSVDHELIKYQTTRVRIFEMVLRLEKKLINKYPTLPTYSFKNMLESWLEDKTNSAELNNYVDCLIAVRNAFAHNQYPMYNPKLFAEVKKFSLFPSSNTKKTELNIAPQLLEIVGKAIKEIEKSENKN

SEQ ID NO: 1669 - protein, 1175 aa, Artificial
  Synthetic
  misc_feature (193)..(193): Xaa can be any naturally occurring amino acid
MTEQNERPYNGTYYTLEDKHFWAAFLNLARHNAYITLAHIDRQLAYSKADITNDEDILFFKGQWKNLDNDLERKARLRSLILKHFSFLEGAAYGKKLFESQSSGNKSSKKKELTKKEKEELQANALSLDNLKSILFDFLQKLKDFRNYYSHYRHPESSELPMFDGNMLQRLYNVFDVSVQRVKRDHEHNDKVXPHRHFNHLVRKGKKDRCGNNDNPFFKHHFVDREGTVTEAGLLFFVSLFLEKRDAIWMQKKIRGFKGGTEAYQQMTNEVFCRSRISLPKLKLESLRTDDWMLLDMLNELVRCPKSLYDRLREEDRARFRVPVDILSDEDDTGGTEEDPFKNTLVRHQDRFPYFALRYFDLKKVFTSLRFHIDLGTYHFAIYKKNIGEQPEDRHLTRNLYGFGRIQDFAEEHRPEEWKRLVRDLDYFETGDKPYITQTTPHYHIEKGKIGLRFVPEGQHLWPSPEVGATRTGRSKYAQDKRFTAEAFLSVHELMPMMFYYFLLREKYSDEASAERVQGRIKRVIEDVYAVYDAFARGEIDTRDELDACLADKGIRRGHLPRQMIAILSQEHKDMEEKVRKKLQEMIADTDHRLDMLDRQTDRKIRIGRKNAGLPKSGVIADWLVRDMMRFQPVAKDTSGKPLNNSKANSTEYRMLQRALALFGGEKERLTPYFRQMNLTGGNNPHPFLHETRWESHTNILSFYRSYLKARKAFLQSIGRSDREENHRFLLLKEPKTDRQTLVAGWKSEFHLPRGIFTEAVRDCLIEMGYDEVGSYKEVGFMAKAVPLYFERACKDRVQPFYDYPFNVGNSLKPKKGRFLSKEKRAEEWESGKERFRDLEAWSHSAARRIEDAFVGIEYASWENKKKIEQLLQDLSLWETFESKLKVKADKINIAKLKKEILEAKEHPYLDFKSWQKFERELRLVKNQDIITWMMCRDLMEENKVEGLDTGTLYLKDIRTEVQEQGSLNVLNRVKPMRLPVVVYRADSRGHVHKEQAPLATVYIEERDTKLLKQGNFKSFVKDRRLNGLFSFVDTGALAMEQYPISKLRVEYELAKYQTARVCAFEQTLELEESLLTRYPHLPDESFREMLESWSDPLLDKWPDLQREVRLLIAVRNAFSHNQYPMYDETIFSSIRKYDPSSPDAIEERMGLNIAHRLSEEVKQAKEMAERIIQA

SEQ ID NO: 1670 - protein, 1124 aa, Artificial
  Synthetic
  misc_feature (121)..(133): Xaa can be any naturally occurring amino acid
MEKPRQRSGEESSAEKFDPEAFLLFGRSRIRKETLRKPIFRKQILQEERTHEKRKGGTASQCTLLGQSEEHPVRLSAKAQGFQELLLPLSTSRIFGIAHVRWKHASETVQRLRCECATGEXXXXXXXXXXXXXDHEHNDKVDPHRHFNHLVRKGKKDRCGNNDNPFFKHHFVDREGTVTEAGLLFFVSLFLEKRDAIWMQKKIRGFKGGTEAYQQMTNEVFCRSRISLPKLKLESLRTDDWMLLDMLNELVRCPKSLYDRLREEDRARFRVPVDILSDEDDTGGTEEDPFKNTLVRHQDRFPYFALRYFDLKKVFTSLRFHIDLGTYHFAIYKKNIGEQPEDRHLTRNLYGFGRIQDFAEEHRPEEWKRLVRDLDYFETGDKPYITQTTPHYHIEKGKIGLRFVPEGQHLWPSPEVGATRTGRSKYAQDKRFTAEAFLSVHELMPMMFYYFLLREKYSDEASAERVQGRIKRVIEDVYAVYDAFARGEIDTRDELDACLADKGIRRGHLPRQMIAILSQEHKDMEEKVRKKLQEMIADTDHRLDMLDRQTDRKIRIGRKNAGLPKSGVIADWLVRDMMRFQPVAKDTSGKPLNNSKANSTEYRMLQRALALFGGEKERLTPYFRQMNLTGGNNPHPFLHETRWESHTNILSFYRSYLKARKAFLQSIGRSDREENHRFLLLKEPKTDRQTLVAGWKSEFHLPRGIFTEAVRDCLIEMGYDEVGSYKEVGFMAKAVPLYFERACKDRVQPFYDYPFNVGNSLKPKKGRFLSKEKRAEEWESGKERFRDLEAWSHSAARRIEDAFVGIEYASWENKKKIEQLLQDLSLWETFESKLKVKADKINIAKLKKEILEAKEHPYLDFKSWQKFERELRLVKNQDIITWMMCRDLMEENKVEGLDTGTLYLKDIRTEVQEQGSLNVLNRVKPMRLPVVVYRADSRGHVHKEQAPLATVYIEERDTKLLKQGNFKSFVKDRRLNGLFSFVDTGALAMEQYPISKLRVEYELAKYQTARVCAFEQTLELEESLLTRYPHLPDESFREMLESWSDPLLDKWPDLQREVRLLIAVRNAFSHNQYPMYDETIFSSIRKYDPSSPDAIEERMGLNIAHRLSEEVKQAKEMAERIIQA

SEQ ID NO: 1671 - protein, 1175 aa, Artificial
  Synthetic
MTEQNERPYNGTYYTLEDKHFWAAFLNLARHNAYITLAHIDRQLAYSKADITNDEDILFFKGQWKNLDNDLERKARLRSLILKHFSFLEGAAYGKKLFESQSSGNKSSKKKELTKKEKEELQANALSLDNLKSILFDFLQKLKDFRNYYSHYRHPESSELPLFDGNMLQRLYNVFDVSVQRVKRDHEHNDKVDPLRHFNHLVRKGKKDRCGNNDNPFFKHHFVDREEKVTEAGLLFFVSLFLEKRDAIWMQKKIRGFKGGTEAYQQMTNEVFCRSRISLPKLKLESLRTDDWMLLDMLNELVRCPKSLYDRLREEDRARFRVPIDILSDEDDTDGTEEDPFKNTLVRHQDRFPYFALRYFDLKKVFTSLRFHIDLGTYHFAIYKKNIGEQPEDRHLTRNLYGFGRIQDFAEEHRPEEWKRLVRDLDYFETGDKPYITQTTPHYHIEKGKIGLRFVPEGQHLWPSPEVGATRTGRSKYAQDKRLTAEAFLSVHELMPMMFYYFLLREKYSEEVSAEKVQGRIKRVIEDVYAVYDAFARGEIDTLDRLDACLADKGIRRGHLPRQMIAILSQEHKDMEEKVRKKLQEMIADTDHRLDMLDRQTVRKIRIGRKNAGLPKSGVIADWLVRDMMRFQPVAKDTSGKPLNNSKANSTEYRMLQRALALFGGEKERLTPYFRQMNLTGGNNPHPFLHETRWESHTNILSFYRSYLEARKAFLQSIGRSDRVENHRFLLLKEPKTDRQTLVAGWKGEFHLPRGIFTEAVRDCLIEMGHDEVGSYKEVGFMAKAVPLYFERACKDRVQPFYNYPFNVGNSLKPKKGRFLSKEERIKEWESGKERFRDLEAWSHSVARRIEDAFAGIKYASPGNKKKIEQLLQDLSLWETFESKLKVKADKINLAKLKKEILEAKEHPYLDFKSCQKFERELRLVKNQDIITWMMCRDLMEENKVEGLDTGTLYLKDIWTDVHEQGSLNVLNRVKPMRLPVVVYRADSRGHVHKEQAPLATVYIEERDTKLLKQGNFKSFVKDRRLNGLFSFVDTGGLAMEQYPISKLRVEYELAKYQTARVCAFEQTLELEESLLTRCPHLPDKNFREMLESWSDPLLDKWPDLHGNVRLLIAVRNAFSHNQYPMYDEAVFSSIRKYDPSSPDAIEERMGLNIAHRLSEEVKQAKETVERIIQA

SEQ ID NO: 1672 - protein, 1127 aa, Artificial
  Synthetic
LQKQDKLFVDRKKNAIFAFPKYITIMENQEKPEPIYYELTDKHFWAAFLNLARHNVYTTINHINRRLEIAELKDDGYMMGIKGSWNEQAKKLDKKVRLRDLIMKHFPFLEAAAYEITNSKSPNNKEQREKEQSEALSLNNLKNVLFIFLEKLQVLRNYYSHYKYSEESPKPIFETSLLKNMYKVFDANVRLVKRDYMHHENIDMQRDFTHLNRKKQVGRTKNIIDSPNFHYHFADKEGNMTIAGLLFFVSLFLDKKDAIWMQKKLKGFKDGRNLREQMTNEVFCRSRISLPKLKLENVQTKDWMQLDMLNELVRCPKSLYERLREKDRESFKVPFDIFSDDYDAEEEPFKNTLVRHQDRFPYFVLRYFDLNEIFEQLRFQIDLGTYHFSIYNKRIGDEDEVRHLTHHLYGFARIQDFAPQNQPEEWRKLVKDLDHFETSQEPYISKTAPHYHLENEKIGIKFCSTHNNLFPSLKREKTCNGRSKFNLGTQFTAEAFLSVHELLPMMFYYLLLTKDYSRKESADKVEGIIRKEISNIYAIYDAFANNEINSIADLTCRLQKTNILQGHLPKQMISILEGRQKDMEKEAERKIGEMIDDTQRRLDLLCKQTNQKIRIGKRNAGLLKSGKIADWLVSDMMRFQPVQKDTNNAPINNSKANSTEYRMLQHALALFGSESSRLKAYFRQMNLVGNANPHPFLAETQWEHQTNILSFYRNYLEARKKYLKGLKPQNWKQYQHFLILKVQKTNRNTLVTGWKNSFNLPRGIFTQPIREWFEKHNNSKRIYDQILSFDRVGFVAKAIPLYFAEEYKDNVQPFYDYPFNIGNKLKPQKGQFLDKKERVELWQKNKELFKNYPSEKNKTDLAYLDFLSWKKFERELRLIKNQDIVTWLMFKELFKTTTVEGLKIGEIHLRDIDTNTANEESNNILNRIMPMKLPVKTYETDNKGNILKERPLATFYIEETETKVLKQGNFKVLAKDRRLNGLLSFAETTDIDLEKNPITKLSVDYELIKYQTTRISIFEMTLGLEKKLIDKYSTLPTDSFRNMLERWLQCKANRPELKNYVNSLIAVRNAFSHNQYPMYDATLFAEVKKFTLFPSVDTKKIELNIAPQLLEIVGKAIKEIEKSENKN

SEQ ID NO: 1673 - protein, 1003 aa, Artificial
  Synthetic
MGAIENKHIFAAYANLAIDGLIKTLNFIAKKLDTQKQLSSWDIKHVITLIDSIFDQNPQNNLEQVVEGYLPWIKPIIEMKTPKKGERQSDKLCIEYKTIITAFASLLNDVRNYYTHYYHDPICIYPGGYDIPSSLNCIYDSAINIIKERFQAEEKEMEHLRRYTRKKGRVVLKTEDDHFYYTLANNNDLSEKGYAFFISMFLERKYSYLFLKKLSGFKRGDSLQYRLTLEVFTALSTKPPVERLRTTKDTKQDRALDILNELSRIPIELYQTLEPKYREMYNATLQPTDAEDPYGLPDRSRIRFRSRFEAFALHFLDKQADFKEIGFYTYLGNYFHNGYQKTRVDRETKDRYINFQLAGFCKNIQDISAKKLSEALNVKSIDISTDSIPDINSFEPYLVQSTPHYIVNGNNIGIKVLPEGKDTYPTIDEKGAKMPIADFWLSKYELPAMLFYTYLRNNNIHKSHCPLSVKDIIERSIHKSTKQKHPEERSELMLRRVMKAIFWTDSKLNEVERIKSQKSAFGKRQHEILKAGRIAETLVRDMLWLQPSKNNGRDKVTEPNFQAIQVSLAYFGIRRNDLTEIFTRAGLINSSNPHPFLAQIGTNYTSLIEFYIAYLKERKVYFSRIQKKILQGKLNIQCHPLRDLQREPNKPQEKEEAIFLPRGLFNEAIINCLKKSKLKQLIESPTREKSPALNVSYLILNYFRTYFEDQSQEFYAQPRNYRLFDKLSPNKGKSKSYLSLEQRIKKMEELRPSKIPVAEANKLLEKEDRLYRKNYNEICDNESIIRLYQIQDILLFMMTKEYLPSDLYNRINKYKLENVKGILNERVSYLIDLNPLKIQGEDIKIKDYGKLFYIHHDTRINSLNKVLSKVKRNNSISSSVKIQPYENYKRECLDFEEAQIQIIPIIHSFEIAMVSMFPDLKKATPGNYYDFNELITEYEKRTKQKIDSSFLIKTRNMFLHDKYEAECIKEISDDFVYAKKIIAEFKMKIENIKLEDFSNDSSA

SEQ ID NO: 1674 - protein, 1319 aa, Artificial
  Synthetic
MGKEHKGNNAPKNRNKVANNSQQPRKVRRLQKTNFRISLSGKHVFGAYFNMARTNFIKTINYILPIAGVRGNYSESQINKLLQAMFLIQTGRNGELTKEQKQWEKKLRLNPEQQTKLQQLLFKHFPVLGPMMADVADHKVYLNKKKSNVQTEDEAFAQLKGVSLADCLEMIYLMAETLTECRNFYTHKSPYNTPSQLAMQYLHQEMIAKKLDKVVVASRRILKDREGLSVNEMEFLTGIDHLHQETVKDEYGNVKMKDGKVMKTFVEYDDFYFKISGKRLVKGFTVTGKDGKPINVDTMLPALSDFGLLYFCVIFLSKPYAKLFIDEVRLFEFSPFSDNENMIMSEMLSIYRIRTPRLHKIDSRDSKATLAMDIFGELRRCPIELYNLLDKNSGQPFFHDEVKRPNSHTPEVSKRLRYNDRFPTLALRYVDETELFKRIRFQLQLGAFRYKFYDKEGIDGRIRVRRIQKDINGYGRLQEVADKRIEKWGDMLQKREERSVKLEHEELYIDLDQFQEDTADSTPYVTDRRPVYNIHANRIGLYWEESQNPNEFKVFDNNGMYIPELVVTEDEKAPVKMPAPRCALSVYDLSAMLFYEYLREQEDGNIPSAEQIIIDYEADYRRFFNAVAEGTLKPFQKTKDFREYLEKEYPRLRMEDIPEKLQLYLTCKGLTHDNKPETVRERMIRLAIEHLKEREERVQRRLEHYEEDRKMIGEKDNKYGKKGFADVRHGAIARYLAQSMMEWQPTNLKDKEKGRDKLTGMNYNVLTAYLATFGQPQTPEEDFTPRTLEQVLTGAHLIGGNNPHPFIDKVLALGNRNIEELYLHYLEEELKHIRSRKQSLSSNPSDKDLSALPFVHHDHLRFHERTNEEMRALAARYTTIQLPDGLFTPYIVELLKQYVELQTALNQDIPANLNPTNNAAYLITQFYQTILKDDAQPFYISGKTYTRHKEGEKDEVFSFKRAYELFSVLNNEKKRTFPFELIPLFLTSEEIQKRLSEKLLDDDGNTMPEQGKRGKAATDSQGNIIWQRKIKLDISNYVSSLSDKDLKISMNQSWKQKEEERTEKREALQSRLTRQIHDIKYNERTLRRYKTQDMVLFLIAKKLFENIIFEQGNEVNSEQMRLSKVCDEAFLRQTLTFRVPVTVGDKTIYVEQENMSLKNYGEFYRFLTDDRLMSLLENIIGTLKPNEDGDLVIRHTDLMSELAAYDQHRSTVFKLIQQIENLIIEKNAALKNPDSEDFWVKEGLPKRNNFASLLELIDQLNNVALTDEERKLLVAVRNAFSHNSYNIDFSLIKDVKHLPEVAKGILQHLESVVGVEQTK

SEQ ID NO: 1675 - protein, 1088 aa, Artificial
  Synthetic
MKIPDLINNYKEQFGTYAVMALMNAQTVLDHIQKLACIGNSESYKEDLWKHPVMLHIKNAAYETDNNPETTLFVMEKLQFYFPFLKIMAERQREYSNKKYNENRLAVNSRDLFFVLDKVFRVLKNYRNTTAHFMTKSLSENEEYLFLKNEQPLANMVNEYYTVALRDMKDRYSYSTEDLAFIQDNRYKQTRGDDGKRKATVNLDFFLSLQSHNGDPAKKLHLSGVGVALLICLFLEKQYVNLFISKLSIFSTYKPNSEQHRIICRSMGIHSIKLPKDRIHSLKDGMSVAMDMLNETKRCPKELFDTLSADKQARFRTISDDHNEVLLMRSSDRFAQLLLQYIDYNKLFKGIRFHVNMGKLRYLFNAAKNCIDGQTRVRVIEHQLNGYGRIDEIEAERKSEDGKFANSGISIRDFENVRRDDGNPENYPYVVDTYSHYILENNKVEMQFTDSCILPFIEEYGGKWYVAKDVPACRISTLELPALAFHMLLLGSKKTEERIKEVYGKYMKLFEAMSNDAVTKENIESFGIALWNLPQKAIDAINGCAHAKNVNAFIKNTVEEMLADTEKRLERLKEDRKGISSHDNKMGKPNFRQISTGRLADFLAKDIVKLQPATTEDGSDKMTGLNYRVMQAAIATYNSNGNPEAEQQFRGMFEKARLIGKSPNAHPFLYKVFASALPKNTIEFYDKYLRERKRYLSNLTKDIESGKTASVPFVNRNQNKWKKPNQEYLGQTYGNSQNLAIELPRQMFDADIKAFLKGLPEMKDVDFDNANVTFLIGEYMKRVLADDFQNFYAWKRNYRYMDMLMGETDSKDGLRHMFTSVEEREKLWREREGRTSSYRKWAARKNQGCGYSKRLPDNVLDEILAKRLSGSRNDYQKCEKAIRRQKVQDAMLFMLAKKAFTQHADFEGKDFKLKNIMPDADKGILSETMPMTFTFEKGGKQYTIESGGMKLKNYGDFHALANDRRIGCLMKLIGTNTAQKEDLISEFNKYDQCRPQVVKLVLDLEKWAFAKYPELGASEEMSYVSFDKILNKLTQHRNLGNRQSNILRKIRNAFDHNSYPESGIVEITTLPEIAQNMKDMFGRYAIVK

SEQ ID NO: 1676 - protein, 1088 aa, Artificial; identical to SEQ ID NO: 1675
  Synthetic

SEQ ID NO: 1677 - protein, 1158 aa, Artificial
  Synthetic
MKNQNSLPSNPTDILEDKPFWAAFFNLARHNVYLTVNHINKLIDLEKLYDEDKHEEIFEREDILNISDDVMNDVNSNGKKRKLDIKKIWDDLDTDLTRKYLLRELILKHFPFIQPAIIGAQTKERTTIDKDKRNTSTSNDSLKQTGEGDINDPLSLSNVKSMFFSLLQMLEQLRNYYSHVKHSKSATMPNFDEDLLNWMRYIFIDSVNKVKEDYSSNSVIDPNTCFSHLIYKDKQGKIKPCRYPFTSKDGSINAFGLLFFVSLFLEKQDSIWMQKKIPGFKKASENYMKMTNEVFCRNHILLPKIRLETVYDKDWMLLDMLNEVVRCPLSLYKRLTPADQNKFKVPEKSSDNANRQEDDNPFSRILVRHQNRFPYFVLRFFDLNEVFTTLRFQINLGCYHFAICKKQIGDKKEVHHLTRTLYGFSRLQNFTQNTRPEEWNTLVKTTEPSSGNDGKTVQGVPLPYISYTIPHYQIENEKIGIKIFDGDTAVDTDIWPSVSTEKQLNKPDKYTLTPGFKADVFLSVHELLPMMFYYQLLLCEGMLKTDAGNAVEKVLIDTRNAIFNLYDAFVQEKINTITDLENYLQDKPILIGHLPKQMIDLLKGHQRDMLKAAEQKKAMLIKDTERRLERLNKQPEQKPNVAAKNIGALLRNGQIADWLVKDMMRFQPVKRDKEGNPINCSKANSTEYQMLQRAFAFYATDSCRLPRYFEQLHLINCDNSHLFLSRFEYDKQPNLIAFYAAYLKAKLDFLNELQPQNWVSDNYFLLLRAPKNNRQKLAEGWKNGFNLPRGLFTEKIKTWFNEHKTIVDISDCDIFKNRVGQVARLIPVFFDKKFKDHSQPFYRYNFNVGNVSKPTEAKYLSKEKREELFKSYQNKFKNNIPAEKTKEYREYKNFSLWKKFERELRLIKNQDILTWLMCKNLFDEKIEQGIDIPYIKLDSLQTNTSTKGSLNALAQVLPMVLAIYIGNSESNNGTGANEEENKGPMVYIKEEGTKLLKWGNFKTLLADRRIKGLFSYIEHDDIDLKQHPLTKRRVDLELDLYQTCRIDIFQQTLGLEAQLLNKYSDLNTDNFYQMLIGWRKKEGIPRDIKEDTDFLKDVRNAFSHNQYPDSKKIAFSRIRKFNPKKTILNEKKGLGIAKQMYEEVEKVVNRIKGIELFD

SEQ ID NO: 1678 - protein, 1127 aa, Artificial
  Synthetic
LQKQDKLFVDRKKNAIFAFPKYITIMENKEKPELIYYELTDKHFWAAFLNLARHNVYTTVNHINKLLEIAELKNDEDVLNIKDSWNKQAEKLDKKVRLRDLIMKYFPFLEAAAYEITNSKSPNNKEQREKEQSEALSLNNLKNVLFIFLEKLQVLRNYYSHYKYSEEFPKPIFETSLLKNMYKVFDANVRLVKRDYMHHENIDMQRDFTHLNRKKQVGRTKNIIDSPNFHYHFADKEGNMTIAGLLFFVSLFLDKKDAIWMQKKLKGFKDGRNLREQMTNEVFCRSRISLPKLKMETVQTREWMQLDMLNELIRCPKSLYERLREEDRESFKVPFDIFSDDYNAEEEPFKNTLVRHQDRFPYFVLRYFDLNEIFEQLRFQIDLGTYHFSIYNKLIGDEDEVRHLTHHLYGFARIQDFAPQNQPEEWRKLVKDLDHFETSQKPYISKTTPHYHLENEKIGIKFCSAHNNLFPSLQTDKTCNGRSKFNLGTQFTAEAFLSVHELLPMMFYYLLLTKDYSRKESADKVEGIIRKEISNIYAIYDAFANGEINSIADLTRRLQNTNILQGHLPKQMISILEGRQKDMEKKAERKIGEMIDDTQRRLDSLCKQTNQKIRIGKRNAGLLKSGKIADWLVNDMMRFQPVQKDQNNIPINNSKANSTEYRMLQHALALFGSESSRLKAYFRQMNLVGNANPHPFLAETQWEHQTNILSFYRNYLEARKKYLKGLKPQNRKQYQHFLILKVQKTNRNTLVTGWKNSFNLPRGIFTQPIREWFEKHNNSKRIYDQILSFDRVGFVAKAIPLYFAEEYKDNVQPFYDYPFNIGNKLKPQKGQFLDKKERVELWQKNKELFKNYPSEKKKTDLAYLDFLSWKKFERELRLIKNQDIVTWLMFKELFKTTTVEGLKIGEIHLRDIDTNTANEESNNILNRIMPMKLPVKTYETDNKGNILKERPLATFYIEETETKVLKQGNFKVLAKDRRLNGLLSFAETTDIDLEKNPITKLSVDHELIKYQTTRISIFEMTLGLEKKLIDKYSTLPTDSFRNMLERWLQCKANRPELKNYVNSLIAVRNAFSHNQYPMYDATLFAEVKKFTLFPSVDTKKIELNIAPQLLEIVGKAIKEIEKSENKN

SEQ ID NO: 1679 - protein, 1105 aa, Artificial
  Synthetic
MNRPNLVEKNKHIFGTYAVMAMNNVQMVFEHIRKIAGLPDITDDTYRPEDLWTHPVMAVLLKAKNGEPTDNATTQLIVEKMLDQFPFLRIMGENQRAFRSKKDEKKGSAEKMLGAVDIYDVMNSMLRVVKAYRDATEHLMFDSSLWNDGSPFLKYNEQVMAGVIENYYGVALRNVKERFGYTTDDLRFIQDHRMKDVRVPGERFLRKTYDLDFFLSIKATNGDRTGKLHLSGVGVTLLICLLLHKQYVTIMLSKLQGIYGKYRAGSKERQIILRSFAINGIVLPKERIRSDKSEMSVALDMINELKRCPRELFDVLSVDDQERFRLQSADMEDVLQMRHSDRFAQLVMQYFDYGELLPTIRFQVNMGKLRYLFNAAKNCIDGATRVRVLEHRLNAYGRVQEMEAKRKNATGAFIGTNIDVREFDEVRRDDANPANYPYVVDTYTHYIIENNKINFTFGEQLPAVENDGGKWYVNNIIAHCSMSVLELPAMVFHSHLYGAAKTEALIRRTWDNYNRLFADMRDGKLTKANLGTYGIAEADMPAKVLEAVNGGGKSHGYWAHVRKEIDEMLADTERRITRLKDDKRAVDSKMNKMGKRGFVRIMPGRLADWLAEDIVRLQRSSLTGTEYGTDRITGLNYRTLQAAIATFNSNHDIVDGESLKALTDMFAKAGLTIRNGKTAHPFLFFVLGSKPRNTIDLYESYLKQRKTYLSNLLEKISNDTLAKTDITFVNPESARFSQRNAEYYRDTAADYLDYHAIELPRQMFEPEIKAMLKKLPEMKDVDFQNANVTYLIAEYLKRFCNDDFQPFYNLKRNYRYIDMLVYDTDSRGKLQPQYTTVARREELWADRNDKVKRYRQAKVNALYLDPKNRLSKTEIEARVDKSIANARNEYTSTEKVIRRYKVQDALLFLLACDTITQNVQLEGKRFKLNAVEPSAETGILSEVMPINFEFTFEGKRYTLHADGMKIKNYGDFFRLINDQRLPSLLNIVGTTQLEKKQMDEELSNYDNCRPEMVKMILGLEKEIYTRFPEKKNLVYEIERFNFSKLMAEMVREGMFSHDDRNTINLIRNAFSHNRYPEKVVISGLCIPEVAKSYEAKMSQMAHLPE

SEQ ID NO: 1680 - protein, 1127 aa, Artificial
  Synthetic
MNNTMEAEGKNERTLQDDPQYFGGYLNMARLNIFNISNHVADKLSIALLKNEEDISNSFLCNPNQKLNWSKAYAMTMRFMPLLKVFDTERLPEHRTSKKDKEKGKEFGKMCDSLKIVFRELNQFRNDYSHYASTEDNFTRKIEISDELAEFLTCNFKRAIEYTKQRFADTYQDEDFKLAERMQMVQGNIITSEGIVFLTSLFLEREHAFLFIGKVKGLKGTQFKQFKATREVFMSYCVNLPQDKLISDDYTQSLTMDIINELTKCPETLYNVLDESARKQFIPQLGEVETDNVRQNSINEAEITDENDYAQYMEDLTKRVRHSNRFPYFALRYIDEFNLLGKFKFQLDLGKLKLDTYPKSYMGEDVDRTITENVSAFGKLSDQQVKEEVQAKVVKDYSSVQFDQFAPHYNMECNKIGISRKSETAIVIKPSKTDAKSSYKLKQPIPEAFLSIKELSKIVLLEYLSPGESQRLITDFISTNSDKLMNLDFIKEVKGKLPVFDKPFYKKVTIKSESYTKDELKELEARKKLLDQVLVTYGLNTKQIPTRITEYWLNIRDVRNQHIISERIKSIRKDCTTRLKALKKLDETGKGNVPKIGEMASFLARDIVSMVIDPVKKKKITSFYYDKLQASLALFADPDKKKEFMHLVNDELNLLSVGGHPFLKNIDFTTIHYTRDLYKKYLEEKGCKIINGKTDISWIFKTFYKKEPGKNSSLPVTKVKLPLDKDGNPDSKQLPHSLYSLGNRKTDNSIEEITKWLSNVKHGKEKTDCTKPVDLPINLFDSRLIELLKKETGDTSLAPKLNGLFVTWWETRGDSTQSFYNDKRNYVIYDQEVCFYPNTKELYQDYYQSALDRAFRLKREERRQERLLNRRLPEIQLKDMKKIFNITLSETEKEIRILQEEDRLLFLILEKLMGNDFAGSLYLKNVNELLNEKVDIRQPIKTFLSFKENGELASKDERMQITKNIISYGSRKNYGLLRRYVHDRRMPELFEYYPTDDISFEAIKQELDDYNKAKQIVFDKVFELERALTKRFKDEVMAHFVNRDGGSRLKGNIQHSPYLNLLKSKGIISKDAHRFLKAVRNAFSHNQYPHKKTMEIFVKEWNASNFANQIVEIYKQKIEEIIEIIKK

SEQ ID NO: 1681 - protein, 1057 aa, Artificial; identical to SEQ ID NO: 1343
  Synthetic

SEQ ID NO: 1682 - protein, 1154 aa, Artificial
  Synthetic
LGSLPQSGTSQAYITLTHIDRQLAYSKADITNDQDVLSFKALWKNLDNDLERKSRLRSLILKHFSFLEGAAYGKKLFESKSSGNKSSKNKELTKKEKEELQANALSLDNLKSILFDFLQKLKDFRNYYSHYRHSGSSELPLFDGNMLQRLYNVFDVSVQRVKRDHEHNDKVDPHYHFNHLVRKGKKDRYGHNDNPSFKHHFVDSEGMVTEAGLLFFVSLFLEKRDAIWMQKKIRGFKGGTETYQQMTNEVFCRSRISLPKLKLESLRTDDWMLLDMLNELVRCPKPLYDRLREDDRACFRVPVDILPDEDDTDGGGEDPFKNTLVRHQDRFPYFALRYFDLKKVFTSLRFHIDLGTYHFAIYKKMIGEQPEDRHLTRNLYGFGRIQDFAEEHRPEEWKRLVRDLDYFETGDKPYISQTSPHYHIEKGKIGLRFMPEGQHLWPSPEVGTTRTGRSKYAQDKRLTAEAFLSVHELMPMMFYYFLLREKYSEEVSAEKVQGRIKRVIEDVYAVYDAFARDEINTLKELDACLADKGIRRGHLPKQMIAILSQEHKNMEEKVRKKLQEMIADTDHRLDMLDRQTDRKIRIGRKNAGLPKSGVIADWLVRDMMRFQPVAKDASGKPLNNSKANSTEYRMLQRALALFGGEKERLTPYFRQMNLTGGNNPHPFLHDTRWESHTNILSFYRSYLRARKAFLERIGRSDRMENRPFLLLKEPKTDRQTLVAGWKSEFHLPRGIFTEAVRDCLIEMGYDEVGSYREVGFMAKAVPLYFERACEDRVQPFYDSPFNVGNSLKPKKGRFLSKEERAEEWERGKERFRDLEAWSHSAARRIEDAFAGIEYASPGNKKKIEQLLRDLSLWKAFESKLKVRADKINLAKLKKEILEAQEHPYHDFKSWQKFERELRLVKNQDIITWMMCRDLMEENKVEGLDTGTLYLKDIRPNVQEQGSLNVLNRVKPMRLPVVVYRADSRGHVHKEEAPLATVYIEERDTKLLKQGNFKSFVKDRRLNGLFSFVDTGGLAMEQYPISKLRVEYELAKYQTARVCVFELTLRLEESLLSRYPHLPDESFREMLESWSDPLLAKWPELHGKVRLLIAVRNAFSHNQYPMYDEAVFSSIRKYDPSSPDAIEERMGLNIAHRLSEEVKQAKETVERIIQA

SEQ ID NO: 1683 - protein, 1154 aa, Artificial; identical to SEQ ID NO: 1682
  Synthetic

SEQ ID NO: 1684 - protein, 1003 aa, Artificial
  Synthetic
MGAIENKHIFAAYANLAIDGLIKTLNFIAKKLDTQKQLSSWDIKHVITLIDSIFDQNPQNNLEQVVEGYLPWIKPIIEMKTPKKGERQSDKLCIEYKTIITAFASLLNDVRNYYTHYYHDPICIYPRGYDIPSSLNCIYDSAINIIKERFQAEEKEMEHLRRYTRKKGRVVLKTEDDHFYYTLVNNNGLSEKGYAFFISMFLERKYSYLFLKKLSGFKRGDSLQYRLTLEVFTALSTKPPVERLRTTKDTKQDRALDILNELSKIPIELYQTLEPKYREVYNETLQPTDAEDPYGLPDRSRIRFRSRFEAFALHFLDKQADFKEIGFYTYLGNYFHNGYQKTRVDRETKDRYINFQLAGFCKNIQDISAKKLSEALNVKSIDISTDSIPDINSFEPYLVQSTPHYIVNGNNIGIKVLPEGKDTYPTIDEKGAKMPIADFWLSKYELSAMLFYTYLRNNNIHKSHCPLSVKDIIERSIHKSTKQKHPEERSELMLRRVMKAIFWTDSKLNEVERIKSQKSAFGKRQHEILKAGRIAETLVRDMLWLQPSKNNGRDKVTEPNFQAIQVSLAYFGIRRNDLTEIFTRAGLINSSNPHPFLAQIGTNYTSLIEFYIAYLKERKVYFSRIQKKILQGKLNIQCHPLRDLQREPNKPQDKEEAIFLPRGLFNEAIINCLKKSKLKQLIESPTREKSPALNVSYLIQNYFRTYFEDQSQEFYAQPRNYRLFDKLSPNKGKSKSYLSLEQRIKKMEELRPSKIPVAEANKLLEKEDRLYRKNYNEICDNESIIRLYQIQDILLFMMTKEYLPSDLYNRINKYKLENVKGILNERVSYLIDLNPLKIQGEDIKIKDYGKLFYIHHDTRISSLNKVLSKVKRNNSISSSVKIQPYENYKRECLDFEEAQIQIIPIIHSFEIAMVSMFPDLKKATPGNYYDFNELITEYEKRTKQKIDSSFLIKTRNMFLHDKYEAECIKEISDDFVYAKKIIAEFKMKIENIKLEDLSNDSSA

SEQ ID NO: 1685 - protein, 1127 aa, Artificial
  Synthetic
LQKQDKLFVDRKKNAIFAFPKYITIMENKEKPEPIYYELTDKHFWAAFLNLARHNVYTTVNHINKLLEIAELKNDEDVLNIKDSWNKQAEKLDKKVRLRNLLMRHFPFLEAAAYEKTTSKDSNSKEQKEKEQAEALSLDNLKNVLFIFLEKLQSLRNYYSHYKYSEEAQKPTFENDLLKNMYKIFDTNVRLVKRDYMHHENVDMQRDFSHLNRKKQEGQTRKIIANPNFRYHFADEKGDMTIAGLLFFISLFLDKKDAIWMQKKLKGFKDGRNLREQMTNEVFCRSRISLPKLKLENVQTKDWMQLDMLNELVRCPKSLYERLREKDRESFKVPFDIFSDDYDAEEEPFKNTLVRHQDRFPYFVLRYFDLNEIFEQLRFQIDLGTYHFSIYNKRIGDEDEVRHLTHHLYGFARIQDFAPQNQPEEWRKLVKDLDHFETSQEPYISKTAPHYHLENEKIGIKFCSTHNNLFPSLKTEKTCNGRSKFNLGTQFTAEAFLSVHELLPMMFYYLLLTKDHPKGKGINKIEKIIRKEISNIYAIYDAFANNEINSIADLTRRLQNTNILQGHLPKQMISILEGRQKDMEKEAERKIGEMIDDTQRRLDLLCKQTNQKIRIGKRNAGLLKSGKIADWLVNDMMRFQPVQKDQNNIPINNSKANSTEYRMLQRALALFGSENFRLKAYFNQMNLVGNDNPHPFLAETQWEHQTNILSFYRNYLEARKKYLKGLKPQNWKQYQHFLILKVQKTNRNTLVTGWKNSFNLPRGIFTQPIREWFEKHNNSKRIYDQILSFGRVGFVAKAIPLYFAEEYKDNVQPFYDYPFNIGNKLKPKKGQFLDKKERVELWQKNKELFKNYPPEKRKTDLAYLDFLSWKKFERELRLIKNQDIVTWLMFKELFNMATVEGLKIGEIHLRDIDTNTANEESNNILNRIMPMKLPVKTYETDNKGNILKERPLATFYIEETETKVLKQGNFKVLAKDRRLNGLLSFAETTDIDLEKNPITKLSVDHELIKYQTTRISIFEMTLGLEKKLIDKYSTLPTDSFRNMLERWLQCKANRPELKNCVNSLIAVRNAFSHNQYPMYDATLFAEVKKFTLFPSVDTKKIELNIAPQLLEIVGKAIKEIEKSENKN

SEQ ID NO: 1686 - protein, 1127 aa, Artificial; identical to SEQ ID NO: 1685
  Synthetic

SEQ ID NO: 1687 - protein, 1267 aa, Artificial
  Synthetic
MAFDKPRPKRRQARSDFYITDKAIMGGYFNLAQLNFFKTLMEIFTKAGIDVSKIKQDNSPKYLMILIKKLTHDDEKIDDKKWADALDLSNECLLKLQQLLYKHFPFLGPVMGGEASYNIYKLKDGHPEVKVANDVMRGMKLEDCLAVLRHFALCLNDCRNFYTHFNPYNSIDAQKEQYLSQNKVAVWLEKVKDASRRIVKQNNQLTSQDMEFLTGIDHMKPQDKVDDFGNIMTDKKGYTIKEYVEYEDYYFRIRGKRYLVDAAGAKLADQEPRNALSDFGVVFLCTLFLENDQSRRMLDELRLFETGPYDGSRDGDEFKNDILREILLFYRARIPRGKRLDPMDDTTLLAMDMLNELRKCPMPLYDVLSREGQRFFEDEVKHPNDLTPEVAKRLRSSDRFPYLALRYIDLNKCFDNIRFQVQLGKFRYKFYDKTTIDGEQVVRGLQKEVNAYGRFQDVEHYRQEKYADMLQQTELVETGEEDITIANFIPDTPQSSPYLSDRTASYNIHNNRIGLLWNMPGEHEVLTGDEKMYLPDLNVDDNGKADVFLPAPKASLSVRDLPALVFYLYLQNQHPDLTPAEAIIQQKYNALVRFFEDVSTGRLLPVKGIAELEAAIDKYGHLTVHEIPEKLRDYLAGVAGTEDDDDCADRLDCYAMGILEKRYRQVAARIDQLKEARKMVGDKMNRYGKKSYIDVRPRRLAEQLAQSIVEWQPATDNGRHKMTGKNFQRLIAFLARYIDEVPLQELKDLMTRARLLEGPVAHPFLQQVLDKNPLNIEVLYDLYFKEEKRYLDKYIDIEINKQGEEVYWLKADADLSKIPFLNSSRLRFHKRDSASFQRLAARYLQVDGRQSTILLPDGLFTPHILSALKSTLYQENHDLQDHLQDQELNQNASYLMSVYLEHVLHDSAQPFYLSNSNDSPFARRYDLFAIVQNKKRGAELLPGPLTPVEINRRLTAKTPDGSAKLIERDIVALLEDMARKTEQRIHKLPQDLYLKKKKQAQEERIKLQRRLKHKITDVKKNERAIRRYKTQDMAIFLMAQQMLANQLSWQNQEGEVPLKLANVCNDGFLSQTMKVSFPYEVPLKEDKTKKVTIDIVQDNMSLKNYGLLYKLYHDERVVTLLQNIVDQQQISFAELTAELSLYDQNRSKAFSNFQQFEKLAFETNREALSNPEHRGFFLEKVNKKNQVIRYERRNNFDALLDLLDAIEAHQLDPRDRQWLTSVRNAFCHNSYYKIDMQQIEKKLPTIIQQIVEIVQRITDKASHPSNR

SEQ ID NO: 1688 - protein, 1127 aa, Artificial
  Synthetic
LQKQDKLFVDRKKNAIFAFPKYITIMENKEKPEPIYYELTDKHFWAAFLNLARHNVYTTINHINRRLEIAELKDDGYMMGIKGSWNEQAKKLDKKVRLRDLIMKHFPFLEAAAYEMTNSKSPNNKEQREKEQSEALSLNNLKNVLFIFLEKLQVLRNYYSHYKYSEESPKPIFETSLLKNMYKVFDANVRLVKRDYMHHENIDMQRDFTHLNRKKQVGRTKNIIDSPNFHYHFADKEGNMTIAGLLFFVSLFLDKKDAIWMQKKLKGFKDGRNLREQMTNEVFCRSRISLPKLKLENVQTKDWMQLDMLNELVRCPKSLYERLREKDRESFKVPFDIFSDDYNAEEEPFKNTLVRHQDRFPYFVLRYFDLNEIFEQLRFQIDLGTYHFSIYNKRIGDEDEVRHLTHHLYGFARIQDFAPQNQPEEWRKLVKDLDHFETSQEPYISKTAPHYHLENEKIGIKFCSAHNNLFPSLQTDKTCNGRSKFNLGTQFTAEAFLSVHELLPMMFYYLLLTKDYSRKESADKVEGIIRKEISNIYAIYDAFANNEINSIADLTRRLQNTNILQGHLPKQMISILKGRQKDMGKEAERKIGEMIDDTQRRLDLLCKQTNQKIRIGKRNAGLLKSGKIADWLVNDMMRFQPVQKDQNNIPINNSKANSTEYRMLQRALALFGSENFRLKAYFNQMNLVGNDNPHPFLAETQWEHQTNILSFYRNYLEARKKYLKGLKPQNWKQYQHFLILKVQKTNRNTLVTGWKNSFNLPRGIFTQPIREWFEKHNNSKRIYDQILSFDRVGFVAKAIPLYFAEEYKDNVQPFYDYPFNIGNRLKPKKRQFLDKKERVELWQKNKELFKNYPSEKKKTDLAYLDFLSWKKFERELRLIKNQDIVTWLMFKELFNMATVEGLKIGEIHLRDIDTNTANEESNNILNRIMPMKLPVKTYETDNKGNILKERPLATFYIEETETKVLKQGNFKALVKDRRLNGLFSFAETTDLNLEEHPISKLSVDLELIKYQTTRISIFEMTLGLEKKLIDKYSTLPTDSFRNMLERWLQCKANRPELKNYVNSLIAVRNAFSHNQYPMYDATLFAEVKKFTLFPSVDTKKIELNIAPQLLEIVGKAIKEIEKSENKN

SEQ ID NO: 1689 - protein, 1127 aa, Artificial
  Synthetic
LQKQDKLFVDRKKNAIFAFPKYITIMENKEKPEPIYYELTDKHFWAAFLNLARHNVYTTINHINRRLEIAELKDDGHMMDIKGSWNEQAKKLDKKVRLRDLIMKHFPFLEAAAYEITNSKSPNNKEQREKEQSEALSLNNLKNVLFIFLEKLQVLRNYYSHYKYSEESPKPTFETSLLKNMYKVFDANVRLVKRDYMHHENIDMQRDFTHLNRKKQVGRTKNIIDSPNFHYHFADKEGNMTIAGLLFFVSLFLDKKDAIWMQKKLKGFKDGRNLREQMTNEVFCRSRISLPKLKLENVQTKDWMQLDMLNELVRCPKSLYERLREKDRESFKVPFDIFSDDYDAEEEPFKNTLVRHQDRFPYFVLRYFDLNEIFEQLRFQIDLGTYHFSIYNKRIGDEDEVRHLTHHLYGFARIQDFAPQNQPEEWRKLVKDLDHFETSQEPYISKTAPHYHLENEKIGIKFCSTHNNLFPSLKREKTCNGRSKFNLGTQFTAEAFLSVHELLPMMFYYLLLTKDYSRKESADKVEGIIRKEISNIYAIYDAFANGEINSIADLTCRLQKTNILQGHLPKQMISILEGRQKDMEKEAERKIGEMIDDTQRRLDLLCKQTNQKIRIGKRNAGLLKSGKIADWLVNDMMRFQPVQKDQNNIPINNSKANSTEYRMLQRALALFGSENFRLKAYFNQMNLVGNDNPHPFLAETQWEHQTNILSFYRNYLEARKKYLKGLKPQNWKQYQHFLILKVQKTNRNTLVTGWKNSFNLPRGIFTQPIREWFEKHNNSKRIYDQILSFDRVGFVAKAIPLYFAEEYKDNVQPFYDYPFNIGNKLKPQKGQFLDKKERVELWQKNKELFKNYPSEKKKTDLAYLDFLSWKKFERELRLIKNQDIVTWLMFKELFKTTTVEGLKIGEIHLRDIDTNTANEESNNILNRIMPMKLPVKTYETDNKGNILKERPLATFYIEETETKVLKQGNFKALVKDRRLNGLFSFAETTDLNLEEHPISKLSVDHELIKYQTKRVRIFEMILRLEKKLIDKYSTLPTDSFRNMLERWLQCKANRPELKNYVNSLIAVRNAFSHNQYPMYDATLFAEVKKFTLFPSVDTKKIELNIAPQLLEIVGKAIKEIEKSENKN

SEQ ID NO: 1690 - protein, 1127 aa, Artificial
  Synthetic
LQKQDKLFVDRKKNAIFAFPKYITIMENKEKPEPIYYELTDKHFWAAFLNLARHNVYTTINHINRRLEIAELKDDGYMMDIKGSWNEQAKKLDKKVRLRDLIMKHFPFLEAAAYEMTNSKSPNNKEQREKEQSEALSLNNLKNVLFIFLEKLQVLRNYYSHYKYSEESPKPTFETSLLKNMYKVFDANVRLVKRDYMHHENIDMQRDFTHLNRKKQVGRTKNIIDSPNFHYHFADKEGNMTIAGLLFFVSLFLDKKDAIWMQKKLKGFKDGRNLREQMTNEVFCRSRISLPKLKLENVQTKDWMQLDMLNELVRCPKSLYERLREKDRESFKVPFDIFSDDYDAEEEPFKNTLVRHQDRFPYFVLRYFDLNEIFEQLRFQIDLGTYHFSIYNKRIGDEDEVRHLTHHLYGFARIQDFAQQNQPEEWRKLVKDLDHFETSQEPYISKTAPHYHLENEKIGIKFCSTHNNLFPSLKREKTCNGRSKFNLGTQFTAEAFLSVHELLPMMFYYLLLTKDHPKGEGVNKIEKIIRTEISNIYDIYDAFANGEINSIADLTCRLQKTNILQGHLPKQMISILEGRQKDMEKEAERKIGEMIDDTQRRLDLLCKQTNQKIRIGKRNAGLLKSGKIADWLVNDMMRFQPVQKDQNNIPINNSKANSTEYRMLQRALALFGSENFRLKAYFNQMNLVGNDNPHPFLAETQWEHQTNILSFYRNYLETRKKYLKGLKPQNWKQYQHFLILKVQKTNRNTLVTGWKNSFNLPRGIFTQPIREWFEKHNNSKRIYDQILSFDRVGFVAKAIPLYFAEEYRDNVQPFYDYPFNIGNKLKPQKGQFLDKEERVELWQKNKELFKNYPSEKKKTDLAYLDFLSWKKFERELRLIKNQDIVTWLMFKELFNMATVEGLKIGEIHLRDIDTNTAKAESNNILNRIMPMKLPVKTYKINNKGKMEMEKPLATFYIEETETKVLKQGNFKALVKDRRLNGLFSFAETTDLNLEEHPISKLSVDHELIKYQTTRVRIFEMILRLEKKLINKYPTLPTYSFKNMLESWLEDKTNSAELNNYVDCLIAVRNAFAHNQYPMYNPKLFAEVKKFSLFPSSNTKKTELNIASQLLRIVEKAIDEIEKSENKN

SEQ ID NO: 1691 - protein, 1168 aa, Artificial; identical to SEQ ID NO: 1357
  Synthetic

SEQ ID NO: 1692 - protein, 1003 aa, Artificial
  Synthetic
MGAIENKHIFAAYANLAIDGLIKTLNFIAKKLDTQKQLSSWDIKHVITLIDSIFDQNPQNNLEQVVEGYLPWIKPIIEMKTPKKGERQSDKLCIEYKTIITAFASLLNDVRNYYTHYYHDPICIYPGGYDIPSSLNCIYDSAINIIKERFQAEEKEMEHLRRYTRKKGRVVLKTEDDHFYYTLANNNDLSEKGYAFFISMFLERKYSYLFLKKLSGFKRGDSLQYRLTLEVFTALSTKPPVERLRTTKDTKQDRALDILNELSRIPIELYQTLEPKYREMYNETLQPTDAEDPYGLPDRSRIRFRSRFEAFALHFLDKQADFKEIGFYTYLGNYFHNGYQKTRVDRETKDRYINFQLAGFCKNIQDISAKKLSEALNVKSIDISTDSIPDINSFEPYLVQSTPHYIVNGNNIGIKVLPEGKDTYPTIDEKGAKMPIADFWLSKYELPAMLFYTYLRNNNIHKSHCPLSVKDIIERSIHKSTKQKHPEERSELMLRRVMKAIFWTDSKLNEVERIKSQKSAFGKRQHEILKAGRIAETLVRDMLWLQPSKNNGRDKVTEPNFQAIQVSLAYFGIRRNDLTEIFTRAGLINSSNPHPFLAQIGTNYTSLIEFYIAYLKERKVYFSRIQKKILQGKLNIQCHPLRDLQREPNKPQEKEEAIFLPRGLFNEAIINCLKKSKLKQLIESPTREKSPALNVSYLIQNYFRTYFEDQSQEFYAQPRNYRLFDKLSPNKGKSKSYLSLEQRIKKMEELRPSKIPVAEANKLLEKEDRLYRKNYNEICDNESIIRLYQIQDILLFMMTKEYLPSDLYNRINKYKLENVKGILNERVSYLIDLNPLKIQGEDIKIKDYGKLFYIHHDTRINSLNKVLSKVKRNNSISSSVKIQPYENYKRECLDFEEAQIQIIPIIHSFEIAMVSMFPDLKKATPGNYYDFNELITEYEKRTKQKIDSSFLIKTRNMFLHDKYEAECIKEISDDFVYAKKIIAEFKMKIENIKLEDLSNDSSA

SEQ ID NO: 1693 - protein, 1102 aa, Artificial
  Synthetic
MENKEKPEPIYYELTDKHFWAAFLNLARHNVYTTINHINRRLEIAELKDDGYMMGIKGSWNEQAKKLDKKVRLRDLIMKHFPFLEAAAYEMTNSKSPNNKEQREKEQSEALSLNNLKNVLFIFLEKLQVLRNYYSHYKYSEESPKPIFETSLLKNMYKIFDTNVRLVKRDYMHHENVDMQRDFSHLNRKKQEGQTRKIIANPNFRYHFADEKGDMTIAGLLFFISLFLDKKDAIWMQKKLKGFKDGRNLREQMTNEVFCRSRISLPKLKLENVQTKDWMQLDMLNELVRCPKSLYERLREKDRESFKVPFDIFSDDYDAEEEPFKNTLVRHQDRFPYFVLRYFDLNEIFEQLRFQIDLGTYHFSIYNKRIGDEDEVRHLTHHLYGFARIQDFAPQNQPEEWRKLVKDLDHFETSQKPYISKTAPHYHLENEKIGIKFCSTHNNLFPSLKREKTCNGRSKFNLGTQFTAEAFLSVHELLPMMFYYLLLTKDYSRKESADKVEGIIRKEISNIYAIYDAFANNEINSIADLTCRLQKTNILQGHLPKQMISILEGRQKDMEKEAERKIGEMIDDTQRRLDLLCKQTNQKIRIGKRNAGLLKSGKIADWLVSDMMRFQPVQKDTNNAPINNSKANSTEYRMLQHALALFGSESSRLKAYFRQMNLVGNANPHPFLAETQWEHQTNILSFYRNYLEARKKYLKGLKPQNWKQYQHFLILKVQKTNRNTLVTGWKNSFNLPRGIFTKPIREWFEKHNNSKRIYDQILSFGRVGFVAKAIPLYFAEECKDCVQPFYDYPFNVGNKLKPKKGQFLDKKDRVELWQKNKELFKNYPPEKRKTDLAYLDFLSWKKFERELRLIKNQDIVTWLMFKELFKTTTVEGLKIGEIHLRDIDTNTANEESNNILNRIMPMKLPVKTYETDNKGNILKERPLATFYIEETETKVLKQGNFKVLAKDRRLNGLLSFAETTDIDLEKNPITKLSVDHELIKYQTTRISIFEMTLGLEKKLIDKYSTLPTDSFRNMLERWLQCKANRPELKNYVNSLIAVRNAFSHNQYPMYDATLFAEVKKFTLFPSVDTKKIELNIAPQLLEIVGKAIKEIEKSENKN

SEQ ID NO: 1694 - protein, 1181 aa, Artificial; identical to SEQ ID NO: 1542
  Synthetic

SEQ ID NO: 1695 - protein, 1140 aa, Artificial; identical to SEQ ID NO: 1541
  Synthetic

SEQ ID NO: 1696 - protein, 1127 aa, Artificial
  Synthetic
LQKQDKLFVDRKKNAIFAFPKYITIMENKEKPEPIYYELTDKHFWAAFLNLARHNVYTTINHINRRLEIAELKDDGYMMDIKGSWNEQAKKLDKKVRLRDLIMKHFPFLEAAAYEMTNSKSPNNKEQREKEQSEALSLNNLKNVLFIFLEKLQVLRNYYSHYKYSEESPKPIFETSLLKNMYKVFDANVRLVKRDYMHHENIDMQRDFTHLNRKKQVGRTKNIIDSPNFHYHFADKEGNMTIAGLLFFVSLFLDKKDAIWMQKKLKGFKDGRNLREQMTNEVFCRSRISLPKLKLENVQTKDWMQLDMLNELVRCPKSLYERLREKDRESFKVPFDIFSDDYDAEEEPFKNTLVRHQDRFPYFVLRYFDLNEIFEQLRFQIDLGTYHFSIYNKRIGDEDEVRHLTHHLYGFARIQDFAPQNQPEEWRKLVKDLDHFETSQEPYISKTAPHYHLENEKIGIKFCSTHNNLFPSLKREKTCNGRSKFNLGTQFTAEAFLSVHELLPMMFYYLLLTKDHPKGEGINKIEKIIRTEISNIYDIYDAFANGEINSIADLTCRLQKTNILQGHLPKQMISILEGRQKDMEKEAERKIGEMIDDTQRRLDLLCKQTNQKIRIGKRNAGLLKSGKIADWLVNDMMRFQPVQKDQNNIPINNSKANSTEYRMLQRALALFGSENFRLKAYFNQMNLVGNDNPHPFLAETQWEHQTNILSFYRNYLEARKKYLKGLKPQNWKQYQHFLILKVQKTNRNTLVTGWKNSFNLPRGIFTKPIREWFEKHNNSKRIYDQILSFDRVGFVAKAIPLYFAGEYKDNVQPFYDYPFNIGNKLKPQKGQFLDKKERVELWQKNKELFKNYPPEKRKTDLAYLDFLSWKKFERELRLIKNQDIVTWLMFKELFKTTTVEGLKIGEIHLRDIDTNTANEESNNILNRIMPMKLPVKTYETDNKGNILKERPLATFYIEETETKVLKQGNFKVLAKDRRLNGLLSFAETTDIDLEKNPITKLSVDHELIKYQTTRISIFEMTLGLEKKLIDKYSTLPTYSFKNMLESWLEDKTNSVELNNYVDCLIAVRNAFAHNQYPMYNPKLFAEVKKFSLFPSSNTKKTELNIASQLLRIVEKAIDEIEKSENKN

SEQ ID NO: 1697 - protein, 1127 aa, Artificial
  Synthetic
LQKQDKLFVDRKKNAIFAFPKYITIMENKEKPEPIYYELTDKHFWAAFLNLARHNVYTTINHINRRLEIAELKDDGYMMGIKGSWNEQAKKLDKKVRLRDLIMKHFPFLEAAAYEMTNSKSPNNKEQREKEQSEALSLNNLKNVLFIFLEKLQVLRNYYSHYKYSEESPKPIFETSLLKNMYKIFDTNVRLVKRDYMHHENVDMQRDFSHLNRKKQEGQTRKIIANPNFRYHFADEKGDMTIAGLLFFISLFLDKKDAIWMQKKLKGFKDGRNLREQMTNEVFCRSRISLPKLKLENVQTKDWMQLDMLNELVRCPKSLYERLREKDRESFKVPFDIFSDDYDAEEEPFKNTLVRHQDRFPYFVLRYFDLNEIFEQLRFQIDLGTYHFSIYNKRIGDEDEVRHLTHHLYGFARIQDFAPQNQPEEWRKLVKDLDHFETSQKPYISKTAPHYHLENEKIGIKFCSTHNNLFPSLKREKTCNGRSKFNLGTQFTAEAFLSVHELLPMMFYYLLLTKDYSRKESADKVEGIIRKEISNIYAIYDAFANNEINSIADLTCRLQKTNILQGHLPKQMISILEGRQKDMEKEAERKIGEMIDDTQRRLDLLCKQTNQKIRIGKRNAGLLKSGKIADWLVSDMMRFQPVQKDTNNAPINNSKANSTEYRMLQHALALFGSESSRLKAYFRQMNLVGNANPHPFLAETQWEHQTNILSFYRNYLEARKKYLKGLKPQNWKQYQHFLILKVQKTNRNTLVTGWKNSFNLPRGIFTKPIREWFEKHNNSKRIYDQILSFGRVGFVAKAIPLYFAEECKDCVQPFYDYPFNVGNKLKPKKGQFLDKKDRVELWQKNKELFKNYPPEKRKTDLAYLDFLSWKKFERELRLIKNQDIVTWLMFKELFKTTTVEGLKIGEIHLRDIDTNTANEESNNILNRIMPMKLPVKTYETDNKGNILKERPLATFYIEETETKVLKQGNFKVLAKDRRLNGLLSFAETTDIDLEKNPITKLSVDHELIKYQTTRISIFEMTLGLEKKLIDKYSTLPTDSFRNMLERWLQCKANRPELKNYVNSLIAVRNAFSHNQYPMYDATLFAEVKKFTLFPSVDTKKIELNIAPQLLEIVGKAIKEIEKSENKN

SEQ ID NO: 1698 - protein, 1003 aa, Artificial; identical to SEQ ID NO: 1632
  Synthetic

SEQ ID NO: 1699 - protein, 1186 aa, Artificial
  Synthetic
VRLQIFTFIKPYMNPENNIVKNYSVKETPWYFGAYLNMARHNVYLLINHLTDKFSYLKNYKKLSLEKQTGTSKFELRPQPFSILTDDEQIVNENILTKIFDTSYPQYDNDRFRIYKYMVRKHSLPFIKNFSETGGRNLDDNPIIDYDGLHQYINEAFALLVRLRDSFSHYLAIDKFGNKIEDRNLTVSTNIHTQVINLYTNSPNYSLERFSATQSDFDYEHLSLYKIFEADNITFTEQGLYFFINLFLERGYGIKFLKKIRGFKNDTNPAFRATIKTFTTYALKVPDERLDNDDPRMSLLMDVLNELKRCPAILSKHLSDQDQKKFNPQLNDDSKANVLLNSVNYDDIDDEQIDYLLNSITTFKRHQDRFPYFALRCIDELNLLPNIRFQVALGSIERRSYDKVVGDVIIDRRILKKLNAFGKLSYFEGKEEQVLLELNRKVKDQDLLFDQFNPHYNINNNKIGFYTFSSGKEKIQWPTIADFPKEGNLHQKRDNSIPKSFLSIHELPKLLLLALKDPELAEKTITDFLDVNKNLVLNKAALGQIRDKIKLCPSIFNRRRVEEKALKQKGRIQFLNHAQIKNLRQRNKITDERLADLKFMDSMISNTKNIKIKEYLKQINYNQVLETRKDALRQVLPAGLKVNQLPTIVIDYLLGMVGQDPHKKILARFKEIKTDTNKRLKQLDRDDDSRLKVGEIATFLTKDIINLVISEDLKKKITSAYYGRIQYQFANFSISKGELTTIIEQLGLFDNIKGHPFLASSMLNKVKGIREFYDNYLSAKLKWINGIIANKNLKDLLKNNKISLPFKIKSIISKSEAKNLDNWLKSKKDMPVDLPVSIFDDQLNTYLKKELQHVNIAFQETDKFSVLLTKLLNGDKQPFYNHTRWYRSEEGDVPFSPDGHSSLTIKNNYSSYAELTEKKIRHVQTQDRVLRLACQSILGQLSDVDDTLTFYLQDILAFTNTNPLNRPATFKHKLKEISSEGVYVVAEDTLSQKEEVVKYLVLEQEEEQNLYDGQKGFQWTIKDFGRFRRFMHDRRLPAIFNYLETSISSYDLLSYQISEYDRYREAIFRETFELEAYLANTYFDEVVVLKLQDKAIFPQVQFKTYLELIKQRNMLDKAACEFINSIRNKFSHSEFPDYYPEISKITVDDIDDFELNKSKKGFKEYAGLSISKKVFDLYQSIMVSCK

SEQ ID NO: 1700 - protein, 1011 aa, Artificial; identical to SEQ ID NO: 1361
  Synthetic

SEQ ID NO: 1701 - protein, 1160 aa, Artificial
  Synthetic
MKNEILTNSKSLKSNPDYFSAYLNMARHNAYLILSHISDKLKPKKTNTPEDALHSAYALEVLKSSKEPDITAKSIKMLNEHFPFLKVMFDTNSITEKSKGSKGIYSEKLPEQYLDKMMLLLDHLNNYRNSYTHCVHIPIINDKNFIYCLNNIFDASVRTVKDRFEFSENDVSHLRRYEQVFDPETKKRKASRKKDFKYNFIDNDDISEKGIAFFIALFLEKKHAFEFLKKLSDFKDSRTKMMQATLESYCVYHIRLPKERIENTQNDLSLCLDIFNELKKCPSELFDLLKKEDAEKFRIKPDINNLNDEDSGNIVENSTDDYNVEPILKRYSNRFPYLAMRYIDEKKVFQKLRFHVDLGNYYFKFYPKTTVDGEKRDRSLKVHLNSFGRLDDLNHARLVEWNDLIRFHKEEEDENPIEELMPYITDTYPHYHLHNNQIGLKDTQNNPDKLLPKIEREKTKTEQPDFWLSTYELPALLFYSYLLKKKRDISAEDLILNCRKKYHTLFKLISEGNGPEIKECQVTIKQKGKNISVFLLTAHFEDETGKSHEIELNDLPQVFQNYLTDKQLHNREELAENKINRLIIETERRREKINKDLERINGLKGNKRGKKNFVEIKSGMLADFLAKDTIRLQPSIDAIGKDKITGLNFQILQSHLAFYGRDFLMLKDIFRQCKLVDAQISHPFLYKLNPEDHFDIVSFYKAYLGERKKYLEQCNRNKDYKSYYFLKFNSQKFTTETIEYCKDLAKKLMNTHSQDNHPINLPRGMFMDAIIDWFKKHGDPQLQAIAKTERVNAVYLIQKFFEFKKDSNQPFYDYPRSYDFIDKLENFNNMRCGRPLLLQRKYYSIQQLADKIDDVKTRITKLPESEPNDSHPRKRMLATLSDYKQNEKLLRLYKTQDRILFLVASDILFAQKPQGLEENDLKLSNVKPKPENDSDEDLLSSQLPFRFPYQYWDVTSKGEIDHKNKIGEVIIFQKKLKLKNYGDFIRYTKDRRLNNLFHWTGDIELEMPVLQKELERYEEARLTVFRLIHDFEKAMYEKHHLFFDELLKTNKLKKENENENSYINHEEMLEKFFSDYPELIHYEDVMLTIRNCFSHNQYPVKCAFDNIDSIGLFEGCPDIESDHDNELNIAMRIKNHAIATYGEFIKILTNLTPIHDINVS

SEQ ID NO: 1702 - protein, 1145 aa, Artificial; identical to SEQ ID NO: 1631
  Synthetic

SEQ ID NO: 1703 - protein, 1160 aa, Artificial; identical to SEQ ID NO: 1701
  Synthetic

SEQ ID NO: 1704 - protein, 1145 aa, Artificial; identical to SEQ ID NO: 1631
  Synthetic

SEQ ID NO: 1705 - protein, 1126 aa, Artificial; identical to SEQ ID NO: 1409
  Synthetic

SEQ ID NO: 1706 - protein, 1168 aa, Artificial; identical to SEQ ID NO: 1357
  Synthetic

SEQ ID NO: 1707 - protein, 1003 aa, Artificial; identical to SEQ ID NO: 1494
  Synthetic

SEQ ID NO: 1708 - protein, 1156 aa, Artificial
  Synthetic
MENHTKQTTYKYDEIADKHYFAGFFNLAWNNIEIVFKVFLKKFKLIEDKDKKIEVNPLSFVDNYFKNELALSDYRDRIDFLKQYFPVVQYLELLVSKNNDLEKCIGEEKENKRRECFRAKFKSLIRTINELRNYYTHHYHKPIIVDEATFELLDELFLTVVKEVKRYKMKGEPIRHLFKKELNNELTALIKLKKSELETRRKEGKRVNIDPVSIENAVLNDAFSHLLFGEKGEKFYQSKSTSSNQQSTINISESGLLFLLGMFLHRKESERLRSNIQGFKAKVVRDPEKPIDFKNNSLKYMATHWVFNHLAAKPIKERLNTAFQKETLLLQIADELSKVPDEVYQTFSQEKKNEFLEDINEYFKTGNDIKSFEESRVVHPVIRKRYENKFNYFVLRFLDEFIDFPTLRFQIHLGNYVHDQKEKPISQGTHLITQRIIKEKINLFGKLSEVTNNKTDFFQKLEVAGGETNLEMFPEPSYNFVGNNIPIYLNLAKSKVEGAKELNSHLIRLNNEEKKHQKKRTGNKPDKTAILSEIQISGISYGKPVALLSLNELPALLYELLINGKSGEEIENILVEKLVARYKTINNFSPDNPLPTSQISKKLRKATANERIDIDKLIRAIDREITVSKEKANLIATKLRDWENAKTNRKYVFTKKELGQEATWLADDIKRFMPNKIKENWKGYQHSHLQLLLTFYESRPNEAYSFLREFWNLDDDTYLFNRWLKTSFNEKSFHKFYLKYLENRKEYFENIQQQITAFKNQEKLLKKFIEQQHIWSVFYKRLYIVSPIEEQKRQLLLKPLVFTRGIFDPKPTYIEGKEFEGNKDLFADWYQYIHDEEHVLQKFYSWKRDYKELFEKFKASDEFTNNKYQLSEKQQFELFNRKWDKKIRKIIGQDLFLNLIIKRIIKELYHQDVALNLADYYLTQEERIEKEQRAKQQTNRLKGDKSENIINDSFIWNMTISYKTDYIDEPAIKLKDIGKFIRFLNDEKVERIFSYTPKKNNWRKDKIEKELEMYEKIRREEVFKMIQELEKKILEKHKFDGINHPDEFEKSGNPNFKKYIAQGVLKKHGIQDVVIEWIENLGENSYEDNNTLELLVQKDKKVQDAFLLIYLRNKFAHNQLPTKEIFDIIVSKTDTKSYVAETLLNYISITSRRILN

SEQ ID NO: 1709 - protein, 1502 aa, Artificial
  Synthetic
MGKGKKGNANKQPKQQVIRFSVKQFSIKEGDKKIYGGYFNMGLCNYYKAISHIFSVLGIRQIVTTKFNDEYVKVPMYSEENLYVVLRYFKKFIDDRTQEESIKKKIQSALRLKSQDQELQKINDEELDDLMKSLHLTNEQLVKFQQLLFKHFPVLGPIMADVVSKNVNDEVKKAIEGEDDEKVINRKKSKVIQSYDNLRGVTLSQCLEEVANLGECLKDCRHYYTHYRPYNSQNTQKKIFDRQYEVAKKLNKVLTASRRIDKRRNALTSEQMEFLTGTDHFKKVDKKFIERESFYFNLKGQRIASTTSKDQEGIVTTISTTHRALSDFGIAYFCATFLSKTYERKFLDEIKLLKTSPLLFDIPASDENLKKVSMQELSDADIANHFRQYCKLQNINDNNIANYVKTFIGDLFNKNEDGTINYSDTPKGVIRVYIGNPLSEQENKLMEEILAVYRVRTPRGKRLDSQSNSITLGMDMLNELRKCPMELYDTLPIEGQKFFEDKVKRENEHTPEIVKRLRSKDRFAELALHYIDEQKKFNDVNIRFQIRLGSFRYKFYDKICVDGEERVRRIQKEVNGYGRIQDVETERKKKWEDDLQKANTQSVKLEHEDLYLDLLQFEKDHKDSTPYITDRRAEYNIHRNRIGMLWNQDSEEKKYLQDEGLYYLPELTVTGENDNRKSPLDMPAPLCSISIYELPAMLFYQYLQENYNDSNGKEYYTTEQIIKTKYDGLVKFFTDIKNGMFVHQPDEKSLKIHLEKTYKLFLTDIPVKLRQYITDEMPEETPMEHLLDLTIGEKKDLGRLIPRIKRLEHRRDTYKQDREKIGDKTNNYGKKSFVDVRHGSLAKFLVRDIVGWQGSKNNGRDKLTGLNYTAIQAFLSVYGQKDEYGCKELEEMLRRSNLLKQRYQSLPKDKDKRRGLKKYDSQLENNPIAHPFLDAVLQCSPRNIEEFYLFYLDEEIKKLKSLAENLIKAKNQEASLNNIPFIHTNRVKYQDRTSEEAIRQLAARYLEISDKDANGSPVKHRATILLPDGMFVNYIHTILADNFKDNKEFIKAISHQDNPATYKQNGKHDNSNKNAAHHITQFFEKILGDHSQEYYYAKDSRQIIEEDDAYGDRAIQRKGDYDRFARNYDIFKLLHDHIKGAEVMPYYLSPQQINDQISKRAKDKLGKDIPLENKVTTDGAPRFLKEIQLRIDRLVNKKRQNAINKALHPKFGKPKKPNYQKLDIADEELHERLEHAILFCKENEKAIRRYKTQDMVLFLLAKQLIENAIQSEDSSDCSEKFKLGNICKDNFLKQTVRYEFPVTTSDGHTVKVTQPNMSLKNYGEFYRLLSDERFISMLEQLKDIDVINYNKLMAELVTYDNYRSEIFGVIHKVEENIYKQKEIIHDENHDLDEFYIDNDKNKMAKRNNFSEMLELLKDVDTSKLTKEERSMFVKIRNAFSHNHMRIPFRNWMTEDEREEYKEWMAKDDVPKEKQQGRIAPPNISDHILKKANELKKKSGCES

SEQ ID NO: 1710 - protein, 1519 aa, Artificial
  Synthetic
MATFRFQNKYVCGAYYNMAQNNFRLAILHVLSRIGINRKDEERAIPELLDTIYGFLTGDTEHFNDTQILQKKVLTLRYDQQVKLRELLFRQFPILKPIIASETHKSLQEQKEKLSEMEEYIHEFEKQLKRLYRSKKGKASQEQKEINEQIKYLKTKKSKYLDEYDTLLFSKSHDADLQLCLKILKTMAWCLYDLRDFYTHYDPYNTPESLKVKYLRQVTVANWLSQVFAASRTIDKERNSITTEEMNFLNEAKKQGNDKKWREDPDYYFAIKGQNLLSSSFIDADSPVYNDYLDELYQKYRKKRLAWMKEQRDEALERDDEEEYGFWVVEMEKLDNPERIAKIKSKICPLALSDFGVLYFCATFLPRNYTLLMADHAEVMKNSPYSMTAEELEARRNACKTDEEREKIDPTDTPRNNILREMLCIYRVRLPKGKRLDKKDTKGLLTLDILNELRKCPKEVYEQLSKEGKDFFISRVSSASHNAPDIVKRIRFGDRFPYLALRAIDESDVFKRIRFQVRLGSYRFYFYNKTCIDGSTQLRRWQKEINGFGRLQDMEALRKSLWKDLLQKKEYDSVQLEDKSGYLDLQQFKADAPDSVPYITDSQAQYNIHNNRIGLIWNGDECRLLRNIKDADVLREYVYLPDLKDNDGNPKKSGKDIEQPSPLCSLSTYELPALLFYHFLYNTPEAQVHKERLEKPEQVIIKKYEALRAFFLELRSHPEQIVKTDLQATLTRFGLKCSEIPQRIIDCIQGCQQKQKETESSVTYLPDLLQLPMEDIRQKVQEKGMERYKDLPAKFRKQISHEQIVTSGLETLLKPLGISVESLPAKVMEALLSTQIQEDVAPAEDASTEKPFNIMFVRSVVYKLHERLQDVSKRHQSFVESIHRVGSKDNKFAKHGYMDVRHGKLAEYLAGSFLKWQPTISNGSDKLTGLNYNVLKSFLSTYGIATDIDDLTAVLHEAKLIHLGKEETPIPHPFLQKVIDKEPDNLEKLFHLYIIQEKEYLSDLLIDYLLQISTAIGTEGQDADMLEEAYTCNGEKLISDMLEEYEAKSTADSRQSVYQLEHPAFTHPKRERWKQGTNIATLTQLAKSYTNPLLLPDGLFTEAIRHLMEIVYSDNQKLQDELSRQNSKGEAASHSVAFIIDVYSRIVLNDHVQSYYCSDLVQPECTNFARSYRLFDKLNNQKDPFKAFVRVPMDTIGIMQKLKTGKEQFEAEVETYIIDTERREKAEAEQKVRNKSVRENWKLDRYEQERERAIDNASWPDSKKQEERDKMERMKRFVQKNERAIRRYRIQDITLFLMARNMLSEVFSGDDGQSFDEQSRQNLKLENVCNEDFLSQTIDYEYAYQLGDRTVTIRQAGMSLKNYGQFYRFLGDVRLDTLLMLLANVKSVTLTDVASEFAKYDQERPLAFKKLQLLEQLAIETDQTGTLYNPEADGFSFINPKGQKEPKRNNFAKLLDLLKDLGSDKNKLLTDIRNALGHNKYITDSSAMTLNEQLEITQVAVKMSEQISLLQQGIQENIK

SEQ ID NO: 1711 - protein, 1324 aa, Artificial; identical to SEQ ID NO: 1391
  Synthetic

SEQ ID NO: 1712 - protein, 1003 aa, Artificial; identical to SEQ ID NO: 1510
  Synthetic

SEQ ID NO: 1713 - protein, 1199 aa, Artificial; identical to SEQ ID NO: 1328
  Synthetic

SEQ ID NO: 1714 - protein, 1048 aa, Artificial
  Synthetic
MCCHTGSGNDYLEAFFLRTFCIEKELSLSKQRTILIDMACIIGRYRNMYSHSIFLSDDNEKVLESEKRCSEYLQSILTVSTRIIKERYRSNKNDAQRGMIDDKSLEFISENKVKFVYDENGKRITAPNKKYYLSTIDKDNTHLSYFGKLMLTCILLEKKYATAFLTQCHFLDAFNDSEAAPKLSERRLMLEVMTALRIRLAEKKLSNEKSEVQISLDILNELKKCPFELYELLGSEDKRLFTIVADTGETILLRRHEDRFPQLALSWIDSSKAFDHLRFQVNAGKLRYLFRDNKHCIDGQTRMRVLEEPLNGYRRLMEFEEERIQKQSGEIRSLWPGLDILNKDETPRNDASVLPYISDYRVRYLFDGDNIGISIGDFTPSITKTDETKYRVTGKTADCCLSKYELPGLLFYHLLTLRYGDNKRSTKNAEDIIIDAIKRYKRLFSDVKEGILKPIKEGNANQLGNRIWNSYGIDIKDIPDKIIDYLLVRECNEDEKFTAWKNGLISEMLQSTKNRIKRFEKDSEAVISSDNKPGKKNHVSLKPGAYASFIANDIVFFQECGATEKMTGLNFKVMQSRLATFTKDGSTSFNILLQTLKNAHLVSNTYGKGDHPFLYRVIKQQPSDIVQFYKIYLNEKVLYLQSDIPDNAIFLHGERKRWENRNEQYYRDLAERYLQRPIQLPRQLFESHIRQLLLSDCIKGERGNDLKEAINSAASQGRCNTTYMIMEYFADYLCDGTQFFYGLFDGDLSHEYNYRFYSLISNNIENSKKLVLTLKKGNNSKESPFISALERGIHWSKRNPLMKKGLKNDSSEGDFVHAAKRAYKEMTETERMFRRYAVQDEVLFLAAKITIRRALGLSEQYNCLLGDIKPQGGSLLEQTIPSITTKHTINTGNKKQKPKQVQILQKNVKLKDFGKVFKLLNDRRIFDLLFNKGNEAVSMTDLCEELERYDRHRVDVFDSVLKYESKITKGYTNKELMNESGQIDFKAIQAFDKQNTTADKEDLRLIRNAFSHNQYPQYNNEPILFDKDIPEIADEISIIAKDIEENTK

SEQ ID NO: 1715 - protein, 1171 aa, Artificial; identical to SEQ ID NO: 1648
  Synthetic

SEQ ID NO: 1716 - protein, 1347 aa, Artificial
  Synthetic
  misc_feature (683)..(689): Xaa can be any naturally occurring amino acid
  misc_feature (1077)..(1077): Xaa can be any naturally occurring amino acid
MPKNKKQAQNSFPKGNNSAPNQNKNKHTSSNQGKSQGNNTPKPNQKAVKEPKPLKVTKDNKYVLGGYFGLGLNNFFKAILSVFAKTGIKVASSKGTVLYPEEKIGAVLRTLYYMVAASDHKFTPEEQTWSKNFNLNVTQQERLKKLLFHHFPILGPIMAGETSYKAYNNKKSHVSDAYSLTYGVTLAECLDALSTLAQGLADCRNSYTHYDPHNTNESLKEQYEVQSKIVRYLDKVMVASRRIDKERNNIDTKQMEFLTGCADNLKSYINLYGFYPKYDKTVVKDEKGRTVKKMVERDDFFYKIGEKMNFGGESFTVLSGFGLTYFCAIFLSKSQTKQMLADIKLFEASPYPPELNEIVREIMCIYRIRAPRGKKKLESGDSKITLALDILNELRKCPKELFDVLTHTGQKFFEENIGSGTESSDEMEDVVKRIRHTDRFSHLAMKYIDETELFRNIRFQVQLGKFRFKFYDKKCINGEVDLRSLQKEINGFGRIQEIEPKRKEKYKDILQRAQTDKVKIEGQDLELDLLQFEKDTKASAPYITDSRAFYNIHNNRIGLYWNECLANGMTIPTPGDYIPELEVTEDGKAKVEMPAPIALMSIYELPALVFYQYLLSAHETDPRKSKNNSAERLIIEKCQALRQFFSDVSSGSLAPVGKRAILSATLMERYGLKLNEVPDKLVXXXXXXXKAEVITQQLIRRLRSAIRRRDHYIEDRKKIGGKDNKYAKKAYVDVRHGALGRYLSESLVEWQPTKNGGKDKLTGMNFNKLQAELETFSNPDKFDVIKMAMQGAGMLSGDIAHPFLNRVMSRQARNIEELYRFYLDEEIKYLKSFFDLSDKNTPKKDSNLDFDKLKLKQNVDISGIPFVRGNARWEERNEDYYRKLAKRYLEVDGLRTSIWLPDGIFTNAIVGILKECAVANPALSERLANEELNNNVAYLINTYFETILNDHSQVFYRSFDIDPATGKEKPNKFARVYDLFNILNNVKVRNALVEVPMTCNGITARLTEKAVGYGGEPLVVYGPKNKPMRAPNGDRVYMKQINVEINDRVAAMGERDKGNHATLEDAQEAMRRRLLHXHCVSDVKNNERAIRRYKTQDMVLFLIAAQLLGDAVKLNKINEINKFSLKNVCSKGFLSQTINFEFPIEIDSKTVYVSQDNMSLKNYGEFYHLLNDDRLPSLLSKLAAAAQEGEKSVVDYNKLMGELTSYDLHRSHIFHAIHQLEKRITSDPGFKPFLRNPSDVRFYIDNDKTRMAKRNNFRSLLTLLEEGDTKLLEKSERELIISIRNAFSHNHYNVDFNRIASRNALSRTTLMNKPDENDKDNRAKLTTIATLISARLEELQNIINRTK

SEQ ID NO: 1717 - protein, 1127 aa, Artificial; identical to SEQ ID NO: 1473
  Synthetic

SEQ ID NO: 1718 - protein, 1285 aa, Artificial
  Synthetic
MAFDKPRPKRRQARSDFYITDKAIMGGYFNLAQLNFFKTLMEIFTKAGIDVSKIKQDNSPKYLMILIKKLTHDDEKIDDKKWADALDLSNECLLKLQQLLYKHFPFLGPVMGGEASYNIYKLKDGHPEVKVANDVMRGVKLEDCLAVVRHFALCLNDCRNFYTHFNPYNPIEAQKEQYLSQNKVAVWLDKVKDASRRIIKQNNQLTSQDMEFLTGIDRMKPQDKVDDFGNIMTDRRGRPIKEYVEYEDYYFRIRGKRYLVDAAGAKLVDQEPRNALSDFGVVFLCTLFLESDQARRMLDELRLFETGPYDGSRDGDEFKNDILREILLFYRTRVPRGKRLDPMDDTTLLAMDMLNELRKCPMPLYDVLSREGQGFFEDEVKRPNDLTPEVAKRLRSSDRFPYLALRYIDLNKCFDNIRFQVQLGKFRYKFYDKTTIDGEQVVRGLQKEVNAYGRLQDVEHYRQEKYADMLQQTELVETGEEDITIANFIPDTPQSSSYLSDRTASYNIHNNRIGLFWNMPGEQEVLAGDEKMYLPDLNVDDNGKADVFLPAPKASLSVRDLPALVFYLYLQNQHPDLTPAEAIIQQKYNALVSFFEDVSTGRLLPVKDIAELEAAIDKYGHLTVHEIPEKLRDYLTGVAGTEDDDDCADRLDCYAMGILEKRYRRVAAHIDQLKEARKMVGDKMNRYGKKSYIDVRPRRLAEQLAQSIVDWQPATDNGRHKMTGKNFQRLIAFLARYTDEVPVQEIKDLMTRARLLDGPVAHPFLQQVLDKNPLNIEVLYDLYFKEEKLHLENYLEIETNKQGEEVFRKKASVDLSRIPFLNSGRLRFHKRDSASFQRLAARYMQVDGRQSTILLPDGLFTPHILSVLKSEYRDLQDHLQDQELNRNASYLMSVYLECVLHDSAQPFYLSNSNDSPFARRYDLFAILQNKKKGAELLPNPLAPVEINRRLTAKTPDGSAKLIERDIKALLDDMARKTEERIHDLQQEYSRKKEKQAQEERVKLERCFMRKIADVKKQAQEERINLQRRLKHKITDVKKNERTIRRYKTQDMAVFLMAKQMLANQLSWQNQEGEVPFKLANVCNEGFLRQTMKVSFPYEVPLKEDKTKKVTIDIVQDNMSLKNYGLLYKLYHDERVVTLLQNIVDQQQISFAELTAELSLYDQNRSKAFSNFQQFEKLAFETNKEALTHPEHRGFFLEKVNKKNQVIRYERRNNFDALLDLLDAIEAHQLDPRERQWLTSVRNAFCHNSYYKIDMQQIEKKLPTIIQQIVEIVQRITDKASHPSNR

SEQ ID NO: 1719 - protein, 1138 aa, Artificial
  Synthetic
METLYNSTNENSRRNLNDDPQYFGAYLNLARLNIFSINNHLAEEFKQKNRLTDEEHIRNSFICNSNIKNLNYNWLFEKLIRLMPIVKQFDSSRLPEEEQKKGDTEGKNLLLMAETLKEVFKDIQDFRNDYTHYYSVEKGDERKLNVSSATADFLVTSFHRAIEYTKSRFANVFSEDDFKLIQAKQLVLSNNSITVEGLVFLTAMFLDRENAFQFIGKVQGLKGTQFKSFIASREVLMAYCVRLPHDKLISDDPKQALLLDMLNELDRCPKLLYNVLSEDAKKQFRPILTKQSIEQVLENSVSDEERENILDNIDYSEYIEQLTVRVRHSNRFHYFAMRFIDEQNLLPDFFFQIDLGKYKLSEYEKSILGQSIPRSIIENAKAFGRLSKFVSEDDVQKIIDPGNLANGFEQFAPHYNTDINKIGFRFNEDICHIESIDAKAERRISVNLIQPQPMGFLSLHELSKIILLEYLQPGESIKLIRQFYKTANTQLFNIDFIELVKTKLPTNWGDLEKQCDTKNNKAYRNSKASLYELQKRKEELDKVLQFHGLNWTQIPERILNYWLNIQDVSYSKSISERILLMKRDGLKRLKQLKNHSNRPDVRIPKVGEMATFIARDIVDMIIDEEKKKKITSIYYDKLQECLAFYADKEKKQQLIGLVRELQLNLQGGHPFLKNLRLESIRKTSEFYELYLTEKFSKLVHKGLNQKGKPQSRDESWIIRTFEKKEWSDKAKKNLTVYKFPDNMKELPFSMQQWINKEQYDLRGWLRNINEGRNRNDQKRPIDLPTNLFNNKLCELLTQELRLAGKAIPNTTKYYELLRVWWLNRDDSVQGFYKGSRSYIIKDELVSFIPDSQPNFKKYYQEPLNKAFIRLSQKRQMDREKDKKLPVLDKTDIEKTFKKTLFDTEKNIRLLAEDDRILLLMAEKLSPGDGSGHLKLNNIKKELNKEQIKERAFQFRPNYDDAGNMPEKGVLLPEIQLIVEAKIRLKNIKDLNRFAYDRRLPELIAYLPNGKIGVNELRYELTDYNKARQEVFDEVFRLEKTIIQKDADGLLALCVNERGIPLRGNIAHKYFLQWLINHGYISEQERKYLNMIRNSFSHNQFPHKLIVSYSQNQINQKGIASIISSAFKEKTESIIYKID

SEQ ID NO: 1720 - protein, 1226 aa, Artificial
  Synthetic
MKTEKKMFVIDGQNKHILGGYFNMARFNFYKTIMEIFGKVGIKGNYGEDVIDRVLDALYKVNCGDENQLDDEQKEWSKKKKLFLPVEKQYLMQKLLFRRMPFFGPIMADVASYNLYKTKKSGVINDEDLARGVSFDDCLDVLRILAACLNDCRNEYTHFKQYNTSVEQKEIDYRKDKVAIWLDDMFTVSRRVLKTDGLVTKTEMEFLTGIEHYDEIEVKDEEGNIVRDKKGWPKKIHVEKEDFFFKIKKNVEGTSEDKKYKTLTDFGVVYFCVLFLSKTYAKRLVDEIKLMKGSKFKGVENDIVREMMSLYRIRLSRGKQLDVHDTSTSLALDMLNELRRCPKELYDVIGKRDKKKFEDKVGLDIEGAENEQETVARIRYSDRFPYLVMKYIDENELFERIRFHIRLGNYRFEFYNKTCINGDDQVRSLQKEINGFGRIHQLEEKRKEMYKDMFQEKEYESKKLEHEDLYLDLLQNKEDAIDTKPYITDHEAYYNIFSNRIGLYWENTWNPSEYVLLSKDKKGLYLPSLADVQDGRVDMPAPKAMLSVFDFPAMMFYEYLQKANGGVKVEDVIINKYNALKEFFSDVYNGKTKEELKSKIESSGLRISEIPEKLRDYLSSEKEYDHNKELKKHALGLLKNRYLDLLDRRKNYKEDRKRIGEKDNKYGKKGFRDVRYGKLGEYLSRSVMDWLPKDSEANAKLTGLNYSKLQAFFATYGPRKTFDELDSVCKEAHLDQHPFLKYVLNKKPNGIEPLYLAYINSEIIQLEKYLDTKNLEKIELKEGADFSDIPFIHHDRKRWEKRNEQYYRDLAGRYLRIGGQGKEKDKVKEVPMNLPDGLFTPYILKLLKEKYANNKELQEKIKDEKLGSIVKGKEEKLNGNAAYLISSFFECVLKDKSQEYYTYKRSYELFNKLDNDEKSLTTDEINERLKRGDVEKPKPIQKEIERFGDAIKKFDRRNHKTLQEAQEAMKKKLTGLIQEVKMNERAIRRYKTEDAILFLMAKRTLSGTILAGQDDQLFMLKDVFTDTFLNQTFDFEFPIKVDGNDRQITIKQNGMSLKNYGEFHRLLADDRMPSLVNLLLDKKVTEVEYSNLWGELTSYDISRSSIFKAAQDFEKQILELHPLNDPNDNRFYIDNDPTKLARRNNFRSLLDLLDGNLLSYEDKELVISIRNAFCHNHYPMKLDVEVDKTRIGDTEGRAAGETTTIATLIKNKMKELCESINLQINN

SEQ ID NO: 1721 - protein, 1221 aa, Artificial
  Synthetic
MDIRLSKNRALLAAYLNMAQQNVYVTLLHISQLMGVEETKDLSNRMYDFQILQELKTGKKGAESEQMVKSERVQKIILLLYRNFPFLKAFVEAKYKQQEKNNGGKNKGGGKNTQKNKNNASNEEQLEFTESELGKLPIPPHEYRTILCDVFRLINDLRNEYTHFSPEKRTGGAKESHEKCQKKMLSYLYLCLDGGRRVVKERFKDTFQENDFNFLTQGPRYSLQKDGDKKKAEERPNFYYRLKDDQGLFSYVGILLFISLFLHKRYISEMLAQSGLFYTPRYWKGQPVNVELERRIISEIFSIYRIRLPKERIDSTRPDYALGLDMLNELQKCPNELYETFSPKDQAEFRVKREYDESGEGTEEGEVLLKRFEDRFPYFAIRYLDENRVFDDIRFQVSIGKYRYKFYNKLCIDVVSSNRNDDCYRLRSLQKEINGFGRLNEVEYERILRYGSHIHVEKPEGDDTPYLTDHHTSYLFNGNRIGLLFNQENGRHDLEEIRGNCLYLPHLTFASSSEGKDARRVPPIAWLSTYELPALIFHHLLCRHYGLERTATESIIKECVGLYHRLFTDIRDGKLLPGEALGIQAEESTRSEISRIKKGEPLPQNISEKIETFLSTHYCTEQVCLHIQDIPKKIIDYLIGKNIDQDMSGLFKQRSRERINKMYESTKIRLKKFKTDLDLQGNGDNKFGKKRYTDIRPGQLADYLAKDLLFFQPYDDEKKNKVTGLNYQILQAALAIYNHNLDELRRLFKNARLLVPENPKMEHPFLGSVLHKSPRTTLQFYAYYLLEKISYLKKRLDDPNETFADLFRYKQRQKWQTRDSQWYRALAGRYMAEMMEEGTMNFKPVELPRGLFERPIKRLLTNILTKRTDSDSQALLKIVESPRCNVSYLIAQYFTLILHDDSQPFYHPNKRYKRTYQYFNILNNRKERNKLVQVYYTLDEMEAYFKDTESLKKRYKDYLTSSEAKKHPAPEQRLKKYLSEYRKNETTIRRYRVQDMLVFLMAKILLLEKGGLEAGELEQYKLSHIQPTTGQNSGQNILSLQVPFNITVKLDDGTERSITQEAIKVKNYGDFFRFLYDDRVASLLPYTQEDIPLERALLEKELEGYDRERIPIFKSVHCMEKEILRLCPELNDPQSSQYKYTTDIGTEKIVKENFRAMLTELCSRGLLPENEIEMMVEIRNSFSHNRYACVNLKGKNIPMIAISIQRKFDGVVGRTIGKNKN

SEQ ID NO: 1722 - protein, 1199 aa, Artificial; identical to SEQ ID NO: 1328
  Synthetic

SEQ ID NO: 1723 - protein, 1003 aa, Artificial
  Synthetic
MGAIENKHIFAAYANLAIDGLIKTLNFIAKKLDTQKQLSSWDIKHVITLIDSIFDQNPQNNLEQVVEGYLPWIKPIIEMKTPKKGERQSDKLCIEYKTIITAFASLLNDVRNYYTHYYHDPICIYPGGYDIPSSLNCIYDSAINIIKERFQAEEKEMEHLRRYTRKKGRVVLKTEDDHFYYTLANNNDLSEKGYAFFISMFLERKYSYLFLKKLSGFKRGDSLQYRLTLEVFTALSTKPPVERLRTTKDTKQDRALDILNELSRIPIELYQTLEPKYREMYNETLQPTDAEDPYGLPDRSRIRFRSRFEAFALHFLDKQADFKEIGFYTYLGNYFHNGYQKTRVDRETKDRYINFQLAGFCKNIQDISAKKLSEALNVKSIDISTDSIPDINSFEPYLVQSTPHYIVNGNNIGIKVLPEGKDTYPTIDEKGAKMPIADFWLSKYELPAMLFYTYLRNNNIHKSHCPLSVKDIIERSIHKSTKQKHPEERSELMLRRVMKAIFWTDSKLNEVERIKSQKSAFGKRQHEILKAGRIAETLVRDMLWLQPSKNNGRDKVTEPNFQAIQVSLAYFGIRRNDLTEIFTRAGLINSSNPHPFLAQIGTNYTSLIEFYIAYLKERKVYFSRIQKKILQGKLNIQCHPLRDLQREPNKPQEKEEAIFLPRGLFNEAIINCLKKSKLKQLIESPTREKSPALNVSYLILNYFRTYFEDQSQEFYAQPRNYRLFDKLSPNKGKSKSYLSLEQRIKKMEELRPSKIPVAEANKLLEKEDRLYRKNYNEICDNESIIRLYQIQDILLFMMTKEYLPSDLYNRINKYKLENVKGILNERVSYLIDLNPLKIQGEDIKIKDYGKLFYIHHDTRINSLNKVLSKVKRNNSISSSVKIQPYENYKRECLDFEEAQIQIIPIIHSFEIAMVSMFPDLKKATPGNYYDFNELITEYEKRTKQKIDSSFLIKTRNMFLHDKYEAECIKEISDDFVYAKKIIAEFKMKIENIKLEDFSNDSSA

SEQ ID NO: 1724 - protein, 1199 aa, Artificial; identical to SEQ ID NO: 1328
  Synthetic

SEQ ID NO: 1725 - protein, 1003 aa, Artificial; identical to SEQ ID NO: 1494
  Synthetic

SEQ ID NO: 1726 - protein, 1129 aa, Artificial
  Synthetic
METNQQTHENRRRTLTNDPQYFGGYLNMARLNIYNINNHIATDFKQATLPEEGQIPAAFLCNKTIKNLNWNHVHTRAVRFLPILKVFDSESLPKDERENSDTEGKDFASMSDTLKVVFSELQEFRNDYSHYYSTEKQDSRKLTVSPELANFLTVNFQRAIAYTKARMKDVLTDADYALVENLQMVAPDNKITTEGLVFLIAMFLEREQAFQFTGKIQGLKGTQFNSFIATREVLMSFCVKLPHDKFVSENLEQALTLDIINELNRCPKTLYSVITDKEKQQFRPELDAQGIDNLIANSTNDDERERILDEIDYQDYIEGLTKRVRYSNRFSYFAMRYIDEKNVFDKLRFHIDLGKYEVDNYTKQFAGEQAERKVLENANAFGKLSSFTDPELIQQRIDKQQHTAGFDQFAPHYNADNNKIGLSTKENIATLIAKSKASSKVEHNLKQPLPQAFLSLHELPKIILLEYLQKGQAEELINDFILLNDTRLMDITFIEEVKSQLPADWDEFSKRSDAKKKKAYSDSTLKYLRQRKTTLNTILSKSNLNDKQIPTRILNYWLNIKEVDDKRSVSDRIKLMKRDCMTRLKAVEKHKLNKSVKTPKVGEMATFLAKDIVDMIVSEEKKQKITSFYYDKMQECLALFANAEKKALFIHIVTNELKLLENDGHPFLQNINLQQIRKTSQFYQAYLIEKGNKMVPRLNPKTNKTSKVDESWMMKQFYVKEWKEEIGKQLTVVKLPANKSRIPFTICQWDKKESHDLNTWLQHVTVGKNKDGKKAVNLPTNLFDEALCDLLREQLDTKIVNYNPAANYNELLKIWWKTRNDDTQQFYQSEREYDIYNEKVRFKIDSSAHFADYYKNALSRAFTRLKAERETARQTNKKLPPLEYKQVERVFKNTIAETEKEIRMLQEEDRMAVLMLERLMDNSPNLRLSKIETLLNDTTHISEKISATLSFDASGERISGKLKQTVTKTLIAERKQKNYTELRKYRYDRRLPELFEYVQADEIPLEWLLEELSAYNNAKQQVFDTVFALEKKIVGTDPDGLKSLFTNPKGEPLKGNIQHKPYVQWLTNKGLINKEEKQFINMVRKCFSHNQFPQRKTMELLIPAWNEKKLALQIATVYNQLIADLTDKI

SEQ ID NO: 1727 - protein, 1127 aa, Artificial; identical to SEQ ID NO: 1457
  Synthetic

SEQ ID NO: 1728 - protein, 1193 aa, Artificial
  Synthetic
MESTVNAKRISYDYKNQEDKHYFGGFLNLAQNNIEETIEALGIRNQVFKKEDSNKKNKSRPAEIIAKVFQIDLKKRKTKDDGSGITYAQWESNVNFLKQYLPIVQFLNLPVSHKKFDHLPKAKKEKAKRDYFIGNFLLLIDIIGSLRHYYTHYHHKQISIEPELFTLLDEIFLHTCLVVKKRKMKSEKTRELLKRELEREVDILKKLKLAALKKQKEDGVRVSLDDEHVERAVLNESFNYLLAKRDNVYKVQPTHCSRGEDGTPFSRSGLVFLVSMFLTKKQGEDFRSRIKGFKEKIVKREENAISPTNNSLRFMATHWVFSYWSYKGFKAKLNTTFSKEVLELKGIEHRLNTTVISKEALLAQIVDELSKVPDEVYEVLSLDKRNEFLEDVNEYIRETREVETLDKSIVEHSVIRKRYESKFGYLALRYLDEFVDFPSLRFQVRLGNYVHDSRTKVIEGTKLVTERQIKEPINVFGKLSKVKELKTQFFLSSDDEENSMEIFPNPSYCFVENNIPIIFSVEGNVKANSIYNKIKLKIRTQRNKDEKRVDRSGRKFPKSRIFSIVNSKWDKSESKKVKLAEPMALLSFNELPSLLYELLHKKKTPQAIEDAIVEKYVEQFEAIENFDSQSTVQKSRIPKKMKKSDKIGKLDYEKLVKDIDRSLAETKEKRKLLLQKQKDAKENNKQTLSSSELGQEAVWLSDDIKRLMPRSSRKEWKGRHHSHLQYTLAFYDVRKKEALALLENFWDMDKDPYWGEKLKNEFNANNTFEYFYFSYLNLREGILSTFLDQIEEYKDQPGNLKKALKDIGIVFQMRKYRIKPLEDQKTALLAKPILLPRGIFDPKPTFIKKKRMDEFPDEFAEWYTYANAPERQFQRFYAMERDYQELWKTEKDTDPDFKQNKKGISEEQQIALFKMKQDLKIKKIKTQDLFLKLIAEQLYLDVFGHKATFSLSDMYQTKEERREIERLSAKQSNRAQGDKSDNIVSENYIWNKTVGFKDQQLEEPCVKLKDIGKIRRFVNNEKVQKLFAYNLDRIWTKRELEDELEMKPSSYEVIRREKLLKEVQNLEKYILKQYGFDNENHPSIFERDGNPNFNEYVVQGILKKKNLVSEDECDWFSKQKIEKIKLDTLRQKSDILIKAYILILIRNTFAHNQLPDKECVDLMQEFCQKDPGISYSEYFLYVFQQIAKEFTNA

SEQ ID NO: 1729 - protein, 1090 aa, Artificial
  Synthetic
MNIPALVENQKKYFGTYSVMAMLNAQTVLDHIQKVADIEGEQNENNENLWFHPVMSHLYNAKNGYDKQPEKTMFIIERLQSYFPFLKIMAENQREYSNGKYKQNRVEVNSNDIFEVLKRAFGVLKMYRDLTNHYKTYEEKLNDGCEFLTSTEQPLSGMINNYYTVALRNTKERYGYKTEDLAFIQDNRNKSTKDAYGKRKSQVNTGFFLSLQDYNGDTTKKLHLSGVGIALLICLFLDKQYINLFLSRLPIFSSYNAKSEERRIIIRSFGINSIKLPKDRIHSEKSNKSVAMDMLNEVKRCPDELFTTLSAEKQSRFRIISDDHNEVLMKRSTDRFVPLLLQYIDYGKLFDHIRFHVNMGKLRYLLKADKTCIDGQTRVRVIEQPLNGFGRLEEAEAMRKQENGTFGNSGIRIRDFENVKRDDANPANYPYIVDTYTHYILENNKVEMFISDKGSSAPLLPVIEDDRYVVKTIPSCRMSTLEIPAMAFHMFLFGSKKTEKLIVDVHNRYKRLFQAMQKEEVTAQNIASFGIAESDLPQKILDLISGNAHGKDVDAFIRLTVDDMLTDTERRIKRFKDDRKSIRSADNKMGKRGFKQISTGRLADFLAKDIVLFQPSVNDGENKITGLNYRIMQSAIAVYDSGDDYEAKQQFKLMFEKARLIGKGTTEPHPFLYKVFARSIPANAVEFYERYLIERKFYLIGLSNEIKKGNKVDVPFIRRDQNKWKTPAMKTLGRIYSEDLPVELPRQMFDNEIKSHLKSLPQMEGIDFNNANITYLIAEYMKRVLDDDFQTFYQWNRNYHYMDMLKGEYDRKGSLQHCFTSVEERECLWKERVTRTEQYRRLASNKIRSNRQMRNASSEEIETILDKRLSNSRNEYQKSEKVIRRYRVQDALLFLLAKKTLTELADFDGERFKLKEIMPDAEKGILSEIMPMSFTFEKGGKIYTITSGGMKLKNYGDFFVLASDKRIGNLLELVGSNTVSKEDIMEEFKKYDQCRPEISSIVFNLEKWAFDTYPELPARVDRKEKVDFKSILKILLNNKNINKEQSDILRNIRNAFDHNNYPDKGIVEIRALPEIAMSIKKAFGEYAIMK

SEQ ID NO: 1730 - protein, 1127 aa, Artificial
  Synthetic
LQKQDKLFVDRKKNAIFAFPKYITIMENQEKPEPIYYELTDKHFWAAFLNLARHNVYTTINHINRRLEIAELKDDGYMMDIKGSWNEQAKKLDKKVRLRDLIMKHFPFLEAAAYEITNSKSPNNKEQREKEQSEALSLNNLKNVLFIFLEKLQVLRNYYSHYKYSEESPKPIFETSLLKNMYKVFDANVRLVKRDYMHHENIDMQRDFTHLNRKKQVGRTKNIIDSPNFHYHFADKEGNMTIAGLLFFVSLFLDKKDAIWMQKKLKGFKDGRNLREQMTNEVFCRSRISLPKLKLENVQTKDWMQLDMLNELVRCPKSLYERLREKDRESFKVPFDIFSDDYDAEEEPFKNTLVRHQDRFPYFVLRYFDLNEIFEQLRFQIDLGTYHFSIYNKRIGDEDEVRHLTHHLYGFARIQDFAQQNQPEVWRKLVKDLDYFEASQEPYIPKTAPHYHLENEKIGIKFCSTHNNLFPSLKTEKTCNGRSKFNLGTQFTAEAFLSVHELLPMMFYYLLLTKDYSRKESADKVEGIIRKEISNIYAIYDAFANGEINSIADLTCRLQKTNILQGHLPKQMISILEGRQKDMEKEAERKIGEMIDDTQRRLDLLCKQTNQKIRIGKRNAGLLKSGKIADWLVNDMMRFQPVQKDQNNIPINNSKANSTEYRMLQRALALFGSENFRLKAYFNQMNLVGNDNPHPFLAETQWEHQTNILSFYRNYLEARKKYLKGLKPQNWKQYQHFLILKVQKTNRNTLVTGWKNSFNLPRGIFTQPIREWFEKHNNSKRIYDQILSFDRVGFVAKAIPLYFAEEYKDNVQPFYDYPFNIGNKLKPQKGQFLDKKERVELWQKNKELFKNYPSEKKKTDLAYLDFLSWKKFERELRLIKNQDIVTWLMFKELFNMATVEGLKIGEIHLRDIDTNTANEESNNILNRIMPMKLPVKTYETDNKGNILKERPLATFYIEETETKVLKQGNFKVLAKDRRLNGLLSFAETTDIDLEKNPITKLSVDHELIKYQTTRISIFEMTLGLEKKLINKYPTLPTDSFRNMLERWLQCKANRPELKNYVNSLIAVRNAFSHNQYPMYDATLFAEVKKFTLFPSVDTKKIELNIAPQLLEIVGKAIKEIEKSENKN

SEQ ID NO: 1731 - protein, 1361 aa, Artificial
  Synthetic
MGKNYYSKNGNASNKNAKVQKAPRLTNEPFTIREDDKKIYGAYFNMALDNFFKTIAYIFNVLDIKQFVRTKYDGEYVEVPMFSEESLHIILKYYSKFFGGTLKSDKLKKNVKKLSRLSSKNEEQEQKYEEDLDELIQSLQLTNEQQQKFQQMLFRHFPFLGPIMADYASYSIYQQASKDVSDKEEIKKRKKEIMNSYDSLRGVTLSQCLEELSKMAECLTACRNKYTHFKPYNSLETQKTQLELQFTIAKKLDKLLAASRRLTKQNIAITTEEMEFITGIDHYENVNKQFIEREDFYFNPKGKGMAVIESNDANGAHQQSSSTYDAFSPFGIAYFCILFLSKTYARLFIDEINLFAGSPFNDSENAIMREIMSLYRVRTPRGKRLDSKATDSTLGMDILNELRKCPMELYETLSQEGRRFFEDEVKRQNDHTPEVVKRLRSTDRFPYLAMRYIDETRMFDDIRFQVRLGSYRFRFYKKIDCVDGVDRVRRIQKEINGFGRLQDIENERKTNWEAQMQDANYKSVKLEHEDLYLDLRQFPKDTESQQPYITDRRAEYNIHNNRIGLYWNRETDTPEYLDDAKCFLPKLETTGDAGKRKAQIIQPAPLCTLSVRELPAMLFYQWLCDNYKTDMPHDSAELLIKKKYDSLVRLFTAIKNGTFSYKTTEEATVKYLKNKFKLTLADVPQKLRMYIVGKETHPLQRLIEVTFDGYEDNSGKHKGKLEQRREKIERRLEKYKDDRKKIGDKTNTYGKKSFVDVRLGSLAKFLARDIIEWQPSNNEGRDKMTGMNYTVMQSFLASYGTKQAEQEGKTRISITQMFTNAKLLNGPTAHPFLQNVLNKGAKNIEKFYLDYLQEEIDHIKSLEDRVKNGEAKEIVIRDIPFIHPDRVKYTDRSTDEAIRKQAARYMEIEDKDADGNTVIHRTTIMLPDGMFITYINDILRSTAKSKEFRKFISPLPSYASDADRKKKSDELKNTAYTISRFFEYELGDKSQLFYYANDTLNGDKQEMFARNYKLFQTLRGIKSGPGKLPYYLSPSQILTGVKNIQSEIDTYIKDNRQSRKYKIEHPKFGKQKIFGERLMAYLNEEDEKERKTISILLSECKHNEKTIRRYKTQDMVLFLMAKDLLGKYIKDEDTQEENSLFMLHNVCDDKFLRRTVRYEFPIRVNEERTVRVVQPNMSLKNYGEFYRLLSDERFLNVIERFKDIDVYNYNKLMAELNSYDSKRSSIFGIVHYLEEIIYGTNDILRDEHENEAGFHVEDNPEKAARRNNFRSMLYIYDKEAEKEKRNAIFELLISIRNAFGHNHLRIPFQEWMTDEEKKAFKSWISKDDEVREKGHERIAPPTIAERILAYTEKTAEETGII

SEQ ID NO: 1732 - protein, 1320 aa, Artificial
  Synthetic
MRPDRDATQRQIIITHYGTFYEISKIMCIFAKLNIQMPSNNNSLNQFITTMDNNETSIKQFVLLGEDNSQYRDYAGSYFTKANLNFYRTMKTVFRRSGIMKDNRLGNVEWRDDNMETALSSFDITTISATQMSSLSDHLFRNLPMFGPIMSHDKNAFLSPLKRAKKALDKAKKDLKNAKKAHQDEDKYEKLKNVAEIEYNQQKENFKNEMYGTEAKDMWDKLINIAGALLYYRNLYTHKNPYSTEDDENKQKEREIKIAKWMNSVFEGEKGILIERKKYKYEDTLFLIDHQKETDRMEKRGNKYVERDNFYFKIKILDENNKCIGLTDFGRFFFCSLFLRRSDSELYAKSVKLFENSPYCLTEQELKIKQAEENKRAATESQKSDHQVNPKTIDITESAQINIIREMMQMHRIRIPREKKIDFTPSESMLLMDILNELRRCPQELYDTFNQTDKLKFVVDNPNEDPESDSKITLTRSKDRFAHLALRLIDHTDALGSIRFHLRLGLFRFRFYDKKLIDNSETLRRVHKEINGFGKWHVVESLRREKWGKYNQKFELNDDGLLQFVPDSAESDPYITDWQTTYNIHANRIGLFWNGNSQSEDYYIPELKTMVDENSKVIAPVEMKIPLCSLSIYDLPAILFYTYIFNLYNGNRLGLPNAEKIIKNKYTALNEFFGFAKKSESTPEELIKKQEELNLHDSEIPERLLYLMGKIKTPKGKIAEWKPNSKRNNHAKELLKKIIEEDEWRIKSFKDKKNKIEDKNRYGRKDYSDIRHGVLAKYLVESMMMWQPGKQKAETKISSANYRALRDYLSNYNNNSNNLQFVLKAAHLIDSENPHPFINKVKGSNIELYYTNYLHEELKHARGILSELEDNNYTGDKKEIIPPFAKPESDKWNKKSNTIQSCAAKYLEHPIQLPDGLFTQAIIDLLKAADIDETIKNDATKDSNATYIIRYWFDKVGQDSPQLFYDSTLFKRSYKFIDKCFLQKDEGNQTIKHFLTEKEILDNIKNFRGETGSLAGKLYPKDKLEESKKSIINQLNEVKDKEKAIRRYRVQDIALFLLARKRLVELLSKSENSNRNEARVETTHSQNNISKKANNLKLKDFGFDEDFHFLSGSEDNGDGLLFEYEYIVDNDANKKIMIVQEGLSLKNYGNIYRVLGDNRIKTLMQLLYEIKKDKVEDGTITFTFAELVKELTNNDKLHHEFYRLFQNIEQEAYDGTGGFDANKKNKEVLDNPDDEQFFFVRQRKNGEVTTKEAVRNSFKKLIELLKQYSTDEGIIVQLRNDAIHDRYPEPIAEMELKETGITESLIEYLNNLIKKNQEQL

SEQ ID NO: 1733 - protein, 1090 aa, Artificial
  Synthetic
MEKVTNTDKNIKPNYRSFKEEESKPFYAAYLNTAIHNIYTVFKDISESLGIAFNFKNDYQILGSDLIKKLEENNEPELSQKIIERLDRQFSFLKTLTLHNAKNRTQADAPLADAIDYHQVIKLWVSQLMDYRNFYSHALHVPIQMDPFIVDGMRSLYDADWKEFKERKTLSTEDTAHLIRLGKNGESRNFHYAFLDKQGNITEKGFLYFTCLWLEKKDAQELLKKHKGFKRGESKSQKATLEKFIWFGTRVPKPRLTSDNSQQGLFMDMVNDLKRCPVVLFDLLSEADKARFYTEDEFGADEEDGYEAKPFLIRKTNRFYYFAMRFLEQRFEHLKFHIDLGNYCYKTYDQVIEGVTRKRRWISRITAFGNLTDFRESDPPLAWREKLLSPGETDKPSTYITPTTAHYHFDPSSKVMAIGLKWVEDYRKDAIWPDIETADVDQKYRNVVPDFWLSLYELPSLVFYQILHEKGLIEHSAESIIKSYREKLNKGFLNNVAEKRILPGLSKVELEKELKQRGLDIQCIPKTVVNYLLSKDPEPIESKAKARLARLKEENTCLLSQVERQEPHYRMKPGSKNHIAPKAGTIADFLAHDMLLLQKPIKQDQGKANSTEFQILQAKLAYFNQNKESLNETFKLCNLTEAPNAHPFLGRIELAKCKGIVDFYKKYLLQRAKFLDQCIMDKSFKEYHFLKIKDTSDTIKALIEKQQNAVLNLPRGLFKSHIQTALTKGDTTSKLLKDVLADNTHNNAFIIQEYFKRVEKDESQTFYEFKRSYELLTKLYDTRRPKDRKPAPPKFFAPEELTEKYRDIKKKLALKIDQKLAGVEKGSPEEARIRSNFSKQYKKLMDDEKQIRLFKTCDMVQFLMVDQLYQQLGLEYKSLVKKDQTGTSFQMGKEYSLREIIPDGQDGILSLKTQVKLPLYLDKGDSTECKIIVRDKMKIKNYGDFRLFLKDRRIKGLLPYIDAEEIAYEALKRELEEFDKCRRAVIAEILRFEQNTVKKFNMELSGKRFFNHEKFLEKGSGYSAEEIESMSLLRNAFFHSIYPSYEQFRGKVNGERFNELKDYTADDPEVDQKSIIQQLKNLTLIYYRGL

SEQ ID NO: 1734 - protein, 1127 aa, Artificial
  Synthetic
MMYNDSQGNNMEQNSKSFLGIFLNQARLNAYITLCHISDLLGEKTVDEDSLAKMPVLTFLDNWGDPIKSRRTYELIHEHFPMLEIIYKAIERREANNSDAKGGGVDINVRAAEYRKILQTLLIAINCKRNECCHAKSADTLAEKVVVKELVRYLEDCFDASVDEVKNRLSLYEDDHNDNSPKDECLHLRRFKGVEKVNGKGKPKANPFFQYAFKDDNGLLTDKGLAFLVSIFLDKDDTFKFLKTSDLHGFKNDTENKFRATLLSYCTWRIKLPHPKVRSDDDITGLALDMLGDIEKCPKELFRLLSTEKQKDFRVKEALDGDEYSSEILLMRYSDRFPYLALRYCDEMEVFANLRFHIDLGRYYFKFYPKKAADGIEHPRQLDKNLKTFGRIREVKDQVKEQWENNGMVKAPDEIKEGHNEPYIRKTTPHYHIVDNQICLEISSGKVVLPELEQNSGGQKTPPRAWLSVYELPGMIFHGLGYGFEHTELLIKQYIKEQREICRKICETGVIPENAGEFLPEGLKDTGTSNAKQNNYAGEKLQRMLEDTKHQITAIKTTKQRMDDKSNKPGKKKFFDIRAGKLADFLARDIIRLQPFDPAKKGKDKTTALNFQVLQETLAFFGAKKHSLERIWKELGLIGGKFEHPFLTKLGNPVACRSIVDFYQVYLDKRLEYLESLKESELKSIQFLRPSRQRYAAGKRDLKTIAERLLERPVNIPNDLFREDIEKFVQNIIPSINNDAIEIDNETGRKKLNTAYLIQEYFRCKEGNHQPVYHCEKTYQVVSKAGEYSKKARNRSIAEALLSISPQMGYKKMESFIKENIPDEGRYEPENLRDYLFKECREFKGNERTLRRFKVQDAVIFMMFKDILKKVFDCEVTGQVSTEDETEVTAVQDENNPANPARKLLELKLENIDPAKYRDKDSIFQYPMPPSTTDISITFNSNLNYEKDYVEYIDKKYKDCAGYSTHGNKREVTYRIVLKNVKLRDIGKHRRYFRDRRLPGLLSWRYMPGDEIDCAEIEEQIEAYEQHRVEIAGLLYGLENKVIDCFMPKDALGDDYIDFNRIIDTIKDKLTGVDEKAETLRKIRNGVYHNQFPVFTDAIEKADGGSIAEKMLSITKRYVEQITKEIN

SEQ ID NO: 1735 - protein, 1262 aa, Artificial
  Synthetic
LQNAKYIRNFAKRRPNNYYSKQSVKQKYMIIKESKQRKDKVRTQTEDSQLSHNRRSPKAQMPYTENDKLRSVYAAYLNMARMNLYNTLRFIGHLYGMDDNIQEGEMDKMKVANFANHPHLEKRLSVRKALLKHLPFLHCMAQAYVNTEHKYTDDNDLQKVLLNIINVVSNQRDHLTHANPYNNDADWAKQKEIEKQLLEPLEKAFMFSKHKVETIFDYSKSDMSFIDRLERMMDTGDTIIVKENNKERELRDNQDHSDYYFRLRTPEGDALSTVGLTFLICKLLHKKHATIFAQRTGLFLEQSHLDGYSPFSKRENEIMFNIFCHERIRLPKGRLESTTDPMALGLDMLAELQKCPAELFNTFGPSDRKLFEVRNEDFSTDSSTEDIILMRRYGDRFARLAMQYIDSFNADPNHRNKRDSAPLPGMAFQVSVGKFRHTFYERAPFHEGVKDRVRVLQKEINGFGPLTKIEDLRQTDYALFIRQVNDDSSDRLYDPDTAQTRPYITDHHASYAITGDRIGLMWNDENVQVLNNDTLCYLPELPIPTATDDSKKPWNVDLTVFNRSNGGHPKGNIAPRAWLSIYDLPALIFLHFLGGKPASVIKDTYNSLMKLFDDIAEGRRDPYFKGQIPQDPNSRKKVILSLREQLTPHLMTDYGLHTRDIPDKIVEYLIGEGLAANEQTAILHAEERFRKWCDIKVKAMKKDLDLRIEHFNKDKEQIGNSSNRIGSKRYVDLRPGSLARYLAKDMIAMVDPKDGAKPSGLDFTLLQAAIATYQGNGCPLEKTELGATIKKAFAWQAHPFLPKIMNLTVSDTIDLYSRYQNEKTKYLDRLLQSHKYSDTYFLRNAHRNMMAKTRSYMRDQKGQDGTLIEGLAHRYRKTLQLPDGLFTNAIREQLAKINNSDIQDALNNPQFGHSAAYLLNLWFTKIIGDQSQPFYRSDTHGHYKRHYKLLETLYPQKTPLDDATLSAKLKGGKNSEIKQEIDKQAPVAKKEAEHQKLMHLLRDLQRNERTIRRYRNQDMVLFLMAKKLLLSGGAPFMNRAESDGSRQFLLQNIVPIGVNHGEENNLLNQKVSLSTRITLLDDKNKPIKDSEKHPMKRTIHQKEIKMKNYGDFFRFLYDSRIGILLSQLPDDEAGIAREKLEKELDTYDNSRTDIFKVIHKIERQIIEEHPELKNPNSGHFTNDKGTPYRNNFTLLLTLSALFSEADHNLNQKGKLLKDIRDAFCHNKYIENIERAIKEKEERELPKIAENLTKWMKEFGEQS

SEQ ID NO: 1736 - protein, 1107 aa, Artificial
  Synthetic
MNIPKLVEDKKRYFGTYTVMALMNAQTVLDHIQKVTELPIIPAINKEGKEFTPPEEDLWQHPVMRYINHVAYKQDDQPEKTQAVIEKLLHHFSFLKIMAENQRDYWNKKNNTHRLEVNSTDLNGILNTVFRVIKKYRDTTTHYMTNDTCWNDGSDFLAKEQRLAFMIDNYYEVALRDLKERYSYTTDDLRFIQYYRYKRVRMPDGKPTMCKNTNFYLSMVDYNGDAGKKLHLSGVGVAQLVCLFLDKQYINQLASNLELTSKHLPSSKEAQIIRRSLGIHNIVLPKDRIHSDKGEMSIAMDMLGEIKRCPNELFDTLSADRQSSFRLISSDHNEVLLKRSSDRFAQLTLQYIDYGEKFDRIRFHVNMGKLRYLFNAEKTCVDGQVRVRVIEHPLNGFGRMAEMEAMRKQEDGTFGKTGIQIRDFDNVKRDDANPANYPYIVDTYTHYMLDDNHVEMLIGKPMDMPEIEEYDGKWYVNKTVPSCRMSTLELPAMMFHMHLLGSKRTEARIIDFYERYCKLFDALKQGAVSKENIGEFGIKEQDMPQTVLDVINGNAQGKNANEYILKTLQELYDHACKRIDNLRQDKRAIGSAANKMGKRGYRQIKPGKLAEYLIQDIVRWQPTLSAGDDYGTDRLTGLNYRVMQAAIATYDSRGKDEEARRFKAMFERANLIGGDRQKNHPFLYKVFGYRLPADIVDFYEKYLNEQKYYINSLLKKAKQGEVVNVPFVNRDQSKWKKPTQEYLGAEYMADKAIELPRQMFDEDIKNHLKTLDQMKDVDFDHANVTYLIGEYMKRVRDDAFQEFYAWRRNYRYIDLLKCEVDRTKRIPKLVETWTTTEEREKIWKEREKLAKEYRSWADGQMKNNPQTRRLTEDERGEIIAKRLSNSRNDYQRSEKMIRRYKVQDALLFIAANDTLTQHMDFKGKQFKLKDITPDAERGILSEKMSMDFKFEKNGKTYIIYAQEMKIKNYGDFFVLANDKRLVNLLALVNQDRVSKDEIEQELKRYDVCRPEVVKMILDLEKWAFDNFPELKAKVMNDREDNKVGFNYILDVLLENKRIGEAQKETLRLIRNAFDHNNYPRTGVVNVVTLPEIAEEMRDLFGEYARIE

SEQ ID NO: 1737 - protein, 1127 aa, Artificial
  Synthetic
MNTHQEELQSWITRKRLPDTEMKKYWAAYMNLARLNFFKTLMFISNSIGDLKPAKDNNGKGNTEVNMHNMGILTALLGPEDEEKARLLIFKHFPFLRTFCIEKELSLSKQRTILIDMACIIGRYRNMYSHSIFISDDNEKVLESEKRCSEYLQSILTVSTRIIKERYRSNKNDAQRGMIDDKSLEFISENKVKFVYDENGKRITAPNKKYYLSTIDKDNTHLSYFGKLMLTCILLEKKYATAFLTQCHFLDAFNDSEVAPKLSERRLMLEVMTALRIRLAEKKLSNEKSEVQISLDILNELKKCPFELYELLGSEDKRLFTIVADTGETILLRRHEDRFPQLALSWIDSSKAFDHLRFQVNAGKLRYLFRDNKHCIDGQTRMRVLEEPLNGYRRLMEFEEERIQKQSGEIRSLWPGLDILNKDETPRNDASVLPYISDYRVRYLFDGDNIGISIGDFTPSITKTDETKYRVTGKTADCCLSKYELPGLLFYHLLTLRHGDNKRSTKNAEDIIIDAIKRYKRLFSDVKEGILKPIKEENANQLGNRIWNSYGIDIKDIPDKIIDYLLVRECNEDEKFTAWKNGLISEMLQSTKNRIKRFEKDSEAVISSDNKPGKKNHVSLKPGAYASFIANDIVFFQECGATEKMTGLNFKVMQSRLATFTKDGSTSFNILLQTLKNAHLVSNTYGKGDHPFLYRVIKQQPSDIVQFYKIYLNEKVLYLQSDIPDNAIFLHGERKRWENRNEQYYRDLAERYLQRPIQLPRQLFESHIRQLLLSDCIKGERGNDLKEAINSAASQGRCNTTYMIMEYFADYLCDGTQFFYGLFDGDLSHEYNYRFYSLISNNIENSKKLVLTLKKGNNSKESPFISALERGIHWSKMNPLMKKGLKNDSSEGDFVHAAKRAYKEMTETERMFRRYAVQDEVLFLAAKITIRRALGLSEQYNCLLGDIKPQGGSLLEQTIPSITTKHTINTGNKKQKPKQVQILQKNVKLKDFGKVFKLLNDRRIFDLLFNKGNEAVSMTDLCEELERYDRHRVDVFDSVLKYESKITKGYTNKELMNESGQIDFKAIQAFDKQNTTSDKEDLRLIRNAFSHNQYPQYNNEPILFDKDIPEIADEISIIAKDIEENTK

SEQ ID NO: 1738 - protein, 1081 aa, Artificial; identical to SEQ ID NO: 1329
  Synthetic

SEQ ID NO: 1739 - protein, 1000 aa, Artificial; identical to SEQ ID NO: 1602
  Synthetic

SEQ ID NO: 1740 - protein, 1196 aa, Artificial
  Synthetic
MKRFSSLLRREEISSFDLYTDFGTKSPLLAIYYNVACVNWEQTQKLIRGFPPDRQTAYLAQYLWRANLVKRNAEGYKFTEDDRRIAALLPEKLDAIRNFHSHIWHDNSVLQADGDLKAFVEKKHEEAKARLFEQNPQSLLDYEAYAKGKSKYALFKYVKDKRADYFTIEGRIFYLSFFLTAGQMNQLLQQCSGFKRADMPLFKIKRQLYTYYCHRDGATLLDFNHDQEVLASMPPVEKQAIIRARTAFKLVNYLYDYPEYWGSADWMPLYDEAGERINSGEALKQWLDKNPDTLPGISFSFIPIKKSPADADKKEHESRVRSGTLAFTVEGIEKYEFHITFPALHRLVVLQRLYQLKKEGVSPLELLKKNLQQQVDNRASLYAILSKRERLRTEDEWEYLTDRSHQQLRGGRKLTELSITFFENLTKGGAENPVVTTRLLNLIRPAESTPLPTPLNKLGKTRFTDDTEPDAIQVYEQDYIMGATQKFRAGNRFMYYSAKYLMDFGGQDWRWGMEKFAMDKKKNSDTKESLLKIKEYLTPREILESNDHRLTLEEDHVYLAIPRPAPKGSANHQQYYQFAIGPRAMRYLMAWVFEKRDKSPEEISSFLMELSQDLELLYQEGAWNSELPVKWLEPAFVMGYLKEYETGGLDTVRQRIQSRISHITKVWDHAVEHTQLLSRSEKNRLIMEAYRFYEWPAGGNGVPRFLRADEYNQMSVCHYSLGLKKKQQTVFVHKGRNYNNKYDYVYKGLFELDKRKPPIPKDVERQLQTAENLDELLVNVITSIRDLLNDKIKSILGAPPAIQKKELPGLCRRLGISIPASLLKGPETESMRQKHLTTLQVQPLAIHPMLMVKKLFPGFYSPAQTDSQSGSTDKTLKRPNLPVFDKLRKNASYRKRLHPDFYNKEFASHLFPEDGNKKQREKLIGEMDRTCAEDILLWQMAHHYLRDNHYTETLAQHLQQLEPGHQPLYDWLKLPIVIQLKPRNEGKDLYISILLHQLDDLLFRQERDRLRKLADHFTYRITQETALWEDDLKDMQLNQLSVGPLPDGSRQNPIPFGILMAEAELIRRCGQQLAERLLDWETGIFEQLLSVHADDKQSLHDWLSQHVDGVDYYRQFKYAFMNFDDVLAVAVSLGIEISEIDSKLMSSLRNCTFHNDIPESGSYSWITRSGERVRNILNMETDLHARKDRSAYEKKD

SEQ ID NO: 1741 - protein, 1332 aa, Artificial
  Synthetic
MLLKLKTYSIMSKECKKQRQEKKRRLQKANFSISLTGKHVFGAYFNMARTNFVKTINYILPIAGVRGNYSENQINKMLHALFLIQAGRNEELTTEQKQWEKKLRLNPEQQTKFQKLLFKHFPVLGPMMADVADHKAYLNKKKSTVQTEDETFAMLKGVSLADCLDIICLMADTLTECRNFYTHKDPYNKPSQLADQYLHQEMIAKKLDKVVVASRRILKDREGLSVNEVEFLTGIDHLHQEVLKDEFGNAKVKDGKVMKTFVEYDDFYFKISGKRLVNGYTVTTKDDKPVNVNTMLPALSDFGLLYFCVLFLSKPYAKLFIDEVRLFEYSPFDDKENMIMSEMLSIYRIRTPRLHKIDSHDSKATLAMDIFGELRRCPMELYNLLDKNAGQPFFHDEVKHPNSHTPDVSKRLRYDDRFPTLALRYIDETELFKRIRFQLQLGSFRYKFYDKENCIDGRVRVRRIQKEINGYGRMQEVADKRMDKWGDLIQKREERSVKLEHEELYINLDQFLEDTADSTPYVTDRRPAYNIHANRIGLYWEDSQNPKQYKVFDENGMYIPELVVTEDKKAPIKMPAPRCALSVYDLPAMLFYEYLREQQDNEFPSAEQVIIEYEDDYRKFFKAVAEGKLKPFKRPKEFRDFLKKEYPKLRMADIPKKLQLFLCSHGLCYNNKPETVYERLDRLTLQHLEERELHIQNRLEHYQKDRDMIGNKDNQYGKKSFSDVRHGALARYLAQSMMEWQPTKLKDKEKGHDKLTGLNYNVLTAYLATYGHPQVPEEGFTPRTLEQVLINAHLIGGSNPHPFINKVLALGNRNIEELYLHYLEEELKHIRSRIQSLSSNPSDKALSALPFIHHDRMRYHERTSEEMMALAARYTTIQLPDGLFTPYILEILQKHYTENSDLQNALSQDVPVKLNPTCNAAYLITLFYQTVLKDNAQPFYLSDKTYTRNKDGEKAESFSFKRAYELFSVLNNNKKDTFPFEMIPLFLTSDEIQERLSAKLLDGDGNPVPEVGEKGKPATDSQGNTIWKRRIYSEVDDYAEKLTDRDMKISFKGEWEKLPRWKQDKIIKRRDETRRQMRDELLQRMPRYIRDIKDNERTLRRYKTQDMVLFLLAEKMFTNIISEQSSEFNWKQMRLSKVCNEAFLRQTLTFRVPVTVGETTIYVEQENMSLKNYGEFYRFLTDDRLMSLLNNIVETLKPNENGDLVIRHTDLMSELAAYDQYRSTIFMLIQSIENLIITNNAVLDDPDADGFWVREDLPKRNNFASLLELINQLNNVELTDDERKLLVAIRNAFSHNSYNIDFSLIKDVKHLPEVAKGILQHLQSMLGVEITK

SEQ ID NO: 1742 - protein, 1003 aa, Artificial; identical to SEQ ID NO: 1494
  Synthetic

SEQ ID NO: 1743 - protein, 1262 aa, Artificial; identical to SEQ ID NO: 1735
  Synthetic

SEQ ID NO: 1744 - protein, 1127 aa, Artificial; identical to SEQ ID NO: 1737
  Synthetic

SEQ ID NO: 1745 - protein, 1403 aa, Artificial
  Synthetic
MGKNKQKKKIQSQDSSKANNPYPSVTKPQRPDFCLEGFYTQQAFVDVRHVAANYFNLAHNNFYKTLIYVLTRSGIDLKTLNFWNFKDDSIGTVLQTVCDATFGSGEQKQAIKDYYFSIEEKKLIVENNKENDSNKKKSDAEIRELSLQRAEKDFGSFVLFEDMQGRIQKKLFHHIPAFGPIMADVASYEAYKNRQKSDELKDKNKEKILRGITFQQCLETLIIIANALNYYRNFYTHEIPYNELEEEWSQTLREAKLVKYMNNVFKASQRLDKKRELVTTEAMTFLTGHGSGDPCDRMKEIPNGEKTYFDEKKHRNVTIKVYRYEENENFFFKIAGREFTTEDGGKANYLSDFGKLLFCCLFLKRQQTQNFAIESRLLEFSPYLLKPHELQKKQAEENKRVDKENKLRQAQGKKRMLTPKQFTKHDSLQNEIILDMLGIYHIRRPLEKRIDAKATPGTLAMDMLNELRRCPSELYQTFSADDKDIFEREVSDPKDGSPRSAKAEEKVKLIRYTDRFPYLALRYIDETNLIGDIRFHIRLGNYRFHFYDKTCVDGNPKIRSWQKEINGFGKWQEIEEKRKSKWANQFQKREYVNTRQEYGEMELEQPVKDHADTKPYITDWTAAYNIHANRIGLYWGLEDGMFLPDLNTIVDPTDANASQEELRKSEMKPRHRAPVIMKEPLCTLSTYDLPALLFYNYLFKHYNAAKYKMPMPNKIIKDAYDGLKAFIDAIAARKKGKDLEEVLQQKGVREFDIPKALRKRLESQGKPEQFNNKIYMRLVERVYGRYDIEREMYVPGKLSEKLEEIEYRIKAFKDKKAKIDSGDNKYAKKGYADIRHGVLARYLAKSFMQWQPTKDKGHDKITGLNYSVMTAFLSTYGINSDIVQLRTLLEKAKLIGSANPHPFLPEVLAESPQNIEDLYFIYLKQEQKFAEGLNSHHGKLKAFKGNLQDKIKYINENKSSIDQILAQIPFVHADREKWRRTDSVDKYYTDYAGRYHTIMLPDSLFTPYIIRLMKSCLPNDKTLMSRIKACESDSRQTLGAAWLIEYYFEHHMKDKHQQFYNANIFRRAYKPFTTMNNDFVKNQNGGNTNEPLPYYNSKKEIEEKLSYTEEDIRNFVYNVWRGKTKREEIEILKNQIKDVKDTEKVIRRYRTQDVTLFLAAKDLLTTQLSKDDNMADATKQAMKNLKEKAECLKLKDFDYDEGFSFLSDGDNPESGIVYTYEYKTKTGRTVKITQKGVSLKNYGNIYRILGDDRFKSLMEGIANIATTDSIEVTFNDLTTEFANYDERRSAMFKMVHELEGKAFIRNEKELQDPNNPVFHIKNDLAKDPRRNNFSSLLELLQEYSDKDQKVMVAIRNAIGHDYYMDITLLDRTNSKAKRVPNISLLMEHTLNKKKDNPSQDKKK

SEQ ID NO: 1746 - protein, 1119 aa, Artificial
  Synthetic
MTEQNERPYNGTYYTLEDKHFWAAFLNLARHNAYITLAHIDRQLAYSKADITNDEDILFFKGQWKNLDNDLERKARLRSLILKHFSFLEGAAYGKKLFESQSSGNKSSKKKELTKKEKEELQANALSLDNLKSILFDFLQKLKDFRNYYSHYRHPESSELPLFDGNMLQRLYNVFDVSVQRVKRDHEHNDKVDPHRHFNHLVRKGKKDRCGNNDNPFFKHHFVDREGTVTEAGLLFFVSLFLEKRDAIWMQKKIRGFKGGTETYQQMTNEVFCRSRISLPKLKLESLRTDDWMLLDMLNELVRCPKSLYDRLREEDRARFRVPVDILSDEDDTGGTEEDPFKNTLVRHQDRFPYFALRYFDLKKVFTSLRFHIDLGTYHFAIYKKNIGEQPEDRHLTRNLYGFGRIQDFAEEHRPEEWKRLVRDLDYFETGDKPYITQTTPHYHIEKGKIGLRFVPEGQHLWPSPEVGATRTGRSKYAQDKRLTAEAFLSVHELMPMMFYYFLLREKYSEEASAERVQGRIKRVIEDVYAVYDAFARGEIDTLDRLDACLADKGIRRGHLPRQMIAILSREHKDMEEKVRKKLQEMIADTDHRLDMLDRQTDRKIRIGRKNAGLPKSGVIADWLVRDMMRFQPVAKDTSGKPLNNSKANSTEYRMLQRALALFGGEKERLTPYFRQMNLTGGNNPHPFLHETRWESHTNILSFYRSYLKARKAFLQSIGRSDRVENHRFLLLKEPKTDRQTLVAGWKGEFHLPRGIFTEAVRDCLIEMGYDEVGSYKEVGFMAKAVPLYFERACKDRVQPFYDYPFNVGNSLKPKKGRFLSKEKRAEEWESGKERFRLAKLKKEILEAKEHPYLDFKSWQKFERELRLVKNQDIITWMMCRDLMEENKVEGLDTGTLYLKDIRTDVYEQGSLNVLNRVKPMRLPVVVYRADSRGHVHKEQAPLATVYIEERDTKLLKQGNFKSFVKDRRLNGLFSFVDTGGLAMEQYPISKLRVEYELAKYQTARVCAFEQTLELEESLLTRYPHLPDESFREMLESWSDPLLDKWPDLHGNVRLLIAVRNAFSHNQYPMYDETIFSSIRKYDPSSPDAIEERMGLNIAHRLSEEMKQAKEMVERIIQA

SEQ ID NO: 1747 - protein, 1000 aa, Artificial; identical to SEQ ID NO: 1602
  Synthetic

SEQ ID NO: 1748 - protein, 1000 aa, Artificial; identical to SEQ ID NO: 1602
  Synthetic

SEQ ID NO: 1749 - protein, 1094 aa, Artificial; identical to SEQ ID NO: 1358
  Synthetic

SEQ ID NO: 1750 - protein, 1168 aa, Artificial; identical to SEQ ID NO: 1357
  Synthetic

SEQ ID NO: 1751 - protein, 1000 aa, Artificial; identical to SEQ ID NO: 1602
  Synthetic

SEQ ID NO: 1752 - protein, 1351 aa, Artificial
  Synthetic
MEKENKKGDNDTQNQNKSTPPAKKFMLINENRGKHIAGTYFEMALANMIRTIEHVFIRAHVYSIVGKLQEDTMADTIEHLAKQNLSATQKSTLSRLIFRHMPFFGPLMADAVDTAIYPLRKKLKELEERRDEINKELQNKNNNKRQELEVEKQTLKKTIKATRKALEQQIVGSSPQLMVEYLSTMSRMMVTLRNFYSHKNPYSNKEDYEKQKSDSKKLAQWLEIIFKGERGILLERKTHSQEDTKFLTQDGVLNYNVNKNNKSTRNNDFYFGPGKKTDKGWELTDFGRYFFVSLFLRKVDADRFAKDVCLYIDSPFRLTVEKKLQLQQKENLRAMKEQFIADENGEDRIVNPRIIGDTESCQNNIIREMLDMHRIHIPREKRIDAEITEGILVMDALNELRKCPKVIHDTFSPSDKENFITKGETPNGEIVESKLVRPQDRFVDLALRCIDQEEVFTDIRFHLRLGLFRYRFYPKETIDGSYVEPIRTIQKEINGFGRMNDVEKLRDDKYRTSFQLRTINEDGLEQPVPDSKDSQPYITDWRTTYNIHANRIGLAWGLPQMTGGYYLPDLNTDEEDNQNRKAIIDMPSPMCYLSTYDLPALLFYRHIFNLYHGTKYSKDGIVDAQTVIKQKYDALHDFFIAVSSSELSTEELLEKQKELKIADEDLPDKLRCFLGTKKLFNKKGKPILKKTDSGEKVQIIKEWRANDEKKKHAINTLLEVIEEDKFRLEAFEKKHSKIIKGGRDNRYGRRGHADVRHGAIARYLAKSMLRWQQTIAEAGGGKITSSDFRVLSDYLTGYGIGVREEFASVALYNLKNVLKKAKLIDSQNEHPFLKEKVLSSSPMNIEQLYTTYLQEEKTHAEELIAKINNDDKDIDLPPFTRPNGLRWETSLKEAALRYTETPAAPFDETGSSHNVSILLPNGLFTPHIINLLKTALADKTIDEHKALAPMSKLLESNPNTFGASYIIRYWFDHVAQDGPQAFYNNGSHQYKRYHRALSLLNPHRKPNKQLIPDYFTEDEIAERLKYARQKNKEVLKDKVIKAFNLDSKKTEKIDEKLKQMREMLNEVAAKEQSIRRYRVQDITLFLTVRDMLLKMLSSKYDERKKENIRKQTIKRISKMRLQDFGFGFDFKLFAATDDDSSYTYEHKSGIKIKMPILSLNNYGSIFRILSEGQRVDNLLSGLKELGITEVYFSDLTAEIAEHDEKRKEFLKIAQDIEQKAYDQNYDILSNDRDPGFYKKDIIYDANNPERILNPSTDAKRNHFSDLIGFLKEFSSFLSFKYVDENGKEKKINLSEFVKELRNAAAHNRYPTTYAFKMLKEHTKGKTIKVQNIINMILEMVNQDIEEMNKKQ

SEQ ID NO: 1753 - protein, 1000 aa, Artificial; identical to SEQ ID NO: 1602
  Synthetic

SEQ ID NO: 1754 - protein, 1127 aa, Artificial
  Synthetic
MNTHQEELQSWITRKRLPDTEMKKYWAAYMNLARLNFFKTLMFISNSIGDLKPAKDNNGKGNTEVNMHNMGILTALLGPEDEEKARLLIFKHFPFLRTFCIEKELSLSKQRTILIDMACIIGRYRNMYSHSIFLSDDNEKVLESEKRCSEYLQSILTVSTRIIKERYRSNKNDAQRGMIDDKSLEFISENKVKFVYDENGKRITAPNKKYYLSTIDKDNTHLSYFGKLMLTCILLEKKYATAFLTQCHFLDAFNDSEVAPKLSERRLMLEVMTALRIRLAEKKLSNEKSEVQISLDILNELKKCPFELYELLGSEDKRLFTIVADTGETVLLRRHEDRFPQLALSWIDSSKAFDHLRFQVNAGKLRYLFRDNKHCIDGQTRMRVLEEPLNGYRRLMEFEEERIQKQSGEIRSLWPGLDILNKDETPRNDASVLPYISDYRVRYLFDGDNIGISIGDFTPSITKTDETKYRVTGKTADCCLSKYELPGLLFYHLLTLRHGDNKRSTKNAEDIIIDAIKRYKRLFSDVKEGILKPIKEENANQLGNRIWNSYGIDIKDIPDKIIDYLLVRECNEDEKYTAWKNGFISEMLQSTKNRIKRFEKDSEAVISSDNKPGKKNHVSLKPGAYASFIANDIVFFQECGATEKMTGLNFKVMQSRLATFTKDGSTSFNILLQTLKNAHLVSTTYGKGDHPFLYRVIKQQPSDIVQFYKIYLNEKVLYLQSDIPDNAIFLHGERKRWENRNEQYYRDLAERYLQRPIQLPRQLFESHIRQLLLSDCIKGERGNDLKEAINSAASQGRCNTTYMIMEYFADYLCDGTQFFYGLFDGDLSHEYNYRFYSLISNNIENSKKLVLTLKKGNNSKESPFISALERGIHWSKMNPLMKKGLKNDSSEGDFVHAAKRAYKEMTETERMFRRYAVQDEVLFLAAKITIRRALGLSEQYNCLLGDIKPQGGSLLEQTIPSITTKHTINTGNKKQKPKQVQILQKNVKLKDFGKVFKLLNDRRIFDLLFNKGNEAVSMTDLCEELERYDRHRVDVFDSVLKYESKITKGYTNKELMNESGQIDFKAIQAFDKQNTTADKEDLRLIRNAFSHNQYPQYNNEPILFDKDIPEIADEISIIAKDIEENTK

SEQ ID NO: 1755 - protein, 1127 aa, Artificial
  Synthetic
MNTHQEELQSWITRKRLPDTEMKKYWAAYMNLARLNFFKTLMFISNSIGDLKPAKDNNGKGNTEVNMHNMGILTALLGPEDEEKARLLIFKHFPFLRTFCIEKELSLSKQRTILIDMACIIGRYRNMYSHSIFLSDDNEKVLESEKRCSEYLQSILTVSTRIIKERYRSNKNDAQRGMIDDKSLEFISENKVKFVYDENGKRITAPNKKYYLSTIDKDNTHLSYFGKLMLTCILLEKKYATAFLTQCHFLDAFNDSEAAPKLSERRLMLEVMTALRIRLAEKKLSNEKSEVQISLDILNELKKCPFELYELLGSEDKRLFTIVADTGETILLRRHEDRFPQLALSWIDSSKAFDHLRFQVNAGKLRYLFRDNKHCIDGQTRMRVLEEPLNGYRRLMEFEEEWIQKQSGEIRSLWPGLDILNKDETPRNDASVLPYISDYRVRYLFDGDNIGISIGDFTPSITKTDETKYRVTGKTADCCLSKYELPGLLFYHLLTLRYGDNKRSTKNAEDIIIDAIKRYKRLFSDVKEGILKPIKEGNANQLGNRIWNSYGIDIKDIPDKIIDYLLVRECNEDEKFTAWKNGLISEMLQSTKNRIKRFEKDSEAVISSDNKPGKKNHVSLKPGAYASFIANDIVFFQECGATEKMTGLNFKVMQSRLATFTKDGSTSFNILLQTLKNAHLVSNTYGKGDHPFLYRVIKQQPSDIVQFYKIYLNEKVLYLQSDIPDNAIFLHGERKRWENRNEQYYRDLAERYLQRPIQLPRQLFESHIRQLLLSDCIKGERGNDLKEAINSAASQGRCNTTYMIMEYFADYLCDGTQFFYGLFDGDLSHEYNYRFYSLISNNIENSKKLVLTLKKGNNSKESPFISALERGIHWSKRNPLMKKGLKNDSSEGDFVHAAKRAYKEMTETERMFRRYAVQDEVLFLAAKITIRRALGLSEQYNCLLGDIKPQGGSLLEQTIPSITTKHTINTGNKKQKPKQVQILQKNVKLKDFGKVFKLLNDRRIFDLLFNKGNEAVSMTDLCEELERYDRHRVDVFDSVLKYESKITKGYTNKELMNESGQIDFKAIQAFDKQNTTADKEDLRLIRNAFSHNQYPQYNNEPILFDKDIPEIADEISIIAKDIEENTK

SEQ ID NO: 1756 - protein, 1126 aa, Artificial
  Synthetic
METNQKPNYKKFTNEQDKPFFSGYLNTAKQNVFIIFRDISERLGLGFDLSNDDNIMNADLWEYLKNNKRPEITQHIIEKLMYHFPFASHLTTNYAYYKRKENQAEPLDYYEIFELLIKQLYEYRNFYTHVVHDPVIMNKVIINGMRILFDAARIEVKDRFNLKTEDVNHLVRLGPKGKENKNFYYNFSDDERNVSEKGLAFFICLGLQRKDAQIFLKSLVGFKLSESPSQKATLEVYTNYSPRIPQPRLTSDNSIEGLLLDMVNELKRCPKELYHLLSIEDREKFKAVKEDNTYDDNDEYEAMPVLKRSRNRFFYFALRYLDNNLQNIKFHIDLGNYCFHVYEQEIEEIVRKRRWIKRMTSFGNLEDFADKMRPAYWVEKTLKLEDKKVDNPNIYITDTTPHYHINGQNIGIKFINNYVALRKNNKIWPELPDFGDNNKTNKPRNETPDCWLSLYELPSIVFYHLLKQQNIGLPSVERIINDHRNQIRGFFNDLENNRIVPSFTDTTLKAELKNRGLKKSQIPSAIVKYLTSKPVMSFEAKASKRLSELVTETSEKLDKIKRQEQHYLKKPGSKDYIDMKCGHLADFLARDMISLQKPYNNMDGKANSTEFQILQSKLAYFGKNKDSLSKTFHLFNLMGSQNIHPFLYKIDINQCIGILDFYKKYLDHRYIYFKQCLNEKRYSEYHFLKLGGKSKEQGRDYFVKLANTLQKETVMNLPRGLFLESIIRILKANDNSRPFAIEIEKMERVNAAYVIDQYLGRILNDKPQVFYSYNKSYEFLNKLFDSRKISEKRNALPEVYFDTGELAKKTTISVKGQKDNEITRSLTKTVEQHIKRNRIFDEKEKTKVYDQYMARYNDFTENEKQIRLAKTCDEVMFMMIDDIFRKYFVLDNGTLKKKTIEAIPFIQLGDDYKLGSIKPDSEKGFLSLQTTVKLQMPFTYETNTDKVLKVKGAESKLSARYIKTIVRETIKIKNYGDFRAFLKDRRISSLLPYLSDREIHYEALQKELELFQKARMEVFDRIFRFEKDITGAFHIPKNKNGYIYHTEILKQKINEGDERFGFIKELRNAFNHSNYPAYVLFKDFIDGSQFNELRNYKSGDTEVENKSVILQFKNLLIQYYDELTDL

SEQ ID NO: 1757 - protein, 1188 aa, Artificial
  Synthetic
  misc_feature (685)..(791): Xaa can be any naturally occurring amino acid
MPNPVIEPESAQAMKSARAAFANLARMNLFSTLSFISDAVGIQDSDKFEEHILNMKILDLDNTLQQAADRQKAFRLMCRHFGFIRYMNEEDEKRKKDKDEDYIKTLGYDKFVDILKRAITVLIYYRDQSTHHVFRDKRNTDRSYLEAEALLAWELDTCFTIAIRVIKERFKKDFSNERTKHCLDFLNGRTRKDNSGKTVLNNGHFFALARKDGEGHLRLTEFGKVYLLSLFLSKQYASELLDKWYSQELGNGAWRDPAPADSPQRSYLRDILSALRIRLPHDRIDSTVGINQIGMDMLGELKRCPKELFPILAANDQKLFEAIDSSTGDKVLMRRSSDRFPHLALSYIDYTGLFKSARFAINVGQYRYVFKDKKLCIDGSTEPRILQKDLNGFGRIQEIEAIRTLEPQAPDNPWPYQSLIKGFEETPRKDAECCPYIRDTRTHYLFNRDRIGVCFGPKPDAFPTPYDSSLTKSEDKIWYLPAITPSPGQGGHAKVSCVEPHCWLSIYDIPAMTFLAFLTKDRISQGLQYVEHIMLECVLRYRALFKDIADGSVFDGAQQDIEAHIRTKYGIAFKDIPKSLQHFLKKEGYDADARFREHLIRVIEGDAKSGVKGLIERTDNRIASWERDLQSVRSVKENKAGKEGFVEIKTGTLMSWLLKDIVYIQKYLPVTDPVTGLTRSNKLTXXXXXXXXXXXXXXXXXXXXXXXXXXXXXXXXXXXXXXXXXXXXXXXXXXXXXXXXXXXXXXXXXXXXXXXXXXXXXXXXXXXXXXXXXXXXXXXXXXXXXXXXXXXMIDNYGFVKAERRKWQRDYLKTLPKEFYNSETGRFCPIFLPSGLFEKPLREQLDRIPELRAALSEGDKDGRKANTTYMIKKYFEIVRGDGHQRYYDFMRTYPFHEYIDKKRKDIKVQNIRTTNLSTGIVSDDSNFRRAVKEVLSSRPAAQSDTRQNHTRPGHTQPTPYSVDTLKKKWKEMSETERTLRRYEVQDMLLFMLGTSIVLHTDTGARLAETGLLLKNVMGGNEGTDILSQPVNITTSVKIRQKIYKIQQTEVKIRDYTKIFALLRDTRTRSLLPVLPIEEVDAAELQDELNRYDIERPKVFRDLLIFEKTQYDSYHSYLSEGRIDFRRLLELDSTLPEEKKEILRLIRNAFSHNTYANPQKAQYEARLRPQPELGPAESMEQNVKEIVNRQ

SEQ ID NO: 1758 - protein, 1383 aa, Artificial
  Synthetic
MGKDHKKGNGAPQNQNTGKQQKSGKVQKPQALVVNETNKYVLGGYFSLGLTNFYKTVLLVFNKAGIKVVSENGNIIYSDEKIGQVLNTLYKSTLNPRPSFEPFEEAWTKHFKLNTNQQVKLQKLLFHHFPILGPIMADEAAYKVNNSKKSNVTDAYTMTYGVTLSDCLKVLSTIAQGLVDCRNTDVHFKPYNSLDDLAKQYLVQENIVRYLIKALVASRRLDKKRNSIETEKMEFLTGYAKDSNDDAGRSLESYIRKWGFYPKYDQVIKTDENGNVLYVIETDKQGNPKKDEKGNPVYKQKKDKFGNWRFKEDGSPEYEEQVRMVERNDFFYKIGGDTSIVKDGKVYSTLTGFGLAYFCTIFLTKSQAKQMLSDVELFEKSPYPKELNDIIRDMLSIYRIRSPKGKKLEGSDTKISLALDMLNELRKCPKELYDVLSPEGQKYFEDKVKRPNERTPEVVKRFRSTDRFPYLAMRYIDETKLFDNIRFQVQLGKLRFKFYPKTCINGEEEIRSQQKEINGFGRIQEIEQKRQTEYQDFLQTAKEKSVKIEGEDINLDLLQFEKDSADSKPYITDSRAYYNIHNNRIGLLWKEKVVTDEEKNKRIIYQYGDYMPSLKNVKDGKAPVTMPSPMAMLSIHELPSLIFYDYLLRVTGNDDKEKSAENIIIDKCHRLQKFFSDVKSGTMTPMANKEELAKKLMSEYGLAVNDIPDKLKKYLSGESIDVNRRKQELTRNRLVRMLKRAIRRRDGFKDDRKMVGNKDNKYGKDSYVDVRHGSLARYLSESFLEWQPSNKKGDNKLTGMNFSKLQSELAVFDDEGKYGVVKEMLEKSGLLSGNYAHPFLNKMTGKNIRNIEELYLLYLNEEVLYIKKLLGIKDKKDNDITDNKIDFKKILLTPDVYDHLPFVKGDARWKEPTPENIKQLAGRYLELDGKRASIWLPDGLFGKHILEILTTHFADNKQLQEDLSDENLTTSVSYLIRVFFEDQLSDSCQPFYVTTKTDGENLRRTKFAHIYDLFNILNNKKVRNAYIKVPKIVEEINDLFVIYAEDKNGNLIKRIGLDGKPLKDENGKTLYKKLIHVEIDKRIDEMTYKERGNHKTLDEAKDAMRRKLIRMIGEVKDNEKTIRRYKAQDMVMFLMAERMMEESEATGNVSKSEKFKLQNVCYPDFLSQTVNFELPFKVGEDTVIISQEFISLKNLGEFYQLLSDERLPSLLERLLEIKKREQKEPNFGYSEIMGELASYDIHRSRIFKAIHQLEKYVVSNSEFREFLNNPNDKRFYIKDDNTQDPKRNNFRSLLELLEEGDIHVLSKDERELIISIRNAFSHNHYGINFDDIADDKDLGKSTLLYIEEETASDANKKELTTIATLIAKKLEELQQKVEKSNYS

SEQ ID NO: 1759 - protein, 1146 aa, Artificial; identical to SEQ ID NO: 1461
  Synthetic

SEQ ID NO: 1760 - protein, 1147 aa, Artificial
  Synthetic
MEIATQQSETQKKKRSLDQDPQYFGAYLNMARHNVFLIVNHLTDTFKELNFKKLANEEDIWKVDNSSNILLNVFDVTQSKYEDFRPRIFHYLIKRHHLPLVKIFNTEYLGENILQDKSIDYERLHQFLCLSFKELTEFRNSYSHSIAIDENGNKVGRKTTLANDLVPEVNLLFKYAPKYSFLRNHQTLNEGDFQHLDNYQLFIADNQLTHQGRFFFINLFLERSYGIKFLKRFRGFKNENTPPFKATIQSFTTYCLKVPDIRLGNENPKQSLLLDMLTELNKCPKELFNHLTEDDKKEFEPNLDETSSTNVLLNSTNYEFFDTDEVEEAIRELTAQKRHSDRFPYLALRFLDETMAFSQLRFQLSLGKIIIKKPYQKTILGQPNDRIITKKLNVFGRISDFLNREKEIIRALSNDQNVDFLEFEQFFPHYNINNNKIAFYFLNDSDLTEENLESRLRDQENRQPTGFLSIHDLPKLVLLHLLAPSEVQKTLQRFINDNNPAFFDLELLANIKSKVVYEPSTFTKRSEHQYRDADKQEEETEKQQEYQTLLNQRKRLLEQHLPKGVKINQIPEKVLDFLMNISEPNENKVIHQKIKSIKDEAKTLLQRVKNKQAANEIPKLGELATFLTRDIINMVVSEELKKKITSPYSNKLQNKIAFFSLSKQEIISLLSELQLLNNEKGHVFLSSRLILESNGLLSFYKSYLEAKIAWIDKNLFLKGKKGGYIIPENKPVPKTLQKIKQEVSQFDFTQWLQNKAAMPIDVPNTIFDVSLENLLKTNLKKRGITVKDTDKFSVLLNKYLDKDTQPFYKYGRVYKIQDEEESVQVVGKMSKTLKKQYGKFVEENEKVIRFYQSKDRVIKLMCNALLQAENKTALTDSFKLAHTHPNSKQNPLDTPMRFEQKLFSNDKETKVLCTIYAQDTENQKNEILAWNSLSEDDKKYWLTLTTKEAQKEWLSGKPETEQEVYHGQKGYQWTIKEVGKFKRFVKDRRIPALVNYFETTKLPFSLLEYQLKEYDRVREQIFDGVFKLEEAISQKDLAGIWALEQEARGRKNYHQVQFNIFEKYLQNTLPSYDPAIGVIRNKFSHNEFPDLIGQGIEKISQAQIDDYQRNKHLKDYLAHAGISIAQQILAIFEQKINDTLTQLTTHG

SEQ ID NO: 1761 - protein, 1313 aa, Artificial; identical to SEQ ID NO: 1584
  Synthetic

SEQ ID NO: 1762 - protein, 1259 aa, Artificial
  Synthetic
MEQPRHQERKYFTLETTPWYFGAWLNQARHNLSIVLNDLSIKLGSKDITDDASLKATKAVRILCDANARPDDVQKALEYYEKKMPFLFAMHYKFFKNEELEDEAEKINEMHGNNLSASPEGYAAILHQLIEVLNAARNHYSHYATTGELSVPEDFFYLLNDAFDVNVRMVKRRFGLEESDIDHLRRFIPNKDPNNKGRNGKKLKVIPNPAFRYRFNKKDSKTHFSEFGLAFFCCLFLKPGDVYLFLKKISGFKAGDTPAQKASLNAYCINNLQLPLERWESDNSMQAVFLDMCNELSKAPKELYDTLHPDKQQLFITSRAATEDEQEMDDMEEPEPETKMVRKHNRFTFFAQRYLDLTNAFPNLRFAVDLGNFHYSIYPKVIAGNRETRHLTKHLIGYGKLEDFDVKNRPPQYAEKYCTPEQHNQEMPPQYIPEIFPHYQVENNLVAISIGEKNACWPELQTESTGGQRSYPYKYIKSKEKRPDAYISTHELPALLFYELVQDKKSGQEIILQHMRKVRAFFSEIKAGMVQPVSNSLLPKPGTADIVEGKNRAYNDRYKALEELLKSRHLKAAWLPEKLLHYLLGIEQKGEQHTKEIAVQRLTDMITDAVEKIERMELREKSAVKPGKKAFRKVKVGKLADTLSADMMQMQPPVKNSEGQPLPSSKANTTAFRVLQSHLAFYGAHKDKLRDIFRACKLIGGINPHPFLHRIDVSGQTGIIEFYKAYFIEKVKYLNHCKKERRYACYHFLRLKNAAHDIPHLVEEYLNEHPETGHCAFNLPRGLFLQASLDYFKEHGSPVMQEYIKLHAGRINSVHLINYYFQHEHKDAAQDFYSWPRQYELFKTPFAKNGYNDHYTIAERTKRVPALKEIIKADETQLAQLKATARIDKEEIVAALRIYRQIREMNNYLVDRYQKKYPGMIDLHRARFSNHDDCRKVVAKARAIIDDHINNVEKRIRSYRCFLENEQYLRLVEVQDKLLFLCIKKMLANADNKLQLLHANETTVQNGDTFLLRNITAPNTPGNYKSMLNCKPVNGISITLPYYAVNERGGFKKQEGKKILLGEVEIFDRHLKIKNNGNFRKLLKDRRLNNLCFYFMPDNEGKISLERNVLENELHAYERQRLVVLEKVAELEKALYSKHEDQAVDLFYNNGRQEHKRYLAFYFAQYISGCQEVQAKLNAIRNGFLHNQYPLIAEAAFKIAPEVWAQQNAAYVPSATGSTKGYGLIEKIAAFAEEQYSIMIAKITGCVSPPLAGWLQQQG

SEQ ID NO: 1763 - protein, 1000 aa, Artificial
  Synthetic
MEEANRYIYGAYFNMARDNFLNTIKLLADKMKLGAISGFGKDGNEVNDINKLFGDKNTYANIENVVEFYFPWIKALEGRFSLDKGDRNLNDMKMFYKSVLTAFFTAVDSLRNKYTHYSHKDLNIREIKIECTLGGKDYCIGLLNALDCIYDSAVNLLKLRFMVGEDEVAHLRRCKAVNKKVVVRTEKDGFYYRLSDNGGVTEKGVIFIASMFLNRKYGFLFLKQLEGFKRSDEKRYRLTLEAFLAFSNIKPVDRLKSDKLDRASLGLDMLNELTKIPKELSETLSVDCLYKYLASDGEDDLRSRIRYQDRFVPLALEFISQSDEFKDFRFYTYVGNYVYKGYIKRLIDGTDKERYLSDRLCGFYKSVNDASSDAIAQKYGVEIKDSNEPDYMLPDSFRPHVLRATPHFVINNNNIGIKICGNDCLPIVNGKGVESPEPDYWLSIYELPAMLFYAYLREKNGKRFKDYKSIRELIEGVEKKADEKNDRDKGALMARHIDKEIIWTQTKLDEVKRLEEKKVAAYGKKGRVVLKSGRMADLLAHDMVRLQPATKGSDKITGVNFQALQVSLAYFKRDILADVFSRAMLTTGNHRHPFLYRIDVSHCSSLRDFYVAYLGERRKYFEDVAKKIAKNKLNTPCHILRRLQREGSGEEAGKDVKPKFLPRGIFTDSIKNCLEQSKLNIYIRNARNDVKPAINAAYLILMYYKEIEKGEFQGFYGEKRRYDILEEGKPLDLAERKKALASIKPAKIDVSEANMPMSKEEHLMRKRYHAVCNNESAIRMYQVQDILLLLMAKDIFKKALSEGVMSKKIGLENLNGIFDAPVNFVKNFDNIKLTATGIKIKNYGKVCRLGTDFKFNSLIKAFHKVYSKSVEMDYSDYLKEEEEFEKYRLNMVKLCREVERGITEDLHLSLDGKSHLSFNDDVIKPYNDKYNVFNGDDLTFFINARNMFMHGDYKYECVKYVVSEHFKGSLNDVSFAKETYGHFCNLLESMRKKTGLRIDI

SEQ ID NO: 1764 - protein, 1165 aa, Artificial
  Synthetic
MKNQNSLPSNPTDILEDKPFWAAFFNLARHNVYLTVNHINKLLDLEKLYDEGKHKEIFEREDIFNISDDVMNDANSNGKKRKLDIKKIWDDLDTDLTRKYQLRELILKHFPFIQPAIIGAQTKERTTIDKDKRSTSTSNDSLKQTGEGDINDLLSLSNVKSMFFRLLQILEQLRNYYSHVKHSKSATMPNFDEDLLNWMRYIFIDSVNKVKEDYSSNSVIDPNTSFSHLIYKDEQGKIKPCRYPFTSKDGSINAFGLLFFVSLFLEKQDSIWMQKKIPGFKKASENYMKMTNEVFCRNHILLPKIRLETVYDKDWMLLDMLNEVVRCPLSLYKRLTPAAQNKFKVPEKSSDNANRQEDDNPFSRILVRHQNRFPYFVLRFFDLNEVFTTLRFQINLGCYHFAICKKQIGDKKEVHHLIRTLYGFSRLQNFTQNTRPEEWNTLVKTTEPSSGNDGKTVQGVPLPYISYTIPHYQIENEKIGIKIFDGDTAVDTDIWPSVSTEKQLNKPDKYTLTPGFKADVFLSVHELLPMMFYYQLLLCEGMLKTDAGNAVEKVLIDTRNAIFNLYDAFVQEKINTITDLENYLQDKPILIGHLPKQMIDLLKGHQRDMLKAVEQKKAMLIKDTERRLKLLDKQLKQETDVAAKNTGTLLKNGQIADWLVNDMMRFQPVKRDKEGNPINCSKANSTEYQMLQRAFAFYATDSCRLSRYFTQLHLIHSDNSHLFLSRFEYDKQPNLIAFYAAYLKAKLEFLNELQPQNWASDNYFLLLRAPKNDRQKLAEGWKNGFNLPRGLFTEKIKTWFNEHKTIVDISDCDIFKNRVGQVARLIPVFFDKKFKDHSQPFYRYDFNVGNVSKPTEANYLSKGKREELFKSYQNKFKNNIPAEKTKEYREYKNFSLWKKFERELRLIKNQDILIWLMCKNLFDEKIKPKKDILEPRIAVSYIKLDSLQTNTSTAGSLNALAKVVPMTLAIHIDSPKPKGKAGNNEKENKEFTVYIKEEGTKLLKWGNFKTLLADRRIKGLFSYIEHDDIDLKQHPLTKRRVDLELDLYQTCRIDIFQQTLGLEAQLLDKYSDLNTDNFYQMLIGWRKKEGIPRNIKEDTDFLKDVRNAFSHNQYPDSKKIAFRRIRKFNPKELILEEEEGLGIATQMYKEVEKVVNRIKRIELFD

SEQ ID NO: 1765 - protein, 1121 aa, Artificial
  Synthetic
MTKPENYNLIETPWYFGAYLNMARHNIYLISNEISEKINLNNMLSAEEHISNSFLTKQDFLNKNNPRLILSMLSRFMPAVKIFSSDLLHKELREKADTEGVDILGMATFLQHSFKELNAFRNDYSHYYSSKTQDKRKVTVDEDFAIMLRKQFDFAISIARKRFEGVIPAKSFDFVENKIAQDLFSDSTTITTRGFVFFNCLFLDKENAFQLFNKVSGFKDTRTFDFLATREVFTVFCVKLPHDKFVSEDPNQALQLDILNYLHKAPKELYNSLTKEGKKIFQPDLSELAKSNIAENSTNNTIAEFEYDEYIQAISTKKRSDDRFSEFALKYLDQSDTFQFDFHINLGKAITKSYEKAVLGEKPNENNRNIEKSIKTFGALTSYKKYVEEDVNEIKSLITQESELKKLFDEKAPEHFSQYAPHFHTQNNKIGLLSKQNKKYFNKLYRPIPPDAFLSIHELPKVVLLEILNKGKASELITAFLQKNNDVVLNRDFINNVKSDLNFTPLQRVFFDKNLSATKYCSNIESEIDKTKEEINSCKFDNQKRTLRLKLKSLIYTKYVHEVESRKNKLNKVLKDHQLSANQIPGRVIDYWLNITDVSIENAIKNRIIAERKDCVKRIKDLTNGKIPKVGEMATFLARDIVNLIINENVKNKITSFYYDLLQECLALYANPDKKQLFIDLCTKELNLFDKNIGHPFLADIDFNKIIKTKDLYRQYLEFKGTKKRFEKEDNWIINTFYSISKDEKTKKNITEIKLPESNIPLSYLRLNRDKSDFDFWLNSVSKGNDKNPNPKPIDLPTNLFDKTLISLLKEKVKTDENTKYNYSKLLALWMNETQHYYNLKREYTIYKDKPYQAIVQFDPNEKKSFKEYYAASLEETFKKRKKEEKRIQEKQVATVFKKAIENNEKVIRFYQTKDRITLLILNELIGEDLYISLNELSPDSDKSPLEAQIPLKENIKGKIITDTRKRKDFSIFRKLASDRRLNHLFEYYNEETIPYEVLRKELNDYDRYKEQVFKAAFDLEKAIINAASEMEYEQIVKDGTQEGPNIQHKAYLNWLVKYEIIDSKEREFINNIRNTFSHNQYPKKAIVDDFNIDFQNSTISSKIVDTYLEKVNKIIKTKLI

SEQ ID NO: 1766 - protein, 1147 aa, Artificial; identical to SEQ ID NO: 1760
  Synthetic

SEQ ID NO: 1767 - protein, 1133 aa, Artificial; identical to SEQ ID NO: 1570
  Synthetic

SEQ ID NO: 1768 - protein, 1003 aa, Artificial
  Synthetic
MGAIKNKHIFAAYANLAIDGLIKTLNFIAKKLDTQKQLSSWDIKHVITLIDSIFDQNPQNNLEQVVEGYLPWIKPIIEMKTPKKGERQSDKLCIEYKTIITAFASLLNDVRNYYTHYYHDPICIYPGGYDIPSSLNCIYDSAINIIKERFQAEEKEMEHLRRYTRKKGRVVLKTEDDHFYYTLANNNDLSEKGYAFFISMFLERKYSYLFLKKLSGFKRGDSLQYRLTLEVFTALSTKPPVERLRTTKDTKQDRALDILNELSKIPIELYQTLEPKYREMYNETLQPTDAEDPYGLPDRSRIRFRSRFEAFALHFLDKQADFKEIGFYTYLGNYFHNGYQKTRVDRETKDRYINFQLAGFCKNIQDISAKKLSEALNVKSIDISTDSIPDINSFEPYLVQSTPHYIVNGNNIGIKVLPEGKDTYPTIDEKGAKMPIADFWLSKYELPAMLFYTYLRNNNIHKSHCPLSVKDIIERSIHKSTKQKHPEERSELMLRRVMKAIFWTDSKLNEVERIKSQKSAFGKRQHEILKAGRIAETLVRDMLWLQPSKNNGRDKVTEPNFQAIQVSLAYFGIRRNDLTEIFTRAGLINSSNPHPFLAQIGTNYTSLIEFYIAYLKERKVYFSRIQKKILQGKLNIQCHPLRDLQREPNKPQDKEEAIFLPRGLFNEAIINCLKKSKLKQLIESPTREKSPALNVSYLIQNYFRTYFEDQSQEFYAQPRNYRLFDKLSPNKGKSKSYLSLEQRIKKMEELRPSKIPVAEANKLLEKEDRLYRKNYNEICDNESIIRLYQIQDILLFMMTKEYLPSDLYNRINKYKLENVKGILNERVSYLIDLNPLKIQGEDIKIKDYGKLFYIHHDTRISSLNKVLSKVKRNNSISSSVKIQPYENYKRECLDFEEAQIQIIPIIHSFEIAMVSMFPDLKKATPGNYYDFNELITEYEKRTKQKIGSSFLIKTRNMFLHDKYEAECIKEISDDFVYAKKIIAEFKMKIENIKLEDLSNDSSA

SEQ ID NO: 1769 - protein, 1212 aa, Artificial
  Synthetic
MVKPINPFDLFTGGKQPELAIAYNLAHDNITKYINTLLTFNKPDYKPLEHINDLPDEVFVYLRHYLWKGNDENKNTSGYELDPQEKSIIKKLLTKLDELRNFYSHIWHDNYMMAFDKELYSFILNKHDVACSKLETKAADRELYFKQIEKYPLFKDYKYITQDGRVFLLSFFLNKGEMQSLLQRLKGYKRTNEPQYHFKHKLYTHYCHREGSSWDSTGIENKELEKRTNSEQTRILSGRQAYRIFNYLKDIPAFTLDEALPLILQSGTWVHNMDTLLVFIKEKNILPGFNFYKKFEVPENDETLDAKELNEANKLLEKKEREGYRYFTYSGDNNCEFEISYANLKHIVTDLFLDVNTGENNNQSQTHFLGVLKDCIDTRKFIFDSLKAGGNKPLHTENFKLEKRYSSIYINYKEYEDAIQERYYTGDEWRHIPISPTPKVEKLLIEWHAEFMRGTNDKPSKNEVAKRKKLLNLIRPRNEPFDTSAYEGLLRTGKKKKLPEVTDPAPLLFHLSYYYRELDTKKRSEDRFLAWGVHYLIDMGLVPDWHFELEQLKYEQKLGDPESPYKFKKVTTWAKGITDNFRLYITDHHVNVGIQKDGVIYRLRIGEKTIKYLLFWHFKEKNKGDKSINGFLVEVCKDLAAIYTNKAEKISVSALHLLENFALPELLYKTKVAEESEKGRKSILYKEQVLKFFTRKKDWVDLQLKNLRTLSRNEKNAILLDAYRLFNFSETEGQKFLRKNEYEQMSVCHFMLNQEKFKVKGLIERTFKLKRRLPAEIINIIYSVVETDGENLDNLLVKILRNRKIFLKQKVDLLNNPGIKNKVIKNDIVDFFDIYIDDANLSAEELAIRNNVRHKTLETLPFSVHPALALKYFYPQQFAAQGFRKEGGNYINVFYELRKQSTRLAGILPLGNFREKETSKIFDNYTQLFSDDKLLKNHIKKWTGEINDIKVKDILLLLVAEDYLKKYDGKTAEEFTKIRGLNKNKLDELFASEVTVTPNIQAVRSELDEEHKNIIPTIIYFSLHMHQLDDYFFRSQKDNQIKLAMFYINWRHEELQAYKDHNGIVEKITAWPDGTKQKPLTMGNLVEARRVNAGHAAELVNYIFDYERGIINNYAKKAPNKQPQQVLQEYSNSNLNGKYIDFDTVLQWDNVNEADIKSDIKTMRVKCLHTLIPINGSHRQKTLPGTALAEALHIYKWLGNDRTAPNIYEQEE

SEQ ID NO: 1770 - protein, 1003 aa, Artificial; identical to SEQ ID NO: 1510
  Synthetic

SEQ ID NO: 1771 - protein, 1000 aa, Artificial
  Synthetic
MEEANRYIYGAYFNMARDNFLNTIKLLADKMKLGAISGFGKDGNEVNDINKLFGDKNTYANIENVVEFYFPWIKALEGRFSLDKGDRNLNDMKMFYKSVLTAFFTAVDSLRNKYTHYSHKDLNIREIKIECTLGGKDYCIGLLNALDCIYDSAVNLLKLRFMAGEDEVAHLRRCKAVNKKVVVRTEKDGFYYRLSDNGGVTEKGVIFIASMFLNRKYGFLFLKQLEGFKRSDEKRYRLTLEAFLAFSNIKPVDRLKSDKLDRASLGLDMLNELTKIPKELSETLSVDCLYKYLASDGEDDLRSRIRYQDRFVPLALEFISQSDEFNDFRFYTYVGNYVYKGYIKRLIDGTDKERYLSDRLCGFYKSVNDASSDAIAQKYGVEIKDSNEPDYMLPDSFRPHVLRATPHFVINNNNIGIKICGNDCLPIVNGKGVESPEPDYWLSIYELPAMLFYAYLREKNGKRFKDYKSIRELIEGVEKKADEKNDRDKGALMARHIDKEIIWTQTKLDEVKRLEEKKVAAYGKKGRVVLKSGRMADLLAHDMVRLQPATKGSDKITGANFQALQVSLAYFKRDILADVFSRAMLTTGNHRHPFLYRIDVSHCSSLRDFYVAYLGERRKYFEDVAKKIAKNKLNTPCHILRRLQREGSGEEAGKDVKPKFLPRGIFTGSIKSCLEKSALNINIRNARNDVKPVINAAYLILMYYKEIEKGEFQGFYGEKRRYDILEEGKPLDLDERKKALASIKPAKIDVSEANMPMSKEEHLIRKRYHAVCNNESAIRMYQVQDILLLLMAKDIFKKALSEGVMSKKIGLENLNGIFDAPVNFVKNFDNIKLTATGIKIKDYGKVCRLGTDFKFNSLIKAFHKVYSKSVEMDYSDYLKEEEEFEKYRLNMVKLCREVERGITEDLHLSLDGKSHLSFNDDVIKPYNDKYNVFNGDDLTFFINARNMFMHGDYKYECVKYVVSEHFKGSLNDVSFAKETYGHFCNLLESMRKKTGLRIDI

SEQ ID NO: 1772 - protein, 1127 aa, Artificial; identical to SEQ ID NO: 1685
  Synthetic

SEQ ID NO: 1773 - protein, 1008 aa, Artificial; identical to SEQ ID NO: 1452
  Synthetic

SEQ ID NO: 1774 - protein, 1211 aa, Artificial
  Synthetic
MNYTAKSDFKKIFENKGYVGALAEKSSNNFEYIYKNTVNRNSRLFYFAVGHKFKNLPVPASILFRKEYDEKAGDFQCNDFTYLQEKNFRNVNGEELLKKTIGGIRNLNSHYVHLFEPLSIDDKSKPVALFLKDAFRMATLVQFLDKEKAWERLWKEAGSAFPEGDYFAEQINPKLLEKYVRYISDSSFKARYKQFLYEKFRQDKKKQGSRANGDGASSSNASGFPEEWSIDACLDNLLFTEVQQEIEWKLYNKYPIINIGVGTYISFIGMLFLLSMFLYKDEADLLISKISGYKKNDDDEMRCKRNIMSFFSKKLSSQDYDSEEKHLIYFRDIIQYLNKYPTEWNKKVDLDNETDSLFSAALKQKIEEMEINRLFPYMRDDVDFKHFAVERLFRKKHVEPLKPIYSALIEKNELLGTIYRQVESHNLLGGEYKGFEFKEYVLKYVLNTFFPGKTDWSEYRNKTFEKEETHEAKLNTNKEVAKLKERLKQKLFYTSYGRNQDRFMEMAIRYLATEEYFGKDAKFKMYKFKTVEEQTDYLEAVENDKSMSKQELDKQKFHNGKLTYYATYSEHCKKYPEWDMPFVIENNSFKVQLKLSETEISETEVSIQRSLLVYLLQDRLFPPEGFYKTSGESLFQEYYKGYKDRLKTACQAFENKSVEQLTSIKKLLPRRAVKRQFSDEPMQQPTYALYKILEEARRQEERYEQLLAYKRATARSIQSSEVYDHFIHKNKGKQFKLRFIRKAWNLMYFKDIYKNSLSTCGQHHKSFHITRDEYNDFCRYLFAMDTVPDYKSRLRMLLDQKSFFADKAFERLFNEGHSLDEYYRKTKVLFKEWADKQQSVAVPKEKYRLKNYKNFSEKVILYINLSDFIAFLIEKKRLQTNAEHKLCLPALRNIEHLISGFYSVEDETTSRSMCKKLMANRLEDCLLYEMAICYLQKEKKKEIKQLNRRGVDVILNTNQVLPIEIKPDKGKTKPDKDKTQGEVYYIEMPFNHIEKYVGIVSLKIKKEEKGHRSFLSDLPGYIKLVNDKLVNEKNRPNGRGSKELEKISRIYQNYLERGNKILLEEYNSIQRHIVTEAGKFISLYMELEKYFIYYSIYNNKMQLLIIEGKRNRITFEEIPELKALVEKEQRNTAFHFGIPKGKLYTQIMRDIENGFIEQIVKPMNCKDYRSIPDEKRAVLDKLYECQKKDGKPKKRSIDEENRYFEKMIRKK

SEQ ID NO: 1775 - protein, 1003 aa, Artificial; identical to SEQ ID NO: 1723
  Synthetic

SEQ ID NO: 1776 - protein, 1120 aa, Artificial
  Synthetic
MEDDKKTTDSISYALKDKHFWAAFLNLARHNVYITVNHINKILEEDEINRDGYENTLENSWNEIKDINKKDRLSKLIIKHFPFLEAATYRQNPTDTTKQKEEKQAEAQSLESLKKSFFVFIYKLRDLRNHYSHYKHSKSLERPKFEEDLQNKMYNIFDVSIQFVKEDYKHNTDINPKKDFKHLDRKRKGKFHYSFADNEGNITESGLLFFVSLFLEKKDAIWVQKKLEGFKCSNESYQKMTNEVFCRSRMLLPKLRLESTQTQDWILLDMLNELIRCPKSLYERLQGVNRKKFYVSFDPADEDYDAEQEPFKNTLVRHQDRFPYFALRYFDYNEIFTNLRFQIDLGTYHFSIYKKLIGGQKEDRHLTHKLYGFERIQEFDKQNRPDEWKAIVKDSDTFKKKEEKEEEKPYISETTPHYHLENKKIGIAFKNHNIWPSTQTELTNNKRKKYNLGTSIKAEAFLSVHELLPMMFYYLLLKTENTKNDNKVEGKKETKKQGKHKIEAIIESKIKDIYALYDAFANGEINSEDELKEYLKGKDIKIVHLPKQMIAILKNEHKDMAEKAEAKQEKMKLATENRLKTLDKQLKGKIQNGKRYNSAPKSGEIASWLVNDMMRFQPVQKDENGEPLNNSKANSTEYQLLQRTLAFFGSEHERLAPYFKQTKLIESSNPHPFLNDTEWEKCNNILSFYRSYLEAKKNFLESLKPEDWEKNQYFLMLKEPKTNRKTLVQGWKNGFNLPRGIFTEPIRKWFMEHWKSIKVDDSKRVGLVAKVIPLFFSEKYKDSVQPFYNYPFNVGDVNKPKEEDFLHREERIELWDKKKDKFKGYKAKKKFKEMTDKEKEEHRSYLEFQSWNKFERELRLVRNQDIVTWLLCTELIDKLKIDELNIKELKKLRLKDINTDTAKEEKNNILNRVMPMELPVTVYEVNKGGYIIKNKPLHTIYIKEAETKLLKQGNFKALVKDRRLNGLFSFVKTPSEAESESNPISKSRVESELGKYQNARLDIIEDMLALEKKLIDKYNSLDTDNFHNMLTGWLELKGEANKARFQNDVKLLTAVRNAFSHNQYPMYNENLFGNIERFSLSSSNIIESKGLNIAVKLKEEVSKAAKKIQNEEDNKKEKET

SEQ ID NO: 1777 - protein, 1334 aa, Artificial
  Synthetic
MNMGKDNKKYQDKRQGQKSEQPKKVRRIQTKDFSISLTGKHVFGAYFNMARTNFVKTINYVLPIAGVRGNYSESQINKMLQALFLIQANRNTELTQEQQQWRKKLILTPEQQTRLQRLLFKHFPVLGPLMADVADHKAYLNKKKSKVQTEDEAFEQLRGVSLADCLEMISLMGETLTECRNYYTHRNPYNSPSELAKQYMHQATIAKKLDKVVVASRRILKDREGLSVNEVEFLTGVDRMKQVDVLDENGKVKMVNGKKMKSFQEYEDFYFTLWAKRPVVGITMTGLDGNLTTIDTKLPALSDFGLLYFCVLFLSKSYAKLFMDEARLFEFSPFTEQENIIMQEMLCIYRIRTPQPHRIDSRDNKATLSMDMFGELRRCPIELYDLLDKTAGQPFFHDKVKRPNSYTPEVSKRLRYTDRFPQLALRYIDENDLFKRIRFQLQLGSFRFKFYDKNDCIDGRVRVRRIQKEINGYGRPQEVNENRFQKWDGLIQKREERSVKLEHEELYIDLDQFLQDSADSTPYITDRHPTYNIHANRIGMYWEESQIPKQFKYFDGNKMYIPELIVGNDGKAPIVMPAPRCSLSVYDLTGMLFYEYLRNQSSTDYLSAEQIIINCESDYRRFFCAVADGTLKPFPKTKELHDYLAREYPNLHIADIPQKLLFYLSGKGLTHNNMPETVRQRLVRLTLEHLEEREQKVKYRLEHYEEDRKVIGNKENKYGKKNFADVRHGALARYLAQSMMEWQPTKDGVGHDKLTGLNYNVLTAYLATFGVAQPKDDFDITPCSLQEVLTKAHLIGGSNPHPFVSKVISHCVIANAKTRQKLTKEPRNIEEFYLFYLEEELKHIRSRIQSLKSNASDKALAALPFVHHDRMRFRERTAEEMKALASRYTTIQLPDGLFTPYIVKLLKAEYADNTALQQKLIQQTPNKLNPINNAAYLVTLFYQMVLHDSAQPFYMSDVTYSRLNADNKSETFSFKRAYELFSVLANDKEKFFPFELKPLFLTSADIQARISAKVKDETGDPIARIGKKGKPEKDTQGNIIWLREITEKIDVYVKSRSDKDLKISPNQSWKEKEEEREQKREALRTRLNRQVNDVKDNERTLRRFKTQDMVLFLLAKGMFTDILNGQEREVNWKHLRLAKVCNDTFLRQTLTFQVPVTIGNETIYVEQENMSLKNYGEFYRFLTDDRLKSLLENIIGELKPDQQGRLVISHTDLMSELAAYDQKRSTVFKLIQQIEAMIIKGNDVLCNPDSPEFWSKPGLPKRNNFSSLLELIDHLNQTALTTEERSLLVAIRNAFSHNSYNIDLSLIAGLKHLPEVANSILQHLQSVIGISTIS

SEQ ID NO: 1778 - protein, 1008 aa, Artificial; identical to SEQ ID NO: 1452
  Synthetic

SEQ ID NO: 1779 - protein, 1129 aa, Artificial; identical to SEQ ID NO: 1396
  Synthetic

SEQ ID NO: 1780 - protein, 1126 aa, Artificial; identical to SEQ ID NO: 1756
  Synthetic

SEQ ID NO: 1781 - protein, 1167 aa, Artificial
  Synthetic
METKEQIGKNVYKTSENDPLYFGGYLNMARHNVFLIINHLTEVFDSLGYTKINDDEDIVNQDHILSQIFDPSKKELENERIRIYNYMIKRHHLPFLKVFNSEILNDEDGENMGIDFKSLHNFIIKSFKTLNDLRNSYSHYLAIDDDGNKIEKRSNIVDVSIKSDIKQLFKHAPKFSFIRNQETQHEEDYNHLDRYRIFENETNILTDQGLYFFINLFLERNHATKFLKKIKGFKNETTPPFRATIQSFTSFALKLPDIRLSNERPLFSLLMNMLTELNKCPKELFNHLTQKDKKEFEPLLNDEEKHNVVLNSTNYSEISDDELDEAIREITALKRYNDRFPYFALRFLDETNALKNIRFQITLGKLIIKRYDKEIAGIEENRRVIKTINAFGKLSDFIDNEEVVLKELKKNLADNNDIRFEQYSPHYNTNNIKIAFYVFDEGDDKTKYPFVFENKENNSDIQNNPSGFLSIHDLPKMLLFECLDINLKPENIIIDFIRSTNLEMFDLSELEKIRKQANYEPEYFSKRINKEKYLISKKGIKYLSKEVENNMLEDLGLSKDELILKDKDSFMKLTNSKKYIEYFSQIKYQYYLQKRREELQRHLPKGLKIDLLPENILEYLMDFKERNNEGIIHQKVAAIRDEAKNLKKSIESEVEKPKNEQRIKLGELATFVARDIIKMVICKEVKDKITSPYYNKLQNKIAYFSLNKDELIDICDELKLFNENEGHVFFKKELIKNSDGIIDFTLDYLRAKDNWIETKLLKKGKTGGYRFPDKTKIPLSFNKIKNKANSFDFKTWLKNKSQLPVDLPRSLFDEKLEIILKGKLNQKGIIFNTGDKFSVLLSKYLNNDTQVFYNYCRSYSINKKIEEFEISGLSGKEIKKNFDSNVEKNEKSIRFIQTKDRVLKLISDKILSIDRSIGLQSGFCLTDIHPAAKHNPLDCPAVFEQKIIRRGDEVFCNIIAKDTENQIQSVKHFESLQAEEEKEAYPDQKWYQWTIKDFGRFKRFIKDRRIPNLSNYFEDKNIPFDLLEYQLREYNKYKEEIFELTLMLEKEIINYDFEGIRTIEFSENRRPKGFYEIRFDTYMEWLDNKNIQYNKERVKECRNKFSHSEYPLFKEISKISKQQITEFETNKQIKDYKSSSGISIAEKIYNLYKLEIERIINSIKNNI

SEQ ID NO: 1782 - protein, 1082 aa, Artificial
  Synthetic
MMYNDSQGNNMEQNSKSFLGIFLNQARLNAYIALCHISDLLEKNTVDEDSLTQMPVLKFLESNKDAVKSERAFDLIGKQFPMLKVIYGSEPKNGQEDNLLERTKKYREILTCLLKALNYNRNENCHAHSGKGKRDYDVKTLIRYLENCFDAAVTPIRDRYSLNEESVFHLRRKTSEGEGKDKRVVDNPNFYYHFKDEQGQLNEKGLAFLTSLFLEKRDTYLFLKRQRGFKRGETPAEKATLECFCCYRIKLPKPVMTSDVDKNGLALDMLNELKKCPKELFELLSKDRQKDFRGIDSSDTEEDGNEILMRRYSDRFPYLALRYCDENELFQNLRFHIDLGRYYFKFYNKEMIDGGTYQRALDKRLKTFGRIRDVKEKVEQQWKDIIKSPGDNTEEKSEPCDNTEKQSEPYKTNTTPHYNLVDNQIGFVISGDCDLPDIKQPEGKITLQKPDAWLSIYELPGMIFHGLGDGFEKTEGLIKQYIERQRKICKKICETGAIPEDAGEFLSESLKDTGTSDAGQNNYAREKLQRMLGDTIQRIKALKKTQDRMADKSNKPGKKKFFDIRAGKLADFLARDIMALQKFDPAKNGKDKLTSTDYQVLQASLAFFSAKKDMIADIFKRIGLLDGDNPHSFLNQINLAGCNSIVDFYLAYLNAKQQYLEGCKKDGDLDDCQFLRPSRQRYAKGKRDIKTIAKQLLDNPVNIPKGFFQKQIEEFVCKQDPSLENREMNTAYMIQEWFEMTHGGCQPFYGYEKTYEIVSKAAEYGKKAVNRNIARELRSITAQMSYKEMKSFIEEKIPDKGRYDPENLRENLLKGCSDFKDNERLLRRSRVQDMVMFMMFETTLKEHLSIDGNVVKLQDITLLEDSPFNKPVRCDTIITVPFNTKPEHYDNGYVVFIQEKYKGFCISQPNRIILKYKVTSENTKLKDLGKYRRYLYDRRLPGLLIWKYPPNAQSDTEIKYSYIEEQIKAYEQHRVEIAGLLYGLENKVIDCLMPKDALGDGYIDFKEIIKKLKDKLPRFEEQADTLWNIRNAFYHNQFPVFTDAIEKADGGSIAEKMLSITQSYVEQITKEIDESDKEFTNV

SEQ ID NO: 1783 - protein, 1008 aa, Artificial; identical to SEQ ID NO: 1452
  Synthetic

SEQ ID NO: 1784 - protein, 1147 aa, Artificial; identical to SEQ ID NO: 1760
  Synthetic

SEQ ID NO: 1785 - protein, 1147 aa, Artificial; identical to SEQ ID NO: 1760
  Synthetic

SEQ ID NO: 1786 - protein, 1147 aa, Artificial; identical to SEQ ID NO: 1760
  Synthetic

SEQ ID NO: 1787 - protein, 1147 aa, Artificial; identical to SEQ ID NO: 1760
  Synthetic

SEQ ID NO: 1788 - protein, 1084 aa, Artificial
  Synthetic
MNPTNPPTMSKGEYRQFDNPKDKAFYAAYLNTAKQNIFIILRDLSERLGLGFEDNDDRMFSAMFWSKLSVNDEEFSQRIIDHLHHHFRFLKSVTLNYARYRTDNLLATALPEDYHFVLKKWIDQLIAYRNYYTHAAHDPICMDPQIIYDMRGLYYAEWKEFKKQKNLTDTDVAHLHGLDKKGHEKPGFLYAFRNDKGLTEKGLLYFTCLWLEKRSGQELLKKHYGFKDSRERSQKATLEKFTRWSAYVPKPKITSDHSTQSLFLDMVNELQRCPKALFDQLQKTHQQIFERAAEDETEELDGYENKPILLRKQNRFFYFALRYLDRSFEHLKFHIDLGNGCFNSYDQRIAEKDWKRQWMHRITGFGNLTDFTNRVPESWKHLQARPGEQATRKTYITETTPHYHFDPASEVMTIGMKWVEHYDPAAAWPLVKTDINGEILKPKNEAPDFWLSLYELPAMVFYQWLHLTAPTRVLLTAEAIIKQHQKNIGLFFSELKTLAHANSIRREELDTLLAKHHLEIGWVPKPIIKCILDQSQPTSHMKATNRLKEMMRENSELLDRLSRRKEHHQARTSSKDYLPMKSGHMADFLARDMIQLQPAINQDQGKANSTEFQVLQSQLAFFGRYRDQLQETFALCNLTAASNPHPFLHKVEERKCRGIFEYYQSYLQERGRFLQECAESPNPEQLHFLSIKPQRDLDKIIEGQLSAVMNLPRGLFKQPIINALKSKETTRPLAIKLQAMDRCNVAYIIQSYFHELQQDQSQPYYNYPREYKLLNKLYDPRPNPLKGKPPHLSYSPQQLTQLQEDIALRLKISIEKDITKNKRKGAERIKEKWHKLFKVFTENEKQIRLYQNGDQVLWLMVQQLYQNLEEDNAKHQTPLTMEGDFLLGEITPETQKGILNMTVRVSVPIKTRSGHSKQIINPTLKIKNYGNFRALLKDRRVAGMLSFVSADEIAESAIRRELEWFEQVRVPILQHIHVLEKVVIEKYTLQKNKDGYISHDEILGYVPGLSEQMKNLLDEFRNMVCHSQYPELEVFKGLIAGADFNDLQHYKKENPAIKEKSIASQLLKLANHNYHETIQAVKKA

SEQ ID NO: 1789 - protein, 1141 aa, Artificial
  Synthetic
MEDDKKTTESTNMLDNKHFWAAFLNLARHNVYITVNHINKVLELKNKKDQDIIIDNDQDILAIKTHWEKVNGDLNKTERLRELMTKHFPFLETAIYTKNKEDKEEVKQEKQAKAQSFDSLKHCLFLFLEKLQEARNYYSHYKYSESTKEPMLEKELLKKMYNIFDDNIQLVIKDYQHNKDINPDEDFKHLDRTEEEFNYYFTRNKKGNITASGLLFFVSLFLEKKDAIWMQQKLRGFKDNRESKKKMTHEVFCRRRMLLPKLRLESTQTQDWILLDMLNELIRCPKSLYERLQGEDREKFKVPFDPADEDYDAEQEPFKNTLVRHQDRFPYFALRYFDYNEIFTNLRFQIDLGTYHFSIYKKLIGGQKEDRHLTHKLYGFERIQEFAKQNRTDEWKAIVKDLDTYETSNERYISETIPHYHLENQKIGIRFRNDNDEIWPSLKTNGENNEKRKYKLDKQYQAEAFLSVHELLPMMFYYLLLKMENTDNGKENNEVGTKKKRNKNNEQEKHKIEEIIENKIKDIYALYDAFANGEINSEEELKEYLKGKDIEIVHLPKQMIAILESKPKDMVKEAKRKQKEMVKDTKKLLAALEKQTQGEIEDGGRNIRLLKSGEIARWLVNDMMRFQPVQKDNEGNPLNNSKANSTEYQMLQRSLALYNKEEKPTRYFRQVNLINSSNPHPFLKWTKWEECNNILSFYRSYLTKKIEFLNKLKPEEWKKNQYFLKLKEPKTNRETLVQGWKNGFNLPRGIFTEPIREWFKRHQNDSKEYEKVEALDRVGLVAKVIPLFFKEEYFKEDAQKEINNCVQPFYSFPYNVGNIHKPDEKDFLPSEERKKRWGDKKYKFKGYKAKVKSKKLTDKEKEEYRSYLEFQSWNKFERELRLVRNQDIVTWLLCTELIDKLKVEGLNVEELQKLRLKDIDTDTAKQEKNNILNRIMPMQLPVTVYEIDDSHNIVKDKPLHTVYIEETKTKLLKQGNFKALVKDRRLNGLFSFVDTSSKAELKDKPISKSVVEYELGEYQNARIETIKDMLLLEETLIKKYKTLPTNKFSAMLNGWLEGKDEADKARFQNDVKLLVAVRNAFSHNQYPMRNRIAFANINPFSLSSANTSEEKKLDIANQLKDKTHKTIEKIIEIEKPIETKE

SEQ ID NO: 1790 - protein, 1119 aa, Artificial
  Synthetic
MTSIQISRGNTNLTRKYQLRELILKHFPFIQPAIIGAQTKERTTIDKDKRSTSTSNDSLKQTGEGDINDPLSLSNVKSMFFSLLQMLEQLRNYYSHVKHSKSATMPNFDEDLLNWMRYIFIDSVNKVKEDYSSNSVIDPNTCFSHLIYKDKQGKIKPCRYPFTSKDGSINAFGLLFFVSLFLEKQDSIWMQKKIPGFKKASENYMKMTNEVFCRNHILLPKIRLETVYDKDWMLLDMLNEVVRCPLSLYKRLTPADQNKFKVPEKSSDNANRQEDDNPFSRILVRHQNRFPYFALRFFDLNEVFTTLRFQINLGCYHFAICKKQIGDKKEVHHLTRTLYGFSRLQNFTQNTRPEEWNTLVKTTEPSSGNDGKTVQGVPLPYISYTIPHYQIENEKIGIKIFDGDTAVDTDIWPSVSTEKQLNKPDKYTLTPGFKADVFLSVHELLPMMFYYQLLLCEGMLKTDAGNAVEKVLIDTRNAIFNLYDAFVQEKINTITDLENYLQDKPILIGHLPKQMIDLLKGHQRDMQKAAEQKKKMLIKDTERRLKSLNKQLNQKPNVAAKNTGTLLRNGQIADWLVNDMMRFQPVKRDKEGNPINCSKANSTEYQMLQRAFAFYTTDSWRLPRYFEQLHLIHSDNSHLFLSHFEYDKQPNLIAFYAAYLKAKLDFLNELRPENWASNNYFLLLRAPKNDRQKLAEGWKNGFNLPRGLFTEKIKTWFSEHKEIVDLSNDDLFKSRVGQVARLIPAFFDKKFTDHSQPFYRYDFNVGNVSKPTEANYLSKEKREKLFKSYQNKFKNNIPAEKTKEYREYKNFSSWKKFERELRLIKNQDILTWLMCKNLFDEQKDKEVNISDIKLDSLQTNTSTKGSLNALAQVVPMVLAIHIGNSESKNETGANEEENKRPTVYIKERGTKRSKWENLKTPLADYIDNSESKNETGTNEEENKGPTVYIKEEGTKLLKWGNFKTLLADRRIKGLFSYIEHDDINLEKYPLTKYQVDSELDLYQKYRIDIFKQTLDLEAQLLDKYSDLNTDNFNQMLSGWSEKEGIPRDIKEDTDFLKDVRNAFSHNQYPDSKKIAFSRIRKFNPKELILEEKKGLSIAKQMYEEVEKVVNRIKGIELFD

SEQ ID NO: 1791 - protein, 1098 aa, Artificial
  Synthetic
MENDKRLEESACYTLNDKHFWAAFLNLARHNVYITVNHINKTLGEGEINRDGYETTLENTWNEIKDINKKARLRELIIKHFPFLEAATYQQRSTDSTKQKEEKQAEAQSLESLKHCLFPFLKKLQKSRDHYSHYKHSKSLERPKFEEDLQKKMYNIFDVSIRLVKEDYKHNTDINLKEDFKHLNRTGKFKYSFADNKGNITESGLLFFISLFLEKKDAIWMQKKLKGFKDSREKYQKMTNEVFCRSRILLPKLRLESTQTQDWILLDMLNELIRCPKSLYERLREKERKEFKVPIEIADEDYDAEQEPFRNTLVRHQDRFPYFALRYFDYNEIFTNLRFQIDLGTYHFSIYKKLIGGNKEDRHLTHKLYGFERIQEFAKQNRPDEWKALVKDLDTFNKEEEKPYISETTPHYHLENEKIGIVFKNHNIWPSTKTELTNNNRKKYNLGASIKAEAFLSVHELLPMMFYYLLLKTKNTHNGNEVEAKKKGTKNKKQEKHKIEAIIESKIKDIYNLYDAFANGEINSIEELEEHCKGKDIEIGHLPKQMIAILKDEHKDMAKKAETKQEKMILATENRLKTLDKKLKGKIRNGKRCNSALKSGEIASWLVNDMMRFQPVQRDEEGKPLNNSKANSTEYQLLQRTLAFFGSEHERLDPYFKQMNLIGDNNPHPFLKETKWEECNNILSFYRSYLEAKKNFLESLKPEDWKKNQYFLMLKEPKNNRETLVQGWKNGFNLPRGIFTEPIRKWFMEHRKKIKADELKRVGFVAKVIPLFFSKEYKDGVQPFYNYPFNVGNINKPEEKDFLDYEKRKKLWDKKQAKFKGKTDKEKREDPSYPDFKSWKKFERELRLVRNQDIVTWMLCMELFEEQKVDGLNTGQIHLKDIVTNVDEEGNNNILNQIKPMQLPITVYDKENSPKRKPLHTVYIEETGTKLLKQGNFKALVKDRRLNGLFSFVKTSSEAESKSKPISKSRVEYELGAYQKARIDIIKDMLALEKTLIDNDENLPTNKFSDMLKSWLKGKGEANKVRFQNDVDLLVAVRNAFSHNQYPMYNSEVFKGMKLLSLSSDIPEKEGLGIAKQLKDKIKETIERIIEIEKEIRN

SEQ ID NO: 1792 - protein, 1207 aa, Artificial
  Synthetic
MENKTSLGNNIYYNPFKPQDKSYFAGYFNAAMENIDSVFRELGKRLKGKGYTSENFFDAIFKENISLVEYERYVKLLSDYFPMARLLDKKEVPIKERKENFKKNFKGIIKAVRDLRNFYTHKEHREVEITDEIFGVLDEMLKSTVLTVKKKKVKTDKTKEILKKSIEKQLDILCQKKLEYLRDTARKIEEKRRNQRERGEKKLVAPFKYSDKRDDLIAAIYNDAFDVYIDKKKDSLKESSKAKYNTESYPQQEKGDLEIPISKNGVVFLLSLFLTKQEIHAFKSKIAGFKATVIDEATVSEATVSHRKNSICFMATHEIFSHLAYKKLKRKVRTAEINYGEAENAEQLSVYAKETLMMQMLDELSKVPDVVYQNLSEDVQKTFIEDWNEYLKENNGDVRTMEEEQVIHPVIRKRYEDKFNYFAIRFLDEFAQFPTLRFQVHLGNYLHDSRPKENLISDRRIKEKITVFGRLSELEHKKALFIKNTETNEDREHYWEIFPNPNYDFPKENISVNDKDFPIAGSILDREKQPVAGKIGIKVKLLNQQYVSEVDKAVKAHQLKQRKAKKPSIQNIIEEIVPINESNPKEAIVFGGQPTAYLSMNDIHSILYEFLIKGTSGEALEKKIVGKIQAQIQQIIDKDTNAKILKPYQDGNSTAIDKEKLIKDLKQEQNILQKLKNEQTAREKEYNDFIAYQDKNREINKVRDRNHKQYLKDNLKRKYPEVPTRKEILYYQEKGKVAVWLANDIKRFMPTDFKNEWKGEQHSLLQKSLAYYEQCKEELKNLLPEKVFQHLPFKLGGYFQQKYLYQFYTCYLDKRLEYISGLVQQAESFKSENKVFKKVENECFKFLKKQNYTHKELDARVQSILGYPIFLERGFMDEKPTIIKGKTFKGNESLFADWFRYYKEYQNFQTFYNAKQYPLVELEEKQADRKRKTKIYQQKKNDVFTLLMAKHIFKSVFKQDSIDRFSLEDLYQSREERLENQEKAKQTGERNTNYIWNKTVDLKLCDGKITVENVKLKNVGDFIKYEYDQRVQAFLKYEENIKWQAFLIKESKEEENYPYVVEREIEQYEKVRREELLKEVHLIEEYILEKVKDKEILKKGDNQNFKYYILNGLLKQLKNENVDGYKVFNLNTEPEDVNINQLKQEATDLEQKAFVLTYIRNKFAHNQLPKKEFWDYCQEKYGKIEKEKTYAEYFAEVFKREKEALIK

SEQ ID NO: 1793 - protein, 1008 aa, Artificial; identical to SEQ ID NO: 1452
  Synthetic

SEQ ID NO: 1794 - protein, 1150 aa, Artificial
  Synthetic
VKMEDDKKTTESTNMLDNKHFWAAFLNLARHNVYITVNHINKVLELKNKKDQDIIIDNDQDILAIKTHWEKVNGDLNKTERLRELMTKHFPFLETAIYTKNKEDKKEVKQEKQAKAQSFDSLKHCLFLFLEKLQEARNYYSHYKYSESTKEPMLEKELLKKMYNIFDDNIQLVIKDYQHNKDINPDEDFKHLDRTEEDFNYYFTRNKKGNITASGLLFFVSLFLEKKDAIWMQQKLRGFKDNRESKKKMTHEVFCRRRMLLPKLRLESTQTQDWILLDMLNELIRCPKSLYERLQGDDRKKFNVPFDPADENYDAEQEPFKNTLVRHQDRFPYFALRYFDYNEIFANLRFQIDLGTYHFSIYKKLIGGQKEDRHLTHKLYGFERIQEFAKQNRTDEWKAIVKDLDTYETSNERYISETTPHYHLENQKIGIRFRNDNDEIWPSLKTNGENNEKRKYKLDKQYQAEAFLSVHELLPMMFYYLLLKMENTDNGKENNEVGTKKKRNKNNEQEKHKIEEIIENKIKDIYALYDAFANGEINSEEELKEYLKGKDIEIVHLPKQMVAILYDEHKDMVEEAKRKQKEMVKDTKKLLATLEKQTQGEIEDGGRNIRLLKSGEIARWLVNDMMRFQPVQKDNEGNPLNNSKANSTEYQMLQRSLALYNKEEKPTRYFRQVNLINSSNPHPFLKWTKWEECNNILSFYRSYLTKKIEFLNKLKPEDWEKNQYFLKLKEPKINRETLVQGWKNGFNLPRGIFTEPIREWFKRHQNDSKEYENVEALDRVGLVTKVIPLFFKEEDFKDKEEYLKKDAQKEINNCVQPFYSLPYNVGNIHKPDEKDFLPSEERKKLWGDKKYKFKGYKAKVKSKKLTDKEKEEYRSYLEFQSWNKFERELRLVRNQDIVTWLLCTELIDKLKVEGLNVEELQKLRLKDIDTDTAKQEKNNILNRVMPMQLPVTVYEIDDSHNIVKDRPLHTVYIEETKTKLLKQGNFKALVKDRRLNGLFSFVDTSSETELKSKPISKSVVEYELGEYQNARIEIIEDMLALEETLIEKDKNLPTNNFSDMLNGWLEGKDESDKARFQNDVKLLVAVRNAFSHNQYPMRNRIAFANINPFSLSSADTSEEKGLDIANQLKDKTHKIIKRIIKIEKPIETKE

SEQ ID NO: 1795 - protein, 1138 aa, Artificial
  Synthetic
METQENELFENRRRTLADDPQYFGAYLNLARLNIFSINNYLAKEFQQTELRDDELIQNGFICIPSQKNRNDNKLFERLIRLMPVIKQFDAARLPNEEQKSGQAEGKDIKTMAKTLKALFKDMQEFRNDYTHFYATDKQECRKLTVSSETATFLKASFARAIEYSKVRFKDVLAEDDYSLVAGKELVEDENTITTEGLVFFTALFLDRENAFQFIGKVQGLKGTQFKSFIATREVLMAYCVRLPHDKLISDNPIQALLFDILNELNKCPKKLYNVLSEEVKKEFRPELSESGIENMLANSFNDEEREKLLDEIEYKEYIEQLTIRVRHSNRFHYFAMRFIDEQELWPGIRFQIDLGKYTLTQYDKQVLGESIPRSVVENTRAFGRLSNFLTADPDSLEQRIDVDHRANGFEQFAPHYNADINKIGIAFTEKEQLPYVVPTKNAETNRVKYSFKQPQPDAFISLHELAKAILLEQLQPGESEKLIRAFCSTAENKLFNLEFIESIKWKLPDWKPFQKQCDTKKSRAYITKKKMFAYAPRDRKKLLDELLAPYGLNWKQVPERILNYWLNIEEVHDARSIKERILLMKRDGLKRLKQLEKHRKDPSIRIPKVGEMATFLARDIVDMMIDKTKKQKITSIYYDKMQECLAFYADAEKKRQFIGLVRELNLNAPDGHPFLKNLNLESIRKTSEFYKLYLMEKVEKMIENGYKSNGDKRFKNIAWIIRVFEEKQKNEKNGKDDTIYRIPNNRNDIPYTIRQWEKETSTLEEWLHTINHGKQEGDRKRPIDLPTDLFDARLCELMKGQMQENGQTFADTAKYNELLKQWWSLREDETQPFYNGARHYVIKEEAVCFMPGAQPRLTSCYADAVEEAYNRLSAERNIARRHNKQLPLIQKQKVEKVFKHTLYDTEREIRLLGEQDRILLLMAEQLTPGRETLKLKTVSEELTRPREIKKEFPYISNYNAQGEKLPKDEPKPKIKVTVTGIMQLKNSNDLNRFAHDRRMPELVAYLPNATIDADTLRYELMDYNKARLTVFDAVFRLEKAIIDQDREGVITLFTDEQGEAKQGRMQHKPYLQWLLNKGIITQPESSYLNMLRNSFSHNQVPHIAVALNGTEVVPVKNIASTIAGAYKQKIETIIGKIG

SEQ ID NO: 1796 - protein, 1227 aa, Artificial
  Synthetic
MNANTPTLAPELKAPRIYNQQDTPWYFGAHLNQARHNLFLALNELTIKIGGNPIENDDQLQSAKALTILNAASPNPNELAKAMEYYDKNFPFLFYMQYRYETDQERDERIFSRQKNRRSAPVQHAYGSAARYFEILNTLIVYLNKARNHCNHYTYSPLTIKKDLVYLLNDVFDVNVRLIKSRFNLEEAQLDHLKRYNGIDRKTKKPKSNYRFWYSFTATGNTENISEAGLAFFTCLFLPKGEAYLFLKKLSGFKRAETPEYKATLEVFTSNMLRVPRERLESDNSPQAVFLDMCNELARCPAELFELLEEEKQELFITNRLEDEDNTDSSGDGPETKMIRKSDRFLYFAQRYLDITKGLPQMRFGVDLGMYFYSIYPKTLAGVDEMRQLTKHLIGYGRLEDFDTDKRPAAFAALYGQKEDPFAPYIRETTPHYHTDGKNIPIYIGSSSCEWPEIGTTDVKGKSYPRKLNKNNTLLPYAILSAKEMPALMLYHLLRKEKNKGDDVQKVIVTHINNVRRFFKAVLNGSERPVDQSPLPKPDGDALKQRSDKEYCRRYELLLQQLDRYALHPSYIPEKLANYLLGIAPSDWKEKAERRLNEMKATAADLVERMELREKDDIKPGKPGFRKVKVGKLAQLIVEDMMLMQPVLKDENDQPVPDSKANGLAYRLLQSHLAFYGVHRDNITELFSSCKLTGGTNPHPFLHRINVNELSGIIEFYKAYFNEKIDYLNTCLKNKRYDEYHFLKINAQPDDIADLLKTYLQTEGPSHSPFNLPRGFFHRATVNWLMLHGTESNKKFLADHPDTNTVHLTKHLFEQQDTAQAFYHWKRHYHLFSGDVPLYLNLEERKQETERTMKIVNRLREELDDMEDLAAEAQDTFYHEIKRLRSLDDIIRHTERKYGASFPAVYEIEWRVSDYYMHKDATRLVTAAIEGQIKDNKHYLNSYKFFIENEKYLRLIEAQDMLLFMAVKDLLKEKIGDISLTETQDKESGTFLLSNISPQNVENNKNLLNQRPAGGIHINLDFFEINENGSFRKSENGKVKVGTATIIDKHLKIKNAGNFRKLLKDRRINNICFYFKPDAGHFTINRMVLENEFRAYDKQRLKVLEVVAAFEEKLYLNSNKEEKATFLNNKGVAEHKLYLKHYFGKFTDDNENLQRNLLAIRNAFAHNQFPLIHDDTFALSANEWRMIHEQYQPSAQGSHQGYGIIEKISLYGINGYQSLIDKISGHV

SEQ ID NO: 1797 - protein, 1158 aa, Artificial
  Synthetic
MKNQNTLPSNPTDILKDKPFWAAFFNLARHNVYLTVNHINKLLDLEKLYNKDKHEEIFEREDIFNISDDVMNDANSNGKKRKLDIKKIWDDLDTDLTRKYQLRELILKHFPFIQPAIIGAQTKERTTIDKDKRSTSTSNDSLKPTGEGDINDPLSLSNVKSIFFRLLQMLEQLRNYYSHVKHSKSATMPNFDEDLLNWMRYIFIDSVNKVKEDYSSNSVIDPNTCFSHFIYKDKQGKIKPCRYPFTSKDGSINAFGLLFFVSLFLEKQDSIWMQKKIPGFKKASENYMKMTNEVFCRNHILLPKMRLEAVYDKDWMLLDMLNEVVRCPLSLYKRLTPADQNKFKVPEKSSDNANRQEDDNPFSRILVRHQNRFPYFALRFFDLNEVFTTLRFQINLGCYHFAICKKQIGDKKEIHHLTRTLYGFSRLQNFTQNTRPEEWNTLVKTTEPSSGNDGKTVQGVPLPYISYTIPHYQIENEKIGIKIFDGDTAVDTDIWPSVSTEKQLNKPDKYTLTPGFKADVFLSVHELLPMMFYYQLLLCEGMLKTDAGNAVEGVLTDARNTIFNLYDAFVQEKINTITDLENYLQDKPILIGHLPKQMIDLLKGHQKDMLKAAEQKKAMLIKDTERRLERLNKQPEQKPDVAAKNTGTLLRNGQIADWLVKDMMRFQPVKRDKEGDPINCSKANSTEYQMLQRAFAFYATDSCRLPRYFEQLHLINCDNSHLFLSRFEYDKQPNLIAFYAAYLEAKLEFLNELQPQNWASDNYFLLLRAPKNDRQKLAEGWKNGFNLPRGLFTEKIKTWFNEHKTIVDISNCDIFKNRVGQVARLIPVFFDKKFKDHSQPFYRYDFNVGNVSKPTEANYLSKEKREELFKSYQNKFKNNIPAKKTTEYPEYKNFSSWKKFERELRLIKNQDILTWLMCKNLFDEQKDKKVNVSDIKLDSLQTNTSTKGSLNALAQVVPMVLAIHIGNSESKNETGTNEKENKGPAVYIKEEGTKLLKWGNFKTLLADRRIKGLFSYIEHDDIDLKQHPLTKRRVDLELDLYQTCRIGIFRQTLGLEAQLLDKYSDLNTDNFNKMLSGWSEKEGISREIKEDTDFLKDVRNAFSHNQYPDSKKIAFSRIRKFNPKELILEEEEGLDIAKQMYKEVKKVVNRIKEIELFD

SEQ ID NO: 1798 - protein, 1133 aa, Artificial
  Synthetic
VKMEDDKKTTESTYTLDNKHFGAAFLNLARHNVYITVNHINKILEEGEINRDGYETTLKNSWDEIKDINKKDRLSKLIIKHFSFLEAATYRQNPTDTTKQKEEKQAEAQSLESLKKSFFVFIYKLRDLRNHYSHYKHSKSLERPKFEEDLLKKMYNIFNASIRLVKEDYKHNKNINPKKDFKHLNRKRKGKFYYSFADNEGNITESGLLFFVSLFLEKKDAIWVQKKLEGFKCSNESYQKMTNEVFCRSRMLLPKLRLESTQTQDWILLDMLNELIRCPKSLYERLRGDDREKFRVPLDPIDEDYDAEQEPFKNTLVRHQDRFPYFALRYFDYNEIFSNLRFQIDLGTYHFSIYKKLIGGQKEDRHLTHKLYGFERIQEFDKQNRTDEWKSIVKDLDTYETSNERYISETTPHYHLENQKIGIRFRNGNNDIWPSLETNGENNEKSKYKLDKQYQAEAFLSVHELLPMMFYYLLLKTENTDNDNEIETKKKENKNDKQEKHKIEEIIENKIKDIYALYDAFANGEINSKEELKEYLKGKDIEIVHLPKQMIAILESKPKDMVEEAERKQRKMVKDTKKLLAALEKQTQEEIEDGGRNIRLLKSGEIARWLVNDMMRFQPVQKDNEGNPLNNSKANSTEYQMLQRSLALYNKEEKPTRYFRQVNLINSSNPHPFLKWTKWEECNNILSFYRSYLTKKIEFLNKLKPEDWEKNQYFLKLKEPKTNRETLVQGWKNGFNLPRGIFTEPIREWFKRHQNNSEEYEKVEALDRVGLVTKVIPLFFKEEYFKEDAQKEINNCVQPFYSFPYNVGNIHKPKEEDFLHREERIELWDKKKDKFKGYKAKKKFKEMTDKEKEEHRSYLEFQSWNKFERELRLVRNQDIVTWLLCTELIDKLKVEGLNVEELKKLRLKDIDTDTAKQEKNNILNRVMPMQLPVTVYEIDDSHNIVKDRPLHTVYIEETKTKLLKQGNFKALVKDRRLNGLFSFVKTPSEAESESNPISKSRVESELGKYQNARLNIIEDMLALEKTLIDNYNSLDTDNFHNMLTGWLKLKGKANKARFQNEVDLLVAVRNAFSHNQYPMYNENLFGNIERFSLSSSNIIESKGLDIAVKLKEEVSKAVEKIQNEEDDKKEKET

SEQ ID NO: 1799 - protein, 1168 aa, Artificial; identical to SEQ ID NO: 1357
  Synthetic

SEQ ID NO: 1800 - protein, 1140 aa, Artificial; identical to SEQ ID NO: 1356
  Synthetic

SEQ ID NO: 1801 - protein, 1094 aa, Artificial; identical to SEQ ID NO: 1358
  Synthetic

SEQ ID NO: 1802 - protein, 1184 aa, Artificial; identical to SEQ ID NO: 1599
  Synthetic

SEQ ID NO: 1803 - protein, 1141 aa, Artificial
  Synthetic
MEDDKKTKESTNMLDNKHFWAAFLNLARHNVYITVNHINKVLELKNKKDQDIIIDNDQDILAIKTHWEKVNGDLNKTERLRELMTKHFPFLETAIYTKNKEDKEEVKQEKQAKAQSFDSLKHCLFLFLEKLQEARNYYSHYKYSESTKEPMLEKELLKKMYNIFDDNIRLVIKDYQHNKDINPDEDFKHLDRIEEDFNYYFTRNKKGNITASGLLFFVSLFLEKKDAIWMQQKLRGFKDNRESKKKMTHEVFCRSRMLLPKLRLESTQTQDWILLDMLNELIRCPKSLYERLQGEDREKFKVPFDPADEDYDAEQEPFKNTLVRHQDRFPYFALRYFDYNEIFTNLRFQIDLGTYHFSIYKKLIGGQKEDRHLTHKLYGFERIQEFAKQNRPDEWKAIVKDLDTYETSNERYISETTPHYHLENQKIGIRFRNDNDEIWPSLKTNGENNEKRKYKLDKQYQAEAFLSVHELLPMMFYYLLLKMENTDNGKENNEVGTKKKRNKNNEQEKHKIEEIIENKIKDIYALYDAFANGEINSEEELKEYLKGKDIEIVHLPKQMVAILYDEHKDMVEEAKRKQKEMVKDTKKLLAALEKQTQGEIEDGGRNIRLLKSGEIARWLVNDMMRFQPVQKDNEGNPLNNSKANSTEYQMLQRSLALYNKEEKPTRYFRQVNLINSSNPHPFLKWTKWEECNNILSFYRNYLTKKIEFLNKLKPEDWEKNQYFLKLKEPKTNRETLVQGWKNGFNLPRGIFTEPIREWFKRHQNDSEEYKKVEALDRVGLVTKVIPLFFKKEDLKKDAQKEINNCVQPFYSFPYNVGNIHKPDEKDFLHREERIELWDKKKDKFKGYKAKVKSKKLTDKEKEEYRSYLEFQSWNKFERELRLVRNQDIVTWLLCTELIDKLKVEGLNVEELKKLRLKDIDTDTAKKEKNNILNRIMPMQLPVTVYEIDDSHNIVKDRPLHTVYIEETKTKLLKQGNFKALVKDRRLNGLFSFVDTSSKAELKDKPISKSVVEYELGEYQNARIETIKDMLLLEKTLIKKYKKLPTDNFSDMLNGWLEGKDESDKARFQNDVKLLVAVRNAFSHNQYPMRNRIAFANINPFSLSSADTSEEKKLDIANQLKDKTHKIIKKIIEIEKPIETKE

SEQ ID NO: 1804 - protein, 1317 aa, Artificial
  Synthetic
MGNDYKKGNYTPKNQNGNKQQPKKVRRLQKTNFRISLTGKHVFGAYFNMARTNFIKTINYILPIAGVRGNYSESQINKLLQAMFLIQTGRNGELTKEQKQWEKKLRLNPEQQTKLQQLLFKHFPVLGPMMADVADHKVYLNKKKSNVQTDDEAFAQLKGVSLADCLDMIYLMAETLTECRNFYTHKSPYNTPSQLAMQYQHQEKIAQKLDKVVVASRRILKDREGLSVNEVEFLTGIDHLHQETVKDEFGNVKMKGGKVMKTFVEYDDFYFKISGKRLVKGYTVTVKDDKPVNVDTMLPALSDFGLLYFCVIFLSKPYAKLFIDEVRLFEFSPFSDNENMIMSEMLSIYRIRTPRLHKIDSRDSKATLAMDIFGELRRCPIELYDLLDKNSGQPFFHDEVKRPNSHTPEVSKRLRYNDRFPTLALRYVDETELFKRIRFQLQLGAFRYKFYDKEGIDGRIRVRRIQKDINGYGRLQEVADKRIEKWGDMLQKREERSVKLEHEELYIDLDQFQEDTADSTPYVTDRRPAYNIHANRIGLYWEESQNPNEFKVFDNNGMYIPELVVTEDEKAPVKMPAPRCALSVYDLSAMLFYEYLREQEDGNTPSAEQIIIDYEADYRRFFNAVAEGTLKPFQKTKEFREYLEKEYPRLRMADIPEKLQLYLTCKGLTHDNKPETVRERLIRLAIEHLKEREERVQRRLEHYEEDRKMIGEKDNKYGKKGFADVRHGAIARYLAQSMMEWQPTNLKDKEKGRDKLTGMNYNVLTAYLATFGQPQTPEEDFTPRTLEQVLTGAHLIGGNNPHPFIDKVLALGNRNIEELYLHYLEEELKHIRSRKQSLSSNPSDKALSALPFVHHDRLRFHERTNEEMKALAARYTTIQLPDGLFTPYIVELLKQYVELQTALNQDIPANLNPTNNAAYLITQFYQTVLKDDAQPFYISGKTYTRHKEGEKDEVFSFKRAYELFSVLNNEKKRTFPFELIPLFLTSEEIQKRLSEKLLDDDGNPMPEQGKRGKAATDSQGNIIWQRKIKLDISNYVSSLSDKDLKISMNQSWKQKEEERTEKREALQSRLTRQIHDIKYNERTLRRYKTQDMVLFLIAKKLFENIIFEQGNEVNSEQMRLSKVCDEAFLRQTLTFRVPVTVGDKTIYVEQENMSLKNYGEFYRFLTDDRLMSLLENIIGTLKPNEDGDLVIRHTDLMSELAAYDQHRSTVFKLIQQIENLIIEKNNALKNPDSEDFWVKEGLPKRNNFASLLELIDQLNNVALTDEERKLLVAIRNAFSHNSYNIDFSLIKDVKHLPEVAKGILQHLQLVLGVEQTK

SEQ ID NO: 1805 - protein, 1134 aa, Artificial
  Synthetic
VKMEDDKKTKESTNMLDNKHFWAAFLNLARHNVYITVNHINKVLELKNKKDQDIIIDNDQDILAIKTHWEKVNGDLNKTERLRELMTKHFPFLETAIYTKNKEDKEEVKQEKQAKAQSFDSLKHCLFLFLEKLQEARNYYSHYKYSESTKEPMLEKELLKKMYNIFDDNIQLVIKDYQHNKDINPDEDFKHLDRTEEEFNYYFTTNKKGNITASGLLFFVSLFLEKKDAIWMQQKLRGFKDNRESKKKMTHEVFCRSRMLLPKLRLESTQTQDWILLDMLNELIRCPKSLYERLQGEYRKKFNVPFDSADEDYDAEQEPFKNTLVRHQDRFPYFALRYFDYNEIFTNLRFQIDLGTYHFSIYKKLIGGQKEDRHLTHKLYGFERIQEFAKQNRTDEWKAIVKDFDTYETSEEPYISETAPHYHLENQKIGIRFRNDNDEIWPSLKTNGENNEKRKYKLDKQYQAEAFLSVHELLPMMFYYLLLKKEEPNNDKKNASIVEGFIKREIRDIYKLYDAFANGEINNIDDLEKYCEDKGIPKRHLPKQMVAILYDEHKDMAEEAKRKQKEMVKDTKKLLATLEKQTQGEIEDGGRNIRLLKSGEIARWLVNDMMRFQPVQKDNEGNPLNNSKANSTEYQMLQRSLALYNKEEKPTRYFRQVNLINSSNPHPFLKWTKWEECNNILSFYRSYLTKKIEFLNKLKPEDWEKNQYFLKLKEPKTNRETLVQGWKNGFNLPRGIFTEPIREWFKRHQNDSEEYEKVETLDRVGLVTKVIPLFFKKEDSKDKEEYLKKDAQKEINNCVQPFYGFPYNVGNIHKPDEKDFLPSEERKKLWGDKKYKFKGYKAKVKSKKLTDKEKEEYRSYLEFQSWNKFERELRLVRNQDIVTWLLCTELIDKLKVEGLNVEELKKLRLKDIDTDTAKQEKNNILNRVMPMQLPVTVYEIDDSHNIVKDRPLHTVYIEETKTKLLKQGNFKALVKDRRLNGLFSFVDTSSETELKSNPISKSLVEYELGEYQNARIETIKDMLLLEETLIEKYKTLPTDNFSDMLNGWLEGKDEADKARFQNDVKLLVAVRNAFSHNQYPMRNRIAFANINPFSLSSADTSEEKKLDIANQLKDKTHKIIKRIIEIEKPIETKE

SEQ ID NO: 1806 - protein, 1254 aa, Artificial
  Synthetic
MKDNRSFQGVRTHRGPRTNNKPQKTRRRQTTDFSISQSGRHVFGAYFNMARANFIKTIWHILPQVGIRGNYPESKVAKMLQALYLIQSGHSDQLSAEQRLWKNNLVLKTPEQKTTLQRLLIKHFPILVPVMADVADRRARNNKKKSTVQTEEDTLSQMKGVELNDYLRALSTIATTLNECRNFYTHNDPYNTPEELTKQYSHQAQIALMLDKAITASRRVLKDREGLTTRELEFLTGVDHMEQVTVRDENNKVIIKNNRPMKRFVEYDDFYFSVWGKRDGQKALSDFGLLYFCVLFLSKTYAKLLIEESRLFEFSPFTDEENLVMQEMMSIYRIHTPKLHRLSSRDDKAALAMDMLSELRRCPRELYDLLSDEDKQVFLDGGKDEKGEETELIKQLRYTDRFPQLALRFIDETELFKHIRFQLSLGTFRYRFYDKVCIDGIERVRRIQKTINGYGRLQEVADKRMEKWGDMLQKKEEREVALENEDLTLNLDQIVADTADTLPYITDRQPSYNISNNRIGLYWESSRDKREYRFFDANEMYLPELSVRDDGKAEVAMPAPKCFLSTRDLSAMLFYEHLRVQHPMDLPSAEQIIMDYEAEYRRFFADVAEGRLHPATKPRYFRNYLKLNYPLLSLSDIPDKLQLYLSGKQLSHEGTAETARERLIRLTMDALNKREEQTKRRLERYLDAKKQIGDKTNKLGKRSFAEIRHGVLAEYIAQSMMEWQPSKDGAGKDKLTGKNYRVLVDYLATYGALDNDPEALPIEQVMQNAHLLGGANPHPFIAKVLAKGDTNIEDFYQHYLEAELQHIRARRQSLQTNPSDKALAALPFVHHERARFAEPTPEEMQTLAGRYETLMLPDGLFTKYIVELLKKAYSDHAELQEALNNDAEPKLNPLRNAAYLISLYYRTVLHDQSQPYYFFKRNYDLFPTLSNHKSKVFPFELLPMYLSSEEIQSRLAAKLMDRNGQPVAVMENGKPKRDEQNNIIWQRQITTEIDRCVQRERADKREAVRAKLLKEVKFIKDNERTIRRYKNQDMTLFLIARGLLQQILTLDAQTVEQSGMRLENVFENTFLRQTLTIRIPVQAGGKTIYVEQGNMSLKNYGEFYRFLSDERLPSLMNNIADSIAPNEKGEYVIRFGDLMGELASYDRKRSEIFRLMQQIEAIAMNSDAALQNPNDSRFWAHEGLPQRNSFKAMVALLDQLNETPMLPEQRTLLVAIRNAFSHNTYNIDLSTIQEVKHLPEVASGILKHLQLLIN

SEQ ID NO: 1807 - protein, 1310 aa, Artificial; identical to SEQ ID NO: 1637
  Synthetic

SEQ ID NO: 1808 - protein, 1120 aa, Artificial
  Synthetic
MKTKVLGNSPFEKPNYKKFKREEDKPFYATYLNTAKQNVFLILREISDKLELGFTTKDTGMLSTELWSKLKNNDQPEVSQKIIERLENQFTFLRQLALNHARDKAYSSEVDSYQNDYNGDSQDKINSNEAESSPEDYHDVLKLWIEQLNSYRNYYTHAKHKPVQLDPAVIDGMRDLFDADWKEFKDRFGFEDSVVGHLIRRGKNGELANFTYAFADRHGTTEKGFLYFVCLWLEKKDAQELLKKHEGFKRSSLSYEKATLERYTWFRTKIPKPKLVSDHSEAGLFMDMVNELKRCPQPLYNTLSEKDKDTFKQLDTADASHGQESEGDEDYTLTPVLKRHSNRFYYFALRYLDQSFEHLRFHVDLGNYCFHSYDQVIEDMPRKRRWIKRMTGFGKLTDFDEAHRPATWGEKLPDPLAQEKPDTYITKTTPHYHLDGTGEVKNIGIKWVDSYDRKKIWPNVSEPYTHGKSDRPHTEAPDFWLSLYELPAVAFYQMLHLQNKDRVHQSAETVIRDYQQNLKNFLTAVAQGRISPGYTLETLSAELDKSNLRISYIPKAVVKYLLNKKGKAYDEKANIRLQELQKENSRLLSKVNRQKPHYHKHTSNKDYVAMKAGYMADFLARDMIRLQQPIDQDQGKANGTEFQLLQAKLALFGKSKDTLHVTFKLCNLIDAANPHPFLHKIKLSKCHGILAFYTEYLHLRDGYLLQCLQEKKYNKYHFLKLNPVDTNIQTLIERQLDAVMNLPRGLFKQPILQAMTIINATKTLVQQLKELPSVNVAYMIQSYFEHVRHDGNQEFYTYKRNYELLDKLYDNKTGRSKTKARYFTGQELEQKTKEIKQKLAQKIDAAIRKKANATEEEKQRIRDNYQKAYKAFTHSEKQIRLHKSCDTVLFMMVDHMYRYGDFLLDRRKKKNEQPQLLELADSYKLRSIKPDTDQSFLSMLLPIAIPVFYPEKTSKHQRTIAREQLKVKNYGDFRSFLKDRRLYTLLPYISDEVVQFEAIQREFAAYHRSRESVFEKILSFEKTVIAQHNIQPNKYGYIEHKDILDEARIPEEQYHQMIDIRNALCHGTYPNPEKFKDQVDGSDFNALKHIGLNAPEASQKSIITQLEQIALRLYEKPKKN

SEQ ID NO: 1809 - protein, 1145 aa, Artificial; identical to SEQ ID NO: 1631
  Synthetic

SEQ ID NO: 1810 - protein, 1133 aa, Artificial; identical to SEQ ID NO: 1798
  Synthetic

SEQ ID NO: 1811 - protein, 1085 aa, Artificial; identical to SEQ ID NO: 1453
  Synthetic

SEQ ID NO: 1812 - protein, 1402 aa, Artificial
  Synthetic
MANFVSPSSDKHIFGTYLNIAHTNFYRTILHVFSSSGIDCYTLMGDLFVTEKTVDKVIDAFWHIAKQENIEEALDSLLDIVKKCYDDRWKKESPTLTGLNDHEKKNKEGEFKAPLTDEGPTGEKAHLMAAFTLRSEQEERLRKLLFRHIPFLAPVMADMVADEFRKKQKNEHNENNSIMHDSSLTDCLQALSHIAQCLTYSRNFYTHANPYNTEADQEKQYDIQKIVAGYLDKAFVASRRIAKKRNGYSEQDLKFLTDKVSANGSPEEFRMEEVFVLDENGQKIKKVEKDDKGNIKLDKDGVPIYIYKKKVIKDENGKPILNNKRKKQYEIIYENGIPVHEYETKFVERKDWYFRLFGNRQILLPDPNPDLSTNSKLGLSDFGILYFCALFLSKEQLAQFCTETRVFVNSPFQNDNNKKNNIILNMMYVYQTHIPRGKRLDSERDSQALAMDMLNELRRCPIELYNVLPEIGKREFEDNVGHENNRTPELSKRIRTKDRFPHLALRYIDSQKTFEKIRFQVRLGSYRFCFYDKNCIDGKSHPRQLHKEINGFGRWQDMEKERKEQYGPLFQKTRDVSVWQKDENAYVNLRQLEPIKAGDPPHITDTITQYNIHKNRIGLYWNTDEETYLKDKVGENGETIYKGYYLPELKAEERPNDKRKRRKAPLDMPAPLCSLSVYDLPAMLFYEHLRKEEQLTAEEFPSIEDIIIKQYDNLVRFFKQVKDIQPTSDESQLATILSTYGLNKQSVPQKIYDYLSMKKTVIGKDFSKSAGIELNRRLRKAKGKLKEFLADKEKIESGNNQYGKDSFASIRYVQLANYLAESIMDWMTAEEGGKYKLTGLNYRVLASSLATFGTRQTDEDILQMLADAHIYEDEKTDHPFIAYTLGDDDNPVIDLETFYENYLNREIKQIEKYISVTIDSQTNKEVITLKKTPDNLPFLHRQRKRWQESTIAEQAERYLYIAEEGKKELNRTTLLLPDGLFTPYIIKVFKQNHPDLICQMQSLSDTQKKGIANNAAYLINLYFESKGEKSQPFYDSTEPFDMDMDNRAKTPYKYARLYDYFTLIDDEQKKRYLPNTIILSKSKNRNSDIAVYIRKIKEKGEEDNRQTYRKFKKDNPDKKDEWNKEKERLKNELKQKVERAQKKAKKLYCDMEDNERAIRRHKTQDRILFLMAKNIMGDTVNQNGDLFKLENVCKEEFLSQKVQVRHIVTSGDRQIVIQKDEMPIKDYGKIYRLLGDERTVVLLSYMLFANNGIIDYDNLTEELKQYDTQRSSAIKSAQTLENKRFVQAKEVLTDPEKNEFYQGNRRYKNRACTKENDAKRNNFSSLLKDLQKLTPEQMEMFCDEDRKLIIAIRNAFSHNSYPAWEVIQKLLDQNQDVQLELKQIAGFLIDKLSSFVARTMNV

SEQ ID NO: 1813 - protein, 1128 aa, Artificial
  Synthetic
VKMEDDKKTTESTYTLDNKHFWAAFLNLARHNVYITVNHINKILEEGEINRDGYETTLKNSWNEIKDINKKDRLSKLIIKHFPFLEAATYRRNPTDTTKQKEEKQAEAQSLESLKKSFFVFIYKLRDLRNHYSHYKHSKSLERPKFEEGLQKKMYNIFNASIRLVKEDYQYNKNINPKKDFKHLNRKRKGKFYYSFADNEGNITESGLLFFVSLFLEKKDAIWVQKKLEGFKCSNESYQKMTNEVFCRSRMLLPKLRLESTQTQDWILLDMLNELIRCPKSLYERLQGDDREKFRVPFDPVDEDYDAEQEPFKNTLVRHQDRFPYFALRYFDYNEIFSNLRFQIDLGTYHFSIYKKQIGGQKEDRHLTHKLYGFERIQEFAKQNRPDEWKAIVKDSDTFKKKEEKEEEKPYISETTPHYHLENKKIGIAFKNHNIWPSTQTELTNNKRKKYNLGTSIKAEAFLSVHELLPMMFYYLLLKTENTKNDNKVEGKKETKKQEKHKIEAIIESKIKDMYALYDAFANGEINSEKELEEYLKGKDIEIVHLPKQMIAILKNEHKDMAEKAEAKQEKMKLATENRLKTLDKQLKGKIQNGKRYNSAPKSGEIASWLVNDMMRFQPVQRDENGEPLNNSKANSTEYQLLQRTLAFFGSEHERLAPYFKQTKLIESSNPHPFLNDTEWEKCSNILSFYRSYLKAKKNFLESLKPEDWEKNQYFLMLKEPKTNRKTLVQGWKNGFNLPRGIFTEPIRKWFMEHWKNIKVDDSKRVGLVAKVIPLFFSEKYKDSVQPFYNYPFNVGDVNKPKEEDFLHRKDRIELWDKNKDKFKGYKAKKKFKEMTDKEKEEHRSYLEFKSWNQFERELRLVRNQDIITWLLCTELIDKLKIDELNIKELKKLRLKDINTDTAKEEKNNILNRVMPMELPATVYEVNKAGNIIKNKPLHTIYIKEAKTKLLKQGNFKALVKDRRLNGLFSFVKTSSEAESESNPISKLRVESELGKYQNARLDIIEDMLALEKKLIDKYNSLDTDNFSLDTDNFHNMLTGWLKLKGKANKARFQNEVDLLVAVRNAFSHNQYPMYDENLFGNIERFSLSSSNIIESKGLDIAVKLKEEVSKAAKKIQNEEDNKKEKET

SEQ ID NO: 1814 - protein, 1008 aa, Artificial; identical to SEQ ID NO: 1452
  Synthetic

SEQ ID NO: 1815 - protein, 1180 aa, Artificial
  Synthetic
METPEKVGNGIVYDHTKIEDKHYFGGYLNLAENNIKNVLNALKNRFGKAIDKKEKEEFKKEFNEYFSDKLAQADYQERVDFLKTYFPVIHYIDLPPAHKKFKGIPKPELEKIRRAYFREHFFLLTDAINALRNFYTHYYHRPLVFDEKLYALLDEIFLDVVLQVKRAKMKNDKTRHLLKASLNDELEALYKAKEKQVKEDIKAGKQRNTDEVSLRNGVLNDAFYHLLFGKDEVNRQYKSKYVHETEAENKIVLSQSGLIFLSGMFLSRKQSEDMRSRIKGFKAKTVKDPEKSPDRKNNSLKYMATHWVFGYLSFKGVKHRISTGFNLETLLMQMVDELSKVPDEVYQTFTEEQKNQFLEDINEYVKEEKETHSLNESIGVHPVIRKRYEDKFAYFALRYLDEFAGFPSLRFQVHLGNYVHDRRTKQIEGTAYETERVVKEKITAFGKLSELAGLKEDYFQKLAVTDNQTGWEKFPNPSYNFVAETIPLYINLANKDVRDAHKTNNLYRGRREAYLNTVAKRNSGKPSTEQIRSDIDAGIADTARSAPVAILSLNELPALLHELLVKKRSGEELEKQLVQTLVKHYATIVDFDPKAPLPELRVTKKLIKSSNEPSVNLDKLIRAIQTEVERTDEKLQLIADHKAEMKKKGKNGQPLRKNVFTNRECGEEARWLADDLKRLMPAAARAKWRGHHHSQLQLSLALYEHRPAEAFSLLKEFWNFADPEPLWNEWIAWAFRSSQTFELFYEKYLTRRRKLFAAWAEQLEGFRNSTAQLNKFIKQQHIWSVFHKRLYIIDTTENQKQKLLRQPLVLPRGLFDVKPTYIKGKSIDDNPELYADWFRLAYYNQDWQRFYAMPGDYRELFERNTDKDTERTKNKYNLSAEEQLNLFKHKHNRKIRAVKINDLYLKLMAEDMLNRLLGHAQTLHLQEMYLTRAERLEKERKAMLQHQRSAGDTSPVIVKDSFVWSIPVEYKYTQTTEAGEKVRVSQPAIKLKDLGKARNFIQTEKVQTLLSYDKEKLWNLAELEDELHIKKYSYETVRREYLLKEIQQFEKYILDGQGFNGADHPETFEENKHPNFKRYLAEGILSKYEQVTEEERNWFTGLNEFTIEKVSPGELDTKQPCTQHAFLLLLIRNKCAHNQLPAAVYYKRMLSGLPLPPEGTGYSQHILQYVRYAIAFLKAA

SEQ ID NO: 1816 - protein, 1180 aa, Artificial; identical to SEQ ID NO: 1815
  Synthetic

SEQ ID NO: 1817 - protein, 1148 aa, Artificial
  Synthetic
MDNSTSKSFKRFFEFKGNVAPIAEKANRNFNIKNLNPINTQQRLHYFAIGHVFKSIDTEKIFTVLLDEVAKVKKPTKFSALQNTEFTFINELKCLMSDIRNINSHFIHDFEKIKIDSIDKNIIEFLKQSFELAVLQTCMDEKNINYEEFTGGGNPEKEIVDFLCDKFYPKIDNSKDLSEHQKLISDFKKKSKDEAINEILFINVSSDYNWNIFETHTVFKISKGKYLSFEACLFLLAMFLYKGEANQLISKIKGFKRNDDNKFMSKRNLFTFFSKKFSSQDIDSEENHLVKFRDLVQYLNHYPTVWNKYLELGSNNPIMTERLKEKIIELEIKRCFPELASNSSFNQFAINYIFKNGKIIECENNNIYLDIINKNDEVRKIYFSIKNNEFNRSEFKDNSFKMFALKYVVKEYYKENKAYADYLTKQIKDKEKTFDEELITNKKVEKLKKQISQNLNFIFYGRNQDRFMEFATRYLAETGYFGKDAKFKMYEFFTTDEQIEEIDRLKRTISKKEFDKLKFHQGKLVHCSTYADHIAKYKNWDTPFVVENNAVQLTVCFDNGQRKILSIQRNLMPYFLEDALYNMQNDKIEGAGKILIENYYNYHKEGFEKSRLTLKQNDTISLLEKATFKKILPKRLLHRYSPAVQNNLPEHSTYKQILTKTKEAEERYVKLLEKAKKDGYEEDFLKRNKGKQFKLRFIRKAWNILFFKDHYLKQVQFSGHHRRFNISREEFNDFSKWMFAFDETPKYKDYLMILFEQKGFLEISNFRTLFVNSSSLDGLYGKTKAIYEGWMQNNNTNEKNPDKYSLKNYEKFFTDELFYINVSHFIAYLDIINKIRRNEKGGIIYPCLENEKHLITEYYYKVKLEENELKNCKKLFNKLMSAKLEDALLYEISMYYLGIDNTIVQKARTNVTNLLNQDVVFNINDANSNHLYDLSIPFNKIDSYVELIKHKEDQENDKKNKKTSFLGNMPSYIVNVICKETKNKESCSICNKYINFKKLDFDDLNKINNHILSNSVKFTQVALSFEEYFIFNEKKSIIKNNRIDVDEFSFWNAYFSDSGLTRKKAFHFGVPKESYDDIIARMENKFVKEQIRPSLPLDYNSFNKQQKSICDALLKSIHSSYFNHREKDKKKKRNEANNMYYKEVILKK

SEQ ID NO: 1818 - protein, 1145 aa, Artificial; identical to SEQ ID NO: 1631
  Synthetic

SEQ ID NO: 1819 - protein, 1150 aa, Artificial
  Synthetic
VKMEDDKKTTESTNMLDNKHFWAAFLNLARHNVYITVNHINKVLELKNKKDQDIIIDNDQDILAIKTHWEKVNGDLNKTERLRELMTKHFPFLETAIYTKNKEDKKEVKQEKQAKAQSFDSLKHCLFLFLEKLQEARNYYSHYKYSESTKEPMLEKELLKKMYNIFDDNIQLVIKDYQHNKDINPDEDFKHLDRTEEDFNYYFTRNKKGNITASGLLFFVSLFLEKKDAIWMQQKLRGFKDNRESKKKMTHEVFCRRRMLLPKLRLESTQTQDWILLDMLNELIRCPKSLYERLQGDDRKKFNVPFDPADENYDAEQEPFKNTLVRHQDRFPYFALRYFDYNEIFANLRFQIDLGTYHFSIYKKLIGGQKEDRHLTHKLYGFERIQEFAKQNRTDEWKAIVKDLDTYETSNERYISETTPHYHLENQKIGIRFRNDNDEIWPSLKTNGENNEKRKYKLDKQYQAEAFLSVHELLPMMFYYLLLKMENTDNGKENNEVGTKKKRNKNNEQEKHKIEEIIENKIKDIYALYDAFANGEINSEEELKEYLKGKDIEIVHLPKQMVAILYDEHKDMVEEAKRKQKEMVKDTKKLLATLEKQTQGEIEDGGRNIRLLKSGEIARWLVNDMMRFQPVQKDNEGNPLNNSKANSTEYQMLQRSLALYNKEEKPTRYFRQVNLINSSNPHPFLKWTKWEECNNILSFYRSYLTKKIEFLNKLKPEDWEKNQYFLKLKEPKINRETLVQGWKNGFNLPRGIFTEPIREWFKRHQNDSKEYENVEALDRVGLVTKVIPLFFKEEDFKDKEEYLKKDAQKEINNCVQPFYSLPYNVGNIHKPDEKDFLPSEERKKLWGDKKYKFKGYKAKVKSKKLTDKEKEEYRSYLEFQSWNKFERELRLVRNQDIVTWLLCTELIDKLKVEGLNVEELQKLRLKDIDTDTAKQEKNNILNRVMPMQLPVTVYEIDDSHNIVKDRPLHTVYIEETKTKLLKQGNFKALVKDRRLNGLFSFVDTSSETELKSKPISKSVVEYELGEYQNARIEIIEDMLALEETLIEKDKNLPTNNFSDMLNGWLEGKDEADKASFQNDVDLLTAVRNAFSHNQYPMRNRIAFANINPFSLSSANTSEEKGLGIANQLKDKTKETIEKIIKIEKPIETKE

SEQ ID NO: 1820 - protein, 1127 aa, Artificial
  Synthetic
LQKQDKLFVDRKKNAIFAFPKYITIMENKEKPEPIYYELTDKHFWAAFLNLARHNVYTTINHINRRLEIAELKDDGYMMDIKGSWNEQAKKLDKKVRLRDLLMKHFPFLEAAAYEMTNSKSPNNKEQREKEQSEALSLNNLKNVLFIFLEKLQVLRNYYSHYKYSEESPKPIFETSLLKNMYKVFDANVRLVKRDYMHHENIDMQRDFTHLNRKKQVGRTKNIIDSPNFHYHFADKEGNMTIAGLLFFVSLFLDKKDAIWMQKKLKGFKDGRNLREQMTNEVFCRSRISLPKLKLENVQTKDWMQLDMLNELVRCPKSLYERLREKDRESFKVPFDIFSDDYDAEEEPFKNTLVRHQDRFPYFVLRYFDLNEIFEQLRFQIDLGTYHFSIYNKRIGDEDEVRHLTHHLYGFARIQDFAPQNQPEEWRKLVKDLDHFETSQEPYISKTAPHYHLENEKIGIKFCSTHNNLFPSLKTEKTCNGRSKFNLGTQFTAEAFLSVHELLPMMFYYLLLTKDHPKGKGINKIEKIIRKEISNIYAIYDAFANNEINSIADLTRRLQNTNILQGHLPKQMISILEGRQKDMEKEAERKIGEMIDDTQRRLDLLCKQTNQKIRIGKRNAGLLKSGKIADWLVNDMMRFQPVQKDQNNIPINNSKANSTEYRMLQRALALFGSENFRLKAYFNQMNLVGNDNPHPFLAETQWEHQTNILSFYRNYLEARKKYLKGLKPQNWKQYQHFLILKVQKTNRNTLVTGWKNSFNLPRGIFTQPIREWFEKHNNSKRIYDQILSFDRVGFVAKAIPLYFAEEYKDNVQPFYDYPFNIGNKLKPQKGQFLDKKERVELWQKNKELFKNYPSEKKKTDLAYLDFLSWKKFERELRLIKNQDIVTWLMFKELFKTTTVEGLKIGEIHLRDIDTNTANEESNNILNRIMPMKLPVKTYETDNKGNILKERPLATFYIEETETKVLKQGNFKVLAKDRRLNGLLSFAETTDIDLEKNPITKLSVDHELIKYQTTRISIFEMTLGLEKKLIDKYSTLPTDSFRNMLERWLQCKANRPELKNYVNSLIAVRNAFSHNQYPMYDATLFAEVKKFTLFPSVDTKKIELNIAPQLLEIVGKAIKEIEKSENKN

SEQ ID NO: 1821 - protein, 1126 aa, Artificial
  Synthetic
MEDDKKTTDSISYELKDKHFWAAFLNLARHNVYITVNHINKILEEGEINRDGYEKTLENSWNEIKDINKKDRLSKLIIKHFPFLEATTYRRNPTDTTKQKEEKQAEAQSLENLKESFFVFIYKLRDLRNHYSHYKHSKSLERPKFEENLLKKMYNIFNASIRLVKEDYQYNKNINPKKDFKHLDRKRKGKFYYSFADNEGNITESGLLFFVSLFLEKKDAIWVQKKLEGFKCSNKSYQKMTNEVFCRSRMLLPKLRLESTQTQDWILLDMLNELIRCPKSLYERLQGEDREKFRVPLDPIDEDYDVEQEPFKNTLVRHQDRFPYFALRYFDYNEIFTNLRFQIDLGTYHFSIYKKLIGGQKEDRHLTHKLYGFERIQEFDKQNRPDEWKAIVKDSDTFKKKEEKEEEKPYISETTPHYHLENKKIGIAFKNHNIWPSTQTELTNNKRKKYNLGTSIKAEAFLSVHELLPMMFYYLLLKTENTKNDNKVEGKKETKKQGKHKIEAIIESKIKDIYALYDAFANGEINSEKELEEYLKGKDIEIVHLPKQMIAILKNEHKDMAEKAEAKQEKMKLATENRLKTLDKQLKGKIQNGKRYNSAPKSGEIASWLVNDMMRFQPVQKDNEGKPLNNSKANSTEYQLLQRTLAFFGSEHERFAPYFKQTKLIESSNPHPFLKDTEWEKCNNILSFYRSYLKAKKNFLESLKPEDWEKNQYFLMLKEPKTNRKTLVQGWKNGFNLPRGIFTEPIRKWFMEHWKNIKVDDSKRVGLVAKVIPLFFSEKYKDSVQPFYNYPFNVGDVNKPKEEDFLHRKDRIELWDKNKDKFKGYKAKKKFKEMTDKEKEEHRSYLEFQSWNQFERELRLVRNQDIVTWLLCTELIDKLKVEGLNVEELKKLRLKEINTDTAKKDKNNILNRVMPMELPVTVYEVNKASNIIKNKPLHTIYIKEAKTKLLKQGNFKALVKDRRLNGLFSFVDTSSKAESESNTISKSRVEYELGEYQKARIEIIKDMLALEETLIDKYDLNHDNFNKMLTGWLELKNKANKASLEKTDKTSFQNDVDLLIAVRNAFSHNQYPMRNRIAFANINPFSLSSANTSEEKGLGIANQLKDKTKETIEKIIKIEKPIETKE

SEQ ID NO: 1822 - protein, 1119 aa, Artificial
  Synthetic
MTEQNEKPYNGTYYTLEDKHFWAAFLNLARHNAYITLAHIDRQLAYSKADITNDEDILFFKGQWKNLDNDLERKARLRSLILKHFSFLEGAAYGKKLFESQSSGNKSSKKKELTKKEKEELQANALSLDNLKSILFDFLQKLKDFRNYYSHYRHPESSELPLFDGNMLQRLYNVFDVSVQRMKRDHEHNDKVDPHRHFNHLVRKGKKDKYGNNDNPFFKHHFVDREGTVAEAGLLFFVSLFLEKRDAIWMQKKIRGFKGGTEAYQQMTNEVFCRSRISLPKLKLESLRTDDWMLLDMLNELVRCPKSLYDRLREEDRARFRVPVDILSDEDDTDGTEEDPFKNTLVRHQDRFPYFALRYFDLKKVFTSLRFHIDLGTYHFAIYKKNIGEQPEDRHLTRNLYGFGRIQDFAEEHRPEEWKRLVRDLDYFETGDKPYITQTTPHYHIEKGKIGLRFVPEGQHLWPSPEVGATRTGRSKYAQDKRFTAEAFLSVHELMPMMFYYFLLRENYSDEASAERVQGRIKRVIEDVYAVYDAFARDEINTRDELDACLADKGIRRGHLPRQMIATLSQEHKDMEEKIRKKLQEMMADTDHRLNMLDRQTDRKIRIGRKNAGLPKSGVIADWLVRDMMRFQPVAKDTSGKPLNNSKANSTEYRMLQRALALFGGEKERLTPYFRQMNLTGGNNPHPFLRETRWESHTNILSFYRSYLKARKAFLQSIGRSDRVENHRFLLLKEPKTDRQTLVAGWKGEFHLPRGIFTEAVRDCLIEMGYDEVGSYKEVGFMAKAVPLYFERACKDRVQPFYDYPFNVGNSLKPKKGRFLSKEKRAEEWESGKERFRLAKLKKEILEAKEHPYHDFKSWQKFERELRLVKNQDIITWMMCRDLMEENKVEGLDTGTLYLKDIRTDVQEQGSLNVLNRVKPMRLPVVVYRADSRGHVHKEEAPLATVYIEERDTKLLKQGNFKSFVKDRRLNGLFSFVDTGGLAMEQYPISKLRVEYELAKYQTARVCAFEQTLELEESLLTRYPHLPDKNFRKMLESWSDPLLDKWPDLHRKVRLLIAVRNAFSHNQYPMYDEAVFSSIRKYDPSSPDAIEERMGLNIAHRLSEEVKQAKEMVERIIQV

SEQ ID NO: 1823 - protein, 1085 aa, Artificial; identical to SEQ ID NO: 1453
  Synthetic

SEQ ID NO: 1824 - protein, 1164 aa, Artificial
  Synthetic
MTATNGLGKGISYHHHLYADKHYFGGFLNLADDNIDQVKQLFDTRFGEKNADRFFSTKNNHLIAYDDWEKGIDFLKQYLPVVHYLALPVNHEKFSNLTDKEKGRRDYFTIHFNLLTSTIHDCRNFYTHYYHDPITVQNDLFQLLDELFILVCRDVRKHRIKTDKTGWLLKRTLQNELQILTKHKKHTLEKQKKEGKKVNLDAEAIENAVMNDAFKHLRYTDKEDNKGNIKKFLVKDQYKSAYNRQEPSENGICLSRSGLLFLCSMFLSRKAGEDMRARVSGFKEKFVYRTEEEITDKNNSLRSMVTQWVFSHLAFKDIKQRITTNLDRETLFVQIVDYLSKVPDELYQVFSNTQKLDFLEDINEYIKEGNKTESLIQSTVAHPVIRKRYENQFNYFVLRYLDEFVEFPSLRFQINTGFYTHDQREKTIEGTEYLTDRKIKEKIKVFGKLSEVTTQKNEFLVKNTDLQGWEAYPGPSYNVNNNNIPVFINMQNNAVNGSKQWYSKINFKIRNERNLKQSPRTEDKKQKSAIADMLKINGEMDLRYEEPTAILCLKELPSLLYELLYTKASPKEIEEHLLKKIIGHLDTIEKYAHHTDSSLQGMPRKLKKSGEESSINYKKLREVIVNELKVITEKQDFLKEKQKDKKVNKRLYLLNNREMGKEATWLASDLIRFMPETARKQWKGYHHSQLQQTLAFYQQKRKEALSLIGQFWDFNTGPYWGDKLKKAFEQTTFEDFYFEYLKMRQAILNNFLENVSSSQNQPNLAKKALKDCWIIFHKRHFIIRPAKEQISSLLAQPVVLPRGLFDNKPTYIKDVKLEDAPEKFANWYRYTYNDYPMQRFYSFDRDYTSLYEEFQSNKDVILNKKRLTKSEQEALLKKKQDLKIKDIRTQDLFLKLIADKLFEDIFDQKADFTLEDIYQTREERMQNGEQALQQSERAPGDDFENIYNESFVLNKTVPFIQKQIHEPTVKIKDLGKFKRFLFDNKVKALFSYEPNRVWSIQELENELTLLPTSYEVIRRVSLLKAIQEFEKYIMECWGDSDTTKLDQKDKKSGKYNPSFKKYIFNGVLDKFRLANAENIKHIIDYKKFEELVDDPQLKSFEEIVRKAYILTIIRNKIAHNQLPDKANMDFIQGMYPKEPQDSYSQYLLRVTQLIIDEMVLLMKI

SEQ ID NO: 1825 - protein, 1168 aa, Artificial; identical to SEQ ID NO: 1357
  Synthetic

SEQ ID NO: 1826 - protein, 1126 aa, Artificial
  Synthetic
LRLFIRSIILFSITCFKTVNKNLSFLLFRLTIFLYLLFPKNRCLASINLKPNKYTTMEEKYYGQGVSYTLNHKHYFALYLNLAQNNLNKILGEFEKIYPRLHHDYLPNQPGALVQKLHQLLPLTEEDAVETRGRLNYLSRSLPFVNAILKQGEYTAYREELIHFFTRMNQLRNYFTHDLYQIDELEFGRNEKLFRFLNEIKKLVLYRLNKEPYFIGSENLTHLAEPNGYFNFLAEQNKKAAINFLVCLFLERKTAMEFLKVQRGYKSSNNPAHKATLSSFTHFSVKMPKPVLESKDFEFRFVLDGINELKRCPKDLFHHFPDQNKELCQTTAEVQMEKEETGEMEMESRKVDLIRYEDKFPYFALRYLDEMNLLPKIRFQVCIGHRKEKFHTHDNATEPVVHHKRVYAFTSLHKLLQENPYTEQFLNEDGIKEHHLKPGSGLENFAPTYAIHDQNIKFVIQAEKFDKFPDLCEENPKAILADGIISIYELKNLVYACLLGRGERAKAENKLLNQVKNYNKFLSDLQCGVFPNINYMAEKNVRKEEFNSYLAKNYQMQNTHIPKQIRRSLLQIKQASYQEKALKKWELWHNDNEEKFYRLKNYLDLAGTEDQPKLKKGSLANELTRDIQFFLPEKYKLELFEYSNLQKALAFYQEGEVERLLRRELQLSYFEKTDKENNKYDLFFEKKHPFLHKVFQVESFNPRARFPKPKVIKNDNSSLFHFAQNYYKQKRKWLENVNRFLHKTDTSSLKEAQGLLYYFKLGTSEENGKRIYHREYGSRYLKPLIADIKAHNIPVNMPSGLFRDILARAGVSDQNNASRQIECDFPATQAFYQFQRQHPIHKQEVDLEQIHSEYRHLHKMEYRNEKENKSHKTLYYFLKREQKIRYYQTCDRLLWKMIQEYLQLRCKDMNLDFSEIDLCDIYTPSVDGQEMVNALEEKKVEISFPIGDRKFCIQEKLKNFGRIARYRYDSRFVSLFRYKGEDLYAGRPEEEVHAKIAGALHDFTREQLELFEAVHVFEQFIHETCADKLESWQNEIREKNQQADRSKQMALHYFSHCFLMQKALAMGIIPDADKMELLIQARNSAAHNKVNEQYIRLSTEACRDNYFGEAIQLYKQIIHCHDIITN

SEQ ID NO: 1827 - protein, 1081 aa, Artificial; identical to SEQ ID NO: 1329
  Synthetic

SEQ ID NO: 1828 - protein, 1164 aa, Artificial; identical to SEQ ID NO: 1824
  Synthetic

SEQ ID NO: 1829 - protein, 1164 aa, Artificial; identical to SEQ ID NO: 1824
  Synthetic

SEQ ID NO: 1830 - protein, 1081 aa, Artificial; identical to SEQ ID NO: 1329
  Synthetic

SEQ ID NO: 1831 - protein, 1085 aa, Artificial; identical to SEQ ID NO: 1453
  Synthetic

SEQ ID NO: 1832 - protein, 1085 aa, Artificial; identical to SEQ ID NO: 1453
  Synthetic

SEQ ID NO: 1833 - protein, 1164 aa, Artificial; identical to SEQ ID NO: 1824
  Synthetic

SEQ ID NO: 1834 - protein, 1141 aa, Artificial
  Synthetic
MTQTATTNSGTLADDKQTYYYHFLKSDKFFFGSFFNLADNNLKATFNDFEKRLGIKSANGLVQKVEQYFPDNLLLSEFERRTELLTEYLPIVHKLRKINKESAEPDRSYFRDNLKMLIKAVDHLRNFYTHYYHKSIIFDERLFEFLNGALLNVCFDVKKKRMKSDTNKAFLKKHFEENFINKSKDKIKEAFDEAFSHLKVSNDGKKFSLTKFYQAKLSHKQKFSVKNDLIFDITNSDFVFLSNSGLLFLLSFFLRREEQEQLLSKMEGFKNQNELNFIATRWVFTHKCFKGLKKTIKSSYDKETLLMQMVDELSKCPDVLYKNLSDKQKQEFVVDVNEFYQEAKEQNEENKLVSHTIIRKRYEDKFAYFALRFLDEFANFPTLRFQVVVGNYLQNEQEKQIKNTTTVLKTNRQIKERIKMFGKLSTLSSKKAAYFKAILEDRTLTAEEKGLDPKWEIFPNPSYGFKGNNIPIYINKKGFKNMLSVDEAKVRTNKDRAAKKDIIEKIFGKDNYYGKPIAYLSLNELPALLYEFLVNGKNGADIENIIFNKIKQQVVAIKAADKTNKGIPNKLRKAKEENDYDLNKLKGNIKDQIDECNEKIHFIRTCRAAFDPNKTKHFFTLKQLGDEATWLADDIKRFMLPEARKNWKAYEHSEFQRLLAFYKRFRKDARQLLKNKWTMNDTFGEMVKRCFSQVEFDQFYEMYLIDKIEQLEVYKNQLDGEAIQSHPKLLKKVLKEIFRYFNERLYLIKPAGKQIEELLKHPINLPRGIFDNRPTYIENANHTDHKDQYAAWFLHITKNENELQQFYSFAWNINNDKTLDYEKLTKEKMKRLEKKRKRQGKTNQNFSQNNSINFNNLKEKIKIRLQKDAKAAINKQIRSDVFIKAMADYVFEKTFDKPYQIPLNEIYQNKAQKEQMRNEAAAQQSRAEGDKSSNIYNETFIWNKVISYSIFGGKIKEEKLKLKDIGKFRALEQNPKVKAIVTYPHNDDWSKTEIEKELTNYERIRSETLLKSVQEIEKKVLQKLQTGTVHPKILEHKGNPQFRKYVVEGFLKDMIAEPELTFFNNNKTIDNFSISEVEEQALLIQQAFYLILIRNKFAHNQLPNVAFFEAMINISGIEKRNDNFAAQLNQIFDTFKAEIIK

SEQ ID NO: 1835 - protein, 1123 aa, Artificial
  Synthetic
MITEQAKVEESTKSVYQNPGYFGAFLNMAVLNVFAISNQIVKTFKELNGVELKNDSDIKCSDKNLLLQIFNNANLPSEIKWNVFNYLYKRQHFPVLKYFLSCYHDDGNQRFYNNETKLFERTHQFLQESFNALVALRNDFTHYIAIDDQGNEVEKKYEVHQNLANLMQDELLHASINFSKTRFEQTQIEEDFKFLQHVKLIEDNVPKLTEQGLYFFTSLFLERGKTYLFLKKLTGFKNETTPSFRATLKVFSAFCLKLPKAKIQNDDYKQSLLMEMLPELAKCPAILYNRLSEDDKQKFKTKISNEARKNIELNSTDYKNIDIQQLELEINDLVSQKRRSDRFHYFALRFLDELDVFKNIKFQIKLGRLMFSEDDIRDKEILGEIQARKITKTVCAFGKLSELEKMAENQLVSQLKGHTNEWKFDQFAPHYNMQHNKIAFCFSEQVKYPVLKKEDEKANQPDGYLSLHALPKLILTSILESDKLETLIKEFFKNNSDTILNVLTLKEIKDQLNFGSDPKELTRKLIDYNKNPRILSGKEKEEKRDLAERMEKEINDREDYAIKMKSRNKKLNVALQNYNLHHNQLPSIVKDYLLNIQNPSLALKINTYLKAEKLTFQQSLKKIKKQQELNHTIKLGELATIITRDMMNMLVDTALKSKLTPPYTNKIQNAIAHFGLKKNELINMLTEWKILDNRAGHVFLQKNHIKNSKGVVDFYENYVEQKIKYIDNIKAKTKNLFGLKPDANVSNQLPYKYRKLTEKYQKPAIKDYVKQKQKVPVNLPLNLFDEVLFSALRSKVNTSKTGLNNLLAAYLKDDSQTFYSFNRLYNINKEPTTVDVNSKSLKEIKIEFGKPVFENEKKIRYQQMIDRVMKMMCIELMQKQDTDLTLGVSQLELAKLSNATPDKNFLNAPVSFKRTVNADKELIAEDNEETKQKVAESIRAYKAGTKEVIEHWYSWTVKDYGRFTRLLVDRRLENLLKHFEGDAIPFSIIKYELDNYDKYWHKILDELLKVEKAIFEKDGERIKALQLGSKYEHVQFGKYVKWLKEKSINYDKKLFLNVRNKFSHSQFLEIDKVGLSKISEQITYNFNENYLTGDWINTNYESIASKVYTKFKTEIDEILKQIA

SEQ ID NO: 1836 - protein, 1224 aa, Artificial
  Synthetic
MENKTSLGNNIYYNPFKPQDKSYFSGYLNVAMENIDSVFRELGKRLKGKEYTWENFFDAIFKENISLVEYERYVKLLSDYFPMARLLDKKEAPIKERKENFKKNFKGIIKAVRDLRNFYTHKEHGEVEITDEIFGVLDEMLKSTVLTVKKKKVKTDKTKEILKKSIEKQLDILCQKKLEYLRDTARKIEEKRRNQRERGEKKLVAPFEYSDKRDDLIAAIYNDAFDVYIDKKKDSLKESSKTKYNTESYPQQEEGDLKIPISKNGVVFLLSLFLSKQEVHAFKSKIAGFKATVIDEATVSEATVSHRKNSICFMATHEIFSHLAYKKLKRKVRTAEINYGKAENAEQLFVYAKETLMMQMLDELSKVPDVVYQNLSEDVQKTFIEDWNEYLKENNGDVGTMEEEQVIHPVIRKRYEDKFNYFAIRFLDEFAQFPTLRFQVHLGNYLHDSRPKENLISDRRIKEKITVFGRLSELEHKKALFIKNTETNEDREHYWEIFPNPNYDFPKENISVNDKDFPIAGSILDREKQPTAGKIGIKVKLLNQQYISEINKAVKAHQLKQRKASKPSIQNIIEEIVPINGNNQEEIIVFGGQPTAYLSMNDIHSILYEFFDKWEEKKERLEKEGEKKLRKEIGKELEEKIVGKIQVQIQQIIDKDTHAKILKPYQDGNSTAIDKDKLIKDLKQEQNILQKLKDEQTAREKEYKECIAYQDKNREINKVRDRNHKQYLKDNLKRKYPEAPTRKEILYYQEKGKVAVWLANDIKRFMPTDFKNEWKGEQHSLLQKSLAYYEQCKEELKNLLPEKVFQHFPFKLGGYFQQKYLYQFYTRYLDKRLEYISGLVQQAENFKSENKVFKKVENECFKFLKKQNYTHKGLDAQVQSILGYPIFLERGFMDEKPTIIKGKTFKGNEALFADWFRYYKEYQNFQTFYNAKQYPLVELEKNQADRKRKTKIYQQKKNDVFTLLMAKHIFKSVFKQDSIDQFSLEDLYQSREERLENQEKAKQTGERNTNYIWNKTVNLNLCDGKITVENVKLKNVGDFIKYEYDQRVQAFLKYEENIEWQAFLIKESKEEENYPYVVEREIEQYEKVRREELLKEVHLIEEYILEKVKDKEILKKGDNQNFKYYILNGLLKQLKNEDVESYKVFNLNTEPEDVNINQLKQEATDLEQKAFVLTYIRNKFAHNQLPKREFWDYCQEKYGKIEKEKTYAEYFSEIFKREKEALIK

SEQ ID NO: 1837 - protein, 1094 aa, Artificial
  Synthetic
MNIPTIIEQKKQFFGTYSVMALLNVQTVLDHIQKLADIEDIPCYDENGKEKDKRENLWEHSVMLYINYKNNSIQKAPEKTALIIDKLMAYFPFLKIMAENQRTHKNKKYQQNRLEVNSDDVFDVLNCLFRVVKKYRDTTTHYMLHDECWDDNSKFLRCSEQILATMLNKYYDVALRNMKERYGYTTEELAFIQNHRYKIEWEPDSRKRPQSNTRFFFSLVDNNGDANPDTLHLSGVGVAVLICLLLDKQYINLFAQQLPAIQKFEPQSAARKMLVRSMGIHSIVLPKDRIHSQKDNMSIAMDMINEMKRCPKELFDTLSPSDQSRFRVTSSDHNEVLFLRHNDRFAQLALQYIDYCKWFNGIRFHVNMGKLRYLFNAEKNCIDGINRVRVIEHALNGFGRIDEMEDLRKSEVGTFANTGVAIRDFENVKRDDADPNNYPYIVDTYTHYILENNKIEMLLTDTNSLPTITEKGGKWYVGKKAPTCRMSIFELPAMMFHAILLGNQATEKRIKTVCANYSRLFEALKQGAVNKDNIASFGIAEEDIPQKVLDIVNGCAQGKDVNIFIKKNIDEMLHDTERRLERLREDREAVNANDNRMGKRGFRQIQRGKLASFLAEDIVKLQPTLCNGTDKLTGLNYRVLQASLAVYDSGGMNEARQQFKALFVKAHLLGTDPHTCHPFLHKVFARSIPDNTIDFYERYLAERESYLSTIQKKVAMGKAVNVPFINRAQSKWSAPTQEALGNAYTDDMAIELPRQMFDDEIKAHLKTLPEMADIDFDNANITFLIGEYQKRVLHDNVQHFYSWQRNYRYIDMLKCETDRKNCLCSTYTSVEEREALWGRRKECIEKYRQWFTRKTSNDRGRSLISAVDIEEILDKRLSNARNEYQKCEKTIRRFKVQDTLLFILAKKALTNFADYNGERFCLNDITPEGDKGILSQLMPMIFRFEKKGKVYTIKSESMKPKNYGDFFVIANDNRICNLLDLIEDNIVSKEDIDKELQKYDQCRPEMAKLVLDLEKWTYSKSPGLMYKEKVQFKDVLDELCKHTNLTERQKFVLGKVRNAFEHNDYPEKGILEITTLPQIAARMKDLFDEYAEVE

SEQ ID NO: 1838 - protein, 1081 aa, Artificial; identical to SEQ ID NO: 1329
  Synthetic

SEQ ID NO: 1839 - protein, 1165 aa, Artificial; identical to SEQ ID NO: 1365
  Synthetic

SEQ ID NO: 1840 - protein, 1085 aa, Artificial; identical to SEQ ID NO: 1453
  Synthetic

SEQ ID NO: 1841 - protein, 1081 aa, Artificial; identical to SEQ ID NO: 1329
  Synthetic

SEQ ID NO: 1842 - protein, 1140 aa, Artificial; identical to SEQ ID NO: 1482
  Synthetic

SEQ ID NO: 1843 - protein, 1146 aa, Artificial; identical to SEQ ID NO: 1461
  Synthetic

SEQ ID NO: 1844 - protein, 1003 aa, Artificial; identical to SEQ ID NO: 1510
  Synthetic

SEQ ID NO: 1845 - protein, 1225 aa, Artificial
  Synthetic
MENKTSLGNNIYYNSFKPQDKSYFAGYLNAAMENMDSVFRELGKRLKGKEYTSENFFDAIFKENISLVEYERYVKLLSDYFPMVRLLDKKEVPIKERKENFKKNFKGIIKAVRDLRNFYTHKEHGKVEIPDEIFAVLDEMLKSTVLTVKKKKVKTDKTKEILKKSIEKQLDILCQKKLNYLRETAEKIEEKRRNQRERGERKLVPPFKYSDKRDDLIAAIYNDAFDFYINKKKDSLKESSKTKYNTESYPQQEKGDLEIPISKNGVVFLLSLFLTKQEIHAFKSKIAGFKATVIDEATVSEATVSHRKNSICFMATHEIFSHLAYKKLKRKVRTAEINYGEAENAEQLSIYAKETLMMQMLDELSKVPDVVYQNLSEDVQKTFIEDWNEYLKENNSDVGTMEEEQVIHPMIRKRYEDKFNYFAIRFLDEFAQFPTLRFQVHLGDYLHDSRPKEHLISDRRIKEKITVFGRLSELEHKKALFIKNTETNEDREHYWEVFPNPNYDFPKENISVNDKDFPIAGSILDREKQPTAGKIGIKVKLLNQKYISEVDKAVKANQLKQRKANKPSIQNIIEEIVPINGNNQEEIIVFGGQPTAYLSMNDIHSILYEFFDKWEEKKEKLEKKGEKELRKEIGKELEEKIVGKIQTQIQQIIDKDINAKILKPYQDDNSTVIDKEKLIKDLKQEQSVLQKLKDEQTVREKEYKECIAYQDKNREINKVRDRNHKQYLRNQLRRKYPEVPARKEVLYYREKGKVAVWLANDIKRFMPTDFKNEWKGEQHSLLQKSLAYYEQCKEELRTLLPQEKVFKHLPFELGGHFQQKYLYQFYTRYLDKRLEHISGLVQQAENFKNENKVFKKVENECFKFLKKQNYIHKELDAQVQSILGYPIFLKRGFMNEKPTIIKGKTFKGNEALFAHWFKYYKEYQNFQTFYDTENYPLVKLEKKQADRKRKTKIYQQKKNDVFTLLMAKHIFKSVFKQDSIDRFSLEDLYQSREERLENQEKAKQTGERNTNYIWNKTVDLNLCDGKITVENVKLKNVGNFIKYEYDQRVQAFLTYEENIKWQAFLIKESKEEENYPYVVEREIEQYEKVRREELLKEVHLIEEYILEKVKDKEILKKGDNQNFKYYILNGLLKQFKNENVDGYKVFNLDTKPEDVDINQLKQEATDLEQKAFVLTYIRNKFAHNQLPKKEFWDYCQEKCGKIAKGKTYAEYFAEVFKREKEALMK

SEQ ID NO: 1846 - protein, 1202 aa, Artificial
  Synthetic
MENKTSLGNNIYYNPFKPQDKPYFAGYLNAAMENIDSVFRELGKRLKGKEYTSENFFDAIFKENISLVEYERYVKLLSDYFPMARLLDKKEAPIKERKENFKKNFKGIIKAVRDLRNFYTHKEHGEVEITDEIFGVLDEMLKSTVLTVKKKKVKTDKTKEILKKSIEKQLDILCQKKLEYLRDTARKIEEKRRNQRERGEDIDPPFRYGDKREDLIAAIYNDAFDFYIDKKKDSLKESIKAKYNTKSYPQQEEGDLKIPISKNGVVFLLSLFLTKQEIHAFKSKIAGFKATVIDEATVSEATVSHRKNSICFMATHEIFSHLAYKKLKRKVRTAEINYGEAENAEQLSIYAKETLMMQMLDELSKVPDVVYQNLSEDVQKTFIEDWNEYLKENNGDVGTMEEEQVIHPVIRKRYEDKFNYFAIRFLDEFAQFPTLRFQVHLGNYFHDSRPKEHLISDRRIKEKITVFGRLSELEHKKALFIKNTETNEDRKHYWEIFSNPNYDFPKENISVNDKDFPIAGSILDREKQPTAGKIGIKVKQYISEVDKAVKANQLKQRKANKPSIQNIIEEIVPINGSNPKEIIVFGGQPTAYLSMNDIHSILYEFLIKGTSGEALEKKIVGKIQTQIQQIIDKDTNAKILKPYQDEISTAIDKEKLIKDLKQEQNILQKLKDEQTVREKEYNDFIAYQDKNREINKVRDRNHKQYLKDNLKRKYPEAPARKEILYYQEKGKVAVWLANDIKRFMPTDFKNEWKGEQHSLLQKSLAYYEQCKEELKNLLPEKVFQHLPFKLGGYFQQKYLYQFYTCYLDKRLEYISGLVQQAENFKSENKVFKKVENECFKFLKKQNYTHKELDARVQSILGYPIFLERGFMDEKPTIIKGKTFKGNESLFADWFKYYKEYQNFQTFYDTENYPLVELEKKQADRKRKTKIYQQKKNDVFTLLMAKHIFKSVFKQDSIDRFSLEDLYQSREERLENQEKAKQTGERNTNYIWNKTVDLKLCDGKITVENVKLKNVGDFIKYEYDQRVQAFLKYEENIEWQAFLIKESKEEENYPYVVEREIEQYEKVRREELLKEVHLIEEYILEKVKDKEILKKGDNQNFKYYILNGLLKQLKNEDVESYKVFNLNTEPEGVNINQLKQEATDLEQKAFVLTYIRNKFAHNQLPKREFWDYCQEKYGKIEKEKTYAEYFSEIFKREKEALIK

SEQ ID NO: 1847 - protein, 1164 aa, Artificial; identical to SEQ ID NO: 1824
  Synthetic

SEQ ID NO: 1848 - protein, 1130 aa, Artificial
  Synthetic
METLSISKVFNYRTLNEDPQYFGGYLTMSRLNIISISNHIANEFGLPLLEEEGQLKNSFLCHKDNKEVNWYHVHSKTKRFLPILKVFEAESLPKEEQKIIDWEGKDFAKMCDTLNTVFTELMEFRDDYSHFYSPKKGTTRKTILSPGLALFLKTNFGRAIGYTKEKFKDILKDEDFQLVASLKMFEADHTITTQGLVFLTSMFLEREYAFRLIGKLAGLQGIQNSSFIATCEVLMAYCLKLPQDQIRNECKRQSFSLELINELSKCPKVLYHTITDEGKQKLRPAPEQLEAKNFFDKSSNKEEKIEAENYDLYIDSLTRRIRSGNRFSEFALKYIDETDIFSEFRFQIEIGTLLVDEYLKFFNGELVPRRIIDNANAFGKLSDFNDQSKVITRIENGHSQRRFEQFAPRYNTENNKIGISKYKVTAKLLPNSKGEHGKKLHQPLPEAFLSLHELPKIILLDYLQKGEAEKLINDFIFVNNCKLMNMPFIESVKNQLPKEWDEFQRRTDGKREMAYDENTLAYLQLRKQILNQVLAEYQLNDKQIPGRILDYWLNITLADEGRAISNRIKSIKRDCMSRLKALRKFKEDRNRSKIPAIGEMATFIAKDIIDMVVSERKKHRITSFYFNKIQECLVQFTVPEKKQLFIHIVTKELRLNDTGGHPFLYKLDLKQINSTLDFYEMYLQEKGYKMVPETNLKTGKVVYTDHSWTALTFYKIEFNDNVDKLMTVVKLPLNKLNLPFTIRQFAGKSTYTLEQWLNNLTKGKNLDNGKQPVNLPTNLFDDKLTELLRRDLEKKKIIYWQYANWNELFKIWWGSRNDSLQSFYNAEREYHIFDEKVNFYPNRRENFADYYQHALKIAFQKKRNERILKQREDKHLPDIIFEQIEKIFKHTIAETEKEIRILQEEDRIMLLMLEGLLEDAKNDQPLKLSEIKTLLNTTTNIRLSVSGKLSFNQFGEPIKGKVHPEIVRTVSVTSKPKEFNLLSKFAVDKRLPELFEYFTDEEIQFESLKTELNAYHKAKQMVLDLSFKLERMIIEKGTNDRIKQLCTCASGDLLTGNICHKTYLTWLKNTGTIDFDTFIFMNMVHYSFSHNQFPQKKTMERLIRRWDANRFALQIEATYIQKIAGIIEHL

SEQ ID NO: 1849 - protein, 1003 aa, Artificial; identical to SEQ ID NO: 1494
  Synthetic

SEQ ID NO: 1850 - protein, 1164 aa, Artificial; identical to SEQ ID NO: 1824
  Synthetic

SEQ ID NO: 1851 - protein, 1164 aa, Artificial; identical to SEQ ID NO: 1824
  Synthetic

SEQ ID NO: 1852 - protein, 1090 aa, Artificial; identical to SEQ ID NO: 1733
  Synthetic

SEQ ID NO: 1853 - protein, 1003 aa, Artificial; identical to SEQ ID NO: 1494
  Synthetic

SEQ ID NO: 1854 - protein, 1164 aa, Artificial; identical to SEQ ID NO: 1824
  Synthetic

SEQ ID NO: 1855 - protein, 1081 aa, Artificial; identical to SEQ ID NO: 1329
  Synthetic

SEQ ID NO: 1856 - protein, 1081 aa, Artificial; identical to SEQ ID NO: 1329
  Synthetic

SEQ ID NO: 1857 - protein, 1003 aa, Artificial; identical to SEQ ID NO: 1510
  Synthetic

SEQ ID NO: 1858 - protein, 1127 aa, Artificial; identical to SEQ ID NO: 1737
  Synthetic

SEQ ID NO: 1859 - protein, 1150 aa, Artificial
  Synthetic
MKTIFAQNSINKLFQHKGKIAPIAEKANINFKLKSNNPNGLSEDFIKSRLHYFSIGHSFKQIDTKQVFGQTDEGERKFFKNLQLENFPNKDTFKTLINDLRNINSHYIHDFEKIKIEKIEPLKHFLIEAFSLAIKMSYLKLETSKKASFVYSDITDNNLMHFLSDKFFPNHEFQIEERAYFKKLSYDKALEYLLFIELDEHYDWKNYKESNHVVFTIAKGTYLSFYGSLFCLSMFLYRGEARTMISKIKGFKKNATEDERVKLDIFTFFAKKFSSQDADAEEKHLVKFRDIVQYLNQYPTAWNKELELESSVPKMTEALNKELELTSSVPKMTEALTEYVKEEEIQRCYEDMYAVGNFKEYALHYFWQRPKPSINAKTEKDFLYEIQTPESVKKLEEEIRKLESDLKKKYDYEKEKALKSANFSLKKLKEKNLPNTKLLKLQKRIANHSLIRSYGRNIDRFMEMGLRYLAENQCFGEYTQFRLYKYFSPEDERLKPEEKHLTKKEFDKLKYHEGKLTHFTTYQEHINKYQDWDMPFVIENNATQIRFSVGGDFYTVSIQRNLLVYLLEIAFYSSQITCHKVLQEYILQNLMDKKESVSLLNTNTPFSKIELAKLRKLIPSRVIQDKLHLPNERKSDYENYTLILDQATIQEIRYQALVEKAKKDNVLEFFLKRNKGKNFKLRFVKKAWNLLFFKNAYVAQLEENKNKHHKHYHITKDEFDNFCKWMYAFEEIPFYKLELEKLLNQKGFLNNVEFKNIFDIGKSLDDYYTSTKKLYTNWLETNKVAAESSKQLFEIHKYKNYEEPNKHLLYINTSHFIEFLKSKKWLQLTDSKIVYTSLNNAKYLRTPYYYTDILQKEEYKTHANLFNKLRTHRLEDCLLFEIGQRYISKNLSKANKIESVKILLSSAYDFEIKPKDNFSASYYINIPFNKIDAFSEWNHAKNQGETGKYDVHFLSKLPLYLENYGYMLGNKSSIAQKWKTQNHPKTIDYADLNTVNMHIMNTAATFTEIGIEMERYLIEKYTLKLKSYNIDVKDITDYDKYFYFIQNAKKEKIYPDRNNAFHFNIASKPYKFLLEDVHKKFIIEKIKTKQYDNFDAVPPIEKTILKMFLKELFDHCYDRNNKAKTEIEKRRKLEDAINKYWQKEVKKYLI

SEQ ID NO: 1860 - protein, 1081 aa, Artificial; identical to SEQ ID NO: 1329
  Synthetic

SEQ ID NO: 1861 - protein, 1214 aa, Artificial
  Synthetic
LILSFIIFNFIVIINQHTLNTYTRKYMKDKSFSTISSAINETITTDNIKYPEQLNLILSKRLRPKNELQPLWAAYFNMARYNMYTTLVHIATATGLSDEDNMENRMDKMRILNEPVEPEIEHRLRKLLCRHFPFAVWMICNPIRKKDSKEDSADEDYRVISVKELRDCLKTVSYTLNYFRNYYSHTRHVETRSEDIIAASRNSEKQTGIFLNKVCTVATRRVKSRFSDKSNKGQAGMIDDQSMKFITEGKVKFRNNNGIKETIYNPDHFLYPLFLNRSSALRDGTNPERLSTVGKIQLICLLLDKKYITEFLDQSGFLSAFNNNAPAPKLSERRLILEVLSDLRIRLPQRKIDATCNDIQVALDMLNELKKCPKELFELLEAKDKATFSILSSTGEHILLRRSSDRFTQLALQWFDVNKAFSRIRFHMNAGIFRYLFNDSKTCIDGKTRLRVLQEPLNCFGRIQEVEDSRESNRDGNDGPWRGFEIKGFDEAARNDVNCLPYINDSRTRYLITEDNIGIRFSGNDEACGNYFPRIDEKNGKYKVTCLPAQCMISIYELQAMLFLHLLNPGNDGGIAPVEKIIIDKVESYRRFFSDIKNGLLTPSGLTESSLNDKLTSTYGISLSDIPDKMKDYLLKKNNKGRGFNAYRDRLIETLKEETEYRIKRLEENLNATNSDTNKPGKPGYVQIKPGSLASFISKDIVFFQECNADQKMTGLNFSVMQGLIATFGSQEGATTDDLRMAFRKSGLIAANGSCGTHPFLAIAFNAGAKNTVDLYKEYLNARKSYLSGIIPDNAPFLHADRIRWAVNDDAYYKDYAERCLQRPVILPRRLFEASIRENLLALNGENANALKKVIIGAGGHCNSAFMIDSYFYYVKNDSPQVFHGACEGDMLHTYGHRFFQVVRRNLKNAEAILSKLKKDSNTHNTYIGALSDAICWAKENPIKPTFSVGRSRLNNHSENEIAAMIKRAFNEYMATEKTLRRYVIQDELLFLAAMKTIKSKLGVPDSEWKLGSIGSKSGSILDKELPLIQTPAKFSNIKRRPNKTITKDLVELVIEQHNVSIKDYGEIYRILADERLYGLLKYHKNETVLASDLKNEIEKYDEKRVKVFEDIMNYEKKITNGVTDRQLCESMDHAKDIDFKVMQTFDTMNDNLTKMELRSIRNAFCHNSYPDVNAFDNSSGTTKRIRIHNADIPGTAEKISEIVNDISSKTEAK

SEQ ID NO: 1862 - protein, 1081 aa, Artificial; identical to SEQ ID NO: 1329
  Synthetic

SEQ ID NO: 1863 - protein, 1214 aa, Artificial; identical to SEQ ID NO: 1861
  Synthetic

SEQ ID NO: 1864 - protein, 1088 aa, Artificial; identical to SEQ ID NO: 1675
  Synthetic

SEQ ID NO: 1865 - protein, 1139 aa, Artificial
  Synthetic
MENDKRLEESACYTLNDKHFWAAFLNLARHNVYITVNHINKTLELKNKKNQEIIIDNDQDILAIKTHWAKVNGDLNKTDRLRELMIKHFPFLEAAIYSNNKEDKEEVKEEKQAKAQSFKSLKDCLFLFLEKLQEARNYYSHYKYSESSKEPEFEEGLLEKMYNTFDASIRLVKEDYQYNKDIDPEKDFKHLERKEDFNYLFTDKDNKGKITKNGLLFFVSLFLEKKDAIWMQQKFRGFKDNRGNKEKMTHEVFCRSRMLLPKIRLESTQTQDWILLDMLNELIRCPKSLYERLQGAYREKFKVPFDSIDEDYDAEQEPFRNTLVRHQDRFPYFALRYFDYNEIFKNLRFQIDLGTYHFSIYKKLIGGKKEDRHLTHKLYGFERIQEFTKQNRPDKWQAIIKDLDTYETSNERYISETTPHYHLENQKIGIRFRNDNNDIWPSLKTNGEKNEKSKYNLDKPYQAEAFLSVHELLPMMFYYLLLKMENTDNDKEDNEVGTKKKGNKNNKQEKHKIEEIIENKIKDIYALYDAFANGEINSIDELAEQREGKDIEIGHLPKQLIVILKNKSKDMAEKANRKQKEMIKDTKKRLATLDKQVKGEIEDGGRNIRLLKSGEIARWLVNDMMRFQPVQKDNEGKPLNNSKANSTEYQMLQRSLALYNKEEKPTRYFRQVNLIKSSNPHPFLEDTKWEECYNILSFYRNYLKAKIKFLNKLKPEDWKKNQYFLMLKEPKTNRKTLVQGWKNGFNLPRGIFTEPIKEWFKRHQNDSEEYKKVEALDRVGLVAKVIPLFFKEEYFKEDAQKEINNCVQPFYSFPYNVGNIHKPEEKNFLHCEERRKLWDKKKDKFKGYKAKEKSKKMTDKEKEEHRSYLEFQSWNKFERELRLVRNQDILTWLLCTKLIDKLKIDELNIEELQKLRLKDIDTDTAKKEKNNILNRVMPMRLPVTVYEIDKSFNIVKDKPLHTVYIEETGTKLLKQGNFKALVKDRRLNGLFSFVKTSSEAESKSKPISKLRVEYELGAYQKARIDIIKDMLALEKTLIDNDENLPTNKFSDMLKSWLKGKGEANKARLQNDVGLLVAVRNAFSHNQYPMYNSEVFKGMKLLSLSSDIPEKEGLGIAKQLKDKIKETIERIIEIEKEIRN

SEQ ID NO: 1866 - protein, 1221 aa, Artificial; identical to SEQ ID NO: 1721
  Synthetic

SEQ ID NO: 1867 - protein, 1034 aa, Artificial
  Synthetic
MNFSENNKYLYGAYFNTALDNFKDVIRHIYRIIKLIDGVDVKISFGDYDTQYDYLSKKLKDRNATSQKVEELLYGAFPFWGKLMSIISSEWKREENTNYNDISAKCVDGIAIIHKVLEDWRNYTTHGQHEEANINESVLYLLKDMYDVSVKTIIERFSLTNSDVTHLSKRIEKKDKEGKNAKVKYQPAGYYAFLDDSKSITEKGLAFLICLFLKKEEAYHFLKSIKGFKRDDDIHYRMTLEVFTAMRYHAPKRLMRLEQKSGDKVSLAMEMINELAKCPKELYEHLSPEEKKKFEIYEEGEQGEVIGDLIRYKDRYEILMMKALEFSGECQDMGFYMHLSKCYMNCYEKTFIDGTKDNRYITFSLCGFGRLQNSYIKPENISTVVDEEYETSENLSSKKECLSNFGEMLHESSSMRVQHSFSEQEFNNSAINVEVPYISESYPSYIVNDNKIGIKRLQSPSDTILPEFDIANKKVSCPKPDYWLSKYELPSMAFYAYLKEVHKDKLSSFPTIWEIIERDKPQSHASQNSPKKIKELEEERLKKYLSEIEIKISELSNNDVILKNGNIADELARDILWLQPSVNKGKDKLTGANFRTLQYALARYSFVKEQLADIYKKGGLIESKNGNNHPFLADILHNGFESLKDYYKGYLCKKKKFIQTQLLKIEKGKTNINFYPFRKLVNEKDKTQKSSENEPVFLSRNLFAENIKKALCAIRGDLKSNIERMEIETKRVNTAKLIQIYFQSFLKDSSQFFYLTDRKYDELNSEIKDGSKYLSLNMRDKIIKDKKESGQMNDGIKDVLESEKIIRLRSIQDMTLFLWMKEFSNIDFIDKIMLKDIDNAFLSKPISINMFIETIQIKCKVKIKDYGRISSIIVSNSLSRSLIKFISSVYKENNLKRQDKEVLSYNYIFKEINTFVKYRPEIIRLAQSIEEKLLEYSKEEISSEGSYYNFRVVATTALEDMPDIDKEVLIDIRNGFCHNSYPENSICHKEYYQIKRKEDSFGFSAEEGIKEENTIAHYLYEKFRLEQEKIMKLE

SEQ ID NO: 1868 - protein, 1062 aa, Artificial; identical to SEQ ID NO: 1324
  Synthetic

SEQ ID NO: 1869 - protein, 1147 aa, Artificial
  Synthetic
MKESIKQGKGKEYNSFKTEDKHYFGGFFNLADNNIEEALKEVGQRLNTTLDSKKLIDKYTKETISLVDYERFIHLLTDYFPIVNEIDQINKKDDKGNIISNTKIERLENFKETFLLLINSIDELRNYYTHYHHDPIQLEPKLFAFLDDVLLKTVLDTKKNYLKMDKTKEMMKDSLKEDYKKIFDLKVQDYLSKDNLTSKKIKKARKYGNGFDDKLTNEIEHSIYNDTIKDFIYDKSKKAELTHARKTSFNDKDPFVKNKDFDLPISSNGIIFLLSLFLNRKEIENLKANIKGYKGKVNKSEEPTLEKNNIRFMTTHRIFSFWHYKGLKSKIKTSENATKETLLMQMIDELSKVPDVIYQNVPKDVQDSFIENWNEYYKDNEENQENLENSKVVHPVIRKRYEDKFNYFAIRFLDEYVDFPTLRFQVHLGNYLEDSRAKKIGNVFTEREIKKKLFVFGKLNEINQLKSDFFQEIKEKKEETQWEIFPNPSYHFPMENSEELKAANKIGIYIDHEKSINKYKHQAKKLSSDAKKNLIEEIIGSKSKMAIGQPIAYLSMNDIHSIIFEALEKLTIEEGKINGKAIEEKIKRQINKQIDEIINRDEKAKIIKNHSKKEVTDFNIEKLIDDVKKEIEITCNLEKKLTEKENKYKAYQKIKGSRNVKTEKRNHVLYNSEKGEIATWLANDIKRFFPKEFKESWKGYQHNEFQLNLAYYDTQKQSVELLLIGLNYQKEIPMIYFSKISFLEFYEEYLKKRKKYFTNLLADLEKHKKGEPINKDKLLTKCFTVFKKKNYQNKALDEKIKTTLASPIFIERGFLDSKPTVIAGKKFYENKNEFADWFVAFKKFCDYQKFYDITEYPLDTKQKTKTEINKIHTKIYTQKKNDWAAWKMVHFIFKDIFKQGLQNVALSELYQSRAERIKNKEEKKQNFIWNRTIDLQLNEKIQIPKVKLKDIGNFRKHEKDQRVKTFLSYGDITGWMAYLPNDWNENHTEKPINVIDIQIDEYEKIRQHELLKEVQTLEKEIYSNVTDKGALLNEIEQKDKTVKKNPNFKKYIVNGLLKQIKKMNVDNFKITQDGFKFNNLTKDILNSYTELEQKTTLLVLIRNKFAHNQLPNNEVYEFSQNLLKREENQTYAAYYLEIFKKLKTELQ

SEQ ID NO: 1870 - protein, 1003 aa, Artificial
  Synthetic
MGAIKNKHIFAAYANLAIDGLIKTLNFIAKKLDTQKQLSSWDIKHVITLIDSIFDQNPQNNLEQVVEGYLPWIKPIIEMKTPKKGERQSDKLCIEYKTIITAFASLLNDVRNYYTHYYHDPICIYPGGYDIPSSLNCIYDSAINIIKERFQAEEKEMEHLRRYTRKKGRVVLKTEDDHFYYTLANNNDLSEKGYAFFISMFLERKYSYLFLKKLSGFKRGDSLQYRLTLEVFTALSTKPPVERLRTTKDTKQDRALDILNELSKIPIELYQTLEPKYREMYNETLQPTDAEDPYGLPDRSRIRFRSRFEAFALHFLDKQADFKEIGFYTYLGNYFHNGYQKTRVDRETKDRYINFQLAGFCKNIQDISAKKLSEALNVKSIDISTDSIPDINSFEPYLVQSTPHYIVNGNNIGIKVLPEGKDTYPTIDEKGAKMPIADFWLSKYELPAMLFYTYLRNNNIHKSHCPLSVKDIIERSIHKSTKQKHPEERSELMLRRVMKAIFWTDSKLNEVERIKSQKSAFGKRQHEILKAGRIAETLVRDMLWLKPSKNNGRDKVTEPNFQAIQVSLAYFGIRRNDLTEIFTRAGLINSSNPHPFLAQIGTNYTSLIEFYIAYLKERKVYFSRIQKKILQGKLNIQCHPLRDLQREPNKPQDKEEAIFLPRGLFNEAIINCLKKSKLKQLIESPTREKSPALNVSYLIQNYFRTYFEDQSQEFYAQPRNYRLFDKLSPNKGKSKSYLSLEQRIKKMEELRPSKIPVAEANKLLEKEDRLYRKNYNEICDNESIIRLYQIQDILLFMMTKEYLPSDLYNRINKYKLENVKGILNERVSYLIDLNPLKIQGEDIKIKDYGKLFYIHHDTRISSLNKVLSKVKRNNSISSSVKIQPYENYKRECLDFEEAQIQIIPIIHSFEIAMVSMFPDLKKATPGNYYDFNELITEYEKRTKQKIDSSFLIKTRNMFLHDKYEAECIKEISDDFVYAKKIIAEFKMKIENIKLEDLSNDSSA

SEQ ID NO: 1871 - protein, 1119 aa, Artificial
  Synthetic
MEDDKKTTESIRYELKDKHFWAAFLNLARHNVYITVNHINKMLEEGEINRDGYENTLENSWNEIKDINKKDRLSKLIIKHFPFLEATTYRRNPTDTTKQKEEKQAEAQSLESLKESFFVFIYKLRDLRNHYSHYKHSKSLERPKFEEDLLKKMYNIFNASIRLVKEDYQYNKNINPKKDFKHLDRKRKGKFYYSFADNKGNITESGLLFFVSLFLEKKDAIWVQKKLEGFKCSNESYQKMTNEVFCRSRMLLPKLRLESTQTQDWILLDMLNELIRCPKSLYERLQGNDREKFRVPFDPVDEDYDAEQEPFKNTLVRHQDRFPYFALRYFDYNEIFTNLRFQIDLGTYHFSIYKKLIGGQKEDRHLTHKLYGFERIQEFDKQNRPDEWKAIVKDSDTFKKKEEKEEEKPYISETTPHYHLENKKIGIAFKNHNIWPSTQTELTNNKRKKYNLGTSIKAEAFLSVHELLPMMFYYLLLKTENTKNDNKVEGKKETKKQEKHKIEAIIESKIKDMYALYDAFANGEINSEKELEEYLKGKDIEIVHLPKQMIAILKNEYKDMAEKAEDKQEKMKLATENRLKTLDKQLKGKIQNGKRYNSAPKSGEIASWLVNDMMRFQPVQKDNEGKPLNNSKANSTEYQLLQRTLAFFGSEHERFAPYFKQTKLIESSNPHPFLKDTEWEKCNNILSFYRSYLEAKKNFLESLKPEDWEKNQYFLMLKEPKTNRKTLVQGWKNGFNLPRGIFTEPIRKWFMEHWKSIKVDDSKRVGLVAKVIPLFFSEKYKDSVQPFYNYPFNVGDVNKPKEEDFLHRKDRIELWDKKKVGFKGYKAKEKPKEMTDEEKKEHRSYLEFQSWKKFERELRLVRNQDIVTWLLCTELIDKLKVEGLNVEELQKLRLKDINTDTAKKEKNNILNRVMPMELPVTVYEVNKASNIIKNKPLHTIYIKEAKTKLLKQGNFKALVKDRRLNGLFSFVDTSSKAESESNTISKSRVEYELGEYQKARIEIIKDMLALEKTLIDKYNSLDTDNFNKMLTDWLELKGEPDKASFQNDVDLLIAVRNAFSHNQYPMRNRIAFANINPFSLSSANTSEEKGLGIANQLKDKTYKTIEKIIEIEKPIETKE

SEQ ID NO: 1872 - protein, 1319 aa, Artificial; identical to SEQ ID NO: 1674
  Synthetic

SEQ ID NO: 1873 - protein, 1403 aa, Artificial; identical to SEQ ID NO: 1745
  Synthetic

SEQ ID NO: 1874 - protein, 1220 aa, Artificial; identical to SEQ ID NO: 1568
  Synthetic

SEQ ID NO: 1875 - protein, 1146 aa, Artificial; identical to SEQ ID NO: 1461
  Synthetic

SEQ ID NO: 1876 - protein, 1127 aa, Artificial
  Synthetic
LQKQDKLFVDRKKNAIFAFPKYITIMENKEKTEPIYYELTDKHFWAAFLNLARHNVYTTVNHINKLLEIAELKNDEDVLNIKDSWNKQAEKLDKKVRLRNLLMRHFPFLEAAAYEKTTSKDSNSKEQKEKEQAEALSLDNLKNVLFIFLEKLQSLRNYYSHYKYSEEAQKPTFENDLLKNMYKIFDTNVRLVKRDYMHHENVDMQRDFSHLNRKKQEGQTRKIIANPNFRYHFADEKGDMTIAGLLFFVSLFLDKKDAIWMQKKLKGFKDGRNLREQMTNEVFCRSRISLPKLKLENVQTKDWMQLDMLNELVRCPKSLYERLREKDRESFKVPFDIFSDDYDAEEEPFKNTLVRHQDRFPYFVLRYFDLNEIFEQLRFQIDLGTYHFSIYNKLIGDEDEVRHLTHHLYGFARIQDFAPRNQPEEWRKLVKDLDHFETSQKPYISKTAPHYHLENEKIGIKFCSTHNNLFPSLKREKTCNGRSKFNLGTQFTAEAFLSVHELLPMMFYYLLLTKDYSRKESADKVEGIIRKEISNIYAIYDAFANNEINSIADLTCRLQKTNILQGHLPKQMISILEGRQKDMEKEAERKIGEMIDDTQRRLDLLCKQTNQKIRIGKRNAGLLKSGKIADWLVSDMMRFQPVQKDTNNAPINNSKANSTEYRMLQHALALFGSESSRLKAYFRQMNLVGNANPHPFLAETQWEHQTNILSFYRNYLEARKKYLKGLKLQNWKQYQHFLILKVQKTNRNTLVTGWKNSFNLPRGIFTQPIREWFEKHNNSKRIYDQILSFDRVGFVAKAIPLYFAEEYKDNVQPFYDYPFNIGNKLKPQKGQFLDKKERVELWQKNKELFKNYPSEKKKTDLAYLDFLSWKKFERELRLIKNQDIVTWLMFKELFKTTTVEGLKIGEIHLRDIDTNTANEESNNILNRIMPMKLPVKTYETDNKGNILKERPLATFYIEETETKVLKQGNFKVLAKDRRLNGLLSFAETTDIDLEKNPITKLSVDHELIKYQTTRISIFEMTLGLEKKLIDKYSTLPTDSFRNMLERWLQCKANRPELKNCVNSLIAVRNAFSHNQYPMYDATLFAKVKKFTLFPSVDTKKIELNIAPQLLEIVGKAIKEIEKSENKN

SEQ ID NO: 1877 - protein, 1125 aa, Artificial
  Synthetic
MEDDKKTTESTYTLDNKHFWAAFLNLARHNVYITVNHINKVLELKNKKDQDILIDNDQDILAIKTHWEKVNGDLNKTERLRKLMTKHFPFLETAIYTKNKEDKEEVKQEKQAKAQSFDSLKHCLFLFLEKLQEARNYYSHYKYSESTKEPMLEKELLKKMYNIFDDNIQLVIKDYQHNKDINPDEDFKHLDRTKEEFNYYFTRNKKGNITASGLLFFVSLFLEKKDAIWMQQKLTGFKDNRESKKKMTHEVFCRSRMLLPKLRLESTQTQDWILLDMLNELIRCPKSLYERLQGVDREKFKVPFDPADEDYDAEQEPFKNTLVRHQDRFPYFALRYFDYNEVFANLRFQIDLGTYHFSIYKKLIGGQKEDRHLTHKLYGFERIQEFDKQNRPDEWKAIVKDLDTYETSNERYISETTPHYHLENQKIGIRFRNGNKEIWPSLKTNGENNEKSKYKLDKQYQAEAFLSVHELLPMMFYYLLLKKEEPNNDKKNASIVEGFIKREIRDIYKLYDAFANGEINNIDDLEKYCEDEGIPKRHLPKQMVAILYDEHKDMVEEAKRKQKEMVKDTKKLLAALEKQTQEEIEDGGRNIRLLKSGEIARWLVNDMMRFQPVQKDNEGNPLNNSKANSTEYQMLQRSLALYNKEEKPTRYFRQVNLINSSNPHPFLKWTKWEECNNILSFYRSYLTKKIEFLNKLKPEDWEKNQYFLKLKEPKTNRETLVQGWKNGFNLPRGIFTEPIREWFKRHQNDSKEYEKVEALKRVGLVTKVIPLFFKEEYFKEDAQKEINNCVQPFYGFPYNVGNIHKPDEKDFLPSEERKKLWGDKKYKFKGYKAKVKSKKLTDKEKEEYRSYLEFQSWNKFERELRLVRNQDIVTWLLCTELIDKMKVEGLNVEELQKLRLKDIDTDTAKQEKNNILNRIMPMQLPVTVYEIDDSHNIVKDKPLHTVYIEETKTKLLKQGNFKALVKDRRLNGLFSFVDTSSEAELKDKPISKSVVEYELGEYQNARIEIIENMLALEGALIEKDKTLPTNNFSAMLNGWLEGKDEADKARFQNDVKLLVAVRNAFSHNQYPMRNRIAFANINPFSLSSADTSEEKKLDIANQLKDKTKETIEKIIEIEKPIETKE

SEQ ID NO: 1878 - protein, 1214 aa, Artificial; identical to SEQ ID NO: 1861
  Synthetic

SEQ ID NO: 1879 - protein, 1216 aa, Artificial
  Synthetic
VSIVSCLSIISKKTSLFLGRIVFSLYLCKIWNIDVSGKPYNLLIIKIPRLTINTLNMNVIESFLPLNTKEKIDQLMAIIKSEPKAMNQNAWHMIFGNIGKSKMQMYFIEKYPQSLFAAPGNYIPSCNGQGQEEKNPQQPQVQQHERQTDIPVPPTSLKDNRFLYATYIEMAFHNMFLNIKHIYGVVFGRDIMAEAKANYEALNPEKKWDEDFANEFLVWKPMFEAFNNGNVEEKQKVGEMLSRHFPLLVPFTDFTNHESNYKNLTIVGILRRLSQVLRVLRNLYSHYRIELFENQKKVYLDNEYLIIRCTMNAYMGARRVIKDRFSYDEKDMRCTDQYQFVDERGRRLKEKVEIKGFRYKIGEKGKDSKLHFTPFGLVAFISLFLEKKYSKILTDKLRLIPIQDQHIINEMLAVYRIRLNAQKLNISKDADLLALDIINELQRCPKDLFSLLSPSDQKKFRHESEANDEVLMVRHSDRFPFLVMKYIDDCQLFDNIRFQVSLGKYFYKFYDKNCIDSETRVRALSKNLNGFGRLSKIEAMREGCWEDSIRQYDDIHKNTVDEKPYVTDHHAKYVINGNRIAMRIIREEEKAYLPELNAEGVRNLAPTCWLSIYDLSSLAFLLYLTNGDFVEGIIENTVENYHKLFKDIENGTMLPVANEEELDSLLCRNYGGIKQKDIPKNMLDYLLRKTSDARKRFVEFSKSIIDRMISQTEYKIEQIKRQEEQCRQNKIGKKSYVIIKDGKLASFLANDIMLFQPNDSENSNKLTGLNFRILQSTLATMKECGIDQLKRTLTSAHIIGEANDEYCNPIVMKMMRKRVPENTRDFYKSYLKARLEYLNECKRKADYENLSFLHSNRSKWQEHDDEFCRLLAGRYLHDENGGTEFEKSINLPSGMFDKYIREKLCEVPALKDIANDETKNVSYLIYAYFKNVCNDDCLFFYEAGRSYRLFKLLGMNGSKTAQDIRLMLNRKHKTSLYKEIDKYLISIPLAEREQEKARLMGLLKGMKNSETDFKRFKIQDILLFLIAKKLFKDNVQDDVQHTAFESLKLKSLKDTDGLSQKIRISVKIKSKNGYEKEIKKPELKLKNYADFYKLLNDRRLPALLDLVREHSIDYDSLVDEFGGYDKVRPNVMKDVLKYERKYYDNHADSDESLDFGSMLDNSSFNEEEKDLLRKIRNSFAHNTYPKYYIVNKAGDPHLPEKAIKCSEKFSSDINNE

SEQ ID NO: 1880 - protein, 989 aa, Artificial
  Synthetic
MANTTLPNYQKNTADTTAELCLFYNLAFDRIQDLLFSYEQKKIEIESFNTFTGEQLCQQHFSKQTYLCLKVYLWKEPVSRRYTQIKQHDICMVNTILQKLVHLRNFHSHYYHDASVLQFPHDLVSFIALQLQTVKQKLAAKQPECAGYYGELEKDIKEYGPPDGEKKQDVYKHFYFFDGNGYIQPEGKNFFLSFFLVKGEMQRFLKKRKRCKRDNGERYQVKNKLYTELCHRDASNRFFTRGKEDYCEGNEPLRRQFNTILNYLLSKPVADKSYMPPPLPGELFSKDEMLQMKEQRSDEPGGETVYIRRSSKFVDIAVRFFMDMPLLGYKNVEPIDWEVRNFTHTKIEKQLSARISTDDNKTYMEAKDGWHRTYRAGNFPRVVNNHIRFVLDGCSTPFIINVRELKNWLYFLLAGNADAYSKCIALIKEYGQQYAHATGELCKTHSLDCSRYPLVFHDGTVESAKLSDAHIKLLTQEPFCTDTYRQKILARIHTTLDFLKETKRKKTELSRNRKNRVIMKCLNWYLPQQAKLKPDEVNLLSIYNFTADNEGLKNESRDSIIQPLMHKLHKATEGAFNCIQASNSLDDLFDTMLDKKRQSLQQLLPKIAQLPLPELHLLAAKLHVRMPGADTARNGNDRLQELQSTLSSNPVLLPNGFFKRNLAPDENYQVSTLVRKRAVWTNILPRDNYHLGEQDSFVNGEHSPAPIRRAVLDAVETHFDELHRAYVLSATELKQQASAQGKQAPKTFKLFVESFAQKLPGTDAKELRPAVDLYKKLKETEVQDALLAQILFKYHNLDLPLRERELKTCKIAELHRHEYTIQLDYNVSIPYKQLDDLATHWDRKKLVALFKNNKYWNWHLRAELQNKGIDTDMRMINYVLNSLYEDSFRYIQLVLAVEKKILEGTGRDALNQLIAGTAGSGRARIEFGSLLDTTAMKGKAKKKFVRLRNSAFHTFVPDNNLQYCEEKERLATHFGIRLEQKKGKGFYRK

SEQ ID NO: 1881 - protein, 1127 aa, Artificial
  Synthetic
VKMEDDKKTTESTNMLDNKHFWAAFLNLARHNVYITVNHINKVLELKNKKDQDIIIDNDQDILAIKTLWEKVNGDLNKTERLRELMTKHFPFLETAIYSKNKEDKEEVKQEKQAKAQSFDSLKHCLFLFLEKLQEARNYYSHYKYSESTKEPMLEKELLKKMYNIFDDNIQLVIKDYQHNKDINPNEDFKHLDRTEEDFNYYFTRNKKGNITASGLLFFVSLFLEKKDAIWMQQKLRGFKDNRESKKKMTHEVFCRRRMLLPKLRLESTQTQDWILLDMLNELIRCPKSLYERLQGEYRKKFNVPFDPADEDYDAEQEPFKNTLVRHQDRFPYFVLRYFDYNEIFTNLRFQIDLGTYHFSIYKKLIGGQKEDRHLTHKLYGFERIQEFAKQNRTDEWKAIVKDLDTYETSNERYISETTPHYHLENQKIGIRFRNGNNDIWPSLETNGENNEKSKYKLDKPYQAEAFLSVHELLPMMFYYLLLKKEEPNNDKKNASIVEGFIKREIRDIYKLYDAFANGEINSEEELKEYLKGKDIEIVHLPKQMIAILESKPKDMVKEAKRKQKEMVKDTKKLLAALEKQTQEEIEDGGRNIRLLKSGEIARWLVNDMMRFQPVQKDNEGNPLNNSKANSTEYQMLQRSLALYNKEEKPTRYFRQVNLINSSNPHPFLKWTKWEECNNILSFYRSYLTKKIEFLNKLKPEDWEKNQYFLKLKEPKTNRKTLVQGWKNGFNLPRGIFTEPIREWFKRHQNDSEEYKKVEALKRVGLVAKVIPLFFKEEYFKEDAQKEINNCVQPFYSFPYNVGNIHKPDEKDFLPSEERKKLWGDKKYKFKGYKAKEKSKKLTDKEKEEYRSYLEFQSWNKFERELRLVRNQDIVTWLLCTELIDKLKVEGLNVEELQKLRLKDIDTDTAKKEKNNILNRIMPMQLPVTVYEIDDSHNIVKDRPLHTVYIEETKTKLLKQGNFKALVKDRRLNGLFSFVDTSSEADLKDKPISKSVVEYELGEYQNARIETIKDMLLLEKTLIKKYKKLPTDNFSDMLNGWLEGKDESDKARFQNDVKLLVAVRNAFSHNQYPMRNRIAFANINPFSLSSANTSEEKKLDIANQLKDKTHKTIEKIIEIEKPIETKE

SEQ ID NO: 1882 - protein, 1127 aa, Artificial
  Synthetic
VKMEDDKKTTESTNMLDNKHFWAAFLNLARHNVYITVNHINKVLELKNKKDQDIIIDNDQDILAIKTHWEKVNGDLNKTERLRELMTKHFPFLETAIYTKNKEDKKEVKQEKQAKAQSFDSLKHCLFLFLEKLQEARNYYSHYKYSESTKEPMLEKELLKKMYNIFDDNIQLVIKDYQHNKDINPDEDFKHLDRTEEDFNYYFTRNKKGNITASGLLFFVSLFLEKKDAIWMQQKLRGFKDNRESKKKMTHEVFCRSRMLLPKLRLESTQTQDWILLDMLNELIRCPKSLYERLQGDDRKKFNVPFDPTDENYDAEQEPFKNTLVRHQDRFPYFALRYFDYNEVFANLRFQIDLGTYHFSIYKKLIGGQKEDRHLTHKLYGFERIQEFAKQNRPDEWKAIVKDLDTYETSEEPYISETTPHYHLENQKIGIRFRNGNNDIWPSLETNGENNEKSKYKLDKQYQAEAFLSVHELLPMMFYYLLLKKEKPNNDEINASIVEGFIKREIRYIYKLYDAFANGEINNIDDLKKYCEDKGIPKRNLPKQMIAILESKPKDMVEEAERKQRKMVKDTKKLLATLEKQTQGEIEDGGRNIRLLKSGEIARWLVNDMMRFQPVQKDNEGNPLNNSKANSTEYQMLQRSLALYNKEEKPTRYFRQVNLIESSNPHPFLNNTEWKECNNILSFYRSYLTKKIEFLNELKPEDWEKNQYFLKLKEPKTNRETLVQGWKNGFNLPRGIFTEPIREWFKRHQNDSKEYEKVEALKRVGLVTKVIPLFFKEEYFKEDAQKEINNCVQPFYGFPYNVGNIHKPKEEDFLHREERIELWDKKKDKFKGYKAKKKFKEMTDKEKEEHRSYLEFKSWNQFERELRLVRNQDIVTWLLCMELIDKLKVEGLNVEELQKLRLKDIDTDTAKQEKNNILNRVMPMQLPVTVYEIDDSHNIVKDRPLHTVYIEETKTKLLKQGNFKALVKDRRLNGLFSFVDTSSEAELKSNPISKLRVEYELGEYQNARIEIIEDMLALEGALIEKDKNLPTDNFSDMLNGWLEGKDESDKARFQNDVKLLVAVRNAFSHNQYPMRNRIAFANINPFSLSSADISEEKGLDIANQLKDKTHKIIKRIIKIEKPIETKE

SEQ ID NO: 1883 - protein, 1064 aa, Artificial
  Synthetic
MPLYYPFSEKDKHYFGSYLNLAHKNIFDVLNEFCSRFQLKNKKPKEKEFFKDFKELEKFLINIFKENISISDYEKWIEVLSSYFPVVAYLDNQEKNRNKKEDRINNFRNNFLNLISTIDKLRNFYTHYFHNEVKIEDSVFEILDKLFENTLLEIKNKFLKTDKTQEALKKLLQKEIDTYTKNNKKEEVLKSIFEESIDIIDEKGNLKTECFSSKNISQPNNNGLKVSISLDGLVILLSIFLNKKDINHFRANISVPDIIKGDEELFKKLNSTCIDRINSHLAYKGLKYRLKTSPILDKAVLMKQILDELNKVPDVIYKNIEESKQEDFIMDLNEYFRDNGEENQSLDNLRVVHPVIRKRYEDKFNYFALRFLDEYADFPKLRFQVHIGNYIHHQTDKFVGNSTKNRIIKEKINVFGKLNDIIKAKANYFHSSTIDTQWEEFPNPSYLFPKENIVDNKNQNANKIGIQLPINNPIINNILNEIPNLNQERNPNKKEKIYIVNDVLNINESDNNNANNNDNPIIPFGAPTAYLSMNDIHSILYEIIKNGTSGQKLENKIRRQIEKQIGDIHNQSEGIKILKKRIEIDNEQINYNKLKKDLENLINQTKNLQKEHQERIDSYNNKERKYILTNNEKGRIANWLANEIKQFMPQKFKSNWKGYQHNELQKLLAYYEISKDEVLKLLENSGTKEHFNFEKYSTLEELYEDYLNTKISTLSTLQQQLKNFEKEIFIFLNRKNYIQKPISEKINQILSSPIFIERGFLDNKPTMIEKTKFAGNEELFADWFQFYKKNKEYQDFYNTEKYPLKSDLSKSELKSINKKINQQKKNDVFALHMAKEIFNDLFLTNNNLDITLSDLFGQNIWDKTLTLELFGGKLKIKNVKIKDIGKYRKYENDSRVKLLTEYFPDREWVGHLPNDKNTPAYNSIERQLEEYERIRSEELFKEVHKLEKEIYDQVEDKNCLLESNNPNFRNYIIKGFLCEIKNYIKDTDTENYAKELKEDNDQNKVENYTYVLINIRNKFSHNQLPDLETFNYCQKIKEINNDQFIAKYYLDIFRTITEILKGNL

SEQ ID NO: 1884 - protein, 1127 aa, Artificial; identical to SEQ ID NO: 1881
  Synthetic

SEQ ID NO: 1885 - protein, 1123 aa, Artificial
  Synthetic
MEDDKKTTDSISYELKDKHFWAAFLNLARHNVYITVNHINKILEEGEINRDGYENTLEKSWNEIKDINKKDRLSKLIIKHFPFLEAATYRRNPTDTTKQKEEKQAEAQSLESLRKSFFVFIYKLRDLRNHYSHYKHSKSLERPKFEEGLQKKMYNIFNASIQLVKEDYKHNTDIKTEEDFKHLDRKGQFKYSFADNEGNITESGLLFFVSLFLEKKDAIWMQQKLRGFKDNRENKKKMTNEVFCRSRMLLPKLRLQSTQTQDWILLDMLNELIRCPKSLYERLREEDREKFRVPIEIADEDYDAEQEPFKNTLVRHQDRFPYFALRYFDYNEIFQNLRFQIDLGTYHFSIYKKQIGDYKESHHLTHKLYGFERIQEFAKQNRPDEWRKFVKTFNSFETSKEPYIPETTPHYHLENQKIGIRFRNDNDKIWPSLKTNSEKNEKSKYKLDKSFQAEAFLSVHELLPMMFYYLLLKTENTDNDNEIETKKKENKNDKQEKHKIEEIIENKITEIYALYDTFANGEIKSIDELEEYCKGKDIEIGHLPKQMITILKSEHKDMATEAKRKQEEMLADVQKSLESLDNQINEEVENVERKNSSLKSGEIASWLVNDMMRFQPVQKDNEGNPLNNSKANSTEYQMLQRSLALYNKEEKPTRYFKQVNLIESSNPHPFLNNTEWKECNNILSFYRSYLTKKIEFLNELKPEDWKKNQYFLKLKEPKTNRETLVQGWKNGFNLPRGIFTEPIRKWFMEHWKSIKVDDLKRVGLVAKVIPLFFSEKYKDSVQPFYNYLFNVGNINKPDEKNFLNCEKRREQLRKKKDEFKKMTDKEKEENPSYLEFQSWNKFERELRLVRNQDIVTWLLCMELFNKKKIKELNVEKIYLKDINTNTTKKEKNTEEKNGEEKIIKEKNNILNRIMPMRLPIKVYGRENFSKNKKKKIRRNTFFTVYIEEKGTKLLKQGNFKALERDRRLGGLFSFVKTPSKAESKSNTISKLRVEYELGEYQKARIEIIKDMLALEKTLIDKYNSLDTDNFNKMLTDWLELKGEPDKASFQNDVDLLIAVRNAFSHNQYPMRNRIAFANINPFSLSSANTSEEKGLGIANQLKNKTHKTIEKIIEIEKPIETKE

SEQ ID NO: 1886 - protein, 1085 aa, Artificial; identical to SEQ ID NO: 1453
  Synthetic

SEQ ID NO: 1887 - protein, 964 aa, Artificial
  Synthetic
  misc_feature (948)..(959): Xaa can be any naturally occurring amino acid
MKKELNREDVFTGGKTPELTIYYNIAYFRMAGLINALCGNKLERDKDALEQFMKAFINGKQKLTDMQFVKLCDYLWKGYKYDKNRSEYSLTENDKTMVLKMVAKLQDIRNFQSHIWHDNKVLVFDADLVQFIKNKHLEAIDAQRQRFSKETEVYEKENRELKKKKNKELLFDIHDGLGYITGEGRNFFLSFFLTRGEMTRFLKQRKGCKRDDTPEYKIKHLVYRHFTHRDGATRTHYGYEDNMLDQLPDKQEFLTTRHTYRLINYLNDIPEEVTNPELFPLFNTISNGILIKESVGTYIAFINKMPLLSDFEFSEVWGKDGKPYTNLVEFYHKTQPGFKFRTDLNSFHKIILNLIRDENYTGFFTTQLNLFMAHREELILVISKPLITPNDLLLIEEHYRYKLKANDFVREKLGEWKEKIEKGKWEKANEQKDKLINLLGGVIEITFYDFYWQKDEKPRNENRFMEFAIRFMADFNLLPDCEWEVEPLQIENDLIANRTATPDLKKSGSQFMNQLTDNYRLKFNDGQIAFRYQNQVFIMGHKAVKNLLIACFDGKEKMLNGFMPALLADLKKITNEHILKNHQALNTLSLLNNDSIPSYISRQWGEAEPITDMKKKAIARMDYITQQFEALIENHHYLNRADKNRQIMRCYKFFEWQYPQNSQFKFLRRNEYHRMSIYHYCLDKEQHKYDKKGHNYLYNRLIKESHNESGNIEQHLPYQIRTMLNDAKDFNDYFLRILNATHKILTDWKNQLKQGREPNNYYLSRLGFTGGLTQKVVHTRLLPFSIHPGIPVSFFYRTEMNQNPSFNLSAKVWNSESPFRVGLKESNYQYAKYLGLFNEIKTQRKIIGKMNQLIAEDALLWQIAKKYLDKCHPKFSEIINQQVNGKQPLNVKAIHDTELTIDFPVDKNLYQVVVKMKQLDDFMFIDSKPVLEKTIRYMIKNSLRDKEXXXXXXXXXXXXLQRSG

SEQ ID NO: 1888 - protein, 1003 aa, Artificial
  Synthetic
MGAIKNKHIFAAYANLAIDGLIKTLNFIAKKLDTQKQLSSWDIKHVITLIDSIFDQNPQNNLEQVVEGYLPWIKPIIEMKTPKKGERQSDKLCIEYKTIITAFASLLNDVRNYYTHYYHDPICIYPGGYDIPSSLNCIYDSAINIIKERFQAEEKEMEHLRRYTRKKGRVVLKTEDDHFYYTLANNNDLSEKGYAFFISMFLERKYSYLFLKKLSGFKRGDSLQYRLTLEVFTALSTKPPVERLRTTKDTKQDRALDILNELSKIPIELYQTLEPKYREMYNETLQPTDAEDPYGLPDRSRIRFRSRFEAFALHFLDKQADFKEIGFYTYLGNYFHNGYQKTRVDRETKDRYINFQLAGFCKNIQDISAKKLSEALNVKSIDISTDSIPDINSFEPYLVQSTPHYIVNGNNIGIKVLPEGKDTYPTIDEKGAKMPIADFWLSKYELPAMLFYTYLRNNNIHKSHCPLSVKDIIERSIHKSTKQKHPEERSELMLRRVMKAIFWTDSKLNEVERIKSQKSAFGKRQHEILKAGRIAETLVRDMLWLQPSKNNGRDKVTEPNFQAIQVSLAYFGIRRNDLTEIFTRAGLINSSNPHPFLAQIGTNYTSLIEFYIAYLKERKVYFSRIQKKILQGKLNIQCHPLRDLQREPNKPQDKEEAIFLPRGLFNEAIINCLKKSKLKQLIESPTREKSPALNVSYLIQNYFRTYFEDQSQEFYAQPRNYRLFDKLSPNKGKSKSYLSLEQRIKKMEELRPSKIPVAEANKLLEKEDRLYRKNYNEICDNESIIRLYQIQDILLFMMTKEYLPSDLYNRINKYKLENVKGILNERVSYLIDLNPLKIQGEDIKIKDYGKLFYIHHDTRISSLNKVLSKVKRNNSISSSVKIQPYENYKRECLDFEEAQIQIIPIIHSFEIAMVSMFPDLKKATPGNYYDFNELITEYEKRTKQKIDSSFLIKTRNMFLHDKYEAECIKEISDDFVYAKKIIAEFKMKIENIKLEDLSNDSSA

SEQ ID NO: 1889 - protein, 1146 aa, Artificial
  Synthetic
MESIIGLGLSFNPYKTADKHYFGSFLNLADNNLKAVFAEFKERISDKSKDEDISNLIEKHFIDNMSIVDYEKNISILNGYLPIIDFLDDELENNLNTRVKNFKKSFIILAEALETLRNYYTHFYHDPITFGDNKEPLLELLDEVLLKTILDVKKKYLKTDKTKEILKDSLREEMDLLVIRKTDELREKKKTNPKFKFSTDPTQIRNSIFNDAFQGLLYEDKENNGKTQVSYRAKTKLNPKDIHKQEERDFEIPLSTSGIVFLMSLFLSKKEIEDFKSNIKGFKGKVVKDENHNSLKYMATHRVYSILAFKGLKYRIKTDTFSKVTLMMQMIDELSKVPDCVYQNLSETKQKDFIEDWNEYLKDNEENTENLENSRVVHPLIRKRYEDKFNYFAIRFLDEFANFKTLKFQVFMGYYIHDQRTKTIGTTNITTERTVKEKINVFGKLSKMDNLKKHFFSQLSDEENTDWEFFPNPSYNFLTQADNSPANNIPIYLELKNQQIIKEKDDIKAEVNNSQNRNPNKPSKRDLLNKISNTNEDFYQGDPTAILSLNEIPALLHLFLVQPDNKTGQQIENIIRIKIEKQFNSIKNPSKDDKGVPKSLFADTNVRVNAIKLKKDLGEELDMLNKKQIVFKENQKASSNYDELLKKHQFTPKNKRPALRKYVFYNSEKGEEATWLANDIKRFMPKGFKTKWKGYQHSELQRKLAFYDRHTKQDIKELLSGCEFDHFLLDINACFKEDDFEDFFSKYLKNRIETLNIILKQLHDFKNEPTPLKGVFKNCLKFLKQKNYVTENPEIIKKRILAKPAFLPRGIFDERPTMKKGKNPLIDRDEFAKWFVEYLENKDYQKFYNSEEYRIRDADFKKNAVIKKQKLKDFYTLQMVNYLLKEVFGKDEMNLQLSELFQTRQERLKLQGIAKKQMNKETGDSSENTRNQTYIWNKDVPVSFFNGKVTIDKVKLKNIGKYKRYERDERVKTFIGYEVDEKWMMYLPHNWKDRYSVKPINLIDLQIQEYEEIRSHELLKEIQNLEQYIYDHTTDKNTLLQDGNPNFKMYVLNGLLTGIKQVNIADFIVLKQNTNFDKIDFTGIASCSELEKKTIILIAIRNKFSHNQLPNKTIYDLANEFLKKEKRETYANYYLKVLKKMISDLA

SEQ ID NO: 1890 - protein, 1003 aa, Artificial; identical to SEQ ID NO: 1768
  Synthetic

SEQ ID NO: 1891 - protein, 1085 aa, Artificial; identical to SEQ ID NO: 1453
  Synthetic

SEQ ID NO: 1892 - protein, 1171 aa, Artificial; identical to SEQ ID NO: 1349
  Synthetic

SEQ ID NO: 1893 - protein, 1132 aa, Artificial
  Synthetic
MEDDKKTKESTNMLDNKHFWAAFLNLARHNVYITVNHINKVLELKNKKDQDIIIDNDQDILAIKTHWEKVNGDLNKTERLRELMTKHFPFLETAIYTKNKEDKEEVKQEKQAKAQSFDSLKHCLFLFLEKLQEARNYYSHYKYSESTKEPMLEKELLKKMYNIFDDNIQLVIKDYQHNKDINPDEDFKHLDRTEEEFNYYFTRNKKGNITASGLLFFVSLFLEKKDAIWMQQKLRGFKDNRESKKKMTHEVFCRSRMLLPKLRLESTQTQDWILLDMLNELIRCPKSLYERLQGDDREKFRVPIEIADEDYDAEQEPFKNTLVRHQDRFPYFALRYFDYNEIFTNLRFQIDLGTYHFSIYKKLIGGQKEDRHLTHKLYGFERIQEFNKQNRPDEWKALVKDLDTYETSNERYISETTPHYHLENQKIGIRFRNGNNDIWPSLETNGENNEKRKYKLDKQYQAEAFLSVHELLPMMFYYLLLKKEEPNNDKKNASIVEGFIKREIRDIYKLYDAFANGEINNIDDLKKYCELKGIPKRNLPKQMIAILKNKPKDMVKKAKHKQKKMVKAAERKQRKMVKETEKLLAALEKQTQEEIEDGGRNIRLLKSGEIARWLVNDMMRFQPVQKDNEGNPLNNSKANSTEYQMLQRSLALYNKEEKPTRYFRQVNLIESGNPHPFLNNTGWKECNNILSFYRSYLTKKIEFLNELKPEDWEKNQYFLKLKEPKTNRKTLVQGWKNGFNLPRGIFTEPIREWFKRHQNDSEEYKKVEALDRVGLVAKVIPLFFKEEDSKDKEEYLKKDAQKEINNCVQPFYSFPYNVGNIHKPKEEDFLHREERIEQWGKKKYNFKGYKAKVKSKKLTDKEKEEYRSYLEFQSWNKFERELRLVRNQDIVTWLLCTELIDKLKVEGLNVEELQKLGLKDIDTDTAKQEKNNILNRIMPMQLPVTVYEIDDSHNIVKDRPLHTVYIEETKTKLLKQGNFKALVKDRRLNGLFSFVDTSSEAELKSNPISKSLVEYELGEYQNARIEIIEDMLALEGTLIEKDKNLPTDNFSDMLKGWLKGKNDADKEESEKAIDFLVAVRNAFSHNQYPMYNSEVFEGMKLLNPSSAEFKDKELGIANQLKKKVKEAIEKIN

SEQ ID NO: 1894 - protein, 1162 aa, Artificial
  Synthetic
MEKTLISSGIYYDHTKLQDKYFFGGFFNLAQNNIDNVIKAFIIKFFPERKDQNINTAQFLDICFKDNDADSDFLKKNKFLKMHFPVIGFLISDNDKIGFKRKFSLLLKAISELRNFYTHYYHKPIEFSSELFEILDAIFVKTTNEIKKLKKKDDKTQQLLNKNLSEEYKIRYQQQIQRLKELKAQGKRIQLNDETAIRNGVFNAAFNHLVYRDGENIKPSRFYQSFYSEAETAENKIPFSQSSILFLLSMFLERKEMEDLKSRVKGFKAKIIKQGEEQISGLKFMATHWVFSYLCFKGIQQKLSTEFHEETLLIQIIDELSKVPDEVYSAFDLETKERFVEDINEYMKEGNADLSLEDSKVIHPVIRKRYENKFNYFAIRFLDEYLSSTSLKFQVHVGNYVHDRRIKDINGTNFQTERIVKDRIKVFGRLSKISNLKADYIKEQLELPNDSNGWEIFPNPSYAFIDNNIPMHILADETTKKGIDLFKDKRRKEQPEELQKRKGKLSKYNIVSMISKEAKGVDRLRIDEPVALLSLNEIPALLYQILEKGATPKDIELIIKNKLTERFEKIKNYDPETPAPASQISKRLRNNTTAKGQETLNAEKLSLLIEREIEDTETKLSSIKEKRLKAKMEQRRNSPKTSIFSNSDLGRIAAWLADDIKRFMPTEQRKNWKGYQHSQLQQSLAYFEKRPQEAFLLLKEGWDTSDGSSCWNNWVINSFSETKDFEKFYENYLRKRAIYFSELAENIKQHTHNTKFLRKFIKQQMPADLFPKKHYILKDLETEKNKVLSKPLVFSRGLFDSNPTFIKGVKVTENPELFAEWYSYGYKTEHSFQHFYGWERDYNELLDSELYKDNNFAKNSIHYSRESQLDLIKLKQDLKIKKVKIQDLFLKRIAEKLFENVFHYPTTLSLDEFYMTQEERAKKERIALAQSLREEGDNSPNIIKDNFIWSKTTAFRSKQIYEPTIKLKDLGKFNRFLLDHKVLMLLSYDPNKIWNKEQLERELSIGENSYEVIRRERLFKEIQNLELQTLSNWSWDGVNHPREFEIEDQKNAWHPNFKMYLVNGILRKNSNFYKEDEDFWLESLKENDFKTLPSEILETKSEMVRLLFLVILIRNQFAHNQLPAVQFYNFIRKNYPEIQNNTVAELYLDLVKLAVQKLKENS

SEQ ID NO: 1895 - protein, 1145 aa, Artificial; identical to SEQ ID NO: 1631
  Synthetic

SEQ ID NO: 1896 - protein, 1003 aa, Artificial; identical to SEQ ID NO: 1450
  Synthetic

SEQ ID NO: 1897 - protein, 1119 aa, Artificial
  Synthetic
MEDDKKTTDSIRYELKDKHFWAAFLNLARHNVYITVNHINKILEEGEINRDGYEKTLENSWNEIKDINKKDRLSKLIIKHFPFLEATTYRQNPTDTTKQKEEKQAEAQSLENLKESFFVFIYKLRDLRNHYSHYKHSKSLERPKFEEDLQKKMYNIFNASIRLVKEDYQYNKNINPKKDFKHLDRKRKGKFYYSFADNEGNITESGLLFFVSLFLEKKDAIWVQKKLEGFKCSNKSYQKMTNEVFCRSRMLLPKLRLESTQTQDWILLDMLNELIRCPKSLYERLQGEDREKFRVPLDPIDEDYDVEQEPFKNTLVRHQDRFPYFALRYFDYNEIFTNLRFQIDLGTYHFSIYKKLIGGQKEDRHLTHKLYGFERIQEFDKQNRPDEWKAIVKDSDTFKKKEEKEEKPYISETTPHYHLENKKIGIAFKNHNIWPSTQTELTNNKRKKYNLGTSIKAEAFLSVHELLPMMFYYLLLKTENTKNDNKVEGKKETKKQEKHKIEAIIESKIKDMYALYDAFANGEINSEKELEEYLKGKDIEIVHLPKQMIAILKNEHKDMAEKAEAKQEKMKLATENRLKTLDKQLKGKIQNGKRYNSAPKSGEIASWLVNDMMRFQPVQRDENGEPLNNSKANSTEYQLLQRTLAFFGSEHERLAPYFKQTKLIESSNPHPFLNDTEWEKCSNILSFYRSYLKAKKNFLESLKPEDWEKNQYFLMLKEPKTNRKTLVQGWKNGFNLPRGIFTKPIRKWFMEHWKNIKVDDSKRVGLVAKVIPLFFSEKYKDSVQPFYNYPFNVGDVNKPKEEDFLHREERIELWDKKKDKFKGYKAKKKFKEMTDKEKEEHRSYLEFQSWNKFERELRLVRNQDIVSWLLCTELIDKLKIDELNIKELKKLRLKDINTDTAKKEKNNILNRVMPMELPVTVYEVNQGGYIIKNKPLHTIYIKEAETKLLKQGNFKALVKDRRLNGLFSFVKTPSEAESKSNPISKSRVESELGKYQNARLDIIEDMLALEKKLIDKYNSLDTDNFHNMLTGWLELKGEANKARFQNEVDLLIAVRNAFSHNQYPMYNENLFGNIERFSLSSSNIIESKGLDIAAKLKEEVSRAAKKIQNEEDDKKEKET

SEQ ID NO: 1898 - protein, 1003 aa, Artificial; identical to SEQ ID NO: 1450
  Synthetic

SEQ ID NO: 1899 - protein, 1206 aa, Artificial
  Synthetic
MSSKNESYNKQKTFNHYKQEDKYFFGGFLNNAEENIITSFKEIAKRLNSKEKNKPIEILQEILSENIIDTEWDRNIKVIAEYFPFVKLLETITERQYKKHKNKLFFKERNPRQNFKNLFLYNCIILFNSPLQLRDFYTHFYHRNFITISFPDFRRTTIDNNSITDYIKNEAIQHSAQSDGVNFIAHSIFELLDELKLETVSQVNNQRIKPNEKHSFLKKNYQNDFTDLTEEEISKKFKKVFNQFWTFNDYKGRMVLKDFHKSHFVEKVEEGSMEQKPKKDFFHQKISRSGFLFLLSLFVDRKNAEFILDNSTYFKASFDLQKLATRWVYTYNCYRGLKNTVNTTFPKETLLSKMVDYLSKVPDEVYQLLSTEQQEMFLEDMNEYMRDNEENNDSSEASKVVHPVIRKRYSNEFNYLALSFIDQYIQLPNLRFAINLGTYVHNKKEKIVGKGKTSSTSNRVIKEDIRIYARLHEAIDFKNNFFLKENFSEDNKDGYWEEFPNPHYAIKDNNIGIYFINKDVIQTNLEERSNGKKKKASIIEILTETESDTIKYGKPHALLSCYELIPLLFDYFQKVKNSREKKLNEKELEAIPIQIENKILSAINSFTKSFENYSEGKNILKSYPKKLSKTSNQTSFLEVQDENGNPAKKIFQDIDKEIQKSQDKLDILKKNENEFQNNERKATFSKKEIGEEATWLANDILRFMPSSFKKDWKGYEHSHLQYLLAFYEVRKTEIFQLLNQKWPLYEDNFMGESLRTFLDNRKTFESFYKGYLDKRKEIFENLKNNLSLNNDNLFRVFDERKYTTKCLECYKKLILEQPVSFSRGIFEDKKAAIKNEWSLIPKDPATEYQSFYNLINIYTNEAIDKEEKKEKYKNLRAINKVKIQDYYLKLMVDTLYQDLFNLPLDKSLSDFYVSKAEREKIKADAKAYQKRNDSSLWNKVIHLSLQNNRITANPKLKDIGKYKRALQDEKIATLLTYDDRTWSYALQKPEKENENDYKELHYTALNMELQEYEKVRSKKLLKQVQQLEKQILDKFYDFSNNATHPEDLEIEDKKGKRHPNFKLYITKALLKNESEIINLENIDIEILIKYYDYNTEKLKEKIKNMDEDEKAKIVNTKENYNKITNVLIKKALVLIIIRNKMAHNQYPPKFIYDLATSFQNDKRNKDWEKFVHQKESEYFATYFNRVFETITTELWENKKEKAKEIV

SEQ ID NO: 1900 - protein, 1367 aa, Artificial
  Synthetic
MGKNKKKYQAKGQDQESKLPKKNVKKPMALVVNENNKYVLGCYFSLGLNNFYKTILLVFAKTGIKVMSDNGNILYGEEKIGQVLCTLYKCTLSSSPKFEPFEQAWSKNFKLNANQQATLRRLLFHHFPVLGPIMADEEAYKVIKTKKSNVTDTYSMTLGVTLPECLKVICNIAQGLVDCRNTDVHYAPYNSIDDLSKQYLVQEDIVRYLNKALVASRRIDKKRNSIETEKMEFLTGYANVDTLNRYLNKWHFYPKYDQLTKRDSDGNILYVQETDKRGNPLFDRQGNPVYKQERDRYGIIVKNADGTPKYEEQKIMVERNDFFYRIGGETTIEKMGKSYSTLTGFGLAYFCTLFLSKPQAKQMLTDIKLFERSPYPQELNDIIRDMLSIYRLRSPKGRKLEGNDNKVTLALDILNELRKCPKELYDVLSPEGQAFFEDEVKRPNERTPEVVKRFRSMDRFPFLCLKYIDETGVFDNIRFQVQLGKLRFKFYPKTCINGEEEIRSLQKEINGYGKLQEIELKRKSEYGDLLQASAEKSVKMEHEDIYLDLRQFEKDRADSRPYITDNKAFYNIHNNRIGLYWNELEYVDKQTNKKVVKLQIGDYIPDLSCVNNGKAPVVMPAPMAMLSVYELPALIFFQYLCNQQKGMESPTTEEIITQKYNSLKRFFQDVSTGTLQPFEKKKLLAEALSSQYELEVREIPDKLQDYLTKKNINIDSKKQKLTQDILVTRLRKAIRRRDGYKDDRKKIGDKENRYGKDSYVDVRHGSLARYLSESFIEWQPTMEKGRDKLTGMNFSKLQSELAIFDSVEKYPSLKDLLGKANLLSGNIAHPFLNNIMGKTIHNIEELYLLYLNEEIKYLRKLFAIDIKVKDGDIKFDKLKLNAPDYTKLPFIRGEKKWEQRNDEYYKQLAKRYLEIEGKRAPINLPNGIFTDYIIKILRNDYASNAQLQECLKDEQLVNNVSYLIRAFFQYQLKDNSQPFYFSSKKISEDEEVPTRFVHFYDLFNILNNEKKRNAYVKVPMTVSQIIKRFTDFALDEDNDRIELIGSNRKPMRDGEGNIRYKKKIQTEIEERVAAMTYKEKGNHKSLDDAREAMLRKLKHAVNDVKDNERAIRRYKAQDMILFLMVDKLISDSVATGKVDNFQNFKLENVCRDDFLSQTVNFEFPFAVGNDTVSICQEAMSLKNYGEFYRLLSDDRLPSLLNRLVTAKKKEGENVTVDYNSLMGELASYDIHRSRIFSAVHKLEKYVVSLKEFESFLNNPDDKRFYINDDKKRDPKRNNFRELLYLLEESDEDILNSDAKELLISIRNAFSHNHYGIDFEKIALPEQMAKSTLMHEVTDGDATENLTTIATLIAKRMTQLQKLVCEGL

SEQ ID NO: 1901 - protein, 1003 aa, Artificial; identical to SEQ ID NO: 1450
  Synthetic

SEQ ID NO: 1902 - protein, 1003 aa, Artificial; identical to SEQ ID NO: 1450
  Synthetic

SEQ ID NO: 1903 - protein, 1003 aa, Artificial; identical to SEQ ID NO: 1578
  Synthetic

SEQ ID NO: 1904 - protein, 1003 aa, Artificial; identical to SEQ ID NO: 1578
  Synthetic

SEQ ID NO: 1905 - protein, 1003 aa, Artificial; identical to SEQ ID NO: 1450
  Synthetic

SEQ ID NO: 1906 - protein, 1179 aa, Artificial
  Synthetic
MSSKNESYNKQKTFNHYKQEDKYFFGGFLNNADDNLRQVGKEFKTRINFNHNNNELASVFKDYFNKEKSVAKREHALNLLSNYFPVLERIQKHTNHNFEQTREIFELLLDTIKKLRDYYTHHYHKPITINPKIYDFLDDTLLDVLITIKKKKVKNDTSRELLKEKLRPELTQLKNQKREELIKKGKKLLEENLENAVFNHCLIPFLEENKTDDKQNKTVSLRKYRKSKPNEETSITLTQSGLVFLMSFFLHRKEFQVFTSGLERFKAKVNTIKEEEISLNKNNIVYMITHWSYSYYNFKGLKHRIKTDQGVSTLEQNNTTHSLTNTNTKEALLTQIVDYLSKVPNEIYETLSEKQQKEFEEDINEYMRENPENEDSTFSSIVSHKVIRKRYENKFNYFAMRFLDEYAELPTLRFMVNFGDYIKDRQKKILESIQFDSERIIKKEIHLFEKLSLVTEYKKNVYLKETSNIDLSRFPLFPNPSYVMANNNIPFYIDSRSNNLDEYLNQKKKTQSQNRKRNLTFEKYNKEQSKDAIIAMLQKEIGVKDLQQRSTIGLLSCNELPSMLYEVIVKDIKGAELENKIAQKIREQYQSIRDFTLDSPQKDNIPTTLIKTINTDSSVTFENQPIDIPRLKNAIQKELALTQEKLLNVKEHEIEVDNYNRNKNTYKFKNQPKNKVDDKKLQRKYVFYRNEIRQEANWLASDLIHFMKNKSLWKGYMHNELQSFLAFFEDKKNDCIALLETVFNLKEDCILTKGLKNLFLKHGNFIDFYKEYLKLKEDFLSTESTFLENGFIGLPPKILKKELSKRLNYIFIVFQKRQFIIKELEEKKNNLYADAINLSRGIFDEKPTMIPFKKPNPDEFASWFVASYQYNNYQSFYELTPDIVERDKKKKYKNLRAINKVKIQDYYLKLMVDTLYQDLFNQPLDKSLSDFYVSKAEREKIKADAKAYQKRNDSSLWNKVIHLSLQNNRITANPKLKDIGKYKRALQDEKIATLLTYDARTWTYALQKPEKENENDYKELHYTALNMELQEYEKVRSKELLKQVQELEKKILEEYTDFLSTQIHPADFEREGNPNFKKYLAHSILENEDDLDKLPEKAEAMRELDETITNPIIKKAIVLIIIRNKMAHNQYPPKFIYDLANRFVPKKEEEYFATYFNRVFETITKELWENKEKKDKTQV

SEQ ID NO: 1907 - protein, 1003 aa, Artificial; identical to SEQ ID NO: 1450
  Synthetic

SEQ ID NO: 1908 - protein, 1003 aa, Artificial; identical to SEQ ID NO: 1494
  Synthetic

SEQ ID NO: 1909 - protein, 1003 aa, Artificial; identical to SEQ ID NO: 1450
  Synthetic

SEQ ID NO: 1910 - protein, 1127 aa, Artificial; identical to SEQ ID NO: 1820
  Synthetic

SEQ ID NO: 1911 - protein, 1003 aa, Artificial; identical to SEQ ID NO: 1684
  Synthetic

SEQ ID NO: 1912 - protein, 1157 aa, Artificial
  Synthetic
MENIETKKDNKKTLNVNPEFFGTYLNLARHNVFLINNELANRFEINSILTTDENIGSSFMTNKITFDKTNSNLVYTNLVRYMPVAKIFSSDLLPKKIQEFATFQGVDILKLTQFFKLSFSELNSFRNDYSHYYSIETKTLKKTQISADFAPLFKESFAFAIEFAKSRFETIFDKKDFELVEKMELIDSNNTISDRGVVFLACMFLDKENAFQFMNKVVGFKATNDNIFLATREVFSVFCVTLPHDKFLSDNPKQALQLDMLNYLNRCPKELFNALSPIGKKQFQPNLSAIASLNVEDNSINESIDFENYQNYIENISTKKRSSDRFPYFALKHLSENNKFDFDFQINLGKVLKKSYKKVVLGIEPEENNRNIVENILVFNNISIFENKNDDEILEIKKSIINEPTFIKRFSNIDVSDFEQFTPHFNTENNKIGLLPHDNKMFANLLYRPIVPTAFLSTHELPKVVLLEHLEKGSSSQIIKSFIDANTNVIFNKSLVEEIKEKLAFERTLYKVFFDEKLKVLDWKADLETQLNSLNDSIKKLKETQTVTFDEKRNKDNALKNKQFERKSLNYALYVKRVNERKNILNNVLEKYNLDASQIPSAIIDYWLKIDSVKEETTIKNKIRAEKSECRDRLKDIKNGKSPKIGEMATFLARDIVRLVIDKDVKKKITSFYYDKLQECLALYEDKDKKQLFIDLCNKELQLFDNQKGHPFLSNLNLQDIHRTKELYQKYIEEKGEKTVPEKYYNRKSDNWEFKEIEANWMYKTFYNKVKNIETGKDETQITIPINKPMPIVYSKLLDKTNDFDKWFTNVSSGCITPENPKPNPKPIDLPTNLFDDKLVKLLKNKIGIADNDTTVYNFSKLLEMWLADAQPFYDNDREYIVFKNKPFEAIVPIKLGTKNSFKDYYREFVETTFRLKKQESKQLQKSQVEAVFRNAISENEKIIRHYKTKDRIMLLMLKETLTADIDIKLSEIYPKSLTNPLDIQIPIKQPIGNKFITDTRKRKEYSIFKRYLSDRRLPSLLTYFDTVEIPFETLKLELNDYQTSRISIAEAVFKLEKSIINVVSQQDLQELESHATEKISNIQFKHYCNWLIKNEKINPQQQLFLENVRNKFLHNQFPDREIVEQHLQLEQNSTFSKQIANHYLSIIENLITNKFN

SEQ ID NO: 1913 - protein, 1146 aa, Artificial; identical to SEQ ID NO: 1461
  Synthetic

SEQ ID NO: 1914 - protein, 1206 aa, Artificial; identical to SEQ ID NO: 1899
  Synthetic

SEQ ID NO: 1915 - protein, 1107 aa, Artificial; identical to SEQ ID NO: 1736
  Synthetic

SEQ ID NO: 1916 - protein, 1003 aa, Artificial; identical to SEQ ID NO: 1578
  Synthetic

SEQ ID NO: 1917 - protein, 1127 aa, Artificial; identical to SEQ ID NO: 1730
  Synthetic

SEQ ID NO: 1918 - protein, 1003 aa, Artificial; identical to SEQ ID NO: 1632
  Synthetic

SEQ ID NO: 1919 - protein, 1003 aa, Artificial; identical to SEQ ID NO: 1684
  Synthetic

SEQ ID NO: 1920 - protein, 1003 aa, Artificial; identical to SEQ ID NO: 1510
  Synthetic

SEQ ID NO: 1921 - protein, 1003 aa, Artificial; identical to SEQ ID NO: 1510
  Synthetic

SEQ ID NO: 1922 - protein, 1003 aa, Artificial
  Synthetic
MGAIENKHIFAAYANLAIDGLIKTLNFIAKKLDTQKQLSSWDIKHVITLIDSIFDQNPQNNLEQVVEGYLPWIKPIIEMKTPKKGERQSDKLCIEYKTIITAFASLLNDVRNYYTHYYHDPICIYPGGYDIPSSLNCIYDSAINIIKERFQAEEKEMEHLRRYTRKKGRVVLKTEDDHFYYTLANNNDLSEKGYAFFISMFHERKYSYLFLKKLSRFKRGDSLQYRLTLEVFTALSTKPPVERLRTTKDTKQDRALDILNELSKIPIELYQTLEPKYREMYNETLQPTDAEDPYGLPDRSRIRFRSRFETFALHFLDKQADFKEIGFYTYLGNYFHNGYQKTRVDRETKDRYINFQLAGFCKNIQDISAKKLSEALNVKSIDISTDSIPDINSFEPYLVQSMPHYIVNGNNIGIKVLPEGKDTYPTIDEKGAKMPIADFWLSKYELPAMLFYTYLRNNNIHKSHCPLSVKDIIERSIHKSTKQKHPEERSELMLRRVMKAIFWTDSKLNEVERIKSQKSAFGKRQHEILKAGRIAETLVRDMLWLQPSKNNGRDKVTEPNFQAIQVSLAYFGIRRNDLTEIFTRAGLINSSNPHPFLAQIGTNYTSLIEFYIAYLKERKVYFSRIQKKILQGKLNIQCHPLRDLQREPNKPQDKEEAIFLPRGLFNEAIINCLKKSKLKQLIESPTREKSPALNVSYLIQNYFRTYFEDQSQEFYAQPRNYRLFDKLSPNKGKSKSYLSLEQRIKKMEELRPSKIPVAEANKLLEKEDRLYRKNYNEICDNESIIRLYQIQDILLFMMTKEYLPSDLYNRINKYKLENVKGILNERVSYLIDLNPLKIQGEDIKIKDYGKLFYIHHDTRINSLNKVLSKVKRNNSISSSVKIQPYENYKRECLDFEEAQIQIIPIIHSFEIAMVSMFPDLKKATPGNYYDFNELITEYEKRTKQKIDSSFLIKTRNMFLHDKYEAECIKEISDDFVYAKKIIAEFKMKIENIKLEDLSNDSSA

SEQ ID NO: 1923 - protein, 1003 aa, Artificial; identical to SEQ ID NO: 1684
  Synthetic

SEQ ID NO: 1924 - protein, 1127 aa, Artificial
  Synthetic
LQKQDKLFVDRKKNAIFAFPKYITIMENKEKPEPIYYELTDKHFWAAFLNLARHNVYTTINHINRRLEIAELKDDGYMMGIKGSWNEQAKKLDKKVRLRDLIMKHFPFLEAAAYEMTNSKSPNNKEQREKEQSEALSLNNLKNVLFIFLEKLQVLRNYYSHYKYSEESPKPIFETSLLKNMYKIFDTNVRLVKRDYMHHENVDMQRDFSHLNRKKQEGQTRKIIANPNFRYHFADEKGDMTIAGLLFFISLFLDKKDAIWMQKKLKGFKDGRNLREQMTNEVFCRSRISLPKLKLENVQTKDWMQLDMLNELVRCPKSLYERLREKDRESFKVPFDIFSDDYDAEEEPFKNTLVRHQDRFPYFVLRYFDLNEIFEQLRFQIDLGTYHFSIYNKRIGDEDEVRHLTHHLYGFARIQDFAPQNQPEEWRKLVKDLDHFETSQKPYISKTAPHYHLENEKIGIKFCSTHNNLFPSLKTEKTCNGRSKFNLGTQFTAEAFLSVHELLPMMFYYLLLTKDHPKGKGINKIEKIIRTEISNIYDIYDAFANGEINSIADLTCRLQKTNILQGHLPKQMISILEGRQKDMEKEAERKIGEMIDDTQRRLDLLCKQTNQKIRIGKRNAGLLKSGKIADWLVNDMMRFQPVQKDQNNIPINNSKANSTEYRMLQRALALFGSENFRLKAYFNQMNLVGNDNPHPFLAETQWEHQTNILSFYRNYLEARKKYLKGLKPQNWKQYQHFLILKVQKTNRNTLVTGWKNSFNLPRGIFTQPIREWFEKHNNSKRIYDQILSFDRVGFVAKAIPLYFAEEYKDNVQPFYDYPFNIGNKLKPQKGQFLDKKERVELWQKNKELFKNYPSEKKKTDLAYLDFLSWKKFERELRLIKNQDIVTWLMFKELFKTTTVEGLKIGEIHLRDIDTNTANEESNNILNRIMPMKLPVKTYETDNKGNILKERPLATFYIEETETKVLKQGNFKVLAKDRRLNGLLSFAETTDIDLEKNPITKLSVDHELIKYQTTRISIFEMTLGLEKKLIDKYSTLPTDSFRNMLERWLQCKANRPELKNYVNSLIAVRNAFSHNQYPMYDATLFAEVKKFTLFPSVDTKKIELNIAPQLLEIVGKAIKEIEKSENKN

SEQ ID NO: 1925 - protein, 1090 aa, Artificial; identical to SEQ ID NO: 1662
  Synthetic

SEQ ID NO: 1926 - protein, 1214 aa, Artificial; identical to SEQ ID NO: 1861
  Synthetic

SEQ ID NO: 1927 - protein, 1003 aa, Artificial; identical to SEQ ID NO: 1510
  Synthetic

SEQ ID NO: 1928 - protein, 1003 aa, Artificial; identical to SEQ ID NO: 1723
  Synthetic

SEQ ID NO: 1929 - protein, 1003 aa, Artificial; identical to SEQ ID NO: 1450
  Synthetic

SEQ ID NO: 1930 - protein, 1146 aa, Artificial; identical to SEQ ID NO: 1461
  Synthetic

SEQ ID NO: 1931 - protein, 1098 aa, Artificial
  Synthetic
METTTVAEFSKTRTMESDPQYFGSYLNMARHNIFNISNYIADYFNLSRLKDDDLIQNSFLCNPDIQKINWPYVFGRTKHLLSILKVFDTDTLPKDEVLSSSQAGKQFLLMNETLKLVFRELQQFRNDYSHYYSAEKGSDKKIIIDEQLVQFLNLNFKRAISYTRERFKDVFSEDDFKYAINLKLVKEDNKITVHGMVFLIAMFLEREEAFSFISRISGLKGTYSKSFLATREVLMAFCVKLPHDKFKSNDEKQATSLDLINELNRCPLDLWNNLNQSDKMKFIPDLEVDENGDHLAEEYEIYAETITKQIRYKNRFTEFALKYIDYAGVLPKYKMLIDVGKISLGSYTKIMNNEPYEREIQDEVIAFDKTVEYTKKDEVLKRVDAEKRTKGFTRFNPHYSSAANKIGLLYKSDFSQVMPAQDRKLGIRLNHPAARAFLSANELTKVILLDYLIPREPERIINRFIQKNKQILDLNFINQIKEQIGFNEFARRTSKKNEHAYTEGALNHLTFRKNQLQAILSKYNLTIAQIPSKIIDYWLNIKPVDEYRKAAERITRIRLETKTRYKEHLKARIANKPALKQGIMASYLARDIIHMIISKEKKKKITSFYYNKLQESLALYGNPGMKELFLSIVKDELKLKAADGHPFLFKLDFDKINLTGDFYENYLWEKAVREEPFTTKSGKTVMKNTSWITRTFYQEEWSEKARKKITTIQLPENQDLVPVNLRINVKSTLEEWLENKRDKPVDLPTDLFDEAILQNLSSLTESSITSTGKKLNWNELFKIWWNSNHQDDVQEFYYYDREYQIYDTKVCFTPGSADKYSTYYQDVFDRLFDQKTALRKIEKRRDPKLANVDRKQLERVFKKSIAGNEKELRIIREQDMVCALMLEKILNIPIKLSSVNSWLSGISKIEQTITVELRNTNSDNALAGKDTITKKIFTEAKGKDYTILHRFLHDKRLPELFEYFTEDEINLERLREEIKSYNKHKQEIQDAAFSLEKCLIELHYDEITDLFIDSEGNKKKSSIQHKPYLQWLLNKKLISVKEYDFLLMVRNCFFHNQFPQRETMELLIDKWCYKSFAATIAEVYTTIINQLIEHIIFK

SEQ ID NO: 1932 - protein, 1003 aa, Artificial; identical to SEQ ID NO: 1450
  Synthetic

SEQ ID NO: 1933 - protein, 1277 aa, Artificial
  Synthetic
MSYQNRDNLKKSKAPFSIDTVGKAPIGAYFNLARYNFYRTIVDIYNKVGFAVNFDEEKFAKALFALYRVTIGKKNEMPQNQKDLVNGIKLTTDKQEKLKRLLYKHFPFIDPILAGEVNRPKSKKSNVANDEEQMAGVTLSQVLKVVANMALTVHDCRNYYTHYNPYNSEEDQMYQYWRQGLVAHYLERLFTAARRISKNRERLTSVEMEFLTSLNHYFKQRNEKTGKFDIPVERDDYYFKITGKRQVVDAAGHDVEVEDEEGNPITFNKALSDFGVLYLCILFLNKTYARKLIDEMHLLDGKRVQIGKAIRNKETGRWETFDIYEGCPYCTDKEKKIISEILSVYRIRVPHGKRIDCNDRGMQLAMDILNELRKCPMPLYDLLTPEGRRTFEDEVQARSGQVDDKGDPIYVPTGDVVKRLRHDDRFAHLVLKYIDEKQLFSRIRFQVRLGAYRFKFYDKTCVDGETRLRRLQKDVNGYGRLQEIEALKQEEYKDMLQQTQDVDTVLEDRETTLNLEQFVEDDINSQPYLTDSRAVYNIHNNRIGMLWNDERNKGAMKPNNGNPYFLPNFADGKQGVVQPGPLASLSIYDFPAMVLYDILRRPLEKNPDFPTTEQVIIDKHDALRRFFNDVYSEDIFDRDTAGRVVLFANEQALSQRIGERYGLQLNEIPDKLKDQLVKTRKPQESGHQRMLRLVRADLSDRISQVERKLERYRDTLRAVGSADNKYGKKQYVDVRHGTLARRLAGSLARWMPRGADGKTRLTGLNFNVLTSTLATFGSGTSYQEFYEMLEQAGLLSGDHAHPFLRRVLERGVRNIEDLYEKYMVVEIEHLNNVLKNNNLQSLPFVHPQRARWSDRNYKQLAHTYLHLTDDRDATMLLPDGLFAPWLKRIMQFLFADNQDVMDALSNDQACNSASYLINAYMVYVQEDEAQPFYYGSEQQPDAIFNRAYDLFTILQNRRTRERSYVPAYLPEGEIMDRLKEKTTDGKRKIMADIEARASKLDKTDLAPYKKPKNGLSPRQQAREAMITKLKRCYKECQNTERTIRRYMTQDIILFQIAREILSEMINFGDPRDSSFKLFNIFEPNFLSHGVRVEFKVEVFQGKNKPPRVVTIYHDNMALKNYGEISRLVNDERTLSLLQQLKDVNQVEYTDLCGEFDFYDNRRTAVFKIVQEIEQLAYERNRLTLNDVNHPAFYVDGDSSNQAVRTNFKALLDLLSQEVTTLSADDRDVLRQVRNAFSHNSYNVALEKLGPNAQIQLPRVAKLIIDHITTIQSSIPQE

SEQ ID NO: 1934 - protein, 1277 aa, Artificial; identical to SEQ ID NO: 1933
  Synthetic

SEQ ID NO: 1935 - protein, 1277 aa, Artificial; identical to SEQ ID NO: 1933
  Synthetic

SEQ ID NO: 1936 - protein, 1003 aa, Artificial
  Synthetic
MGAIENKHIFAAYANLAIDGLIKTLNFIAKKLDTQKQLSSWDIKHVITLIDSIFDQNPQNNLEQVVEGYLPWIKPIIEMKTPKKGERQSDKLCIEYKTIITAFASLLNDVRNYYTHYYHDPICIYPGGYDIPSSLNCIYDSAINIIKERFQAEEKEMEHLRRYTRKKGRVVLKTEDDHFYYTLANNNDLSEKGYAFFISMFLERKYSYLFLKKLSGFKRGDSLQYRLTLEVFTALSTKPPVERLRTTKDTKQDRALDILNELSKIPIELYQTLEPKYREMYNETLQPTDAEDPYGLPDRSRIRFRSRFETFALHFLDKQADFKEIGFYTYLGNYFHNGYQKTRVDRETKDRYINFQLAGFCKNIQDISAKKLSEALNVKSIDISTDSIPDINSFEPYLVQSMPHYIVNGNNIGIKVLPEGKDTYPTIDEKGAKMPIADFWLSKYELPAMLFYTYLRNNNIHKSHCPLSVKDIIERSIHKSTKQKHPEERSELMLRRVMKAIFWTDSKLNEVERIKSQKSAFGKRQHEILKAGRIAEMLVRDMLWLQPSKNNGRDKVTEPNFQAIQVSLAYFGIRRNDLTEIFTRAGLINSSNPHPFLAQIGTNYTSLIEFYIAYLKERKVYFSRIQKKILQGKLNIQCHPLRDLQREPNKPQEKEEAIFLPRGLFNEAIINCLKKSKLKQLIESPTREKSPALNVSYLIQNYFRTYFEDQSQEFYAQPRNYRLFDKLSPNKGKSKSYLSLEQRIKKMEELRPSKIPVAEANKLLEKEDRLYRKNYNEICDNESIIRLYQIQDILLFMMTKEYLPSDLYNRINKYKLENVKGILNERVSYLIDLNPLKIQGEDIKIKDYGKLFYIHHDTRISSLNKVLSKVKRNNSISSSVKIQPYENYKRECLDFEEAQIQIIPIIHSFEIAMVSMFPDLKKATPGNYYDFNELITEYEKRTKQKIDSSFLIKTRNMFLHDKYEAECIKEISDDFVYVKKIIAEFKMKIENIKLEDLSNDSSA

SEQ ID NO: 1937 - protein, 1126 aa, Artificial; identical to SEQ ID NO: 1756
  Synthetic

SEQ ID NO: 1938 - protein, 1003 aa, Artificial; identical to SEQ ID NO: 1510
  Synthetic

SEQ ID NO: 1939 - protein, 1057 aa, Artificial; identical to SEQ ID NO: 1344
  Synthetic

SEQ ID NO: 1940 - protein, 1147 aa, Artificial
  Synthetic
MEETTTMGKGVAYDHTLFKDKHYFAGYLNLAVNNIENVFKTVYKNRFDIKQHNLYKILDSLDGQISEPDYIERVSFLKQYFPVLHYLDLHPDNKRFTKEEDKVKARRRYLINNLRLLIETLSKLRDFYTHYYHKPLSIEQNTFSLIDNIFLNVVIDVKRQKKKNDHTRQLLKDSLKEEMDILYQKTKASLKEKQKENTRIKLDSETINNTIFNNSFSHLIYRRKKADNDILSASCKSEYKGEPTENGINVSVDGLLFFLGIFLSRKESNDLRGRIKGFKGTVIKDLPDFPNEKNNSLKFMATHWVFTYLNIKPIKQKLNTNFSRETLLLQIVDELTKIPNEIYRNLCFKKQQEFVEDINEYIKEGDDIDTLNSSTVIHPVIRKRYENKFNYFVLRYLDEFVSFNSLRFQIYLGNYVHHIQRKKLSGTEYETERVIKEKINVFGKLSEVSNIKGDYFIQNNPDNEALGWEIYPNPSYNFTGNNIPIYFDINDQDKEKINEYKSIRNFSEKRILRKKNKKNKQEIFDLINNTLTTRVFTAEPTAILSLNELPALLYTILCENKTASEIENLLRRTYLKRLNTIKNYQPGTLPQSKITKNLNKSTNQESLDVSKLIKAMKHEISISNEKLTLIKKNQNEVKDTSHRRKYVFNSKELGIEATWLANDLKRFMPKKVRENWKGYMHSQLQNSIAYYSQKPKEALSILSSVWNFNDDNYIWNEGIKKAFNEKEFEKFYCKYLASRNKTLEKLKENLDNLEYKTDKRKLDKFIKQQNLDCLFHIRTYTIDSTQEQINKLLAKPLVFPRGIFDSKPTFVKNESVTEKPELFADWYTYTYKEHPLQEFYSFTKDYECNFKKEKLTVKEFVKNQEQLNPEEQLNLFKLKEDLSIKCIKNQDLFLKLVVDNIYNKIFEYNIDISLKNLYISRKERIAIGLKAKELNQINDSYIWGKTILYQDKQIRETKVQLKDINKIKRFLEEDKVKQILSYDINKQWEIEELKYELYIKPNSYEVIRREKLFKAIQEFESYILTINNFDGSNHPSILEYNSNPRFKHYVVNGLLLKKGLATNEEIEWLLAKGQKEFNTFDKSIVEKPEIIQKAFLLVLIRNKFAHSQLPIKEYYEMIRSYTKNIENLNTTEIIFQFTTNTINELKR

SEQ ID NO: 1941 - protein, 1338 aa, Artificial
  Synthetic
MANVQFQLVPVDYSRPYDEQPECKRHIIGAYANLARHNMTVTINTVMQAIGMNLFNENDIDDAFNKSHRKKIAKLDNIQKVNLQKRLYRHFPFFKRMKLEDENKKSVQLNTLLEVMADFTSCMAMLRNYYTHYHPYNSFLEQEKQFELKKRMGKRLQYLYENTAQLFKSNESLPHEANEVFATLRIPEDYVEEFMPGDEGYDELLKLITDPRTNSFKKKGLKLEMKSQKITRKSLRYVRNPEYQAYMMDDSKGMSDVAIIYFLCLFLEKKVAFELMEEVGFTKQVKFTGKNADQQLLFVKEIMCMNRIRMTKTKLDSEMTDTALALDMISELRKCPKPLYEVFCKEARDEFKDDATVSWERIHNEEAVATEETTEDENNGAESVDKNTPRSTFVRWEDRFPQMALRYIDCQGLFDDIRFQLNLGKYRFAFYQHDASYSVDNEERLRILQKELHGFGRIQEVNPQMKEKWATLFDEKYVEDGLTQKRPDQSGQAPYVTEQDAQYAIDDKSHSVGLRWEGFEATGDPHKHYGDLDAQKMFIPYLPTNLQKDTTKTNQAEPLLAPQAMLSLYELPALLFYQYLSVKYGRSKFEAENVIKDYYKNIRSFLDDFSKGQIHPIGGTPVRDVKKQEELWTQRKTELNEILQKYNLKDSDIPSKLRYYLCSKEVDYDQKLLDSALNRLNERKKRVEKSKESFNEKKKLIGTKQNKFDRMRATIKTGQLAQWLIRDIWDWLPNNSICRKKLSGQSYAVLQSSLAMLGQQFSETGVDILNVNRLKSMFTKAGVISQSGEIDKNQHHPFLNEVFSQCQIDSVEYFYETYLDCELTHIENVDKEIREGSDFDDYLKIPFLHCERRRWCEQDFNSLRNLAKRYLNRPIQLPDGLFAKSIFNLLLEAEPKLKVALMTIRGAANNQQLDNNTAYLIRLYMEEVEGDHSQPFYSTAPIDGAPSPYRHVYRLFKKYFGQSIPGTNQTTTPAYTIEEIREILKDKSKLMELILNHIADDLAKFREKKKKKVKSFNLKAFIDLQWKIVKDENATGKAKRNFQQRKQEVDKRINAKKKELEGLRAKIEKEVDEYEKKLIQKQKRQFDKVADNERIIRRFKTQDVLMFVMAREILKAKSKDRDFTKGFCLKYVMTDSLLSKPIDFDWRVNIKEKDKKPVTKTIRQEGMKMKNYGQFYKFASDHQRLESLLSRLPGEIFLRAEIENEFSYYDTNRSEVFRQVYIIESEAYRLKPELLDDSNANEGWFYYSDNRTGKQRPIRNSFIQLLEILAAGKDGILDDNEKVAMQTTRNAFGHNTYDVDLDAVFEGNEQKKKIPEVSNGITSKIKEGTTELKKKLEE

SEQ ID NO: 1942 - protein, 1126 aa, Artificial; identical to SEQ ID NO: 1756
  Synthetic

SEQ ID NO: 1943 - protein, 1152 aa, Artificial
  Synthetic
METQILGQGISYDHTKIEDKHFFGGFLNSARNNVDLLITAFGAKFGFSNKLSLTQFVEVCFKPEDSDEDFQNKLRFVRMHLPVVQYLRFQGDRTVLRQKFALLLQAIDGLRNFYTHYYHKPLHLSNELFVLLDDIFAAVADDVKKNKMKDDKTRHLLKKNLKEELDIRYKQQVEKLKKLKSEGKKVNLNDTEAIKNGVLNGAFNHLIFKDEEVIKPTVSYSSYYYGSDSAENGICISQSGLLFLLSMFLGRKETEHLKSRIKGFKARIIKHEEEHISGLKFMATHWVFSQLCFKGVKPKLNTDFHEETLLIQIIDELSKVPDELYRSFDKETKTKFIEDINEYIREGKVDLSLEESKIVHPVIRKRYESKFNYFAIRFLDEFFDFPSLRFQVHVGNFVHDRRIKHIAGTDFQTERLVKDRIKVFGKLSTISRLKAEHLTEIIGLNKDTGWELLPNPSYVFIENNIPIHISADKSFKNGIKEFKDKRKAEKPEEMKKREQGKMQKFEISKLIGVKNDINPESPIALLSMNEIPALLYEILVNNVSPEEIEEKLKNKLNIGFERIRDYDPITPLPASMISKRLRNNTDGKSVNTEKLISLIEREIEKTDEKLILIAKNRRECRVRFRGKAIRQQVFRNSELGVEATWLADDIKRFMPAVQKKNWKGYQHSQFQQSLAFFEKRPHEARSILQAGWDFSDGSSFWNGWIMNSFTKDKTFDGFYETYLYGRQKYFTRLSENIAQHSTNAKNLRKFMDQQMPKGLFENRLYMLEDLNTEKRKILSKPLIFSRGIFDEKPTFIKGVKVTENPEGFADWYKYGYAPKHKFQNYYWWERNYDDLLEEELAKDTDFAKNSFKYDRKSQIELLAKKQDLKIKNIKIQDLFLKLMAEFLFQKVFDHSVELSLDHLFLSQEERLEKERVAHLQSQRMEGDDSPNILKEDFIWSKTLAYEDGQIYEPRVKLKDLGKLKALLLDDKVKTLLSYDSDKRWNRLAIDNEMSIGSDSYESIRRELLFKEIQQMEKTTLENWPWDGIAHPAEFEFADKTGVRHPNFKHYIVNGILRKKPGLVEEQEAKWIEDCDEEIFKNLSENDLAKKTEPIQLAFLVIMIRNQFAHNHLPAKQFYEFIKQTYPEIQGTTVSEFYLQFMRFAIQRMLNLN

SEQ ID NO: 1944 - protein, 1118 aa, Artificial
  Synthetic
MEDDKKTKESISYELEDKHFWAAFLNLARHNVYITVNHINKILEEGEINRDGYEKTLENSWNEIKDINKKDRLSKLIIKHFPFLEATTYRLNPTDTTKQKEEKQAEAQSLESLKESFFVFIYKLRDLRNHYSHYKHSKSLERPKFEEGLQKKMYNIFNASIQLVKEDYKHNTDIKTEEDFKHLDRKGQFKYSFADNEGNITESGLLFFVSLFLEKKDAIWVQKKLEGFKCSNESYQKMTNEVFCRSRMLLPKLRLQSTQTQDWILLDMLNELIRCPKSLYERLRGEDREKFRVPLDPIDEDYDAEQEPFKNTLVRHQDRFPYFALRYFDYNEIFTNLRFQIDLGTYHFSIYKKLIGGNKEDRHLTHKLYGFERIQEFDKQNRPDEWKAIVKDSDTFKKKEEKEEEKPYISETTPHYHLENKKIGIAFKNHNIWPSTQTELTNNKRKKYNLGTSIKAEAFLSVHELLPMMFYYLLLKTENTKNDNKVEGKKETKKQEKHKIEAIIESKIKDMYALYDAFANGEINSEKELEEYLKGKDIEIVHLPKQMIAILKNKHKDMVEKAEAKQEKMKLATENRLKTLDKQLKGKIQNGKRYNSAPKSGEIASWLVNDMMRFQPVQRDENGEPLNNSKANSTEYQLLQRTLAFFGSEHERLAPYFKQTKLIESSNPHPFLNDTEWEKCSNILSFYRSYLKAKKNFLESLKPEDWEKNQYFLMLKEPKTNRKTLVQGWKNGFNLPRGIFTEPIRKWFMEHWKNIKVDDSKRVGLVAKVIPLFFSEKYKDSVQPFYNYPFNVGDVNKPEEKNFLNCEERKGIWKEKKDKFKGYKAKEKPKEMADKEKEEHRSYLEFQSWNKFERELRLVRNQDIVTWLLCTELIDKLKIDELNIKELKKLRLKDINTDTAKEEKNNILNRVMPMELPVTVYEVNKGGYIIKNKPLHTIYIKEAKTKLLKQGNFKALVKDRRLNGLFSFVKTPSEAESESNPISKLRVESELGKYQNARLDIIEDMLALEKKLIDKYNSLDTDNFHNMLTAWLELKGDANKARFQNDVDLLVAVRNAFSHNQYPMYNENLFGNIERFSLSSSNIIESKGLDIAAKLKEEVSKATKKIQNEEDDKKEKET

SEQ ID NO: 1945 - protein, 985 aa, Artificial; identical to SEQ ID NO: 1401
  Synthetic

SEQ ID NO: 1946 - protein, 1200 aa, Artificial
  Synthetic
MQEEIISADPKTKQTKFNHYSEEDKYFFGGFLNNADDNLKQVSKEFKERLNIIGQNENTSTSNDDDNLNSVVKQYINNNKSLAKKEKAINILIDYFPIVAAVKKYCSNNIDETFELFKLLLGTVADLRNFYTHYYHKPITIDEKVYDFLDTTLFDVFMTIKKKKVKNDKSKELLKEKLRPELKLLINLKRKELIQKGKKTENLENAVFNHCLRPFLEETKNSKNKTISLRSYKKSKPEEETTVPITQSGLVFLMSFFLHRKDFQLFISGLEGFKGKVNAVQEEEITLKKNNLVYMISHWSYSYYNFKGLKHRIKTDQGVNEIEYDGITHTITNKDTKEALLTQLVDYLSKVPDEVYNNLSEEQQNEFLEDVNEYMRDNPENEDSSISSIVSHQVIRKRYENKFNYFALRFIDEYGNLPSFRFMVNFGSYIKDRKKKVLDSINYNSERIIKKEIHLFEKLSMVTDYKKNLFLNETATLNLAQFPLFPNPSYVIANNNIPFYINCQKNDLNDYFGKKKSSQSQNQKKNHTYDKDNKGQTSSNIVGELEKALGVKDIKQRSTIGLFSCNELSSMLHEIIVKKTSGVDLENRIAQKIKEQYQIIKDFDSNSYDESAKNKIPKALLKTSKVDSTITFEGKQIDLARLINAVTFELDATHAKIKTVKEREEEVRKGEIEKNQKNSSNKQKTKVKYRKYVFYNNEIGQEASWLAGDLIRYMKNNATWKGYMHSELQALLAFYEEKRNDIITILENTFNLKADCLLTIDLKSLLVKNHKFIDFYKDYLSLKRSFLNEKLMFLKNNDFNGIPAKTLKKEWNSVFEVFKKRQYLIQSTEEKKQNLYGDAINLSRGIFDDKPTMIPNKQPNREEFAAWFVAPTVYEHYQSFYNLIDLNNPKTDTKEQTKQNYKTIRTLNKIKIQDYYLKLMVDALYKDLFGQELNIELKDFYVPKSERESIKADAKNYQQVDNSFLWNKVVHHTLQGGRINATAKLKDIGKYKRAMKDEKIASLLTYDDRTWTYALDNIKDESKQTHLYSLTMELQEYEKVRSKELLKQVQQLEKEILNLDEDFVTTQNHPIIFEVANNPRFRKYIEEGILNKILPNENQVEILRGIDFDDLSWAFDSSERNEEQKEKINLYYQITNPQVQRGLILIMIRNKIAHNQYPPKYIYDLAQTFIPKKENEYFASYFNRVFKEMTKKLLESLEKK

SEQ ID NO: 1947 - protein, 1125 aa, Artificial; identical to SEQ ID NO: 1582
  Synthetic

SEQ ID NO: 1948 - protein, 985 aa, Artificial; identical to SEQ ID NO: 1567
  Synthetic

SEQ ID NO: 1949 - protein, 1125 aa, Artificial; identical to SEQ ID NO: 1582
  Synthetic

SEQ ID NO: 1950 - protein, 1104 aa, Artificial
  Synthetic
MQDKLNDNVSTARTISNDPQYFGGYLNMARLNIFNISNYIGQLFNQSLLPEEAHIPNSFLTNYQIKHLNWNHTYSRTLRFLPIVKLFNLEEYPKNTNGKLDHTLITPGLTKDFESMSKYLKQVFADINDFRNDYSHFYSTTTGTNRKLYVDDQTATLLTNAFEFAIDHTMLRLKGVLSEEDFNHVRIRKIVEADNKITTDGLVFLICMFLEREHAFQFINRVKGFKGTQYCCFVATREVFMTFCVKLPHDKFISSDIKQRLIMNMINELNNCPKDLYAVLSEKEREKVRSIDVTNNGSDDNFGEMDYDLYKEELISNIRHSNRFPYFALGFIDETGCLSSWRFHINIGKLELASYFKPLAGSEEQRRIIENVKAFGKLSDFNDKDSTYTKINNKLHDHGFDQFAPHYNIIQNKIGIYRTTLKTPIIIRRSGQTDNLKVRIKQHAPEAFLSLHMLPQIILLEYLKSGAAEKILNHFIDFNQEILNEKFIRKIKEKLPSDWSEFHRKTDSKKQSAYSAKSLNCLEDRKQCLNNVLDHYNLNIKQIPSRIIDYWLNIADVDDSRSFSDRIKLMKSDCKKRLKVIKKYSDDPSTRIPKVGEMATFLAKDIVDMIVDKSLKMRFTSFYYDRMQESLAFYAASEKKDLFRAIVDELRIFEKDGHPFLENVLKKSPSNTLDFYTCYLKEKADTRNNNFEKNNSWIDRVFFTTVFNDKINKKMVTVRMPEDTSNIPYTIRIWAEKDKVDLWKWLNNITTLNKKPIDLPVNLFDSKLHELLCLELDKKAVTYNPESKWNELLKLWWNTRNDGVQWFYSAEREYSIYNEKIHFIPDSKETFKEYYVSAFTKVNQNNKRGRKKPINKQLEHVFKRSIAESEKKFRILQEEDRLIVLMVEKLMKEKNVNIENLQLSNVAKLISEEIHVEMVLEYDNNGNIIYKNITQPSKKNMIVTRCKRKNYTLLHKYRYDRRLPGLFEYCQTQEVQHDWLKKELDSYNRAKQVVFDSAFKLEKHIIAYDKDGLVKLYVDENNNSLTGNVVHKPYLNWMVSKNLITNEECDFLHTVRNKFAHNQFPRKEIVKDMFDLDYSSPIAEQISEVYRQKINDVISKKAIH

SEQ ID NO: 1951 - protein, 1211 aa, Artificial
  Synthetic
LILSFIIFNFRVIINQHTLNTYTRKYMKDKSFSTTSSAINETITTDNLKYPERLNLILSKRLRPKNELQPLWAAYFNMARYNMYTTLVHIATATGLSDEENMENRMDKMRILNEPVEPEIEHSLRKLLCRHFPFAVWICSPIRKKDSKEDSADEDYRVISVKELRDCLKTVSYTLNYFRNYYSHTRHVETRSEDIIAASRNSEKQTGIFLNKVCTVATRRVKSRFGDKSNKGQAGMIDDQSMKFITEGKVKFRNNNGIKETIYNPDHFLYPLFLDRSSALRDGTNPERLSTVGKMQLICLLLDKKYITEFLDQAGFLSAFNNDALAPRLSERRLILEVLSDLRIRLPRRKIDATCNDIQVALDMLNELKKCPKELFELLEAKDKATFSILSSTGEHILLRRSSDRFTQLALQWFDVNKAFSRIRFQMNAGIFRYLFNDSKTCIDGKTRLRVLQEPLNCFGRIQEVEDSRESNRYGNDGPWRGFEIKGFDEAARNDVNCLPYINDSRTRYLITEDNIGIRFSGDDEACGNYFPRIDEKNGKYKVTCLPAQCMISIYELQAMLFLHLLNPGNDGGIAPVEKIIIDKVESYRRFFSDIKNGLLTPSGLTESSLNDKLTSTYGISLSDIPDKMKDYLLKKNNKGRGFNAYRDRLIETLKEETEYRIKRLEENLNATNSDINKPGKPGYVQIKPGSLASFISKDIVFFQECNADQKMTGLNFSVMQGLIATFGSQEGATTDDLRMAFRKSGLIAANGSCGTHPFLAIAFNAGVKNTLDLYEKYLNARKSYLSGIIPDNAPFLHADRIRWTINDDAYYKDYAERCLQRPVILPRRLFEASIRENLLALNGENANALKKVIIGAGGHCNSAFMIDSYFYYVKNDSPQVFHGACEGDMLHTYGHRFFQVVRRNLKNAEAILSKLKKDSNTHNTYIGALSDAICWAKENPIKPTFSVGRSRLNNHSENEIVAMIKRAFNEYMATEKTLRRYVIQDELLFLAAMKTIKSKLGVPDGEWKLGSIGSKSGSILDKELPLIQTPAKFSNIKKRPYTKKDLVEFVIEQHNVSIKDYGEIYRILADERLYGLLKYHKNEIVLASDLKNEIEKYDEKRVKVFEDIMNYEKKITNGVTDRQLCESMDKEHPKDIDFKVMQTFDTMNDNLTKMELRSIRNAFCHNSYPDVNAFDDSSRTTKRIHNADIPGTAEKISGIVNDISSKTEAK

SEQ ID NO: 1952 - protein, 1003 aa, Artificial; identical to SEQ ID NO: 1936
  Synthetic

SEQ ID NO: 1953 - protein, 985 aa, Artificial; identical to SEQ ID NO: 1567
  Synthetic

SEQ ID NO: 1954 - protein, 1025 aa, Artificial
  Synthetic
METKEQIGKNVYKTSENDPLYFGGYLNMARHNVFLIINHLTEVFDSLGYTKINDDEDIVNQDHILSQIFDPSKKELENERIRIYNYMIKRHHLPFLKVFNSEILNDEDGENMGIDFKSLHNFIIKSFKTLNDLRNSYSHYLAIDDDGNKIEKRSNIVDVSIKSDIKQLFKHAPKFSFIRNQETQHEEDYNHLDRYRIFENETNILTDQGLYFFINLFLERNHATKFLKKIKGFKNETTPPFRATIQSFTSFALKLPDIRLSNERPLFSLLMNMLTELNKCPKELFNHLTQKDKKEFEPLLNDEEKHNVVLNSTNYSEISDDELDEAIREITALKRYNDRFPYFALRFLDETNALKNIRFQITLGKLIIKRYDKEIAGIEENRRVIKTINAFGKLSDFIDNEEVVLKELKKNLADNNDIRFEQYSPHYNTNNIKIAFYVFDEGDDKTKYPFVFENKENNSDIQNNPSGFLSIHDLPKMLLFECLDINLKPENIIIDFIRSTNLEMFDLSELEKIRKQANYEPEYFSKRINKEKYLISKKGIKYLSKEVENNMLEDLGLSKDELILKDKDSFMKLTNSKKYIEYFSQIKYQYYLQKRREELQRHLPKGLKIDLLPENILEYLMDFKERNNEGIIHQKVAAIRDEAKNLKKSIESEVEKPKNEQRIKLGELATFVARDIIKMVICKEVKDKITSPYYNKLQNKIAYFSLNKDELIDICDELKLFNENEGHVFFKKELIKNSDGIIDFTLDYLRAKDNWIETKLLKKGKTGGYRFPDKTKIPLSFNKIKNKANSFDFKTWLKNKSQLPVDLPRSLFDEKLEIILKGKLNQKGIIFNTGDKFSVLLSKYLNNDTQVFYNYCRSYSINKKIEEFEISGLSGKEIKKNFDSNVEKNEKSIRFIQTKDRVLKLISDKILSIDRSIGLQSGFCLTDIHPAAKHNPLDCPAVFEQKIIRRGDEVFCNIIAKDTENQIQSVKHFESLQAEEEKEAYPDQKWYQWTIKDFGRFKRFIKDRRIPNLSNYFEDKNIPFD

SEQ ID NO: 1955 - protein, 1126 aa, Artificial; identical to SEQ ID NO: 1756
  Synthetic

SEQ ID NO: 1956 - protein, 1168 aa, Artificial
  Synthetic
MEKEKLGMGIQYDHSIKADKHFFGGFLNLAENNIATVFNSFNNRYRKVSNDEKKINNTALIDECFSDTVSDAEYKTRIDFLKMYFPIINYIEKENNNRNHFRLRFVQLIKTINDLRNFYTHYYHKQLEIDENFFNFLDDTFLTIVQDVKKHKMKDDKTRHLLSKNLSENLDQLYKSKKQQLEQMKKEGKKVNLDDISIKNSVLNDSFFHLLYKKDQVNQVYKSKLNGTAENNIILSQSGLIFLLGMFLTKKESEDLRSRVRGFKAKFVKSDDLSNNIKFMATHWVFSYLAYKGHKHRLAGHFQQEGLLIQIIDELSKVPDEVYVTLDKEKQNSFIEDINEYLKSGKEDLSLEDSIVVHPVIRKRYENKFNYFALRYLDQFADFPTLRFQIHLGNFVHDRRLKDIQGTAFQTERIVKEKINVFSRLSEVSNLKSSYIQNNKNEDDINGWEIFPNPSYNFAANNIPIFINLQNSKLEGAKKLYGQLKQIKNQPEENDKNKEKKNITRDEAKLNKEQITQLVDSDIQGGKFKNTYIGPPLAMLSLNELPALLYELLVKGVPAKEIEDRMVAKLVARFKIIQDYSPTQNISSSHITKKLRKSTDQVQIDTAKIVRAANREIEITEQKLALISQNRKDTKNISQRRKYVFTTRELGIEASWLAYDIKRFMPKENRELLKGYQFAQIQHSLSKFDINNEELINTLSAVWNFKENSSDFSQWVRDSLLKSKSFDTAYEVWLKKRKEYFQMVAENLSSYELESGLLKKFIKQQQIFEIFKEWLYKIESSQKQIHRLLKTALVFPRGIFDDKPTFIQGAKINETPELYADWYQYTYQSSHQFQNFYDLERDYTEWFDFEKLKDVEAVKNKKKLNTDEQFAKLRLKQDIKIKQIKTQDLFLKLIAQNIYNKIFDTNISLELKDLYLTQEERIKRENKALIQSNRKTGDSCQNIINDNFIWSMTVPFDQGQIIEPAVKLKDLGKFKNFIADPKVQKLLQYDTAKIWTKQMLDDELFIKSNSYETIRREHIFKIFQDFEKDILTLNNFDGINHPSDFEQEDYKGNRHPNFKFYVTKGILEKFNLAAAQEIRWLLELKEDNIEHTSIETIKEKSEFVQYCFFIILIRNKFAHNQFIEATYMHYLMSKMVINPDYSYCENISEFLKSATSKILNHLNYKNVH

SEQ ID NO: 1957 - protein, 1003 aa, Artificial; identical to SEQ ID NO: 1723
  Synthetic

SEQ ID NO: 1958 - protein, 985 aa, Artificial; identical to SEQ ID NO: 1567
  Synthetic

SEQ ID NO: 1959 - protein, 1003 aa, Artificial; identical to SEQ ID NO: 1723
  Synthetic

SEQ ID NO: 1960 - protein, 1157 aa, Artificial; identical to SEQ ID NO: 1912
  Synthetic

SEQ ID NO: 1961 - protein, 985 aa, Artificial; identical to SEQ ID NO: 1567
  Synthetic

SEQ ID NO: 1962 - protein, 1110 aa, Artificial
  Synthetic
METNEQILENRRRTLTNDPQYFGGYLNMARLNIYNISNHIANEFGQAPLPEEGQIPASFLCNKGIKKLNWNHVYGKTRRFLSILKVFDVESLPKDERENSEKEGRDFASMSDTLKVVFGELQAFRNDYSHYYSTEKGDSRKLTISVELADFLTVNFKRAIAYTKVRMKDVLADIDYELVESKHIVTPDNTITTEGLVFLTCMFLEREQAFQFIGKIQGLKGTQFNSFIATREVLMSFCVKLPHDKFVSEDLRQALTLDIINELNRCPKTLYEVITEESKQQFRPELDAQGIDNLIANSSNDEEREKILDEIEYEDYIEGLTKRVRHNNRFPYFAMRYIEEKNVFDKLRFQIDLGKYEVDKYNKELNGEPIERVVVENAKAFGKLSSYVDEKTIAKKIDNQQRTGGFEQFAPHYNADNNKIGLSNKEETAVLIPKTKPDSKVSNNLKQPLPQAFLSLHELPKIILLEYLQKGKAEEMIHDFILLNDSKLMNMHFIEEVKSKLPADWNEFAKRSDSKKKKAYSEAALKYLWQRKTILNDVLIEYNLNDKQVPTRILNYWLNIKEVEDNRSVSDRIKLMKRDCMTRLKVLEKHKLDKSVKTPKVGEMATYLAKDIVDMIVSKEKKQKITSFYYDKMQECLALFADAEKKALFIHIVTNELKLFENGGHPFLQNLNLQQIRKTSQFYEAYLKEKGNKQVQKFNPKTNKTSKIDESWMMQLFYSKEWKEEIGKQLTVVKLPANKIHVPFTIRMWEEKEKYNLNAWLHNVAVGKNVKDGKKAVDLPTNLFDETLCDLLRKQLDAKTVNYNPASNYNELLKLWWITRDDATQDFYQSEREYEIYKEKLKFNLDSSSHFADYFKKALERAYNRLKAERETEQQTNRRLPPIDPKQVERVFKNTIAETEKEIRMLQEEDRMAVLMLEQLMDNTRNLKLSKIKTLLNDTTRIEHKILNKTIIAERKQKNYTELRKYVHDRRLPDLFEYVDADEVPLEWLQDELRAYNTAKQQVFDTVFMLEKKIIETDYVGLKVLFTGPDGQVQTGNIQHKPYLQWLKNKGLINDNEKQFINEVRNCFSHNQFPQRKTMELLILGWEEGKLALQIVTVYNQLITDIIDRI

SEQ ID NO: 1963 - protein, 985 aa, Artificial; identical to SEQ ID NO: 1567
  Synthetic

SEQ ID NO: 1964 - protein, 1136 aa, Artificial
  Synthetic
MESHVNNPKKRTLADDPQYFGAFLNMARHNVFLIINHIIGHFPNQKPIKDDDQIANEPLNFIVNRNKYSASDTQKLFDLLQKFMPVVKVFNPEALPKNERSADSIDFDGFFEIINKCFKELNHFRNDYLHYYSVDNKDERKISIDEDLAGFLSTGFQRAVEYTMNRFKDTFEEKDFEIAKEKIIVTEDNVITPDGLVFFCCLFLDREYAFQFINRVVGFKGTQHKVFLATRAVFSAYCVKLPYEKLISDDPRQAFLLDMLNELNRCPDELFRCLGNEGKKQFQPNLDVLEKLEIENFDEYIQNITTKKRYRDRFPYFAMKYFDMNNCFEKLRFHINLGKYHVTEYEKSFNNSTEDRVIIENVKTFGKLEEYALPEEEKEKLIKKIEDKINLVTSKNSFFEQFSPHYHIEKNKIGLQFKSDVPEIKKYIGKKLYNKPGIPNITQIPYLIKSDSNTSRINLKLNKAHPDAFLSIHQLPKMVLIELLEKGSSEKIIKEFINNSFPKILESEIIKDVKKQLNIEKPFYKKFQGKSKNAYTSEALEILAERKERLNELLKPYKLDTKQIPTRLINYFLDIKEVSQNLSIKNVIKNHVEDIKNRLKDINKNKSPRIGEMATFLAKDIVDMMIDENQKKKFTSFYYDKLQRSIALFPSAEDGKIVFINICSKEFDLFNKEMGHPFLQDIRISDFYKTFDLYKAYLELKIQWVKRVFYSEKINKKKSRLETYISIPENQHSIPFSFWNLQKEQSSFEEWLGNIKGEKESRQKPVDLPVNLFDNKAEDLLKSKLREKNIVYGESDRFARLLELYFEKDIQPFYKNKREYNIYEEIIPFELQDNVKFKDLFYNKALEIYNKKTIERKEENDAIKIRNKSKKYNKEKTKPPLKFDDILNVFNNAITENEKLLRFYQVKDRLMLKMCENLIECDEPLNFKLEEIYPGSEISPLEIESEITQKVTGELSFDEKGNRINLDSKVKIDKTVTATRKRKDFGVFKKFIHDKRLPELFEYFDEQQIPYETLKIELADYNFAKELILDKTFELEKRVIYCFNDEFLDWYKTIMESDIHNIQFKYYLDFLKSKNIMKPDEYDFLKVVRNTFSHNQFPPKAVMERFIPINKSNGKISGQVYEKYNEKIENVLCQFV

SEQ ID NO: 1965 - protein, 1003 aa, Artificial; identical to SEQ ID NO: 1673
  Synthetic

SEQ ID NO: 1966 - protein, 985 aa, Artificial; identical to SEQ ID NO: 1567
  Synthetic

SEQ ID NO: 1967 - protein, 1126 aa, Artificial
  Synthetic
MEDDKKTTESTNMLDNKHFWAAFLNLARHNVYITVNHINKILEEGEINRDGYENTLENSWDEIKDINKKDRLSKLIIKHFPFLEATTYRQNPTDTTKQKEEKQAEAQSLENLKESFFVFIYKLRDLRNHYSHYKHSKSLERPKFEEDLQKKMYNIFNASIRLVKEDYQYNKNINPKKDFKHLDRKRKGKFYYSFADNEGNITESGLLFFVSLFLEKKDAIWMQQKLTGFKDNRESKKKMTHEVFCRRRMLLPKLRLESTQTQDWILLDMLNELIRCPKSLYERLQGEYRKKFNVPFDPADEDYDAEQEPFKNTLVRHQDRFPYFALRYFDYNEIFTNLRFQIDLGTYHFSIYKKLIGGQKEDRHLTHKLYGFERIQEFAKQNRPDEWKAIVKDLDTYETSNERYISETTPHYHLENQKIGIRFRNGNNDIWPSLETNGEKNEKSKYKLDKQYQAEAFLSVHELLPMMFYYLLLKTENTDNDNEIETKKKENKNDKQEKHKIEEIIENKIKDIYALYDAFANGEINSKEELKEYLKGKDIEIVHLPKQMIAILKNKHKDMVEKAEAKQEKMKLATENRLKTLDKQLKGKIQNGKRYNSAPKSGEIASWLVNDMMRFQPVQRDENGEPLNNSKANSTEYQLLQRTLAFFGSEHERLAPYFKQTKLIESSTPHPFLNETEWEKCNNILSFYRSYLKARKNFLESLKPEDWEKNQYFLMLKEPKTNRKTLVQGWKNGFNLPRGIFTEPIRKWFMEHWKNIKVDDSKRVGLVAKVIPLFFSEKYKDSVQPFYNYPFNVGDVNKPKEEDFLHREERIELWDKKKDKFKGYKAKKKFKEMTDKEKEEHRSYLEFQSWNKFERELRLVRNQDIVTWLLCTELIDKLKIDELNIKELKKLRLKDINTDTAKEEKNNILNRVMPMELPVTVYEVNKGGYIIKNKPLHTIYIKEAKTKLLKQGNFKALVKDRRLNGLFSFVKTPSEAESESNPISKSRVESELGKYQNARLNIIEDMLALEKTLIDNYNSLDTDNFSLDTDNFHNMLTGWLKLKSKANKARFQNEVDLLVAVRNAFSHNQYPMYNENLFGNIERFSLSSSNIIESKGFDIAVKLKEEVSKAVEKIQNEEDNKKEKET

SEQ ID NO: 1968 - protein, 985 aa, Artificial
  Synthetic
MGAIENKHIFAAYANLAIDGLIKTLNFIAKKLDTQKQLSSWDIKHVITLIDSIFDQNPQNNLEQVVEGYLPWIKPIIEMKTPKKGERQSDKLCIEYKTIITAFASLLNDVRNYYTHYYHDPICIYPGGYDIPSSLNCIYDSAINIIKERFQAEEKEMEHLRNYTLVNNNGLSEKGYAFFISKFLERKYSYLFLKKLSGFKRGDSLQYRLTLEVFTALSTKPPVERLRTTKDTKQDRALDILNELSRIPIELYQTLEPKYREMYNETLQPTDAEDPYGLPDRSRIRFRSRFEAFTLHFLDKQADFKEIGFYTYLGNYFHNGYQKTRVDRETKDRYINFQLAGFCKNIQDISAKKLSEALNVKSIDISTDSIPDINSFEPYLVQSTPHYIVNGNNIGIKVLPEGKDTYPTIDEKGAKMPIADFWLSKYELPAMLFYTYLRNNNIHKSHCPLSVKDIIERSIHKSTKQKHPEERSELMLRRVMKAIFWTDSKLNEVERIKSQKSAFGKRQHEILKAGRIAETLVRDMLWLQPSKNNGRDKVTEPNFQAIQVSLAYFGIRRNDLTEIFTRAGLINSSNPHPFLAQIGTNYTSLIEFYIAYLKERKVYFSRIQKKILQGKLNIQCHPLRDLQREPNKPQEKEEAIFLPRGLFNEAIINCLKKSKLKQLIESPTREKSPALNVSYLIQNYFRAYFEDQSQEFYAQPRNYRLFDKLSPNKGKSKSYLSLEQRIKKMEELRPSKIPVAEANKLLEKEDRLYRKNYNEICDNESIIRLYQIQDILLFMMTKEYLPSDLYNRINKYKLENVKGILNERVSYLIDLNPLKIQGEDIKIKDYGKLFYIHHDTRISSLNKVLSKVKRNNSISSSVKIQPYENYKRECLDFEEAQIQIIPIIHSFEIAMVSMFPDLKKATPGNYYDFNELITEYEKRTKQKIDSSFLIKTRNMFLHDKYEAECIKEISDDFVYAKKIIAEFKMKIENIKLEDFSNDSSA

SEQ ID NO: 1969 - protein, 1174 aa, Artificial
  Synthetic
MNPENNIVKNYSVKETPWYFGAYLNMARHNVYLLINHLTDKFSYLKNYKKLSLEKQTGTSKFELRPQPFSILTDDEQIVNENILTKIFDTSYPQYDNDRFRIYKYMVRKHSLPFIKNFSETGGRNLDDNPIIDYDGLHQYINEAFALLVRLRDSFSHYLAIDKFGNKIEDRNLTVSTNIHTQVINLYTNSPNYSLERFSATQSDFDYEHLSLYKIFEADNITFTEQGLYFFINLFLERGYGIKFLKKIRGFKNDTNPAFRATIKTFTTYALKVPDERLDNDDPRMSLLMDVLNELKRCPAILSKHLSDQDQKKFNPQLNDDSKANVLLNSVNYDDIDDEQIDYLLNSITTFKRHQDRFPYFALRCIDELNLLPNIRFQVALGSIERRSYDKVVGDVIIDRRILKKLNAFGKLSYFEGKEEQVLLELNRKVKDQDLLFDQFNPHYNINNNKIGFYTFSSGKEKIQWPTIADFPKEGNLHQKRDNSIPKSFLSIHELPKLLLLALKDPELAEKTITDFLDVNKNLVLNKAALGQIRDKIKLCPSIFNRRRVEEKALKQKGRIQFLNHAQIKNLRQRNKITDERLADLKFMDSMISNTKNIKIKEYLKQINYNQVLETRKDALRQVLPAGLKVNQLPTIVIDYLLGMVGQDPHKKILARFKEIKTDTNKRLKQLDRDDDSRLKVGEIATFLTKDIINLVISEDLKKKITSAYYGRIQYQFANFSISKGELTTIIEQLGLFDNIKGHPFLASSMLNKVKGIREFYDNYLSAKLKWINGIIANKNLKDLLKNNKISLPFKIKSIISKSEAKNLDNWLKSKKDMPVDLPVSIFDDQLNTYLKKELQHVNIAFQETDKFSVLLTKLLNGDKQPFYNHTRWYRSEEGDVPFSPDGHSSLTIKNNYSSYAELTEKKIRHVQTQDRVLRLACQSILGQLSDVDDTLTFYLQDILAFTNTNPLNRPATFKHKLKEISSEGVYVVAEDTLSQKEEVVKYLVLEQEEEQNLYDGQKGFQWTIKDFGRFRRFMHDRRLPAIFNYLETSISSYDLLSYQISEYDRYREAIFRETFELEAYLANTYFDEVVVLKLQDKAIFPQVQFKTYLELIKQRNMLDKAACEFINSIRNKFSHSEFPDYYPEISKITVDDIDDFELNKSKKGFKEYAGLSISKKVFDLYQSIMVSCK

SEQ ID NO: 1970 - protein, 1138 aa, Artificial; identical to SEQ ID NO: 1719
  Synthetic

SEQ ID NO: 1971 - protein, 1125 aa, Artificial
  Synthetic
MKKTNAEESNFNHTLNDQKYYFAGYLNLAENNIKTLEKAYGEHFLCSGKETIISNLNNTSSLIDWDLKVKFLSQYLPVVSYLNLDTDPNSTFKIIKKEFSENLSSLFDSIGSLRNFYSHYYHRPLTEELNIELLSFLDRTFVAVCINVKKKRMKDDKTKQLLKATLNNELDLLLKAKKEELLKKKKEGKKVSIDAISMKNSVLNDAFNHLVQLDKNSREEIPGRFYTSVLGDNNKYTENEINISMSGLLFLLSMFLTKKQNEDMRSRIFGFKGTIDPDKSISKSNNSFRNMATNWVFSYLSFKGMKKQLGNTFKKESLLVQIVDELSKVPHEVYQTLSPHHQEMFLEDMNEYLKEGNKKLCLEDSIVVHPVIRKRYEDKFNYFAIRYLDEFVEFPSLRFQVNVGNYVHDRRMKTIDGTKTETDRMVKEEIRAFGKLSVISKLKADFFAKDLPSDISWEMYPNPSYNISANNIPVYIDLIKSSVAGAVDVGKDHKSYQAKLDLDEDKRKRNRKEGKPGKTEIARILLGKKQILFEKPTVLLSLNELPALLYEVLKEGGDKQDIGKRIEDKIVEKIVAQYKLIDQYDGTIELPGSVIPKKLRKSGSEKCTNMDKLLRAVKRELEITQEKLDLIKNNKKKFESKEKDEKGKARQHVFYTNELGQEATWIANDIKRFMPRDVKEKWRGYHHSNLQKLLSQYNQSRNEAVKCITCFWNFDQQTPWGKGIKEAFYKSTFEEFYKAYLDNRMDVYKTLENNLIAAKGHSKLFNKEKKKAFVLFDKHLYNIPDINTQKERLKSTLFILPRGIFDSKPTFIKGIKYEEDPSCFADWYQFANNAGNEYQQFYNLTRSYTSLFEETKKNNEGLKENKKGLSADEQFDFFKMRQDLKIKKIKTQDLFLFQIVKDLYKKVFGRTFPEGLELKDMYQTPAERQANYELAVKQSQRTEGDKSDNLYNTNFLWNLTVPFETGKIKEPQVKLKDIGKFYKFAADEKVQTILSYSDREWSKLDLEKELELMPTSYEVIRREQLLRDIQQFEKRILENYPSDGNAHPRDFEIVRNGILSPSFNFYLLKGVIIKNNLASEEECQWFEQVHLNKTQFYPEVATKSTIIQSAYLLLLIRNKMLHNQL

SEQ ID NO: 1972 - protein, 1003 aa, Artificial; identical to SEQ ID NO: 1494
  Synthetic

SEQ ID NO: 1973 - protein, 1145 aa, Artificial
  Synthetic
MTLPTDNTFIEKADQEILGKNKLFFGAYLNMANHNAYLIIKDISERLKQEDALDIDAPSDEDNLAYADIFSKILKKASDKNPKNRPQATIIDKVTNLLIHHFPAFEVFAYEHPFEQQNSYPELLYQKLTTALKLLNDLRNEHSHFYYKGSFDIDTVFSAAQEEITRFPYLTPEDIEELEYYKNDLLEPLTYFKKYGFVFFICTFLEKRYARYMLKEKQLDLIASDKERDATLENFTNYSCRLPRPKLESSVIELDMLNELSRCPKGIHDVLSSPMEKVLLKTDAKDDPNQVPMIRHNDRFPYFALSYFDKMERFPAMRFHIWAGKTRLAFYGKKLGKKNVLRDIQENVTIYARLNDIKADKIPDNWKDKIDVEDSEENKEKAKIQSYSPHYNIHNNRIAIKFIDTQKDELDTENFSEIKSKPQDPTKDKQLKYTVTHALPNAILSTYELQNLFLYDYLYRTYKDQKVLARPADSFIRNYISSFHRFCKDVKSGKIQPVSPHDFERLTEHTRSTTRDLGNREEELEIRKEALQKKKLDNYGLKVKNLPDALREYLLGYKQETYTEIALNKLRGKIKQTKVHYKLATKDDLFLDGKTDLKSGKIGDFLAADIVFLKPLDANRTGKPNNQQFNELQKAIARFHSQKKDVEDFINEELQIKEQSLPHAHPFLYKIQFEEHTDVQSFYIKYLELKIEWLECTKREIQGKSDYLKPWQWREEADKCKQYGIDIKPEGLSDAATENKYGYFLQINTKKGNERNYTNATTPSKANSKEFESLESKSPVILPRGLFNDAIIDAMMKIDEFKGKIKEGDNIVRCLDVLAEGDRQTFYDFERSYTVGKAAPTSVTIHQGANDEYIKNKLRSIKPIIKKLRTQQNAKDAKYKDKKILQNHIKALQAISDNERSIRFIRANDRALFLMIKHIFSEHKSYVVEGSKLTKSINTLPWKLNKVGYEIKENNILNEILPMNIQFNQKNIYTEGEYGTDPLNKLSIKHYGKFRKLLKDKRLSNKKKPGLLNYYTDQNVRWSAINKELEYYDENRDRLLDVIYKFEKAVWENEECREELKENIRLGYINHAAQLKAVGKIVRDFTASKQDQLALLRNKFLHNQIPYTENLKTGWVDNNPEYPLITQALLELAIIEYQNITKNII

SEQ ID NO: 1974 - protein, 1003 aa, Artificial; identical to SEQ ID NO: 1494
  Synthetic

SEQ ID NO: 1975 - protein, 1090 aa, Artificial
  Synthetic
MKEEEAPVVSTYNKDDKHFWAAFLNLARHNVYITINHINKILGEAEINIDGYDIPLKNIWSGIRDINKKARLEELMIKHFPFLEAMTHQQHLTGNTKQKEEKQAEIQSFEILKDNLFLLLKMLQDLRNHYSHYKHSKSLERPKFDEDIRNKLYNILDTSIRLVKEDYKHNPDIKPKEHFKHLDRKRNEKFRYSFADNEGNITISGLLFFVSLFLEKKDAIWVQKKLEGFRCSNESYQKMTNEVFCRNRILLPKLRLESTQTKDWILLDMLNELIRCPKSLYERLKGEDRKKFEVPFDSTDEDYDAEQDPFKNTLIRHQDRFPYFVLRYSDYNEIFENLRFQIDLGTYHFSIYKKLIGGEKEDRHLTHKLYGFERLQEFAKQNRPDEWKAIIKDLDTFKKQEDEKVNEKPYISETTPHYHLENEKIGIAFKNHNIWPSTNTELTNNKRKKYNLRTSIKAEAFLSVHELLPMMFYYMLLKTKNESPRKVEAIIESKIKDIFTLYDAFANDEIDNTDELEKYCEDKDIKIGHLPKQMIAILYNKHKDMVEKAKVKQEKMKLATENRLKTLDKLIEGKMKYAKRGISPLKSGEIASWLVNDMMRFQPVQRDENGEPLNNSKANSTEYQLLQRTLALFGSEHERLTPYFKQMNLIGDTNSHPFLKQTEWEKCNNILSFYRNYLKAKIEFLNKLKPEDWKKNQCFLKLKEPKTNRDTLVQGWKNGFNLPRGIFTEPIRKWFIKYWKKIKVDDLKRVGLVAKVIPLFFSEKYKDSVQPFYNYPFNVGNIDKPKEKDFLDIARRRKLWDKKQLEFKGKTEEEKRKNPSYLDFKSWKKFEREIRLTRNQDIVTWLMCIEIYNNQKVENLNTGHIYLKDIITNVEEERSNNILNQIKSMQLPVTVYENESSPKKKYLRTIYIEENGTKLLKQGNFKALVKDRRLNGLFSFVKTNSEAESKRNPISKLRVEHELREYQKARIEIIKDMLALEKTLIDNYDSLDTDNFHNMLTGWLELKGEVNKAKFNNDVKLLTAVRNAFSHNQYPMYDENLFVNIERFSLSSSKILESKGLSIAVKLKEEVSKIIKKIQEEEDGKKEKET

SEQ ID NO: 1976 - protein, 948 aa, Artificial
  Synthetic
LFFSFHNAQRVIFKHLYKAFDASLRMVKEDYKAHFTVNLTRDFAHLNRKGKNKQDNPDFNRYRFEKDGFFTESGLLFFTNLFLDKRDAYWMLKKVSGFKASHKQREKMTTEVFCRSRILLPKLRLESRYDHNQMLLDMLSELSRCPKLLYEKLSEENKKHFQVEADGFLDEIEEEQNPFKDTLIRHQDRFPYFALRYLDLNESFKSIRFQVDLGTYHYCIYDKKIGDEQEKRHLTRTLLSFGRLQDFTEINRPQEWKALTKDLDYKETSNQPFISKTTPHYHITDNKIGFRLGTSKELYPSLEIKDGANRIAKYPYNSGFVAHAFISVHELLPLMFYQHLTGKSEDLLKETVRHIQRIYKDFEEERINTIEDLEKANQGRLPLGAFPKQMLGLLQNKQPDLSEKAKIKIEKLIAETKLLSHRLNTKLKSSPKLGKRREKLIKTGVLADWLVKDFMRFQPVAYDAQNQPIKSSKANSTEFWFIRRALALYGGEKNRLEGYFKQTNLIGNTNPHPFLNKFNWKACRNLVDFYQQYLEQREKFLEAIKNQPWEPYQYCLLLKIPKENRKNLVKGWEQGGISLPRGLFTEAIRETLSEDLMLSKPIRKEIKKHGRVGFISRAITLYFKEKYQDKHQSFYNLSYKLEAKAPLLKREEHYEYWQQNKPQSPTESQRLELHTSDRWKDYLLYKRWQHLEKKLRLYRNQDVMLWLMTLELTKNHFKELNLNYHQLKLENLAVNVQEADAKLNPLNQTLPMVLPVKVYPATAFGEVQYHKTPIRTVYIREEHTKALKMGNFKALVKDRRLNGLFSFIKEENDTQKHPISQLRLRRELEIYQSLRVDAFKETLSLEEKLLNKHTSLSSLENEFRALLEEWKKEYAASSMVTDEHIAFIASVRNAFCHNQYPFYKEALHAPIPLFTVAQPTTEEKDGLGIAEALLKVLREYCEIVKSQI

SEQ ID NO: 1977 - protein, 1003 aa, Artificial; identical to SEQ ID NO: 1494
  Synthetic

SEQ ID NO: 1978 - protein, 1140 aa, Artificial; identical to SEQ ID NO: 1356
  Synthetic

SEQ ID NO: 1979 - protein, 1128 aa, Artificial
  Synthetic
METQISNIENKYRILNDDPQYFGGYLNMARLNVFNISNHIAKEFNLPLLPEEGHLKNSFLCQKENKKVNWNHIFSKTNRFLSILKVFDVESLPKEEQKMTDSEGKDFALMSDSLKIVFGELQEFRNDYSHYYSTENGTSRKTTVSDEMSLFLRTNFLRAIQYTKERFKGVLNDEDYQLVASKKVLEADNTITVEGLVFLTSMFLEREYAFQFIGKITGLKGTQNNSFISTREVLMAFCLKLPHDRFQSDDTRQAFSLDLINELTRCPKELYNAITEEGKMKFQPKLDEPGIKNLLDNSTNNKKKIDAEDYDEYIESLTKRIRYNNRFSDFALKYIEETDILGDFRFQIDLGKLFVDEYDKFFNGEEVPRRIIENVKAFGKLNDFNDESILLAQIENGYPSKGFEQFAPHYNTENNKIGISVKVDTAKLRSNSKGEPGKNLNQPLPEAFLSLNELPKIILLDYLQKGEPEQLINDFILINNSKLMKMSFIEEIKNLLPKEWNEFRKRADTRKQAAYNNETLAYLLERKQILNQVLVSYQLNDKQIPGRILDYWLNIKEVEEGRAVSDRLKLMKRDCMSRLKALEKFKIDRNRSKIPKTGEMATFLAKDIVDMVVSEGIKKKITSFYYDKMQECLALFADPEKKRLFIHIVIRELRLNGTGGHPFLFQLNFDKINCTSDFYSEYLREKGHKMVKEKNLKTGKIVLTDHSWMALTFYKLEFNDKVDKLMTVVKLPLNKLNIPFTLRQLEGKTINTLEQWLHNITKGKNLNDGKHPVNLPTNLFDERLTACLQKELDKKQIIYPPYANWNELFKTWWKSRNDSTQSFYNAEREYIIFDEKVNFYPNRQEKFADYYHHAVKAAYQKKRNERTLQQKDDKHLPDILFAQVEKTFKQTIAGTEKEIRMVQEEDRIMLVMLESLLEDGKKLQLKLSEINTLLNATTEIKQVVTAKLSFNDSGEIIKDKTNPEITKTITAVRKRKDYSVLRKFVFDRRLPELFGYFDGDEIQFESLKAELDAYNKAKQEVLDVVFKLEKKIIAKDCNGVQQLFSDETGNLLTGNIQHKPYLTWLKSKGLIGDSTFTFLNMVRNCFSHNQYPQKKTMERFIDHWETNRFALTIATKYNHEITRIMEKI

SEQ ID NO: 1980 - protein, 1003 aa, Artificial; identical to SEQ ID NO: 1494
  Synthetic

SEQ ID NO: 1981 - protein, 1003 aa, Artificial; identical to SEQ ID NO: 1632
  Synthetic

SEQ ID NO: 1982 - protein, 1003 aa, Artificial; identical to SEQ ID NO: 1632
  Synthetic

SEQ ID NO: 1983 - protein, 985 aa, Artificial; identical to SEQ ID NO: 1567
  Synthetic

SEQ ID NO: 1984 - protein, 1003 aa, Artificial
  Synthetic
MGAIENKHIFAAYANLAIDGLIKTLNFIAKKLDTQKQLSSWDIKHVITLIDSIFDQNPQNNLEQVVEGYLPWIKPIIEMKTPKKGERQSDKLCIEYKTIITAFASLLNDVRNYYTHYYHDPICIYPGGYDIPSSLNCIYDSAINIIKERFQAEEKEMEHLRRYTRKKGRVVLKTEDDHFYYTLANNNDLSEKGYAFFISMFLERKYSYLFLKKLSGFKRGDSLQYRLTLEVFTALSTKPPVERLRTTKDTKQDRALDILNELSKIPIELYQTLEPKYREMYNETLQPTDAEDPYGLPDRSRIRFRSRFETFALHFLDKQPDFKEIGFYTYLGNYFHNGYQKTRVDRETKDRYINFQLAGFCKNIQDISAKKLSEALNVKSIDISTDSIPDINSFEPYLVQSMPHYIVNGNNIGIKVLPEGKDTYPTIDEKGAKMPIADFWLSKYELPAMLFYTYLRNNNIHKSHCPLSVKDIIERSIHKSTKQKHPEERSELMLRRVMKAIFWTDSKLNEVERIKSQKSAFGKRQHEILKAGRIAEMLVRDMLWLQPSKNNGRDKVTEPNFQAIQVSLAYFGIRRNDLTEIFTRAGLINSSNPHPFLAQIGTNYTSLIEFYIAYLKERKVYFSRIQKKILQGKLNIQCHPLRDLQREPNKPQEKEEAIFLPRGLFNEAIINCLKKSKLKQLIESPTREKSPALNVSYLIQNYFRAYFEDQSQEFYAQPRNYRLFDKLSPNKGKSKSYLSLEQRIKKMEELRPSKIPVAEANKLLEKEDRLYRKNYNEICDNESIIRLYQIQDILLFMMTKEYLPSDLYNRINKYKLENVKGILNERVSYLIDLNPLKIQGEDIKIKDYGKLFYIHHDTRISSLNKVLSKVKRNNSISSSVKIQPYENYKRECLDFEEAQIQIIPIIHSFEIAMVSMFPDLKKATPGNYYDFNELITEYEKRTKQKIDSSFLIKTRNMFLHDKYEAECIKEISDDFVYAKKIIAEFKMKIENIKLEDLSNDSSA

SEQ ID NO: 1985 - protein, 1171 aa, Artificial; identical to SEQ ID NO: 1349
  Synthetic

SEQ ID NO: 1986 - protein, 1134 aa, Artificial
  Synthetic
MNETDYLAKRLEYNYASIEDKHYFGGYFNLAQNNINDLSKAFKEKFGMKPKSCILDFFTQDKAIAEYQLGVEFLQKNLPVIRYLYLPTSHKRFENVPKNQLISEQRNYFKNSLKVLKNLIRDYRNFYTHHFHKPIPVFPETYKLLDDLFLAVANDVKKHRMKTDASKQLLKKGLIEELAQLEKLKLEDLKKLKREGKKVNLNDKEAITNAILNDSFSHLLPKENTISKYYSAVPTEDIDTENGVTISESGIIFLLGLFLTKKQSEDLRSRVKGFKAKLIVNPENPINKKNNSLKYMATHWVFGYLGFKGLKNRFTTTFTKDTLLAQIVDELSKVPDELYQVLPEELKNEFLEDMNEYLKEENSESLDKATVIHPVIRKRYENKFAYFALRFLDEFVDFPTLRFQLHLGNYVHDKREKPIEGTKYVTERIVKEKIKAFAKLSEAAQLKQKYFEEKENHQSIGLQLYPNPSYNFVGNNIPIHLNLNEHFFPKEVKIVAGRLKKRNSSYKSDHPEEYKVRTDNKIKPDAILQDLGKPEKLAPVAMLSLNELPALLHLVLTKKTPEEIEIIIAQKIAERYNVLTNYKAGDDISKGQITKNLLKAKQKKEVNLDKLQLAIEKEIAVTNDKLQTIALHIKERNDPKQKRKYVFTNKEIGLQVTWLANDLKRFMPKGSRQNWRGQHHSQLQKSLAFYDIQPKEPLSLLEEVWDFKNEAYLWNNGIRRSFDKRDFISFYTSYLNNRKETFQRFKDQLNGIRSNKKILDKFIKQQHLWNLFHKRLYVIDTIEEQVEKLLVKPMQFPKGVFDHKPTYIKGKSIQENPECFADWYVAWNQHTDYQKFYSWDRDYKSAYLSGEQEKTEKRFIRVQGSKINKVKQQDVLLAKMASIIFNELYLPEDAEHLDLNLSDIYKTQTERKAEIEAALIQSHKTTGDNSANIIKSTSAWTLTVPYCSKNIYEPQVKLKELGKFKKFIASQKVQTLFEYKPQKIWNKTELEEVLELKANSYEVIRRDYLLKSIQEFEKYMIKKLPTLIDTNEHPNFNKYLTTFLKSLELVSEEDAKWLISKKDFDTTPIDELKKQSKIMEKAFLLVMIRNKFSHNQLPRKIYYDEIYKNVPNAVSINFNELFLEYTNQTILEFK

SEQ ID NO: 1987 - protein, 1127 aa, Artificial
  Synthetic
MNTHQEELQSWITRKRLPDTEMKKYWAAYMNLARLNFFKTLMFISNSIGDLKPAKDNNGKGNTEVNMHNMGILTALLGPEDEEKARLLIFKHFPFLRTFCIEKELSLSKQRTILIDMACIIGRYRNMYSHSIFISDDNEKVLESEKRCSEYLQSILTVSTRIIKERYRSNKNDAQRGMIDDKSLKFISENKVKFVYDENGKRITAPNKKYYLSTIDKDNTHLSYFGKLMLTCILLEKKYATDFLTQCHFLDAFNDSEVAPKLSERRLMLEVMTALRIRLAEKKLSNEKSEVQISLDILNELKKCPFELYELLGSEDKRLFTIVADTGETILLRRHEDRFPQLALSWIDSSKAFDHLRFQVNAGKLRYLFRDNKHCIDGQTRMRVLEEPLNGYRRLMEFEEERIQKQSGEIRSLWPGLDILNKDETPRNDASVLPYISDYRVRYLFDGDNIGISIGDFTPSITKTDETKYRVTGKTADCCLSKYELLGLLFYHLLTLRHGDNKRSTKNAEDIIIDAIKRYKRLFSDVKEGILKPIKEENANQLGNRIWNSYGINIKDIPDKIIDYLLVRECNEDEKFTAWKNGFISEMLQSTKNRIKRFEKDSEAVISSDNKPGKKNHVSLKPGAYASFIANDIVFFQECGATEKMTGLNFKVMQSRLATFTKDGSTSFNILLQTLKNAHLVSTTYGKGDHPFLYRVIKQQPSDIVQFYKIYLNEKVLYLQSDIPDNAIFLHGERKRWENRNEQYYRDLAERYLQRPIQLPRQLFESHIRQLLLSDCIKGERGNDLKEAINSAASQGRCNTTYMIMEYFADYLCDGTQFFYGLFDGDLSHEYNYRFYSLISNNIENSKKLVLTLKKGNNSKESPFISALERGIHWSKMNPLMKKGLKNDSSEGDFVHAAKRAYKEMTETERMFRRYAVQDEVLFLAAKITIRRALGLSEQYNCLLGDIKPQGGSLLEQTIPSITTKHTINTGNKKQKPKQVQILQKNVKLKDFGKVFKLLNDRRIFDLLFNKGNEAVSMTDLCEELERYDRHRVDVFDSVLKYESKITKGYTNKELMNESGQIDFKAIQAFDKQNTTADKEDLRLIRNAFSHNQYPQYNNEPILFDKDIPEIADEISIIAKDIEENTK

SEQ ID NO: 1988 - protein, 1134 aa, Artificial; identical to SEQ ID NO: 1986
  Synthetic

SEQ ID NO: 1989 - protein, 1003 aa, Artificial
  Synthetic
MGAIENKHIFAAYANLTIDGLIKTLNFIAKKLDTQKQLSSWDIKHVITLIDSIFDQNPQNNLEQIVEGYLPWIKPIIEMKTPKKGERQSDKLCIEYKTIITAFASLLNDVRNYYTHYYHDPICIYPRGYDIPSSLNCIYDSAINIIKERFQAEEKEMEHLRRYTRKKGRVVLKTEDDHFYYTLVNNNGLSEKGYAFFISMFLERKYSYLFLKKLSGFKRGDSLQYRLTLEVFTALSTKPPVERLRTTKDTKQDRALDILNELSKIPIELYQTLEPKYREMYNETLQPTDAEDPYGLPDRSRIRFRSRFETFALHFLDKQADFKEIGFYTYLGNYFHNGYQKTRVDRETKDRYINFQLAGFCKNIQDISAKKLSEALNVKSIDISTDSIPDINSFEPYLVQSTPHYIVNGNNIGIKVLPEGKDTYPTIDEKGAKMPIADFWLSKYELPAMLFYTYLRNNNIHKSHCPLSVKDIIERSIHKSTKQKHPEERSELMLRRVMKAIFWTDSKLNEVERIKSQKSAFGKRQHEILKAGRIAETLVRDMLWLQPSKNNGRDKVTEPNFQAIQVSLAYFGIRRNDLTEIFTRAGLINSSNPHPFLAQIGTNYTSLIEFYIAYLKERKVYFSRIQKKILQGKLNIQCHPLRDLQREPNKPQDKEEAIFLPRGLFNEAIINCLKKSKLKQLIESPTREKSPALNVSYLIQNYFRTYFEDQSQEFYAQPRNYRLFDKLSPNKGKSKSYLSLEQRIKKMEELRPSKIPVAEANKLLEKEDRLYRKNYNEICDNESIIRLYQIQDILLFMMTKEYLPSDLYNRINKYKLENVKGILNERVSYLIDLNLLKIQGEDIKIKDYGKLFYIHHDTRISSLNKVLSKVKRNNSISSSVKIQPYENYKRECLDFEEAQIQIIPIIHSFEIAMVSMFPDLKKATPGNYYDFNELITEYEKRTKQKIDSSFLIKTRNMFLHDKYEAECIKEISDDFVYAKKIIAEFKMKIENIKLEDLSNDSSA

SEQ ID NO: 1990 - protein, 1003 aa, Artificial; identical to SEQ ID NO: 1494
  Synthetic

SEQ ID NO: 1991 - protein, 1127 aa, Artificial
  Synthetic
LQKQDKLFVDRKKNAIFAFPKYITIMENKEKPEPIYYELTDKHFWAAFLNLARHNVYTTINHINRRLEIAELKDDGYMMGIKGSWNEQAKKLDKKVRLRDLIMKHFPFLEAAAYEITNSKSSNNKEQREKEQSEALSLNNLKNVLFIFLEKLQVLRNYYSHYKYSEESPKPIFETSLLKNMYKVFDANVRLVKRDYMHHENIDMQRDFTHLNRKKQVGRTKNIIDSPNFHYHFADKEGNMTIAGLLFFVSLFLDKKDAIWMQKKLKGFKDGRNLREQMTNEVFCRSRISLPKLKLENVQTKDWMQLDMLNELVRCPKSLYERLREKDRESFKVPFDIFSDDYDAEEEPFKNTLVRHQDRFPYFVLRYFDLNEIFEQLRFQIDLGTYHFSIYNKRIGDEDEVRHLTHHLYGFARIQDFAPQNQPEEWRKLVKDLDHFETSQEPYISKTAPHYHLENEKIGIKFCSTHNNLFPSLKREKTCNGRSKFNLGTQFTAEAFLSVHELLPMMFYYLLLTKDHPKGEGVNKIEKIIRTEISNIYDIYDAFANGEINSIADLTCRLQKTNILQGHLPKQMISILEGRQKDMEKEAERKIGEMIDDTQRRLDLLCKQTNQKIRIGKRNAGLLKSGKIADWLVNDMMRFQPVQKDQNNIPINNSKANSTEYRMLQRALALFGSENFRLKAYFNQMNLVGNDNPHPFLAETQWEHQTNILSFYRNYLEARKKYLKGLKPQNWKQYQHFLILKVQKTNRNTLVTGWKNSFNLPRGIFTQPIREWFEKHNNSKRIYDQILSFDRVGFVAKAIPLYFTEEYKDNVQPFYDYPFNIGNKLKPQKGQFLDKKERVELWQKNKELFKNYPSEKKKTDLAYLDFLSWKKFERELRLIKNQDIVTWLMFKELFKTTTVEELKIGEIHLRDIDTNTANEESNNILNRIMPMKLPVKTYETDNKGNILKERPLATFYIEETETKVLKQGNFKVLAKDRRLNGLLSFAETTDIDLEKNPITKLSVDHELIKYQTTRISIFEMTLGLEKKLIDKYSTLPTDSFRNMLGSWLEDKTNSAELNNYVDCLITVRNAFAHNQYPMYNPKLFAEVKKFSLFPSSNTKKTELNIASQLLRIVEKAIDEIEKSENKN

SEQ ID NO: 1992 - protein, 1121 aa, Artificial; identical to SEQ ID NO: 1525
  Synthetic

SEQ ID NO: 1993 - protein, 1144 aa, Artificial
  Synthetic
MDIIPKLTYTIESTPWYFGAYLNMARHNVYLLINHLTEKFSHLKYEKLKDDKEIKGKNILTEIFDTTKSDLDEERFRIYKYLVRGHYLPFIKVYSDSKGNALENNPLVYYDRLHQFINNSFALLVKFRDAFSHYLALDEHGNSIDSRQLNIDHEIAHDLETIFQDSLSLSASRFYLTQQESDFEHLKHYALFKETETKLSENGFYFFICLFLEKQYAIKFLKKIKGFKNETIPAFRATLLAFTHYTIRIPDIRLDNDEPRMGVLMEMLNELQKCPIELYKRLTDEDKKKFEPALDEESQLNLILNSTANSENLSDEQTDSLLIDLTTLKRHQNRFSYFALRCIDELNLLPGIHFQITVGKIELRAYPKVIGKVATNRRILKEVNAFGKLSAYEGKENWFSQQLKMIYEDENLVFDQYNPHYNIQENKIAFYVLDSGTSGTLLPLKKKNTLPTGFLSLNDLPKLIVRALNSPGRTVSLIKDFIAKNENIILNEDALVAWKEQLHLDPAVFTRRIIKENALRGKEGIAYLTQRKTDALFKRYKALSIKIDSLAGLKKLIDQLHSKKDKEYISQIVYTHFLNKRKDALAGILPKGLPVNQLPLKVINYLLSLETVGHKKKFLHYIKEEKRTCKTRLKALNKQENNAPKIGEIATFLARDIINMVVNEETKQNITSAYYNRLQNKIAYFSISKPEIAEMLTELNLFDKKTGHPFLDKGSIMASSGILAFYEYYLVEKAAWIDKQILHKNQLKKDLESHLNKLPFAYARRYQKNNEVNFTKWLINKKVMPVNIPNNLFDADVNKILKDSLRKMGIAFKDTEKFALLLSKSMMGDTQPFYTYKREYTVDGEKIPFYPANQSGKDIKTDYGKHADASEKEIRFIQTQDRVIKLLCRNIIQSIVKFKESNLDIILNNIYPFSETSVLNAPQKFEFTLPKNGKKKIIVAEDTSAQKEQVLRYKGLSDLEERKQYNGQKGYQWTIKDFGRFKRFVHDRRLSEVLDYIDAPNATFDLLAYQLDEYDRYRVEIFQQTFDFEKAIAIKHLDRVKHFDSIDKAGKKGKIAEVSFRVYLDVLKELKILATDEADLLKNVRNKFSHSEFPPFIKSLTKITSENIASFEANKFTKDAISALDISVPSKILNEYKAVLSKFS

SEQ ID NO: 1994 - protein, 1003 aa, Artificial
  Synthetic
MGAIENKHIFAAYANLAIDGLIKTLNFIAKKLDTQKQLSSWDIKHVITLIDSIFDQNPQNNLEQVVEGYLPWIKPIIEMKTPKKGERQSDKLCIEYKTIITAFASLLNDVRNYYTHYYHDPICIYPGGYDIPSSLNCIYDSAINIIKERFQAEEKEMEHLRRYIRKKGRVVLKTEDDHFYYTLANNNDLSEKGYAFFISMFLERKYSYLFLKKLSGFKRGDSLQYRLTLEVFTALSTKPPVERLRTTKDTKQDRALDILNELSRIPIELYQTLEPKYREMYNETLQPTDAEDPYGLPDRSRIRFRSRFEAFALHFLDKQADFKEIGFYTYLGNYFHNGYQKTRVDRETKDRYINFQLAGFCKNIQDISAKKLSEALNVKSIDISTDSIPDINSFEPYLVQSTPHYIVNGNNIGIKVLPEGKDTYPTIDEKGAKMPIADFWLSKYELPAMLFYTYLRNNNIHKSHCPLSVKDIIERSIHKSTKQKHPEERSELMLRRVMKAIFWTDSKLNEVERIKSQKSAFGKRQHEILKAGRIAETLVRDMLWLQPSKNNGRDKVTEPNFQAIQVSLAYFGIRRNDLTEIFTRAGLINSSNPHPFLAQIGTNYTSLIEFYIAYLKERKVYFSRIQKKILQGKLNIQCHPLRDLQREPNKPQEKEEAIFLPRGLFNEAIINCLKKSKLKQLIESPTREKSPVLNVSYLIQNYFRAYFEDQSQEFYAQPRNYRLFDKLSPNKGKSKSYLSLEQRIKKMEELRPSKIPVAEANKLLEKEDRLYRKNYNEICDNESIIRLYQIQDILLFMMTKEYLPSDLYNRINKYKLENVKGILNERVSYLIDLNPLKIQGEDIKIKDYGKLFYIHHDTRISSLNKVLSKVKRNNSISSSVKIQPYENYKRECLDFEEAQIQIIPIIHSFEIAMVSMFPDLKKATPGNYYDFNELITEYEKRTKQKIDSSFLIKTRNMFLHDKYEAECIKEISDDFVYAKKIIAEFKMKIENIKLEDFSNDSSA

SEQ ID NO: 1995 - protein, 1003 aa, Artificial; identical to SEQ ID NO: 1578
  Synthetic

SEQ ID NO: 1996 - protein, 1003 aa, Artificial; identical to SEQ ID NO: 1494
  Synthetic

SEQ ID NO: 1997 - protein, 1003 aa, Artificial; identical to SEQ ID NO: 1578
  Synthetic

SEQ ID NO: 1998 - protein, 1003 aa, Artificial; identical to SEQ ID NO: 1578
  Synthetic

SEQ ID NO: 1999 - protein, 1140 aa, Artificial; identical to SEQ ID NO: 1356
  Synthetic

SEQ ID NO: 2000 - protein, 1126 aa, Artificial; identical to SEQ ID NO: 1409
  Synthetic

SEQ ID NO: 2001 - protein, 1144 aa, Artificial; identical to SEQ ID NO: 1993
  Synthetic

SEQ ID NO: 2002 - protein, 1135 aa, Artificial
  Synthetic
MNTVPASENKGQSRTVEDDPQYFGLYLNLARENLIEVESHVRIKFGKKKLNEESLKQSLLCDHLLSVDRWTKVYGHSRRYLPFLHYFDPDSQIEKDHDSKTGVDPDSAQRLIRELYSLLDFLRNDFSHNRLDGTTFEHLEVSPDISSFITGTYSLACGRAQSRFADFFKPDDFVLAKNRKEQLISVADGKECLTVSGLAFFICLFLDREQASGMLSRIRGFKRTDENWARAVHETFCDLCIRHPHDRLESSNTKEALLLDMLNELNRCPRILYDMLPEEERAQFLPALDENSMNNLSENSLNEESRLLWDGSSDWAEALTKRIRHQDRFPYLMLRFIEEMDLLKGIRFRVDLGEIELDSYSKKVGQNGEYDRTITDYALAFGKLSDFQNEEEVSRMISGEASYPVRFSLFAPRYAIYDNKIGYCHTSDPVYPKSKTGEKRALSNPQSMGFISVHDLRKLLLMELLCEGSFSRMQSDFLRKANRILDETAEGKLQFSALFPEMRHRFIPPQNPKSKDRREKAETTLEKYKQEIKGRKDKLNSQLLSAFDMDQRQLPSRLLDEWMNIRPASHSVKLRTYVKQLNEDCRLRLRKFRKDGDGKARAIPLVGEMATFLSQDIVRMIISEETKKLITSAYYNEMQRSLAQYAGEENRRQFRAIVAELHLLDPSSGHPFLSATMETAHRYTEDFYKCYLEKKREWLAKTFYRPEQDENTKRRISVFFVPDGEARKLLPLLIRRRMKEQNDLQDWIRNKQAHPIDLPSHLFDSKVMELLKVKDGKKKWNEAFKDWWSTKYPDGMQPFYGLRRELNIHGKSVSYIPSDGKKFADCYTHLMEKTVRDKKRELRTAGKPVPPDLAADIKRSFHRAVNEREFMLRLVQEDDRLMLMAINKMMTDREEDILPGLKNIDSILDEENQFSLAVHAKVLEKEGEGGDNSLSLVPATIVIKSKRKDWSKYIRYRYDRRVPGLMSHFPEHKATLDEVKTLLGEYDRCRIKIFDWAFALEGAIMSDRDLKPYLHESSSREGKSGEHSTLVKMLVEKKGCLTPDESQYLILIRNKAAHNQFPCAAEMPLIYRDVSAKVGSIEGSSAKDLPEGSSLVDSLWKKYEMIIRKILPILDPENRFFGKLLNNMSQPINDL

SEQ ID NO: 2003 - protein, 1175 aa, Artificial
  Synthetic
MTEQNERPYNGTYYTLEDKHFWAAFLNLARHNAYITLTHIDRQLAYSKADITNDEDILFFKGQWKNLDNDLERKARLRSLILKHFSFLEGAAYGKKLFESQSSGNKSSKKKELTKKEKEELQANALSLDNLKSILFDFLQKLKDFRNYYSHYRHPESSELPLFDGNMLQRLYNVFDVSVQRVKRDHEHNDKVDPHRHFNHLVRKGKKDRYGNNDNPFFKHHFVDREGTVTEAGLLFFVSLFLEKRDAIWMQKKIRGFKGGTETYQQMTNEVFCRSRISLPKLKLESLRTDDWMLLDMLNELVRCPKSLYDRLREEDRARFRVPVDILSDEDDTDGTEEDPFKNTLVRHQDRFPYFALRYFDLKKVFTSLRFHIDLGTYHFAIYKKNIGEQPEDRHLTRNLYGFGRIQDFAEEHRPEEWKRLVRDLDYFETGDKPYITQTTPHYHIEKGKIGLRFVPEGQHLWPSPEVGATRTGRSKYAQDKRFTAEAFLSVHELMPMMFYYFLLREKYSDEASAEKLQGRIKRVIEDVYAVYDAFARDEIDTLDRLDAYLADKGIRRGHLPRQMIAILSQEHKDMEEKIRKKLQEMIADTDHRLDMLDRQTDRKIRIGRKNAGLPKSGVIADWLVRDMMRFQPVAKDTSGKPLNNSKANSTEYRMLQRALALFGGEKERLTPYFRQMNLTGGNNPHPFLHETRWESHTNILSFYRSYLKARKAFLQSIGRSDRVENHRFLLLKEPKTDRQTLVAGWKGEFHLPRGIFTEAVRDCLIEMGHDEVGSYKEVGFMAKAVPLYFERACKDRVQPFYDYPFNVGNSLKPKKGRFLSKEKRAEEWESGKERFRDLEAWSQSAARRIEDAFAGIENASRENKKKIEQLLQDLSLWKAFESKLKVRGDKINIAKLKKEILEAKEHPYHDFKSWQKFERELRLVKNQDIITWMMCRDLMEENKVEGLDTGTLYLKDIWTDVHEQGSLNVLNRVKPMRLPVVVYRADSRGHVHKEQAPLATVYIEERDTKLLKQGNFKSFVKDRRLNGLFSFVDTGALAMEQYPISKLRVEYELAKYQTARVCAFEQTLELEESLLTRYPHLPDKNFRKMLESWSDPLLDKWPDLHRKVRLLIAVRNAFSHNQYPMYDEAVFSSIRKYDPSSPDAIEERMGLNIAHRLSEEVKQAKEMAERIIQA

SEQ ID NO: 2004 - protein, 1003 aa, Artificial
  Synthetic
MGAIENKHIFAAYANLAIDGLIKTLNFIAKKLDTQKQLSSWDIKHVITLIDSIFDQNPQNNLEQIVEGYLPWIKPIIEMKTPKKGERQSDKLCIEYKTIITAFASLLNDVRNYYTHYYHDPICIYPGGYDIPSSLNCIYDSAINIIKERFQAEEKEMEHLRRYTRKKGRVVLKTEDDHFYYTLANNNDLSEKGYAFFISMFLERKYSYLFLKKLSGFKRGDSLQYRLTLEVFTALSTKPPVERLRTTKDTKQDRALDILNELSKIPIELYQTLEPKYREMYNETLQPTDAEDPYGLPDRSRIRFRSRFETFALHFLDKQADFKEIGFYTYLGNYFHNGYQKTRVDRETKDRYINFQLAGFCKNIQDISAKKLSEALNVKSIDISTDSIPDINSFEPYLVQSTPHYIVNGNNIGIKVLPEGKDTYPTIDEKGAKMPIADFWLSKYELPAMLFYTYLRNNNIHKSHCPLSVKDIIERSIHKSTKQKHPEERSELMLRRVMKAIFWTDSKLNEVERIKSQKSAFGKRQHEILKAGRIAETLVRDMLWLQPSKNNGRDKVTEPNFQAIQVSLAYFGIRRNDLTEIFTRAGLINSSNPHPFLAQIGTNYTSLIEFYIAYLKERKVYFSRIQKKILQGKLNIQCHPLRDLQREPNKPQDKEEAIFLPRGLFNEAIINCLKKSKLKQLIESPTREKSPALNVSYLIQNYFRTYFEDQSQEFYAQPRNYRLFDKLSPNKGKSKSYLSLEQRIKKMEELRPSKIPVAEANKLLEKEDRLYRKNYNEICDNESIIRLYQIQDILLFMMTKEYLPSDLYNRINKYKLENVKGILNERVSYLIDLNLLKIQGEDIKIKDYGKLFYIHHDTRISSLNKVLSKVKRNNSISSSVKIQPYENYKRECLDFEEAQIQIIPIIHSFEIAMVSMFPDLKKATPGNYYDFNELITEYEKRTKQKIDSSFLIKTRNMFLHDKYEAECIKEISDDFVYAKKIIAEFKMKIENIKLEDLSNDSSA

SEQ ID NO: 2005 - protein, 1144 aa, Artificial; identical to SEQ ID NO: 1993
  Synthetic

SEQ ID NO: 2006 - protein, 1175 aa, Artificial
  Synthetic
MTEQNEKPYNGTYYTLEDKHFWAAFLNLARHNAYITLTHIDRQLAYSKADITNDEDILFFKGQWKNLDNDLERKARLRSLILKHFFFLEGAAYGKKLFESQSSGNKSSKKKELTKKEKEELQANALSLDNLKSILFDFLQKLKDFRNYYSHYRHPESSELPLFDGNMLQRLYNVFDVSVQRVKRDHEHNDKVDPHRHFNHLVRKGKKDKYGNNDNPFFKHHFVDREGKVTEAGLLFFVSLFLEKRDAIWMQKKIRGFKGGTETYQQMTNEVFCRSRISLPKLKLESLRTDDWMLLDMLNELVRCPKSLYDRLREEDRARFRVPVDILSDEDDTDGAEEDPFKNTLVRHQDRFPYFALRYFDLKKVFTSLRFHIDLGTYHFAIYKKNIGEQPEDRHLTRNLYGFGRIQDFAEEHRPEEWKRLVRDLDYFETGDKPYITQTTPHYHIEKGKIGLRFVPEGQHLWPSPEVGATRTGRSKYAQDKRFTAEAFLSVHELMPMMFYYFLLREKYSEEASAERVQGRIKRVIEDVYAVYDAFARDEINTRDELDACLADKGIRRGHLPRQMIAILSQKHKDMEEKVRKKLQEMIADTDHRLDMLDRQTDRKIRIGRKNAGLPKSGVIADWLVRDMMRFQPVAKDTSGKPLNNSKANSTEYRMLQRALALFGGEKERLTPYFRQMNLTGGNNPHPFLHETRWESHTNILSFYRSYLKARKAFLQSIGRSDRVENHRFLLLKEPKTDRQTLVAGWKGEFHLPRGIFTEAVRDCLIEMGLDEVRSYKEVGFMAKAVPLYFERASKDRVQPFYDYPFNVGNSLKPKKGRFLSKEKRAEEWESGKERFRDLEAWSHSAARRIEDAFAGIENASRENKKKIEQLLQDLSLWETFESKLKVKADKINIAKLKKEILEAKEHPYLDFKSWQKFERELRLVKNQDIITWMMCRDLMEENKVEGLDTGTLYLKDIRTDVQEQGSLNVLNHVKPMRLPVVVYRADSRGHVHKEQAPLATVYIEERDTKLLKQGNFKSFVKDRRLNGLFSFVDTGGLAMEQYPISKLRVEYELAKYQTARVCAFEQTLELEESLLTRYPHLPDKNFRKMLESWSDPLLAKWPELHEKVRLLIAVRNAFSHNQYPMYDEAVFSPIRKYDPSSPDAIEERMRLNIAHRLSEEVKQAKETVERIIQA

SEQ ID NO: 2007 - protein, 1003 aa, Artificial; identical to SEQ ID NO: 1768
  Synthetic

SEQ ID NO: 2008 - protein, 1127 aa, Artificial
  Synthetic
MNTHQEELQSWITRKRLPDTEMKKYWAAYMNLARLNFFKTLMFISNSIGDLKPAKDNNGKGNTEVNMHNMGILTALLGPEDEEKARLLIFKHFPFLRTFCIEKELSLSKQRTILIDMACIIGRYRNMYSHSIFISDDNEKVLESEKRCSEYLQSILTVSTRIIKERYRSNKNDAQRGMIDDKSLKFISENKVKFVYDENGKRITAPNKKYYLSTIDKDNTHLSYFGKLMLTCILLEKKYATDFLTQCHFLDAFNDSEVAPKLSERRLMLEVMTALRIRLAEKKLSNEKSEVQISLDILNELKKCPFELYELLGSEDKRLFTIVADTGETILLRRHEDRFPQLALSWIDSSKAFDHLRFQVNAGKLRYLFRDNKHCIDGQTRMRVLEEPLNGYRRLMEFEEERIQKQSGEIRSLWPGLDILNKDETPRNDASVLPYISDYRVRYLFDGDNIGISIGDFTPSITKTDETKYRVTGKTADCCLSKYELPGLLFYHLLTLRHGDNKRSTKNAEDIIIDAIKRYKRLFSDVKEGILKPIKEENANQLGNRIWNSYGINIKDIPDKIIDYLLVRECNEDEKFTAWKNGFISEMLQSTKNRIKRFEKDSEAVISSDNKPGKKNHVSLKPGAYASFIANDIVFFQECGATEKMTGLNFKVMQSRLATFTKDGSTSFNILLQTLKNAHLVSTTYGKGDHPFLYRVIKQQPSDIVQFYKIYLNEKVLYLQSDIPDNAIFLHGERKRWENRNEQYYRDLAERYLQRPIQLPRQLFESHIRQLLLSDCIKGERGNDLKEAINSAASQGRCNTTYMIMEYFADYLCDGTQFFYGLFDGDLSHEYNYRFYSLISNNIENSKKLVLTLKKGNNSKESPFISALERGIHWSKMNPLMKKGLKNDSSEGDFVHAAKRAYKEMTETERMFRRYAVQDEVLFLAAKITIRRVLGLSEQYNCLLGDIKPQGGSLLEQTIPSITTKHTINTGNKKQKPKQVQILQKNVKLKDFGKVFKLLNDRRIFDLLFNKGNEAVSMTDLCEELERYDRHRVDVFDSVLKYESKITKGYTNKELMNESGQIDFKAIQAFDKQNTTADKEDLRLIRNAFSHNQYPQYNNEPILFDKDIPEIADEISIIAKDIEENTK

SEQ ID NO: 2009 - protein, 1144 aa, Artificial; identical to SEQ ID NO: 1993
  Synthetic

SEQ ID NO: 2010 - protein, 1003 aa, Artificial; identical to SEQ ID NO: 1494
  Synthetic

SEQ ID NO: 2011 - protein, 1134 aa, Artificial; identical to SEQ ID NO: 1986
  Synthetic

SEQ ID NO: 2012 - protein, 1003 aa, Artificial; identical to SEQ ID NO: 1494
  Synthetic

SEQ ID NO: 2013 - protein, 1144 aa, Artificial; identical to SEQ ID NO: 1993
  Synthetic

SEQ ID NO: 2014 - protein, 1003 aa, Artificial; identical to SEQ ID NO: 1494
  Synthetic

SEQ ID NO: 2015 - protein, 1134 aa, Artificial; identical to SEQ ID NO: 1986
  Synthetic

SEQ ID NO: 2016 - protein, 1003 aa, Artificial; identical to SEQ ID NO: 1494
  Synthetic

SEQ ID NO: 2017 - protein, 1130 aa, Artificial
  Synthetic
METTATFRNYNCRNSFKQIFNFKGAIAPIAEKASRNFTLKTKNPVNREQRLHYFALAYSFKQLDTENLFEKVLDETLREKRPTKFLALQKFDSAFCIELNKVVGIIRNINSHYIHDFEKLKTDEIHPSVLAFLKESFDVALIQIYLKEKEITYEQFVGSGDIDKRLVGFMHDKFYPLDDKKTYPEEYLEIRKEFKSLSKKEAIDTILFVEVDSSFDWMVFDTHKAFTVSSGKYLSFYACLFLLSMFLYKSEANQLISKIKGFKKNTTDEEKSKREIFSFFSKKFSSQDIDSEENHLVKFRDLIQYLNRYSLAWNKDLELASGHPLMTDRLKATIIDMEIDRSFPLFTGNKRFKEYARLKLWNDKSINNAFTDEEKTSFDYEINTCPELKDAHTKLEELKQMKGLYGHKKERNEKEIYRTKKTILTKANEPNPIKEKLENRIKNNLLFVSYGRNQDRFMDFATRYLAETKYFGVDAQFKLYQFFTSEEQNVEMDRLKKTLPKKEYDNLKFHQGKLVHYSTFEEQLARYESWDTPFVIENNAIQIKMNLGNGIDKIVSIQRGLMVYLLEDALYNVKPEAIENAGKKLLTAYYAQHQAEFTTSKLILQEQDSISPEQKNKFKKILPKRLLHRYSPAIQNYLPEHNTLQLILEKAKDSEARYEKLVEKAKAEGKYEDFVKRNKGKQFKLQFVRKAWHLMYFKDSYMQQVAVSGHHKRFHIERDEFNDFSRYLFAFDEVALYKDYLHEMLEKKGFLENVAFKTLFESGSSLDNLYVKTKQAYQAWIHTQAEREQVSDKYSIANYNKLFEDDLFYINRSHFIDYLKSSSKLQVDAQGWMRFRALENAPYLIPAYYYADKLIKEETKSCGKLYNKLNATRLEDVMLYEIGMRYLQLDKQIVQKAKKPVIEILNQDVALDIKDVQNKHLYQLQIPFNKIDEFVGLIAHKGEQDVQFKSSYLANIVAYLEKVQRHKDIKSVYASFTANPLKKVLTYDDLHKIDGHLVSNSIKFTNLALAKELYFVHKHSISIQKDNRITYDEIIALKPYFNITTRNKAFHFGVPNISYPQMVSEIEKKFIADEVRPTAPSNFEDLSKPLKSICNILLETLHNDYFGQERDGKKKRKDAEQRYFNEVIAK

SEQ ID NO: 2018 - protein, 1144 aa, Artificial; identical to SEQ ID NO: 1993
  Synthetic

SEQ ID NO: 2019 - protein, 1152 aa, Artificial
  Synthetic
MKDILTTEKQNRFYSHKIADKYFFGGYFNLASNNIYEVFEEVNKRNTFGKLAKRDNGNLKNYIIHVFKDELSISDFEKRVAIFASYFPILETVDKKSIKERNRTIDLTLSQRIRQFREMLISLVTAVDQLRNFYTHYHHSEIVIENKVLDFLNSSFVSTALHVKDKYLKTDKTKEFLKETIAAELDILIEAYKKKQIEKKNTRFKANKREDILNAIYNEAFWSFINDKDKETVVAKGADAYFEKNHHKSNDPDFALNISEKGIVYLLSFFLTNKEMDSLKANLTGFKGKVDRESGNSIKYMATQRIYSFHTYRGLKQKIRTSEEGVKETLLMQMIDELSKVPNVVYQHLSTTQQNSFIEDWNEYYKDYEDDVETDDLSRVIHPVIRKRYEDRFNYFAIRFLDEFFDFPTLRFQVHLGDYVHDRRTKQLGKVESDRIIKEKVTVFARLKDINSAKASYFHSLEEQDKEELDNKWTLFPNPSYDFPKEHTLQHQGEQKNAGKIGIYVKLRDTQYKEKAALEEARKSLNPKERSATKASKYDIITQIIEANDNVKSEKPLVFTGQPIAYLSMNDIHSMLFSLLTDNAELKKTPEEVEAKLIDQIGKQINEILSKDTDTKILKKYKDNDLKETDTDKITRDLARDKEEIEKLILEQKQRADDYNYTSSTKFNIDKSRKRKHLLFNAEKGKIGVWLANDIKRFMFKESKSKWKGYQHTELQKLFAYFDTSKSDLELILSDMVMVKDYPIELIDLVRKSRTLVDFLNKYLEARLGYIENVITRVKNSIGTPQFKTVRKECFAFLKESNYTVASLDKQIERILSMPLFIERGFMDSKPTMLEGKSYQQHKEDFADWFVHYKENSNYQNFYDTEVYEIITEDKREQAKVTKKIKQQQKNDVFTLMMVNYMLEEVLKLPSNDRLSLNELYQTKEERIVNKQVAKDTQERNKNYIWNKVVDLQLCEGLVRIDKVKLKDIGNFRKYENDSRVKEFLTYQSDIVWSAYLSNEVDSNKLYVIERQLDNYESIRSKELLKEVQEIECSVYNQVANKESLKQSGNENFKQYVLQGLLPIGMDVREMLILSTDVKFKKEEIIQLGQAGEVEQDLYSLIYIRNKFAHNQLPIKEFFDFCENNYRSISDNEYYAEYYMEIFRSIKEKYAN

SEQ ID NO: 2020 - protein, 1107 aa, Artificial
  Synthetic
METIEKTEHKGLNVYKTVENDPQYFGGYLNMARLNIFSINNSVAHKIKLPTLSDEEKILDSFLCTNNRKHLNWNLAHSIAVKFLPIVKVFDFESLPKQERTGDLNNRNAGKDFAAMTASLRCLFSEIQEFRNDYSHYYSIANGDKRKTTISGEAAEFLRLNFARAIEYTKERFNGVLNDEDFEPAKERVLVNQDNTITTDGFVFLISMFLEREHAFQFIGKIKGLKGTQFNSFIATREVLMAFCVKLPHDRFVSEDKKQALTLDIINTLNRCPKELYSVITDEERKAFKPGLDSLKLENLLDNSTNDKAAIEDYDKYIEALTRKIRHSNRFSYFALKFIDETDIFSKLRFQVNLGKLLIDEYEKPVNNELYPRSIVQNVKAFGKLNDFEEEAEVLKQIDKDGNSLGFEQYAPFYSTKNNKIGLHTNSAKSIIINRPNSESKIKKNLKQALPEAFLSLHELPKIIVLEHLKKGKPEELINDFILACNSKITNKQFIDEVKAKLPNDWNEFNKRSDSKKDPAYKPNALAYLRKRKKTLDEVLAQYNLNHKQIPTRILDYWLCIVDIDENRAISERIKRMKREGMDRLKAYQKFTKTGKGKIPKIGEMATFLAKDIVDMVISTDKKKKITSFYYDKMQECLALFADPEKKTLFIDLISKELMLNDIGGHPFLKNIRFKNLNYLQDLYAKYLQEKVKRNAYNDDSWMNTTFYDLAWDDKKGKESTTVRIPFNLSNVPFTLRQLKEKTNYNLDEWLYNVTKGKVKGDGKAPINLPTNLFDETLTRLLQNNLEAHAVEYPAEAKYNELFKIWWKKRGDSTQSFYNAEREYFIFDEKVNFKLQENAMFADFYSDSVKKAFRAKRNARRIEQRTDRSLPDIKFSQVEKVFKRSISNSEKQIRLLQEEDRIMLLMLEKLMTPNQDLNLKLNQIDTLLNKIITVKELVTGKLYFENNAEITKTIVDRRKRKDFSMLHKYVFDRRLPELFEYFEENEIPLPNLKNELEAYNAAKQKVLDAAFELEKKLLANNRADNFIDEDCKNGHIPHKAYLQWLTKEGVINENEFLFLNGVRNCFSHNLFPQKRTMSLFVARWDNSNFAQQIAERYNEKIDAILAI

SEQ ID NO: 2021 - protein, 1057 aa, Artificial; identical to SEQ ID NO: 1344
  Synthetic

SEQ ID NO: 2022 - protein, 1003 aa, Artificial; identical to SEQ ID NO: 1888
  Synthetic

SEQ ID NO: 2023 - protein, 1003 aa, Artificial; identical to SEQ ID NO: 1494
  Synthetic

SEQ ID NO: 2024 - protein, 1134 aa, Artificial; identical to SEQ ID NO: 1986
  Synthetic

SEQ ID NO: 2025 - protein, 1167 aa, Artificial
  Synthetic
MNKAIFGAYLNAAQHNAYMILNHIKDLVTLKDKNNTAGADVEESRLDNINILQLKNAPEKIAYTLKLLYLHFPFLGMLVPENINSVENNYEKVARILKKALVRLNQERNQYSHYETQTLKTESHFVLASTQKDLDLDELRSTFLNWFNLDNPNKERAFARYPFMDGEARNFMGLHIAKNSLWKNSSEAGKDFSEKGLIYFLCLFLERKQAYLLLNSIQGFKGSKGNKFRAVREMYAHNCCKLPQPRLDSSDILLDMLNELNRCPKDLFQVLGETDQQRFMSAIDNASAVVKRQDDNGELLEYEKRIRHQDRFPYFALRYFDDTNAFPRLRFQLYIGKLLQKTYDKALQGETYQRQIAKEIYAFGKLSEFLGTQPTKHPLLKNMTVYEQHTIDTATGAVINNPNAPEIGQIVQFSPQYNFGTNKIMLKIGKETTVDSKALEYRRGEKGVVLKDKMKIKKIEPEEKEAILSTHELPNLFLYHYLYKQGHLTSTVESFIEKYIDTFRKFIKSVQTKQFLPLEKSAFKRRSISYKDRKEATIKKAPQTGREPYNDKNFEELKDRKTALQHRLDNSDFKGLYWSYLPDEIVNYLLNTQPTDYKTVVLAKIDELKDQTNELKQQFKRINKRKAFFEEEQEENPTNDHTATFSTGLRVGEIATWLAKDIIFLKPYQKDVKNYGKPNNDQYNRLQTLLALYPLYKDELPKFFEELHLIGGKSTENHPFLSQNLPNSLYDFYQNYIDAKLKWLIQLHTDIDGVKRKDKATQSIKTVKEGLNPTQIENLYSHLFGKISQVETNIESKKYDTLPIALPVGLFNAAILEGMQRKGIALSEKDNTLFALKNLLQNDTQEFYHYPRRYETTQEILQPFLTHSGSACKDLAEREKLMESLKNEINRLGKSTNEEKLILRRTLVNFRSRVLEKEQTIRFTQQQDRCLWLMCQELTNYRKEKTQEGIQLDFTNTSLQKLEELLDTNKEMKLQVYIYKTKQAIGIITDTLPIRRYGDLRRFAKNRQLPNLYDYFYDENQHQNGNLPTFSPQNLQDALEFLEKNRPSILQKALDLEEVIFSNYEVEFVAYKAANSTKTDPDHNIFIEYLFSKLPETTLTQIAGANTEAKKIFKLRNHILHNEVPPKEYIGNHLTQHLGKNPETPLQVTEFIIAHTIRIYEQLAAAV

SEQ ID NO: 2026 - protein, 1134 aa, Artificial; identical to SEQ ID NO: 1986
  Synthetic

SEQ ID NO: 2027 - protein, 1159 aa, Artificial
  Synthetic
MSSKNESYNKQKTFNHYKQEDKYFFGGFLNNAEENIITSFKEIAKRLNSKEKNKPIEILQEILSETIIDTEWDRNIKVIAEYFPFVKLLETITQKQYEENQNKLFFKERNPRQNFKNLFLYNCIILFNCPLQLRDFYTHFYHRNFITISFPDFRRTTTDNISIYDYVKNEAIQHSAQSDGVNFIAHSIFELLDELKLETVSQVNNQRIKPNEKHSFLKKNYQNDFTDLTEEEISKKFKKVFNQFWTFNDYKGRMVLKDFHKSHFVEKVEEGSMEQKPKKDFFHQKISRSGFLFLLSLFVDRKNAEFILDNSTNFKASFDLQKLATRWVYTYNCYRGLKNTINTTFPKETLLSKMVDYLSKVPDEVYQLLSIEQQEMFLEDMNEYMRDNEENNDSSEASKVVHPVIRKRYSNEFNYLALSFIDQYIQLPNLRFAINLGTYVHNKEEKIVGKGKTSSTSNRVIKEDIRIYARLHEAIDFKNIFFLKENFSEDNKGCHWEEFPNPHYAIKDNNIGIYFINKDVIQNNLEERSNGEKKKASIIEILTETESDTIKYGKPHALLSCYELIPLIFDYFQKVKNSREKKLNEKELEAIPIQIENKILSAINRFTKSFENYSEGKNILKSYPKKLSKTSNETSFLEVQDENGNPVKKILQDIDKEIQKSQDKLDILKKNENEFQNDERKTTFSKKEIGEEATWLANDILRFMPSSFKKDWKGYEHSHLQYLLAFYDVRKTEIFQLLNQKWPLYEDNFMGKSLKTFLDNRKTFESFYKGYLDKRKEIFENLKNNLSLNNDNLFRVFDKRKYITQSLECYKNAILEQPVSFSRGIFEDKKVSVKNEWSIIPKDPTTQYQSFYNLINVYTNEAIDKEEKKEKYKNLRAINKVKIQDYYLKLMVDTLYQDLFNQPLDKSLSDFYVSKAEREKIKANAKAYQKCNDSSLWNKVIDLSLQNNRITANPKLKDIGKYKRAVQDEKIATLLTYDNRTWTYALQKPKKKNKNDYKELHYTALNMELQEYEKVRSKKLLKQVQQLEKQILEEYTDFLSTQIHPADFEREGNPNFKKYLAHSILENEDDLDKLPEKAEAMRELDETITNPIIKKAIVLIIIRNKMAHNQYPPKFIYDLANRFVPKKEEEYFATYFNRVFETITKELWENKEKKDKTQV

SEQ ID NO: 2028 - protein, 1184 aa, Artificial
  Synthetic
METKKLNIKTIQDNPEYFGSYLNMARHNVFLLINHLHKTFKYLPFQELKNDQHIATIENNILLNIFDTSKKEFEDERQKVYNYLIKRHHLPIIKYIGKNEENDLIDFEEIHKFLVIAFKELNKLRNSYTHYLAIDNNKNVLKRKLDINHELKKNIEKLFKVAPYISYLRNFETQKQEDYSHLLSNYQLFKNEDILTEHGFYFFINLFIERKYAIKLLKKIRGFKNETTPAFKSTLQTFTSYCLKIPDTRLDNGFPKQTILMEILSELNKCPKELYNHLTQNDKEKFEPKIKEEQIINSDNYLDIDNESIDSLVKDLVSLKRYEDRFPNFALRFIDEANFFDRIRFQITIGKLVIKRYNKTIIGNQQDRRVIKIINAYGKLNDFIGKETEILNQLKKDLDDDTIVFEQFAPHYNTNNNKIAFKIFDTNSIKIQYPKVFENKKEIEALHNNPSGFISIHDLHKIVLASLLTQNTKHSKNVATETIIIDFVNNTNATILDIDRLQSIKNDVQFEPENFTKRVFDEKKMRVRGSRKPQFVTKQTEAKLLLKYKLHSQELYSLSRDEFKKIAKNNAIDLEVFNQIKYKYYLESRKKTLQSGLPKNILVNQLPQRVLNHLMNISETSTQTRIYLKIKAIKQENVNLLKTAKKELKDGQIIKLGEYAMYLCRDILNMIIDKDLKQKITQPYIKKIQNRLSYFSISKVELVAILKELQLFDKNKGHVFLEQSHISNSKGIKDFYIKYLEEKNSWLNFFLNQLKDEHYNKQRIPYTYQGIINKYEDFNFTKWLSNKTKMPVNIPNSLLDNFVNTALKIKLKKQNIAYNNHDTLSVLIAKIMNKDTQPFYNYERVYKDKSKNSIHIKQINSLCNKTIKIEYNKFVEANEKRIRFYQTKDRVLKLMCNYLMKEDKTVGLENEILLKNIYPNSTTTILENPAFFKQKLRKNDMDDTQMSKSNENLYFTIIAQDNLKQIEEIQKWNTLTPNEKLKWTSLKTKEEQQSFLQNCNAEEIKIYHGQKGYQWKFKDYGRFKRFVKDRRLNELSKYFEMNEIPFDILEYQIMEFDKIREKIFEHIFTLEKAIYEKDPQGLIKLEFKHRPKEFNEVKFDVYLDWLSQNNLCFNKYIIKWGRNKFSHTEFPYFNTIPKITKKQIEDFDYFKNVYGGKEQLNISIAQKIIELFEKEITQIIEKIK

SEQ ID NO: 2029 - protein, 1184 aa, Artificial; identical to SEQ ID NO: 2028
  Synthetic

SEQ ID NO: 2030 - protein, 1000 aa, Artificial; identical to SEQ ID NO: 1602
  Synthetic

SEQ ID NO: 2031 - protein, 1081 aa, Artificial; identical to SEQ ID NO: 1329
  Synthetic

SEQ ID NO: 2032 - protein, 1128 aa, Artificial
  Synthetic
METQISNIENKYRILNDDPQYFGGYLNMARLNVFNISNHIAKEFNLPLLPEEGHLKNSFLCQKENKKVNWNHIFSKTNRFLSILKVFDVESLPKEEQKMTDSEGKDFALMSDSLKIVFGELQEFRNDYSHYYSTENGTSRKTTVSDEMSLFLRTNFLRAIQYTKERFKGVLNDEDYQLVASKKVLEADNTITVEGLVFLTSMFLEREYAFQFIGKITGLKGTQNNSFISTREVLMAFCLKLPHDRFQSDDTRQAFSLDLINELTRCPKELYNAITEEGKMKFQPKLDEPGIKNLLDNSTNNKKKIDAEDYDEYIESLTKRIRYNNRFSDFALKYIEETDILGDFRFQIDLGKLFVDEYDKFFNGEEVPRRIIENVKAFGKLNDFNDESILLAQIENGYPSKGFEQFAPHYNTENNKIGISVKVDTAKLRSNSKGEPGKNLNQPLPEAFLSLNELPKIILLDYLQKGEPEQLINDFILINNSKLMKMSFIEEIKNLLPKEWNEFRKRADTRKQAAYNNETLAYLLERKQILNQVLVSYQLNDKQIPGRILDYWLNIKEVEEGRAVSDRLKLMKRDCMSRLKALEKFKIDRNRSKIPKTGEMATFLAKDIVDMVVSEGIKKKITSFYYDKMQECLALFADPEKKRLFIHIVIRELRLNGTGGHPFLFQLNFDKINCTSDFYSEYLREKGHKMVKEKNLKTGKIVLTDHSWMALTFYKLEFNDKVDKLMTVVKLPLNKLNIPFTLRQLEGKTINTLEQWLQNITKGKNQNDGKHPVNLPTNLFDERLTACLQKELDKKQIIYPPYANWNELFKTWWKSRNDSTQSFYNAEREYIIFDEKVNFYPNRQEKFADYYHHAVKAAYQKKRNERTLQQKDDKHLPDILFAQVEKTFKQTIAGTEKEIRMVQEEDRIMLVMLESLLEDGKKLQLKLSEINTLLNATTEIKQVVTAKLSFNDSGEIIKDKTNPEITKTITAVRKRKDYSVLRKFVFDRRLPELFGYFDGDEIQFESLKAELDAYNKAKQEVLDVVFKLEKKIIAKDCNGVQQLFSDETGNLLTGNIQHKPYLTWLKSKGLIGDSTFTFLNMVRNCFSHNQYPQKKTMERFIDHWETNRFALTIATKYNHEITRIMEKI

SEQ ID NO: 2033 - protein, 1047 aa, Artificial; identical to SEQ ID NO: 1398
  Synthetic

SEQ ID NO: 2034 - protein, 960 aa, Artificial
  Synthetic
MEILTIPEVIKCRTLSDDPQYFGGYLNMARLNVLNISNHIAKEFKLPLLPEEAHLKNSFLCKKENKKIDWNHVYARTIRFLSVMKVFDAESLPKEEQKTIDWEGKDFASMCDTLNIVFSELQEFSNDYSHYYSTEKETKRKTTVSDELALFLRTNFKRAIEYTKVRFKGILNDEDYQLVVSKKMLETNHTITHEGLVFLTSMFLEREYAFRFIRKIHGLSGPKDNSFIATCEVLMAFCLKLPQEQFRSDNRRQAISLELMNELKKCPKVLYHVITEEWKQKLKSVPEELETKNLHYNTKRETKIEFEDYDLYIESLTKQVRYNNRFSEFALKYIDETGIFSEFRFQLDLGKILVDEYLKNFNDERVQRCIIENAKAFGKLNDYTNETKVMSLIVNGPPLKSFDRFAPHYNIESNKIGISTHEVTAKLVPNSKGEPAKKLHQPLPEAFLSLHELPKIILLEYLQKGEPEKLINEFILVNNSKLMNMSFIEEVKNQLPKEWDKFQRRTNAKHELAYDENTLAFLLQRKQILNKTLLAYQLNDKQIPTRILDYWLNISDADEERAISNRLKSIKRDCMSRLKALSKFNENGNRNKIPGIGEMATFLAKDIIDMVVSEGKKRKITSFYYDKMQECLALFGDPDKKQLFIHIVTKELKLNDPGGHPFLDKLDLQKINSTTGFYEIYLQEKGHKMVPENNPKTGKVIYTDHSWMALTFYKIEFNDKVDMLMTVVKLPLKKLNIPFTLRQLSGKTNNTLKQWLNNLTQGKKRNDGKRPINLPTNLFDERLAELLRKDLDNKKIVYWPYANWNELFKTWWSSRNDGLQSFYNAEREYRIFDEKVNFYPNRKENFADYYQHALKLAFQKKQSKRILEQMYDQHLPDILFDQVEKTFRHTIAETEKEIRILQEEDHIMLLMLESLLDDGSKQQLKLSEIRTHLNRTTNIRQVVKGKLSFDDSGELIKDNT

SEQ ID NO: 2035 - protein, 1094 aa, Artificial
  Synthetic
MEANEQNQENRRRTLTNDPQYFGGYLNMARLNIYNINNHIAADFGQAVLPEEGQIPSGFLCNKEIKKLNWNHIYAKTRRFLPILKVFDIESLPKEEQVNSDKEGKDFAAMSDTLKVVFSELQDFRNDYSHYYSTEKGENRKLTISAELTDMLTINFKRAIAYTKVRMKDVLTDADYELVETKQVVTTGNIITTEGLVFLTCMFLEREHAFQFIGKIQGLKGTQFNSFIATREVLMSFCVKLPHDKFVSENLEQALTLDIINELNRCPKTLYGVITDEEKMQFRPELDELDIEKLIANSTNDDERERILDEIGYEEYIEGLTKRVRYNNRFPYFAMRFIEEKNVFDKLRFHIDLGKYEVDRYTKQLAGEQTERVVLENVKAFGKLSSFTDPELIQQKIDNQQRTDGFEQFAPHYNADNNKIGLSNKESIAILIPKSKPESKVGNNLKQPLPQAFLSLHELPKIILLDYLQKGKAEELINDFILLNDTRLMDITFIEEVKLKLPANWNEFAKRSDAKKKKAYSDAAMEYLLQRKATLNDVLITYNLNDKQIPTRILNYWLNIKDVEDNRSVSDRIKLMKRDCMSRLKVLEKHKLDKSVKTPKVGEMATFLAKDIVDMMVSKEKKQKITSFYYDKMQECLALFADTEKKALFIHIVTNELKVLEGDGHPFLTNINLQQIRKTSQFYELYMNAKVQYLIQFYKPSKDKVDKRGRPTTEVKLPPLDKRSNIPFTIRQWDEKEKYNLNAWLRNVTVGKNTKDGKKAVNLPTNLFDETLCDLLSQQLDARTVNYNPAANYNELLKLWWKTRDDATQDFYQSEREYDIYEEKVEFKIDSSGHFADYYKKALSKAYNRLKAEREIARRTNKRLPPIEHKQVERVFKNTIAETEKEIRMLQEEDRMAVLMLEQLMDDSGNLKLSTIKTSLNNTTQIKQKILNKTIVAERKQKNYTELRKYVHDRRLPNLFEYVEADEILLEWLLDELMAYNAAKQQVFDTIFMLEKRIIETDPQELKSLFTNEKGQVQTGNIQHKPYVQWLKNKGLINHNEKLFINMVRNCFSHNQFPQRETMELLISEWGAGKIATQILTVYNQLITNIINKI

SEQ ID NO: 2036 - protein, 1168 aa, Artificial; identical to SEQ ID NO: 1357
  Synthetic

SEQ ID NO: 2037 - protein, 1118 aa, Artificial
  Synthetic
METIEKAEHKGLNVYKTLKSDPQYFGGYLNMARSNIFSINNSVAHKIKISTLPDEEKILDSFLCNNNRKHLNWNLAHSIAVKFLPIIKVFDFESLPKSERTGDLNNLNTGKDFAAMAASLRCLFREIQEFRNDYSHYYSIANGTKRKTIISGELAEFLRLNFARAIEYTKERFNGVLNDDDFEPVKERVLVNQDNTITTDGFVFLISMFLEREHAFQFIGEIKGLKGTQFNSFIATREVLMAFCAKLPHDRFVSEDKKQAFTLDIINTLNRCPKELYGVITDEERKAFKPCLDKLNLENLLDNSTNDKADVEDYDKYIEALTRKIRHSNRFSYFALKFIDETDIFSKLRFQINLGKLLIDEYEKPINREMYPRSIVQDVKAFGKLSDFEDGAEVLKQIDKDGNSLGFEQYAPFYHTKNNKIGLHTNNAKAIVIHKPNSQSKVKKSLKQALPEAFLSLHELPKIIVLEHLEKGKSEELINDFVLACNSKITNKQFIDEVKRKLPNDWNEFSKRSDSQKESAYKPNALAYLRMRKKIVDEVLAPYNLNHKQIPTRILDYWLCIVDINADRAISDRIKRMKREGMDRLKAYQKFTKTGKGKIPKIGEMATFLAKDIVDMVISTDKKKKITSFYYDKMQECLALFADPEKKSLFVDLISKELHLNEADGHPFLKNIEFSKIRYTQDLYLIYLQEKVNKMIDVKNFRSGKTSTIDKSWMMCTFYKREWNQEAGKQLTEVKLPDNLSSIPFTLRQLKEKISSNLDEWLHNLTKGNEANDGKTPINLPTNLFDEPLIRLLQNDLDAQQVEYSADAKYNELFKIWWRNRGDSTQSFYHAEREYFIFDEKVNFKLQENAMFADFYSLSVKKAFRAKQNARRIEQKTNRRLPDIQFSQVEKVFKRSISNTEKQIRLLQEEDQILLLMLEKLISSDQDLNLKLNQIDILLNETITVKEPVRGNLFFDNNAEITRRIIDQRKRKDHSMLHKYVFDRRLPELFEYFAENEIPLQDLKNELEAYNNAKQMVLATVFKFEEALVANNHADDFMDADSKTGHIPHKAYLQWLKKEGMINENEFQFLNRVRNCFSHNQFPPKNTMSLFVSQWADGNFALQIAELYNEKIDAILAI

SEQ ID NO: 2038 - protein, 1081 aa, Artificial; identical to SEQ ID NO: 1329
  Synthetic

SEQ ID NO: 2039 - protein, 1112 aa, Artificial
  Synthetic
MENQELKTRTMKSEPYYYGAFLNMARLNIFNISNHLSNKLNILPTLSSEEHIANAFFTDKNTKIKWEHTYDILRRFIPIVKVFDTESLPKGEVGNNTGKDFSKMSDTLKIIFKELNEFRNDYSHYYSTEKEDKRKITISDELANFLNENFKRAIAYTKKRFKGVFTEKDFELANNIQLFNKDKEITEKGLAFLTSIFLEREYAFQFISKIEGLKGTQKSEYRATREVFMAYCVNLPHDKFISEDAKQSFSLDIISELNRCPQTLFNVITEKEQEKFRPTINQQEKNNIINNSVPYDIEDYEEYVNSITKKIRYDNRFPFFALKFIDETQVFEKIRFQIDLGEILLDEYTKQLANNEEKRQVVQNAKAFGRLNDFIDENNVLENINKQNGSASFIQYAPNYNFDNNKIGIDTTGKRIMPILTKQTDNNKKVKNKLKQPLPKAFLSIHELPKIILLEYLEKGKAEKLINDFLLINESQLLNYKYIEEIKNKLNNFDVFQKRSQRKKLQTAYNKTNIEELQSRKEELNKILKEYKLNDKQIPTRILEYWLNIEDVTPNEAISDRIKLMKRDCVDRLRDIKKGKAPKIGEMATFIAKDIVDMIISKDIKQKISSFYYDKIQECLALYNVSEKRDLFLTICNELRLLDADKGHPFLKNINLNRINYTSDFYVKYLQEKGHKLIKETNYRTGKLVEKDKSWMFLNFYYLKKNETLNKMMTIVQLPDDKSKLPFTIAQLDKPKNTFEEWINNITKGKTKTDKEKPIDLPTNIFDKEIEEILKNKLSEEKIAFTENANYNQLFKLWWTDCRKDNVQKFYDAEREYVIYDEHVKFIPNTKPKFENYYNESFPIVLTRLKRDREEARKLNRKLPPIEKSQVEKVFKQAIGSTEKEIRLLQEEDRIMLLMFEQLLETDNNLNLKLNNAESLLNEQITIKEKISLKLSFNEQEDKKEIIKTIIDKRKRKDFSILRKFKYDKRLPELCEYFETDDISHSDLKKELDEYNKAKEQILANAFMLEKTIIEKDKDGIKALFLNDNGEKKYGNVQHKPYLTWLKNKGLINDNEYLFINMVRNTFSHNQFPQKRTIQIFIDKNRGNPITFAETIKNAYNKKIEEIIVKIK

SEQ ID NO: 2040 - protein, 1131 aa, Artificial
  Synthetic
MNDKIAQSYARWNFCQYFENKAFVAPIAEKSAHNIKRQNSIGKTTGQRLYYFAIGHKWKNLPNVIFQRFYDEQQKQYATGDYMALQKEAFPKKDIEELLRNLRNLNNHYVHDFQKLIIDKENNNALRKFLKESFRMAATMVYFEHENIWERLCEKTNQKLSNTSFTSEQYDKKLQELYQKHITNKDFKNKLCEFLSKKFLFNKTNNDHTLNDLDSLIEYLLFVRVSSDFEWKINNEHAVFTIQKGEYLSFVGALFALCMFLYKDEANTMISKVKGYKKTKEKEMMAKRDIMTFFSKNISAQDIDCEEKNLIYFRDIILYLNKYPLEWNKALEKEVNADKVFEVLKKEIAEMEENRILDVCLTPYPQRTIQSFILSDNFDKIPDVNKKMIDEQVEAIQKDVEKLAQRLKENTFFTSYGRNQDRFMEFALRYLAERNYFGSDAQFKCYRFYTTEEQNVFLESEKERLPKKEFDKIKFHRGRVVYFSTLADHRDRYPDWDTPFVFENNAIQIRITLNDKTVLLSIQRPLLVCLVQHCLMQKTPEGKGKNLLEDYYAHYRENLATALTAFGKSKTEVSSEDKNIIEQLFPRRAVKRWATGEEVQLTNEGLDRILKEAKHCELRYQKKLEEVEKTVERTGNPDPLTHFLKKNKGKQFKLRFVKKAWNLMYFKPVYKERYEEKKEHHKSYHLTREEYNDFCCYMFDYGVNSDYQRLLRELLDSKGFLANPELAGLFEKCKSLDDFYQDTKKIFETWISTSVREKREDRFQLSMYKNFSFNQEVPQPILYINLQHFLNHVKKDKGEQEYAYPLPPNQSYLISSYYFKDHQKSNNSTLNKLHFKLRNTCVEDCLLYEIAMYYFNKENPITDPARNKVNKILQSKDLFIEIQDKRELSKTFRLYFPFKQIEKVGSMLHNDQEKERLTDVPRYIDLLADREERKKNKQWNKEIRKIYDNYKSGKILLEDYTYLQKEVVRESGTFLSVYMEMEKFFILQEKLRPKPGRNNIVYKKITPLKTLLEEIEQEQKIEKFDNNGNRQSNIIRNDACHFSFPQKLYDTILIELEKKFIKKYVSSPTPLSFQDFPAPIRKVLDYFLESVHNSLFQYKIKNKEERIATAQREYINQVIKKYIQPLQRRIH

SEQ ID NO: 2041 - protein, 1168 aa, Artificial
  Synthetic
METKQQVGKGISYDHRRPDDKHYFGGFLNLAQNNIDGVIQEFAMRLNREYDPENKNQSLFSYFNINASFTDWERGVNILKEYWPMMEFIDRPATDKQFEAEKPENREAAKRKYFLATLGALLTSIKDLRHYYTHYYHPPVHLNDDLFLFLDHALLYTAFDVKKAKMKDDKTRQLLNQNLSLELEKLKKLKVEELKKKKEKGIKVNLQDEKGILNAIYNDAFAHIITKEKDSDKDKLETRYKSILPQDEAAETGINISISGLIFLLSLFLSRKEIEQLKSNIEGYKGKVLNIETEVDRKHNSLKYMATHWVFSILAFKGLKQRLTNSFEKESLLIQMMDELNKVPDELYQTLSETAKKEFLEDINEYVSEGDDNEKATYVVHPVIRKRYESKFNYFAIRYLDEFAQFPTLKFQIFVGQYLHDNRPKTLASNGMTAQRMIKEKINLFGNLSEVTKHKSDFFEKESAAQGWEFFPNPSYNWAGNNIPVYIDMIGKEGKAKEIQVQINKYRKQLNPAPQRDKRISKKEIIEQLYKEKVVYGDPTLMLSANELMALLYELIVNGKSGAELENKIVEQIIARYEQIEAYDPTTQQLPTNQMPHKLQKSRKDSKVTDTDKLLKTIDKEIDEGNKKLELIACHRKEWEEAEQRKKSGKRNNPGTKSRKHLFYASEMGEEATWIANDLKRFMPKPARAEWKGTHHSELQRLLAFYSTQRLEAWQLVESVWTANTHSFWEENFKEAFYKPEFENFYGAYIEIRTKILTTCRSILENNPEATMNNDTEKEWDKVFTLFDKRLYRTSTTDEQKKQLLTKPFAFPRGLFDDKPTFLPGSKPNENPERFAAWYSYGYTYSGKFQSFYDMPRNYSDWYKKLKEDGKLPRLDKKTEQEKILRFRMDCDLNIKHIRFQDIYVKLMVDSLYKAVFGQQPEFDLSHLYDTRSERYENNTIAQRQKSRQEGDNSDNAINENYVWNKTFAISLYNGRITESQVKLKDVGKFRRFATDPRVQTLISYDDTRTWTKLEIENELDNKADAYEPIRRTQSLKAIQQLEKNILKKNGFNGKQHPEELKHNGNPNFRKYIANGLLKHRTDIRQEELALISDTEFQEIGLERIRQTNPLIQKAYLLILLRNKFGHNQLPDQEHFRLMRSIYPYNQQESYSAYFNHVITQIIEELNT

SEQ ID NO: 2042 - protein, 1003 aa, Artificial
  Synthetic
MGAIENKHIFAAYANLAIDGLIKTLNFIAKKLDTQKQLSSWDIKHVITLIDSIFDQNPQNNLEQVVEGYLPWIKPIIEMKTPKKGERQSDKLCIEYKTIITAFASLLNDVRNYYTHYYHDPICIYPGGYDIPSSLNCIYDSAINIIKERFQAEEKEMEHLRRYTRKKGRVVLKTEDDHFYYTLANNNDLSEKGYAFFISMFLERKYSYLFLKKLSGFKRGDSLQYRLTLEVFTALSTKPPVERLRTTKDTKQDRALDILNELSKIPIELYQTLEPKYREMYNETLQPTDAEDPYGLPDRSRIRFRSRFEAFALHFLDKQADFKEIGFYTYLGNYFHNGYQKTRVDRETKDRYINFQLAGFCKNIQDISAKKLSEALNVKSIDISTDSIPDINSFEPYLVQSTPHYIVNGNNIGIKVLPEGKDTYPTIDEKGAKMPIADFWLSKYELPAMLFYTYLRNNNIHKSHCPLSVKDIIERSIHKSTKQKHPEERSELMLRRVMKAIFWTDSKLNEVERIKSQKSAFGKRQHEILKAGRIAETLVRDMLWLQPSKNNGRDKVTEPNFQAIQVSLAYFGIRRNDLTEIFTRAGLINSSNPHPFLAQIGTNYTSLIEFYIAYLKERKVYFSRIQKKILQGKLNIQCHPLRDLQREPNKPQEKEEAIFLPRGLFNEAIINCLKKSKLKHLIESPTREKSPALNVSYLIQNYFRAYFEDQSQEFYAQPRNYRLFDKLSPNKGKSKSYLSLEQRIKKMEELRPSKIPVAEANKLLEKEDRLYRKNYNEICDNESIIRLYQIQDILLFMMTKEYLPSDLYNRINKYKLENVKGILNERVSYLIDLNPLKIQGEDIKIKDYGKLFYIHHDTRISSLNKVLSKVKRNNSISSSVKIQPYENYKRECLDFEEAQIQIIPIIHSFEIAMVSMFPDLKKATPGNYYDFNELITEYEKRTKQKIDSSFLIKTRNMFLHDKYEAECIKEISDDFVYAKKIIAEFKMKIENIKLEDLSNDSSA

SEQ ID NO: 2043 - protein, 1171 aa, Artificial
  Synthetic
MEEIVLKNNKIEFDHSLLKDKHFFAGYLNLAQNNIDQALEAYKVRFGVKANEKDNFSVIDNLDIKKLSEPDYINRIDFLKLHFPVVGYLDLPVTNDLFKNEIDKNLARRLYFKEKFKVLVKTIDSLRNFYTHYYHKSLPFDKKLFTLVDEIFLQVILDVKRLKKKNDHTRQFLKQSLKEEYPILFNLKKKDLQDKKAKGKKVSLDTVSINNAVFNDAFFHLLYQKDQLNPFYKSALLDGEHYENTISISQNGLLFLLGMFLNKKEGEDLRSQIKGFKGKVVKDHPEFPNAKNNSFRFMATHWVFSYLAFKGIRQKISTAFDKETLLIQIVDELSKVPDEVYNNLSFEKQQQFVEDINEYIKEGNETKRLNDAIVIHPVIRKRYENKFNYFVLRYLDEFAGFPSLRFQIHLGNYVHDRRIKNIAGTSFETDRIVKEKINVFGNLSEVGNLKADYFEKNEASATDSGWEIFPNPSYNFVSENIPIFINLQKSKVPGAAKLFGQIKSKQIKVEKEDGNQRAESKYTKEQMTTLIDPNIKGQTFEKIYIGPPTAMLSLNELPALLYELLVRKVSPEAIENTMIQKLMDRFSTIEKYAPSDKLSASQITKNLRRSDVTEKIDTEKLQRSIEKEIKICDEKLATISQNRKDTRVPYHKRKFIFTNKELGSEATWLTDDLIRFMPKDARENWKGYQHSQLQQSLAYFNQNTREAFSLLQSVWDFKDTNYNWNSGIQKAFISCKHFDMLLERYLNNRKDTLTAMYEGVRSFSSNTKMLKKLIEQQNIWTVFNKRLFQINPIDQQKERLLAKPLVFPRGIFDEKPTFIKDSKLTEQPEAFADWYRYTYKAHLYQRFYELERNCDLLFEQNQLSNEYFSANKKNLSKAEQLELFQLKQDLKIKKVKNQDLFLKLIAEAIYNKTFEHDASLSLSDFYLTQEERLEKEANARRQSERQKNDTSENIIKDNFIWSKTISIKDGQVYAESIKLKDIGKFRRFLNDSKVKTILSYDPNRRWTKQELEDELSIKRDSYETIRREELIKEIQLFEKSILESYNFDGQQHPTDLESENNPKFKHYVVNGVLRKRKLAPEDEIQWLLDCTEKQFDKLTLAELTTKTDTIQKAFLLIIIRNKFAHNQLPKDIFYSLIKKHTYPDGVGVSNDKTASSVILEFTRSVIAMFRD

SEQ ID NO: 2044 - protein, 1003 aa, Artificial; identical to SEQ ID NO: 1673
  Synthetic

SEQ ID NO: 2045 - protein, 1127 aa, Artificial; identical to SEQ ID NO: 1737
  Synthetic

SEQ ID NO: 2046 - protein, 1003 aa, Artificial; identical to SEQ ID NO: 1673
  Synthetic

SEQ ID NO: 2047 - protein, 1144 aa, Artificial
  Synthetic
MNTQPVGLGVYYSHTSKKDKHFFGGFLNLGINNLEVLIEAFNLKFFPKDKKTIDIKNFVQICFGIKISDHDFESRVEFLQKYLPVVRYLDKRNKESFKNQVDLLFRSLDSLRNFYTHYYHGPLSLPEALFDLLDDTFSKVASHVKSNKVKDDKSQHLLKSSLSEELDARYKLQLERLKAAGKKVYLHDHDAIRNGVLNSSFDHLIYNNEADAAVVTRRYAAHYSEIEPADNGITISQSGLLFLAGLFLKRKEVEDLKSRVKGFKAKIIKEGEENISGLKYMATHWVFSYLSFKQPKQTLTNDFDRETLLLQIIDELSKVPDDVYQAFSEETRNLFVEDINQYLKEGNDDYTLEEAQVIHPVIRKRYDNKFNYFAIRYLDEFAGFKSLRFQVHLGNYVHDRRTKHISGTELQTERRIKERVKVFGRLSDAQRLKNDFFADESHRDQELGWEIFPNPSYVFIENNIPIYFKVDNEVGEAMKSAKARRKSLSADERKVRSEDKAQKHIIVNSISQKGLLRKDEPTALLSLNEIPALLYEILVKGTSPDEIEEILKFKAVERVQTIKNYNPEQPLPASQISKRLRTNTIVAGKQYNLDKVKQLLDKEIFSADEKLALIYKNRAELNKKIGGKVLRNYIFGFSELGREATWIAEDIKRFMPVPTRREWKGYQHSQLQQSLSYYESRPDEAFNILKDNWNFDDEAMLWNSWIKDSFKEKSFDQFYERYLHGKRKYLENFLENLQNFSPGSNKILEKFLSQQMPKNFFDKRLYVLEPLEREKDKILSYPLVFPRGLFDPAPTFIKGVRITEEPERFAAWYHYGYSPDHPFQRFYDMERDYTDLINTDTENRTDADKNKPDFTVEQQYALIKKKQDLKIKNIKIQDLFLKLIAETLFQDVFDYTSEIGLSDLYLTQAERIEKEQNAALQSVRRAGDDSDNIIKDNFIWSKTISYEKGQIYEPAVKLKDIGKFRYFLNDGRIGRLLSYDTSKIWSKSEIENEIYIGPGSYESIRREAIFKELQKLEVKILAGYEGEHPEELEFENNPSFKKYIVNGFLRKQSDTVSETDCSWLDSFRDSTFENPEVFENLSDKAPLIQEAFLLVYLRNKFAHNQLPVKEAYYYIYENYSELRGSTVAETLLNFVAYAVNSITK

SEQ ID NO: 2048 - protein, 1008 aa, Artificial; identical to SEQ ID NO: 1452
  Synthetic

SEQ ID NO: 2049 - protein, 1003 aa, Artificial; identical to SEQ ID NO: 2042
  Synthetic

SEQ ID NO: 2050 - protein, 1134 aa, Artificial; identical to SEQ ID NO: 1986
  Synthetic

SEQ ID NO: 2051 - protein, 1134 aa, Artificial; identical to SEQ ID NO: 1986
  Synthetic

SEQ ID NO: 2052 - protein, 1003 aa, Artificial; identical to SEQ ID NO: 1673
  Synthetic

SEQ ID NO: 2053 - protein, 1192 aa, Artificial
  Synthetic
MAFDKPRPKRRQARSDFYITDKAIMGGYFNLAQLNFFKTLMEIFTKAGIDVSKIRQDNSPKYLMILIKKLTHDDEKIDDKKWADALDLSNECLLKLQQLLYKHFPFLGPVMGGEASYNIYKLKDGHPEVKIANNVMRGVKLEDCLAVIRHFALCLNDCRNFYTHFNPYNPIDAQKEQYLSQNKVAVWLDKVKDASRRIIKQNNQLTSQDMEFLTGDRMKPQDKVDEFGNIMTDKKGYTIKEYVEYEDYYFRIRGKRYLVDAAGAKLVDQEPRNALSDFGVVFLCTLFLESDQARRMLDELRLFETGPYDGSRDGDEFKNDILREILLFYRTRVPRGKRLDPMDDTTLLAMDMLNELRKCPMPLYDVLSREGQGFFEDEVKRPNDLTPEVAKRLRSSDRFPYLALRYIDLNKCFGNIRFQVQLGEFRYKFYDKTTIDGEQVVRGLQKEVNAYGRLQDVERYRLEKYADMLQQTELVETGEEDITIANFIPDTPQSSPYLSDRTASYNIHNNRIGLLWNMPGEHEVLTGDEKMYLPDLKVDENGKADVFLPAPRASLSVRDLPALVFYLYLHNQYPDLTPAEAIIQQKYNALVRFFDDVSTGHMLPVNGIEELEKAIDQYGHLTVNEIPEKLRDYLAGSARAENDDDCGVRFDWYALGVLEKRYKQVRARIDQLKEARKMVGDKMNRYGKKSYIDVRPRRLAEQLAQSIVDWQPSTDNGRHKMTGKNFQRLIAFLARYTDEVPVQEIKDLMTRARLLEGPVAHPFLQQVLDKNPLNIEVLYDLYFKEEKRYLDKYIDIEINKQGEEVYWIKPDADLSKIPFLNSSRLRFHKLDSAYYQRLAARYLQVDGRQSTILLPDGLFTPHILSVLKSTLYQENRDLQDHLQDQELNRNASYLMSVYLEHVLHDSAQPFYMPNSNDSPFARRYDLFAIVQNNKKGIELLPCPLTPVEINRRLTGKTPDCRAKLIERDILALLEDMARKTEQRIHKLPQGLYRKKKNEAQEERIKLQQRMRHKIANVKKNERAIRRYKTQDMAVFLMAKQMLANQLSWQNQEGEVPFKLANVCKEGFLRQTMKVSFPYEVPLKEDKTQKATINIVQDDMSLKNYGLLYKLYHDERVVTLLQNIVDQQQISFAELTAELSLYDQNRSKAFSNFQQFEKLAFETNKEALSNPEHRGFFLEKVNKKNQVIRYERR

SEQ ID NO: 2054 - protein, 1361 aa, Artificial; identical to SEQ ID NO: 1731
  Synthetic

SEQ ID NO: 2055 - protein, 1146 aa, Artificial; identical to SEQ ID NO: 1461
  Synthetic

SEQ ID NO: 2056 - protein, 1167 aa, Artificial; identical to SEQ ID NO: 2025
  Synthetic

SEQ ID NO: 2057 - protein, 1003 aa, Artificial; identical to SEQ ID NO: 1494
  Synthetic

SEQ ID NO: 2058 - protein, 1003 aa, Artificial; identical to SEQ ID NO: 1723
  Synthetic

SEQ ID NO: 2059 - protein, 1078 aa, Artificial
  Synthetic
MINNKNTNQAFWAAYSNVAAYNVAIIIAHINSKIENKTKEADEESLGKIEDLFDMVCVDNPNNKKKIDFLYKYMPFIWLFVDYIYNQDKTSNGIPFFEKRIINNNDKNDVESREVTLTEQIEIIKELFQLLLDIRNNQSHFVGSNYFVNDSMFRALEYCFDVSLRTTITRFWDDAKDANNKLEHLKRHDNKGKIKKEFIYKFKNIGVDKNNFTTNGLAFFLCLFLDKRMSKLMLDQISGFKRNDSKEYRATINVFTIDRIRLPKEKIESVFSLDSLGLDIINELQKCPKELYDLLSQEDRNKFVLIDEETEDETILKRSQNRFSYFVMRYFDEKEIFKNIRFHIDLGLYNKDCYEKTLKDGSKLEDRFISKRLKGFGRIQEMNTEFEKHKKEYPDFYVQDKNEKNYQIPNRMPTFPHYHYANEEKTLIGLKIKDKVDYKYSDIERNNFILEKPDAYISTYEFPAMYFCEYLKGNPEQVLIDTYNTIIDFLKKIASNDNSIEIFRDEITGKTEDEIKELFKNEFKLDINDIPKELKVYISTKPAKSKNTYQEYLKQKMDTMLEEAKKEYGWIIDKENRIKERRIKAGKKNYEKINIGDIALKLVKDIIYLTPISSKNNGKDGITSPNYNRLQEHFALWVEKERRFKAIEILNAFKIFDKHPFLNKLGKIEDISSIVILYKAYMLSKINYLNEKAVKGKYGIDILSNDKENKKALDYETYSIDLAKKLLELPINLPRNMFYEEIVKSKELETLRRYIYGKRANVSYLIKLYLNEKLKDDSQEFYKYDRMYKFFKEGRNNKNVYHELNRFDEKVSEIKEQIKNNQDNPNYKFYKQFTENEKQLRLLQTQDVLLFLMAKSILFNEVETKFIDKTIQSESILLKNIGIGGKSVLEEKTKVNLSLSVADYYLFIEDTLKIKNYGDFKYFCFDKRVSNYLECLLKTFNDNQYKKGGNPYKIKRQEIEKELENYETYRIAAFEKILEFERIFFQNYYTKEEFESINNGTHFSFEKIIKEFIEKTNAEYEICKLIKSTRNAFSHSQYPMQDNWLRNRIDEKNKSNMLDIIYNDFSESIESCKKLIVN

SEQ ID NO: 2060 - protein, 1078 aa, Artificial; identical to SEQ ID NO: 2059
  Synthetic

SEQ ID NO: 2061 - protein, 1003 aa, Artificial; identical to SEQ ID NO: 1673
  Synthetic

SEQ ID NO: 2062 - protein, 1003 aa, Artificial; identical to SEQ ID NO: 1494
  Synthetic

SEQ ID NO: 2063 - protein, 1003 aa, Artificial
  Synthetic
MGAIENKHIFAAYANLAIDGLIKTLNFIAKKLDTQKQLSSWDIKHVITLIDSIFDQNPQNNLEQVVEGYLPWIKPIIEMKTPKKGERQSDKLCIEYKTIITAFASLLNDVRNYYTHYYHDPICIYPGGYDIPSSLNCIYDSAINIIKERFQAEEKEMEHLRRYTRKKGRVVLKTEDDHFYYTLANNNDLSKKGYAFFISMFLERKYSYLFLKKLSGFKRGDSLQYRLTLEVFTALSTKPPVERLRTTKDTKQDRALDILNELSRIPIELYQTLEPKYREMYNETLQPTDAEDPYGLPDRSRIRFRSRFEAFALHFLDKQADFKEIGFYTYLGNYFHNGYQKTRVDRETKDRYINFQLAGFCKNIQDISAKKLSEALNVKSIDISTDSIPDINSFEPYLVQSTPHYIVNGNNIGIKVLPEGKDTYPTIDEKGAKMPIADFWLSKYELPAMLFYTYLRNNNIHKSHCPLSVKDIIERSIHKSTKQKHPEERSELMLRRVMKAIFWTDSKLNEVERIKSQKSAFGKRQHEILKAGRIAETLVRDMLWLQPSKNNGRDKVTEPNFQAIQVSLAYFGIRRNDLTEIFTRAGLINSSNPHPFLAQIGTNYTSLIEFYIAYLKERKVYFSRIQKKILQGKLNIQCHPLRDLQREPNKPQEKEEAIFLPRGLFNEAIINCLKKSKLKQLIESPTREKSPALNVSYLILNYFRTYFEDQSQEFYAQPRNYRLFDKLSPNKGKSKSYLSLEQRIKKMEELRPSKIPVAEANKLLEKEDRLYRKNYNEICDNESIIRLYQIQDILLFMMTKEYLPSDLYNRINKYKLENVKGILNERVSYLIDLNPLKIQGEDIKIKDYGKLFYIHHDTRINSLNKVLSKVKRNNSISSSVKIQPYENYKRECLDFEEAQIQIIPIIHSFEIAMVSMFPDLKKATPGNYYDFNELITEYEKRTKQKIDSSFLIKTRNMFLHDKYEAECIKEISDDFVYAKKIIAEFKMKIENIKLEDFSNDSSA

SEQ ID NO: 2064 - protein, 1140 aa, Artificial; identical to SEQ ID NO: 1356
  Synthetic

SEQ ID NO: 2065 - protein, 1168 aa, Artificial; identical to SEQ ID NO: 1357
  Synthetic

SEQ ID NO: 2066 - protein, 1003 aa, Artificial; identical to SEQ ID NO: 2063
  Synthetic

SEQ ID NO: 2067 - protein, 1003 aa, Artificial; identical to SEQ ID NO: 1494
  Synthetic

SEQ ID NO: 2068 - protein, 1003 aa, Artificial; identical to SEQ ID NO: 1494
  Synthetic

SEQ ID NO: 2069 - protein, 1003 aa, Artificial; identical to SEQ ID NO: 1494
  Synthetic

SEQ ID NO: 2070 - protein, 1003 aa, Artificial; identical to SEQ ID NO: 1494
  Synthetic

SEQ ID NO: 2071 - protein, 1110 aa, Artificial; identical to SEQ ID NO: 1486
  Synthetic

SEQ ID NO: 2072 - protein, 1140 aa, Artificial; identical to SEQ ID NO: 1482
  Synthetic

SEQ ID NO: 2073 - protein, 1003 aa, Artificial; identical to SEQ ID NO: 1494
  Synthetic

SEQ ID NO: 2074 - protein, 1003 aa, Artificial; identical to SEQ ID NO: 1494
  Synthetic

SEQ ID NO: 2075 - protein, 1156 aa, Artificial
  Synthetic
MENHTKQTTYKYDEIADKHYFAGFFNLAWNNIEIVFKVFLKKFKLIEDKDKKIEVNPLSFVDNYFKNELALSDYRDRIDFLKQYFPVVQYLELLVSKNNDLEKCIGEEKENKRRECFRAKFKSLIRTINELRNYYTHHYHKPIIVDEATFELLDELFLTVVKEVKRYKMKGEPIRHLFKKELNNELTALIKLKKSELETRRKEGKRVNIDPVSIENAVLNDAFSHLLFGEKGEKFYQSKSTSSNQQSTINISESGLLFLLGMFLHRKESERLRSNIQGFKAKVVRDPEKPIDFKNNSLKYMATHWVFNHLAAKPIKERLNTAFQKETLLLQIADELSKVPDEVYQTFSQEKKNEFLEDINEYFKTGNDIKSFEESRVVHPVIRKRYENKFNYFVLRFLDEFIDFPTLRFQIHLGNYVHDQKEKPISQGTHLITQRIIKEKINLFGKLSEVTNNKTDFFQKLEVAGGETNLEMFPEPSYNFVGNNIPIYLNLAKSKVEGAKELNSHLIRLNNEEKKHQKKRTGNKPDKTAILSEIQISDISYGKPVALLSLNELPALLYELLINGKSGEEIENILVEKLVERYKTINNFSPDNPLPTSQISKKLRKATANERIDIDKLIRAIDREIAVSKEKANLISTKLRDWENAKTNRKYAFTKKELGQEATWLADDIKRFMPNKVKENWKGYQHSHLQLLLAFYESRPNEAYSFIQEFWNLDNDTYLFNRWLKTSFNEKSFHKFYLKYLENRKKYFENIRHQITAFKNQEKLLKKFIEQQHIWSVFYKRLYIVSPIEEQKRQLLLKPLVFTRGIFDPKPTYIEGKEFEGNKDLFADWYQYIHDEEHVLQKFYSWKRDYKELFEKFKASDEFTNNKYQLSEKQQFELFNRKWDKKIRKIIGQDLFLNLIIKRIIKELYHQDVALNLADYYLTQEERIEKEQRAKQQTNRLKGDKSENIINDSFIWNMTISYKTDYINEPAIKLKDIGKFIRFLNDEKVERIFSYTPKKNNWRKHEIEKELEMYEKIRREEVFKMIQELEKKILEKHKFDGINHPDEFEKSGNPNFKKYIAQGVLKKHGIQDVVIEWIENLGENSYEDNNTLELLVQKDEKVQDAFLLIYLRNKFAHNQLPTKEIFDIIVSKTDTKSYVAETLLNYISITSRRILN

SEQ ID NO: 2076 - protein, 1156 aa, Artificial; identical to SEQ ID NO: 2075
  Synthetic

SEQ ID NO: 2077 - protein, 1003 aa, Artificial; identical to SEQ ID NO: 1494
  Synthetic

SEQ ID NO: 2078 - protein, 1003 aa, Artificial; identical to SEQ ID NO: 1494
  Synthetic

SEQ ID NO: 2079 - protein, 1124 aa, Artificial
  Synthetic
MNIEIKARNMSDHPQYFGAFLNMARLNIFSISNHLAKIFDKTPLDDEEKILTSFISDKKIKNLNWNKVIGILKKFMPIVKIVNAETLPKSEQEKLKDENKFNPKNDFEKMCDFLFYLFKEISEFRNDYTHYYSIENKTERKKNVSPEIKDFLIENFNRAVEYTKDRFANVFTDKDFELAKNIVLFNDNSEITSLGLAFLISIFLEREYAFLFIGKVTGLKGTQHKSFLAVREIFMAFCVKLPHDKLVSEDRKQELSLLIISELNKCPQELYNVISDDEKKYFLPELDVIAKANVLENSVPDDEMDYDNYIQNITKKIRYENRFPYFALRYIDETNFFTKYRFQINLGKVLLNEYKKKLLNEEEDRQIIDKAFAFGKLNLFLNNEDEILKKINKANGNIEFEQFAPHYNFNDQLFKIGISNKESYPIFIKNENKANGILKQTLPDAFLSLNILSDIILLDYLKKGESEKLIADFIQLNKSHILNWEFIEKIKAKFAGLEVFQKYSRGKKQPAAYRTERLKELEDRKKRLNDVLTEYNLNDKQIPSRIIEYWLNINDTAKNKQISDKIKLMKNDGKDRLKDLRKNKAPKIGEMATFLAKDIVDMIISKERKVKITSFYYDKMQEGLALYNVEEKRKMFLDICNLPEINLFDPQAGHPFLSKINPAKIKYTTDFYRLYLEEKTCKMVETTNYKTGKISKKDQSWMSNTFYKLEYSEKVGKNMTVVKLPSIISNLPLTIQKWCKENYDFKEWFDHIHGKIDNAPKPVAKPVDLPTNLFEPAIKHELQDIFKNHIPFNDNDTNNQLFKLWWTKVKNNGFMKFYNTKREYNIYDEKVIFEIKPQGKFSDYYQNALSKAFKNLSTERKNEKQINRALPDIDRKQVEKVFKQTIGNTEKKIRILQEEDALMLLMFEKLLDMPGINMLNNINMDNILDETIEVKQKIERKLSFDDNGEIIKNDDAKKTISKIIVEERKRKEYSVLHKYLYDKRLPELFEYFEEPEIPVAKLKLELDNYNQAKNEIFDLVFNFEKKLIEKDKDGIIAKIETKPDEVPTGNIQHKPYLLWLKSKNYIDDSDFKFLNMVRNTFSHNQFPQKKTMEIFINTWNKTKFAENIFEIYKLKIEFILGKVG

SEQ ID NO: 2080 - protein, 1003 aa, Artificial; identical to SEQ ID NO: 1922
  Synthetic

SEQ ID NO: 2081 - protein, 1003 aa, Artificial; identical to SEQ ID NO: 1494
  Synthetic

SEQ ID NO: 2082 - protein, 1262 aa, Artificial; identical to SEQ ID NO: 1735
  Synthetic

SEQ ID NO: 2083 - protein, 1003 aa, Artificial; identical to SEQ ID NO: 1450
  Synthetic

SEQ ID NO: 2084 - protein, 1146 aa, Artificial; identical to SEQ ID NO: 1461
  Synthetic

SEQ ID NO: 2085 - protein, 1242 aa, Artificial
  Synthetic
MEQNRKEGSLRTQEDIQYFGSYFNMARHNLYLITNHLTSVFSHLNFSQLDDDEDIWSDKPEVNEKNILLNIFDTKNERLQDERIRVFRYLMRRHHLPCLRIFTNDFKVLETTGNTIKKDELEVDFDAVHKFLNIAFKEINLFRNSYTHYLSINEEGKRLKKKKKISSKLVPVLNSLFSYAPEYSFLRHNIDKANKDVKIYKEEVKEYYDNIKSKYKLFENDSNELTDQGMYFFITLFLERAHGIKFLKRFRGFKNETTPPFKATIQAFTTYTLKIPDVRLDNDIPEQTMIMEVLNELNKCPEELFKFLKKEDKDRFQPVISDESLTNIINSSNYEEISDEDIDRLIKENSVLKRREDRFPYFALQYLEIMSKLKNIRFQIYLGKLVLKTYDKENPNIERRVITDIHAFGKLSDFVGKEAEVLDTFNSQLKDYGYSVAWDQYKPSYAIEMNRIGFYLFNDQGDKVENKILPSLCKNKNLERKVEIKVNKIQPTGFISTHMLPKFLISYLMGDVNEKNGEKTITHFLEKVNVSILDQNIINQIKSEIQNLDPIEFTKRCPKLSAIKNVKKLRVAGAIDKKIVEYQYINDTDIAKLVQKTGLAYDTMVTYSKDKFKEKTNHLNLSKKELETFAHIKYKYYLSERRKALDSVLKAYFPEIGSQDIPKELYNYLLNINEQDNKKLEHRRIKDEVTKTKKLIKDVNRSLKFEDKILLGDLATKIARDIINMIIDKDLKVSMTNPFANRLQNLIAYFSTNKEAIVALCESYKVFEHNKGHFFLTRELILNSTGVIDFYIRYFEAKIEKIKEVLLVRGKEGGYEINTELIPYSYTQYLPKEVKEENKNTCKNLFEQWLYYKQKSPVNLPVTLLDEDLTSALKSKLKLKPDLKDGFSKLIQLYLKDDAQEFYSFDRVYRNNDNEHVIKYSNEGSSKEMQIKYGKVAVESEKIIRHVLLKDRILRVICEDLLKSDKNTSSTKSFLLKDISPWSETNILNKPNEFSYNLRKNIDGSGTEYCTIVAKDSTEQIRQINEWNDLSKEIKSKFLKLNAEQKIDFLTTQDEKTKLVLLGQQNYQWKFSDFGRFRRFMKDKRINEMVKYFEPKQIPFDLLEFQILQYNIYREKMFDKIFELERVMSERYFEDIKSKHLENFKYNEVGFQTYLNVLSEKIASGYDIAILKWGRNKFSHTEIVYYNFISKIAVQDIEEFELKKHLEGYKENVSFNIARNIYRVFSREVDKTINLINNSFKI

SEQ ID NO: 2086 - protein, 1003 aa, Artificial; identical to SEQ ID NO: 1510
  Synthetic

SEQ ID NO: 2087 - protein, 1317 aa, Artificial; identical to SEQ ID NO: 1804
  Synthetic

SEQ ID NO: 2088 - protein, 1003 aa, Artificial; identical to SEQ ID NO: 1494
  Synthetic

SEQ ID NO: 2089 - protein, 1003 aa, Artificial
  Synthetic
MGAIENKHIFAAYANLAIDGLIKTLNFIAKKLDTQKQLSSWDIKHVITLIDSIFDQNPQNNLEQIVEGYLPWIKPIIEMKTPKKGERQSDKLCIEYKTIITAFASLLNDVRNYYTHYYHDPICIYPGGYDIPSSLNCIYDSAINIIKERFQAEEKEMEHLRRYTRKKGRVVLKTEDDHFYYTLANNNDLSEKGYAFFISMFLERKYSYLFLKKLSGFKRGDSLQYRLTLEVFTALSTKPPVERLRTTKDTKQDRALDILNELSKIPIELYQTLEPKYREMYNETLQPTDAEDPYGLPDRSRIRFRSRFETFALHFLDKQADFKEIGFYTYLGNYFHNGYQKTRVDRETKDRYINFQLASFCKNIQDISAKKLSEALNVKSIDISTDSIPDINSFEPYLVQSTPHYIVNGNNIGIKVLPEGKDTYPTIDEKGAKMPIADFWLSKYELPAMLFYTYLRNNNIHKSHCPLSVKDIIERSIHKSTKQKHPEERSELMLRRVMKAIFWTDSKLNEVERIKSQKSAFGKRQHEILKAGRIAETLVRDMLWLQPSKNNGRDKVTEPNFQAIQVSLAYFGIRRNDLTEIFTRAGLINSSNPHPFLAQIGTNYTSLIEFYIAYLKERKVYFSRIQKKILQGKLNIQCHPLRDLQREPNKPQDKEEAIFLPRGLFNEAIINCLKKSKLKQLIESPTREKSPALNVSYLIQNYFRTYFEDQSQEFYAQPRNYRLFDKLSPNKGKSKSYLSLEQRIKKMEELRPSKIPVAEANKLLEKEDRLYRKNYNEICDNESIIRLYQIQDILLFMMTKEYLPSDLYNRINKYKLENVKGILNERVSYLIDLNLLKIQGEDIKIKDYGKLFYIHHDTRISSLNKVLSKVKRNNSISSSVKIQPYENYKRECLDFEEAQIQIIPIIHSFEIAMVSMFPDLKKATPGNYYDFNELITEYEKRTKQKIDSSFLIKTRNMFLHDKYEAECIKEISDDFVYAKKIIAEFKMKIENIKLEDLSNDSSA

SEQ ID NO: 2090 - protein, 985 aa, Artificial; identical to SEQ ID NO: 1567
  Synthetic

SEQ ID NO: 2091 - protein, 1146 aa, Artificial; identical to SEQ ID NO: 1461
  Synthetic

SEQ ID NO: 2092 - protein, 1081 aa, Artificial; identical to SEQ ID NO: 1329
  Synthetic

SEQ ID NO: 2093 - protein, 1126 aa, Artificial; identical to SEQ ID NO: 1756
  Synthetic

SEQ ID NO: 2094 - protein, 1003 aa, Artificial; identical to SEQ ID NO: 1510
  Synthetic

SEQ ID NO: 2095 - protein, 1143 aa, Artificial
  Synthetic
MKQVNNTHREFSKIFRDKGYIAPIAEKAHRNYSIVLNNPINTDDRLHHFAIGHAFKDLGTKAIFKYDLNEKEKRLTPSQYLTLQLENFTFKDDLFKVIENIRNINSHYVHKFDFIEIGKLTENKEANIKIIEFLKEAFEVAVLVNFLEEEKITYEAFSQDEEANHKIVSYLCEKFYPNKEFQQEERQYFLSLNKNAAIEALLFIQVEEDVEWKLFEDHSIFSIHSGCYLSFHSCLFMLSLFLYKDEANKLISKIKGFKRTDDQYSFKRNIFMFFSKKFKSQDISSEEKYLVRFRDIISYLNKYPIHWNKHLELESGFPQMTELLQKKIIETEIFRSFPKYDQKRERKKFLQFATKKLFGFDFYLNEKLEFTDQEISDFKYQINTSPELQKVNSDIDKLQGTPNLSEKQNREFRKLKGKKKKLNQFPNPVKEKLEKRIKEKTLYKSYGRNQDRFMHFAIRFLAEGNYFGEDVKFKLYQFYTIKEQEDYLTDLQNRNGLKSLDSLTYHQGKLIHYNTFRDHINKYKEWDTPFVIQNNAFKLKIKLYNGTEKLLTVQRGLMIYFLEHALFHVKSELHSAGKCLLEEYFEEYQKEVSYGKKILENKEAVSLNEKNKLKRFFPKRLLHHYSPTQQNNLADKSSFELILEEAILQEKRYNELLENARNVNLEEQFTEKNKGKQFKLRFIRKAWQQMYFKSIYLERASEKGHHKAFNITKEQFNDFSRWMFAFDEVPKYKDYLTSLFEQKEFFKNDEFKHLFNQSSSLNELYGKTKERYSNWLKSNQPQLNSEKYTYDNYKNILHKNQWYINVAHFIDFLQAKDLLYKNGDNTIQYKALENKQYLVEAYYYKDRLNPQEYKTNGKLFNKLRKNKLEDALLYEMAIRYLHVDMSIAREAKNHVSEVLNSNITFNIQNKTSQHLYKLIVPFSKLETLAVLLNHKIEQEESPKLRGKSFLGNIHEYLNTTNNNKDLKAVIKQKKNTGTLNYEHLNTVYNHIISQSILFTRIEMKLEEYFIAKYKNTIPDNSNHIKWDEIINTDNERLLRQYFNKATRNKAFHFGIPSKDYKKLIEDEIEIKFLNEEIKRDHPTSFDDLNPMQKSVCRLFMNVLHNDYFRKSRPVNTETDEEKNNRIREERAKFEETYFNSMIR

SEQ ID NO: 2096 - protein, 1003 aa, Artificial; identical to SEQ ID NO: 1494
  Synthetic

SEQ ID NO: 2097 - protein, 1003 aa, Artificial; identical to SEQ ID NO: 2063
  Synthetic

SEQ ID NO: 2098 - protein, 1150 aa, Artificial
  Synthetic
MNTQPVGLGISYSHTSKNDKHFFGGFLNLGINNLEVLIAAFKLKFFSGDQKKIDIKNFVQTCFTANISDHDFESRVEFLQNYLPVVRYLDKRNKEGFKNQVELLFKSLDSLRNFYTHYYHAPLSLPQALFDLLDSTFAKVASDVKANKVKDDKSRHLLKSALSEELNARYKLQLERLKELKASGKKVNLHDHDAIRNGVLNSSFNHLIYKNEAGDTIVTRRYAARYSEIESAENGITISQSGLLFLAGLFLKRKEVEDLKSRVKGFKAKIIKEGEENISGLKYMATHWIFSYLSFKQPKQTLTNDFDRETLLLQIIDELSKVPDDVYQAFSEETRNLFVEDINQYLKEGNDDYTLEEAQVIHPVIRKRYENKFNYFAIRYLDEFAGFTSLKFQVHLGNYIHDKRTKHISGTELQTERRIKERVKVFGKLSDAQRLKNDFFADKSRRDQELGWEILPNPSYVFIENNIPIYFKVDNEVAEAVKSAKASRKSLSPDERKVRSGDKAQKHIILNSISERGLLRKDEPTALLSLNEIPALLYEILVKGTSPVEIEEILKSKAVERVQVIKNYTPEQPLPGSQISKRLRSNTAVTGKQYNVDKLQQLLKKEIFLADEKLALIYKNRVELHKKIGGKVLRNYVFGFSELGREATWIAEDIKRFMPLPARREWKGYQHSQLQQSLSYYESRPNEAFNILKDNWNFDDGAMLWNSWIKDSFNEKFFDRFYERYLHGKRKYLENFLENIQNFSPGSNKILEKFLCQQMPKNFFDKRLYVLEPLEQEKDKILSYPLVFPRGLFDPAPTFIKGVQVMEEPERFAAWYRYGYSPDHPFQRFYEMERDYTDLINDDTETRPDTDKNKSDFSSEQQYALIKKKQDLKIKNIKIQDLFLKLIAETLFSDIFDYDSEIRLSDLYLTQAERIEKEQNAAQQSIRPAGDDSDNIIKDNFIWSKTIPYIKDQIYEPAVKFKDIGKFKYFLNDGRINRLLSYDTLKIWSKAEIETEIYIGSASYESIRREAIFKELQKLEEKILARYKGGHPEELEYKNNPSFKKYIVNGILRKKPDTVSETDCFWLDNFDESTFENPEVFEILSDKLPLVQEAFLLVYLRNKFAHNQLPIKEAYFYINENYPDLRGSTVSETLLNFLVHAVNNITNRCI

SEQ ID NO: 2099 - protein, 985 aa, Artificial; identical to SEQ ID NO: 1567
  Synthetic

SEQ ID NO: 2100 - protein, 1121 aa, Artificial
  Synthetic
VKMEDDKKTTGSISYELKDKHFGAAFLNLARHNVYITINHINKLLEIREIDNDEKVLDIKALWQKGNKDLNQKARLRELMTKHFPFLETAIYSKNKEDKEEVKQEKQAEAQSLESLKDCLFLFLEKLQEARNYYSHYKYSEFSKEPEFEEGLLEKIYNIFDDNIQLVIKDYQHNKDINPDEDFKHLDRTEEDFNYYFTRNKKGNITASGLLFFVSLFLEKKDAIWMQQKLRGFKDNRESKKKMTHEVFCRSRMLLPKLRLESTQTQDWILLDMLNELIRCPKSLYERLQGDDREKFKVPFDPADEDYDAEQEPFKNTLVRHQDRFPYFALRYFDYNEIFTNLRFQIDLGTYHFSIYKKLIGGQKEDRHLTHKLYGFERIQEFAKQNRPDEWKAIVKDFDTYETSNERYISETTPHYHLENQKIGIRFRNGNKDIWPSLKTNGENNEKRKYKLDKQYQAEAFLSVHELLPMMFYYLLLKKEEPNNDKKNASIVEGFIKREIRDIYKLYDAFANGEINNIDDLEKYCEDKGIPKRHLPKQMVAILYDEPKDMVKEAKRKQKEMVKDTKKLLATLEKQTQGEIEDGGRNIRLLKSGEIARWLVNDMMRFQPVQKDNEGNPLNNSKANSTEYQMLQRSLALYNKEEKPTRYFRQVNLINSSNPHPFLKWTKWEECNNILSFYRSYLTKKIEFLNKLKPEDWEKNQYFLKLKEPKTNRETLVQGWKNGFNLPRGIFTEPIREWFKRHQNDSKEYEKVEALKRVGLVTKVIPLFFKEEYFKEDAQKEINNCVQPFYSLPYNVGNIHKPDEEDFLHREERIELWGKKKDKFKGYKAKVKSKKLTDKEKEEYRSYLEFQSWNKFERELRLVRNQDIVTWLLCTELIDKLKVEGLNVEELKKLRLKDIDTDTAKQEKNNILNRIMPMQLPVTVYEIDDSHNIVKDRPLHTVYIEETKTKLLKQGNFKALVKDRRLNGLFSFVDTSSEAELKSNPISKSVVEYELGEYQNARIETIKDMLLLEKTLIKKYKTLPTNKFSAMLNGWLEGKDESDKARFQNDVKLLVAVRNAFSHNQYPMRNRIAFANINPFSLSSADISEEKGLNIANQLKDKTHKTIKKIIEIEKPIETKE

SEQ ID NO: 2101 - protein, 1003 aa, Artificial; identical to SEQ ID NO: 1632
  Synthetic

SEQ ID NO: 2102 - protein, 1003 aa, Artificial; identical to SEQ ID NO: 1494
  Synthetic

SEQ ID NO: 2103 - protein, 1047 aa, Artificial; identical to SEQ ID NO: 1398
  Synthetic

SEQ ID NO: 2104 - protein, 1140 aa, Artificial; identical to SEQ ID NO: 1482
  Synthetic

SEQ ID NO: 2105 - protein, 1003 aa, Artificial; identical to SEQ ID NO: 1494
  Synthetic

SEQ ID NO: 2106 - protein, 1069 aa, Artificial
  Synthetic
MVYYNWKNHDEKWFFAIYLNLARQNAYLTLSHIANLLGEVPCDEENLCEMPIIEALNGNDQSLLQKSERLILKHFPFFAPIIETERNIALKNNKPFSEKEGTKLLYNLCKSFFQLLNDWRNFYTHYDYAVMRFRNDEERDNFFKYLDFIFDTSLRMGKERFKWEENELSCFRRLEGKDRITRRPKENPNFLYHFEREKKLTEKGFVFFVSLFLEKKDSIDLINHVKQHFNDIFRDFFAIYSIRIPQHRVESTDSTLALGLDILNELKRFPKPVFELLQKKDKISFISNIKESDQNESNFIRMNNRFAFFALNFIDELKLFPQFRFHIKLGRYFYKFYDKKTIDGETRKRNLSVGLKTFARLNEVNSAKKEQWDNLIWDEAKEKLPTPPKNFAQKYITNAFPRYHLNANQIALKKVGDNIHLPELDDGKTHCDVPDCFLSAYELPALVFYGLILGQKNTVDGFAAAEKIIDSHIKNFRKLFSDIHTGEMLPDSEENVKNTLNSQYQIDISDIPVEMQDYLLDKKVNISEKFKKFAGNKIRNEVERCQRLIEKIKVKRDKLKDKGNKIGKKKFVVIKSGSLAKFLAKDMLNLQPSLDGAGKDKITSLNYQVLQSYLTSYSQHKHLLKNLFLNCALTFSKNKHPFLEKLNPENHLTIVDFFIAYLIKRKEYFEECLKKIVMGKNVSEYFLHPKRKKWNVRDTEYYRNLAKTYSENPISLPRGMFNEGLKKWFSENGNDKMKKFAQGRCNSVFLIQNYFAEVEKDKSQEFYNFKRSYKILNLLLGKRSGNKLLENYFSVAELSSNCKNWSQQIYKLPQKPLDSRNVEISKLYRESALGKFNKFLQNEKIIRFNKVQDMLLFLMVKEIFTYHQKQADLKVKIWGESFKLAEINANTNGILNVQVPCSMKIFGKIIETTLKVRNYGDFVRYTKDSRLENLFKWVSVKNISLADLKTELENYQDVRFDIFSLIHRFEKLVLEKFAEEVKKERELNQKGQYFTNFSTILNVFYRYFPNFAKERAKIESLRNNLSHNEYPEAQYFSENITNLSVAVYLRRIATELFMRYNSELSKIKL

SEQ ID NO: 2107 - protein, 1121 aa, Artificial; identical to SEQ ID NO: 2100
  Synthetic

SEQ ID NO: 2108 - protein, 1375 aa, Artificial
  Synthetic
MESSNKRKKDKSQNALKGKNVYIDEFVVTMKNFSLPKYHKHILAAYYNLARRNLYMTIANVFVYAGGQFPFTEDDMVMPLKVLHDLISKHKCYGDIKKAAEYEKQMSFKKIDQKKLHSRLYHSLPMLAPATDDIKEMQLKSILSETSASLVSTLEDCLKALIHYTATITDCRNIYTHYRAYKSPENQEIAYDNQKEVSFFLDAVMKAGRRICKRLDNLSQEDMDFIEQGKHYEQVSVIDEKTGLPKKDKKGRIIKVPSERKNFYFRIKGVRDVVDAKGKPIDGNSCHALSDFGLIFLAVLFLKKTDAEALMSEVQLMEKSPFSSKENELVKSFMSVYRIHLPKGKRLDINDDATQLGMDMLNELRKCPKELYELLDLKGKKTFEDDVTVLTGDIDPVSHNPISRTTGEKAVRKRYVDRFPYLALRYIDKKNLLEDIRFQLHLGSYRFSFYKKTTIDGEEKLRILQRGINGYGKLVEVEGERLILWEEHFQKFEIKDPNETEKSEIAIDEDGNIIQLIQPTESVVNDTPYVTDHRASYNFTVNRIGLYWQEEGIVGVAGEKFLPALTYKRHAESLQDDDRRKRATVSQPAPLAFLSTRELPALLFYHYLWNTHRLGNDPVASIIKNEYRKMRQMFLGIADGSITSKDGIENLGIKWANVPQKLRDYLTHKNVNPSDRLVQVFFGKGKDKGHLQERIDWIERKKSKFEELQKRIKAGDNKRGKKKFDTIRPNEIARNLATWIMDWIPQDSKCAAVMTTPNFEALVDMLAKYGIHEDYDESKLRTTLTNGYVMQCHPFMTDVMNQHPKDIERLYVTYMDKEIFKLKSILNQSHSRKALEAIPFAHTDRLRWTSRNDAYYKALAKRYLNIDDKSRAVLFLPDGLFTEHILRILQNPDDAKFSGIEAFKTKEGNAKEENEQHNVSYLISTFLESVLGDRSQSYYYDLGRSYDFFKEMKREKKDVKNPRSALKNQYLKPLQIAEALRGRAELKKKISIFVNNLYNSKEIQSQLQKEEENLQSRLDWERNPRKREKINMELEAFLSNKRTWKLRMNDKLLRLAHECAKNERTIRRYRIQDILIFLMAKDLLGNSFKERTQQKPFMLQNVSSPAFLSQTVEFTYKTKSSCKYKKGDNTYTITMPIEIRQDNLAIKNYNLAFRYLKDDRLGSFLSQLVRVVAENTDGEETKANMSTIVVDYNKLSGEFDSYNKLRSQIFDVIHQIESLIVDPNKAIYNNPVHKNFYVHDSLRAKNGEERTDENAVRNSFSSLLKTVYKILPDDEIKTIQQEAEKAEALRVSLIYKVMVAIRNAFSHNHFDIDLLQIAAPQTLRIIIDSLNLQAEDGMQKKGKDEKIEHISKLILSKLQTLRDTLNKDIYNKSNQ

SEQ ID NO: 2109 - protein, 1519 aa, Artificial
  Synthetic
MATFRFQNKYVCGAYYNMAQNNFRLAILHVLSRIGINRKDEERAIPELLDTIYGFLTGDTEHFNDTQILQKKVLTLRYDQQVKLRELLFRQFPILKPIIASETHKSLQEQKEKLSEMEEYIHEFEKQLKRLYRSKKGKASQEQKEINEQIKYLKTKKSKYLDEYDTLLFSKSHDADLQLCLKILKTMAWCLYDLRDFYTHYDPYNTPESLKVKYLRQVTVANWLSQVFAASRTIDKERNSITTEEMNFLNEAKKQGNDKKWREDPDYYFAIKGQNLLSSSFKDSDSPANNDYLDELYQKYRKKRLAWMKEQRDEALERDDEEEYGFWVVEMEKLDNPERIAKIKSKICPLALSDFGVLYFCATFLPRNYTLLMADHAEVMKNSPYSMTAEELEARRNACKTDEEREKIDPTDTPRNNILREMLCIYRVRLPKGKRLDKKDTKGLLTLDILNELRKCPKEVYEQLSKEGKDFFISRVSSASHNAPDIVKRIRFGDRFPYLALRAIDESDVFKRIRFQVRLGSYRFYFYNKTCIDGSTQLRRWQKEINGFGRLQDMEALRKSLWKDLLQKKEYDSVQLEDKSSYLDLQQFKADAPDSVPYITDSQAQYNIHNNRIGLIWNGDECRLLRNIKDADVLREYVYLPDLKDNDGNPKKSGKDIEQPSPLCSLSTYELPALLFYHFLYNTPEAQVHKERLEKPEQVIIKKYGALRAFFLELRSHPEQIVKTDLQATLTRFGLKCSEIPQRIIDCIQGCQQKQKETESSVTYLPDLLQLPMEDIRQKVQEKGMERYKDLPAKFRKQISHEQIVTSGLETLLKPLGISVESLPAKVMEALLSTQIQEDVAPAEDTATEKPFNIMFVRSVVYKLHERLQDVSKRHQSFVESIHHVGSKDNKFAKHGYMDVRHGKLAEYLAGSFLKWQPTISNGSDKLTGLNYNVLKSFLSTYGIATDIDDLTAVLHEAKLIHLGKEETPIPHPFLQKVIDKEPGNLEKLFHLYIIQEKEYLSDLLIDYLLQISTAIGTEGQDADMLEEAYTCNGEKLISDMLEEYKAKSTADSRQSVYQLEHPAFTHPKRERWKQGTNIATLAQLAKSYTNPLLLPDGLFTEAIRHLMEIVYSDNQKLQDELSRQNSKGEAASHSVAFIIDVYSRIVLNDHAQSYYCSDLVQPECTNFARSYRLFDKLNNQKDPFKAFIRVPMDTIGIMQKLKTGKEQFEAEVETYIIDTERREKAEAEQKVRNKSVRENWKLDRYEQERERAIDNASWPDSKKQEERDKMERMKRFVQKNERAIRRYRIQDITLFLMARNMLSEVFSGDDGQSFDEQSRQNLKLENVCNEDFLSQTIDYEYAYQLGDRTVTIRQAGMSLKNYGQFYRFLGDVRLDTLLMLLANVKSVTLTDVASEFAKYDQERPLAFKKLQLLEQLAIETDQTGTLYNPEADGFSFINPKGQKEPKRNNFAKLLDLLKDLGSDKNKLLTDIRNALGHNKYITDSSAMTLNEQLEITQVAVKMSEQISLLQQGIQENIK

SEQ ID NO: 2110 - protein, 1093 aa, Artificial
  Synthetic
LARHNVYITINHINKLLEIREIDNDEKILDIKTLWEKVNGDLNKTERLRELMTKHFPFLETAIYSKNKEDKEEVKQEKQATAQSFKSLEHCLFLFLKKLQEARNYYSHYKYSESTKEPMLEKELLKKMYNIFDDNIQLVIKDYQHNKDINPDEDFKHLNRTEKEFNYYFTTNKKGNITASGLLFFVSLFLEKKDAIWMQQKLRGFKDNRESKKKMTHEVFCRSRMLLPKLRLESTQTQDWILLDMLNELIRCPKSLYERLQGVDREKFRVPIEIADEDYDAEQEPFKNTLVRHQDRFPYFALRYFDYNEIFTNLRFQIDLGTYHFSIYKKLIGGQKEDRHLTHKLYGFERIQEFNKQNRPDEWKALVKDLDTYETSEEPYISETTPHYHLENQKIGIRFRNGNNDIWPSLETNGENNEKSKYKLDKQYQAEAFLSVHELLPMMFYYLLLKKEKPNNDEINASIVEGFIKREIRYIYKLYDAFANGEINSIGDLEKYCEDKGIPKRHLPKQMVAILYDEHKDMVKEAKRKQRKMVKETEKLLAALEKQTQEEIEDGGRNIRLLKSGEIARWLVNDMMRFQPVQKDNEGNPLNNSKANSTEYQMLQRSLALYNKEEKPTRYFKQVNLIESGNPHPFLNNTGWKECNNILSFYRSYLTKKIEFLNELKPEDWEKNQYFLKLKEPKTNRKTLVQGWKNGFNLPRGIFTEPIREWFKRHQNVSEEYNKVEALDRVGLVTKVIPLFFKEEYFKDDAQKEINNCVQPFYSLPYNVGNIHKPDEKDFLHREERIELWGKKKDKFKGYKAKKKPKKITDEVKEEHRSYLEFQSWNKFERELRLVRNQDIVTWLLCMELFDNLKVEGLNVEELQKLRLKDIDTDTAKKDKNNILNRIMPMQLPVTVYEIDDSHNIVKDKPLHTVYIEETKTKLLKQGNFKALVKDRRLNGLFSFVDTSSEAELKDKPISKSVVEYELGEYQNARIETIKDMLLLEETLIEKYKTLPTNNFSAMLNAWLEGKDESDKARFQNDVDLLVAVRNAFSHNQYPMRNRIAFANINPFSLSSANTSEEKKLDIANQLKDKTHKTIKKIIEIEKPIETKE

SEQ ID NO: 2111 - protein, 1126 aa, Artificial; identical to SEQ ID NO: 1409
  Synthetic

SEQ ID NO: 2112 - protein, 1140 aa, Artificial; identical to SEQ ID NO: 1356
  Synthetic

SEQ ID NO: 2113 - protein, 986 aa, Artificial
  Synthetic
MKTNQPKTIYYNWKDKEDFAYFAFYTSQALNNTSIILKNISEIIENKVDKTNDDNQLFSNAQVIKILESNNSVAQKSVINLLDSNLPFSVKSISDPFLVKNRLSYFLWLLKNFRNEYAHYHERELDSRTTLDREEDFKKRENLNKRFSKYDFADELLKLKKSAVEELEKRLKINNKELESDSVYKSFKNRFLKISSRQNFTEEDFIFFLCLFLSTKETMQLLNGIKGKKNTTTEEFQWIRRVFTIFNAKRFQNKIKSDNPKEAFILNIVNDLAKIPIHLKKYLTEEAKEKLIYTVQETEDEEGNILEQKSEAVTKHDEMFSYRCLQYLELFGFAKNINFNINLGKVFINKPYKKTIINDEYDRFLDKEIHTFGKLKDFDDSYFEGYIERKETENGVVTTFKQPLKFYSPKYHFSNNRIGIKLYNKNLKLELKEYDEDGKFVVINNQPDYFLSENAIPYFTYCMINFGEDKTLGVIKNFETNFKRFLNDVSIGKSIKLQEIEQNYSLKIGWIPSLIRDNLFHDNDKTFEEVVKEKINSLKEETQKLIENNNKKPEDRDRNIKFSFKKGDLATFVAKDIIYFMESKEEIVNGKKVVSKLSSIEYDVLQSKLAFYGKHEEDLKLLFKKWNLNERHPFLKDVSMEKVEDRRGFKRQIGIKKFFKNYIYQRKYWLNDLKLEINKENYHFVDDYKVCKNDTQIKAYASNLLNHTIYLPNDLFSDLILENSNFAVEKANTNFLISKNLEYFGNQWFYNKENYQQGLDTYQSHLRDKQIRKAITLDRLYWNMLKINTQIPEFSQIFEQNNLAAYNSEQTLLEKQIRMSSNFKLAKEDFRYLDFDRDFEIKIEGYRKIKDFGIFRHLIKDRRVPSILAFYTKYKKLGSINEEIIRNEILDFEYYKISILKRVLEIDKQIYNNLIGKNISIHEKFSENVNKLYLENQKLANKIIEIRNKLLHNKVPEINLENIQETFSETLFLEMEKSCNELERLI

SEQ ID NO: 2114 - protein, 1003 aa, Artificial; identical to SEQ ID NO: 1494
  Synthetic

SEQ ID NO: 2115 - protein, 1199 aa, Artificial; identical to SEQ ID NO: 1328
  Synthetic

SEQ ID NO: 2116 - protein, 1085 aa, Artificial; identical to SEQ ID NO: 1453
  Synthetic

SEQ ID NO: 2117 - protein, 1127 aa, Artificial
  Synthetic
MENLSKEQIVETQEQNKRTWGNDPQYFGAYLNMARLNIYNVSNHLAEKFGITAIENEEQISNSFLGDKENKVFKNKQNHIFSNLIRYLPIVKVFDFEKLPEEEKISLKDNFGKDFKELSDTLKIIFSEINEFRNDYSHYFSTEKKNKRKTKVSDKLKDFLNINYTRAIQYTKNRFINVFSDNDFCLAEEAKLVENDNTITQDGIVFFTSMFLDRENAFQFISKIKGLKGTQTKAFKAKREVLMAFCINLPHDKFVSENTEQAFSLELINELNKCPKTLYNVISENEKQHFLPKLEDEQIDNVLENSVPYTIDDYENYIENITKKVRNKNRFSYFALKFIDQKELFKNWKFQIDLGKVVLDEYTKTLQGKDETRTVVENAKAFGKLQHLNDEENVLNKINKSESKTHFEQFAPHYNFDNNKIGISRKEDSAIFISRNTDKKVKFNLKQPLPEAFLSIHELPKIILLEYLENGKTEQLINDFIEINNSKILNKKFIESIKSKLTDFNTFNKRSQGRKEKSAYKKEALKYLLDRKEKLNQILAEYNLNVKQIPTRILDYWLNVADVQEKTAISDRIKLMKRDCMDRIKAMKKGKAPKIGEMATFIAKDIVDMIIGEEKKKKITSFYYDKMQECLALFADKEKKELFIHICNNELKLNESDGHPFLKNIILYDYRYTSDLYRRYLEEKADNRNNLNKNDTSWLAKNFYFIEKVEVFDKRLNRMEFKPQTVVKIKDKSKIPFTLRQLEKEKSSFDTWFENITKGKETTDKKKPVDLPTNLFDNYLKELLIKDLSKNNIKFNPKTNYNELFKLWWKECRKDKTQSFYNAEREYSFEDKKLNFKINTKSKFEDYINPEFAEKVFKLKSSRREKENSTGRKLPPLMIKDLEKSMANKIGSIEKDIRILQEDDCMMLLMFEKLVDNNLELKLENVDTLMNESIEIKQSILGKLSFDDFGDNVNKNDRIIISKNITETRKRKEYSVLKKYIFDRRLPELFEYFETEDITMEKIKLELGTYNKAKDIVFDLIFDLESAIIKKNENRIKELNKDKNGNIQTGNIQHKPYLFWLLEKNLITEQEFTFLNMVRNTFSHNQFPQKKTMELFIKNWNKNEYAKQILTVYTEKINNLIEKVIDI

SEQ ID NO: 2118 - protein, 1003 aa, Artificial; identical to SEQ ID NO: 1494
  Synthetic

SEQ ID NO: 2119 - protein, 1003 aa, Artificial; identical to SEQ ID NO: 1510
  Synthetic

SEQ ID NO: 2120 - protein, 1152 aa, Artificial
  Synthetic
MENHTKQTTYKYDEIADKHYFAGFFNLAWNNIEIVFKVFLKKFKLIEDKDKKIEVNPLSFVDNYFKNELALSDYRDRIDFLKQYFPVVQYLELLVSKNNDLEKCIGEEKENKRRECFRAKFKSLIRTINELRNYYTHHYHKPIIVDEATFELLDELFLTVVKEVKRYKMKGEPIRHLFKKELNNELTALIKLKKSELETRRKEGKRVNNDPVSIENAVLNDAFSHLLLGEKKVKKFYQSKSTSSNQQSTINISESGLLFLLGMFLHKKESERLRSNIQGFKAKVVRDPEKPIDFKNNSLKYMATHWVFNHLAAKPIKERLNTAFQKETLLLQIADELSKVPDEVYQTFSQEKKNEFLEDINEYFKTGNDIKSFEESRVVHPVIRKRYENKFNYFVLRFLDEFIDFPTLRFQIHLGNYVHDQKEKPISQGTHLITQRIIKEKINLFGKLSEVTNNKTDFFQKLEVAGGETNLEMFPEPSYNFVGNNIPIYLNLAKSKVEGAKELNSHLIRLNNEEKEHQKKRTGNKPDKTIQISGISYGKPVALLSLNELPALLYELLINGKSGEEIENILVEKLVARYKTINNFSPDNPLPTSQISKKLRKATANERIDIDKLIRAIDREIAVSKEKANLIATKLRDWENAKTNRKYAFTKKELGQEATWLADDIKRFMPNKVKENWKGYQHSHLQLLLAFYESRPNEAYSFIQEFWNLDNDTYLFNRWLKTSFNEKSFHKFYLKYLENRKKYFENIRHQITAFKNQEKLLKKFIEQQHIWSVFYKRLYIVSPIEEQKRQLLLKPLVFTRGIFDPKPTYIEGKEFEGNKDLFADWYQYIHDKEHVLQKFYSWKRDYKELFEKFKASDEFTNNKYQLSEKQQFELFNRKWDKKIRKIIGQDLFLNLIIKRIIKELYHQDVALNLADYYLTQEERIEKEQRAKQQTNRLKGDKSENIINDSFIWNMTISYKTDYINEPAIKLKDIGKFIRFLNDEKVERIFSYTPKKNNWRKHEIEKELEMYEKIRREEVFKMIQELEKKILEKHKFDGINHPDEFEKSGNPNFKKYITQGVLKKRGIQDVVIEWIENLGENSYEDNDTLELLVQKDEKVQDAFLLIYLRNKFAHNQLPTKEIFDIIVSKTDTKSYVAETLLNYISITSRRILN

SEQ ID NO: 2121 - protein, 1193 aa, Artificial; identical to SEQ ID NO: 1728
  Synthetic

SEQ ID NO: 2122 - protein, 1147 aa, Artificial
  Synthetic
MSGNYVNDRIGSVRRASQGAGGGFKKPRTYLSGDFARDMKALRIKGSVRDARTRRDLEKDETPAFIAYLTLALENLGNILGKVDLSGFMRPEAVTEALDESGRLFELASFLWMFREGEPQFNYGRVRKPGEERDYEKFAKAIVLKLWELRNMFVHSTQERAATVLVVDPGFYRFVEGELYSEARENALGPGRKSEKIFKLKLFTPHNESNTQYEFTRKGLIYLICLALYRHDANEFIQRFPDLQLPPRDWEVEGGYKPEKTEQELVELRKKGGSVKAILDAFTYFSMRASRTDIDVADADYLNFANILLYLNKVPGPAYDYLALQKEADRLVAEEKDSTENMENKRFKYVLQARKKDRFLTLALAYLEDFNKLSCLKFKRLDITVRPERKRYLFGRIPEGAKNEFGDEIQDANGMDRHYAIVNGNAQFEFVPAEHYGPVRITRLRGALGEDEIMRLLLVIHDCEVRRADPNRVLADYLTAYHRILERMLNAQDLAELSLEDAQYRADFKTVSGKDDAALAPAVFVEQMKPFFSASVTRYFVNQDLRPDTALLQKKLGAHLAARRDRAQDTLVRLDHLSEWLALDKEARVAAGRPLCKVGELRFPPRTCRFNDAQLVGMVLDFLNFYLAKEEKYRQLPRGMRHRGMVDYEFQLLHTDIGRFGIDPQRLWRSLEKRESLNAEGGPLEALRSRERELFRAEERRCKGRLDRNGRPLRVGHTLTMLAYAATELLAEGCEDARQTWTGPLSDEDRELLPYVAPMYGVKAGQPLDREALVRTVLGIDLASWSHAYDYASGKNFDGRGLESAKELIAAQIPMPNDFARRCVTQPAEGVFQFNPAFRAFKPYGEMSLRDYYDVKPLIASVQKLDAATALLARVEDSHARANALIDPTLPGIESRVRPPQEEGDERNRTEFSYGKSAPGPREFSRAVVNKAIQSIQRVERQDKVLLACAKDYWERYMKSEVMSSARSKVLKFDFAGAKDIREFFTLDLVDEVKGVKVRMMPNDFARPAYSAVTEHIQELAQRISVPADGVYAFYDLWLALRDLQRRENTARLDLLAADVKFDALIGAPQLPKEMSAAEKSEQLFLHAQKALRGISKDPLTRAEFDLILALSPRLRHPSGRGQTLLGQDLEAARRIYRRFGCLTPMK

SEQ ID NO: 2123 - protein, 1217 aa, Artificial
  Synthetic
MYNKPNGSPEPFDLFTGGKLPELAIAFNLAYDNIEKYIRTIQSFEEPLNNIDKLKDEVFVYLRHYIWKGNTENKNSSGYELDPKEKAIIKKLLTKLKQLRNFHSHVWHDNSMMHFDNELVHFIQDKHEVACDKLLEEKNADATLYLKQLKEYPLFKDGKYITQDGRIFFLSLFLNKGEMQSLLQGLKGSKRTNMPAYQFKHKVYTFYCHREGSSWDNTGVDNKALQQRGDEEQKRILYGRQANRIFSYLKDIPAFTKEEALPLVLSSGKWVHDMDSLLLFIREKNILPGFIFFKMEKEPDDDITGEKELNEEKKALETKEREGYRYFMMPENDKYDFEISYPALKHIATDIFLDANDAEEVENSSLQHFNGVLKDCIYMRNHIYNKLKAEGGKPIHPENFVLRKEYNSVYINYHEHEGSIQERYYTGNEWRHIPISPTPKIEKLLIEWHVAFTQGKNDKPNKGEVTKRVKLLNKIRPKNEPFDTSIYEGLLKTGKKKIIPNTETEPLLFHLGYYYREQDTKKRKEDNFLEWGVRYLMDMRLVPDWYFELEQLKYEQKSGEPESPYKLKKVTSWDKNIPDNFRLRITDNQVNIGIALEGKTYRLRIGEKIMKYLLCWHFRENKKENKSINGFLLNITKDLASIHNSQSKVNLASLQLLEGFAVPELLYKTKVVEENEKGKKADLYKEEVLKFFTEKWEWADKNIKNIKQLNRSEKNAVLLDAYRLFDFNETEGQKFLRKNEYEQMSICHYMLNQEKWKVKGLIERTFKLKRRLPQEIIDILYSVIDTERQNLDDLLILVLHNRKKFLKNKIDLLKLPGIKNRQIKNDIAGFMDIYLNDANLTTEELGIRNKARNKTLVNLPFAVHPALTLKYFYPQQFAAQGFRKEGGAYTNLFYKLRQDARLSTMLPDEILREKPVTKIFEDYIKQFPQDVLLESFTKKWTGTVNDIKTKDILLLLVAEVYLEKYDAHTATEFKKIKNLKKLQLDELFKAEVPVTLKLDQQLKKELEKEYKKAVPEINLLLRMHQLDDYFFRSQKETLAKLAIFYINWRNEELKLYAGKTDIMDKIKAWPDGSAAKPLTMGQLVEARRVNAGYAAELVGYIFDYEKGLLNGHVNKPNSAQKQKMLTDYCLTNGLLAYIDFNIILDWDKITDTEIKKQIKGLRINCLHSLIPLNGSYRQQTMPGTPVAEALHVHTRLGNDRTAPNIYEQDDKNETEEA

SEQ ID NO: 2124 - protein, 1077 aa, Artificial
  Synthetic
MATFRFQNKYVCGAYYNMAQNNFRLAILHVLSRIGINRKDEERAIPELLDTIYGFLTGDTEHFNDTQILQKKVLTLRYDQQVKLRELLFRQFPILKPIIASETHKSLQEQKEKLSEMEEYIHEFEKQLKRLYRSKKGKASQEQKEINEQIKQLKTKKSKYLDEYDTLLFSKSHDADLQLCLKILKTMAWCLYDLRDFYTHYDPYNTPESLKVKYLRQVTVANWLSQVFAASRTIDKERNSITTEEMNFLNEAKKQGDDKKWREDPDYYFAIKGQNLLSSSFIDADSPVYNDYLDELYQKYRKKRLAWMKEQRDEALERDDEEEYGFWVVEMEKLDNPERIAKIKSKICPLALSDFGVLYFCATFLPRNYTLLMADHAELMKYSPYSMTAEELEARRNACKTDEEREKIDQTDTPRNNILREMLCIYRVRLPKGKRLDKKDTKGLLTLDILNELRKCPKEVYEQLSKEGKDFFISRVSSASHNAPDIVKRIRFGDRFPYLALRAIDESDVFKRIRFQVRLGSYRFYFYNKTCIDGSTQLRRWQKEINGFGRLQDMEALRKSLWKDLLQKKEYDSVQLEDKSSYLDLQQFKADAPDSVPYITDSQAQYNIHNNRIGLIWNGDECRLLRNIKDADVLREYVYFPDLKDNDGNPKKSGKDIEQPSPLCSLSTYELPALLFYHFLYNTPEAQVHKERLEKPEQVIIKKYEALRAFFLELRSHPEQIVKTDLQATLTRFGLKCSEIPQRIIDCIQGCQQKQKETESSVTYLPDLLQLPMEDIRQKVQEKGMERYKDLPTKFRKQISHEQIVTSGLETLLKPLGISVESLPAKVMEALLSTQIQEDVAPAEDTSTEKPFNIMFVRSVVYKLHERLQDVSERHQSFVESIHHVGSKDNKFAKHGYMDVRHGKLAEYLAGSFLKWQPTISNGSDKLTGLNYNVLKSFLSTYGIATDIDDLTAVLHEAKLIHLGKEETPIPHPFLQKVIDKEPGNLEKLFHLYIIQEKEYLSDLLIDYLLQISTAIGTEGQDADILEEAYTCNGEKLISDMLEEYEAKSTADSRQSVYQLEHPAFTHPKRERWKQGT

SEQ ID NO: 2125 - protein, 1362 aa, Artificial
  Synthetic
MPNVKFTLVPVDYSRPYEEQPECKRHVIGAYANLARHNMTLTINTIMQTIGMPLFNENEIENAFSKSHRMELDTLDSTQKLNLQKRFYRHFPFFKRLKLEDEKKKSVQLGKLLGIMSDLTECMTMLRNTYTHYHPYVAPNKAVQQLELKKRIGKLIDQLFENSTRIYKKGEKIPHEGNELFTSQRKLTKKEINILRNSDSSFDETLKTVQAEIEKRKKNYQTELKKRQELIAKGIKPNKELEPVSETEVKIGKDTYIVGSNGTSIKKIWNQYDRDPDYYARMCDDEKGLSDAGIVYFICLFLDKQVASDFMDEVGFTEQCYFSESNIIMLKELMSLNRIRMVKMRLDSEMNETALALDMMSELRKCPQPLYDVLDTSARNDFKDATTVKWEMEHQQEATVSYNQQEDEDNEFAPQKSTPRSTFVRWDDRFSELALQYIDRWKPFNDIRFHLNLGKYRFAFYNHTSEQSVDGRERLRILQKELHGFGRIQEVEAVLKERWKKNFDQKEVEDGLIKKKPDTEGQAPYVTEQRPRYNIDKKSNSIGLRWEGWDNGGNQTVKRKDGTVFTTGHYGDLAEKKMFIPNIPRPASTDPTKHENKAERLLQPQCMLNLFDLPALVFHRYLLEKYRKDVSLTEQIIKGCYNSMHSFLTDLSKGTIFPLEHYQIKVTDIPDRIRQLLEGKQPDNVERLKESAMRKLKERKARIERTQKSYYEKKDRIGNKDNKFDKMRATIKTGQLGRWLMQDIMDWIPQHSEARQKLTGQTYMVLQSSLTLLGQKINEDSLSTTITLKKLKVMMVNAKIVEEDIVGNKTDALIYHPFLHLVFSECYDDSVEAFYEKYLEKELNRIQQMIDWISKPVSNDAILGRYRYTPFIHHERTRWKPVNSETLKLLATRYLERPLQLPKGLFTESIRVLLNEIALENGLTADKVNLFANAVNAAQMISLYHTLIEGDDSQRFYHNEPTKIGTIKNPNAYGHLYRLFKKLYGNPNENSNRIYKFSTPEINRILTGNIDAITSTNQLLKIKRLDYKIYEYIIKEMKKEGTLKPIDVHLIVLDRKYADLNDYEEATTVQERLAIDKLLKEILKKLKNYEVDMIWEYYMKMKRMAKKVASNERAILRYKTQDVLLLYMARNILMAKSNNAESFKEGFMLENVRQGDALLDKTINFEWKVMIVSGTPDLEEKQQCSKTIVQNNMKMKNYGQFYKFASDHQRLSSLLSRLPDDIFQRAEIENEFAYYDTNRSEVFRQVYIIESEAYKLKPELTDDANAYKEWFTFIDKKSGKPRAKRNNFGELLKILAAGGDGVLDDVEKSLLQSTRNAFGHNTYDVDMPVVFNGKQDKMKVPEVANGIKEKILEQTEKLKKNV

SEQ ID NO: 2126 - protein, 935 aa, Artificial
  Synthetic
  misc_feature (3)..(4): Xaa can be any naturally occurring amino acid
LFXXSGNVKRYVRNPDYPAYMMDEKEGMSDIAIIYFLCLFLEKKVSFELMEEVGLTKQIKFKGRDADQQLLFVKEILCMNRIRMTKTKLDSEMTDTALALDMINELRKCPKPLYEVLDREAREEFKDDATIQWEMDHGKEAVETEDSENEDGNEAPTEKDTPRSTFVRWQDRFPQMALSYIDYRGLFQDIRFQLNLGKYRFAFYTHDKETSIDGSERLRILQKELHGFGRIQEVEAKKNEKWAGLFDEKYVEDGLTQKKPDEAGQAPYITEQRAQYAIDEKSHSIGLRWEGWRAAADSRNHYGDLDSQKMFIPYIPANPASQEGTRQKNQAEGLLRPQAMMSLYELPGLLFYQYLLEKYGKDKFVAEKLIKECYSHLELFLKDVSTGDLMPVNSVGKKDELAKILNEKYKLRLSDIPEKLRKYLLSESVDCAEKLKDSAYHRLAERKERIERILKQYREKCKRIGTKENKFNKKRASIKTGALAQALMRDIMDWLPLDSEARTKLTGQSYMALQAAFAVLGQEFTDEEGNSQVMNMQALRSILINAKVLDEKTEKIDQKCFHPFLHLVFRDCKEEFLGKFYEMYLEKELEKIDLVVKFLDGADGDYDLLRNRYRYVPFLHHERERWSLRDAGAMKRLAAHYLELPLRLPDGLFAQAIYSFLQEVPQNEVPQKLWDRFRKKLKEANEGEPQLRLSGNVSYLINLYFNNVENDHSQHFYITDPIDTPPSAYRHIYRVFKRYFGEKIPHTNRTTTPAYTIDEIREILKDKETLKARIDAYIKKDVDKFRGGKWEKFRTRQRKYEEELWAELKQQVRKHQRRWDVDEFDKEVRQKLNERKAKFDEMIEQFRMPLFRKQERMFKKVADNERSIRRFKTQDILMLIMAREILKAKSQDKDFTKDFCLKYVMTDSLLDKPIDFTWTVTIKDKDKGSRTKSIV

SEQ ID NO: 2127 - protein, 1199 aa, Artificial; identical to SEQ ID NO: 1328
  Synthetic

SEQ ID NO: 2128 - protein, 1003 aa, Artificial; identical to SEQ ID NO: 1450
  Synthetic

SEQ ID NO: 2129 - protein, 985 aa, Artificial; identical to SEQ ID NO: 1567
  Synthetic

SEQ ID NO: 2130 - protein, 1199 aa, Artificial; identical to SEQ ID NO: 1328
  Synthetic

SEQ ID NO: 2131 - protein, 1129 aa, Artificial
  Synthetic
METNQQTHENRRRTLTNDPQYFGGYLNMARLNIYNINNHIATDFKQATLPEEGQIPAAFLCNKTIKNLNWNHVHTRAVRFLPILKVFDSESLPKDERENSDTEGKDFTSMSDTLKVVFSELQDFRNDYSHYYSTEKGDSRKLIVSPELANFLTVNFQRAIAYTKARMKDVLTDTDYALVENLQMVAPDNKITTEGLVFLIAMFLEREQAFQFTGKIQGLKGTQFNSFIATREVLMSFCVKLPHDKFVSENLEQALTLDIINELNRCPKTLYSVITDKEKQQFRPELDAQGIDNLIANSTNDDERETILDEIDYQDYIEGLTKRVRYSDRFSYFAMRYIDEKNVFDKLRFHIDLGKYEVDNYTKQFAGEQAERKVLENAKAFGKLSSFTDPELIQQRIDKQQHTAGFDQFAPHYNADNNKIGLSTKENIATLIAKSKASSKVEHNLKQPLPQAFLSLHELPKIILLEYLQKGQAEELINDFILLNDTRLMDITFIEEVKSQLPANWDEFSKRSDAKKKKAYSDSTLKYLRQRKTTLNTILSKSNLNDKQIPTRILNYWLNIKEVDDKRSVSDRIKLMKRDCMTRLKAVEKHKLNKSVKIPKVGEMATFLAKDIVDMIVSEEKKQKITSFYYDKMQECLALFANAEKKALFIHIVTNELKLFENGGHPFLQNINLQQIRKTSQFYQAYLVEKGNKMVPRLNPKTNKTSKVDESWMMKQFYVKEWKEEIAKQLTVVKLPANKSRIPFTIRQWDEKEKYDLNVWLQHVTVGKNKDGKKAVNLPTNLFDEALCNLLREQLDTKIVNYNPAANYNELLKIWWKTRNDDTQQFYQSEREYDIYNEKVRFKIDSSTHFADYYKNALSRAYTRLKAERETARQTNKRLPPLEYKQVERVFKNTIAETEKEIRMLQEEDRMAVLMLEQLMDNSPNLRLSKIETLLNDTTPISEKISAKLSFDASGERITDKSNPTATKTLVAERKQKNYTELQKYRYDRRLPELFEYVQADEIPLEWLLDELSAYNSAKQQVFDTVFALEKKIIQTEPDELKSLFTGANGELQTGNIQHKPYVQWLTNKGLINKEEKQFINMVRKCFSHNQFPQRTTMELLIPAWNEKKLALQIATVYNQLIADLTDKI

SEQ ID NO: 2132 - protein, 1242 aa, Artificial; identical to SEQ ID NO: 2085
  Synthetic

SEQ ID NO: 2133 - protein, 1171 aa, Artificial; identical to SEQ ID NO: 1349
  Synthetic

SEQ ID NO: 2134 - protein, 1043 aa, Artificial
  Synthetic
MENKEQNKRTWDNDPQYFGSYLNMARLNIFNISNHLAKKFGLTVLEDEGKITISFLGDKENKKYKTKQGLIYSNLTRYMPIAKVFDFEKLPENERNKVKNNFGKDFNRLSDTLKIVFKELNEFRNDYSHYYSTEKQDKRKLEISSELNDFLILNFSRALSYTKERFKDVFSDEDFKIASQTIVVNNDKTITQDGIVFLTSMFLDRENAFRFINKIIGLKGTQTNEFKAKREVLLFFCVKLPHDKFVSENTELAFSLDLINELNKCPKTLYNVITEEGKQLFRPTLETEQIKNVLQNSVPDTIDDYENYIEGITKKVRNENRFSYFALKYIDQKELFKNWRFQIDLGKIVLDEYYKQLNGKDEVRTVTENAKAFGRLQDLNDEENTLKKINTGENKTCFDQFAPHYNFDDKNNKIGISKKEITSRFISQKTDKKVKFNLLQPLPEAFLSIHELSKIILLEYLEQGKTEQLINDFIEINNAKIINREFIETIKSKLSEFNVFHKRSQGRKEKRAYSEGALKYLLERKEKLNQILAEHNLNVKQIPARILDYWLNIEDVQEKTAISGRIKLMKRDCMDRLKAIKKKNPPKIGEMATFLAKDVVDMIISEEKKKKITSFYYDKIQECLALFADKEKKELFIQICNELKLNNESDGHPFLKNINLNEFRYTSDLYKKYAEEKRLYLENNFYKKERNEKAKKDLTVVVLPHDKSKIPFSIRQLEKEKTSFDKWLEYVTKGKETTDKKKPVDLPVNLFDDTLKRLLKTELSKNNIEFDNDANNNELFKTWWSQCREDDVQKFYTAEREYTFEKGKLTFKINSKSKFEEYIDQEFIENVFKSKSRKRENENNTGRKLPPLRIKEVTKNIVKKIGNTEKEIRMLQEEDRLMLLMFEQLTKKELNVKLKNADDLLNEQIEIRENISGKLVFDEFGHLIEEKKSQKTIAKNIVETRKRKEYSVLKKYVFDKRLPELFEYFEEEDIPMEKIKLELDSYTKAKDIIFDLAFKLEETIIKKDESGIKELNKDPEGNIQSGNIQHKPYLHWLLKNDLI

SEQ ID NO: 2135 - protein, 1119 aa, Artificial
  Synthetic
MTEQNERPYNGTYYTLEDKHFWAAFFNLARHNAYITLAHIDRQLAYSKADITNDEDILFFKGQWKNLDNDLERKARLRSLILKHFSFLEGAAYGKKLFESQSSGNKSSKKKELTKKEKEELQANALSLDNLKSILFDFLQKLKDFRNYYSHYRHPESSELPLFDGNMLQRLYNVFDVSVQRVKRDHEHNDKVDPHRHFNHLVRKGKKDKYGNNDNPFFKHHFVDREGTVTEAGLLFFVSLFLEKRDAIWMQKKIRGFKGGTETYQQMTNEVFCRSRISLPKLKLESLRTDDWMLLDMLNELVRCPKSLYDRLREEDRARFRVPVDILSDEDDTDGTEEDPFKNTLVRHQDRFPYFALRYFDLKKVFTSLRFHIDLGTYHFAIYKKNIGEQPEDRHLTRNLYGFGRIQDFAEEHRPEEWKRLVRDLDYFETGDKPYISQTTPHYHIEKGKIGLRFVPEGQHLWPSPEVGATRTGRSKYAQDKRLTAEAFLSVHELMPMMFYYFLLREKYSDEASAEMVQGRIKRVIEDVYAVYDAFARDEINTRDELDACLADKGIRRGHLPRQMIAILSQEHKDMEEKVRKKLQEMIADTDHRLDMLDRQTDRKIRIGRKNAGLPKSGVIADWLVRDMMRFQPVAKDTSGKPLNNSKANSTEYRMLQRALALFGGEKERLTPYFRQMNLTGGNNPHPFLHETRWESHTNILSFYRSYLKARKAFLQSIGRSDRVENHRFLLLKEPKTDRQTLVAGWKGEFHLPRGIFTEAVRDCLIEMGLDEVGSYKEVGFMAKAVPLYFERACKDRVQPFYNYPFNVGNSLKPKKGRFLSKEKRAEEWESGKERFRLAKLKKEILEAKEHPYLDFKSWQKFERELRLVKNQDIITWMMCRDLMEENKVEGLDTGTLYLKDIRTEVQEQGSLNVLNRVKPMRLPVVVYRADSRGHVHKEQAPLATVYIEERDTKLLKQGNFKSFVKDRRLNGLFSFVNTGALAMEQYPISKLRVEYELAKYQTARVCAFEQTLELEESLLTRYPHLPDKNFRKMLESWSDPLLDKWPDLHRKVRLLIAVRNAFSHNQYPMYDEAVFSSIRKYDPSSPDAIEERMGLNIAHRLSEEVKQAKEMAERIIQA

SEQ ID NO: 2136 - protein, 1312 aa, Artificial
  Synthetic
MGKGNKGNEVKIQQPKKKRRIQKTNFTISLTGKHVFGAYFNMARTNFIKTINYILPIAGVRGNYSENQINNMLHALFLIHAGRNSELSKEQKQWEKKLRLNLEQQTKLQKLLFKHFPVLGPMMADVADHKAFLNKKKSKVQTEDEAFVQLKGVSLSDCLEMIHLMAITLTECRNFYTHKSPYNTPSQLASQYQHQEQIAKKLDKVVVASRRILKDREGLSINEVEFLTGIDHLHQEIEKDQFGNIVKKNGKVLKTFVEYDDFYFKIFGKRLVKGLTVAVKDNDPVNVDTMLPALSDFGLLYFCVLFLSKPYAKLFIDETRLFEFSPFNDNENMILSEMLSIYRIRTPRLHKIDSRDNKAALAMDIFGELRCCPIELYDLLDKNTGQSFFHDEVKRPNSHTPEVSKRLRYDDRFPTLALRYIDETELFKRIRFQIQLGAFRYRFFDKEDCIDGRVRVRSIQKEINGYGRLQEVADKRLEKWGDMLQKREERSVKLEHEELYLDLDQFQEDTANSTPYVTDRRPSYNIHANRIGLYWEDSQNPKQFKVFDENGMYIPKLIVTEDEKAPINMPAPRCALSVYDLPAMLFYEYLREQQKGNVQAAEQIIIDYENDYRKFFKAVAEGTLKPFQKTKELREYLEENYPKLRMSDIPEKIQLYLTSKGLTHNNKPETVRERMIRLINQHLEEREKNVQRRLEHYQEDRKMVGEKENKYGKKGFADVRHGALARYLTQSMMEWQPSKDGKGYDKLTGLNYNVLTAYLATFGTPQTVEEGFTPKSLEQVLTKAHIIGGSNPHPFMNKVLSLGSRNIEELYLHYLEEELKHIRSRKQSLSSNSSDKALSSLPFVHHDRMRFHERTDEEMRALAARYTTIQLPDGLFTPFIVEILQQHYSDNNELQTALKQDIPAKLNPTHNAAYLITQFYQTVLKDDAQPFYLSSKTYTRTKEGEDPKTFSFKKTYELFSVLNNDKKDSFPYELIPLFLTSDEIQERLSAKLLDENGNPIPEAGKKGKPATDSQGNVIWQRIIKQEIKNHVESLSDKDLKISMNQSWKQKNEERAAKREAMQSRLIRQINEVKDNERLLRRYKTQDMVLFLMAKKMFANIISEQGNEVNWKQMRLSKVCNEAFLRQTLTFRVPVAVGEKTVYVEQENMSLKNYGEFYRFLTDDRLTSLLENIVETLKPNKDGDLVIRHTDLMSELAAYDQIRSTIFELIQKIEDIIIEKKKDLKDPNSDMFWAHEGLPKLNNFASLLELIDRLNDMALTDDERRLLVAIRNAFSHNSYNIDFSLIKTIKHLPEVAKGILQHLQSVLGVEQIQ

SEQ ID NO: 2137 - protein, 1009 aa, Artificial
  Synthetic
  misc_feature (375)..(375): Xaa can be any naturally occurring amino acid
MDTPNFSERIPVSLQSHPYYFAHYLNMARHNAYVILEYVNRELIKPGKNLDEDNLIQSTVLKDGYFDRKPDELSHRNRLLVQHFPFLREAENEGARTCNPVSYKLKTALAALNQWRNNASHYPLNQNHEKDFDLQPFFSFAIEACKKRMREVFQPDDFYLLETNEKQFYTLHNENGFTEKGLYCFICFFLEKKYAFQFLAGIKGFKNTTDNKFRATLETFTEHCCRLPKPKLDSSDIKLDMLGELSRCPAPLFDLLDIEERKKFIREPEEVKPDESGDREEVQQVLMKRYDDRFPYFALRYFEEKNLLKGISFHIHIGRWIKSEHTKKIMGAERDRRLLKDIRTFGELKEFSPEHAPDYWLRDGITPDDVDQFSXPQYRIVGNRIGIKLNYNGHNRWSVPDKEINVKPDAIISTYEFLNLFLYEHLYQKKLTGLSPAEFIQDYLDRFNNFLSEFKAGHIRPVGDFSLEKRRGQGDEPDLTARRKSLQKELDRFVLKGKDLPDKIREYLLGYKQKSEKKQAKWILGGMIKETVYWRNKAEQSPEKMRSGDMAQQLARDIIFLTPPHTVKEHKQKLNSLEYDVLQYALAYFSSNREKLYSFFKEHQLTVKGDRAHPFLYKIRLDECQGILDFFIVYMQQKEKWLGWLDRNLKSPRLNEEEFFNTYSYFIKTDTKRAIEMDYESCPNYLPRGIFNEPIAKAVQKAGVKIKDEDNASYALSVYSNGKTQPFYNKERYYNKGIFRMEELPEKLQPKELLGKIQWTIKSSGKDTEEFRSLQNLKNRILNTEKEIRYVQSTDRALWIMVADLFPETFELRPDDLECIGHDLSDDLLSRPYQMKEKVYNYTITDYLPIKRYGEFRRFLKDRRLENLLTYFEEGVPLHREALVAELEAYDLQRKNLLEIIYRFEKLVFDRHRHELTFSGEGENQYVNHWDYLDFVARKYGLSAEVKELNSERFTELRNKMLHNQIPYQLWIKEAIAAREENTVCGRIMGMIGEIYERMTTEIEKQMQV

SEQ ID NO: 2138 - protein, 1146 aa, Artificial
  Synthetic
MESIIGLGLSFNPYKTADKHYFGSFLNLADNNLKAVFAEFKERISDKSKDEDISNLIEKHFIDNMSIVDYEKNISILNGYLPIIDFLDDELENNLNTRVKNFKKSFIILAEALETLRNYYTHFYHDPITFGDNKEPLLELLDEVLLKTILDVKKKYLKTDKTKEILKDSLREEMDLLVIRKTDELREKKKTNPKFKFSTDPTQIRNSIFNDAFQGLLYEDKENNGKTQVSHRAKTKLNPKDIHKQEERDFEIPLSTSGIVFLMSLFLSKKEIEDFKSNIKGFKGKVVKDENHNSLKYMATHRVYSILAFKGLKYRIKTDTFSKVTLMMQMIDELSKVPDCVYQNLSETKQKDFIEDWNEYLKDNEENTENLENSRVVHPLIRKRYEDKFNYFAIRFLDEFANFKTLKFQVFMGYYIHDQRTKTIGTTNITTERTVKEKINVFGKLSKMDNLKKHFFSQLSDEENTDWEFFPNPSYNFLTQADNSPANNIPIYLELKNQQIIKEKDDIKAEVNNSQNRNPNKPSKRDLLNKISNTNEDFYQGDPTAILSLNEIPALLHLFLVQPDNKTGQQIENIIRIKIEKQFNSIKNPSKDDKGVPKSLFADTNVRVNAIKLKKDLGEELDMLNKKQIVFKENQKASSNYDELLKKHQFTPKNKRPALRKYVFYNSEKGEEATWLANDIKRFMPKGFKTKWKGYQHSELQRKLAFYDRHTKQDIKELLSGCEFDHFLLDINACFKEDDFEDFFSKYLKNRIETLNIILKQLHDFKNEPTPLKGVFKNCLKFLKQKNYVTENPEIIKKRILAKPAFLPRGIFDERPTMKKGKNPLIDRDEFAKWFVEYLENKDYQKFYNSEEYRIRDADFKKNAVIKKQKLKDFYTLQMVNYLLKEVFGKDEMNLQLSELFQTRQERLKLQGIAKKQMNKETGDSSENTRNQTYIWNKDVPVSFFNGKVTIDKVKLKNIGKYKRYERDERVKTFIGYEVDEKWMMYLPHNWKDRYSVKPINVIDLQIQEYEEIRSHELLKEIQNLEQYIYDHTTDKNTLLQDGNPNFKMYVLNGLLTGIKQVNIADFIVLKQNTNFDKIDFTGIASCSELEKKTIILIAIRNKFAHNQLPNKTIYDLANEFLKKEKRETYANYYLKVLKKMISDLA

SEQ ID NO: 2139 - protein, 1142 aa, Artificial
  Synthetic
MDQLINQTMVASFKKIFDHKGYIAPIVNKAWDNFNVINKNSVNKVEDVYHFAVGHVFKNLNKKLIFEYRLNEVSRQMESSKFTSLDKNNFNFCDTLWSVVNNIRNLNSHYVHTFDEVGLNKIKKTETVTFLKEAFELSSIFAFINEQNQTLEEYINDENRDKKLVRFWKEKFFPNEEHQKAERAILDGYTKGQALDYLLFISVPNDFEWTIADTHPVFTIKAGSYLSFHAQLFLISIFLYKHEAEQLISKIKGFKKNDDIYNRKRNIFTFFSKKFSSRDADTEQKHLILFRDIVQYLNHYPTEWNEALRRETPVPAMTAQLERHIIKTEIYRAFPDYEGNPTFLYFAGKHFFGKKFLTYFPEAADEFTAKEKSDFLYEINASLALKDINSKTARLNHKARLTRTEEKEKDKLKKDKIKEEKKPNPVKEKLQKRIDDNMLFVSYGRNVDRFMEFAIRFLAEENYFGKDALFNMYKFYTSDEQDRYLREIKPVVSKKEYDNQSYHQGKLTEFLTYEKYLSKYPQWDDPFVIRDNAFQVKVCFDVNNFKIFSVQRSLLIYLLEDALFNYDNDKKKREDAGKRLLRDYFCEFKKDFDSGLQTLTVNETVTATEKTGLMKLFPKRLLHRYSPAVPNYVPEYGSVMDRILAETVDKEERYAALLAKARSEGREEDFLKYNKGKQFKLRFLKKAWHILYFKNIYLQRAGVAGHHKDFHITKEEFNDFCKWIFAFDEVPQYKTYLAGYFTAKHFFDNDAFKKLFTESDSLQSLYDNTKQAFEEFAKSAQQQIAPDKYRLENYEQFFKKAVVYINLSHFIEWLQAKSRLQKNAQGQLQYRSAENKQYLHEDFYYKDTLPVDEYKKHGKLFNKLKKAKLEDCLLYETALHYLGLKRNVISQARTHISEMLTQDIEFDIKKKDGEHLYKLMVPFNKIDSLARLVRKTEEQLQEFKSSFMENIVLYLAEVEDQKDIKTFYEKFRNSNILTFENLHILNNNVIKGAIKFTRVCMLLEMYFIVKHRIRVTHSNRIDIKGIKDTAGRAEVPKYACECYRKKAFHFGVPDKDFVKVLENTERMFLDNEIKPQQLQSWDDLQPLQKTICSQFMDMLHGSLYKREKSPHGSGSSEEGSERAKREMQAFREAYFRKMIVGK

SEQ ID NO: 2140 - protein, 1146 aa, Artificial; identical to SEQ ID NO: 1461
  Synthetic

SEQ ID NO: 2141 - protein, 1168 aa, Artificial; identical to SEQ ID NO: 1357
  Synthetic

SEQ ID NO: 2142 - protein, 1127 aa, Artificial
  Synthetic
LQKQDKLFVDRKKNAIFAFPKYITIMENKEKTEPIYYELTDKHFWAAFLNLARHNVYTTVNHINKLLEIAELKNDEDVLNIKDSWNKQAEKLDKKVRLRNLLMRHFPFLEAAAYEKTTSKDSNSKEQKEKEQAEALSLDNLKNVLFIFLEKLQSLRNYYSHYKYSEEAQKPTFENDLLKNMYKIFDTNVRLVKRDYMHHENVDMQRDFSHLNRKKQEGQTRKIIANPNFRYHFADKEGNMTIAGLLFFVSLFLDKKDAIWMQKKLKGFKDGRNLREQMTNEVFCRSRISLPKLKLENVQTKDWMQLDMLNELVRCPKSLYERLREKDRESFKVPFDIFSDDYDAEEEPFKNTLVRHQDRFPYFVLRYFDLNEIFEQLRFQIDLGTYHFSIYNKRIGDEDEVRHLTHHLYGFARIQDFAPQNQPEEWRKLVKDLDHFETSQEPYISKTAPHYHLENEKIGIKFCSAHNNLFPSLQTDKTCNGRSKFNLGTQFTAEAFLSVHELLPMMFYYLLLTKDYSRKESADKVEGIIRKEISNIYAIYDAFANGEINSIADLTCRLQKTNILQGHLPKQMISILEGRQKDMEKEAERKIGEMIDDTQRRLDLLCKQTNQKIRIGKRNAGLLKSGKIADWLVSDMMRFQPVQKDTNNAPINNSKANSTEYRMLQHALALFDSESSRLKAYFRQMNLVGNANPHPFLAETQWEHQTNILSFYRNYLEARKKYLKGLKPQNWKQYQHFLILKVQKTNRNTLVTGWKNSFNLPRGIFTQPIREWFEKHNNSKRIYDQILSFDRVGFVAKAIPLYFAEEYKDNVQPFYDYPFNIGNKLKPQKGQFLDKKERVELWQKNKELFKNYPSEKKKTDLAHLDFLSWKKFERELRLIKNQDIVTWLMFKELFKTTTVEGLKIGEIHLRDIDTNTANEESNNILNRIMPMKLPVKTYETDNKGNILKERPLATFYIEETETKVLKQGNFKVLAKDRRLNGLLSFAETTDIDLEKNPITKLSVDHELIKYQTTRISIFEMTLGLEKKLIDKYSTLPTDSFRNMLERWLQCKANRPELKNYVNSLIAVRNAFSHNQYPMYDATLFAEVKKFTLFPSVDTKKIELNIAPQLLEIVGKAIKEIEKSENKN

SEQ ID NO: 2143 - protein, 1114 aa, Artificial
  Synthetic
MKPFSENNSVSNSGETEKREAYSVTNPDHKFFFCHFANKARHNAYIIINEVAEALGLEKRDENNLYNSEILRIDSIKNPEKFGHVIGLLKKHFRFMPYLVDKEHPGMALTYLKNMLIDLNCYRNFFSHYHYESKTPDFKMFRIGRPNVTDISLAYLLRMAVKDAKKRLVAFTDDDFKDIYTATYKKDGSIDKRNFYNLEENLNKRVAFFLSLFLEKNDGNELISKIEGMRGTGKKSYIANRESFLQFWCTPPKPQIESGDLGLEILNELNRIPAQLYQAINSDGKKKFEPDQNIQTEGITTVMRRYQNRFPYFAIRFFEETNYLPQLRFHDFLGQLCLQQYPKFLNGKEDQRRITKDINALGKLAAYQTGDNINPLWRTQEAVSERLYSNDEEIKKNALNNDLLTFAPQYRMTHYTIGIILQNIDKTEWPTWQKKTDEKGRPKLILKSSDYAKPPQGKLAHPVAVISAMELQNLFLYAWLYKQKKIQKSPEDFIRDYLEVIKQCIDETKNDTCEPVTTESYLKRSHEKCSVELQKNKLGKVRLLREKLLRDYNIKPSDLPDLVRECLLNYSYPHLEEKLMQKIENHIGMAQKWLDESKKLKKLEKGRKKGLTAGKIGTRLAHEFISYKTSTDKPNDQQYNILQEYIAYFGRNIKPLDNFLSELKISGTGNHLFIRNSLQEYETSFKEKINAKKRIKKDDITYGVKSFYEDYLGDKIKYLAATLQQLKENKLPSHEKVLLLNIYHIKEKIKEEWDYDGLHVRLPRGIFNTAIAEAVKDEIQPQKGRTANPSYVIGNKFVQSQKFYEFEREYMVREVQDNKQKKSGKKPPQEEYIGKVEGALNNIKNRTPKSEKHKILIKRLFEKVEKNEKEVRYFQNTDRILWEMVKEFYKSSIHNRITNKNEMEIKMESANLEKVGFNVNQTNNFLEEPVEMKQSAFGKTVKTYASIKDYGIFRRLLRDKRLDSLLNWFENPEDPNSASAIIDKSDLDYELTKYDSLRDDVIKTIFEFEKACGEHSRFSNIINQKIKTPQQIHFALLEEYSKIKNSDNFPIHTLFYFRSKFIHNEFPDSLEDEMKNYEPIMLIKQKGKPFITEIAAHVISLYQNLTQEINANLI

SEQ ID NO: 2144 - protein, 1145 aa, Artificial; identical to SEQ ID NO: 1973
  Synthetic

SEQ ID NO: 2145 - protein, 1003 aa, Artificial; identical to SEQ ID NO: 1494
  Synthetic

SEQ ID NO: 2146 - protein, 1133 aa, Artificial
  Synthetic
MSVRQEEIQTWIARKCVKETEMKKYWAAYMNMARNNLFVTLMSISRSVGDPEPIKGDNIESNIQNLGVLRRELTPEMEEKTKSLFFKHFPFLRALSVKEEQKEESGGAQIPTLQDLRNCITDFACTLGHYRNVNSHSIFIDKREDGVIERAQGSERRCGGYLQSILTVSTRTIKERYRAGKNSVQKGMIDEESFKFITDSKVRISYRGRDRITTPNERYYLNTFDKDGVHLSFFGKLMMTCLLLEKKYATELLTQCHFLDAFSGDAESPKLPERRLILEVMTALRIRLPERKLSIEKDEVQIALDILNELKKCPYELYDLLGDEDKSLFRIVSDTGDSVLLRRSDDRFPQLALSLLDSGRSFDRLRFQVNAGKLRYLFREEKRCVDGQTRMRVIEEPLNGFRRRGELEEERVRKQSEGSGLWLGLKILSQEDAPRNDASLLPYITDSRTRYILDGDNIGMSVGDFTPSIVKMDDVRYKVEGKVPDCYLSKYELPGLLFYHHLTRGHSNMNWKSAEQIIIDTIGHYRKLFSDVKNGVLVPSAGEGEKQLSARLMSSYGVALPDVPEKIADYLLERECGGVEKFKLWKQRILDSLIQDTEKRLEKLDDVSKRVRSSDNKPGKKNYVYYKPGAYASFVAEDIVFFQECGASEKLTGLNFKVLQSRMATFVRGEATSMDILRQTFRNAGLISGTCGKGNHPFLYRVVSQSSQDIVDFYNLYLKEKKTYLISGIPDDATFLHRERAKWEDRDAQYYMNLAARYLERPIQLPRQMFERAIRAILLSSFIQGESGDMKSHIKEAFSNGRCNTAFMIMEYFNEYLNDGSQSFYGLFEGDLNHCQGYGFYSLIRNNLRTAKTLVKSRRGIDGASSNYARFLEEAVRSIKEVSVGSNDLGHKLPIEELSGKLKSAYKDMMNTEKRLRRYAVQDQVLFLEARRVIWTYWGIKDKENECLLGDIMPNGGSLLDLVMPYIETSYRVRSGNFGRMKEFEAKVRQENVSVKDYGKVFKLFNDRRVNDLLSLHGKESAKMDDICEELDRYDRHRVGVFGDILKYEDKITKGIPENDLVKDNGVVDFKVVQGYDYQNSEEDKIDLRVIRNAFAHNQYPQKKGSPVKYGVDMPEIADRISEIVKDIEEKTE

SEQ ID NO: 2147 - protein, 1123 aa, Artificial; identical to SEQ ID NO: 1650
  Synthetic

SEQ ID NO: 2148 - protein, 1140 aa, Artificial; identical to SEQ ID NO: 1482
  Synthetic

SEQ ID NO: 2149 - protein, 1003 aa, Artificial
  Synthetic
MGAIENKHIFAAYANLAIDGLIKTLNFIAKKLDTQKQLSSWDIKHVITLIDSIFDQNPQNNLEQVVEGYLPWIKPIIEMKTPKKGERQSDKLCIEYKTIITAFASLLNDVRNYYTHYYHDPICIYPGGYDIPSSLNCIYDSAINIIKERFQAEEKEMEHLRRYTRKKGRVVLKTEDDHFYYTLANNNDLSEKGYAFFISMFLERKYSYLFLKKLSGFKRGDSLQYRLTLEVFTALSTKPPVERLRTTKDTKQDRALDILNELSRIPIELYQTLEPKYREMYNETLQPTDAEDPYGLPDRSRIRFRSRFEAFALHFLDKQADFKEIGFYTYLGNYFHNGYQKTRVDRETKDRYINFQLAGFCKNIQDISAKKLSEALNVKSIDISTDSIPDINSFEPYLVQSTPHYIVNGNNIGIKVLPEGKDTYPTIDEKGAKMPIADFWLSKYELPAMLFYTYLRNNNIHKSHCPLSVKDIIERSIHKSTKQKHPEERSELMLRRVMKAIFWTDSKLNEVERIKSQKSAFGKRQHEILKAGRIAETLVRDMLWLQPSKNNGRDKVTEPNFQAIQVSLAYFGIRRNDLTEIFTRAGLINSSNPHPFLAQIGTNYTSLIEFYIAYLKERKVYFSRIQKKILQGKLNIQCHPLRDLQREPNKPQEKEEAIFLPRGLFNEAIINCLKKSKLKQLIESPTREKSPALNVSYLILNYFRTYFEDQSQEFYAQPRNYRLFDKLSPNKGKSKSYLSLEQRIKKMEELRPSKIPVAEANKLLEKEDRLYRKNYNEICDNESIIRLYQIQDILLFMMTKEYLPSDLYNRINKYKLENVKGILNERVSYLIDLNPLKIQGEDIKIKDYGKLFYIHHDTRINSLNKVLSKVKRNNSISSSVKIQPYENYKRECLDFEEVQIQIIPIIHSFEIAMVSMFPDLKKATPGNYYDFNELITEYEKRTKQKIDSSFLIKTRNMFLHDKYEAECIKEISDDFVYAKKIIAEFKMKIENIKLEDFSNDSSA

SEQ ID NO: 2150 - protein, 1146 aa, Artificial; identical to SEQ ID NO: 1461
  Synthetic

SEQ ID NO: 2151 - protein, 1146 aa, Artificial; identical to SEQ ID NO: 1461
  Synthetic

SEQ ID NO: 2152 - protein, 1085 aa, Artificial
  Synthetic
MNAQTVLDHIQKVTELPIIPAINKEGKEFTPPEEDLWQHPVMRYINHVAYKQDDQPEKTQAVIEKLLHHFSFLKIMAENQRDYWNKKNNTHRLEVNSTDLNGILNTVFRVIKKYRDTTTHYMTNDTCWNDGSDFLAKEQRLAFMIDNYYEVALRDLKERYSYTTDDLRFIQYYRYKRVRMPDGKPTMCKNTNFYLSMVDYNGDAGKKLHLSGVGVAQLVCLFLDKQYINQLASNLELTSKHLPSSKEAQIIRRSLGIHNIVLPKDRIHSDKGEMSIAMDMLGEIKRCPNELFDTLSADRQSSFRLISSDHNEVLLKRSSDRFAQLTLQYIDYGEKFDRIRFHVNMGKLRYLFNAEKTCVDGQVRVRVIEHPLNGFGRMAEMEAMRKQEDGTFGKTGIQIRDFDNVKRDDANPANYPYIVDTYTHYMLDDNHVEMLIGKPMDMPEIEEYDGKWYVNKTVPSCRMSTLELPAMMFHMHLLGSKRTEARIIDFYERYCKLFDALKQGAVSKENIGEFGIKEQDMPQKVLDVINGNAQGKNANEYILKTLQELYDHACKRIDNLRQDKRAIGSAANKMGKRGYRQIKPGKLAEYLIQDIVRWQPTLSAGDDYGTDRLTGLNYRVMQAAIATYDSRGKDEEARRFKAMFERANLIGGDRQKNHPFLYKVFGYRLPADIVDFYEKYLNEQKYYINSLLKKAKQGEVVNVPFVNRDQSKWKKPTQEYLGAEYMADKAIELPRQMFDEDIKNHLKTLDQMKDVDFDHANVTYLIGEYMKRVRDDAFQEFYAWRRNYRYIDLLKCEVDRTKRIPKLVETWTTTEEREKIWKEREKLAKEYRSWADGQMKNNPQTRRLTEDERGEIIAKRLSNSRNDYQRSEKMIRRYKVQDALLFIAANDTLTQHMDFKGKQFKLKDITPDAERGILSEKMSMDFKFEKNGKTYIIYAQEMKIKNYGDFFVLANDKRLVNLLALVNQDRVSKDEIEQELKRYDVCRPEVVKMILDLEKWAFDNFPELKAKVMNDREDNKVGFNYILDVLLENKRIGEAQKETLRLIRNAFDHNNYPRTGVVNVVTLPEIAEEMRDLFGEYARIE

SEQ ID NO: 2153 - protein, 1277 aa, Artificial; identical to SEQ ID NO: 1933
  Synthetic

SEQ ID NO: 2154 - protein, 1003 aa, Artificial; identical to SEQ ID NO: 1723
  Synthetic

SEQ ID NO: 2155 - protein, 1146 aa, Artificial; identical to SEQ ID NO: 1461
  Synthetic

SEQ ID NO: 2156 - protein, 1127 aa, Artificial
  Synthetic
LQKQDKLFVDRKKNAIFAFPKYITIMENKEKTEPIYYELTDKHFWAAFLNLARHNVYTTVNHINKLLEIAELKNDEDVLNIKDSWNKQAEKLDKKVRLRDLIMKHFPFLEAAAYEITNSKSPNNKEQREKEQSEALSLNNLKNVLFIFLEKLQVLRNYYSHYKYSEESPKPIFETSLLKNMYKVFDANVRLVKRDYMHHENIDMQRDFTHLNRKKQVGRTKNIIDSPNFHYHFADKEGNMTIAGLLFFVSLFLDKKDAIWMQKKLKGFKDGRNLREQMTNEVFCRSRISLPKLKLENVQTKDWMQLDMLNELVRCPKSLYERLREKDRESFKVPFDIFSDDYDAEEEPFKNTLVRHQDRFPYFVLRYFDLNEIFEQLRFQIDLGTYHFSIYNKLIGDEDEVRHLTHHLYGFARIQDFAPQNQPEEWRKLVKDLDHFETSQKPYISKTAPHYHLENEKIGIKFCSTHNNLFPSLKREKTCNGRSKFNLGTQFTAEAFLSVHELLPMMFYYLLLTKDYSRKESADKVEGIIRKEISNIYAIYDAFANGEINSIADLTCRLQKTNILQGHLPKQMISILEGRQKDMEKEAERKIGEMIDDTQRRLDLLCKQTNQKIRIGKRNAGLLKSGKIADWLVNDMMRFQPVQKDQNNIPINNSKANSTEYRMLQRALALFGSENFRLKAYFNQMNLVGNDNPHPFLAETQWEHQTNILSFYRNYLEARKKYLKGLKPQNWKQYQHFLILKVQKTNRNTLVTGWKNSFNLPRGIFTQPIREWFEKHNNSKRIYDQILSFGRVGFVAKAIPLYFAEECKDCVQPFYDYPFNVGNKLKPKKGQFLDKKDRVELWQKNKELFKNYPPEKRKTDLAYLDFLSWKKFERELRLIKNQDIVTWLMFKELFKTTTVEGLKIGEIHLRDIDTNTANEESNNILNRIMPMKLPVKTYETDNKGNILKERPLATFYIEETETKVLKQGNFKVLAKDRRLNGLLSFAETTDIDLEKNPITKLSVDHELIKYQTTRISIFEMTLGLEKKLIDKYSTLPTDSFRNMLERWLQCKANRPELKNYVNSLIAVRNAFSHNQYPMYDATLFAEVKKFTLFPSVDTKKIELNIAPQLLEIVGKAIKEIEKSENKN

SEQ ID NO: 2157 - protein, 1119 aa, Artificial
  Synthetic
MKEEETPVVSTYNKDDKHFWAAFLNLARHNVYITINHINKLLEIREIDNDEKVLDIKTLWQKVNKDLNQKARLRELMTKHFPFLETAIYTRNKEDKKEVKEEKQAKAQSFDSLNHCLFLFLEKLQEARNYYSHYKYSESTKEPVLEKELLKKMYNIFDNNIQLVIKDYQHNKDINPDEDFKHLDRTEKEFNYYFTQDKKGKITESGLLFFVSLFLEKKDAIWMQQKFTGFKDNRENNKQMTHEVFCRSRMLLPKLRLESTQTQDWILLDMLNELIRCPKSLYERLKGEDRKKFEVPFDSTDEDYDAEQDPFKNTLIRHQDRFPYFILRYFDYNEIFKNLRFQIDLGTYHFSIYKKLIGGQKEYRHLTHKLYGFERIQEFTKQHRPDDWKAIVKDFDTYETSEEPYISETTPHYHLENQKIGIRFKNDNDKIWPSLETNGENNEKSKYKLDKQYQAEAFLSVHELLPMMFYYLLLKKEEPNNDKKNASRVEGFIKREIRDIFKLYDAFANDEINNIDDLKKYYKDKNVEIRHLPKQMIAILESKPKDMAKEAKRKQKEMVKDTKKLLATLEKQTQKEKEDEGRNVKLLKSGEIARWLVNDMMRFQPVQKDNEGKPQNNSKANSTEYQMLQRSLALYNKEEKPTRYFRQVNLIESSNPHPFLKWTKWEECNNILTFYHRYLTKRIEFLNKLKPEDWKKNQYFLKVKEPKTNRETLVQGWKNSFNLPRGIFTEPIREWFERHQNDSEEYKKVEKLNKAGLVTKVIPLFFKEEPFKENTKKEINDWVQPFYSFPYNVGNIHKPKEEDFLHREERIELWDKKKDKFKGYKEKIKSKKLTEKEKEEFRSYLEFQSWNKFERELRLVRNQDIVTWLLCKELIDKLKIDELNIEELKKLRLNNIDTDTAKKEKNNILNRVMPMELPVTVYEVSKAGNIIKDKPLHTIYIKESKTKLLKQGNFKALVKDRRLNGLFSFVKTNSEAESKRNPISKLRVEHELREYQKARIEIIKDMLVLEKTLIDNYDSLDTDNFHNMLTGWLELKGEVNKAKFNNDVKLLTAVRNAFSHNQYPMYDENLFVNIERFSLSSSKILESKGLSIAVKLKEEVSKIIKKIQEEEDGKKEKET

SEQ ID NO: 2158 - protein, 1103 aa, Artificial
  Synthetic
MEKPLPPNVYTLKHKFFWGAFLNIARHNAFITICHINEQLGLTTPPNDDKIADVVCGTWNNILNNDHDLLKKSQLTELILKHFPFLAAMCYHPPKKEGKKKGSQKEQQKEKENEAQSQAEALNPSELIKALKTLVKQLRTLRNYYSHYKHKKPDAEKDIFKHLYKAFDASLRMVKEDYKAHFTVNLTQDFAHLNRKGKNKQDNPKFDRYRFEKDGFFTESGLLFFTNLFLDKRDAYWMLKKVSGFKASHKQSEKMTTEVFCRSRILLPKLRLESRYDHNQMLLDMLSELSRCPKLLYEKLSEKDKKHFQVEADGFLDEIEEEQNPFKDALIRHQDRFPYFALRYLDLNESFKSIRFQVDLGTYHYCIYDKKIGDEQEKRHLTRTLLSFGRLQDFTEINRPQEWKALTKDLDYKETSKQPFISKTTPHYHITDNKIGFRLGTSKELYPSLEVKDGANRIAKYPYNSDFVAHAFISVHELLPLMFYQHLTGKSEDLLKETVRHIQRIYKDFEEERINTIEDLEKANQGRLPLGAFPKQMLGLLQNKQPDLSEKAKIKIEKLIAETKLLSHRLNTKLKSSPKLGKRREKLIKTGDWLVKDFMRFQPVAYDVQNQPIESSKANSTEFQLIQRALALYGGEKNRLEGYFKQTNLIGNTNPHPFLNKFNWKACRNLVDFYQQYLEQREKFLEAIKNQPWEPYQYCLLLKIPKENRKNLVKGWEQGGISLPRGLFTEAIRETLSEDLTLSKPIRKEIKKHGRVGFISRAITLYFRERYQDDHQSFYNLPYELEAKASTPKPPLPKKREYVLRAEHYEYWQQNKPQSPTELQRLELHTSDRWKDYLLYKRWQHLEKKLRLYRNQDVMLWLMTLELTKNHFKELKLNYHQLKLENLAVNVQEADAKLNPLNQTLPMVLPVKVYPATAFGEVQYQETPIRTVYIREEQTKALKMGNFKALVKDRRLNGLFSFIKEENDTQKHPISQLRLRRELEIYQSLRVDAFKETLSLEEKLLNKHASLSSLENEFRTLLEEWKKKYAASSMVTDEHIAFIASVRNAFCHNQYPFYKETLHAPILLFTVAQPTTEEKDGLGIAEALLRVLREYCEIVKSQI

SEQ ID NO: 2159 - protein, 1141 aa, Artificial
  Synthetic
MTQTATTNSGTLADDKQTYYYHFLKSDKFFFGSFFNLADNNLKATFNDFEKRLGIKSANGLVQKVEQYFPDNLLLSEFERRTELLTEYLPIVHKLRKINKESAEPDRSYFRDNLKMLIKAVDHLRNFYTHYYHKSIIFDERLFEFLNGALLNVCFDVKKKRMKSDTNKAFLKKHFEENFINKSKDKIKEAFDEAFSHLKVSNDGKKFSLTKFYQAKLSHKQKFSVKNDLIFDITNSDFVFLSNSGLLFLLSFFLRREEQEQLLSKMEGFKNQNELNFIATRWVFTHKCFKGLKKTIKSSYDKETLLMQMVDELSKCPDVLYKNLSDKQKQEFVVDVNEFYQEAKEQNEENKLVSHTIIRKRYEDKFAYFALRFLDEFANFPTLRFQVVVGNYLQNEQEKQIKNTTTVLKTNRQIKERIKMFGKLSTLSSKKAAYFKAILEDRTLTAEEKGLDPKWEIFPNPSYGFKGNNIPIYINKKGFKNMLSVDEAKVRTNKDRAAKKDIIEKIFGKDNYYGKPIAYLSLNELPALLYEFLVNGKNGVDIENIIFNKIKQQVVAIKAADKTNKGIPNKLRKAKEENDYDLNKLKGNIKDQIDECNEKIHFIRTCRAAFDPNKTKHFFTLKQLGDEATWLADDIKRFMLPEARKNWKAYEHSEFQRLLAFYKRFRKDARQLLKNKWTMNDTFGEMVKRCFSQVEFDQFYEMYLIDKIEQLEVYKNQLDGEAIQSHPKLLKKVLKEIFRYFNERLYLIKPAGKQIEELLKHPINLPRGIFDNRPTYIENANHTDHKDQYAAWFLHITKNENELQQFYSFAWNINNDKTLDYEKLTKEKMKRLEKKRKRQGKTNQNFSQNNSINFNNLKEKIKIRLQKDAKAAINKQIRSDVFIKAMADYVFEKTFDKPYQIPLNEIYQNKAQKEQMRNEAAAQQSRAEGDKSSNIYNETFIWNKVISYSIFGGKIKEEKLKLKDIGKFRALEQNPKVKAIVTYPHNDDWSKTEIEKELTNYERIRSETLLKSVQEIEKKVLQKLQTGTVHPKILEHKGNPQFRKYVVEGFLKDMIAEPELTFFNNNKTIDNFSISEVEEQALLIQQAFYLILIRNKFAHNQLPNVAFFEAMINISGIEKRNDNFAAQLNQIFDTFKAEIIK

SEQ ID NO: 2160 - protein, 1213 aa, Artificial
  Synthetic
MEKNSLQDTTRTKDDVLYFGSYLNMGRHNVYLIINHVTEVFKHLGFRKLNDDEDIWSEKEQVNEGNILLNIFDPKKEKYQDERFRVFNYLIKRHHLPFLRIFTNQVLNDSGEIQNPEKKDMLIDFEGAHVFINKIFRELNEFRNSYTHYLSLSNEGTPLPKKLQINVELIKDLKTLFYYAPEFSFIRHNVLKQESKEEYETKVKAYYNDIRRKYRLFEGDESAGKLTDQGLFFFVNLFLERSNAIKFLKRFRGFKNETLPPFKATIQSFTTYALKIPDVRLDNDFPKQALLMEILTELNRCPKELYQVLGKEDKAKFDPKLEQSAINNILENVNYDELSDEHLEQAIKELVVLKRHDDRFPYFALRYLDEMNLLSQIRFQVYLGKVELKSYFKDDLGIERRILKPIYAFGKLSDFDNKEEDILRELKKNLPPDCQDIHWDQYKPHYNISQNNIPFYIFNDTDPKVLLPRLPIKGRQEDRYSKKPAGFLSIHSLPKFVITFLVPPLDRNGEKKIIEFVKSTNGFILNYENIENLQNKIQYAPETFTRRMVKNRTLLNKEKKVCYVTKSEIEDLTKKCEISFEDLMKLSREELSKKYKNLSPREIEVFSQYKYEHMLASRKEILMTEVYNNLPDLNLEFKYLPGKIRDKLLKIKTDEKKLIKNRIKSEISHTRYLVKKADNASKTNTTLKLGEMATELARDITRMVIDENIKKKITNPYANRLQNLIAYFSLNKNEIVQLLMNELKLFDTAKGHVFLTRELIEKSTGVLDFYINYFNKKIEYFDATFKVFLASPSEYEFKKALPLKYVNLIKKTFEFDTVKWFAHKNNMPVNIPFNLFDNLINNKLKYKIRENTVKMTFSKLLEIYVKYDCQPFYKFNREYNSVEKDQTESINILLLSSKDIQKNFSKRAVDNEKQIRFTQAKDRILKLMIEQLIVDSGSVISDIDFNLEDIYPGSEQSALNSPAEFRHKLKRQGNNGEEFLTVVAKDSESQIRQIKEWGELPKAERKIWNNLKSKEEKEEFLKSKNDKEKLTFNAQQWYQWTNADFGRFRRFLKDKRIPKLSKYFESKTIPFDLLEYQLFQYTIYREKMFDKVFELEKRMSELFLNDLVKIKLQKNDTFPEVSFQDYIKVLENKHYSFDKFILSMGRKSVSHTQVVFYDKIPRITQQNMDEFEARKTEKGYKENLTFNIPKQIFEIFSKEVDNVLHHFNINLTS

SEQ ID NO: 2161 - protein, 1230 aa, Artificial
  Synthetic
MENNPSNRFSKPAVPPKTRRSEGCEKPDSHSAELKPVFAAYLNMAQMNLFNTLKAIEGKLGIVTQKQKAKEDCMEEMNIVGFDKIKEVEVRIKAFKELLKRIPVLQSLSGYQVKGDVKTVSFENVAALLLAIVKIVHYYRNEYSHTHHYYTDAEKAEEADFEKRIMQPLDLAFMSAKRNMAKVHGYGKKELDFIDGNERQEVTGKGRDKKVKYYTDYYFRLGNDDFTRLSDVGIAFIVCKLLNKKYAIQFLQQSKIMTPRSQGGLSPFSQEENEVMANIFCAERIRLPKGRMEVESLDRKAALGLDMLNELQKCPKELFDTFCQDDKELFKVVQDEEEQQSDLEDGALMRRNDDRFPVLALRYIDEQKVLNGMAFQVSLGNYRYQFYNKTTIDPSDPNRVRILQKEINGFGPMHLVESKFKGKYGKDGLNLIRESQSEAPADTAATKPYLTDKRASYVIHNNRVCIMLKEKGSPLDKDCCYLPDLPVPKEENGTQKVNRPGDEKEKDWPHTCWLSIYDLPALVFLHLLGGNPGQVIRDYVGKIRRLLNDIVEEECVPPCCDEPSPTDGSQRKKTITKPKEVVDIWLKEQYKLPLSSVPEKIVDYLAGVSGGSMEEERRKAEDGFSKWAKSAVEKEIGDTELRQKRFQNDKKRVGSKANRIGKKSYVEIRPGRLADFLAKDIMKMQPADAEKNHCGKLTGQNYQIMQAAIATFKGDGRECRLTGLGELFVKAGLVGKDNRQKHPFLDKVLTNEITDTLDFYEKYLEEKKYYLEQLLCSEKYSEAYFLHGGLNDYKPKDRDYIKLLAGRYKDTFQLPDGLFADAISECLKKEDNVEIRNAAEGENRNNAAYLLRVYFTNKYDDDSQPFYFQTDGRFKRHYKVFDTIEGKKDATYRTVEEIRAMLRKGAADKAPVRRAIAEHLNTMQMPGKPQRINGKKKPTWREATPDEKEAEAKKCQMQLRYCQQNERAIRRYKAEDMLMFMMAKRLLLESDNVLKKGNLNGLEAFKLRDIKPIGCKNGPQDNILNQQIDFSAAIDLFVEEVVHYTDKKGEEGTRFKTVNKGKKVIRQSGLKIKNIGDFYRFIFDSRLGSLLSQIEGDTFEREMVEKELDTYDNRRKDGFKTAHEIERVIIGKNKEQIETRFKNEIAAGLESEKIVYNKFGELLKYCELTSDIQAKIVDIRNMLAHNKYMDNIERVVDKDDMTLPQVLEKIIEWLQDNSKKITHTDESTNT

SEQ ID NO: 2162 - protein, 1312 aa, Artificial
  Synthetic
MANNQFRLVPVDYSRPYDQQPECKRHVIGAYANLARHNMTVTINAIMQAIGLELFNENNIDEAFNSSHRKILSQLDNIQKVNLQKRIYRHFPFFKRMKLEDESKKSVQLNKLLEIMSDFTSCMSMIRNYYTHYHPYNSPAELANQLELKKEMGKRLQYLFENTSQMFKSYENLDHESNEVFAALRIPEDYIEEFMPGDKDYQKLETLLKDPKVSRFKKQGLKLDMKTLKITKKAVRYIRNPEYQAYMMDKEKGMSDIAVIYFLCLFLEKKVSFELMEEVGLTEQIKFNGENADQQLLFVKEILCMNRIRMTKTKLDSEMTDTALALDMINELRKCPKPLYEVFCKEARDEFKDDSTVQWEKEHRTETVNTEENTDSEDERTIEKDTPRSTFVRWEDRFPQMALRYIDYQGLFDDIRFQLNLGKYRFAFYQHDKAYSVDNEERLRILQKEMHGFGRIQEVQAKKNEKWAVLYDKKYVEEGLTKKKPDMAGQAPYVTEQYAQYAIDEKSHSVGLRWEGWKATGDSKKHYGDLDNQKMFIPYLPTKPLPEGKQTNQSEPLLPPQALLSLYELPGLLFFQYLLVKQEKDIFEAENMIKKYYHSLYRFFQDVSTGTLKPVADKDEKDTLEKLAKVLSAEPYCLRLTDIPDKLKKYLLGISVDNCQRMEQSAIYRLEERKERIQKALNSFIDKKKKIGSKENKFDKMRATIKTGSLGQLLARDIMEWLTDETKTRMKLTGQNYVAMQTALTLLGQSFRGDRDHEVNCTKLREIFLKSNILPENDDDYDADLHHPFLLNVLDEEPSSVEEFYEIYLEEELNHIDYMITFLKKHKAKGTALYIPFLHANRSRWKNADEDTMKKLATRYMEQPLQLPNGMFTESIFKLLMEIDNPDLHEELVKAENPDADKNLANNVSYLMSIYFKHVERDHSQPFYNTTAIEGEPSPYRHVYRIFKKLYGQQIPHTNQTTTPAYTVEEINGLRKQALTDIAKYVEKDISNWKDRQQFKFEQKLKKKLKKENDRRYKNHEQQLNVYEEVNKVVQQEINTMRTTTTAKLIRQLKKVYDNERTIRRFKTQDMLMLIMAREILKAKSQNKDFTKDFCLKYVMTDSLLDKPIDFDWSVNIEKKKKNEEGKIEKEIIRKTIRQEGMKMKNYGQFYKFASDHQRLESLLSRLPDELFLRAEIENELSYYDTNRSEVFRLVYIIESEAYKLKPELANDANTDKEWFYYADKKGKKHPKRNNFLSLLEILAAGKDGILNEDEKRSLQSTRNAFGHNTYDVDLPTVFEGKEEKMKIPEVANGIKDKIENQTEELKKSLQK

SEQ ID NO: 2163 - protein, 1040 aa, Artificial
  Synthetic
MTTKDVIEVQTDETLKHVFGAYLNMARNNLRIVLEYVDEKVFRKRRMNEDALHESDLIKSLLKNERPDEQQRATGLLKQLLPFLTLLVRNQSNSSAQDYASVLVSFIKALNGARNFYCHSLHQPLTIESRLVNSLEYLFDAARRKTKVRFGLSLEDIEHLVRKPAVKKGKKTEIVCKQDFRYQFISNNNKFTQEGLAYFICLFLERKYSELFLKKIPNFKDSRYKKYQATIDTYSILSLKLPKPRIQSSDNKEALLLDILEELKRCPGELFDRLLPEDQNRFRILGDDENGSNTPVLIKRFGDRFPNLVFRYFELTGRLPWIQFYIDLGTYNYEIYKKEVGGEQRLRRLQHHLKGFGYIEDFDYEKLPESWRSLIRKSHELTADYEESHIIFTHPHYHFVNSSIGIYVDPTKQDPILPDLNTRKNTQPHAWLSKYDLPAMVFLHLLTKKGHISFQPSKVINQYIETYRKFFSDLSGSTTISPEWLRENLENFNLTPSQIPKAIACHLSNASQNLMLDKGKRKLARFIQDTDSRLRNLEKLIERSKERPGSKYHRLVKTGRLADFLARDMLLLQPPIDEKKGKATSTLFQVLQARLAFYGRDKELLSSLYKECNLVDSENPHPFLEKVPSASNIVDFYRNYLRHRKQYMEKLLSECTHDTLKERQYHFLHFGERDRKDDSKYCSNLARKLSKMPFNLPRGLFIRPIFNHLTSRGPEAVKNKLVSNERNNTVFMLQTYMNRAYNDSTQEYYNWPRNYPIFSYIFGSGEKKSNNNINKIYFTPAQLETKASEIKAYINSAAHIQEEDKNKLIREYKNFIYSEKMIRHTKACDIVLFLMAKDLLMQLDQTIMKPESLNNFKLNEIGPGDTGEVMSLKMTFRFKIQTKTVVARDLKLKNYGSFKRLLKDNRIESLLEWYDEDEIEIGTIYRELEAYDRVRLEVQKLILEFESKCIARYGLGLRAGTDDHHLKHSEILKEFTNQTGNSIAAEKMNIIRNSFMHNRFPQKEKFENDILSDEPIAVQFRELYEKLMSQVAQAATKTSV

SEQ ID NO: 2164 - protein, 1126 aa, Artificial
  Synthetic
MYTNDNNGRDKSVGHPLDRFMGGRNKTVDLAHFYNLALDAVDKIKITHPLSNVGFWSEYFWRSHLDRKNNKAYVPTDIEAKLVQETYAKLKQIRNFQSHIWHDDCVLAFSTELASWIKNKYERAKAYLFENNQQAMLDFEALDNQHPRPLFKQVHSTFYITVEGRIFFLSFFLSREQMNSLLQQRKGHKRTDMPLYKMKRELYTFYCHRDGAAIARMNQANDEWNFLRPEQQKDIKLARQAFRLLSYLQDYPSCWKTLLPEHPSELLVYCKERGILSEFHIQLERDGFHLEHERFTGQTWLMKTSHFRELLTLIMLFEFTGRTRHPKDLLLLRMEKLLEHRTKMITLMQKSVFKLTEDEIDFLQIPEHQLLRTQRLTTQNLIAYFEQFDPQKESTGKLGRKLAGFLEIEPIQLYPQDFNETETRKFRNDNQFMLFAAQYLMDFGPEEWYWCMERFENGVPGEGEKVTLNKIKEFHQPAVAKALADFRICIEEDHVILGIPKSPDGVLVEGVPNYKSFYQIAIGPKAMRYLMARMLVDSKAITPLKALPVRLKNDLDLLRKKGGWADGKGFKLLEPVFLPPYLKNPTGDISKLFNSALNRLTHMRQVWQEVVEHPDRFTRHEKNRLVMLLYRQFDWVPEKGNTVKFLRRHEYQQLSVCHYSLHLKKKKVGYSRNKGGGSSPNKFEKLFRDVFQLDTRKPPIPREIKSLLQQANDLDDLVGIVGQHQIPRLEAELNNIASLPNLQRKKALSQFCRKIGLSIPVNCLVTSEQQMLRKKHSETLEFQVIPLHPMLVVKALFTDEYQQSTDENRQQQIGGRKALSIFKNIREDQLRCGLLRNDYYRHEIAQELFCETDAVKVRENAVGLLDKTKTEDVIIAWMAEQYLSKNPFTEVLSNRIKDVINQNRSYAPELYHEPITLEICDNKGKGIGLYMQVRLHQLDDLIYNSHRYMFPKAAHLYRRRLFEENTIWESELQRLREDRLKGAPLPDGSLESPIPIELLIDEIRLVRRTALKLGNALFDFERSVIEKLGTAHLDKDAFQTWLINRNPLEKAEDVHHFKFDNILVHAVELGLIDSDLFNRLKKVRDKVLHGNIPEESFSWMTREGEQLRSVLNILEDLHAGKDEAKY

SEQ ID NO: 2165 - protein, 1127 aa, Artificial
  Synthetic
MEDDKKTTDSIRYELKDKHFWAAFLNLARHNVYITVNHINKILEEDEINRDGYENTLENTWNEIKDINKKDRLSKLIIKHFPFLEATTYRQNPTDTTKQKEEKQAEAQSLESLKKSFFVFIYKLRDLRNHYSHYKHSKSLERPKFEEDLQNKMYNIFDVSIQFVKEDYKHNTDINPKKDFKHLDRKRKGKFHYSFADNEGNITESGLLFFVSLFLEKKDAIWVQKKLEGFKCSNKSYQKMTNEVFCRSRMLLPKLRLESTQTQDWILLDMLNELIRCPKSLYERLQGVNRKKFYVSFDPADEDYDAEQEPFKNTLVRHQDRFPYFALRYFDYNEVFANLRFQIDLGTYHFSIYKKLIGGQKEDRHLTHKLYGFERIQEFDKQNRPDEWKAIVKDSDTFKKKEEKEEEKPYISETTPHYHLENKKIGIAFKNHNIWPSTQTELTNNKRKKYNLGTSIKAEAFLSVHELLPMMFYYLLLKTENTKNDNKVGGKKETKKQGKHKIEAIIESKIKDIYALYDAFANGEINSEDELKEYLKGKDIKIVHLPKQMIAILKNEHKDMAEKAEAKQEKMKLATENRLKTLDKQLKGKIQNGKRYNSAPKSGEIASWLVNDMMRFQPVQKDNEGKPLNNSKANSTEYQLLQRTLAFFGSEHERFAPYFKQTKLIESSNPHPFLKDTEWEKCNNILSFYRSYLEAKKNFLESLKPEDWEKNQYFLMLKEPKTNRKTLVQGWKNGFNLPRGIFTEPIRKWFMEHWKSIKVDDSKRVGLVAKVIPLFFSEKYKDSVQPFYNYPFNVGDVNKPKEEDFLHRKDRIELWDKKKVGFKGYKAKEKPKEMTDEEKKEHRSYLEFQSWKKFERELRLVRNQDIVTWLLCTELIDKLKVEGLNVEELQKLRLKDINTDTAKKEKNNILNRVMPMELPVTVYEVNKASNIIKNKPLHTIYIKEAKTKLLKQGNFKALVKDRRLNGLFSFVDTSSKAESESNTISKSRVEYELGEYQKARIEIIKDMLALEKTLIDKYNSLDTDNFNKMLTDWLELKNKANKASLEKTDKTSFQNDVDLLIAVRNAFSHNQYPMRNRIAFANINPFSLSSADTSEEKGLGIANQLKEKTHKTIEKIIKIEKPIETKE

SEQ ID NO: 2166 - protein, 1175 aa, Artificial; identical to SEQ ID NO: 1496
  Synthetic

SEQ ID NO: 2167 - protein, 1113 aa, Artificial
  Synthetic
MENDKRLEESACYTLNDKHFWAAFLNLARHNVYITINHINKLLEIRQIDNDEKVLDIKALWQKVDKDINQKARLRELMIKHFPFLEFAIYNNNKDGKQEEKQAKAQSFESLKDCLFLFLKKLQESRNYYSHYKYSESSQEPKLEKELRKKMYNIFDASIRLVKEDYQYNKDIDPEKDFKHLERKEDFNYLFTDKDNKRKITKNGLLFFVSLFLEKKDAIWMQQKLRGFKDNRGNKEKMTHEVFCRSRMLLPKIRLESTQTQDWILLDMLNELIRCPKSLYERLQGAYREKFKVPFDSIDEDYDAEQEPFRNTLVRHQDRFPYFALRYFDYNEIFKNLRFQIDLGTYHFSIYKKLIGDNKEDRHLTHKLYGFERIQEFAKQKRPNEWQALVKDLDIYETSNEQYISETTPHYHLENQKIGIRFKNKKDKIWPSLETNGKENEKSKYNLDKSFQAEAFLSVHELLPMMFYYLLLKKEEPNNDEKNASIVEGFIKKEIKRMYAIYDAFANEEINSKEELEEYCKNKGLQERHLPKQMIAILTNKSKDMVKAAERKQKEMVKDTKKRLATLEKQTQGEIEDGGRNIRLLKSGEIARWLVNDMMRFQPVQKDNEGKPQNNSKANSTEYQMLQRSLALYNKEEKPTRYFIQVNLIKSSNPHPFLEDTKWEECYNILSFYRNYLKAKIEFLNKLKHEDWKKNQYFLMLKEPKTNRKTLVQGWKNGFNLPRGIFTEPIKEWFKRHQNDSEEYKKVEALDRVGLIAKVIPLFFKEEYFKEDAQKEINNCVQPFYSFPYNVGNIHKPEEKNFLHCEERRKLWDKKKDKFKGYKAKEKTKKMTDKEKEEHRSYLVFQSWKKFERELRLVRNQDIVTWMLCMELFDKLKVEGLNVEELQKLRLKDIDTDTAKKEKNNILNRIMPMQLPVTVYEIDKSFNIVKDKPLHTVYIEETGTKLLKQGNFKALVKDRRLNGLFSFVKTSSEAESKSNPISKLRVEYELGAYQKARIDIIKDMLALEKTLIDNDENLPTNKFSDMLKSWLKGKGEANKARLQNDVDLLVAVRNAFSHNQYPMYNSEVFKGMKLLSLSSDIPEKEGLGIAKQLKDKIKETIERIIEIEKEIRN

SEQ ID NO: 2168 - protein, 1146 aa, Artificial; identical to SEQ ID NO: 1461
  Synthetic

SEQ ID NO: 2169 - protein, 1140 aa, Artificial; identical to SEQ ID NO: 1482
  Synthetic

SEQ ID NO: 2170 - protein, 1137 aa, Artificial
  Synthetic
MENNNLGNGIVYDYAIIADKHYFGGFLNLAKDNIDAVFKAYEDRFGENVPDMKIENLSYQDYQNRIDFLKYYFPVINYLDLPVSDKEFENIRDKEPKRRKYFRENFKTLYKAVSALRHFYTHYYHEPLSFEMNLFSLLDKIFISVIEDIKKEKKNDNKTRPLLNRNLKEELKCLMALKKQELKEKQKSQKNISLDEVSIQNAVFNDAFSQFFNKEKKISRFYQAENTDTDIENKLNISQTGLLFLLGMFLTKKQSEDLRSRIRRFKNKIIKNQDHPVSKQNNSLKYMSTQWVFGYLAFKGLKSTLNTTFMQETLLTQIVDELSKVPNEIYRNLSQEQQQLFIEDMNEYVQDGNNVKSLEDAIVIHPVIRKRYEDKFPYFVIRYLDEYAGFPTLKFQIQLGNYVHDKRTKKIQGTVYSTERVVKEKITVFGKLSEITALKDNYLKKRTQNNEENRGWEIYPNPSYNFTGNNIPIYLDLESSNVPGAKQLYGNIQKQCADLRKKNIENQDQTERADKATKHDIVKLIDSKKIVIKKPTAFLSLNELSGLLYELLVNKKNGKQIEDILIKKLIEHYDTISEFSTENPLPTSQITKKLLKSNSESQWNTGKLMRDIEREIAVTEHKLNLIKDKRDSLSRYNLKEKIRKPVFSNRAAGKEAVWIAEDLVRFMPKAVRKNWKGYHHSQLQQSLAFYEQRPNEAVNLVKQYWNLNDTRYCWNEGIKKSFERSEFDLFYEAYLKNRKKILNLYRDKLSDNMENMESMMQDEHLDFIFNRHLYKIDTTENQKLKLLAHPFVFPRGIFDEKPTYIKGKSMTETPELYAEWYRYANQRIESQQFFYKTPRDYKDLYNTMKEHKKEIDENKYNLSEIEKYNLFKNKQDKAIKKVQMQDVFLELIVKDLFNRIFPNQGCDFSLKDFTDIHNDTWNISVPFQWKQIREPEVKLKDIGKFKRFLFDKKIENILSYNEDKIWTKRELEEELELLPSSYEVIRREQLLKLIQELENCILQKNNFDGVNHPKEFEQSDEDKKAYPNFKHYITEGILKKCTLAENTDIEWLNQLKEDTFEKVPLQELCMKPKIIQKAYLLVLIRNKISHNQLPKKEYFERIKTMFSPAEANETISYSSIILNFTKSVIQELKTYLK

SEQ ID NO: 2171 - protein, 1137 aa, Artificial; identical to SEQ ID NO: 2170
  Synthetic

SEQ ID NO: 2172 - protein, 1117 aa, Artificial
  Synthetic
METMNALLEKKMRTIGDDPQYFGGYLNMMRHNIFSISNHLAQKFDQALLRDEMNIAGSFLCNYEIKNVNWNHIFRHAVRFMPVIKIFNFEQLPASVRVHEESEKKVPDQTMDFRKTCSTLGEVFKDLRDFRNDYTHYFSTDKGASRKIEVSPVTADFLNDAFRLAIDYTKERMKDVLKEEDYKLVERKVMFDADRHITTEGLVFLICMFLEREDAFRFIGKVKGLKGTQYSTFIATREVLMAYCVKLPHDKFINEDAKQDLTLNIINELNRCPKTLYHVISERDKKRFRPELDLDKKRRIIDSSTDRDDTESWEEPDFETYVEEITKQVRYENRFSYFAMRFIDETNMFSSLRFQIDLGKLELAIYNKMLAGEEVKRRVVENVKVFGKLRDYLQEATVLSLIDHQSLSTGFVQFAPHYNAQNNRIGLSRRSRNALLMKKEVLTNNIHLKLIQHQPDVFLSLHELPKIILLEYLQRGEAEKMIEWFIDINEKLLTRGFIEEVRLKLPDSWSDFRRRSAGNSKTGYSEKALEELQSRKQTLNVVLKEYGLNDKQIPARILNYWLKIVDVDAEHSFSERIKLMRSDCKKRLRAMEKHRLDPNERVPKVGEMASFLAKDIVSMVIDRKKKERITSFYYDKMQACLAFYADEEKNVLFGQIVKELGLLEKGGHPFLANVLERKPRNTAQLYTDYLKEKADKSMRKRLSKRMIEGPDTSWICRTFYRKERCNGKIMTKIRLPEDVSEIPLTINQWAAKEKSDLDTWLNNITRRETKKGIDLPTNLFDTKLCELLRCRLDDKGIRYDAGSNYNELLKLWWGLVREDSVQEFYATEREYVVYGENINFIADSEKKFQNYYSDAFHKVAEQHKLDAVKQSPAQLERVFKHAVAGTEKEIRMLQEEDRLMLLMVEQLMGRMDGLKLSQVQSLLDEEIPAELQLKYDAVGSVVTDDSAVSVMTRYVVATCKRKDHTKLRKYRYDRRLAGLFTYHPGEVVKQEWLKEQLAAYNKAKLDVFDMVFKLEEQITLKDVDGVEALFLDEQQRPKSGNIQHWPYLKWLEMKGIINDKESHFLSSVRNSFSHNKFPEQEDMPKSTTTENSLPIAAQIANAYTQKVEEIMEKVAGL

SEQ ID NO: 2173 - protein, 1106 aa, Artificial
  Synthetic
METNQPINENRRRTLSNDPQYFGGYLNMARLNIYNISNHIAADFEQSTLTEEGQIPASFLCNQGIKKLNWNRVFEKTKRFLSILKVFDVESLPKEERENSEKEGKDFAAMSDTLKTVFGELQDFRNDYTHYYSTEKADTRKLTVSVELADFLKLNFKRAIAYTKVRLNDVLTDADYELVEGKQVVTADNVITTEGLVFLTCMFLEREHAFQFIGKIQGLKGTQFNSFIATREVLMSFCLKLPHDKFVSENLEQALTLDIINELNRCPKTLYDVITEKERLQFRPELDEQGIENLLANSMNDDERESILDGIDYDKYIEGLTKRVRHTNRFPYYAMRFIDEKNIFSKLWFHIDLGKFEVDKYSKQLAGEQTERVVLENAKAFGKLSSFTDPVVIEHKIDNQKRTDGFEQFAPHYNADNNKIGLSNKEDIAHLIPKSKPDTKVGNNLKQPLPQAFLSLHELPKIILLDYLQKGKAEQLITDFIKLNDERLMDIRFIEEVKLKLPADWNEFAKRSDSKKKRAYSGAALKYLHQRKATLNEVLIAYNLNDKQIPTRILNYWLNIKEVDDNRSVSDRIKLMKRDCMARLKVIEKHKVDKSVKTPKLGEMATFLAKDIVDMMVSKEKKQKITSFYYDKMQECLALFADAEKKALFIHIITHELKLFENGGHPFLQNINLQQIRKTSQFYEAYLKEKANKQVPKTNRTNQVDESWMMKQFYIKERKEEIGKQLTVVKLPANRNNIPYTIRQWDEKENYNLNKWLEHVTVGKVKGDGKKAVNLPTNLFDETLSDLLRSELDARAVNYNPAANYNELLKLWWKSRNDGTQSYYESEREYTIYDEKVSFRINSANHFADYYQKALSRAYNRLKAERETARRTNLRLPPIERKQVERVFKNTIAETEKEIRMLQEEDCMAVLMLEQLMDNTDNLKLSTIETLLNDTTRIKQNILNKILVAERKQKNYTELRKYIHDRRLPHLFEYVAANEIQLEWLQEELRAYNTAKQQVFDTVFALEKKITETDPHGLKALFIQDNGNAKTGNIEHKPYVQWLNNKGLISEEDSRFMLEVRNRFSHNEFPVRQTVELRIPACNENKIALQIVTKYDELIAGIISRI

SEQ ID NO: 2174 - protein, 1160 aa, Artificial; identical to SEQ ID NO: 1701
  Synthetic

SEQ ID NO: 2175 - protein, 1145 aa, Artificial; identical to SEQ ID NO: 1631
  Synthetic

SEQ ID NO: 2176 - protein, 1393 aa, Artificial
  Synthetic
  misc_feature (504)..(617): Xaa can be any naturally occurring amino acid
MANNQFILVPVDYSRPYDEQPECKRHVIGAYANLARHNMTVTINAIMQAIGLELFNENNIDNAFNSSHRKILSQLDNIQKVNLQKRLYRHFPFFKRMKLEDENKKSVQLNTLLEVMSDFTSCMAMIRNFYTHYHPYNSPAELANQLELKKQMGKRLQYLFENTSQMFKSNENLDHESNEVFAALRIPEDYIEEFMPGDKDYQKFETLLKDPKVSRFKKQGLKLDMKTQKITKKTVRYIRNPEYQAYMMDDEKGMSDIAIIYFLCLFLEKKVSFELMEEVGLTEQVKFNGENADQQLLFVKEILCMNRIRMTKTKLDSEMTDTALALDMINELRKCPKPLYEVFCKEARDEFKDASTVQWEKENRTEAVNTEENTDNEDEMAAEKDTPRSTFVRWEDRFPQMALRYIDYQGLFNDIRFQLNLGKYRFAFYQHDKTYSVDNEERLRILQKELHGFGRIQEVQAKKNEKWADLYDKKYVEEGLTKKKPDEAGQAPYVTEQYAQYAIXXXXXXXXXXXXXXXXXXXXXXXXXXXXXXXXXXXXXXXXXXXXXXXXXXXXXXXXXXXXXXXXXXXXXXXXXXXXXXXXXXXXXXXXXXXXXXXXXXXXXXXXXXXXXXXXXXFIPYLPTKPLQEGKQTNQSEPLLPPQALLSLYELPSLLFYQYLLAKQGKNKFEAENMIKKYYHCLYRFFQDISSGTLKPVAGKDEKDNLEKLAKVLSAEPYCLRLTDIPDKLKKYLLGISVDNGQRMEQSAICRLEERKERKQKTLNNFVDKKKKIGSKENKFDRMRATIKTGSLGQLLARDIMGWLTDDTKTRMKLTGQNFVAMQTALTLLGQSFGGGRDHEVNCTKLREIFLKANILPENDDDYDADLHHPFLLNVLDEEPSSVEEFYEIYLEEELNHIDYMISFLKKHKAKGTALYIPFMHANRSRWKNADEDAMKKLATRYLEQPLQLPNGIFTESIFKLLMEIDNPNLRKELVQAQNPIADKNLANNVSYLIKIYFKNVERDHSQPFYNTTAIDGEPSPYRHVYRIFKKLYGQQILHTNQTTTPAFTIEEIKGLRKQALTDIAKYVEKDISDWKEKKQFKFELKLKKKLKKENDRRYKNHERQLNVYEEVNKAVQQEINTMSATTTAKLLRQLKKVYDNERIIRRFKTQDMLMLIMAREILKAKSQDKDFTKDFCLKYVMTGSLLDKPIDFDWSVNIEKKKKNEEGKIEKEIIRKTIRQEGMKMKNYGQFYKFASDHQRLESLLSRLPDELFLRAEIENELSYYDTNRSEVFRQVYIIESEAYKLKPELENNANANEEWFYYVDKKGKKHPKRNNFLSLLEILAAGKDGILDEDEKRSLQSTRNAFGHNTYDVDLPTVFEGKEEKMKIPEVANGIKDKIEEQTIELKEKMK

SEQ ID NO: 2177 - protein, 1175 aa, Artificial
  Synthetic
MTEQNERPYNGTYYTLEDKHFWAAFLNLARHNAYITLAHIDRQLAYSKADITNDEDILFFKGQWKNLDNDLERKARLRSLILKHFSFLEGAAYGKKLFESQSSGNKSSKNKELTKKEKEELQANALSLDNLKSILFDFLQKLKDFRNYYSHYRHPESSELPLFDGNMLQRLYNVFDVSVQRVKRDHEHNDKVDPHRHFNHLVRKGKKDRCGNNDNPFFKHHFVDREGKVTEAGLLFFVSLFLEKRDAIWMQKKIRGFKGGTETYQQMTNEVFCRSRISLPKLKLESLRTDDWMLLDMLNELVRCPKSLYDRLREEDRARFRVPIDILSDEEDTDGTKEDPFKNTLVRHQDRFPYFALRYFDLKKVFTSLRFHIDLATYHFAIYKKNIGEQPEDRHLTRNLYGFGRIQDFAEEHRPEEWKRLVRDLDYFETGDKPYITQTTPHYHIEKGKIGLRFVPEGQHLWPSPEVGATRTGRSKYAQDKRLTAEAFLSVHELMPMMFYYFLLREKYSEEASAERVQGRIKRVIEDVYAVYDAFARDEINTRDELDACLADKGIRRGHLPRQMIAILSQEHKDMEEKIRKKLQEMIADTDHRLDMLDRQTDRKIRIGRKNAGLPKSGVIADWLVRDMMRFQPVAKDSSGKPLNNSKANSTEYRMLQRALALFGGEKERLTPYFRQMNLTGGNNPHPFLHETRWESHTNILSFYRSYLKARKAFLQSIGRSDRVENHRFLLLKEPKTDRQTLVAGWKGEFHLPRGIFTEAVRDCLIEMGYDEVGSYKEVGFMAKAVPLYFERACKDRVQPFYDYPFNVGNSLKPKKGRFLSKEKRAEEWESGKERFRDLEAWSHSAARRIEDAFAGIENASRENKKKIEQLLQDLSLWETFESKLKVKADKINIAKLKKEILEAKEHPYLDFKSWQKFERELRLVKNQDIITWMMCRDLMEENKVEGLDTGTLYLKDIRTEVQEQGSLNVLNRVKPMRLPVVVYRADSRGHVHKEQAPLATVYIEERDTKLLKQGNFKSFVKDRRLNGLFSFVNTGGLAMEQYPISKLRVEYELAKYQTARVCAFEQTLELEESLLTRYPHLPDKNFRKMLESWSDPLLDKWPDLHRKVRLLIAVRNAFSHNQYPMYDEAVFSSIRKYDPSSPDAIEERMGLNIAHRLSEEVKQAKETVERIIQA

SEQ ID NO: 2178 - protein, 1324 aa, Artificial
  Synthetic
MGKENKGNNAPKTQNKTANNSQQQKKVRRLQKTSFRISLTGKHVFGAYFNMARTNFIKTINYILPIAGVRGNYSENQINKMLRALFLIQAGRNGELTTEQKQWEKKLRLNPEQKTRLQKLLFKHFPVLSPMMADVADHKAYLNKKKSNVQTEDEAFEQLKGISLSDCLEIICLMAETLTECRNFYTHKDPYNKPSLLAAQYQHQEMIAKKLDKVIVASRRILKDREGLSVNEVEFLTGIDHLHQEVVKDEFGNVKKKDGKVMKTFVEYDDFYFKISGKRLVKGFTVTVKDDKPVNVDTMLPALSDFGLLYFCVLFLSKPYAKLFIDEVRLFEFSPFDDNENMIMSEMLSIYRIRTPRLHKIDSRDNKATLAMDIFGELRRCPIELYDLLDKNTGQPFFHDEVKRPNSHTPEVSKRLRYNDRFPTLALRYIDETELFNRIRFQLQLGAFRYKFYDKECIDGRVRVRRIQKDINGYGRLQEVADKRLDKWGDLIQKREEQSVKLEHEELYLDLDQFQQDTADSTPYVTDRRPAYNIHANRIGMYWEDSQNPKLFEVFDENKMYIPELKVSEDMKAPVKMPEPRCALSIYDLSAMLFYEYLREQEDENIPSAEQIIIDYESDYRRFFKAVAEGSLKPFQRTKEFREYLKKEYPRLHLADIPEKLQSYLCSHGLSFNNKPESVRERLDRLALQHLEERELRVHRRLEHYQEDRKMIGNKENKFGKKSFADVRHGALARYLAQSMMEWQPTKLKDKEKGHDKLTGLNYNVLTAYFATFGASHTIEEENFTPRTLEQVLTEAHILGGSNPHPFINKVLAHGNRNIEELYLHYLDEELKHIRSRKQSLSDNPSDKALAALPFVHYDRTRFHERTEEEMKSLAARYTTIQLPDGLFTPYIVKLLQEHYADKEELQQALKKEFPDKLNPNHNAAYLIMLFYQTVLNDDAQPFYLSGKTYTRQLEEGKTESFSFKRAYELFSVLRGSKKNTFPYELIPLFLTCDEIQQNLSAKLLDAEGNPIPEAGKRGKPATDSQGNTIWKRRIKQQIFDYVEKQSDRDLKISMNQSWKQKEEERAAKREALYSRLTRQINEIKNSERTLRRYKTQDMVLFLLAKEMFANIICEQGNEVNSKQMRLSKVCNQSFLRQTLTFRVPVAVGEKTIYVEQENMSLKNYGEFYRFLTDDRLMSLLENIVDTLKPNEDGDLVIRHTDLMSELAAYDQHRSTVFKLIQQIENLIIERNKALKNPESEDFWVKEGLPKRNNFASLLELIDQLNNVALTDEERKLLVAVRNAFSHNSYNIDFSLIKDVKHLPEVAKGILQHLESVLGVAPTK

SEQ ID NO: 2179 - protein, 1003 aa, Artificial; identical to SEQ ID NO: 1578
  Synthetic

SEQ ID NO: 2180 - protein, 948 aa, Artificial
  Synthetic
LFFSFHNAQRVIFKHLYKAFDASLRMVKEDYKAHFTVNLTRDFAHLNRKGKNKQDNPDFNRYRFEKDGFFTESGLLFFTNLFLDKRDAYWMLKKVSGFKASHKQREKMTTEVFCRSRILLPKLRLESRYDHNQMLLDMLSELSRCPKLLYEKLSEENKKHFQVEADGFLDEIEEEQNPFKDTLIRHQDRFPYFALRYLDLNESFKSIRFQVDLGTYHYCIYDKKIGDEQEKRHLTRTLLSFGRLQDFTEINRPQEWKALTKDLDYKETSNQPFISKTTPHYHITDNKIGFRLGTSKELYPSLEIKDGANRIAKYPYNSGFVAHAFISVHELLPLMFYQHLTGKSEDLLKETVRHIQRIYKDFEEERINTIEDLEKANQGRLPLGAFPKQMLGLLQNKQPDLSEKAKIKIEKLIAETKLLSHRLNTKLKSSPKLGKRREKLIKTGVLADWLVKDFMRFQPVAYDAQNQPIKSSKANSTEFWFIRRALALYGGEKNRLEGYFKQTNLIGNTNPHPFLNKFNWKACRNLVDFYQQYLEQREKFLEAIKHQPWEPYQYCLLLKVPKENRKNLVKGWEQGGISLPRGLFTEAIRETLSKDLTLSKPIRKEIKKHGRVGFISRAITLYFKEKYQDKHQSFYNLSYKLEAKAPLLKKEEHYEYWQQNKPQSPTESQRLELHTSDRWKDYLLYKRWQHLEKKLRLYRNQDIMLWLMTLELTKNHFKELNLNYHQLKLENLAVNVQEADAKLNPLNQTLPMVLPVKVYPTTAFGEVQYHETPIRTVYIREEQTKALKMGNFKALVKDRRLNGLFSFIKEENDTQKHPISQLRLRRELEIYQSLRVDAFKETLSLEEKLLNKHASLSSLENEFRTLLEEWKKKYAASSMVTDKHIAFIASVRNAFCHNQYPFYKETLHAPILLFTVAQPTTEEKDGLGIAEALLKVLREYCEIVKSQI

SEQ ID NO: 2181 - protein, 1137 aa, Artificial; identical to SEQ ID NO: 2170
  Synthetic

SEQ ID NO: 2182 - protein, 1003 aa, Artificial; identical to SEQ ID NO: 1494
  Synthetic

SEQ ID NO: 2183 - protein, 1200 aa, Artificial
  Synthetic
MQEEIISADPKTKQTKFNHYSEEDKYFFGGFLNNADDNLKQVSKEFKERLNIIGQNENTSTSNDDDNLNSVVKQYINNNKSLAKKEKAINILIDYFPIVAAVKKYCSNNIDETFELFKLLLGTVADLRNFYTHYYHKPITIDEKVYDFLDNTLFDVFMTIKKKKVKNDKSKELLKEKLRPELKLLINLKRKELIQKGKKTENLENAVFNHCLRPFLEETKNSKNKTISLRSYKKSKPEEETTVPITQSGLVFLMSFFLHRKDFQLFISGLEGFKGKVNAVQEEEITLKKNNLVYMISHWSYSYYNFKGLKHRIKTDQGVNEIEYDGITHTITNKDTKEALLTQLVDYLSKVPDEVYNNLSEEQQNEFLEDVNEYMRDNPENEDSSISSIVSHQVIRKRYENKFNYFALRFIDEYGNLPSFRFMVNFGSYIKDRKKKVLDSINYNSERIIKKEIHLFEKLSMVTDYKKNLFLNETATLNLAQFPLFPNPSYVIANNNIPFYINCQKNDLNDYFGKKKSSQSQNQKKNHTYDKDNKGQTSSNIVGELEKALGVKDIKQRSTIGLFSCNELSSMLHEIIVKKTSGVDLENRIAQKIKEQYQIIKDFDSNSYDESAKNKIPKALLKTSKVDSTITFEGKQIDLARLINAVTFELDATHAKIKTVKEREEEVRKGEIEKNQKNSSNKQKTKVKYRKYVFYNNEIGQEASWLAGDLIRYMKNNATWKGYMHSELQALLAFYEEKRNDIITILENTFNLKADCLLTIDLKSLLVKNHKFIDFYKDYLSLKRSFLNEKLMFLKNNDFNGIPAKTLKKEWNSVFEVFKKRQYLIQSTEEKKQNLYGDAINLSRGIFDDKPTMIPNKQPNREEFAAWFVAPTVYEHYQSFYNLIDLNNPKTDTKEQTKQNYKTIRTLNKIKIQDYYLKLMVDALYKDLFGQELNIELKDFYVPKSERESIKADAKNYQQVDNSFLWNKVVHHTLQGGRINATAKLKDIGKYKRAMKDEKIASLLTYDDRTWTYALDNIKDESKQTHLYSLTMELQEYEKVRSKELLKQVQQLEKEILNLDEDFVTTQNHPIIFEVANNPRFRKYIEEGILNKILPNENQVEILRGIDFDDLSWAFDSSERNEEQKEKINLYNQITNPQVQRGLILIMIRNKIAHNQYPPKYIYDLAQTFIPKEENEYFASYFNRVFKEMTKKLLQSLENN

SEQ ID NO: 2184 - protein, 1140 aa, Artificial; identical to SEQ ID NO: 1482
  Synthetic

SEQ ID NO: 2185 - protein, 1129 aa, Artificial
  Synthetic
METNQQTHENRRRTLTNDPQYFGGYLNMARLNIYNINNHIATDFKQATLPEEGQIPAAFLCNKTIKNLNWNHVHTRAVRFLPILKVFDSESLPKDERENSDTEGKDFASMSDTLKVVFSELQEFRNDYSHYYSTEKQDSRKLTVSPELANFLTVNFQRAIAYTKARMKDVLTDADYALVENLQMVAPDNKITTEGLVFLIAMFLEREQAFQFTGKIQGLKGTQFNSFIATREVLMSFCVKLPHDKFVSENLEQALTLDIINELNRCPKTLYSVITDKEKQQFRPELDAQGIDNLIANSTNDDERERILDEIDYQDYIEGLTKRVRYSNRFSYFAMRYIDEKNVFDKLRFHIDLGKYEVDNYTKQFAGEQAERKVLENAKAFGKLSSFTDPELIQQRIDKQQHTAGFDQFAPHYNADNNKIGLSTKENIATLIAKSKASSKVEHNLKQPLPQAFLSLHELPKIILLEYLQKGQAEELINDFILLNDTRLMDITFIEEVKSQLPADWDEFSKRSDAKKKKAYSDSTLKYLRQRKTTLNTILSKSNLNDKQIPTRILNYWLNIKEVDDKRSVSDRIKLMKRDCMTRLKAVEKHKLNKSVKTPKVGEMATFLAKDIVDMIVSEEKKQKITSFYYDKMQECLALFANAEKKALFIHIVTNELKLLENDGHPFLQNINLQQIRKTSQFYQAYLIEKGNKMVPRLNPKTNKTSKVDESWMMKQFYVKEWKEEIAKQLTVVKLPANKSRIPFTIRQWDEKEKYDLNTWLRHVTVGKNNDGKKAVNLPTNLFDEALCDLLREQLDTKIVNYNPAANYNELLKIWWKTRNDDTQQFYQSEREYNIYNEKVRFKIDSSAHFADYYKNALSRAFTRLKAERETARQSNKRLPPLEYKQVERVFKNTIAETEKEIRMLQEEDRMAVLMLERLMDNSPNLRLSKIETLLNDTTPIREKISATLSFDASGERISGKSNPTVTKTLVAERKQKNYTELRKYRYDRRLPELFEYVQADEIPLEWLLEELSAYNNAKQQVFDTVFTLEKKIIGTDPDGLKSLFTGANGELQTGNIQHKPYVQWLTNKGLINKEEKQFINMVRKCFSHNQFPQRKTMELLIPAWNEKKLALQIATVYNQLIADLTNKI

SEQ ID NO: 2186 - protein, 1090 aa, Artificial
  Synthetic
MNNFFKKYQSEFSAYYNMARQNAYITLQHISNIMGYKEGEGKESRLFEMQSVMQVTKEKPNQQIFLLKQLSRFFPVLRIMAECERKKGQLASGSPESIRKVLVNIFNVLNYERDRASHLSFVDERTDSEKYIEKERQVAYYLNHCYTVAVRTIKTRFGKETKDMEIFTKERYKFTTEFVDGKKIRKAEINYNFPFSMVDKDKRLTDLGRVFLISLFIEKRYASIFFDSLQTNNKSDIYKNLNEEQKSLLREIFSAFRIRLPKERLGNERSDILLALDMLNELKKAPQDLFEHLKPEDQDKFRIKSTTGDDILLRRSEDRFHFFAMRYIDEKRLFNNIRFQVNMGKYRFLKKEDKHCINDEHCMRILQKDINGFGRLQEMEDYRCGISDLWKSRSMIKPHTDITRNDPNILPYITDSRTQYVFNGDRIGLGWPGYSSSEGKSLPVRNSSYIPEVSSDNTVECAQPKCWISIYEIPAMVFHILLNGNSGVETEKLIKDEVEKYKRFFQDIVDCNIQKVKCKDIKNPTPVEYKPIEDKYGIKWSNIPDKLKDYLVGRTRKNFESYAKTIVCEMIEKNKRAIERFKEDIKKVNGTDNKMGKKSYIEIKPGRLAAFLMKDIIALQPSALTGELKGRDKLTGLNYSVLNAELAMYNALYDKENFYRLKVMFEKANLIGNSNNRHPFLYKVFDSKPMNTIEFYQSYMKYRLEWLKSVLSKKDFKSVNLLKPERTKWMNRNTEFYKNLAQRYLSQPIELPRSLFESSIVDKMIEICADNDNLQELKKKLIRYRNKEEGVRFNVTYLILKYHESVKNDKSQKFYGWDKGYKVIDKLEGKSCFRQTNFLENYDFKGKTNEYIDTLEIKQRWNTYKKASNEEKEIELKKIEKYRKELDENERTLRRLKVQDILLFYLAKNIIGSGVDNFKMKSISPYKEEGILELQIPFSMKFTLSDGTERTIYQEAIKIKNYGDFFCYLYDERVKSLLPQIKKAEINRMELDRELMNYDLTRPEIFGLILDFEKAVNKKYPEMTKERHGFTDLLNKLEVLNSLEKENIRLVRNAFSHNKYPNIKNIKNDIPEIAVGIKKSFIKDTDKIIK

SEQ ID NO: 2187 - protein, 1134 aa, Artificial; identical to SEQ ID NO: 1986
  Synthetic

SEQ ID NO: 2188 - protein, 985 aa, Artificial; identical to SEQ ID NO: 1567
  Synthetic

SEQ ID NO: 2189 - protein, 1121 aa, Artificial; identical to SEQ ID NO: 1604
  Synthetic

SEQ ID NO: 2190 - protein, 1134 aa, Artificial; identical to SEQ ID NO: 1986
  Synthetic

SEQ ID NO: 2191 - protein, 1125 aa, Artificial
  Synthetic
VKMEDDKKTTESTNMLDNKHFWAAFLNLARHNVYITVNHINKVLELKNKKDQDIIIDNDQDILAIKTHWEKVNGDLNKTERLRELMTKHFPFLETAIYTKNKEDKEEVKQEKQAEAQSLESLKDCLFLFLEKLQEARNYYSHYKYSESTKEPMLEEGLLEKMYNIFDDNIQLVIKDYQHNKDINPDEDFKHLDRKGQFKYSFADNEGNITESGLLFFVSLFLEKKDAIWMQQKLTGFKDNRESKKKMTHEVFCRRRMLLPKLRLESTQTQDWILLDMLNELIRCPKSLYERLQGEYRKKFNVPFDSADEDYDAEQEPFKNTLVRHQDRFPYFALRYFDYNEIFTNLRFQIDLGTYHFSIYKKLIGGQKEDRHLTHKLYGFERIQEFAKQNRPDEWKALVKDLDTYETSNERYISETTPHYHLENQKIGIRFRNGNKEIWPSLKTNGENNEKSKYKLDKPYQAEAFLSVHELLPMMFYYLLLKKEEPNNDKKNASIVEGFIKREIRDMYKLYDAFANGEINNIGDLEKYCEDKGIPKRHLPKQMVAILYDEPKDMVKEAKRKQKEMVKDTKKLLATLEKQTQEEIEDGGRNIRLLKSGEIARWLVNDMMRFQPVQKDNEGNPLNNSKANSTEYQMLQRSLALYNKEEKPTRYFRQVNLINSSNPHPFLKWTKWEECNNILSFYRNYLTKKIEFLNKLKPEDWEKNQYFLKLKEPKTNRETLVQGWKNGFNLPRGIFTEPIREWFKRHQNDSKEYEKVEALKRVGLVTKVIPLFFKEEYFKEDAQKEINNCVQPFYSFPYNVGNIHKPDEKDFLPSEERKKLWGDKKDKFKGYKAKVKSKKLTDKEKEEYRSYLEFQSWNKFERELRLVRNQDIVTWLLCTELIDKMKVEGLNVEELQKLRLKDIDTDTAKQEKNNILNRIMPMQLPVTVYEIDDSHNIVKDRPLHTVYIEETKTKLLKQGNFKALVKDRRLNGLFSFVDTSSKAELKDKPISKSVVEYELGEYQNARIETIKDMLLLEKTLIKKYEKLPTDNFSDMLNGWLEGKDESDKARFQNDVKLLVAVRNAFSHNQYPMRNRIAFANINPFSLSSADISEEKKLDIANQLKDKTHKIIKKIIEIEKPIETKE

SEQ ID NO: 2192 - protein, 1137 aa, Artificial; identical to SEQ ID NO: 2170
  Synthetic

SEQ ID NO: 2193 - protein, 1146 aa, Artificial; identical to SEQ ID NO: 1461
  Synthetic

SEQ ID NO: 2194 - protein, 1148 aa, Artificial
  Synthetic
MNNNILEQSTSGSEKRASTRTLEADPQYFGVYINMARHNVFQIINALTHKFSKQIENAKPINDDENIANDYLINIGKGTDKSPTIIEVLNPAHPLHRLYGEHVFRALKRYLPLVTIFEVPSINTEDIIKDTDDILPVLFQDLYEFITLLFYELVKFRDAYTHALALDEQGNIVPRKIDLHPNLRHYFEHLFYKAPDYTLRRFRSTQEKIAHGFHEKDFALLKAHNLYQDPHSNELTTQGLFFFTTLFLEQKYAYQFLKRFNGFKNETIQPFKATLRVFTAFTVKLPNDKLASDHPGQSFLLDMLNELNKIPQSLFKHLTPKDQEMFERINDEALTNILKNTDEASFKDVDDLLGKMAPLIRREDRFPYFALWFLEQTKAFNHIRFQISIGKIAYSPYDKTIIGETSPRIIKFDIHGFGSLAEFSDEDTLLTTLKRQLPAGSPHASLTFSQYAPHYHIKNNKIGILVDYPSGDRPLSNITQQPDGKIKVNHIKPTAFISINELPKLVVLALLGTNKDNKPIGNDIERLIRSFITKFKNQLFHLAPLTKIKNGLTFSPETFTRRMDKDKMVKGRIPKSELAKREEYKIYLEKRKAVLQGTTDLKLNVNQLPTKIQNYLLNIDEVSDEKSIHLRIKTMIKEVEYRLKKIDRNKLPKVGDIATYIARDMLDMVADVRTKSRITSAYYSQIQRALAYFALDKTRLIDLCDELGLFNHQTGHVFLIREIFLNNHHILGVYREYLTKKQNWIDQNLIVKIQERGKRLTKYILPTNRPLPYKMKQSINKGFEFNAWLQHKSTMPIDLPTTLFDESLTSLLKKTIAQKLGIASKSEDKFGRLLDRLLKQDTQPFYKFERIYRKPFSQEEPEPFNILKLTHTALKQRFGKPAEVNEKIIRHHQRKDQIVRLMCEHLFKNNSELAFEGEFLLENLHPASRNNPLDAPMVFEQTIPHTHKKIVAQDSNKWIQEVKKTNNRNKAWYRWTLKDFGTFRKIIHDRRLPALVNSITGDEIDFDLVQFELAAYDRARETIFDQLFLLEQFIADKDMSYIKQHKAIERMQDGKGFDEVQFNTYADWLSDKGLLTPDEINGLKEIRNRFSHNQWPGISKLGIQPISQEQQSAFVTHLNIKGWVNEHHTPLAMFMEKLVINWVSKAIT

SEQ ID NO: 2195 - protein, 1146 aa, Artificial; identical to SEQ ID NO: 1461
  Synthetic

SEQ ID NO: 2196 - protein, 1147 aa, Artificial
  Synthetic
MEIAPQQSETQKKKRSLDQDPQYFGAYLNMARHNVFLIVNHLTDTFKELNFKKLANEEDIWKVDNSSNILLNVFDVTQSKYEDFRPRIFHYLIKRHHLPLVKIFNTEYLGENILQDKSVDYERLHQFLCLSFKELTEFRDSYSHSIAIDENGNKVSRKTTLANELVPEINLLFKYAPRYSFLRNYQTLNEGDFQHLDNYQLFVADNQLTHQGRFFFINLFLERSYGIKFLKRFRGFKNENTPPFKATIQSFTTYCLKVPDIRLGNENPKQSLLLDMLTELNKCPKELFNHLTEDDKKEFEPNLDETSSTNVLLNSTNYEFFDADEVEEAIRELTAQKRHNDRFPYLALRFLDETMAFSQLRFQLSLGKLIIKKPYQKTILGQPNDRIITKKLNVFGRISDFLNREKEIIRALSNDQNVDFLEFEQFFPHYNINNNKIAFYFLNDSDLTEENLESRLRDQENRQPTGFLSIHDLPKLVLLHLLAPSEVQKTLQRFINDNNPAFFDLELLSNIKSKVVYEPSNFTKRSEHQYRDADKQEEETEKQQEYQTLLNQRKRLLEQHLPKGVKINQIPEKVLDFLMNISEPNENKVIHQKIKSIKDEAKTLLQRVKNKQAANEIPKLGELATFLTRDIINMVVSEELKKKITSPYSNKLQNKIAFFSLSKQEIISLLNELQLLNNEKGHVFLSSRLILESNGLLSFYKSYLEAKIAWIDKNLFLKGKKGGYIIPENKPVPKTLQKIKQEVSQFDFTQWLQNKAAMPIDVPNTIFDVTLENLLKTNLKKRGITVKDTDKFSVLLNKYMDKDTQPFYQYSRVYKKQDEEESVQVVGKWGKTLKKQYGKFVEENEKVIRFYQSKDRVIKLMCNALLQAENKTALTDSFKLAHTHPNSKQNPLDTPMRFEQKLFSNDKETKVLCTIYAQDTENQKNEILAWNSLSEDDKKYWLTLTTKEAQKEWLSGKPETEQEVYHGQKGYQWTIKEVGKFKRFVKDRRIPALVNYFETTKLPFSLLEYQLKEYDRVREQIFDGVFKLEEAISQKDWAGIWALEQEARGRKNYHQVQFNIFEKYLQNTLPSYDPAIGVIRNKFSHNEFPDLIGQGIEKISQAQIDDYERNKHLKDYLAHAGISIAQQILVIFEQKINDTLTQLTTHG

SEQ ID NO: 2197 - protein, 1090 aa, Artificial
  Synthetic
MMTQQKTLPEKRMDALADLHINPTHKLRKDESPYFLLYLNYAVNNICDITGIDQSINQEFRACQEIKQKGTAVIRKLANFFWLFQAEDPMRDFPDYEEKTLMIVEKIYALRNYFAHLEQNGSGPLVVTRDFYVFVEGCLAGKAKERIMRPGIRMDKLFKMKLFAQHDRTQQTYDFTRKGLIFLICLALYRDDAMEFTQCLEDMKLPACPKNSVSLEDCMTLCSEENASVCKPGSARAFIEFFTCYSARRGRSVNFLTEDSSDSGKIHSCLSYLSFADIIGYLNKVPPAAMDYLSLESENARLALEKSQSTESEENKEFKYKLHKRFRDRFLSFAASWCEDFDAFPCMKFKRLDISESEGRKRYVFGKENDNRVHMDRHYQIKDNAIRFAWVPEKHYGEIHIDSLRSAVTAGTMKQLLFAKLNGDKNVETMVDKYFTAYHRILETVVNTKDPNDLYLEGTLLDDFITVSGCSREDVMQDVNLLLPFFPKNLIRFFSGDESKPDTDELAETLYSRIRSDWDRAADFINRLNVKNTWLKKLKNLREKDADAKLPPPVCSPEDVKNPPRSCNISDGTMIAWVFRYFNLFLDDSQKFRQLPRGMQHRSEVKDHEYQLVHAMIGKYSMDPKALQSYIHNRRPELLPALLDLKKELKTFQSPSRKSGRNVRGYRPMMHSLSDLAKAAANCYINYCEEKLKKLEEGNLPPEGILALCKKFHVRTGLPYDRTSLLKTVLHIDLGKWSSAFDYERKRPYENRTLQEEGHIVSQIPFPADFTQRVMQQTKDERWKKLLHPETGIFDFNKAFSSLKLEILPRDFYDVKPLIEACEAARSGKSVSGIAGLNASTPEKPLDFSRAGINRAIREIKETGNQDRILANLALKYWLEFRKTSAFECKLGTTPDFAAGFPVNEFFKAEVTIKFEKGDRKIRIMPNDINRPILAQIQRYASAIADSMEEGKTEKSQIFDFRDMLVAYRKIQADDARKRKEIIPLLRKFESSVVIPQERYDIKAEDQAEKSAAIRRMEFEFYRKKYPKLTFKEYNTLADVRNQVFHRGFRLETGAAIEILKAYSPSEKPKTENGNVYRNFFRNRYSRGKW

SEQ ID NO: 2198 - protein, 1226 aa, Artificial
  Synthetic
MSSKNESYNKQKTFNHYKQEDKYFFGGFLNNADDNLRQVGKEFKTRINFNHNNNELASVFKDYFNKEKSVAKREHALNLLSNYFPVLERIQKHTNHNFEQTREIFELLLDTIKKLRDYYTHHYHKPITINPKIYDFLDDTLLDVLITIKKKKVKNDTSRELLKEKLRPELTQLKNQKREELIKKGKKLLEENLENAVFNHCLIPFLEENKTDDKQNKTVSLRKYRKSKPNEETSITLTQSGLVFLMSFFLHRKEFQVFTSGLEGFKAKVNTIKEEEISLNKNNIVYMITHWSYSYYNFKGLKHRIKTDQGVSTLEQNNTTHSLTNTNTKEALLTQIVDYLSKVPNEIYETLSEKQQKEFEEDINEYMRENPENEDSTFSSIVSHKVIRKRYENKFNYFAMRFLDEYAELPTLRFMVNFGDYIKDRQKKILESIQFDSERIIKKEIHLFEKLGLVTEYKKNVYLKETSNIDLSRFPLFPNPSYVMANNNIPFYIDSRSNNLDEYLNQKKKAQSQNRKRNLTFEKYNKEQSKDAIIAMLQKEIGVKDLQQRSTIGLLSCNELPSMLYEVIVKDIKGAELENKIAQKIREQYQSIRDFTLDSPQKDNIPTTLIKTINTDSSVTFENQPIDIPRLKNAIQKELALTQEKLLNVKEHEIEVDNYNRNKNTYKFKNQPKNKVDDKKLQRKYVFYRNEIRQEANWLASDLIHFMKNKSLWKGYMHNELQSFLAFFEDKKNDCIALLETVFNLKEDCILTKGLKNLFLKHGNFIDFYKEYLKLKEDFLNTESTFLENGFIGLPPKILKKELSKRLKYIFIVFQKRQFIIKELEEKKNNLYADAINLSRGIFDEKPTMIPFKKPNPDEFASWFVASYQYNNYQSFYELTPDIVERDKKKKYKNLRAINKVKIQDYYLKLMVDTLYQDLFNQPLDKSLSDFYVSKAEREKIKADAKAYQKRNDSSLWNKVIHLSLQNNRITANPKLKDIGKYKRALQDEKIATLLTYDARTWTYALQKPEKENENDYKELHYTALNMELQEYEKVRSKELLKQVQELEKKILDKFYDFSNNASHPEDLEIEDKKGKRHPNFKLYITKALLKNESEIINLENIDIEILLKYYDYNTEELKEKIKNMDEDEKAKIINTKENYNKITNVLIKKALVLIIIRNKMAHNQYPPKFIYDLATSFQNDKRNKDWEKFVHQKESEYFATYFNRVFETITKELWENKEKKDKTQV

SEQ ID NO: 2199 - protein, 1331 aa, Artificial
  Synthetic
MGKDNKKYQAKGQDQKPRQTKKVRRIQSKDFRISLTGKHVFGAYFNMARTNFVKTINYVLPIAGVRGNYSENQINKMLQALFLIQSNRSAELTQEQQQWKKKLTLTSEQQTRLQRLLFKHFPVLGPMMADVADHKAYLNKKKSKVQTEDEAFEQLRGVSLADCLEILVLMGMTLTECRNFYTHRRPYNSPSELAGQYSHQATIAKKLDKVVVASRRILKDREGLSVNEIEFLTGIDHMEQVDVLDENGKPKMVNGKKMKSFKEYDDFYFTLWAKRDVKNITMTGSDGHPTTIDTKLPALSDFGLLYFCVLFLSKPYAKLFMDEARLFEFSPFTGQENIIMQEMLCIYRIRTPQLHRIDSRDSKATLAMDIFGELRRCPTELYDLLDKTAGQPFFHDVVKRPNAFTPEVSKRLRYTDRFPQLALRYIDQNDLFKRIRFQLQLGAFRYKFYDKTDCVDGRVRVRRIQKDINGYGRPQEVNEKRFKTWEGLIQKREERSVKLEHEELYIDLDQFQQDTAASTPYVTDRRPSYNIHANRIGMYWEESQNPNQFKYFDEKKIYIPELKVTEDGKAPIEMPVPRCSLSVYDLAGMLFYEYLLKRSDSKYPSAEQIIIDCESDYHRFFSAVADGTLKPFAKQKELCDYLATNYPNLRLADIPEKLLLFLSGKGLTHNNMPETARQRLVRLTIEHLEEREQRVQRRLDHYEEDRKKIGDKENKYGKKGFADVRHGALARYLAQSMMEWQPTKDGMGHDKLTGLNYNVLTAYLATFGAPQPADEPDFAPLSLQEVLAKAHLIGGSNPHPFLPKVLSHTITVNRQTDRKMTVEPRNIEEFYLFYLEEELKHIRSRMQSLKTNASDKALASLPFVHHDRMRFRERTAEEMKALASRYTTIQLPDGLFTPHILKLLRAEYADNEALQQALNLQMPNQLNPVNNAAYLITLFYQTVLHDDAQPFYMSAKAYTRQNADNKTETFSFKRAYELFTILADDKENFFPFELKPLFLTSDDIQARISAKVKDETGDPIAKIGKRGKKEKDSQGNIIWLREITEKIDVYVDSRTDKDLKISANQSRKEKEAEREQKREALRLRLNRMVREVKDNERTLRRFKTQDMVLFLMAKDMFTNILSDQEREVNWKHLRLSKVCNEAFLRQTLTFLIPVTIGDVTIYVEQENMSLKNYGEFYRFLTDDRLTSLLENIVGDLEPDQQGRLVIRHTDLMSELAAYDQKRSTVFKLIQQIEALIIKSNDALSNPASPDFWAKPGLPKRNNFASLLELIDHLNQTALTTEERTLLVAIRNAFSHNSYNLDLTQIAGVKHLPEVANSILKHLETIMGETQK

SEQ ID NO: 2200 - protein, 1160 aa, Artificial
  Synthetic
MEQKQLESRFNQIFNNKGHTGPIAEKAVKNFETIRQHKVSPRERLHYFAVGHALRNIDKDLKESIFEYNLDEEQKKQKPTQFTTLQSDFFRFENALLTLLKDIRNCNGHYVHTFDKLQLDEILKLQEKNKEHGILNKDAGCQIIEFLKEAFEFSILIQFLKEKPKEYEKFKKRKNENKNQSLRNLIGGYEKKLVKYLCDKFFPNEEKQKEIRDKFIEHNLEEAIEDLLFIPVDEDIEWKLGEEHVVFVIKKGKYLSFYAQLFLLSMFLYKQEANQLISKIRGFKRSEDEFQYKRNIFTFFSKKVSSQDIHSEEKHLIYFRDIIQYLNRFPTAWNEYLSPERKNLPMTKLLEKYILEEEIFRTFSTYKNDCNRELFLKYTIKRLFCKKAELFDAEKISIDDNLRKKFNYEIDTSPELKNIHEKLKGKLKPKDYYKNIKRKEELEKEENPEKLKLTKKVTEEKLFTAYGRNRDRFMDFAVRYLAEQNYFGKDAEFKMYMFETTNEQENYLKEQKNTADKKVIDQNKYHQGRLTCFKTYQKHKDDYQNWDDPFVFQNNAFQIILTFSNGERKKFSIQRKLLIYLLEDALFNHSDSIEDKGKQLLEDYFFNTLMPDFEDAKESYKTSDDVNWKHRKLLPKRLIYTVHPPRRTDSEEQIHPFEKILRETQEQERRYRLLLGKAKNMKLKEEFIKRNKGKHFKLRFIRKAWHLMYFREIYERRAKEHSHHKSFHITRDEINDFSRWMYAFDEVPPYKVYLRNMLQRKKFMENEEFAELFEKGKSLDDFYRITKKEFSKRIKNNLFQLKVDSERQYAEILSKKLVYINLSHFIKYLNAKGKLTVENGIIQYKASTNKKYLIDEYYYTEVLPREEYKVHKHLFNKLRATKLEDALLYELAMKYLREDNDIVEKAKSKVSDIQSSEISFDIKDYYGNHLYTLIVPFNKLETLSILIRYKTKQEKNSKLQRTSFLGNIYHLLAFLDKNYKQLSKYKDDGGFKKIVKNFKNKKRLSFVELNTINGYIISGAVKFSKVHMELERYFINKHKIKANHIYIDLEDIKDDSNKQVFGNYYDSKLRIRNKAFHFGVPTNFFFNIEIEKIEKKFILEEVKLQNVSSFDKLNQNAKSVCRVFMEVLHSDLYRRDKNKSKEELRREFEEKYFNEIITTV

SEQ ID NO: 2201 - protein, 1232 aa, Artificial
  Synthetic
MTTTSLNNARLALYLNQAEHNAFMIIKEVFRKMDADKQNYVDGEIGLAKKFYKIAHGYYDKRLELQRMLELLQFYFPFMEMLAKDAPDPEKAQIEKLTLMLIVLNTFRNHYSHYTTHPSILHDGFLKRDFKKDKNGDPNADFHGVLLYDKEGKEKHFNGRNILFEVRKATNTLYKKAVEEKMRVEYFKHSDENRSTSKKDYKYIDKLNEIETIFLPLLKIEKRADGNENKEVPELSQLFKTTREDRKDTAGKVIRDEKTGKARPYFKIEKINSDGLLYFICLFLNSGDANRLISGTTGFKRNDDLVWESKRLAFRHFCCKPPHSRLRSISMTDDSLLLDIIGELQKCPAEIYPLLDDEYRQKFRFGTDVYLNNNEEKVENESLQKRYENRFPYLALRYLDSLNLPNLRFQLTLGKVNMKKYEKRFMDEIIDRQLQKEVKVFDRLCNYPYENDVDENGIITRQAVSKLIEESLKGTSLDKNSLLLNEWEEDGILSNNWQHFAPHYNFENNTIALSLMPHTFKHFCATAATNKFGLPHLKQPDAVLGIYELPQLVWFAMQNEKNPKKIESFIERTIDTYKKEFNTGIELKGKDNPELYKYDYPKPIYAILTNKRLKPLDKVKGITEALLAENSEIMERAEKWLQIAKEKAAASKISKGKTNKHTIIPKGKRGTIATWIAKDIIWLCPPEVRMHIGQAFANALQENLAIYSVEKLKGLFNYSGENTGRAWPRTIKAAHPFLYEKTGARDNLFDFYQEYITCRAAFFKEQADLALTGLNKTRFPDLLGISADIKSLANYLKPFKTDGQETLTVNLAKGGFNGEIAKIAAGRQANQNVSGQGAFSFNFMLAGLQPQTQEFYSYPRLYKRFENGEEQEGYIFTDLAAAKRTASKNLFKIINQTEKQIRQRQAEDRMLFLMTKQLSGKLFREDIFLDNNLGDFFNANVWEKRRLFEFSIAANLPRIRAEVRLKDAGSFTKFLADHRLKPLLAYYDLPAVDYMYQLPAGEEAKAERIKNNQYYFDKDYRPNIKDEVQFFEEVREVMFAEGLAFERYVLEWADQNGQLNNFNTFYAKNGYSNHRQDYLLPIAQVLIPGTIKEDFKTPEVLAHPPAQLLMLSIMTEIRNKTSHNEFFKRIWKQLFTDNILDIDAKRDEFIAFGEKSLESYYSVEEQNSRSVNLSAEAKVKRSLDTRERTAISIRFFKDFCEGRQTAFVAEWWLVAYRYMINKIKEELIIKSV

SEQ ID NO: 2202 - protein, 1127 aa, Artificial
  Synthetic
LQKQDKLFVDRKKNAIFAFPKYITIMENKKKPEPIYYELTDKHFWAAFLNLARHNVYTTVNHINKLLEIAELKNDEDVLNIKDSWNKQAEKLDKKVRLRNLLMRHFPFLEAAAYEKTTSKDSNSKEQKEKEQAEALSLDNLKNVLFIFLEKLQSLRNYYSHYKYSEEAQKPTFENDLLKNMYKVFDANVRLVKRDYMHHENIDMQRDFTHLNRKKQVGRTKNIIDSPNFHYHFADKEGNMTIAGLLFFVSLFLDKKDAIWMQKKLKGFKDGRNLREQMTNEVFCRSRISLPKLKLETVQTREWMQLDMLNELIRCPKSLYERLREEDRESFKVPFDIFSDDYNAEEEPFKNTLVRHQDRFPYFVLRYFDLNEIFTQLRFQIDLGTYHFSIYNKRIGDEDEVRHLTHHLYGFAHIQDFAQQNQPEVWKKLVKDLDYFEASQEPYISKTTPHYHLENEKIGIKFCSAHNNLFPSLQTDKTCNGRSKFNLGTQFTAEAFLSVHELLPMMFYYLLLTKDYSRKESADKVEGIIRKEISNIYAIYDAFANNEINSIADLTRRLQNTNILQGHLPKQMISILEGRQKDMEKEAERKIGEMIDDTQRRLDLLCKQTNQKIRIGKRNAGLLKSGKIADWLVSDMMRFQPVQKDTNNAPINNSKANSTEYRMLQHALALFGSESSRLKAYFRQMNLVGNANPHPFLAETQWEHQTNILSFYRNYLEARKKYLKGLKPQNWKQYQYFLILKVQKTNRNTLVTGWKNSFNLPRGIFTQPIREWFEKHNNSKRIYDQILSFDRVGFVAKAIPLYFAEEYKDNVQPFYDYPFNIGNKLKPQKGQFLDKKERVELWQKNKELFKNYPSEKKKTDLAYLDFLSWKKFERELRLIKNQDIVTWLMFKELFNMATVEGLKIGEIHLRDIDTNTAKAESNNILNRIMPMKLPVKTYETDNKGNILKERPLATFYIEETETKVLKQGNFKVLAKDRRLNGLLSFAETTDIDLEKNPITKLSVDHELIKYQTTRISIFEMTLGLEKKLIDKYSTLPTDSFRNMLERWLQCKANRPELKNYVNSLIAVRNAFSHNQYPMYDATLFAEVKKFTLFPSVDTKKIELNIAPQLLEIVGKAIKEIEKSENKN

SEQ ID NO: 2203 - protein, 1155 aa, Artificial
  Synthetic
MDNNTTLEKTELGLGITYNHDKVEDKHYFGGFFNLAQNNIDLVAQEFKKRLLVQGKDSINIFSNYFSDQCSITNLERGIKVLSEYFPVIFYFDLDENNKSKSIRQHIILLLDTINNLRNYYTHYYHKKVIIDDALYPLLDTILLKVVLEIKKKKLKEDKTKQLLKKGLEKEMAILFNLMKKEQKEKKIKGWNIDKNIKGAVLNRAFSHLLYNDGISDYRKSKSNTEDENLKDTLSESGILFLLSFFLNKKEQEQLKANIKGYKGKIASIPDEEITLKNNSLRNMATHWTYSHLTYKGLKHRIKTDHEKETLLVNMVDYLSKVPNEIYQNLSEQNKSLFLEDINEYMRDNEENNDSSEASRVIHPVIRKRYENKFAYFAIRFLDEFAEFPTLRFMVNVGNYIHDNRKKDIGGTSLITNRTIKQQINVFGNLTEIHKKKNDYFEKEENKEKILEWELFPNPSYHFQKENIPIFIDLEKSKETNELAKEYAKEKKKIFGSSRKKQQNTAKKNREAIINLVFDKYKTSDRKTVTFEQPTALLSFNELNAFLYAFLVENKTGKELEKIIIEKIANQYQILKNCSSTVDKTNDSIPKSIKKIAHPTTDSFYSEGKKIDIEKLERDIKIEIEKTNEKLETIKENETSAKNYKRNERDIQKRKLYRKYVFFTNEIGIEATWITNDILRFLDNKENWKGYQHSELQKFISQYDNYKKEALGLLESEWNLESEAFFGQKLKRIFQSNFTFETFYKKYLDNRKDTLETYLSAIENLKTMTDVPPKILKKSWAELFRFFDKKIYLLSTIETKINELITKPINLSRGVFDEKPTFINGKSPNKENDQHLFANWFIHAKEQTIFQDFYNLALETPKEINNLKKQNYKLERSINNLKIEDIYIKQMVDFLYQKLFEQSFKGSLQDLYTSKEKREVEKSKAKNEQTPDESFIWKKQVEINALNGRIIAKTKIKDIGKFKNLLTDNKITHLISYDNRIWNFSLDNDGDTTKKLYSLNTELESYERIRREKLLKQIQEFEQFLLKQETEYSAERKHPEKFEKDGNPNFKKYIIEGMLNKITPVNEIEELEILKSKEDVFKIDFNEIVKLNNESIKKGYLLIMIRNKFAHNQLIDKNLFTFSLQLYSKNENENFSEYLDKVCQKIIQEFIEKLK

SEQ ID NO: 2204 - protein, 1193 aa, Artificial
  Synthetic
  misc_feature (348)..(348): Xaa can be any naturally occurring amino acid
  misc_feature (365)..(365): Xaa can be any naturally occurring amino acid
MESTVNAKRISYDYKNQEDKHYFGGFLNLAQNNIEETIEALGIRNQVFKKEDSNKKNKSRPAEIIAKVFQIDLKKRKTKDDGSGITYAQWESNVNFLKQYLPIVQFLNLPVSHKKFDHLPKAKKEKAKRDYFIGNFLLLIDIIGSLRHYYTHYHHKQISIEPELFTLLDEIFLHTCLVVKKRKMKSEKTRELLKRELEREVDILKKLKLAALKKQKEDGVRVSLDDEHVERAVLNESFNYLLAKRDNVYKVQPTHCSRGEDGTPFSRSGLVFLVSMFLTKKQGEDFRSRIKGFKEKIVKREENAISPTNNSLRFMATHWVFSYWSYKGFKAKLNTTFSKEVLELKGIXHRLNTTVISKEALLAQXVDELSKVPDEVYEVLSLDKRNEFLEDVNEYIRETREVETLDKSIVEHSVIRKRYESKFGYLALRYLDEFVDFPSLRFQVRLGNYVHDSRTKVIEGTKLVTERQIKEPINVFGKLSKVKELKTQFFLSSDDEENSMEIFPNPSYCFVENNIPIIFSVEGNVKANSIYNKIKLKIRTQRNKDEKRVDRSGRKFPKSRIFSIVNSKWDKSESKKVKLAEPMALLSFNELPSLLYELLHKKKTPQAIEDAIVEKYVEQFEAIENFDSQSTVQKSRIPKKMKKSDKIGKLDYEKLVKDIDRSLAETKEKRKLLLQKQKDAKENNKQTLSSSELGQEAVWLSDDIKRLMPRSSRKEWKGRHHSHLQYTLAFYDVRKKEALALLENFWDMDKDPYWGEKLKNEFNANNTFEYFYFSYLNLREGILSTFLDQIEEYKDQPGNLKKALKDIGIVFQMRKYRIKPLEDQKTALLAKPILLPRGIFDPKPTFIKKKRMDEFPDEFAEWYTYANAPERQFQRFYAMERDYQELWKTEKDTDPDFKQNKKGISEEQQIALFKMKQDLKIKKIKTQDLFLKLIAEQLYLDVFGHKATFSLSDMYQTKEERREIERLSAKQSNRAQGDKSDNIVSENYIWNKTVGFKDQQLEEPCVKLKDIGKIRRFVNNEKVQKLFAYNLDRIWTKRELEDELEMKPSSYEVIRREKLLKEVQNLEKYILKQYGFDNENHPSIFERDGNPNFNEYVVQGILKKKNLVSEDECDWFSKQKIEKIKLDTLRQKSDILIKAYILILIRNTFAHNQLPDKECVDLMQEFCQKDPGISYSEYFLYVFQQIAKEFTNA

SEQ ID NO: 2205 - protein, 1003 aa, Artificial
  Synthetic
MGAIENKHIFAAYANLAIDGLIKTLNFIAKKLDTQKQLSSWDIKHVITLIDSIFDQNPQNNLEQVVEGYLPWIKPIIEMKTPKKGERQSDKLCIEYKTIITAFASLLNDVRNYYTHYYHDPICIYPGGYDIPSSLNCIYDSAINIIKERFQAEEKEMEHLRRYTRKKGRVVLKTEDDHFYYTLANNNDLSEKGYAFFISMFLERKYSYLFLKKLSGFKRGDSLQYRLTLEVFTALSTKPPVERLRTTKDTKQDRALDILNELSKIPIELYQTLEPKYREMYNETLQPTVAEDPYGLPDRSRIRFRSRFEAFALHFLDKQADFKEIGFYTYLGNYFHNGYQKTRVDRETKDRYINFQLAGFCKNIQDISAKKLSEALNVKSIDISTDSIPDINSFEPYLVQSTPHYIVNGNNIGIKVLPEGKDTYPTIDEKGAKMPIADFWLSKYELPAMLFYTYLRNNNIHKSHCPLSVKDIIERSIHKSTKQKHPEERSELMLRRVMKAIFWTDSKLNEVERIKSQKSAFGKRQHEILKAGRIAETLVRDMLWLQPSKNNGRDKVTEPNFQAIQVSLAYFGIRRNDLTEIFTRAGLINSSNPHPFLAQIGTNYTSLIEFYIAYLKERKVYFSRIQKKILQGKLNIQCHPLRDLQREPNKPQENEEAIFLPRGLFNEAIINCLKKSKLKHLIESPTREKSPALNVSYLIQNYFRAYFEDQSQEFYAQPRNYRLFDNLSPNKGKSKSYLSLEQRIKKMEELRPSKIPVAEANKLLEKEDRLYRKNYNEICDNESIIRLYQIQDILLFMMTKEYLPSDLYNRINKYKLENVKGILNERVSYLIDLNPLKIQGEDIKIKDYGKLFYIHHDTRISSLNKVLSKVKRNNSISSSVKIQPYENYKRECLDFEEAQIQIIPIIHSFEIAMVSMFPDLKKATPGNYYDFNELITEYEKRTKQKIDSSFLIKTRNMFLHDKYEAECIKEISDDFVYAKKIIAEFKMKIENIKLEDFSNDSSA

SEQ ID NO: 2206 - protein, 1127 aa, Artificial; identical to SEQ ID NO: 1755
  Synthetic

SEQ ID NO: 2207 - protein, 1242 aa, Artificial; identical to SEQ ID NO: 2085
  Synthetic

SEQ ID NO: 2208 - protein, 1003 aa, Artificial; identical to SEQ ID NO: 1510
  Synthetic

SEQ ID NO: 2209 - protein, 1179 aa, Artificial
  Synthetic
MSSKNESYNKQKTFNHYKQEDKYFFGGFLNNADDNLRQVGKEFKTRINFNHNNNELASVFKDYFNKEKSVAKREHALNLLSNYFPVLERIQKHTNHNFEQTREIFELLLDTIKKLRDYYTHHYHKPITINPKIYDFLDDTLLDVLITIKKKKVKNDTSRELLKEKLRPELTQLKNQKREELIKKGKKLLEENLENAVFNHCLRPFLEENKTDDKQNKTVSLRKYRKSKPNEETSITLTQSGLVFLMSFFLHRKEFQVFTSGLEGFKAKVNTIKEEEISLNKNNIVYMITHWSYSYYNFKGLKHRIKTDQGVSTLEQNNTTHSLTNTNTKEALLTQIVDYLSKVPNEIYETLSEKQQKEFEEDINEYMRENPENEDSTFSSIVSHKVIRKRYENKFNYFAMRFLDEYAELPTLRFMVNFGDYIKDRQKKILESIQFDSERIIKKEIHLFEKLGLVTEYKKNVYLKETSNIDLSRFPLFPSPSYVMANNNIPFYIDSKSNNLDEYLNQKKKAQSQNRKRNLTFEKYNKEQSKDAIIAMLQKEIGVKDLQQRSTIGLLSCNELPSMLYEVIVKDIKGAELENKIAQKIREQYQSIRDFTLDSPQKDNIPATLTKTISTDTSVTFENQPIDIPRLKNAIQKELALTQEKLLNVKQHEIEVDNYNRNKNTYKFKNQPKDKVDDNKLQRKYVFYHNEIGQEANWLASDLIHFMKNKSLWKGYMHNELQSLLAFFEDKKNDCIALLETVFNLKEDCILTKDLKNLFLKHGNFIDFYKEYLKLKEDFLSTESTFLENGFIGLPPKILKKELSKRLNYIFIVFQKRQFIIKELEEKKNNLYADAINLSRGIFDEKPTMIPFKKPNPDEFASWFVASYQYNNYQSFYELTPDKIENDKKKKYKNLRAINKVKIQDYYLKLMVDTLYQDLFNQPLDKSLSDFYVSKAEREKIKNDAKAYQKRNDSFLWNKVIHLSLQNNRITANPKLKDIGKYKRALQDEKIATLLTYDDRTWTYALEKPEKEKENDYKELHYTALNMELQEYEKVRSKKLLKQVQQLEKQILEEYTDFSSTQIHPADFEREGNPNFKKYLAHSILANEDEIDKLPEKVEAMMKLDETITNPIIKKAIVLIIIRNKMAHNQYPPKFIYDLATRFVPKKEEEYFACYFNRVFETITTELWENKKKKDKTRV

SEQ ID NO: 2210 - protein, 1214 aa, Artificial; identical to SEQ ID NO: 1575
  Synthetic

SEQ ID NO: 2211 - protein, 909 aa, Artificial
  Synthetic
MKMFYKSVLTAFFTAVDSLRNKYTHYSHKDLNIREIKIECTLGGKDYCIGLLNALDCIYDSAVNLLKLRFMAGEDEVAHLRRCKAVNKKVVVRTEKDGFYYRLSDNGGVTEKGVIFIASMFLNRKYGFLFLKQLEGFKRSDEKRYRLTLEAFLAFSNIKPVDRLKSDKLDRASLGLDMLNELTKIPKELSETLSVDCLYKYLASDGEDDLRSRIRYQDRFVPLALEFISQSDEFKDFRFYTYVGNYVYKGYIKRLIDGTDKERYLSDRLCGFYKSVNDASSDAIAQKYGVEIKDSNEPDYMLPDSFRPHVLRATPHFVINTNNIGIKICGNDCLPIVNGKGVESPEPDYWLSIYELPAMLFYAYLREKNGKRFKDYKSIRELIEGVEKKADEKNDRDKGALMARHIDKEIIWTQTKLDEVKRLEEKKVAAYGKKGRVVLKAGRMADLLAHDMVRLQPATKGSDKITGANFQALQVSLAYFKRDILADVFSRAMLTTGNHRHPFLYRIDVSHCSSLRDFYVAYLGERRKYFEDVAKKIAKNKLNTPCHILRRLQREGSGEEAGKDVKPKFLPRGIFTDSIKNCLEQSKLNIYIRNARNDVKPAINAAYLILMYYKEIEKGEFQGFYGEKRRYDILEEGKPLDLAERKKALASIKPAKIDVSEANMPMSKEEHLMRKRYHAVCNNESAIRMYQVQDILLLLMAKDIFKKALSEGVMSKKIGLENLNGIFDAPVNFVKNFDNIKLTATGIKIKDYGKVCRLGTDFKFNSLIKAFHKVYSKSVEMDYSDYLKEEEEFEKYRLNMVKLCREVERGITEDLHLSLDGKSHLSFNDDVIKPYNDKYNVFNGGDLTFFINARNMFMHGDYKYECVKYVVSEHFKGSLNDVSFAKETYGHFCNLLESMRKKTGLRIDI

SEQ ID NO: 2212 - protein, 1127 aa, Artificial; identical to SEQ ID NO: 2008
  Synthetic

SEQ ID NO: 2213 - protein, 1146 aa, Artificial; identical to SEQ ID NO: 1461
  Synthetic

SEQ ID NO: 2214 - protein, 1220 aa, Artificial; identical to SEQ ID NO: 1568
  Synthetic

SEQ ID NO: 2215 - protein, 1127 aa, Artificial; identical to SEQ ID NO: 2008
  Synthetic

SEQ ID NO: 2216 - protein, 1160 aa, Artificial
  Synthetic
  misc_feature (223)..(224): Xaa can be any naturally occurring amino acid
  misc_feature (228)..(228): Xaa can be any naturally occurring amino acid
  misc_feature (263)..(263): Xaa can be any naturally occurring amino acid
  misc_feature (267)..(267): Xaa can be any naturally occurring amino acid
  misc_feature (274)..(274): Xaa can be any naturally occurring amino acid
  misc_feature (288)..(288): Xaa can be any naturally occurring amino acid
  misc_feature (312)..(312): Xaa can be any naturally occurring amino acid
MKNEILTNSKSLKSNPDYFSAYLNMARHNAYLILSHISDKLKPKKTNTPEDALHSAYALEVLKSSKEPDITAKSIKMLNEHFPFLKVMFDTNSITEKSKGSKGIYSEKLPEQYLDKMMLLLDHLNNYRNSYTHCVHIPIINDKNFIYCLNNIFDASVRTVKDRFEFSENDVSHLRRYEQVFDPETKKRKASRKKDFKYNFIDNDDISEKGIAFFIALFLEKKXXFEFXKKLSDFKDSRTKMMQATLESYCVYHIRLPKERIEXTQNXLSLCLDXFNELKKCPSELFDXLKKEDAEKFRIKPDINNLNDEDSXNIVENSTDDYNVEPILKRYSNRFPYLAMRYIDEKKVFQKLRFHVDLGNYYFKFYPKTTVDGEKRDRSLKVHLNSFGRLDDLNHARLVEWNDLIRFHKEEEDENPIEELMPYITDTYPHYHLHNNQIGLKDTQNNPDKLLPKIEREKTKTEQPDFWLSTYELPALLFYSYLLKKKRDISAEDLILNCRKKYHTLFKLISEGNGPEIKECQVTIKQKGKNISVFLLTAHFEDETGKSHEIELNDLPQVFQNYLTDKQLHNREELAENKINRLIIETERRREKINKDLERINGLKGNKRGKKNFVEIKSGMLADFLAKDTIRLQPSIDAIGKDKITGLNFQILQSHLAFYGRDFLMLKDIFRQCKLVDAQISHPFLYKLNPEDHFDIVSFYKAYLGERKKYLEQCNRNKDYKSYYFLKFNSQKFTTETIEYCKDLAKKLMNTHSQDNHPINLPRGMFMDAIIDWFKKHGDPQLQAIAKTERVNAVYLIQKFFEFKKDSNQPFYDYPRSYDFIDKLENFNNMRCGRPLLLQRKYYSIQQLADKIDDVKTRITKLPESEPNDSHPRKRMLATLSDYKQNEKLLRLYKTQDRILFLVASDILFAQKPQGLEENDLKLSNVKPKPENDSDEDLLSSQLPFRFPYQYWDVTSKGEIDHKNKIGEVIIFQKKLKLKNYGDFIRYTKDRRLNNLFHWTGDIELEMPVLQKELERYEEARLTVFRLIHDFEKAMYEKHHLFFDELLKTNKLKKENENENSYINHEEMLEKFFSDYPELIHYEDVMLTIRNCFSHNQYPVKCAFDNIDSIGLFEGCPDIESDHDNELNIAMRIKNHAIATYGEFIKILTNLTPIHDINVS

SEQ ID NO: 2217 - protein, 1145 aa, Artificial; identical to SEQ ID NO: 1631
  Synthetic

SEQ ID NO: 2218 - protein, 1274 aa, Artificial
  Synthetic
METPNKTSTSAYKDLQNDPYYFSHFINMGRHNAYLIIHYIYKCVYKEELNLIESNLYQFSSKVKANSKKNPDELTKVIRLLLLHFPFLAYYDNAEREKRDERVVGRSNDGNWNKKVKERPYLSDKNTVSSNSEKASEKATSESHICLERLSQFLIVLNNLRNETSHYKHPKKSTLLPDFQKMYQSGIKEAQRRMNYEDKDIQHLFKDPHYKLIETQKQTETVGLTKFNGQKKVNRQPQVNGQTGTDKLAKVDKLTGFDKLTEVDELQDLDELTEIGIYYFICLFLDKKNGYLLLSRIRGFKDRNRTSEKYKSATLEAFTQFHCLVPNPKLESSNIAMDMLNELNRCPRQLYQVLSQDDKEKFVATDTEKEEDSDEVPEPIMKRSEDRFPYFALRYFEEMSRLGLSGTLDQITFQLFLGRKHDQEPHTKILNGTQRTHSLLKNMHVFGKLPFYQKEEAYQFYEGNEEVEFYAPAYRIVGNRIGLVLKDIHPHYTIPKSDGNYKNGNCKNGNCKNENCPDAILSTHELSALFFYNFLHKKGWIDTPTHQFIRDYLDRFRRFINDLQSGKIEPVNENQSIKKSKRHDDRELAKISQRSNQLQKLLDQYGLKVSWLPDACREYLLNYQVPSHKWMVKDKFVSMKKDAERKLKRLTSFKEKCTERGHGHSEEIKTISLKNKQIRIGELAQELARDLVFLTPPQTAQNSDAKKKINNLEFDILQKMLAYFPSYKDELKPFLEILKEKDNRWKHPFLGKIVTRKYSSCSSLTDLYKAYYEQKIDWIDTEILKRSTNRDRKTTVSLRREAEEIASQYEYILKLDRKTKPATEKIYSEEAVYLPTGLFEESIVRAIKQHSTELGIDIKSGSNVAGCLMAYCNNVKQPMYSLPRYYNAKELGYKDAVLRDEIKEKISEFFSKQSKKNVRMTPTDKKVLHEKENEMKNLAKRIKENEAEILRQQNNDRALFLMVNDLLPASLKGDPTRPGDEITELGRLGFDQQHNMLDREYEMCETIYGRKVTAVLPIKRYGEFRRFLKDRRLENLLKYYPEGAEIRLGAMRSGCTQQKGEKFKDSNLSEEIEIYDMERDKLLKLIYDFEKLLIDHYADEITKTKDQYYNHTNCLIAAQKLGINIDPELLLEEEEMENEIKVADQNRDQNRDKDGNKNDVRPFEEKPNSCSEGNDKGYLCYENREKESVSPENDSKQVANQSNGKKGNNCNLGELRRKLIHNEIPYEPWIEKEINKRKDEPMITKRIVCLVSDIYSQLVESLQAMVDQNEGKQW

SEQ ID NO: 2219 - protein, 1126 aa, Artificial; identical to SEQ ID NO: 1756
  Synthetic

SEQ ID NO: 2220 - protein, 909 aa, Artificial; identical to SEQ ID NO: 2211
  Synthetic

SEQ ID NO: 2221 - protein, 1003 aa, Artificial; identical to SEQ ID NO: 1494
  Synthetic

SEQ ID NO: 2222 - protein, 1179 aa, Artificial; identical to SEQ ID NO: 2209
  Synthetic

SEQ ID NO: 2223 - protein, 1138 aa, Artificial
  Synthetic
MKNQSTLPSNPTDILKDKPFWAAFFNLARHNVYLTVNHINKLLDLEKLYNKDKHKEIFEHEDIFNISDDVMNDANSNGKKRKLDIKKIWDDLDTDLTRKYQLRELILKHFPFIQPAIIGAQTKERTTIDKDKRSTSTSNDSLKQTGEGDINDPLSLSNVKSMFFCLLQMLEQLRNYYSHVKHSKSATMPNFDEDLLNWMRYIFIDSVNKVKEDYSSNSVIDPNTSFSHLISKDEQGEIKPCRYSFTSKDGSINAFGLLFFVSLFLEKQDSIWMQKKIPGFKKASENYMKMTNEVFCRNHILLPKMRLETVYDKDWMLLDMLNEVVRCPLSLYKRLTPANQNKFKVPEKSSDNANRQEDDNPFSRILVRHQNRFPYFVLRFFDLNEVFTTLRFQINLGCYHFAIYKKQIGDKKEVHHLTRTLYGFSRLQNFTQNTRPEEWNTLVKTTELSSGNDGKTVQGVPLPYISYTIPHYQIENEKIGIKIFGEDTAVDTDIWPSVSTEKQLNKPDKYTLTPGFKTDAFLSVHELLPMMFYYQLLLCEGMLKTDAGNAVEKVLIDTRNAIFNLYDAFVQEKINTITDLENYLQDKPILIGHLPKQMIDLLKGHQRDMLKEAEQKKRRLIKDTERRLKLLDKQPEQKPNVAAKNTGTLLRNGQIADWLVKDMMRFQPVKRDKEGNPINCSKANSTEYQMLQRAFAFYATDSCRLPRYFEQLHLINCDNSHLFLSRFEYDKQPNLIAFYAAYLKAKLDFLNELRPENWASDNYFLLLRAPKNNRQKLAEGWKNGFNLPRGLFTEKIKTWFNEHKTIVDISDCDIFKNRVGQVARLIPVFFDKKFTDHSQPFYRYNFNVGNVSKITEANYLSKEKREELFKSYQNKFKNNIPAKKTTEYREYKNFSSWKKFERELRLIKNQDILTWLMCKNLFDEKIKPKKDILEPRIAVSYIKLDSLQTNTSTAGSLNALAKVVPMTLAIHIDSPKPKGKAGNNEKENKEFTVYIKEEGTKLLKWGNFKTLLADRRIKGLFSYIEHDDINLEKYPLTKYQVDSELDLYQKYRIDIFKQTLDLEAQLLDKYSDLNTDNFNKMLSGWSEKEGIPREIKEDTDFLKDVRNAFSHNQYPVFRVRRLMEKIEKAFFIFYLSMV

SEQ ID NO: 2224 - protein, 1139 aa, Artificial; identical to SEQ ID NO: 1865
  Synthetic

SEQ ID NO: 2225 - protein, 1124 aa, Artificial
  Synthetic
MEDNLTKNKKKMKIPKLIEEHKSVFGAYLTMALSNVEMVLNHIAERAGLDKYEWDEDHGVEDYWKYPVMQCLGRKDKPWPILSDVLLDVRNRLFRSFPFLKIMAENQRDYRNAKGEVERVEISESDIFDVLNNIFRVLKAYRDTCSHYLIENRIWEDNSLMLMYKECPLASMVNQYYTAALRITKERYGYETRDLTFIQKCRFKQEPEKDASGKVKKKAVSDLDFFLSLVALNGDSNKRLHLSGWGVTLLICLFLEKKYVNVFLSKLPNPGNYPPNSKESRIIRRSMGVCSVVLPKERIHSETGDLSVALDMLNELKRCPKELFDTLSPGDQERFRTISSDYNEVLQMRSKDRFAQLVLQYIDHNRLFENLRFHVNMGKLRYLFNPKKYCIDGHTRVRVLEHPLNGFGRLQEMEKERLQEDGTFADSGIKVRCFDEVRRDDADSNNYPYIVDTYTHYILENDMVEMFFCSEDGWGKEMPEVTSENGKCYVRKTVPHCRMSVLELPAMLFHLLLCGAKNTEAHIGKVCDNYRRLFSDMAQGNLTEENILSYGIKKEDIPQKVWDCVQGVHTGKDCRVFRKKEIRERYEDVTRRLERLMSDRKAVLGGENKIGKRGFVQIVPGRLAAYLATDICRLQPSLRKGDGYGTDRLTGLNFRLLQSSIATYNCGESDILYGRFRDVFCSAGLIDGDNPHPFLDKVLPEAYSVRCPRNTIEFYERYLEEYQRYLKPLVIKLEKGKVPSLSFVNEGQRRWARRDDAYYHELGNLYLSQAIELPRQMFDAEIKDKLREMPEMMDVDFDHANVTFLIGEYLKRVCHDESQGFYSWPRHYKYVDMLKCILNPKNGSLQAVYTQMGEREGLWQERSGLEEKYAKIRLRDLARKGLDKDEANERIKTGLGNRKKEYQKAEKVIRRYKVQDALLFMLAKDTLFKPVERFKLKDIMPDGEKGILSEVVPMDFRFMVPVREKGCWKVQYMSATLHSDEMKIKNFGDFFALARDKRMKTLLPLVGYEVQKKDVEDEFDKYDDCRPELVAMVLDFERWAYETYPKLKELVTDNVNYGSLFSALLGQLQNMNELTSEEKYALTGIRNAFCHNSYPTDSNMVEVKELPKIAEYLKELFKDYIGLE

SEQ ID NO: 2226 - protein, 1272 aa, Artificial
  Synthetic
MGKNNHYGKKPNDSVKPQQKANQNNGSNQQVNNAPSYPSLLEAPKLISTSNNLRPIYAAYLNMARQNLYNVLQHVSVLVGYDNKCDEEAMKQMKVINFAKEKSEKRIRIQKELLYAIPVLRQMLSVDVDEEKKTITDEDVQSLLKNIVSTIFDLRNFYTHYKPYNSPEEISFQKETERALFPYIDKAFDSAKRKVEAIWDYNKKDLRFYEGSERMTVTRKGKKKAQKRVKFFFNPQEEDGSALSAVGIAFLICKLLPKQYSTQFLQQIKLFERSPYKKEHPIFGKANEVMYNMFCIDHIRLPKGRMESIADETILGLDMINELRKCPFELFKVLSEKDQKLFEVEAKENEPGEKEPAVTQLNLMRRYKDRFSYLALRYIDFQKDILPGMAFQVALGTYRYHFYDKKNCIDGGEPRVRIWQKEINGFGRLPQIEAERKRKYGKKEDGSKGVFIRPFDEVTVDTAETEPYITDRHAGYAITGNRIGIMWHDDKHEDFKNNQYLPELPLPSVQTENGEKVGAKVSIKNLEPICWLSTFDLPGLIFLHLLGGKPDTVIKSKYESLKKLLNYIKGDEFVDLYKNEIAAHIEKYDSAGLSKEEETLLRKRLKAQLEPIVFSKFNLHVNDLPEMITDILIGKTGHDEQTEKDHAEKRFNEWARNKVEKMIESLERRIKGFEKDLEKVGTKANRVGKDNFVDIRPGSLARYLAKDIMGFQPTIADEDKRGTDKLTGLNFQIMQSAIATFEGNSLQGTQTPLWQLFKRANLLAKDVNGDKNPQKHPFLNDVMSSTLKDTVDLYRRYQEHKLKYLRKILEENNFKEAYFLHGNRKRYAPKTLEAVRSLAERYLNTLYLPDGLFAEEINKVLKDKYKDNKSIQEAFQDPKQKYNIAYLLNVYFEQVHKDCCQPFYYSRNGMFKRNYELFNTLASSKNNKVVKWYTVDEMNDLTKKGSQDMSIAKRKIEEYLDNYMVKDEIDDTERLATEEEKTRKRRFLISLLNDCKKNEKIIRRYKTEDILLFLMAKKILVGKLKTQKGRTIEQSEFNEFKLSAIPAFKRAQKQGEEEKEYKELNDNRDILSKFIDFNVEIVLRDEKGREILDDKGTPIRKKVYQEHLQLKKYGDFYRFLYDTRIGLLLKQLTSECIKREDIDDELDEYDRNRKEIFAKIHAIEKLIINAHADQLDDSNAGKEGFVNEDGEPYRTNFRSLLSLVESIRIDRKKLTKEGELIVETRNAFSHNKYIEQLKDIADEKGLTLPEVAKLILANLNRFAIKLGIATKK

SEQ ID NO: 2227 - protein, 1090 aa, Artificial
  Synthetic
MKEEETPVVSTYNKDNKHFWAAFLNLARHNVYITINHINKILGEAEINIDGYDIPLKNIWSGIRDINKKARLEELMIKHFPFLEAMTHQQHLTGNTKQKEEKQAEIQSFEILKDNLFLLLKMLQDLRNHYSHYKHSKSLERPKFDEDIRNKLYNILDTSIRLVKEDYKHNPDIKPKEHFKHLDRKRNEKFRYSFADNEGNITISGLLFFVSLFLEKKDAIWVQKKLEGFRCSNESYQKMTNEVFCRNRILLPKLRLESTQTKDWILLDMLNELIRCPKSLYERLKGEDRKKFEVPFDSTDEDYDAEQDPFKNTLIRHQDRFPYFVLRYSDYNEIFENLRFQIDLGTYHFSIYKKLIGGEKEDRHLTHKLYGFERLQEFAKQNRPDEWKAIIKDLDTFKKQEDEKVNEKPYISETTPHYHLENEKIGIAFKNHNIWPSTNTELTNNKRKKYNLRTSIKAEAFLSVHELLPMMFYYMLLKTKNESPRKVEAIIESKIKDIFTLYDAFANDEIDNTDELEKYCEDKDIKIGHLPKQMIAILYNKHKDMVEKAKVKQEKMKLATENRLKTLDKLIEGKMKYAKRGISPLKSGEIASWLVNDMMRFQPVQRDENGEPLNNSKANSTEYQLLQRTLALFGSEHERLTPYFKQMNLIGDTNSHPFLKQTEWEKCNNILSFYRNYLKAKIEFLNKLKPEDWKKNQCFLKLKEPKTNRDTLVQGWKNGFNLPRGIFTEPIRKWFIKYWKKIKVDDLKRVGLVAKVIPLFFSEKYKDSVQPFYNYPFNVGNIDKPKEKDFLDIARRRKLWDKKQLEFKGKTEEEKRKNPSYLDFKSWKKFEREIRLTRNQDIVTWLMCIEIYNNQKVENLNTGHIYLKDIITNVEEERSNNILNQIKSMQLPVTVYENESSPKKKYLRTIYIEENGTKLLKQGNFKALVKDRRLNGLFSFVKTNSEAESKRNPISKLRVEHELREYQKARIEIIKDMLALEKTLIDNYDSLDTDNFHNMLTGWLELKGEVNKAKFNNDVKLLTAVRNAFSHNQYPMYDENLFVNIERFSLSSSKILESKGLSIAVKLKEEVSKIIKKIQEEEDGKKEKET

SEQ ID NO: 2228 - protein, 1183 aa, Artificial; identical to SEQ ID NO: 1519
  Synthetic

SEQ ID NO: 2229 - protein, 1124 aa, Artificial
  Synthetic
MENKKTLETTPEYFGSYLNLARLNVFNISNHLANKFEIVALDEEGNIPTSFLTDGKNKTFIAKQTHVFDQLKRYMPVVKLFDDELLPKSEQEKLENKKGKDFAKLTATLKVVFKELNLFRNDYTHYYSKTNKTNRKLIISDELKVFLNMSYEYALLYTQSRFKDVFKEEDFITAQQAQLIKDDNVITQDGLVFLTTMFLDRENAFSFINKITGLKGTQHTAFKVKREVLCAYCVNLPHDKFISEDAKQSFSLELINELNKCPKTLFDVITDEAKKEFQPELGDEEKERLYQNSLSPYADEKNMDSIDDYENYINDITKRVRNTNRFSYFAMKFIDQNDVFKTIRFQLDLGKFILDDYSKSFNGVEEPRRVVERAMAFDKLQNVLKEEDVLKRINTGTVSNKFEQFAPHYNFDTNKIGLKLAGADTAKLLAQKDSSKKVISYLQQPTIDAFLSVHELPKIILLNYLQKGSAEQIIKDFIQINNTKLFTKEFIELIKSQLTHFDVFDKRSQGRKQDKGAYPQGKLNHLASRKQKLNELLAAHHLNDKQIPTRILDYWLNIEDVTNKIAVSDRIKLMKRDCIDRLKDIKKNKTPRVGEMATFLAKDIVDMIIDVNKKKKITSFYYDKMQQCLALYADTERKTLFIQIIKELELNKSGGHPFLHKIDFENYRYTADIYKAYLEEKGQKLISEVNPKNGKKVVKDISWLEKNFYTKEWNEEIKKQMTIVKIPNDITKIPFTILQFDKEKSTFDIWFENVTKGKALTNDRKKPIDLPTNLFDGVLKELLVKELSNKSILFDLGSNYNELFKLWWEKCREDSTQSFYNSGREYTFEDFKLNFVINTKDKFEHYISNSFVEKVKTAKQEKQNIEKQLPHNIGKRYTAIDTNQVKKSLIKKIGTTEKEIRIQQEEDRLMLLMFEQMTSQTLHPKLKTINILLNETIPIKEPINGLLSFNDLGQIIKDKKEKKLIVKYLVEERKRKDYSVLKKYIFDRRLPELFEYFEEDEISIEILKKEVESYNKSRDIVFDSIFKIEQAIILKNEQELVNSSDDENNISHKTYLNWLLLNDYISQEEYVFFNMVRNTFSHNQFPQRKTIERYMKLESRIEIASQIATKFVEKVNGIITQMQS

SEQ ID NO: 2230 - protein, 1090 aa, Artificial; identical to SEQ ID NO: 2227
  Synthetic

SEQ ID NO: 2231 - protein, 1182 aa, Artificial
  Synthetic
MKDKSFSTTSSAINETITTDNLKYPERLNLILSKRLRPKNELQPLWAAYFNMARYNMYTTLVHIATATGLSDEENMENRMDKMRILNEPVEPEIEHSLRKLLCRHFPFAVWMKDSKEDSADEDYRVISVKELRDCLKTVSYTLNYFRNYYSHTRHVETRSEDIIAASRNSEKQTGIFLNKVCTVATRRVKSRFSDKSNKGQAGMIDDQSMKFITEGKVKFRNNNGIKGTIYNPDHFLYPLFLDRSSALRDGTNPERLSTVGKIQLICLLLDKKYITEFLDQAGFLSAFNNDAPAPRLSERRLILEVLSDLRIRLPQRKIDATCNDIQVALDMLNELKKCPKELFELLEAKDKATFSILSSTGEHILLRRSSDRFTQLALQWFDVNKAFSRIRFQMNAGIFRYLFNDSKTCIDGKTRLRVLQEPLNCFGRIQEVEDSRESNRYGNDGPWRRFEIKGFDEAARNDVNCLPYINDSRTRYLITEDNIGIRFSGDDEACGNYFPRIDEKNGKYKVTCLPAQCMISIYELQAMLFLHLLNPGNDGGIAPVEKIIIDKVESYRRFFSDIKNGLLTPSGLTESSLNDKLTSTYGISLSDIPDKMKDYLLKKNNKGRGFNAYRDRLIETLKEETEYRIKRLEENLKATNSDTNKPGKPGYVQIKPGSLASFISKDIVFFQECNADQKMTGLNFSVMQGLIATFGSQEGATADDLRMAFCKSGLIAANGSCGTHPFLAIAFNAGVKNTLDLYKKYLNARKSYLSGIIPDNAPFLHADRIRWAVNDDAYYKDYAERCLQRPVILPRRLFETSIRENLLALNDENANALKKVIIDAGNHCNSAFMIDSYFYYVKNDSPQVFHGACEGDMIHTYGHRFFQVVRRNLKNAEAILSKLKKDSNTHNTYIGALSDAICWAKENPIKPTFSVGRSRLNNHSENEIAAMIKRAFNEYMATEKTLRRYVIQDELLFLAAMKTIKSKLGVPDGEWKLGSIGSKSGSILDKELPLIQTPAKFNIKKRPYTNDIIEKDLVEFVIEQHNVSIKDYGEIYRILADERLYGLLKYHKNETVFASDLKNEIEKYDEKRVKVFEDIMNYEKKITNGVTDRQLCESMDKEHAKDIDFKVMQTFDTMNDKLTKMELRRIRNAFCHNSYPDVNAFDKSSGTTKRIHNADIPGTAEKISGIVNDISSKTKAK

SEQ ID NO: 2232 - protein, 1090 aa, Artificial
  Synthetic
MNIPALVENQKKYFGTYSVMAMLNAQTVLDHIQKVADIEGEQNENNENLWFHPVMSHLYNVKNGYDKQPEKTMFIIERLQSYFPFLKIMAENQREYSNGKYKQNRVEVNSNDIFEVLKRAFGVLKMYRDLTNHYKTYEEKLNDGCEFLTSTEQPLSGMINNYYTVALRNMNERYGYKTEDLAFIQDKRFKFVKDAYGKKKSQVNTGFFLSLQDYNGDTQKKLHLSGVGIALLICLFLDKQYINIFLTKLPIFSSYNAQSEERRIIIRSFGINSIKLPKDRIHSEKSNKSVAMDMLNEVKRCPDELFTTLSAEKQSRFRIISNDHNEVLMKRSSDRFVPLLLQYIDYGKLFDHIRFHVNMGKLRYLLKADKTCIDGQTRVRVIEQPLNGFGRLEEAETMRKQENGTFGNSGIRIRDFENVKRDDANPANYPYIVDTYTHYILENNKVEMFISDEENSTPLLPVIEDDRYVVKTIPSCRMSTLEIPAMAFHMFLFGSGKTEKLIVDVHNRYKRLFKAMQKEEVTVQNIASFGIAESDLPQKIIDLISGNAHGKDVDAFIRLTVDDMLADTERRIKRFKDDRKSIRSADNKMGKRGFKQISTGKLADFLAKDIVLFQPSVNDGENKITGLNYRIMQSAIAVYDSGDDYEAKQQFKLMFEKARLIGKGTTKPHPFLYKVFARAIPANAVEFYERYLIERKFYLTGLHKEIKNGNRVDVPFIRRDQNKWKTPAMKTLGRIYDEDLPVELPRQMFDNEIKSHLKSLPQMEGIDFNNANITYLIAEYMKRVLDDDFQTFYQWKRNYRYMDLLKGEYDRKGSLQNCFTSVEERECLWKERETRTEQYRKQASNKIRSNRQMRNASSEEIETILDKRLSNSRNEYQKSEKVIRRYKIQDALLFLLAKKTLTELADFDGERFKLKEIMPDAEKGILSEIMPMSFTFEKGGKKYTITSEGMKLKNYGDFFVLASDKRIGNLLELVGSNTVSKEDIMEEFKKYDQCRPEISSIVFNLEKWAFDTYPELSARVDRKEKVDFWSILDVLSNNKDINNEQSYILRKIRNAFDHNNYPDKGIVEIRALPEIAMSIKKAFGEYAIMK

SEQ ID NO: 2233 - protein, 1127 aa, Artificial; identical to SEQ ID NO: 1987
  Synthetic

SEQ ID NO: 2234 - protein, 1179 aa, Artificial
  Synthetic
MSSKNESYNKQKTFNHYKQEDKYFFGGFLNNADDNLRQVGKEFKTRINFNHNNNELASVFKDYFNKEKSVAKREHALNLLSNYFPVLERIQKHTNHNFEQTREIFELLLDTIKKLRDYYTHHYHKPITINPKIYDFLDDTLLDVLITIKKKKVKNDTSRELLKEKLRPELTQLKNQKREELIKKGKKLLEENLENAVFNHCLRPFLEENKTDDKQNKTVSLRKYRKSKPNEETSITLTQSGLVFLMSFFLHRKEFQVFTSGLEGFKAKVNTIKEEEISLNKNNIVYMITHWSYSYYNFKGLKHRIKTDQGVSTLEQNNTTHSLTNTNTKEALLTQIVDYLSKVPNEIYETLSEKQQKEFEEDINEYMRENPENEDSTFSSIVSHKVIRKRYENKFNYFAMRFLDEYAELPTLRFMVNFGDYIKDRQKKILESIQFDSERIIKKEIHLFEKLGLVTEYKKNVYLKETSNIDLSRFPLFPSPSYVMANNNIPFYIDSRSNNLDEYLNQKKKAQSQNRKRNLTFEKYNKEQSKDAIIAMLQKEIGVKDLQQRSTIGLLSCNELPSMLYEVIVKDIKGAELENKIAQKIREQYQSIRDFTLDSPQKDNIPTTLTKTISTDTSVTFENQPIDIPRLKNALQKELTLTQEKLLNVKQHEIEVDNYNRNKNTYKFKNQPKDKVDDNKLQRKYVFYRNEIGQEANWLASDLIHFMKNKSLWKGYMHNELQSFLAFFEDKKNDCIALLETVFNLKEDCILTKDLKNLFLKHGNFIDFYKEYLKLKEDFLSTESTFLENGFIGLPPKILKKELSKRLKYIFIVFQKRQFIIKELEEKKNNLYADAINLSRGIFDEKPTMIPFKKPNPDEFASWFVASYQYNNYQSFYELTPDKIENDKKKKYKNLRAINKVKIQDYYLKLMVDTLYQDLFNQPLDKSLSDFYVSKAEREKIKADAKAYQKCNDSSLWNKVIHLSLQNNRITANPKLKDIGKYKRALQDEKIATLLTYDDRTWSYALQKPEKENENDYKELHYTALNMELQEYEKVRSKKLLKQVQQLEKQILEEYTDFSSTQIHPADFEREGNPNFKKYLANSILANEDEIDKLPEKVEAMMKLDETITNPIIKKAIVLIIIRNKMAHNQYPPKFIYDLATRFVPKKEEEYFACYFNRVFETITTELWENKKEKAKEIV

SEQ ID NO: 2235 - protein, 983 aa, Artificial
  Synthetic
LFKLFLACCINCDNFDGRFAIFEVNILLITMSNEIGAFREHQFAYAPGNEKQEEATFATYFNLALSNVEGMMFGEVESNPDKIEKSLDTLPPAILRQIASFIWLSKEDHPDKAYSTEEVKVIVTDLVRRLCFYRNYFSHCFYLDTQYFYSDELVDTTAIGEKLPYNFHHFITNRLFRYSLPEITLFRWNEGERKYEILRDGLIFFCCLFLKRGQAERFLNELRFFKRTDEEGRIKRTIFTKYCTRESHKHIGIEEQDFLIFQDIIGDLNRVPKVCDGVVDLSKENERYIKNRETSNESDENKARYRLLIREKDKFPYYLMRYIVDFGVLPCITFKQNDYSTKEGRGQFHYQDAAVAQEERCYNFVVRNGNVYYSYMPQAQNVVRISELQGTISVEELRNMVYASINGKDVNKSVEQYLYHLHLLYEKILTISGQTIKEGRVDVEDYRPLLDKLLLRPASNGEELRRELRKLLPKRVCDLLSNRFDCSEGVSAVEKRLKAILLRHEQLLLSQNPALHIDKIKSVIDYLYLFFSDDEKFRQQPTEKAHRGLKDEEFQMYHYLVGDYDSHPLALWKELEASGRLKPEMRKLTSATSLHGLYMLCLKGTVEWCRKQLMSIGKGTAKVEAIADRVGLKLYDKLKEYTPEQLEREVKLVVMHGYAAAATPKPKAQAAIPSKLTELRFYSFLGKREMSFAAFIRQDKKAQKLWLRNFYTVENIKTLQKRQAAADAACKKLYNLVGEVERVHTNDKVLVLVAQRYRERLLNVGSKCAVTLDNPERQQKLADVYEVQNAWLSIRFDDLDFTLTHVNLSNLRKAYNLIPRKHILAFKEYLDNRVKQKLCEECRNVRRKEDLCTCCSPRYSNLTSWLKENHSESSIEREAATMMLLDVERKLLSFLLDERRKAIIEYGKFIPFSALVKECRLADAGLCGIRNDVLHDNVISYADAIGKLSAYFPKEASEAVEYIRRTKEVREQRREELMANSSQ

SEQ ID NO: 2236 - protein, 1123 aa, Artificial; identical to SEQ ID NO: 1835
  Synthetic

SEQ ID NO: 2237 - protein, 1145 aa, Artificial
  Synthetic
MTLPTDNTFIEKADQEILGKNKLFFGAYLNMANHNAYLIIKDISERLKQEDALDIDAPSDEDNLAYADIFSKILKKASDKNPKNRPQATIIDKVTNLLIHHFPAFEVFAYEHPFEQQNSYPELLYQKLTTALKLLNDLRNEHSHFYYKGSFDIDTVFSAAQEEITRFPYLTPEDIEELEYYKNDLLEPLTYFKKYGFVFFICTFLEKRYARYMLKEKQLDLIASDKERDATLENFTNYSCRLPRPKLESSVIELDMLNELSRCPKGIHDVLSSPMEKVLLKTDAKDDPNQVPMIRHNDRFPYFALSYFDKMERFPAMRFHIWAGKTRLAFYGKKLGKKNVLRDIQENVTIYARLNDIKADKIPDNWKDKIDVEDSEENKEKAKIQSYSPHYNIHNNRIAIKFIDTQKDELDTENFSEIKSKPQDPTKDKQLKYTVTHALPNAILSTYELQNLFLYDYLYRTYKDQKVLARPADSFIRNYISSFHRFCKDVKSGKIQPVSPHDFERLTEHTRSTTRDLGNREEELEIRKEALQKKKLDNYGLKVKNLPDALREYLLGYKQETYTEIALNKLRGKIKQTKVHYKLATKDDLFLDGKTDLKSGKIGDFLAADIVFLKPLDANRTGKPNNQQFNELQKAIARFHSQKKDAEDFINEELQIKEQSLPHAHPFLYKIQFEEHTDVQSFYIKYLELKIEWLECTKREIQGKSDYLKPWQWREEADKCKQYGIDIKPEGLSDAATENKYGYFLQINTKKGNERNYTNATTPSKANSKEFESLESKSPVFLPRGLFNDAIIDAMMKIDEFKGKIKEGDNIVRCLDVLAEGDRQTFYDFERSYTVGKAAPTSVTIHQGANGEYIKNKLRSIKPIIKKLRTQQNAKDAKYKDKKILQNHIKALQAISDNERSIRFIRANDRTLFLMIKHIFSEHKSYVVEGSKLTKSINTLPWKLNKVGYEIKENNILNEILPMNIQFNQKSIYTEGEHGTDPLNKLSIKHYGKFRKLLKDKRLSNKKKPGLLNYYTDQNVRWSAINKELEYYDENRDRLLDVIYKFEKAVWENEECREELKENIRLGYINHATQLKAVGKIVRGFTTSKQDQLALLRNKFLHNQIPYTENLKTGWVDNNPEYPLITQALLELAIIEYQNITKNII

SEQ ID NO: 2238 - protein, 1260 aa, Artificial
  Synthetic
VRHQGARTPDARQPRHGRHGRNVLSRSPLTTDYCGRAAVRPALFVSPLGHKRQSLISRYPSIPNSFMKNDYNSNSPKKTVAPKHFALPEAMGGETPLNEDEKKLKAVAGTYFERAMNNAAQTLRYIFNNKLQLTPTPDFKDLEKTLRGLAENSALADPLKHDEFRKLVFHHIPLFKALEDYRTRPPKPQKGSFSQPKEVRKLYSAADILIDLADMVGALNHYRNTYTHANHSCSQQTKAALQQREGEIAKWMENVFDSAVRMTKERCGFSADQMKFLQCGFGSRRKRDGKKFVLNDQFFFALTRNGLEVTPAGRLFLCCCFLPSHYVWDFLGRVNLERTTPFDQNQRDILSRALNVFHLRLPQENRIESDTSEGGLLLDVFAELGRCPLREVFDHISPQGQKQFRPKPDDRSPDGEEVLLARYDDRFPQLALRLIDQLGILDLVDKNGNKKEGIRFQQRLGSFRFRFYDKRCVDGASRLRTLQKEINGFGKWHELESRRRSRWAGIIRESAQPDQESEGGFAPDTADSQPYVTDCAPRYNIHNNRIGMTWGLDDGLFLPDLPKAAENPGSVAVEQPVPKCSMSIFDLPALLFYRHLIFKKGNIANLATPAKVIQDCCNNLHELFELAEQGASPDALKKFAVDKGIADSSIPVRLLNYINGNPCGPQDRLAAHAAQVLQEVVELCENRLDQLKEAQKCDIKYGKKGCRQVRYGHMAQYLGKSIMRWQPPRPGGQNKLTGLNYQTLVKALATSGQSWNDREVNQLFQKSELLGSDHPHPFLAEALRGTQNLGHFYSRYLAREKTFALKMKAELEARPAEALRQVPFAKPDAAKWKDCQSHPDYIKDYARRLLHTPAGGKETPAILLLPDGLFDAHVRKAITAFLPNTELCQMANEKVPGNNEKVPGNECCYKYGISKLIAQYFEQVQNDYAQPFYNADMPDFGRAYSLTTKLYGQKVGNSHQPYYMNSANLKTAVAKCGAETVRRAVDMKAAQTEESAKRKLRSILNNEKAIRRLMTQDKVLFLTAKELLYSLLTHEWFNYYTKPANTSVLQQINSVQLQSADSDFLRQCSQIIGDDQLPTFRFKLKNSDVTITQENLSLRNMGNVYRVQRDPRWQTLQKLLEKLEQTEVQYGAITAEFKNHEENSVKAVELSQRLEHEAYSDAIGRGETIDEETSHNFRKLLVCHPTLSKYQCDEIVLVRNKFNHNQYVDPSISKDKIFIERNMNGKKVPNLAKAMYETMKEAVEHPEDIIRKEVGEVSGG

SEQ ID NO: 2239 - protein, 1129 aa, Artificial; identical to SEQ ID NO: 2185
  Synthetic

SEQ ID NO: 2240 - protein, 1003 aa, Artificial; identical to SEQ ID NO: 1494
  Synthetic

SEQ ID NO: 2241 - protein, 1003 aa, Artificial; identical to SEQ ID NO: 1684
  Synthetic

SEQ ID NO: 2242 - protein, 1118 aa, Artificial
  Synthetic
MKEEETPVVSTYNKDDKHFWAAFLNLARHNVYITINHINKLLEIREIDNDEKILDIKALWQKVNKDLNQKARLRELMTKHFPFLETAIYTKNKEDKKEVKEEKQAKAQSFDSLNHCLFLFLEKLQEARNYYSHYKYSESTKEPVLEKELLKKMYNIFDNNIQLVIKDYQHNKDINPDEDFKHLDRTEKEFNYYFTQDKKGKITESGLLFFVSLFLEKKDAIWMQQKFTGFKDNRENNKQMTHEVFCRSRMLLPKLRLESTQTQDWILLDMLNELIRCPKSLYERLKGEDRKKFEVPFDSTDEDYDAEQDPFKNTLIRHQDRFPYFVLRYFDYNEIFKNLRFQIDLGTYHFSIYKKLIGGQKEDRHLTHKLYGFERLQEFTKQHRPDDWKAIVKDFDTYETSEEPYISETTPHYHLENQKIGIRFKNDNDKIWPSLETNGENNEKSKYKLDKQYQAEAFLSVHELLPMMFYYLLLKKEEPNNDKKNASRVEGFIKREIRDIFKLYDAFANDEINNIDDLKKYYKDKNVEIRHLPKQMIAILESKPKDMAKEAKRKQKEMVKDTKKLLATLEKQTQKEKEDNGRNVKLLKSGEIARWLVNDMMRFQPVQKDNEGNPLNNSKANSTEYQMLQRSLALYNKEEKPTRYFRQVNLIESSNPHPFLKWTKWEECNNILTFYHRYLTKKIEFLNKLKPEDWKKNQYFLKVKEPKTNRETLVQGWKNGFNLPRGIFTEPIREWFERHQNDSEEYKKVEALGRVGLVTKVIPLFFKKEYFKEDARKEINDCVQPFYNFPYNVGNIYRLKDEDFLHREERIKLWNNKKDKFKGYKEKIKSKKLTEKEKEEFRSYLEFQSWNNFERELRLVRNQDIVTWLLCKELIDKLKIDELNIEELKKLRLNNIDTDTAKKEKNNILNRVMPMELLVMVYEVNKAGNIIKNKPLHTIYIKEAKTKLLKQGNFKALVKDRRLNGLFSFVKTNSEAESKRNPISKLLVEYELGEYQEARIEIIKDMLALEETLINKYKDLPTNKFSDMLNSWLEGKDEADKARFQNDVDFLIAVRNAFSHNQYPMHNKIEFANIKPFSLYTMNNSEEKGLGIANQLKDKTKETKDKIIEIEKPIETKE

SEQ ID NO: 2243 - protein, 1118 aa, Artificial; identical to SEQ ID NO: 2242
  Synthetic

SEQ ID NO: 2244 - protein, 1253 aa, Artificial; identical to SEQ ID NO: 1347
  Synthetic

SEQ ID NO: 2245 - protein, 1098 aa, Artificial
  Synthetic
MNNEQNLEQRIFAQAKNIRDDKAYFGAHLNLARHNAFIILHHINQRLGFIDQNVQDDAQFKKFKCLTILKQSSKPDLIAKSLDLIRFHFPFLQILTDKLSDIRSSNGERKILTPQEEGEIIESLLTDLNGYRNEYCHGENKSHVPDSYLIKNLKSIYDASLRMVKERFKLEPHKIKHLERNNKDGEKLNFKYALSNNSSISEKGLVFFINLFLEVKDSYSFIKKIEGFKNAGTNSLNATTYCFTIQHVRLPNPKITSQEYTKEELLLRMMNYLEKVPDQIFKTLSPADQENCKSNVDVFETPIEGDLIEKSLHKRYRDQFPEFALNYIDYYKLFPNIRFQINLGKFIFSVKDKEILGETRKRRQIQMLRGFGQIQDYQNKKNIPEIWQSLINKSHEIPEDFPDPYINDMEPHYHIENNNIYFKFMEPDTTHWPRIDARIENQNNINAHPRPRLLQADGILSVYELAPLLFYEMIRSDKSKSAETILSIQKSNIERLLNDIKSGELTKVALDKIPNPYSPSNKKFNTAKQVILKEKIEKRKIELNEKLKKYKLALDDLPKMILYYLLNIEHEDISLKVIPIIKSMQVETNHLLNKLQHNLEKRNKPGEKGSKLILSGELASFLAQDMLALQAKSDNSRDKANSQEYQHLQYKLAYYSLYIDEFKSIFKKLNLIDSDKFSHPFLSKLTKIFPNIIQFYEWYLNERKKWLMDIETKPEEALKFIKLKKSVNITGEQLVDQFLVKTNGNQAGIPYNFPRGIFDDAIKSELEKNDKMKAIISNTKRVNSHFLINRYIEHEKNNKSQSFYEWKRNYEIYDRLEDDRKKMFDPLPKKYKTNDELGHGLKKHREYIKTLAERDVIKRGNSNLSKEKLTTLFKNYEENEKEIRLQKTQDQVLYLMIVKSISDNFSPGEFNNIALQDFVPNAINSPLAKRIPFEIKYGEKKIFQEEIQIKKIGEFHRFLKDRRLINLMAYIKKERISRSELEYELGEYQKQRILFLEKVLEFEQKLYAYDKFYFDNIIAENNRVEHWQYLRYFEEKFVLTPEQKEQSSNLRNKFSHNEYPEIMYFEDVCSGEEKIGVASQLAQIGIKLYEDMVSQIQK

SEQ ID NO: 2246 - protein, 1242 aa, Artificial; identical to SEQ ID NO: 2085
  Synthetic

SEQ ID NO: 2247 - protein, 1091 aa, Artificial
  Synthetic
MKEEEKGKTPVVSTYNKDDKHFWAAFLNLARHNVYITVNHINKILGEAEINIDGYDISLKNIWSGIRDINKKARLEELMIKHFPFLEAMTHQQRLTGNTKQKEEKQAKIQSFEILKDNLFLLLKMLQDLRNHYSHYKHSKSLERPKFDEDIRNKLYNIFDTSIRLVKEDYKHNPDIKPKEHFKHLDRKRNEKFRYSFADNEGNITISGLLFFVSLFLEKKDAIWVQKKLEGFRCSNESYQKMTNEVFCRNRILMPKLRLESTQTQNWILLDMLNELIRCPKSLYERLKGEDRKKFEVPFDSTDEDYDAEQDPFKNTLIRHQDRFPYFVLRYFDYNEIFENLRFQIDLGTYHFSIYKKLIGGQKEDRHLTHKLYGFERLQEFAKQNRPDEWKAIIKDLDTFKKQEDEKVNEKPYISETTPHYHLENEKIGIAFKNHNIWPTTNTELTNNKRKKYNLGTSIKAEAFLSVHELLPMMFYYMLLKTKNESPRKVEAIIESKIKDIFTLYDAFANDEIDNTDKLEKYCEDTDIKIGHLPKQMIAILYNKHKDMVEKAKVKQEKMKLATENRLKTLDKLIEGKMKYAKRGISPLKSGEIASWLVNDMMRFQPVQRDENGEPLNNSKANSTEYQLLQRTLALFGSEHKRLTPYFKQMNLIGDNNSHPFLKQTEWEECNNILSFYRSYLEARKNFLKNLEPKDWKKNQYFLKIKEPKSNRQTLVQGWKNGFNLPRGIFTEPIKKWFIEHRKKMKVDELKSVGLVAKVIPLYFNEKYKDSVQPFYNYPFNVGDINKPKEKDFLDNGKRRKLWDKKQLEFKGKTEEEKRKNPSYLDFKSWKKFERELRLIRNQDIVTWLMCIELYNNQKVENLNTGHIYLKDIITNVKEERNNNILNQIKSMQLPVTVYENESSPKKKYLRTIYIEENGTKLLKQGNFKALVKDRRLNGLFSFVKTSSEAESKRNPISKLRVEHELREYQKARIDIIKDMLALEKTLIDNYDSLDTDNFHNMLTGWLELKGEAIKTKFNNDVKLLTAVRNAFSHNQYPMYDENLFINIERFSLSSSRILESKGLGIAVKLKEEVSNAIEKIKNEEDAKKET

SEQ ID NO: 2248 - protein, 1118 aa, Artificial; identical to SEQ ID NO: 2242
  Synthetic

SEQ ID NO: 2249 - protein, 1160 aa, Artificial
  Synthetic
METQEQIAKNIYYAHDIYEDKHYFGAFLNLAQNNIGQVFSEFCTRLNEPKDENVHNIIIKYFSNNVSYSDWDKRIKILKEYLPVIEHLNLPTSDNIFEEYQINEKENKKRDYFRKNFQSLIKSVNDLRNFYTHYYHPPVVIDESLFDFLDSLLLKTCLTVRKKKMKNDKTRQILKKGIIAEWKVLEELKVNELKKNKEKNKWINIDDKEGIRNAILNDSFHHLIFKDKDSFCLKDYHKAKYSKNIFAENKIPISKSGLVFLLSLFLTKKETEQLKANIEGFKAKVIGKEDEVTKKNNSLKYMATHWVFSYLTYKGLKRRVSTSFDKVTLLTQMLDELSKVPDEVYQTFSISDKDEFLEDINEFVQESTGDDKSLIESTVVHPVIRKRYENKFNYFAIRFLDEYANFPTLKFQIFAGLFQHDHKTKNIGESNYISDRQIKEKINVFGKLSKVAKYKSDYFTENENENEWHLFPNPSYNFVGNNIHIYFDMYRKGAEVKSVQEEINALRKIINPKKDRVNRKGKKEIIDMIYNKSSKIEYNEPTALFSLNELPAILYEFLINKKTGEDLENILVQKIVERYKTIKNYNTTQQLSNSFITKKLRKSSLKQDQINIEKLLRSINKEIEINGEKLNLIKTNKEETTKTNKQDKPERKYIFYTNELGQEATWLANDLVRFMPKFAKTNWKGYQHSELQRLLAFYDRHKNEAKTLLTTNWDLNSFPIWGSDINEAFDKDKFDEFYEEYLKKRKKTLEGFANTIELNKNDPKLLKKVLKEVFIAFDKRLFVISSIDKQKNELLAKPIVFPRGIFDNKPTFILGQKVEQAPSLYADWYSYCYDKSLRFQKFYDFNRECTDSFEKYEVENKESKLNKKNLSRQQKIDLFKKKQDLLIKKVQHKDIFIKHMIDYLFFKVFKKEIDISLNEIYQTKEERLNNQIVAIEQRDREKGDKSENKLIDNFIWNKTISMSLLNGQIIEPDVKLKDIGKFKKLETDKKVHHLLSYDKTKIWNKLMLEDELENKLDSYERIRREKLLKLVQLFEKGIIENHSENNDEHPKEFEKDGKPNFRKYIAKGVLKKNTKIAESEINWLSDIKDMETVEISEVNSKSVILQKAYTLILLRNKFGHNQLPDKNAFDMMQTLYKTAENETYSKYFLRVTEQIINEFS

SEQ ID NO: 2250 - protein, 1126 aa, Artificial; identical to SEQ ID NO: 1756
  Synthetic

SEQ ID NO: 2251 - protein, 1133 aa, Artificial
  Synthetic
MKEEEKGKTPVVSTYNKDDKHFWAAFLNLARHNVYITVNHINKILGEGEINRDGYENTLEKSWNEIKDINKKDRLSKLIIKHFPFLEVTTYQRNSADTTKQKEEKQAEAQSLESLKKSFFVFIYKLRDLRNHYSHYKHSKSLERPKFEEDLQEKMYNIFDASIQLVKEDYKHNTDIKTEEDFKHLDRKGQFKYSFADNEGNITESGLLFFVSLFLEKKDAIWVQKKLEGFKCSNESYQKMTNEVFCRSRMLLPKLRLQSTQTQDWILLDMLNELIRCPKSLYERLREEDRKKFRVPIEIADEDYDAEQEPFKNALVRHQDRFPYFALRYFDYNEIFTNLRFQIDLGTYHFSIYKKQIGDYKESHHLTHKLYGFERIQEFTKQNRPDEWRKFVKTFNSFETSKEPYIPETTPHYHLENQKIGIRFRNDNDKIWPSLKTNSEKNEKSKYKLDKSFQAEAFLSVHELLPMMFYYLLLKTENTDNDNEIETKKKENKNDKQEKHKIEEIIENKITEIYALYDAFANGKINSIDKLEEYCKGKDIEIGHLPKQMIAILKSEHKDMATEAKRKQEEMLADVQKSLESLDNQINEEIENVERKNSSLKSGEIASWLVNDMMRFQPVQKDNEGNPLNNSKANSTEYQMLQRSLALYNKEEKPTRYFKQVNLIESSNPHPFLNNTEWEKCNNILSFYRSYLEAKKNFLESLKPEDWEKNQYFLMLKEPKTNCETLVQGWKNGFNLPRGIFTEPIRKWFMEHWKSIKVDDLKRVGLVAKVIPLFFSEEYKDSVQPFYNYLFNVGNINKPDEKNFLNCEERRELLRKKKDEFKKMTDKEKEENPSYLEFKSWNKFERELRLVRNQDIVTWLLCMELFNKKKIKELNVEKIYLKDINTNTTKKEKNTEEKNGEEKIIKEKNNILNRIMPMRLPIKVYGRENFSKNKKKKIRRNTFFTVYIEEKGTKLLKQGNFKALERDRRLGGLFSFVKTPSKAESKSNTISKLRVEYELGEYQKARIEIIKDMLALEKTLIDKYNSLDTDNFNKMLNGWLELKNKANKASLEEANKARFQNDVDLLIAVRNAFSHNQYPMRNRIAFANINPFSLSSANTSEEKGLNIANQLKDKTHKTIEKIIEIEKPIETKE

SEQ ID NO: 2252 - protein, 1145 aa, Artificial; identical to SEQ ID NO: 1631
  Synthetic

SEQ ID NO: 2253 - protein, 1156 aa, Artificial
  Synthetic
MESQPKRTDGITYYDHKSNSDKHYFGGYLNQALNNYTVIEKLFEQKFEESLENFLQKNKKVSYAQWERMLNFLKHHFPVVHYIDLPVREATKDNPDPFPRNDAERRQHFITTFTSIKKLLFDLRNFYSHYFHEPIDTKIDTLSHLDQIFVAVCEHVKTKRMKTDETRLLLKETLADELTHLFILKEKELLELKKKVGITGKTTAEEVRNAIFNDSFKHLYYEKQPSRIYRSSLQEEAATENGITISQSGLSLILSFFLSKREMEGFKSRLRGLKGRVLNLENGNIDLRNNSLRFMATHWVFSYLCFKGPNQKLNTSYLEETLLVQIIDELTKVPHEVYEALHVVQRDKFVEDINEFMRQDLEDGSEENALVVHPVIRKRCENKFNYFALRYLDEFAGFKTLRFQINIGNYIHDRRSKELKSGSFITDREVKERINVFGRLSAVTTLKDDFFRSESYEGSSWERFPNPSYNINGNNIAIYLDLGKDHGKDTKVIYDARSKRNKKEERVDRSNGKPTKDDILKELQQAVEVKSDTIHRKEPTALLSLHELPALLYELLVNHVKPETIETILAGKISERLKVIQEYTPQSDLPLSQIPKNLKVSGQEPKVQYDKLIRLIDNLIAAGEDKSALISKNQREIANPKIKRNFVFTITERGREANWLANDIKRFMPESTKGQWKGYHHSQLQEILAFYFARKQDAISLLNSVWQLKQSDFGASLEVLFLKPGFDSFYIAYLQNRKEHLGQIRDRILQYQSEKNVIKKVLKSIDHIFPKKVYTIRSTQDQIENLLGKPIAFSRGIFDSKPTFITDTTFEGNEHLFADWYRTSRDKSIAFQSFYNLPKDYSELISHAKETGKRIHDLSARVKMNTDLNIKNVQIKDFFLKKIADALFQKCLGQTFANSEGNDLANLTLEQLYLEREERKQINLNAKLQYQRKPGSLSNNIYNDSFIWNKPIQFKADQIEESKVKLKDLGKIKRFIADTKVTQLLAYAPTRVWSIGELEDELNLKARCYETIRREQILKDLFNFEKQILTSLNFNGQVEPPSLAIHTNHKFRAYVAEGVLRRKGHIESASWLINIDFEKTGVKELREATSLSIDSFLLVLIRNKFMHNQLPPLPFYEFMCERYPKNEGETFSEFFFRIAAAIMKKLINLDVKIAVA

SEQ ID NO: 2254 - protein, 1129 aa, Artificial; identical to SEQ ID NO: 1469
  Synthetic

SEQ ID NO: 2255 - protein, 1130 aa, Artificial
  Synthetic
METHTERVSVTYDYTEKADKHYFAGFLNQADLNFRTALVELAKRCGIEHGVNRANEGQNDEKETISWINETFNDKLSQTDWNYRTSLLSNFLPFVREISYKENTSVTRDAFRSDLILLYENLMILRHYYTHKFHDEKKLERKVFGVLDYLILQAAHTVRNRRLRNAIYKPALPKQFEEDYLEAEKSFIKHNQEVEALRQTEKLKADFDIKQFRKKHPTYKEEDFHSIYLNRAVSEILDKNKDTGEFSLKDSQRSERAEKDDKLSQNGFVFFLCLFLSRKDAEDLLDHTTNFKASYRLRYLVKRWTYTVFCYVGIRHTLRSEFSKEALLLQMVDELSKCPAELFEVLPEDKQQEFVMDRNEYFKDNDEDGNTPEESFVSHLIIRKRYQDRFPYFAIRFLDEFANFQSLRFQLRLGKYKHDTRTKTFKGIETTTERSIKEEIKVFGKLSEVHKSKEEYFEAKPEADEKTIKGWLQYPNVSYVIDNNNIPIYLDKFTQKENFPIDRSRKIEIINELHINEIIRSEAPHAFLSINELPACIYLFMEEASKKKRHPNSERELLTNPIGVGIENRILGKVQSQYKFIQTVDYNSQLSDKNTPKRFIKSLKEGKTNGEIDYHRLTNAIKKQIEDCDQRLIWLNSKKEEQKNREKKDQNTLKSRFILNSKEIGETAMWLAKDIKRYVSKTDRKNWKSRHQAELQALFAFYDKKKQQTESLLRDEMGIDLSEYSFLKDMFLEPSFVSVYNFYLIKKRELLNSYVLLIENNTGNYQQKAVRKEINKIFDHFDRSKYSYIDSAYHSNLLQKPVNLPRGLFDDKKEFSSKGDKEGRQSWFALAEDAPKQVFYSYSRAYQIQDMDGKTIKMKEFEMHENINEKADFDTELKKHIVTTEKRIRKIARQDYYLLQMVKFLFEELGIKFTEDITLSDAFFERDNIRKNIQISHGQSKREKGDYSENIYRVSNLLETRININLFGGKIPVMNIRLKDVGKYRALEKDERIKKLLSYSDRNYSTIDELIKEIDNYEYIRRHEILKAVHKLEHTIYTLAKENNETDKLQDGNPNFTEYLKYYYSQINEAIANISDDPLIIVRNRLSHNQLPELSEYNIIKAQSPRNETELIGDYLLRVFNSFNNSLISM

SEQ ID NO: 2256 - protein, 1150 aa, Artificial
  Synthetic
METQMLGISYDHTKTADKHFFGGYLNLATNNIESVINAFRDKFGPKDKELQSSQFASVCFKDNDSDADFQKKFRFIQMHFPVISYLQKEGDRSILRNNFSLLLNVISDLRNFYTHYYHKPLEFPNELFALLDFVFGKVAHEVKQYKMKDDNTRHLLNKNLSEELEIRYQQQFEKLRELKDQGKKINLSDTTGIKNGVLNNAFSHLIFKDGENFKPTVSYSSYYHGVDSSKNGITISQSGLLFLLSMFLNKRETENLKSRVRGFKAKIIKSEENEISGLKFMATHWVFSYLAFKGVKQRLNFDFQEETLLVQIIDELSKVPDELYQSFDERTKKSFIEDINEYMKEGTEDLTLEDSIVVHPVIRKRYENKFNYFAIRFLDEFMEFPTLRFQVHVGNYVHDRRVKNIAGTGFQTERVLKDRIKVFGKLTEINNLKADYIEKELKLSNEIGWELLPNPSYVFIENNIPIYLSMGKEFKKGIKDFSNRRKAQKPEEMKNRNQEKIRKDQITGIIGNKNELNPEKPVAMLSLNEIPALLYEILINGASPSEIENTIQDKLNAAFERIKDYDPKSPVPASQISKRLRKNNGIRSIDPDKLVHLIKKEIECTEAKLSLIDQNRKECKQRLKGKLIRERVFRNSEMGREATWIAEDIKRFMPALQRQNWKAYQHAQFQQSLSYLEKRPGEARSILMEGWDFEDGSSLWNGWIMNCFTKDLPFDVFYEFYLKKRKEYFVQLLDNIKHYSTNVRFLLKFLEQQMPKGLFDKRHFVLEDLETEKNKILSKPLVFPRGIFDNKPTFIKGKKVTEEPELFANWYQYGYDNSHKFQRFYDWERDYEKLLEDKLNEDAEFAKKSLEYSRADQLALLKLKQDLKIKKIKIEDLFLKLMAEYLFKKIFHYETNLSLDDFFLTQEERLQKEREAAQQNQRQAGDDSPNIIKDDFIWSKTIAYQKGQIYEPSVKLKDFGKFKAYSSDEKVKALLSYDTNKIWCKLELEKELSIGSLCYEAIRREQLFNEIQELEKKILSNWNWDKINHPYEFEVEDKKGVGHPNFKHYIVNGILRKNNIVFNEGEDQWIEDLNENQFKTLSKEELAEKSEIIQIAFLIILIRNQFAHNRLPASQFYEFICEKYPEIKGETASEIYLNFIKEMIPELMKL

SEQ ID NO: 2257 - protein, 1150 aa, Artificial; identical to SEQ ID NO: 2256
  Synthetic

SEQ ID NO: 2258 - protein, 1196 aa, Artificial
  Synthetic
MKTSKEFENYNSRNSFKKIFDFKGEIAPIAEKANRNLELKTKNETNLVQRVHYFAIGHTFKYIDTETLFEWVVDEETQMKQPTKFLSLQSFDDSFCDELQKITVVGTNNEYNGLIPAIRNINSHYIHSFEKIRIDSLSPVMVKFLKESFELSVIQIYIKEENELKRSKNERLASTKEIIEQNGFGKRLVQFLCDKFYPVGNKTTYPEDYLEYRKQFRNLSKDEAIDSLLFVEVETAFDWLLFETYPAFNIAVGKYLSFYSCLFLLSMFLYKSEANQLISKIKQFKRNKIQEEKSKREIFTFFSKRFSSQDIDSEENHLVKFRDLIQYLNRYPVAWNKDIELESQHPVMTDRLKAKIIEMEIDSSFPIYAENNRFHVFAKYQIWGKKYFGKKIEKEYIEQSFNGNEVEEFSYEINTSPELKGFYLKLADLKSKPGLYEKHKAEIKRTETSIKELIEQNVPNPITEKLKTRIEKNLLFVSYGRNQDRFMDFATRYLAETNYFGNDARFKMYQFYTTTEQNKEYENLKEVKSKKEIDRLKFHHGRPIHFSTYSNHHKRYESWDTPFVFENNAIQVKMTLDHGIEKTVSIQRSLMVYLLEDALFKADKSMVDSAGKHLISEYFTHQQQDFNYSRLVLEQNESINTEQKNKFKKILPKRLLNHYLPAIQNNTPAFSTLQLILEKAKLAEERYKKLTEKVKTEGNYDDFIKRNKGKQFKLQFIRKAWHLMYFKESYKQQASFSGHHKRFHIERDEFNDFSRFMFAFDEVPAYKDYLKQLLDKKGFFENQQFKALFENGTSLDNLYVKTKQAYEKWLIGQNNRELEATKYTLQSYEQFFADDMFYINQSHFISFLESKSLLSRDEQGQMRFNALANCAFLVSEFYYTDKLDKTEYKTNRKLFNQLRSVRLEDALLYEMAMCYLKIDQQVVQKAKAHVIEILTQNVQFDICNSQDKLVYHLVIPFNKIDAYVELLNRKETDETISSGSSFITNVDKYIEMIWNEIPWKEKNENAKKITHAAMYPIGEKYSRQKTITYDDLQKIYQHLLSSSNKLTNVSMQIERYYLCKPDGQGHVVFNGETDRKTGCYLIRFEKTGVPKTYFGVGELNIRNKAFHFLITPSKSYEKWLMDVEREFILKEVKPNNPKAYTDLNRSVKLVCDILLNTLHNNYFKLTDSDKGIPKEEQGKQKQKNAQITYFTKHILY

SEQ ID NO: 2259 - protein, 1127 aa, Artificial
  Synthetic
LQKQDKLFVDRKKNAIFAFPKYITIMENKEKTEPIYYELTDKHFWAAFLNLARHNVYTTVNHINKLLEIAELKNDEDVLNIKDSWNKQAEKLDKKVRLRNLLMRHFPFLEAAAYEKTTSKDSNSKEQKEKEQAEALSLDNLKNVLFIFLEKLQSLRNYYSHYKYSEEAQKPTFENDLLKNMYKIFDTNVRLVKRDYMHHENVDMQRDFSHLNRKKQEGQTRKIIANPNFRYHFADEKGDMTIAGLLFFISLFLDKKDAIWMQKKLKGFKDGRNLREQMTNEVFCRSRISLPKLKLENVQTKDWMQLDMLNELVRCPKSLYERLREKDRESFKVPFDIFSDDYDAEEEPFKNTLVRHQDRFPYFVLRYFDLNEIFEQLRFQIDLGTYHFSIYNKRIGDEDEVRHLTHHLYGFARIQDFAPQNQPEEWRKLVKDLDHFETSQEPYISKTAPHYHLENEKIGIKFCSTHNNLFPSLKREKTCNGRSKFNLGTQFTAEAFLSVHELLPMMFYYLLLTKDYSRKESADKVEGIIRKEISNIYAIYDAFANGEINSIADLTCRLQKTNILQGHLPKQMISILEGRQKDMEKEAERKIGEMIDDTQRRLDLLCKQTNQKIRIGKRNAGLLKSGKIADWLVNDMMRFQPVQKDQNNIPINNSKANSTEYRMLQRALALFGSENFRLKAYFNQMNLVGNDNPHPFLAETQWEHQTNILSFYRNYLEARKKYLKGLKPQNWKQYQHFLILKVQKTNRNTLVTGWKNSFNLPRGIFTQPIREWFEKHNNSKRIYDQILSFGRVGFVAKAIPLYFAEECKDCVQPFYDYPFNVGNKLKPKKGQFLDKKDRVELWQKNKELFKNYPPEKRKTDLAYLDFLSWKKFERELRLIKNQDIVTWLMFKELFKTTTVEGLKIGEIHLRDIDTNTANEESNNILNRIMPMKLPVKTYETDNKGNILKERPLATFYIEETETKVLKQGNFKVLAKDRRLNGLLSFAETTDIDLEKNPITKLSVDHELIKYQTTRISIFEMTLGLEKKLIDKYSTLPTDSFRNMLERWLQCKANRPELKNYVNSLIAVRNAFSHNQYPMYDATLFAEVKKFTLFPSVDTKKIELNIAPQLLEIVGKAIKEIEKSENKN

SEQ ID NO: 2260 - protein, 1088 aa, Artificial; identical to SEQ ID NO: 1675
  Synthetic

SEQ ID NO: 2261 - protein, 1229 aa, Artificial
  Synthetic
MENNPSNRFSKPTVPPKTRRSEGCEKPDSHSAELRPVFAAYLNMAQMNLFNTLKAIEGKLGIVTQNAKEDCMEGMKIVDFDKNIKEVEVRVKAFKELLKRIPVLQSLSGYQIKDDVKTVSFEDVAELLRAIVKIVHYYRNEYSHTHHYYTDAEKAEEADFEKRIMQPLDLAFMSAKRNMAKVHGYGKKELDFIDGNERQEVTGKGRDKKVKYYTDYYFRLGNDDFTRLSDVGIAFIVCKLLNKKYAIQFLQQSKIMTPRSQGGLSPFSQEENEVMANIFCAERIRLPKGRMEVESLDRKAALGLDMLNELQKCPKELFDTFCQDDKELFKVVQDEEEQQSDLEDGALMRRNDDRFPVLALRYIDEQKVLNGMAFQVSLGNYRYQFYNKTTIDPSNPNRVRILQKEINGFGPMHLVESKFKGKYGKDGLNLIRESQSEAPADTAATKPYLTDKRASYVIHNNRVCIMLKEKGSPLDKDCCYLPDLPVPKEENGTQKVNRPGDEKEKDWPHTCWLSIYDLPALVFLHLLGGNPGQVIRDYVGKIRSLLNDIAEEKCVPPCCDEPSPTNGPQQKKTITKPKDEVSIWLKEQYELPLSSVPEKIVDYLAGVSGGSMEEERLKAEDGFSKWAKSAVEKEIGDTELRQKRFQNDKKRVGSKANRIGKKSYVEIRPGRLADFLAKDIMKMQPADAEKNHCGKLTGQNYQIMQAAIATFKGDGRECRLTGLGELFVKAGLVGKDNRQKHPFLDKVLTNEITDTLDFYEKYLEEKKYYLEQLLCSEKYSEAYFLHGGLNDYKPKDRDYIKLLAGRYKDTFQLPDGLFADAISECLKKEDNVEIRNAAEGENRNNAAYLLRVYFTNKYDDDSQPFYFQTDGRFKRHYKVFDTIEGKKDATYRTVEEIRAMLRKGAADKAPVRRDIAEHLNTLQMPGEPQWINGKKKPSWREATPDEKESEAKKCQMQLRYCQQNERAIRRYKAEDMLMFMMAKRLLLESDNVLKKGNLNGLEAFKLRDIKPIGCKNGPQDNILNQQIDFSAAIDLFVEEVVHYTDKKGEEGTSFVSVNKGKKVIHQSGLKIKNIGDFYRFIFDSRLGSLLSQIEGDTFEREMVEKELDTYDNRRKDGFKTAHEIERVIIGKNKEQIETRFKNEIAAGLESKKIVYNKFGELLKYSELNSDIQAKIVDIRNMLAHNKYMDNIERVVDKDDMTLPQVLEKIIEWLQDNSKKITHTDESTNT

SEQ ID NO: 2262 - protein, 1146 aa, Artificial; identical to SEQ ID NO: 1461
  Synthetic

SEQ ID NO: 2263 - protein, 1003 aa, Artificial; identical to SEQ ID NO: 1494
  Synthetic

SEQ ID NO: 2264 - protein, 1003 aa, Artificial; identical to SEQ ID NO: 1723
  Synthetic

SEQ ID NO: 2265 - protein, 1130 aa, Artificial; identical to SEQ ID NO: 2255
  Synthetic

SEQ ID NO: 2266 - protein, 1138 aa, Artificial; identical to SEQ ID NO: 1719
  Synthetic

SEQ ID NO: 2267 - protein, 1003 aa, Artificial; identical to SEQ ID NO: 1494
  Synthetic

SEQ ID NO: 2268 - protein, 1173 aa, Artificial
  Synthetic
MGKDYKTQQPKKVRRQQKTNFSINLTGKHVFGAYFNMARTNFVKTINYIMPIAGVRGSYSENQINKMLHALFLIQAGRSGELTNEQRQWEKKLRLNTEQQTRLQKLLFKHFPVLGPMMADVADHKAFLNKKKSKVQTEEDKFAQLKGVSLADCLDVICLMADALTECRNFYTHKAPYNAPSQLAAQYQHQEMIAKKLDKVVVACRRVLKDREGLSVNEVEFLTGIDHLHQEVVKDESGNVKKKNGKVMKTFVEYDDFYFKISGKRLVKGFTVAVKDDKPVNIDTMLPALSDFGLLYFCVLFLSKPYAKLFIDEVRLFEFSPFTDTENMIMSEMLSIYRIRTPRLHKIDSRDNKATLAMDIFGELRRCPIELYELLDKNMGQPFFHDEVKHPNSHTPEVSKRLRYNDRFPTLALRYIDENELFKHIRFQLQLGAFRYRFYDKEDCIDGIVRVRRIQKDINGYGRLQEVADKRIEKWGDLIQKREEHAVKLEHEELYIDLDQFVEDTADSTPYVTDRRPSYNIHANRIGLYWEDSQNPKSYKIFDENGMYIPELVVTEDEKAPIKMPAPRCTLSVYDLSAMLFYEYLHEQQDVDTPSAERIIIDCEDDYRRFFKAVAEGTLTPFKKTKEFREYLEREYPKLRMADIPEKLQLYLTSKGLTHDNKPETVHERMIRLTREHLEEREIHVQRRLEHYQEDRKMIGEKENKYGKKSFADVRHGALARYLAQSMMEWQPTKLKDKEKGHDKLTGLNYNVLTAYLATYGHPQVSEEDFVSLTLEQVLTNAHLLGGNNPHPFIGKVLALGNRNIEELYLHYLEEELKHIRSRKQSLLSNPSDKALSALPFVHYDRVRFHERTDEEMRALAARYTTIQLPDGLFTPYILEILKKHYTENTELQNALRQDATAKINPTNNAAYLITLFYKTVLKDDAQPFYISGKAYTRNKDGEKAEAFSFKRSYELFSVLNNNKKKTFPYELLPLFLTSDEIQERLSAKLLDDNGNPIPEAGKRGKPATDIQGNTIWQRQIKQKINGYVNSLSDKDLKISMNQSWKKKEEERAAKREAMQSRLTKQINEVKGNERTLRRYKTQDMVLFLMAKELFATIISDQGNEVNWKQMRLSKVCNEAFLRQTLTIRVPVTVGNTTIYVEQENMSLKNYGEFYRFLTDDRLMSLLNIIVET

SEQ ID NO: 2269 - protein, 1134 aa, Artificial; identical to SEQ ID NO: 1986
  Synthetic

SEQ ID NO: 2270 - protein, 1131 aa, Artificial
  Synthetic
MEELSEFDLFTGGKRPEFAVFYNVALTRAIGILNYYAHPNTKELQNFTEKAFKTKFEEWITIKKQLPTEPAYHEMANYLWKSFDLRENDQGYALTDLDKKMTAELLLKLYEIRDFHSHAYHDNIALKVSAEFVKFIESMHDRALDKAREKYDTTDYEKMYCGKNARFGFFRDVYPDFFITQEGRAFLLSLFLTKGEMTLFLQQKKGSKRNDKDEFKVKHFVYRYFTHREGSARRWISQEEAMLDVLPEDMKNQVQSARKAYKVLSYLADQPELSTLSALNISDRPGNAGDTTSIFCLKNGTLVHNAMDLIAFCKEYDLFHGVQATEEKGRIHITVDCNGRAFVLDFLEADIKKVALDFFRSSDKRAYNTSFREKLDEWAQSRNHLLDILYMTERSTPHTIEDAETSLFEELESYYKQKLMGGPILREKLGRWIDIIQKNHGVDNAAQFREFVERVRNETIWVSHYDLFATENHKPRSSDKFMLFAVHYLMDWGNTGWEWGFKNPATIEKTEREKNRLLLKLDNEKLAQALALDRETKGGETPTIDVATERERLRISAGLVVYAAQKPQGTRLALKEGQALLRAEDQLFLIGPVAMRNLLIAFLIDGKDIKHFFKPLAMDMKKIGEAIKSKAELPENLELIGSHEMPETMRKALKNSKKTYSNENSIAQARKKINRIIDEVIRPLQNGAADKLSRAEKNRKIMDMYLYYDWKYANNDDFKFLRRHEYQQMSVYHYLLEKHKRNEYGFLIDGIMGHIPQEILLLLNKARDMDGLLQSLCVETTKRLNDWRELLDMRDLPFRKKREILEKLSVTLPDKSLTLNPYMPVPVHPLWVIKKYYKAENEAGGFSLSYKKIRENGLISSLKAENYAWESYSEFLGQHPQKDKITKKLKGSFDRLITEDTLVWHIGQKYLETMMPAWRDALTEAVQAGRNLRETEVKLNLADLTLVLKYHQLDDVLLQESKATMLKIAEHLKRSLPYREEKLKEFDPAKKIENRFKFNIDENLSELPYDDVHKERSRIASEALHWAKYILEWELAAVRSMLSSDLQKWRVVKSGYPRIGFRQVMDYCALTDTLKDLVAKIRNHSFHFVIPEGWCYAELEKNEDLCRLLKYVPKEKHWRALEAKKQSRNLS

SEQ ID NO: 2271 - protein, 1003 aa, Artificial; identical to SEQ ID NO: 1922
  Synthetic

SEQ ID NO: 2272 - protein, 1003 aa, Artificial; identical to SEQ ID NO: 1723
  Synthetic

SEQ ID NO: 2273 - protein, 1253 aa, Artificial; identical to SEQ ID NO: 1347
  Synthetic

SEQ ID NO: 2274 - protein, 1128 aa, Artificial; identical to SEQ ID NO: 2032
  Synthetic

SEQ ID NO: 2275 - protein, 946 aa, Artificial
  Synthetic
VLSPEGQKEFEDEVVHENERTPEVVKRFRSTDRFPFLALKYIDETKLFSNIRFQVQLGKLRFKFYDKPCINGETDVRSWQKDINGFGRLQEIEEKRKQIYKDWLQASVEREVKIEGEDISLDLLQFEQDTAMSRPYITDSRTSYNIHNNRIGLYWVEGVSNGHQYAKGGDYLPDLSVVKDGDAPVEMPAPMAMLSIYELPALFFYQYLQSATKDSGIPSAEDFIIMKCRGLRQLFLDISQGVVRPVSRKTELMAKLKEGRYGLTISDIPEKLRDYLLNKAPQDINQRKLMAAQERLRQRLQKAIRRRNGYEEDRKKIGTKTNNFGKASFVDVRHGSLARYLSESFLEWQPTLENGKGKLTGMNFSKLQAELATFVSPDQFDDIRQMLEEAHLLTGSIAHPFLKNIMGKNVQNIEHFYLLYLNEEIKHLRKIFDVDEKIADKDINFDGLILKDPDYSKLPFIKGKARWEERTPDYYRKLAQRYLEVDGKRAAVCLPDGMFADGILKMLKTNYAGNEVLQAHLVNEELTHNVSYLIRVFFEDQLKDQSQPFYASAFQSDANEPEEPSKFAHHYDLFDILNGEKAGLSLVPVYLSATQINTIFTWKELYELHLTILKKTTHKVRKNGREEREVSYETVERDFLGIKDDIMENVRNMQKKDMGNHSTLQEAKDARMRKLTKAVRDVKNNERAIRRHKTQDMILFLMAEQLLKDVLAMPDNGADGKFKLRNVCKQRFLANTIDVKFPFPVEGENVFITQQNVALKNYGEFYQLLSDDRLPSLLAKLVQSKKYDKGEEILIDYSSLMGELTSYNIHRSRIFWAIHQLERFIVTNQNFAEFLSNPSDMRFFVHEDRGSGPKRNNFRSLLELLEETDIKVLTPAERELIIAIRNAFSHNHYGIDFSELDLDDTTLLHHADGAEAENGKKKLTTIATLIVGKLLELQEKVKVHNQ

SEQ ID NO: 2276 - protein, 1327 aa, Artificial
  Synthetic
MGKDNKKYQAKGQDQKPRQTKKVRRIQSKDFRISLTGKHVFGAYFNMARTNFVKTINYVLPIAGVRGNYSENQINKMLQALFLIQSNRNAELTQEQQQWKKKLTLTSEQQTRLQRLLFKHFPVLGPMMAEVADHKAYLNKKKSKVQTEDEAFEQLRGVSLADCLEMLVLMGMTLTECRNFYTHRRPYNSPSELAGQYSHQATIAKKLDKVVVASRRILKDREGLSVNEIEFLTGIDHMEQVDVLDENGKPKMVNGKKMKSFKEYDDFYFTLWAKREIKNITMTGSDGHPTTIDTKLPALSDFGLLYFCVLFLSKPYAKLFMDEARLFEFSPFTGQENIIMQEMLCIYRIRTPQLHRIDSRDSKATLAMDIFGELRRCPTELYDLLDKTAGQPFFHDVVKRPNAFTPEVSKRLRYTDRFPHLALRYIDQNDLFKRIRFQLQLGAFRYKFYDKTDCVDGRVRVRRIQKDINGYGRPQEVNEKRFKTWEGLIQKREERSVKLEHEELYIDLDQFLQDTAASTPYVTDRRPSYNIHANRIGMYWEESQNPNQFKYFDEKKIYIPELKVTEDGKAPIEMPVPRCSLSVYDLAGMLFYEYLLKRSDSKYPSAEQIIIDCESDYHRFFSAVADGTLKPFAKQKELCDYLATNYPNLRLADIPEKLLLFLSGKGLTHNNMPETARQRLVRLTIEHLEEREQRVQRRLDHYEEDRKKIGDKENKYGKKGFADVRHGALARYLAQSMMEWQPTKDGMGHDKLTGLNYNVLTAYLATFGAPQPADEPDFAPLSLQEVLAKAHLIGGSNPHPFLPKVLSHTITVNRQTDRKMTVEPRNIEEFYLFYLEEELKHIRSRMQSLKTNASDKALASLPFVHHDRMRFRERTAEEMKALASRYTTIQLPDGLFTPHILKLLRAEYADNEALQQALNLQMPNQLNPVNNAAYLITLFYQTVLHDDAQPFYMSAKAYTRQNADNKTETFSFKRAYELFTILADDKENFFPFELKPLFLTCDDIQARISAKVKDETGDPIAKIGKKEKDSQGNIIWLREITEKIDVYVDSRTDKDLKISANQSRKEKEAEREQKREALRLRLNRMVREVKDNERTLRRFKTQDMVLFLMAKDMFTNILSDQEREVNWKHLRLSKVCNEAFLRQTLTFLIPVTIGDVTIYVEQENMSLKNYGEFYRFLTDDRLTSLLENIVGDLEPDQQGRLVIRHTDLMSELAAYDQKRSTVFKLIQQIEALIIKSNDALSNPASPDFWAKPGLPKRNNFASLLELIDHLNQTALTTEERTLLVAIRNAFSHNSYNLDLTQIAGVKHLPEVANSILKHLETIMGETQ

SEQ ID NO: 2277 - protein, 1220 aa, Artificial; identical to SEQ ID NO: 1568
  Synthetic

SEQ ID NO: 2278 - protein, 1128 aa, Artificial
  Synthetic
MENKRTLKDHPQYFGAFLNMARHNVFVINNHLAERFKLSPLPEDSHIPTSFLTRPIKERPNHIFSHLIRFIPIAKVFDPEQLPKEERTEEKSKTGKDFNKLKETFKICFSELNDFRNDYSHFFSTKKRTERKLMVDKLLADFLTTNYSRAIQYSIKRFTGVFKDEHFELARKNIILVDNENKITEDGLVFFTCLFLDRENAFQFINKIIGFKGTHTLEFKATREVFCAFCVNLPHDRFISDDPEQAFILDMLNELNRCPSELFNSLTEEGKKPFQPTLDSKQITNIEDNNAVAKELPDEDFYEYMQSITKRIRHEDRFPYLALKYLDTTKAFNKIRFQIDLGKFQIDEYKKQFNNAEEDRMIIENAKAFGRLDEFTSIEKTKDELEKVIGKMINKDGFKNVDSKQFAFEQFSPRYNYDKEKNKIGFQFFPNGIGVPIYPKLKKSENEKSNVKYNLFQNNPHAFLSIHELPKVVLLELLEKGKVETIIEEFINSNNTKILNKDFIEEIKNKLKFEKPFYKKFQKKNLHAYDNPSIEDYTERKNKLNEILNDLKTRKEQLNELLSHYNLNHTQIPTRIVNYWLDIKEVGKETAIANRIKAFRSECAERLKDNKKGKAPKIGVMATFLAKDIVNMVIDENIKKKITPFYYDKMQECLALFAGDENKQLFITICNELNLFNKETGHPFLKDIRINEIHYTSDFYQMYLEKKQNWIVNVFYKLEWNEKAKKKLTTVALPENLTLPFSIRNLDRTKSDFDSWLNNLINGKKEKDNPKPLDLPTDLFDNALVEVLTNKIGIERNPKHNYSYLLTQWLKDTQPFYNFEREYEIYKDKVYKETVKFKLGSKPTFKDYFLSSIKTVLQKLNIERKIERKPLLNENDVLRVFNHAITENEKLIRFYQTKDRVMLLMLKELMKSDRDLNITLHNIEAALNETVEIEQKVKGFLSYDAEGNYIDKQNDRTEEINKTITDKRKRKDFSVFKKFISDRRLPELFQYFKENEIPYQQLKDELDEYNKEKEKVFDETFKLETAIIEKAENEIKELFRDKKGNKIEGNIQFEPYLKWLKEKNFIGDTEFKILKVIRNAFSHNQFPPKIVMDKNIQWQQNISISQQIYETYASTIATVLDKIATLIL

SEQ ID NO: 2279 - protein, 1097 aa, Artificial
  Synthetic
MENDKKLEESACYTLNDKHFWAAFLNLARHNVYITVNHINKTLGEGEINRDGYETTLENTWNEIKDINKKARLRELIIKHFPFLEAATYQQRSTDSTKQKEEKQAEAQSLESLKHCLFPFLKKLQKSRDHYSHYKHSKSLERPKFEEDLQKKMYNIFDVSIRLVKEDYKHNTDINLKEDFKHLNRTGKFKYSFADNKGNITESGLLFFISLFLEKKDAIWMQKKLKGFKDSREKYQKMTNEVFCRSRILLPKLRLESTQTQDWILLDMLNELIRCPKSLYERLREKERKEFKVPIEIADEDYDAEQEPFRNTLVRHQDRFPYFALRYFDYNEIFTNLRFQIDLGTYHFSIYKKLIGGNKEDRHLTHKLYGFERIQEFAKQNRPDEWKALVKDLDTFNKEEEKPYISETTPHYHLENEKIGIVFKNHNIWPSTQTELTNNNRKKYNLGVSIKAEAFLSVHELLPMMFYYLLLKTKNTHNGNEVEAKKKGTKNKKQEKHKIEAIIESKIKDIYNLYDAFANGEINSIEELEEHCKGKDIEIGHLPKQMIAILKDEHKDMAKKAETKQEKMILATENRLKTLDKKLKGKIRNGKRCNSALKSGEIASWLVNDMMRFQPVQRDEEGKPLNNSKANSTEYQLLQRTLAFFGSEHERLDPYFKQMNLIGDNNPHPFLKETKWEECNNILSFYRSYLEAKKNFLESLKPEDWKKNQYFLMLKEPKNNRETLVQGWKNGFNLPRGIFTEPIRKWFMEHRKKIKADELKRVGFVAKAIPLFFSKEYKDGVQPFYNYPFNVGNINKPEEKDFLDYEKRKKLWDKKQAKFKGKTDKEKREDPSYPDFKSWKKFERELRLVRNQDIVTWMLCMELFEEQKVDGLNTGQIHLKDIVTNVDEEGNNNILNQIKPMQLPITVYDKENSPKRKPLHTVYIEETGTKLLKQGNFKALVKDRRLNGLFSFVKTSSEAESKSKPISKSRVEYELGAYQKARIDIIKDMLALEKTLIDNDENLPTNKFSDMLKSWLKGKGEANKARFQNDVKFLIAVRNAFSHNQYPMYDEKLFVNIEPFSLSSSDILEKEGLRIAVQLEEEVRKAVEKIKKSETKK

SEQ ID NO: 2280 - protein, 1122 aa, Artificial
  Synthetic
MKEEEEKGKTPVVSTYNKDDKHFWAAFLNLARHNVYITINHINKLLEIREIDNDEKILDIKDLWQKVNKNLNQKARLRELMTKHFPFLETAIYSKNKEDKEEVKQEKQAKAQSFDSLKHCLFLFLEKLQEARNYYSHYKYSESTKEPMLEKELLKKMYNIFDDNIQLVIKDYQHNKDINPDEDFKHLDRTEEDFNYYFTRNKKGNITASGLLFFVSLFLEKKDAIWMQQKLTGFKDNRESKKKMTHEVFCRRRMLLPKLRLESTQTQDWILLDMLNELIRCPKSLYERLQGVDREKFKVPFDPADEDYDAEQEPFKNTLVRHQDRFPYFALRYFDYNEIFTNLRFQIDLGTYHFSIYKKLIGGQKEDRHLTHKLYGFERIQEFAKQNRPDEWKAIVKDLDTYETSNERYISETTPHYHLENQKIGIRFRNGNNDIWASLETNGENNEKSKYKLDKQYQAEAFLSVHELLPMMFYYLLLKKEKPNNDEINASIVEGFIKREIRYMYKLYDAFANGEINNIDDLEKYCEDKGIPKRHLPKQMVAILYDEHKDMVEEAKRKQKEMVKDTKKLLATLEKQTQGEIEDGGRNIRLLKSGEIARWLVNDMMRFQPVQKDNEGNPLNNSKANSTEYQMLQRSLALYNKEEKPTRYFRQVNLINSSNPHPFLKWTKWEECNNILSFYRSYLTKKIEFLNKLKPEDWEKNQYFLKLKEPKTNRETLVQGWKNGFNLPRGIFTEPIREWFKRHQNNSKEYKNVEDLKRVGLVTKVIPLFFKEEYFKEDAQKEINNCVQPFYSFPYNVGNIHKPDEKDFLPSEERKKLWGDKKNKFKGYKAKVKSKKLTDKEKEEHRSYLEFKSWNQFERELRLVRNQDIVTWLLCMELIDKLKVEGLNVEELKKLRLKDIDTDTAKQEKNNILNRIMPMQLPVTVYEIDDSHNIVKDRPLHTVYIEETKTKLLKQGNFKALVKDRRLNGLFSFVDTSSEAELKSNPISKSVVEYELGEYQNARIETIKDMLLLEETLIKKYKKLPTNNFSAMLNGWLEGKDEADKARFQNDVDLLIAVRNAFSHNQYPMRNRIAFANINPFSLSSANTSEKKGLDIANQLKDKTHKIIKRIIKIEKPIESKE

SEQ ID NO: 2281 - protein, 1156 aa, Artificial; identical to SEQ ID NO: 2253
  Synthetic

SEQ ID NO: 2282 - protein, 1057 aa, Artificial; identical to SEQ ID NO: 1344
  Synthetic

SEQ ID NO: 2283 - protein, 1098 aa, Artificial; identical to SEQ ID NO: 1791
  Synthetic

SEQ ID NO: 2284 - protein, 1003 aa, Artificial; identical to SEQ ID NO: 1494
  Synthetic

SEQ ID NO: 2285 - protein, 1147 aa, Artificial
  Synthetic
MKIQDPLLAVYTNMARHNVFNIIRAAQDAFSITTPKKLKDDAGIAMDSHFLMKLLERDYAFPDQRRWKVINYLKNRNYLPILHHFYHELEAKMVKEYEGKASAEKPETNFFNSVKDYLAWCFTTLNTLRNASTHMHVYKANTNAEYDPLHLPNEYLIILNNLYESAKATAKSKFGEALGNHLFDQSNKIDFQTNDNQFSKLGLAFFICQFLDQRNATIYLQKTGVLNHFTGKLRLAHIKCFTTYCVKTPEKKITNENQEQSLLLQIMQDLERCPNNLYMQLSDDDKKKLQPQLSEDQVNRIIENSLSGNINYDIELEQLVKELSGYRRPRNRFNYFAVRFLDIKDALGKYKFQLSMGKLLLRTYTKKILSTEDERRILRELFVGGNLQNFQDEDEVLNTYTKRNPSDTEVTFEQFSPKYNIVDNTIAIYDKEFYPTNRGKTNKTKEEKAAVNQPKAYLSLRASYKMALLYVLHNDEDILENIITKHIGEFNPFEILSSQTVFDIHAELKKEEERFASPLRQVSADDTKMIFPKRNSPNQSFYKARERYVKELKYRKNILQDQFIKRNIDINVNSLPEKLLHYLLNVNSLPSSTQNDSEMAKKFEKEFHKKIRFENDQAKSICKKIEENKNDLSNIKLGKLATLVTKDIMKQMINVGEKNKFTTPYYRELQSAIAHFSTNKQKIITFCDYFSLFKNKVGHPFLTKNLITNATGVIHFTELYFQAKTNWFRNNFLKKGSKEEDYKDGGFKVNEDQITKLPYSLRTWIAKRTKNFDIIEWWNNKIGKPVNLPENIFDDELKRALIKEIPPEQLPVPEQQKIGKLLRIFIQNDEQFFYGFKRYYSYNTKATKSEEKKFIYDPKVTQNVKSATMNINWVNNHEKRIRFTRTKDRVALKLAEMLATEKGFSTNNMQLKQFVPNAQNSPLKQPIRFEKIINHDEIEDNFNGEKNFYTIPEKIIVADDKLSDKYENQERESKWNYQSYSRFNRVVYDKRLPGLLSAFEAKTIPFELLEYELNSYDNEWLKIIEKTAQFENAIYRKDSNGIIEICKTKYGKKTHDIEFEVYEQWLKNRNIILHPIVTYIRNKFSHSQLPLAHQLEFDLISIRESDSFLQKYENDIPIIEQYTTYSKRIFQLYDEKMSDLMEQISIV

SEQ ID NO: 2286 - protein, 1156 aa, Artificial; identical to SEQ ID NO: 1708
  Synthetic

SEQ ID NO: 2287 - protein, 948 aa, Artificial; identical to SEQ ID NO: 1976
  Synthetic

SEQ ID NO: 2288 - protein, 1124 aa, Artificial
  Synthetic
MKIPQIIENNKHLFGAYSTMALSNIRNILDHIATLADIENDFYSDSDSYWYHPCIKIIDPRNNCTDAAKADFVIEKIKSHFPFVPIVAEAQRQSDILRAKKQLDIAVRNRDYQKQEELKHRQKSLLSVTNADIYRVLNNMLWVLANYRNQTVHYLISDIKFEDGSDFLNYNEQPLSRMLNNYFTIALRDTANKYSYSPEALSFIQSSRYKTENRRKILDTDFFLSIQHNNSDTNPKNLHLSGVGVALLICLFLEKKYVNVFLQKLPIYGPYKKQSMEANIIRQSFSIHTVKLPKERIVSEKSDFTIALDMLNELKRCPKQLFSTLSYADQNAFRIVSSDMSDVLQVRHTDRFAQLSLEYIDRRELFSDIRFHLNMGKLRYLKTADKHCIDGVSRVRVLEGKINAFGRIHEFEARRKEQGFVEWHEQAARLIKTNKNIEIRDFEHVKRDDATPDSYPYIIDTYTHYLLENNKIEMRFGDYLPKLVKVDDQKWTVYNEMPTCCMSALELPAMMFHMMLCGSEATEHLIKAEVEKYKKLFGAMANGTLSKENIGNFEIAMEDLPKKVIDCVNRKKSGKSFVKQIKKEIAEMLADTNLRIVRLKSDKRSVASTQNKMGKRGFRSIQPGKLADWLAADIVKHQPSLFSGDDYGTDRITGMNYRVMQSTIATFNAATPEHSLDELKRVFSAAQLIQCQEREHPFLQKALNRNPQNTIDFYEFYLQAKRAYYQSLRQSIENGEDVKLPYLNPDRNKWVRRGASFYSTMGDIYLEDMPIELPRQMFDKEIKKALAQLPSMKGVDMKQSNVTFLIAEYLKRELKDDFQPFYQWNRNYRFTDMMICEENCDTKALASKFIPLELREEIWEKRGELKDAYKRWAFGRLNKNPDIKRLSPAEKDELLEKRIAKCRNEYQKSEKIIRRYKVQDVLMFMMVKSMFAQGVFTAESKEFALSTITPDAERGILSEVVPIDFKFSIDGKTYTIHSNGMKIKNYGDFYKLINDKRMKSLLNIVTHSTIEKDLLEKEFSTYDDKRPEAVEIIFEFEKAAYEKHPELKELLTPERKFDFRALLEELQAKSDLSQIDARYLSQIRNAFNHNAYPRNLKITSNIPEIAQEMVNIFRITDPYKKGKK

SEQ ID NO: 2289 - protein, 1167 aa, Artificial; identical to SEQ ID NO: 1781
  Synthetic

SEQ ID NO: 2290 - protein, 1160 aa, Artificial; identical to SEQ ID NO: 2249
  Synthetic

SEQ ID NO: 2291 - protein, 1094 aa, Artificial; identical to SEQ ID NO: 1358
  Synthetic

SEQ ID NO: 2292 - protein, 950 aa, Artificial
  Synthetic
LFFSFHNAQRVIFKHLYKAFDASLRMVKEDYKAHFTVNLTRDFAHLNRKGKNKQDNPDFNRYRFEKDGFFTESGLLFFTNLFLDKRDAYWMLKKVSGFKASHKQSEKMTTEVFCRSRILLPKLRLESRYDHNQMLLDMLSELSRCPKLLYEKLSEKDKKCFQVEADGFLDEIEEEQNPFKDTLIRHQDRFPYFALRYLDLNESFKSIRFQVDLGTYHYCIYDKKIGYEQEKRHLTRTLLNFGRLQDFTEINRPQEWKALTKDLDYNETSNQPFISKTTPHYHITDNKIGFRLRTSKELYPSLEVKDGANRIAKYPYNSDFVAHAFISISVHELLPLMFYQHLTGKSEDLLKETVRHIQRIYKDFEEERINTIEDLEKANQGRLPLGAFPKQMLGLLQNKQPDLSEKAKIKIEKLIAETKLLSHRLNTKLKSSPKLGKRREKLIKTGVLADWLVKDFMRFQPVVYDAQNQPIKSSKANSTESRLIRRALALYGGEKNRLEGYFKQTNLIGNTNPHPFLNKFNWKACRNLVDFYQQYLEQREKFLEAIKHQPWEPYQYCLLLKVPKENRKNLVKGWEQGGISLPRGLFTEAIRETLSKDLTLSKPIRKEIKKHGRVGFISRAITLYFKEKYQDKHQSFYNLSYKLEAKAPLLKKEEHYEYWQQNKPQSPTESQRLELHTSDRWKDYLLYKRWQHLEKKLRLYRNQDIMLWLMTLELTKNHFKELNLNYHQLKLENLAVNVQEADAKLNPLNQTLPMVLPVKVYPTTAFGEVQYHETPIRTVYIREEQTKALKMGNFKALVKDRHLNGLFSFIKEENDTQKHPISQLRLRRELEIYQSLRVDAFKETLSLEEKLLNKHASLSSLENEFRTLLEEWKKKYAASSMVTDKHIAFIASVRNAFCHNQYPFYKETLHAPILLFTVAQPTTEEKDGLGIAEALLRVLREYCEIVKSQI

SEQ ID NO: 2293 - protein, 1003 aa, Artificial; identical to SEQ ID NO: 1510
  Synthetic

SEQ ID NO: 2294 - protein, 948 aa, Artificial; identical to SEQ ID NO: 1976
  Synthetic

SEQ ID NO: 2295 - protein, 1138 aa, Artificial
  Synthetic
MPVSNHQQKGHKTYFTNHSNKAEISVFVNTALNNIYRIIKTIEENVFQAVPDYNREEMYKSQVFTVLFSKRNEVKKERIIQYLTRWLPWFSKGLTITDPRRFALRLVVYIQKLVELRNFYSHSLKNVVNLNLYTNAHVPSSAKDVFIDLVCDIRREERDKKDSFIPFDHVKAEYKDYMFDAILHEDLNREKYACYEQDYCNFRADFKQLYKSTKNEVRERFKKERNLNDEKLKKQGVIFSAGKGPDSKQNANKLTEFGLVFFISIFLERRMVADFLDTVYPNDIGFMDKLVKRSLTIYNAKPPKEQLISMDRKFALGLDILNMLNRVPNYIYDHLTDGAKEKAIDEEGIVMKRYNDRFPYLILQCLEYSGKLEGLQLMCLIGKNFNAKPYHKQFEGKSEIREIHKTLYAFDHLSDIRENDKYYQELRSKDHEVNYNIGEEELAIINEIKNLHTYPLYQYYPKYGIHEYSTWKYIGFVFQDESIGPPVIAQSEESETRIVITPEFRVNNTQHQFTLDQSLLKYLAYLLKGESTVSENENGLASFKDLCLQFKSDFVRLLNDIRDQNITPDSDYDYSQILNSYNIPSACIPKRIKKYLNAKQSSNNSRKLIKTKLEYMLCETKCLLAENPVRSKPLPKEEYINRKKESQYFLMRGDKATWITNDILFFMKPKLVSIEKEGQKTNHFHKLNNQQAKILQSKLALMDHNFHDIRSFMKETGVFETGSEHIFLTEQNIKAKYQKVDNFFVRYLGLRKAYLESTIKKLKTKNQIINQTELERAYYYIKSKTIRRSVANEDKHIAITTYIENLKKEPTIIHPELMKKWANDVYQKEESENNQVHNLSYIVNDLDESFARYKQQWFYQKDSLIDGFGKRPQFQKRPEEVHHVDEREKLIKRQKRAKRNSFDQAIELNTLQCQDKLLWHYLKYILVEDQNIVDFLHKQTSLASYTHSKENDILKHEIDFKIEAAIREYKSNKKITGKCKIKDIGKVKATLKIPLLFNKPKKVWVEGLLSYYKNDEIDYDDLMEAIDKIKSELPSIMKHFMKIEDDYQLHKESVYMKKIENMKEAPYCSFAKMIKSLKIDNLLSKSAGATNLDTLRNALLHGSLPRCEKAALKPKDISIGEFVISHLTNEIGQTQITY

SEQ ID NO: 2296 - protein, 1153 aa, Artificial
  Synthetic
MEQEYDFFNKTDKHFFAGLFNTALNNFDLSLAELNKRMNYKEIKGNEKEIIIIEYAFNKDERTQLDFENNFKYLSESLIFLNRIPSFIAHKNKNGSTIILKDFLKDFLCGLYQTLLNYRNYYTHFEHDDVAIGHPLIAEFLEYLLFNSVSRVKDDRVKTKAVKDKLLSKYKDDYTTIIEYKNKWICDKNEELINEGRKTFKKINNNSEAGYNYVLNSIFRRFIDDSTNTPKLQLDEKCSTDDGLTKVGFIQFLALLLNKRQVSLLFDNITYTRYTDTQLQRVITRWIFTYESYRDINYLFKSEYDEHALLLQMVSELTKCPKNLYPYLSEKNKDNFLEDINIYFKENAKLFEDDALVSHEVVRKRFEDKFPYFAIRFLDEFAKFPSLRFQVNMGKFNHDSREKEFISTGKKTERLILENLTVFENLSEATKKKNLYFEKSDSKEKSDKESNYKDVSDSIEVSDWVEYPRPKYQFNKNTIGIWLDCDGLGNYDESPKRENKKPTKHDILDKIELKDSFKKPIAYLSLHELPALLYCLLIEKKDGRFIENRIKGKIRKQRSFLESLKGDYQYSEEELKQFPKKIRLILTKKSNINSEKIKRQISNEIKVNPLKEIREKYTPKSETELSLSEKGKIATWLSKDIKRFVAKDVKGPSEEDKNKSWKGYQFSEFQALLSYYDIDKSKLSDFVFKDLNFNINKDFPFQGIVFNKSSLFDFYTHYLKSRREYLNHLLENFSNTTNEELLLPFKASKFKIKELEEYRKNKLEEPVMLVRGVFDDKPTASREKDKTEFAKWFTVSMNSSSAQKFYDFDKIYPLTLSVINGRKSEENLTINTKAGLTKQYIPFQSIRNKDSFVLTDFEKEEIKKNIKNPNENLNKNFYKYKQKQIYKNEATIRKTMRNDYYMLQMIKTFFIDTNEFINSTFENISLKDFYLTKAEKEKIQKNAISQSEKEKGDKTNVIFNESYILDKRVELSLLEGKIIGNVALKDRGKYKKLSQDQKVKQLTEYFDKTWSFEEIINEISDYEHIRSKVFFNSVHELEEKIYLKAKTENKVEELKDKGHHNFRNYLKYYFINDEHQKEEFNKIKRTNSILEVKEEFKQLILLIEIRNKFAHNQLIPKTSFDYLTSKFSMETNERVASYLNRIFNTIKTEILIR

SEQ ID NO: 2297 - protein, 1003 aa, Artificial
  Synthetic
MGAIENKHIFAAYANLAIDGLIKTLNFIAKKLDTQKQLSSWDIKHVITLIDSIFDQNPQNNLEQVVEGYLPWIKPIIEMKTPKKGERQSDKLCIEYKTIITAFASLLNDVRNYYTHYYHDPICIYPRGYDIPSSLNCIYDSAINIIKERFQAEEKEMEHLRRYTRKKGRVVLKTEDDHFYYTLVNNNDLSEKGYAFFISKFLERKYSYLFLKKLSGFKRGDSLQYRLTLEVFTALSTKPPVERLRTTKDTKQDRALDILNELSRIPIELYQTLEPKYREMYNETLQPTDAEDPYGLPDRSRIRFRSRFEAFALHFLDKQADFKEIGFYTYLGNYFHNGYQKTRVDRETKDRYINFQLAGFCKNIQDISAKKLSEALNVKSIDISTDSIPDINSFEPYLVQSTPHYIVNGNNIGIKVLPEGKDTYPTIDEKGAKMPIADFWLSKYELPAMLFYTYLRNNNIHKSHCPLSVKDIIERSIHKSTKQKHPEERSELMLRRVMKAIFWTDSKLNEVERIKSQKSAFGKRQHEILKAGRIAETLVRDMLWLQPSKNNGRDKVTEPNFQAIQVSLAYFGIRRNDLTEIFTRAGLINSSNPHPFLAQIGTNYTSLIEFYIAYLKERKVYFSRIQKKILQGKLNIQCHPLRDLQREPNKPQEKEEAIFLPRGLFNEAIINCLKKSKLKHLIESPTREKSPALNVSYLIHNYFRAYFEDQSQEFYAQPRNYRLFDKLSPNKGKSKSYLSLEQRIKKMEELRPSKIPVAEANKLLEKEDRLYRKNYNEICDNESIIRLYQIQDILLFMMTKEYLPSDLYNRINKYKLENVKGILNERVSYLIDLNPLKIQGEDIKIKDYGKLFYIHHDTRISSLNKVLSKVKRNNSISSSVKIQPYENYKRECLDFEEAQIQIIPIIHSFEIAMVSMFPDLKKATPGNYYDFNELITEYEKRTKQKIDSSFLIKTRNMFLHDKYEAECIKEISDDFVYAKKIIAEFKMKIENIKLEDLSNDSSA

SEQ ID NO: 2298 - protein, 1128 aa, Artificial; identical to SEQ ID NO: 2032
  Synthetic

SEQ ID NO: 2299 - protein, 1104 aa, Artificial
  Synthetic
METNENQKNNSKTLDSDKYYFAAYLNMARHNAFITLAHITRILGKNPAGEDQLAEMYAIKIFNPVNNSLSEDILKAKKLIDKHFPFVKYLVNINDSDPEVYIAEKYHKVLNQYSTLLNDYRNYYTHTASAAKVDLQPDFNNGLESIFDLAVNEVVKRFTLKEEEINHLRRKSPENTEIDNSTFKYRFRRKSLPPAFNENGMAFFICLFLEKNYSYLFLKQITGFKKDGTPGFRASLEAYTVYRTRIPKIRIDAEQNREMTLAMDMLGELKKCPRELYDVLQPEYDNKFRAKLNSDDGENEEDDYETENLFLRNGSRFSYLALSFIDTNNLLPGYSFHIDLGNYYFRFYSKMGADGIERKRNIKKHLLTYGNLVEAHQQKKVQWGLLEKENHEIPENNEEPYITNTYPHYHIQNNQVGLFSWNNIKTELPELKGKDTKTKAPDIWLSTYELPAIIFYALLCKKQAAIPPETIIANHIEKIKQLFSDIHTGICKPKLSQMNADEYIKQFESHYVSLSDIPKPLKEYLLGETFPDKAFEDYAHDMIKKLFDDTAHRLKQLDKQIIKDEESKPGVNGEDKFNSTYDNMKAGRMAAFLATDMLMMQPSVSVNELGIKDGKDKATGFNFQILQSCLALYGANHHKLYHIFENCKLINSPIPHPFLKDINLPTLDTLSAFYKQYLIERKKYLGICTLEKNYHAYYFLKPGERRWHERNDEYYRQLAHNYLNGFGKEPNKLGFNLPRSLFTPFIKSWFARFGNTEMKLLIKEESQQKHNAAFLITKYFELNLNDKVQPFYDFPRSYFFTDKYFSLQKSNKWPEEFTTEFLSFSELCNKSADFEKFYKDLGHHSYLDDKQRQTLHKDYHNYLKNEKLIRLAQTTDMVLFMAVQHIFEKLKVADTEEFKLSAIQTPDTSDILSLQCPFSLNIAVYHTDEKGNVKRKETPLAYKKITQTDLKIKNFGDFMRFTADRRLNELLKYLPQEEVSRADLQRELEEYDTCRLAVAKIIHTFENKMILRFSNEMNAMLTQHSYIEFKEISKLFYTAFTEHLADCIKLESIRNAFMHNQYPRPEDVGLAEVSFPGIALQLCQQAENVVQIFTQKLTLITNTQ

SEQ ID NO: 2300 - protein, 950 aa, Artificial
  Synthetic
  misc_feature (836)..(946): Xaa can be any naturally occurring amino acid
MNTIVKNEVKQAFNNIHFSKGSIAPLAEKANRNYKLITKWHNKQERLHYFAVGHAFKNIDKKALFGLTYDEKIDEFVPQRFEKLYSYHNFTFDNELDNLLSRIRDINSHSIHDFSVIKTDQYKSLLPFLLESFEVAAMMSYVDENRISLESYFDNNKEADFVKFLSNKFYIENKNLKKLSKKEAIHALLFINNPNTFDWLLFNEHKVFEVEKGEYFSHLAQLFLLSMFLYKGEAEKLISKIKGFKRNEDKKENSKRNIFTFFSKKFSSQDINSEESHLIKFRDIIQYLNHYPLVWNHEIEKNTKSMPVNMVMETIIDKEINRLFPDYSRNERFKIYVKYKIWGKKHFGKNIERLYIETPFTSEELKDFNYVVFTSPELKNEYAKLKVAKSEKEKRSIEKDINTLKNKRNITLEKLQKNIEENTLITSYGRNQDRFMPFACRYVAESNYFGEKAKFKLYMERTSDEQKNAESKMPKKALDKQKYHQGRRVDFLTFNEILEKYPDWDTPFVIENNAIQIELSNGKQISIQRALLVYLLEHALYGNANYPNGESLLNAYISTLEKHKEEKLAILKSHPSLNIEDKPEYKPELKKLFPRRLVKNYFPANEQSNDYNPFAKIWEDALDSEKRYKQLLEEAKQRESSINNNPDNKTKSSLVFDFEKKNKGKNFKLRFIKKAWNLMYFKAIFTENANTYGHHKRFHITKDEYKDYCRYMYAFEEVKTYKERLGKLFDSKGFFKNKEFKQLFDASLTLDSLYEKTKNKFKDWMNKQSKKTHSYAIESYQHIMDPEKHIVYINLSHFIDFLFKEGILEGKKENGIQFKSLHNKDFLLQAYYLKNXXXXXXXXXXXXXXXXXXXXXXXXXXXXXXXXXXXXXXXXXXXXXXXXXXXXXXXXXXXXXXXXXXXXXXXXXXXXXXXXXXXXXXXXXXXXXXXXXXXXXXXXXXXXXXXFPCT

SEQ ID NO: 2301 - protein, 1113 aa, Artificial
  Synthetic
MESLIQHEENKARNLINDPQYFGGYLNMARHNIFSIDNHLASCFETSKLSNEKHISDSFLLSADKRKNKTNKEPINENLLFERTLRFMPILRVFDTERLPKEVRLNTENMGKDFDEMRNCLKQAFSELNKFRNDYTHYFSTNTETNRKLQVTSELEEFLTRSFKLAIAFTKQRMRDVLKEEDYSLVEKKVMVLPEERFITTEGIVFLACMFLEREYAFQFIGKVVGLKGTHRNEFIATREVLMAYCVKLPHDKFISEDSRQALILDIANELNKCPLTLYDVITEDGRKQFRPELTDDSKRSVIENCINEDLEVDYDEYIQILTKNVRYKNRFPYFAFQYIEETKLLDNFRFSIDLGQFVLAEYEKRLAGEPTSRIVVENVKTFKYLRNVINEDVVFELKESNLQSNRFLQFSPHYSSNNNKIGISSESQPSVVKSKGKIESKIDYKIKQPLPEAFVSIHELPKIILLDYLSKGSVVKIINSFIRTNKSIILDIDKIKEIKEKLPNNEVWVPFRRLTDSKKHSAYSEEQKDEILRRKKLLNEILSSYSLNIKQIPSRIIDYWLNIIDVRKERSFSDRIKLMKRDCAERYKAIKRNEKDKTVSIPKIGEMATFLAKDIIAMIADEDKKSKITSFYYDKLQECLALYANIEKKKLFIHIVTNELRLNEKGGHPFLKGINLNSITRTKELYEIYLSEKAYKLNSRENDESWMSMTFYHQEWNEKAMKKMTKVVYPVNDEQIPYTIKQWNKPQQLLFDRFTNEQGKSSDWVRLKPLDLPTNLFDEEICVQLRSRLQEAKIPFDNKSNYSELLKLWWESRDDSTQPYYQLERQYNIYDESVRFTLNSKNKFKDYYQATLKKVFNQKKAEREAKRRINKRLPDIQFKDLERVFKHAIAETEKQIRIIQEEDRIMLLMLEKLMDDQQLKLGKAETLLSSTVPIKQKIGDKTNSSRVIVAQRKQKHYTVLRKYQYDRRLPELFEYTTEKEELKLEWLEDELKAYNKGKLKVFDLVFSLEKRIIEVAKQDIIALFDKPGSNDSKFNVDHKPYIKWLEKKELINSVEAGFMKKIRNSFSHNQFPECQTVELMISLMSDIPIATQIVNEYERLILRISSQIEEMK

SEQ ID NO: 2302 - protein, 1153 aa, Artificial; identical to SEQ ID NO: 2296
  Synthetic

SEQ ID NO: 2303 - protein, 1171 aa, Artificial; identical to SEQ ID NO: 1648
  Synthetic

SEQ ID NO: 2304 - protein, 1153 aa, Artificial; identical to SEQ ID NO: 2296
  Synthetic

SEQ ID NO: 2305 - protein, 1142 aa, Artificial
  Synthetic
MEDDKKTTESIRYELKDKHFWAAFLNLARHNVYITVNHINKVLELKNKKDQDIIIDNDQDILAIKTHWEKVNGDLNKTERLRELMTKHFPFLETAIYTKNKEDKEEVKQEKQAKAQSFDSLKHCLFLFLEKLQEARNYYSHYKYSESTKEPMLEKELLKKMYNIFDDNIRLVIKDYQHNKDINPDEDFKHLDRTEEDFNYYFTRNKKGNITASGLLFFVSLFLEKKDAIWMQQKLRGFKDNRESKKKMTHEVFCRSRMRLPKLRLESTQTQDWILLDMLNELIRCPKSLYERLQGEDREKFKVPFDPADEDYDAEQEPFKNTLVRHQDRFPYFALRYFDYNEIFTNLRFQIDLGTYHFSIYKKLIGGQKEDRHLTHKLYGFERIQEFAKQNRPDEWKAIVKDLDTYETSNERYISETTPHYHLENQKIGIRFRNDNDEIWPSLKTNGENNEKRKYKLDKQYQAEAFLSVHELLPMMFYYLLLKMENTDNGKENNEVGTKKKRNKNNEQEKHKIEEIIENKIKDIYALYDAFANGEINSKEELKEYLKGKDIEIVHLPKQMIAILESKPKDMVEAAKRKQKEMVKDTKKLLATLEKQTQEEIEDGGRNIRLLKSGEIARWLVNDMMRFQPVQKDNEGNPLNNSKANSTEYQMLQRSLALYNKEEKPTRYFRQVNLINSSNPHPFLKWTKWEECNNILSFYRNYLTKKIEFLNKLKPEDWEKNQYFLKLKEPKTNRETLVQGWKNGFNLPRGIFTEPIREWFKRHQNDSKEYEKVEALKRVGLIAKVIPLFFKEEYFKEDAQKEINNCVQPFYSFPYNVGNIHKPDEKDFLLSEERKKLWGDKKNKFKGYKAKVKSKKLTDKEKEEYRSYLEFQSWNKFERELRLVRNQDIVTWLLCTELIDKLKVEGLNVEELKKLRLKDIDTDTAKQEKNNILNRVMPMQLPVTVYEIDDSHNIVKDRPLHTVYIEETKTKLLKQGNFKALVKDRRLNGLFSFVDTSSEAELKSKPISKSVVEYELGEYQNARIEIIEDMLALEETLIKKYKTLPTNKFKKMLKGWLEGKDEADKARFQNDVKLLTAVRNAFSHNQYPMRNRIAFANINPFSLSSADTSEEKGLDIANQLKDKTHKIIKRIIEIEKPIETKE

SEQ ID NO: 2306 - protein, 1262 aa, Artificial; identical to SEQ ID NO: 1735
  Synthetic

SEQ ID NO: 2307 - protein, 1082 aa, Artificial
  Synthetic
MARHNAYLLMTDINTRLGYEKAPADDADTINIKALTILRKGEQNISADMQLKVIRELHIHFPFLKTMLFAFKRPKGKVEDRELQKMEYAPADYYEFFAVFLKSLNELRNEYSHAAPQKTDFPGSLLYGMRLTFDAAVRKARERFSYTDKDVDHLIRLGKGGKERAAFNYKFQDEKDASLSLYGFSFFICLLLERKYITLFTQKLYGLKNRSVRKYQASYEVFAIYGISLPRARYTSDVGEGALLLDMLNELKKCPSLLFPQLPAKYQDTFRIPITEIEEGEEQQEGDSGYVLVKRHEDRFTYFALRFIDEVKWFSSLHFPIDLGNYHYYLYNKTVEGIPRVASLWEKVIGYGRFPDYQRDFFAEAVPQNWRVLWKNHEQLAADESNLLPFMPRTTPHYHLPDDNISIKIAKDGELWPHLEFKGNDKSLNKQKAKEQPDLQISKYDLFSLVFYGLLVGSDRVRSLIENKLINYVSMRRKLYRQVQSGAFTPIQFPADIPAPTHKGIKDPLYDKRKALLNTKLASSGYDFPPDDLTDEIKAYLMGVKTESFEEKAKYRILDLLDETDNLLNAIKRKLKEKRKPGSKKDVEIKAGILADFLARDILMFQAAIKDGTAKAEGKATSTIYKVLQAKLALYGANADTIRQTFAACNLIGGRNPHPFLARVVDQNKKRITDFYVAYLDARMRYLEQCEQDKKYREYEWLKHNQSRRRNQPDYGRELAGRMLEIPIVIPRAFFTPLIMAELTISGNEQLKALIQNGRTHNSSFLVLSYLTQQLGDGTQHFYDWERVYKIFDNWFDERKKKRDPLPQKPLDERARQELFKDVYKWAIEQTKETQTDYRKRFEEFEWTEKQLRHVKIQDVVTFLMCDYLLKNINRNLFQSEGRFFLKDIGEGGILDTTMKNFGRTVRYSCQSIPSDTEYIISGETRIYQDNLKVKNVGDFNKFIKDRRLNNLLAFLKKEQIARADLEKELERYDMLRPDIFHSIHEFEIKILAKWPDTNGLSFEEILQRCIKENALTKEDAAKIKTIRNAFSHNQYPDPLAFMSGNVMNEEAAGSSHVADYFYNYLVAALQKVKSETPSTVG

SEQ ID NO: 2308 - protein, 1152 aa, Artificial
  Synthetic
MENHTKQTTYKYDEIADKHYFAGFFNLAWNNIEIVFKVFLKKFKLIEDKDKKIEVNPLSFVDNYFKNELALSDYRDRIDFLKQYFPVVQYLELLVSKNNDLEKCIGEEKENKRRECFRAKFKSLIRTINELRNYYTHHYHKPIIVDEATFELLDELFLTVVKEVKRYKMKGEPIRHLFKKELNNELTALIKLKKSELETRRKEGKRVNNDPVSIENAVLNDAFSHLLLGEKKVKKFYQSKSTSSNQQSTINISESGLLFLLGMFLHKKESERLRSNIQGFKAKVVRDPEKPIDFKNNSLKYMATHWVFNHLAAKPIKERLNTAFQKETLLLQIADELSKVPDEVYQTFSQEKKNEFLEDINEYFKTGNDIKSFEESRVVHPVIRKRYENKFNYFVLRFLDEFIDFPTLRFQIHLGNYVHDQKEKPISQGTHLITQRIIKEKINLFGKLSEVTNNKTDFFQKLEVAGGETNLEMFPEPSYNFVGNNIPIYLNLAKSKVEGAKELNSHLIRLNNEEKKHQKKRTGNKPDKTIQISGISYGKPVALLSLNELPALLYELLINGKSGEEIENILVEKLVARYKTINNFSPDNPLPTSQISKKLRKATANERIDIDKLIRAIDREIAVSKEKANLIATKLRDWENAKTNRKYAFTKKELGQEATWLADDIKRFMPNKVKENWKGYQHSHLQLLLAFYESRPNEAYSFIQEFWNLDNDTYLFNRWLKTSFYEKSFHKFYQKYLENRKEYFENIRHQITAFKNQEKLLKKFIEQQHIWSVFYKRLYIVSPIEEQKRQLLLKPLVFTRGIFDPKPTYIEGKEFEGNKDLFADWYQYIHDKEHVLQKFYSWKRDYKELFEKFKASDEFTNNKYQLSEKQQFELFNRKWDKKIRKIIGQDLFLNLIIKRIIKELYHQDVALNLADYYLTQEERIEKEQRAKQQTNRLKGDKSENIINDSFIWNMTISYKTDYINEPAIKLKDIGKFIRFLNDEKVERIFSYTPKKNNWRKHEIEKELEMYEKIRREEVFKMIQELEKKILEKHKFDGINHPDEFEKSGNPNFKKYITQGVLKKRGIQDVVIEWIENLGENSYEDNDTLELLVQKDEKVQDAFLLIYLRNKFAHNQLPTKEIFDIIVSKTDTKSYVAETLLNYISITSRRILN

SEQ ID NO: 2309 - protein, 1147 aa, Artificial
  Synthetic
MQLTNAKNYLSQQVDRENIRARFAEIFHRKGVMAAIANKAFRNLELKKERAGKESDDNGIYHYFLIGHLFKHIDTKAFFASVLNADETKQVPSRFRALQSFEFDFGPDFFTLLKSVRNVNSHYIHTFDCLRVDRLTPKLWKFIREAFELSSILSFINEYEMSAAAYFEDDMREEKLIAFWCDKFFPNTVYQSTVRKSFGNLTKSKAIDFLLTIDVDTPITWELSPGHQLFTIDSGRYLSFHATMVVISLSLYKNEANQLISKIKGFKRNDDNAYKSKRRIFTELSKRFSSQDNDHEQLHLVKFRDIIQYLNHYPTPWSEMLEPDKHPDAAARSLKESIVDMEIRRLYPEVFITGSNEEQERFAIYARYRLFGEVIKGRYKKSFISANFSSAESGKFEDVIYTSDEVKGLRRKLADLRNAQVIDGRRRKEIEKVKRALADAKSLPNQEVEKLANRLHSGLFFISYGRNQDRFMEFALRYLLEAAYFGPEAKACSYQFYTTEEQQDFLANAKNSSPKATYDKLKFHHGKSVHFITYADHLKKYPDWDTPFVVRNNAVQVEVPIDLEGPQGHPVYKVLTIQRAVMPYLLAHAMYHAERGTPAGQKLISAFYMRYHSQIEADMTFLSERTAITSIEKSRLKKRFPKRLLHNYHGGSNPQPYTTPLRALLEDANAQEERYALLLAEAKKKGIGAEFTKRNKGKQFKLRFLRRAWHELYFKKSYARQVALHDGQHHKSFHITRDEFNDFSRWMFAFDEVPQYKHQLEKLFSAKGFFHITSFRSLFDSGRSLEDFYYKTKQIFKTWLEEESKKSAVPKLRDLSAFKQQIDRPDLFINLSEFINFLIDTGTLSKDASGHIQYHCASNFPFLHSHFYEVSTLSGASATFRKRIGKHRLEDALLYEIAMHYLKMDTQVIQHARHHVGVIQQEDVELDLKDSKGNGLYKLSIPFHKISAFTELLTHKAKQEANPRFRNSSFLGNLKEYINLAQDEKEVKPICQVLARTGTLFYDDLHKINGHLVSQSIQFTQVVMALERYFISKGGVSLFNKDYIDFSKLPILMGYFENKKETRNKAFHFDVPKQTYRSLIFDIEKKFITNEVKPVGAKKWQDLPIEIRAILELFLNQLHEHFFGRKATDGVNRRRQAEDKYMNEVVN

SEQ ID NO: 2310 - protein, 1090 aa, Artificial
  Synthetic
MEDDKKTKESTYTLDNKHFWAAFLNLARHNVYITVNHINKILGEGEINRDGYEKTIENAWNEIKDINKKDRLSKLIIKHFPFLEVTTYQQNSADTTKQKEEKQAEAQSLESLKKSFFVFIYKLRDLRNHYSHYKHSKSLERPKFDKDFRNKLYNIFDASIRLVKEDYKHNPDIKPKEHFKHLDRKRKEEFRYSFADNEGNITISGLLFFVSLFLEKKDAIWVQKKFEGFRCSNESYQKMTNEVFCRNRILMPKLRLESTQTQDWILLDMLNELIRCPKSLYERLKGEDRKNFEVPFDSTDEDYDAEQDPFKNTLIRHQDRFPYFVLRYFDYNEIFENLRFQIDLGTYHFSIYKKLIGGQKEDRHLTHKLYGFERLQEFAKQNRPDEWKSIIKDLDTFKKQEDEEVNEKPYISETTPHYHLENEKIGIAFKNHNIWPTTKTELTNNKRKKYNLGTSIKAEAFLSVHELLPMMFYYLLLKTKNESPRKVEAIIESKIKDIFTLYDAFANDEIDNTDKLEKYCEDKDIKIGHLPKQMIAILYNKHKDMVEKAKVKQEKMKLDTEDRLKKIDKQIEGKIKYTKRGKSPLKSGEIASWLVNDMMRFQPVQRDENGEPLNNSKANSTEYQLLQRTLALFGSEHERLTPYFKQMNLIGDTNSHPFLKQTEWEKCNNILSFYRNYLKAKIEFLDKLKPEDWKKNQYFLKLKEPKTNCKTLVQGWKNGFNLPRGIFTEPIRKWFMEHQKSIKVDDLKRVGLVAKVIPLYFNKIYKDSVQPFYNYPFNVGDINKPKEKDFLDNEKRRKLWDKKQLEFKGKTEEEKRKNPSYLDFKSWKKFERELRLIKNQDIITWLMCIELYNNQKVENLNTGHIYLKDIITNVKEERNNNILNQIKSMQLPVTVYENESSPKKKYLHTIYIEENGTKLLKQGNFKALVKDRRLNGLFSFVKTNSEAESKSNPISKLCVEHELREYQKARIEIIKDMLALEKTLIDNYDSLDTDNFHNMLTGWLELKGEVNKAKFNNDVKLLTAVRNAFSHNQYPMYDENLFGNIERFSLSSSTILESKGLNIAAKLKEEVSKTVEKIQEEEDGKKEKET

SEQ ID NO: 2311 - protein, 1270 aa, Artificial
  Synthetic
MNLLTKNNTIMGNYQQNWKKRRTAPQPNAKSEQLRPVFAAYLNMARANLYSVLRYISVQCGLEVNQNEDSMHELPIAKFASNKRPEVRQKAFLLLMRNIPILQQMTQSGLTQGKPADGDRPAKEKHLAVEQEDLQRVLQNLIRVVNFKRNLFTHADHYDTDEEIEKELQREVALSGPLNTAFKGSKREVKRIFCYTEKDMNFVDQDEHMKRILMKDKNGNIMQDEKGKDMYIFVERSNWYFRLYDTTPDPVTEMPLAQKLTTAGLVFILCKLLHKKYATQLVQKTGLFRTRAQSGSSPFEKNENEVMFNIFCAHRIRLPKGRVESTASDYALGLDILNELQKCPSELFDTLSPDDKELFQFKKKDNETLSSPDDDINLFRRYGDRFPYLAMHYIDAMREAHDNQSKVLRDIVFQVSLGKYRFNFYNRASLDTNVEDRVRVWQKEINGFGPIDKIEQKRKDEYGAIIRPISDDPKRLYNADTAETEPYLTDQHAAYAITGNRIGITWNDLIQNPHSDERRSSIRLRWPEKEKKGEDRQKDKINIEKLDNDKCFLPNVPESTENVAPRAWLSIYDLPALIFLHLLGGDPEAVIKDTYKRLVLLFDDIRTDQLKPQANKEQLQNVLSSDPYKLRLSDIPKKLQNYLSSKGPKTQDEADKAFINWVNEQLDGDGLEVGIIEKLRLRIEQFKQNLKVVGDKQNRIGRKGYVDIRPGSLARYISKDIMLMTRPDESRKNNGKPSGLDYGVLQAAIATFKGDGNALANTSLGRMLLKAINVNNHPFLNSVMGQQISDTIDFYTKYQIAKLEYLNALRKGKRGDYKEQWFLREAYRNHAVQTAEHMQGEKGLASLYIDTLQLPDGLFTDAIYNQLLANNVTANNAEVRAALADREKSGGVSHLINLYFEKVLGDKPQSFYREMKRHYKVIDWAKYEQDKDHPVLLTTIPPAVYSSPEEISTLLRKGNSDDSPIVRKLNHIANSLKKKISKKWEMPPRYASAEIKEKDDLFFKLIHQMRKLQKNERNIRRYRNQDILLFEMAKKILLSGGVVIKDNGHVERGIDQFKLHDILPPGMKRGNDNNLLEQKVEFRLTINLNDENGKPIKDSEGNSLTRTISQAGIKIKNYGDFYTFLYDSRIGSLLSQLNVNDDIKRDNLETEFEHYDRQRQEVFRLLQNIERLIIESHPAIADSNAGKPGFNNKEGKPYRNSFSSLLSLCKQYLNEGGEPTDVSNLLTEIRNAYSHNRYVKSESKDLDIRSLSLPEVADHILNWLKNHQHE

SEQ ID NO: 2312 - protein, 1330 aa, Artificial
  Synthetic
MKNEQNRTNVHFKLEDVNYKIPYDQQPECKRHVIGAYANLARHNMTVTINVIMQAIGMKLFNENDIDDAFNKKHRTIIAKLDSIQKVNLQKRLYRHFPFFKRMKLEDETKKSVQLNTLLEVMADFTNCMAMLRNYYTHYHPYNTPEEEKRQFELRKAMGKRLQYLYENTCQLFKSNEALDHESNEVLSALRIPEDYTQVIKPGDNEYKKTSEFYFNPKISEKKKRGIKYDPSTKVFEKKAVRFVRNPDYQAYMMDDEKGMSDTAIIYFLCLFLEKKVSFDLMEEVGFTKQIVFKGEHADQQLLYLKEIMCMNRIRMTKTKLDSEMTDTALALDMINELRKCPKPLYEVFCKEARDEFKDDATVIWEREHGHEAIATEETQEVDNDQELSETTDKNTPRSTFVRWEDRFPQMALKYIDMTRMFDDIRFQLNLGKYRFAFYMHDEKYSVDGQKRLRILQKEIHGFGRPIEVDEKKSLKWASLFNQRTVQDGLTIKEPDTAGQDPYITEQRAQYAIDEKAHSIGLRWEGWDNPNRKTIVDENGKEKKEPHYGDLDKEKMFIPYLPSTPVKEERQTNQAEPLLAPQCTLSLYELPGLLFYQYLMTKYKSSKYDAESVVKNTFSNLNLFFNDVAKGVLCPVEGKDENTRKQEMEKLLKEKYKLQLSSVPEKLKMYLIGSNVDNAQRMEASALRRLNERRERKNKALESFRNKKKVIGSKDNKFDKMRSTIKTGSLGQLLARDIMEWLTDETKGKMNLTGQNYIAMQTALALLGQRFDDNSEEITWNKLREIFISANILPQNADDYDADLHHPFLQKVLDEAPTSVEEFYEIYLEKEINHIDDITTLFKKHKAKGIGLYIPFLHVNRIRWQNTDAEGMKKLASRYTERPLQLPNGMFSTPILHILMEIKNPKLHKALEKIQNDEKGVQLSNNIGYLMKLYFKFVERDHSQPFYNTTAIDGQPSPYRHVYRIFKKLYGEKIPHTNRTTSPAYSIEELRGLRKKSIEDINAYVDKEIQAWKEKRLTKFEKKLTDKLKKENDRRYKNYEKQLNIKEEVRAAVEKEELAMLPELEAMRHEMTSKLEKKLKKVYDNERAIRRFKSQDTLLLIMAREILKAKSKDQDFTKGFNLKYVMTDSLLDKRIDFSWDVLIQDKKTGSVRKSIKQKDMKMKNYGQFYKFASDHQRLESLLSRLPQSVFQRAEIENEFSYYDTNRSEVFRQVYIIESEAYKLKPGLEDDNNANHEWFNYIDKKTAKPHPIRNSFIQLLEILAAGKDGILDDKEKIAIQKTRNAFGHNTYDVDLPAVFEGKEEKMKIPEVANGIKDKIEEQTGEMTKKIK

SEQ ID NO: 2313 - protein, 1113 aa, Artificial; identical to SEQ ID NO: 1386
  Synthetic

SEQ ID NO: 2314 - protein, 1127 aa, Artificial
  Synthetic
MNNTMDAEGKNERTLQDDPQYFGGYLNMARLNIFNISNHVADKLSIALLKNEEDINNSFLCNSNQKLNWSKAYAMTMRFMPLLKVFDTERLPEHRTSQKDKEKGKEFGIMCDSLRIVFRELNQFRNDYSHYTSTEDNFTRKIEISPELAEFLTCNFKRAIEYTKQRFADTYQNEDFILAERMQMVKSNIITTEGIVFLTSLFLEREHAFLFIGKVKGLKGTQYKQFKATREVFMSYCVNLPQDKLISDDYTQSLTMDIINELTKCPETLYNVLDESARKQFIPQLGEVETDNVRQNSINEAELTDENDYAQYMEDITKRVRHSNRFPYFALRFIDELDLLGKFKFQLDLGKLKLNTYPKPYMGEDVDRAITENVSAFGKLSDHQVKEEVQAKVVKDYSSVQFDQFAPHYNMECNKIGISRKSETAIVIKPSETGVKSAYKLKQPIPEAFLSIKELSKIVLLEYLSPGESQRFITDFICTNSDKLMNLDFIKEVKGKLPVFDKPFYKKVTIKRKSYTKHELTDLEARKNLLDQVLVTYGLNTKQIPTRITEYWLNIRDVRNQYIISERIKSMRKDCTTRLKSLKKLDETGKGKVPKIGEMASFLARDIVSLVIDPVKKKKITSFYYDKLQASLALFADPDKKKEFMHLVKDELNLLSVGGHPFLINIDFTTIHYTRDLYKKYLEEKGCKITNDRKDISWIFNTFYKKEPGKNSSLPVTKVKLPLDKNGNPDSKRLPHSLYSLGNRKTDNSIEEIEKWLSNVKHGKMKTDCTKPVDLPTNLFDSRLIELLQKETGDTSLAPKLNGLFVTWWKKRGDSTQSFYNDKRNYVIYDQEVCFLPNTKKLYQDYYQSALDRAFRLKREERRQERLLNIRLPDIQLKDMKKIFNITLSETEKEIRILQEEDRLLLLILEKLMEKEIAGTLNLKNVNDLLNEQVDICQQVKTYLSFKENGELASKDERMQITKNIISYGSRKNYGLLRRYVHDRRMPELFEYYPTDDIPFEAIKQELEAYNKAKQIVFDKVFELERALTERFKDEVMAHFVNRDGGSRLKGNIQHSPYLNLLESKGIISKDAHRFLKAVRNAFSHNQYPHKKTMEIFVKEWNTSNFANQIVDIYKQKIDEVIDNIKK

SEQ ID NO: 2315 - protein, 1113 aa, Artificial
  Synthetic
MESLIQHEENKARNLINDPQYFGGYLNMARHNIFSIDNHLASCFETSKLSNEKHISDSFLLSADKRKNKTNKEPINENLLFERTLRFMPILRVFDTERLPKEVRLNTENMGKDFDEMRNCLKQAFSELNKFRNDYTHYFSTNTETNRKLQVTSELEEFLTRSFKLAIAFTKQRMRDVLKEEDYSLVEKKVMVLPEERFITTEGIVFLACMFLEREYAFQFIGKVVGLKGTHRNEFIATREVLMAYCVKLPHDKFISEDSRQALILDIANELNKCPLTLYDVITEDGRKQFRPELTDDSKRSVIENCINEDLEVDYDEYIQILTKKVRYKNRFPYFAFQYIEETKLLDNFRFSIDLGQFVLAEYEKRLAGEPTSRIVVENVKTFKYLRNVINEDVVFELKESNLQSNRFLQFSPHYSSNNNKIGISSESQPSVVKSKGKIESKIDYKIKQPLPEAFVSIHELPKIILLDYLSKGSVVKIINSFIRTNKSIILDIDKIKEIKEKLPNNEVWVPFRRLTDSKKHSAYSEEQKDEILRRKKLLNEILSSYSLNIKQIPSRIIDYWLNIIDVRKERSFSDRIKLMKRDCAERYKAIKRNEKDKTVSIPKIGEMATFLAKDIIAMIADEDKKSKITSFYYDKLQECLALYANIEKKKLFIHIVTNELRLNEKGGHPFLKGINLNSITRTKELYEIYLSEKAYKLNSRENDESWMSMTFYHQEWNEKAMKKMTKVVYPVNDEQIPYTIKQWNKPQQLLFDRFTNEQGKSSDWVRLKPLDLPTNLFDEEICVQLRSRLQEAKIPFDNKSNYSELLKLWWESRDDSTQPYYQLERQYNIYDESVRFTLNSKNKFKDYYQATLKKVFNQKKAEREAKRRINKRLPDIQFKDLERVFKHAIAETEKQIRIIQEEDRIMLLMLEKLMDDQQLKLGKAETLLSSTVPIKQKIGDKTNSSRVIVAQRKQKHYTVLRKYQYDRRLPELFEYTTEKEELKLEWLEDELKAYNKGKLKVFDLVFSLEKRIIEVAKQDIIALFDKPGSNDSKFNVDHKPYIKWLEKKELINSVEAGFMKKIRNSFSHNQFPECQTVELMISLMSDIPIATQIVNEYERLILRISSQIEEMK

SEQ ID NO: 2316 - protein, 1003 aa, Artificial; identical to SEQ ID NO: 1494
  Synthetic

SEQ ID NO: 2317 - protein, 974 aa, Artificial
  Synthetic
MSITPKKMYNIFDNNIQLVIKDYQHNKDINPDEDFKHLDRTEKEFNYYFTQDKKGKITESGLLFFVSLFLEKKDAIWMQQKLTGFKDNRENNKQMTHEVFCRSRILMPKLRLESTQTQDWILLDMLNELIRCPKSLYERLKGEDRKKFEVPFDSTDEDYDAEQDPFKNTLIRHQDRFPYFILRYFDYNEIFKNLRFQIDLGTYHFSIYKKLIGGQKEDRHLTHKLYGFERIQEFTKQHRPDDWKAIVKDFDTYETSEEPYISETTPHYHLENQKIGIRFKNDNDKIWPSLETNGENNEKSKYKLDKQYQAEAFLSVHELLPMMFYYLLLKKEEPNNDKKNASRVEGFIKREIRDIFKLYDAFANDEINNIDDLKKYYKDKNVEIRHLPKQMIAILESKPKDMAKEAKRKQKEMVKDTKKLLATLEKQTQKEKEDDGRNVKLLKSGEIARWLVNDMMRFQPVQKDNEGKPLNNSKANSTEYQMLQRSLALYNKEEKPTRYFRQVNLIESSNPHPFLKWTKWEECNNILTFYHRYLTKKIEFLNKLKPEDWKKNQYFLKVKEPKTNRETLVQGWKNGFNLPRGIFTEPIREWFERHQNDSEEYKKVEKLNKAGLVTKVIPLFFKEEPFKEDTKKEINDWVQPFYSFPYNVGNIHKPKEEDFLHREERIELWDKKKDKFKGYKEKIKSKKLTEKEKEEFRSYLEFQSWNKFERELRLVRNQDIVTWLLCKELIDKLKIDELNIEELKKLRLNNIDTDTAKKEKNNILNRVMPMELPVTVYEVNKAGNIIKDKPLHTIYIKEAKTKLLKQGNFKALVKDRRLNGLFSFVKTSSEAESKRNPISKLRVEHELREYQKARIEIIKDMLALEKTLIDNYDSLDTDNFHNMLTGWLKLKGEVNKAKFNNDVKLLTAVRNAFSHNQYPMYDENLFVNIERFSLSSSKILESKGLSIAVKLKEEVSKIIKKIQEEEDGKKEKET

SEQ ID NO: 2318 - protein, 1003 aa, Artificial; identical to SEQ ID NO: 1494
  Synthetic

SEQ ID NO: 2319 - protein, 1127 aa, Artificial
  Synthetic
LQKQDKLFVDRKKNAIFAFPKYITIMENKEKPEPIYYELTDKHFWAAFLNLARHNVYTTINHINRRLEIAELKDDGYMMGIKGSWNEQAKKLDKKVRLRDLIMKHFPFLEAAAYEITNSKSPNNKEQREKEQSEALSLNNLKNVLFIFLEKLQVLRNYYSHYKYSEESPKPTFETSLLKNMYKVFDANVRLVKRDYMHHENIDMQRDFTHLNRKKQVGRTKNIIDSPNFHYHFADKEGNMTIAGLLFFVSLFLDKKDAIWMQKKLKGFKDGRNLREQMTNEVFCRSRISLPKLKLENVQTKDWMQLDMLNELVRCPKSLYERLREKDRESFKVPFDIFSDDYDAEEEPFKNTLVRHQDRFPYFVLRYFDLNEIFEQLRFQIDLGTYHFSIYNKRIGDEDEVRHLTHHLYGFARIQDFAPQNQPEEWRKLVKDLDHFETSQKPYISKTAPHYHLENEKIGIKFCSTHNNLFPSLKREKTCNGRSKFNLGTQFTAEAFLSVHELLPMMFYYLLLTKDHPKGEGVNKIEKIIRTEISNIYDIYDAFANGEINSIADLTCRLQKTNILQGHLPKQMISILEGRQKDMEKEAERKIGEMIDDTQRRLDLLCKQTNQKIRIGKRNAGLLKSGKIADWLVNDMMRFQPVQKDQNNIPINNSKANSTEYRMLQRALALFGSENFRLKAYFNQMNLVGNDNPHPFLAETQWEHQTNILSFYRNYLEARKKYLKGLKPQNWKQYQHFLILKVQKTNRNTLVTGWKNSFNLPRGIFTKPIREWFEKHNNSKRIYDQILSFDRVGFVAKAIPLYFTEEYKDNVQPFYDYPFNIGNKLKPKKGQFLDKKERVELWQKNKELFKNYPSEKKKTDLAYLDFLSWKKFERELRLIKNQDIVTWLMFKELFNMATVEGLKIGEIHLRDIDTNTAKAESNNILNRIMPMKLPVKTYEINNKGKMEMEKPLATFYIEETETKVLKQGNFKALVKDRRLNGLFSFAETTDLNLEEHPISKLSVDHELIKYQTTRVRIFEMILRLEKKLINKYPTLPTYSFKNMLESWLEDKTNSAELNNYVDCLIAVRNAFAHNQYPMYNPKLFAEVKKFSLFPSSNTKKIELNIAPQLLEIVGKAIKEIEKSENKN

SEQ ID NO: 2320 - protein, 1152 aa, Artificial
  Synthetic
MTLPTDNTFIERPDEKILYQNKLFFGAYLNMAQHNAYLIIKDISEQFGLDISTLQENQLESADLIKKLKGKGGRPKNSVQMTNALVRRLPFLEAMKAPEESTYKAGTEKEKEVIHAKEIQSGEVGKILTTAFEFMGQLRNFYSHYHHEDVDFKDFSVIEIIFDNAIKRAIKRIPDVNEENTNHLLNAPTYAMYKDGKLTNLGLTFFICLFLERKYAYLFLMQLEHFKGQNDFVYSNRRCFTDLSCNLPKPKLGSSEIEMDILGELARCPKELFYRLSEEDKNKFFAEQKETEDEIPPPIMKRKDDRFASFALRYLEEKRLNKMRFQIHLGKVRRIGEKHQYDKTIAGVEAERVIMENLRTFAKLSETNTEKTPEHWRVFNRDTNKKDLIRTEIEQFRPRHQITGNRIALKFLTEERNSVFPDLKFDNNQTKLQALDTPDAILSTYELQNLVMYDQLHKEGAIEKDVETFIADYILNFRKFCEAVDKGEVTPVADADFIKVVKASGKSKPEYSEAQLVELKNRQQSLKGILTNYGLQIQQLPDNLREYLLGYAPVNYKREALRILETKFSETLKLRTDSQKGFGPKVGEMATFLARDINHLKPPREWKDSKVRLNDEQYDNLQAAISQFSGQIPQIEALFDELELTKSYSRSRAENEALQALMHPFLFRIKLQDSANQGGIHIFYQRYLNKKADWLQGLMLLLKQEPYGDFGPFNNFPEGYQNISLPEFTKKFDYVLRIDKKLNRKKQYLFSDKEKTQKSAIFLPRGLFNAPIMEALFFKKNIEVEPDDSLVMAMSKYKPDSQSFYNFERIYTLKGRDEAPDTLYTGDANQIGAQMQVLKKEIEQMQSKRKAMSLPADWWETYSQKNKGKKKKEELTSIQKTAQNLEYQINDLKKFRRSVMTNEQTLRYRQTNDRVLWLIVKNYFEDIDSHFNIDISEWELHNVGFEIKEKNVLNTKIDLSFPLYGYTIHTKQSEGENVPVHESDHLTIKRYGEFRYVLKDRRLWSEKVHQDGNIEKTGILRYYSPDTPIAWSILKRELDTYDGEDRHKLMNHIHAFEYDMYTMHEEKMERESGAKIINHLKQLEAVHNYIAQIDKPNHLMINELRSKFMHNQIPFNAWLENELKNTPKGSKVKQLLDIATKAYHNIITQINQ

SEQ ID NO: 2321 - protein, 985 aa, Artificial; identical to SEQ ID NO: 1567
  Synthetic

SEQ ID NO: 2322 - protein, 1003 aa, Artificial
  Synthetic
MGAIENKHIFAAYANLAIDGLIKTLNFIAKKLDTQKQLSSWDIKHVITLIDSIFDQNPQNNLEQVVEGYLPWIKPIIEMKTPKKGERQSDKLCIEYKTIITAFASLLNDVRNYYTHYYHDPICIYPGGYDIPSSLNCIYDSAINIIKERFQAEEKEMEHLRRYTRKKGRVVLKTEDDHFYYTLANNNDLSEKGYAFFISMFLERKYSYLFLKKLSGFKRGDSLQYRLTLEVFTALSTKPPVERLRTTKDTKQDRALDILNELSKIPIELYQTLEPKYREMYNETLQPTDAEDPYGLPDRSRIRFRSRFEAFALHFLDKQADFKEIGFYTYLGNYFHNGYQKTRVDRETKDRYINFQLAGFCKNIQDISAKKLSEALNVKSIDISTDSIPDINSFEPYLVQSTPHYIVNGNNIGIKVLPEGKDTYPTIDEKGAKMPIADFWLSKYELPAMLFYTYLRNNNIHKSHCPLSVKDIIERSIHKSTKQKHPEERSELMLRRVMKAIFWTDSKLNEVERIKSQKSAFGKRQHEILKAGRIAETLVRDMLWLQPSKNNGRDKVTEPNFQAIQVSLAYFGIRRNDLTEIFTRAGLINSSNPHPFLAQIGTNYTSLIEFYIAYLKERKVYFSRIQKKILQGKLNIQCHPLRDLQREPNKPQEKEEAIFLPRGLFNEAIINCLKKSKLKHLIESPTREKSPALNVSYLIQNYFRAYFEDQSQEFYAQPRNYRLFDNLSPNKGKSKSYLSLEQRIKKMEELRPSKIPVAEANKLLEKEDRLYRKNYNEICDNESIIRLYQIQDILLFMMTKEYLPSDLYNRINKYKLENVKGILNERVSYLIDLNPLKIQGEDIKIKDYGKLFYIHHDTRISSLNKVLSKVKRNNSISSSVKIQPYENYKRECLDFEEAQIQIIPIIHSFEIAMVSMFPDLKKATPGNYYDFNELITEYEKRTKQKIDSSFLIKTRNMFLHDKYEAECIKEISDDFVYAKKIIAEFKMKIENIKLADFSNDSSA

SEQ ID NO: 2323 - protein, 1146 aa, Artificial; identical to SEQ ID NO: 1569
  Synthetic

SEQ ID NO: 2324 - protein, 1196 aa, Artificial; identical to SEQ ID NO: 2258
  Synthetic

SEQ ID NO: 2325 - protein, 1165 aa, Artificial
  Synthetic
MTPANPKINEILRKHNCEQSFNKISQFKGEIAPIAEKSARNLKQKLKNPVNQEQRLHHFTIGHKFKLLDKEHIFQYKVDEVTTQKTPTKFQVLHSWQNEKGKDFVKSIQSVIENIRNVNSHYVHTFDCLKVDAIPASIIEFMKQAFELSAVHVFLLENSKSYSEYVENDRLKKNFCTFLFDKFYTFEKKANKVNDKEKEESERKYLEAREEFRRLDKRDALDVLLFVDVKENFVWKVGDTHEVFTTTKGRYLSYNACLFLLSLFLYKNEATQMISKIKGFKRNKTKEENSKRDIFTFLAKKFSSQDIDSEENHLVKFRDLVQYLNKYPVDWKSSLENEDECTEKVDALKSAIIDKEITRLFPDYAKIPRFVDFARRELWGKDIPDDFSDEEKNEFGYEIDTSIELKDAEKKLAEFEAMSDYKKRENGIREQNRAIKKIMDAGRNEHRGVAKLKDRLARGVFFQSYGRNQDRFLEFATRFLAEQQYFGADAKFRMQQFYTTEEQNKYLAEQKNVLSKKEFDKLPYHDAMLVHFDTYDKHKERYPSWDMPYVVADNAIQVKLTFAPDNVRVVSIQRALMVYLLEHALQLPEEKMAGAGFAFLQAYCQHHDSDFKEKHAQLQNGEIPMDEKADFKKLLPKRLLKAYFPQGEKTTEPSALQQLLDRAESAEMRYKALHDMHEQNNNLSEFEKRNKGKQFKLMFVRKAWNLMYFRKLYKMRVEEEIKRVGNIDKAHHKSFHITRDEFNDFCRYMFAFDEVPEYKILLVKMLQNKGFIRHNSLAIMLRDSKSLDDLYQATKPLFKKWMRTSAALRDKSQKYTLSSYQQIFDKSPLYINLSHFIEFIKNEKYIGLDDTGTRIIYKSLVNKKYLVGDYYIDSFRGKKDSATRKLINQLMTARLEDVMLYEIATRYLKHTPDVANQAKEHVAIIMTREVSFDVSDAHKKKLYRLTVPFNKLEKYVELMKHKEDQDEEYKSSYLANINTYIEEANTHKDMKAVYEAFCKDSPARILSFDGLHKIDCHIVSSSVKFTRVAMELEAYLIEKHKCSIKKDNRISTGEVPGMDAYMGAKNKNGEYMLRNKAFHFALPDLPYDTVLKQQEATFVTNEVKPRNPASYKSLDRKQKRVCELLLKTMHSNLFDRKRYKDDSTMMNEEAEKSYFNQVIRGSSAY

SEQ ID NO: 2326 - protein, 1196 aa, Artificial; identical to SEQ ID NO: 2258
  Synthetic

SEQ ID NO: 2327 - protein, 1165 aa, Artificial; identical to SEQ ID NO: 2325
  Synthetic

SEQ ID NO: 2328 - protein, 985 aa, Artificial; identical to SEQ ID NO: 1567
  Synthetic

SEQ ID NO: 2329 - protein, 1140 aa, Artificial; identical to SEQ ID NO: 1482
  Synthetic

SEQ ID NO: 2330 - protein, 1003 aa, Artificial; identical to SEQ ID NO: 1494
  Synthetic

SEQ ID NO: 2331 - protein, 1130 aa, Artificial
  Synthetic
MTHFKKIGPDDYYFSAFASLARHNIYIVLHSIDAYIGKPSKHDDDAKINNFNCLNYIINNGKKKSDIIEKITSKLEYHFPFLELLLHNKKTISVDKKKKVIYQTIETSKYYEKLIALFDQITDWRDIGAHAEDIHKKKLTAKFVEDLRKIYDASWHKTKEGLSLSVSQMDQLVRLKGRQTKNHDKLQVQKDRPNFKYGLINDSNHFSEQGLAFLICLFLQESEANLFLKHVEHVWSNQDFNSNSTNLNSSQAIKLFTAYRLRLPFPKLQSSHDSQSLFLDMINSLKKCPSILFNHISNLDKKKFKKDIKNSEVNFGSEELITNENIETVHEVRKRDRFVIQALEYFDLTNTFNYMRFHIDLGKFIYKTYTSPIDGTDRIRRLEKNLHAFDKIQEVIGEKRPEIWKNLIKEPNTIPEDSLDCYIVDTEPHYHISDHKIGFKVFQNVLPSFHDIVKIGENNFKFSENPKPDGFISIYELPAMVFYEHITGNHGKSEEIIREHIKQRRKIITEVLNDSNLPLYKTSINLKLFTHPIQPEFINIHNEIIKRKRAAESYLSTKNIDYRNIPESIIYYIANIDEIPEDIRIYNILESMKLDAKEKLNNLKNRIENPQKKGKRGAKALLDGQLATELSKDILYLQPSDKDAKNKANPLEYQILQAKLSKFNIEKSKLYEWFKEIKLISIEETLDHPFLFKLNPNNFSSIVSFYTEYFKWKVKYLEYLIKNNITPGFVKLNNLNFKARISTYIAKKNYASSKTDEYYLVPTQIPHGFFTPYIIQEIEKLPNGQAILSSRGSTKSGDQYINFEYIVKNYFSLYKEDSNQSYYQFKRNYEIFDIVNDTRTIAQKNNPLPSKDYSVEEMIIERTKVQNILEQLKVKNEPNVTASFGISTKTYEKLKSLYKHYNENEKNIRIQKTKDMVTFLMCERLFPHELFENTKSIGKLKEINPDNSTSILNSNINIEKSITLKRNFGETNYSKTITHTCKLKDSGVINKLLNDRRLPELLLYFNTSKIPFEIIIKELLDYNTERIDFFKAIIDFEKRYFISESKKKLKTLEANEYRKHSELINTLIGTERIRDEAEAEGLWSARNAFYHNQYPKKELFHEYVTNIINKSTKIAKPIIKKSKNKYDNLP

SEQ ID NO: 2332 - protein, 1146 aa, Artificial; identical to SEQ ID NO: 2138
  Synthetic

SEQ ID NO: 2333 - protein, 1220 aa, Artificial; identical to SEQ ID NO: 1568
  Synthetic

SEQ ID NO: 2334 - protein, 1038 aa, Artificial
  Synthetic
MNQAPYTRRVKTLKTDGAYFGNYLNMARHNAYLILNDFSDVFEELKIEEINEEDLHNTGLLPRLRRSKKLDLKLKAFQKLKHHFPFLQCIDDPEKALGVLRQLLENLNRQRNCYTHGQHDEKGLFVDGNSLEGFFKAAVKKVPVRFRSIIGEADIRHMVTYEADDVRKEKGQLTSFYALVDPRQALTEKGLAFFTCLFLERRYAFRFLSRLNGFKNTTNPAFRATLEAFAMFCCRLPRPRLESGELMLDLLGELSRCPKEIYQVLGEADRQRLVASADEPEIVLDADDDPELPETIMRRYGDRFPYFALRFMDEEEYFENLRFHLKLCRVVKKEYLKETGGEVRERKLVTDVNAFGRLKDFNEQTLPPYWKGKKDIEQWSPHYRIMGNRIALKLITDAEKNRESVWPALNKEKYKTMPDAILSTYELQNLLVCQYLYKKNPENRNAEQIIQQYIENFRRFINDTREGKVKPLDGKPFFKRQDPYYHRVLNQLSDCSGQLQVVLDGYGLKVKDLPDVMREYLLGYVPASYCSEAQRKIKAVLGEVRQRIKAIEKGRAPRVGDMAQFLARDVIFLKPLNDEGRGKPNNLQYDLLQGMYAFFGKEKYSIRKLHNELALVGKQHRYTHPFLYRIRLDECNGILDFYQRYLEQKERWLTAGERLLKRNDLEVFRERYDYSLSIKERSGFPVDYKPENQPVYLPRGLFNEAVLEGLRREGVALKAGDNLVYAMGQWLMGDSQPYYLMNRYYFREGEYQERHDYQVCLAAMDEELVHLMKKREPRNKKEKQQLQYAIQDVKKVKKCVLHHEGAIRYVQSNDRVMWLMVQVLAQKEHNAAYDMQRFSLRHLFFTNEEAQMSNNLLKKEIPMKINIEDKLISDTLPLRRYGEFRAAMKDRRLKNLLSYYPQKEIAHEVIKEELACYDLRREAVFETIYSFEQVALQSSMGEVLQAKINSHGYVNHTILLGVLFEQGISLSGGWTKEEVIIMRNKINHNEIPLAESLKERVRVGGGELIIAQLFDIVVGVYNELTEKTKSLSIWKVQV

SEQ ID NO: 2335 - protein, 1003 aa, Artificial; identical to SEQ ID NO: 1768
  Synthetic

SEQ ID NO: 2336 - protein, 956 aa, Artificial
  Synthetic
MATFRFQNKYVCGAYYNMAQNNFRLAILHVLSRIGINRKDEERAIPELLDTIYGFLTGDTEHFNDTQILQKKVLTLRYDQQVKLRELLFRQFPILKPIIASETHKSLQEQKEKLSEMEEYIHEFEKQLKRLYRSKKGKASQEQKEINEQIKYLKTKKSKYLDEYDTLLFSKSHDADLQLCLKILKTMAWCLYDLRDFYTHYDPYNTPESLKVKYLRQVTVANWLSQVFAASRTIDKERNSITTEEMNFLNEAKKQGNDKKWREDPDYYFAIKGQNLLSSSFIDADSPVYNDYLDELYQKYRKKRLAWMKEQRDEALERDDEEEYGFWVVEMEKLDNPERIAKIKSKICPLALSDFGVLYFCATFLPRNYTLLMADHAEVMKNSPYSMTAEELEARRNACKTDEEREKIDPTDTPRNNILREMLCIYRVRLPKGKRLDKKDTKGLLTLDILNELRKCPKEVYEQLSKEGKDFFISRVSSASHNAPDIVKRIRFGDRFPYLALRAIDESDVFKRIRFQVRLGSYRFYFYNKTCIDGSTQLRRWQKEINGFGRLQDMEALRKSLWKDLLQKKEYDSVQLEDKSGYLDLQQFKADAPDSVPYITDSQAQYNIHNNRIGLIWNGDECRLLRNIKDADVLREYVYLPDLKDNDGNPKKSGKDIEQPSPLCSLSTYELPALLFYHFLYNTPEAQVHKERLEKPEQVIIKKYEALRAFFLELRSHPEQIVKTDLQATLTRFGLKCSEIPQRIIDCIQGCQQKQKETESSVTYLPDLLQLPMEDIRQKVQEKGMERYKDLPAKFRKQISHEQIVTSGLETLLKPLGISVESLPAKVMEALLSTQIQEDVAPAEDASTEKPFNIMFVRSVVYKLHERLQDVSKRHQSFVESIHRVGSKDNKFAKHGYMDVRHGKLAEYLAGSFLKWQPTISNGSDKLTGLNYNVLKSFLSTYGIATDIDDLTAVLH

SEQ ID NO: 2337 - protein, 1088 aa, Artificial
  Synthetic
MKKFDFKLKETDYTRLYSEQTDCKRHVVGAYANLALHNMTTVVNSIRQAVGLDTITDDTIKDAFSRDSFKGLDAGNQLKLQNKLFRHFPFLRRMKLEQHGTLDYSEVINDFIKLMSIIRDDFSHYCPYSDESQQTENSLIKKNASEKLKEIFTNSVSQYLHTAEENEVRDSVQNSKTQQDNKVTITENSIDMRDPASKDGLTDAGIVFFLCCFLEKHTAFEFLEEIKFTEGLNPANALYVKEILCMNRIRMTRSQIDSQMSDTALALDMMNELRKCPKPLYDVLDPASRNYFKDDANLQWEEDNPTQTDSQSPDSHNITDLRAKSVPRSTFVRWQNRFPEMALCFIDLKGLFKTTRFQLRLGNYRYRFYTHTAQQSLDGRERLRILQKELHGFGRINEIEQTIKKEWGQYIEKNTTDPKPKDQPDRTPYITHQRPQYNIDPVSHSIGLRWDFPNKKTKYYIPEIQPQQKCPSENLAPQCYLNTDELPALLFYQYIKNTYSPNKGSSAENIIRKCYINLHTLFSQLAKNEKISINELDKWELRPSDIPAKIRKLMEGHERSEQEIRDSLRRSIEHQLALIDKTTYERLVKYEAATDKKEQTDKKTTRFRPPILTGRLAQQLIDDIVWWLPTDSPCRSRLTSEKYNILQASIALLGQWTDASDPSQQTVTIDDLRQMMEKIGLLGPDGHPFLSQVFKQPIQSAGFFYHNYLYAEQDHIETLWQDFDHNLDQLISQAHAKLPFVHIDRPKWNVDKSNNLSQLAQEYLTHPLQLPLGLFAQPIAQLLRDIAEGEATETWKQLTAEIDRLTQKGQPSTLKLIELYHKNIEEDDFQNFYNSSPNAGFQHHYELFKKIYKEKGRSVEEVFNLLRRKSNPPQSKSQLDCDIHEYVEKHRKDKSKEWAEDQTTLMRKQAKQVEQTEHAIRRCQIEDIVMLYAARVMLYAARDILSAKNNRTPNGTDTHQPQKFKLKHVQNDDGLLERTIDFNWVVDIEGQQKTIRQQNMKMKDYGKFYKFASDGERLESLLAHLGGNEFQRADIEAEYAQYDDCRSQVFRYVYMLESKAYQLLAMQKDNPIDLLDDKNSTRDEFWFV

SEQ ID NO: 2338 - protein, 985 aa, Artificial; identical to SEQ ID NO: 1567
  Synthetic

SEQ ID NO: 2339 - protein, 1127 aa, Artificial
  Synthetic
LQKQDKLFVDRKKNAIFAFPKYITIMENKEKTEPIYYELTDKHFWAAFLNLARHNVYTTINHINRRLEIAELKDDGYMMGIKGSWNEQAKKLDKKVRLRDLIMKHFPFLEAAAYEMTNSKSPNNKEQREKEQSEALSLNNLKNVLFIFLEKLQVLRNYYSHYKYSEESPKPIFETSLLKNMYKVFDANVRLVKRDYMHHENIDMQRDFTHLNRKKQVGRTKNIIDSPNFHYHFADKEGNMTIAGLLFFVSLFLDKKDAIWMQKKLKGFKDGRNLREQMTNEVFCRSRISLPKLKLENVQTKDWMQLDMLNELVRCPKSLYERLREKDRESFKVPFDIFSDDYDAEEEPFKNTLVRHQDRFPYFVLRYFDLNEIFEQLRFQIDLGTYHFSIYNKLIGDEDEVRHLTHHLYGFARIQDFAPQNQPEEWRKLVKDLDHFETSQKPYISKTAPHYHLENEKIGIKFCSTHNNLFPSLKREKTCNGRSKFNLGTQFTAEAFLSVHELLPMMFYYLLLTKDYSRKESADKVEGIIRKEISNIYAIYDAFANNEINSIADLTCRLQKTNILQGHLPKQMISILEGRQKDMEKEAERKIGEMIDDTQRRLDLLCKQTNQKIRIGKRNAGLLKSGKIADWLVNDMMRFQPVQKDQNNIPINNSKANSTEYRMLQRALALFGSENFRLKAYFNQMNLVGNDNPHPFLAETQWEHQTNILSFYRNYLEARKKYLKGLKPQNWKQYQHFLILKVQKTNRNTLVTGWKNSFNLPRGIFTQPIREWFEKHNNSKRIYDQILSFDRVGFVAKAIPLYFAGEYKDNVQPFYDYPFNIGNKLKPQKGQFLDKKERVELWQKNKELFKNYPPEKRKTDLAYLDFLSWKKFERELRLIKNQDIVTWLMFKELFKTTTVEGLKIGEIHLRDIDTNTANEESNNILNRIMPMKLPVKTYETDNKGNILKERPLATFYIEETETKVLKQGNFKVLAKDRRLNGLLSFAETTDIDLEKNPITKLSVDHELIKYQTTRISIFEMTLGLEKKLINKYPTLPTDSFRNMLERWLQCKANRPELKNYVNSLIAVRNAFSHNQYPMYDATLFAEVKKFTLFPSVDTKKIELNIAPQLLEIVGKAIKEIEKSENKN

SEQ ID NO: 2340 - protein, 1110 aa, Artificial
  Synthetic
LQKQDKLFVDRKKNAIFAFPKYITIMENKEKPEPIYYELTDKHFWAAFLNLARHNVYTTINHINRRLEIAELKDDGYMMGIKGSWNEQAKKLDKKVRLRDLIMKHFPFLEAAAYEITNSKSPNNKEQREKEQSEALSLNNLKNVLFIFLEKLQVLRNYYSHYKYSEESPKPIFETSLLKNMYKVFDANVRLVKRDYMHHENIDMQRDFTHLNRKKQVGRTKNIIDSPNFHYHFADKEGNMTIAGLLFFVSLFLDKKDAIWMQKKLKGFKDGRNLREQMTNEVFCRSRISLPKLKLENVQTKDWMQLDMLNELVRCPKSLYERLREKDRESFKVPFDIFSDDYDAEEEPFKNTLVRHQDRFPYFVLRYFDLNEIFEQLRFQIDLGTYHFSIYNKRIGDEDEVRHLTHHLYGFARIQDFAPQNQPEEWRKLVKDLDHFETSQEPYISKTAPHYHLENEKIGIKFCSTHNNLFPSLKREKTCNGRSKFNLGTQFTAEAFLSVHELLPMMFYYLLLTKDHPKGEGVNKIEKIIRTEISNIYDIYDAFANGEINSIADLTCRLQKTNILQGHLPKQMISILEGRQKDMEKEAERKIGEMIDDTQRRLDLLCKQTNQKIRIGKRNAGLLKSGKIADWLVSDMMRFQPVQKDTNNAPINNSKANSTEYRMLQHALALFGSESSRLKAYFRQMNLVGNANPHPFLAETQWEHQTNILSFYRNYLEARKKYLKGLKPQNWKQYQHFLILKVQKTNRNTLVTGWKNSFNLPRGIFTQPIREWFEKHNNSKRIYDQILSFDRVGFVAKAIPLYFAEEYKDNVQPFYDYPFNIGNKLKPQKGQFLDKKERVELWQKNKELFKNYPSEKKKTDLAYLDFLSWKKFERELRLIKNQDIVTWLMFKELFNMATVEGLKIGEIHLRDIDTNTAKAESNNILNRIMPMKLPVKTYETDNKGNILKERPLATFYIEETETKVLKQGNFKVLAKDRRLNGLLSFAETTDIDLEKNPITKLSVDHELIKYQTTRISIFEMTLGLEKKLIDKYSTLPTDSFRNMLERWLQCKANRPELKNYVNSLIAVRNAFSHNQYPMYDATLFAEVKKFTLFPSVDTKKIELNIAPQLL

SEQ ID NO: 2341 - protein, 1107 aa, Artificial
  Synthetic
MSTRYTNQKKVEENINYVFSNKGIFAAVAEKTLTNYKSKFNEGQTIQPNLHYFAVGHTFKNIDTKRIFDYQLSEDEMDILPTKYFSLQQNKFSFPIDGQTKTDKLYLLLDNIRNINAHFIHDFNFLKVDNIDENIICFLIDSFELALIKGVFAKKYGDKKSKLRLDFLSNEARDEILTDILENLDKELIVFMKEIFYQTLYVVDKKEWRNKELNQEKKDFLDNHLSSKEDWINWILFNCVEEDIDWYLNNYGDYDPHPDSKNHKHKVLTIEKGKYLSFEGSLFMMTMFLYANEANYLIPKLKGYKKNGTPQDASKLEVFRFFAKKFKSQDVDSEHKQYVKFRDMIQYVGKYPTVWNKHIHLDSYYVKDLKATILENEIIQLYQEDIKNHFQSICGLKQFEDSQEEIQLAFIEVAKDYLQNKEIYYTGEYREDCITILKTSAEHLANKRQLKDIQKQLKKYINKAYKSLSSEDQGKKKKLDISKLKYIDKIRKSKNSINTTTDKFAKRVEDNLLFISNGRNSDRFMVFACRFLAEINYFGKDAQFKMYENYYSEEEQNALKDKKQNLTQKEFDKLHYHGGKLTHFETFENHTKKYPNWDMPFVVQNNAIYVKIPGINFIKNTAFCIQRNVINYLLEHALGENYKDQQGRKWLFDYYEHKTEATDNAKRILTESKPIEASSKTKLKKLLPKKLFPKYSASETEKNILRKYLEQAEESEKLYENQKDKAKAENRLDLFVNKNKGKQFKLRFIFKAWQLMYFKKQYQIEKERYAELEKLERIPKNHEHEFGHHKKFNINRKEFNLFSKWLFAMDEVPEYKNSLKELLDDKNFFDNSEFQKLFESSSNINQFYESTKSKFKNWLNDQQVRNVGKTIQPENYYKMMEVGNFHINLSHLIAFGVTHNFIEKSGKNILRPITSHAKYLNTKIYDIDLEHSDASNLEKNIFRKLYKIRLEDCLLYEIALRYFQPNLNLRQKSYEQLNKLLVQKISITIKANNSQTYQVLVPFRDLEKFEQLKAIDDNTQNNFSLLRRLPEYLSQLRKRNENVFGLKDMVKAFGVDKSISLADMSMLYNHLITQQGRYTNCIMALEEYFIWKEECTIEGQEDKKFRL

SEQ ID NO: 2342 - protein, 1147 aa, Artificial
  Synthetic
MNNNTIDEKTGIGLGKTYNHDKTEDKHYFGGFFNLADDHIEKSFKEISERLNLSNYDKNNKISFLEVIFKIDALDIEWKRAVQMFSNYFPFVSVIEKITKMEYQNDNIKTIHIPTENKKAIFINTLVILFDAIEKLRNFYTHYHHNDIVLGEYPIVNTHIENQISVLDYQKSNFISSNIFNILDKIKLEAIQEVKNKRMNVKDNHSLLNKKYKNLFENKNEEETKKLFNKSFKYLYEVIKKGENNYEAILKDFHRSKNTNSITNNFKNNISRSGFLFLFSLFLDKKEMEHLLSKSKNFKATNELQFLATRWVYTHFCFKGLKNTINTSFTKETLLTQMVDYLSKVPNEIYQYLSEEDQEKFLEDENEYMRDNEENMDSSESSRVIHEVKRKRYENKFNYFALRFIEEVIQLPNLRFMIKVGSFVHSQMSKSVGKGKNILVTNRVIKEDIKVFGRLNDVIDAKNEYFNNKNNIPNSELGYWEEFPNPSYYFQGNNIPIYIFNKIDENTNGIEASKRINRISKKDILTKIIKEEDKDKFIFDKPHALLSCNELIPLIHTYLHKANNTTDIENLRLEIEKKITSKIENQKKTIEFFNPDKAISSENLKKYPKKLFKTNAVETFLKVKNNNGDIVFKITNDIDEEIKKTQQKIFFLNNNTKEIQEGIRKYLFTKKEIGKEATWLANDLKRMMPESSRKNWKGYEHGQLQYLFSFYSERKNEIRQLLNEKWKLFEDKFIGKTISDIIERRNNFDLFYKDYLIKRLEILNNIKNNITINNENLFRIFSKRKYVTKDLESYKKSIIEQPVNLPCGLFDSNPTFIIGKEWNDKNNENKFAKWFTEAKKYSSYQSFYTLPLHYIEINQKVIYKNTRSINKTKIQDYYLKNMVDNLYNDLFNQKTISLLEDYYVSKEEREQIKSSAKINHEKDESFIWKKQINFEAYNGRIKSKAKMKDFGKFKKILLNSKIKNLIKYNNQSWSIELENKQKYCSLSMELENYEKIRSEYLLKQVQELEEIILNNNEHYKVHKIHPSIFEEKNGHPNFRFYIETGVLEKISVLNLQEFEKLKKINLHSLYESEISEIQNLTCPWIKKGLVVIMIRNKFAHNQYPDKIIYDITNNDIPKKEDEYFATYFNRVFESYKTQLIEKLNNKN

SEQ ID NO: 2343 - protein, 1133 aa, Artificial
  Synthetic
MEEKLGKGVEYNPFKKEDKYYFGGYFNLAENNINEVFKEVKKRLGETNSSSNIELLNNVFRKEMSLVDYEKWVNAFADYFPIVNYLDRETIKKGEKVVEVPREKRIECFRDMFKGLINTISQLRHYYTHYHHEPIEIDDKILSFLDEVLFNTIITTKNKYLKTDKTKELIKDSLQEELDILCKLKVKYLESKRKRFDRKDKGAIENAVYNDVFRRFIYKDEKGNESLKDIIRTKQIKVHQNSSYLELPISSSGIIFLLSLFLNKKEVESLKSNIRGYKGKSKSEETTPEKNGLLFMTTHRIYSVLAYKGLKKRIKTSVKGDKETLLMQMIDEVSKVPHCIYQNLDQTLQATFIEDWNEYFKDNEENEENLENSRVLHPVIRKRYEDKFNYFAIRFLDEYAEFPSLRFQVNLGNYVHHKATKKFGNSEVTTERVIKDKITVFGRLSEVNKAKADFFKNETELDPAWELFPNPSYEFPKEKGNNDKDAGKIGIQVKLLNKDIEAVLNESKNTLNNKTRKSDKISKKEIINKIVQINDDTKYNNKNIIYQGNAIAYLSLNDIHSLLYELLVIGTKGDKLERKVVEKIQQQVTEIRNKDTSAKILSKYKDSEESNTIDKKKLVIDLKYEYDKLQDLLKEHKNREEDYIQTKKKKKDSPKRKYILYHNEKGQVAVWLSNDIKRFMPQNFKEKWKGYQHSEFQKSLAYYETNKEMLKIILQDLDLEQFPFDIKSCFYKNTLEDFYNRYLSLRISYLENVIDRVECFSNEPKAFKSVLKECFVFLKKQNYTNHSLDEQVKKILANPIFIERGFLDTKPTMIQGVKFSENKGCFADWFVHYKEYEHYQKFYDTNLYPVESIEDKERQKLEATIKKQQKNDVFTLLMIKKIFNDLFNQDFEANLYEMYQSKEEREKNQLVAKETQNRNLNFIWNKPIAIDLFDGKVKIDEVKLKDVGSFRKYENDKRVQTFITYIPEIQWIPYLPNTWEGINLPVNVIERQIDRYEKVRSEELLKEVQAIEKYIYEQVNDKTELLQNGNQNFKNYLVNGLLKQIQGIDVSNFKFINQQKFETINVKDLDNEASALEQKVYVLINIRNQFSHNQFPKSAFYQFCQKILSIEEDELFADYYLRLFKLLRNELLD

SEQ ID NO: 2344 - protein, 1058 aa, Artificial
  Synthetic
MNNPENQKEKTSIGTHPFYFGHYLNMARHNAYIILCALSKKYNFNIPDESEQNEAQLNHFKILNFAADKEKRPDELNAIKEDLQFHFPVLKAFQLSEFGKSFSDLLILLGDLRNRYSHVYYKKDFKHEVELRDILKQARKDAIKRMNSVIPEEEFHHLVKVKESKIPFKFYLTERDRNTLTEKGVAFLCCLFLEKKFAFRFLSRLENFHRTEEKWARATLETFTEYCCILPYDRLDSSDIKLDMINELNRCPRELYYLLDDSLKKKFLDKPEAEEDLTETSTDENAEYEKPTPLRRHSDRFPWFALNFFENVYPGIHFQVKLGRVLTQDLYDKTIASTSRDRRILKDINSLGHPFKYPVESAPDSWYNIKQASETGLVNTAMRAGEIDQYSPKFRITEKRIGLFLNKPYTIPFWPNLSKEAKPKKSGPIITTCKASAIKPDAILSTYELQNLFLYTYLYKEENRISKSPEQFILDFQREFNRFLSDLSAGKLHPVSDQLLLKQPGRDIEDPDWKERKARLSDLLQPYGLKDSYLPDDIKNYLLGVADPELKKRVLAKIDTQIKTTKDYIEYVGKRLDKSTKNTVRVIPVGKMAQILARDIVFMLPHVDKVSKPNNQQYYVLQNMLAYFSLKKKELRDLFKELHLTQADRHPFLHKINLEESKGILEFFGNYFKLKNEYLNGLRIGLDSVNFKRFYKENKHLFDAEKKDVWKRNYSETHLLPRGLFNQAIARALNADEKEGVDKWLSMLPGLGTVTQNYYTHKRYYLKNRSEEFKALNDTGNPYDLIGQINTLLQSKQKPEDSKRLRDLKKEILDTEKTIRYRQSTDRALWLMLHYMFTHDERTKETTTLNFELNKLQYIGYDNEEFSLFSDEYPFTYEIENKEHRRKLKVTETMHIRRYGDFRRFFKDRRLKDLILYFPEEEQSIDRGKLIKELDTYEEKREKLFEKFYQFEKLLNEKYGDQISPKIKGKAEYKDHTVYLDFIRQKPALLENVRFLNDEKFSELRNKILHNQIPVFEWVREEVLRGDIRKTHTERILDIIGDVYDTMIENIHKEETNS

SEQ ID NO: 2345 - protein, 1107 aa, Artificial; identical to SEQ ID NO: 2341
  Synthetic

SEQ ID NO: 2346 - protein, 1087 aa, Artificial
  Synthetic
MKNIYKEGRPVMAAYFNMALRNLRNVVIDIQKKVEKGDPNINDGELLKASVIKRLARHIEGKRTISPYQPELLDMAIKMFFQKIKFLAPLREAISLKDGITEAEWLKTNFSEIYTILLKYRNLFTHYDPKNSLDEIQSYEWKAVWLLQKCIEGGRREVKTRFNFSEQDMAFLTGHDIGEAKQREPIDEQGHNQYGNRRRSAFKFIDREDFRYNVRKNKFDGQNRTTHLSDVGIVMFCCLFLERKYISEFTQQIGLFNIQFQSGKNRILKRPDDKEKKIMREILAYYRILTPRPRVESTRPEYALALDIFNELQKAPIELFDTFSPDDQAKFRIVGDNDSETLMVRHRDRFPYFVMRYIDDNRIFTKIRFQMSLGKYRFKFYEKQCIDSSDKDRIRSLQKEVNGFGRFDEIEQFRKERYAHLLTQSDIPEADTIDSKPYLTNQQASYLYNGNRIGLWWGDNCFLPEITADKAECRQPLAWLSFHEMPAMMFHYILSNSGFQTQEIIINYVKNLKDFFLKIADGTITPDNYSDYLTDDITINRLPEKIREYLLGNVPVVDEDSLVNDINDKYEKMVEEAKILLKRFDDDCKRANATDNKFGKKSFVTIKPGRLASWLAKDIVALQFSNEKGDNKLTGLNYQVMQSAIAQWESADAVRRIFENANLLSGDYSHPFLAKAMAGNPKSTAEFYRAYLKQRSRKDWEVTFFRPNRLRNQERTPEWYKCLATRYAEQPIDLPRSLFDNAIRRCLVNNHIDIPKRANVAFLIKRYLSVEMADANQLFYDSQKYRRSYKLFNILFGHRERNKILPNYYSIDEMIKLVGEKGVSLRKSIENHLKQFGNIQKFGQNKADDIINDERQKIQHAKSFYCDNEKQIRRFMTQDIILYILARKVIISQPQFAISEANIFLRDITPDAKENILNMNLPVSITVKLTANKQTFNTVITHPNLKIKNIGDFYSLIYDSRLSSLVRKYQELKNINSNVKIEFDYQRIEKEFENFDHTRIDVFKIIHSLERSIIEDNPNIPDDDHNNFRALLGDGKRFSETEIDELADIRNAFSHNHYNVSGLPNTAELPEIAKVIGKKAEYISQKE

SEQ ID NO: 2347 - protein, 1145 aa, Artificial; identical to SEQ ID NO: 1631
  Synthetic

SEQ ID NO: 2348 - protein, 1125 aa, Artificial
  Synthetic
VKMEDDKKTTESTNMLDNKHFWAAFLNLARHNVYITVNHINKVLELKNKKDQDIIIDNDQDILAIKTHWEKVDGDLNKTERLRELMTKHFPFLETAIYTKNKEDKEEVKQEKQAKAQSFDSLKHCLFLFLEKLQEARNYYSHYKYSESTKEPMLEKELLKKMYNIFDDNIQLVIKDYQHNKDINPDEDFKHLDRKGQFKYSFADNEGNITASGLLFFVSLFLEKKDAIWMQQKLTGFKDNRESKRKMTHEVFCRRRMLLPKLRLESTQTQDWILLDMLNELIRCPKSLYERLQGEYRKKFNVPFDSADEDYDAEQEPFKNTLVRHQDRFPYFALRYFDYNEIFTNLRFQIDLGTYHFSIYKKLIGGNKEDRHLTHKLYGFERIQEFDKQNRPDEWKALVKDLDTYETSNERYISETTPHYHLENQKIGIRFRNGNNDIWPSLETNGENNEKSKYKLDKQYQAEAFLSVHELLPMMFYYLLLKKEEPNNDKKNASIVEGFIKREIRDIYKLYDAFANGEINNIDDLEKYCEDKGIPKRHLPKQMVAILYDEHKDMVEEAKRKQKEMVKDTKKLLAALEKQTQGEIEDGGRNIRLLKSGEIARWLVNDMMRFQPVQKDNEGNPLNNSKANSTEYQMLQRSLALYNKEEKPTRYFRQVNLIESGNPHPFLKWTKWEECNNILSFYRSYLTKKIEFLNKLKPEDWKKNQYFLKLKEPKTNRETLVQGWKNGFNLPRGIFTEPIREWFKRHQNNSKEYKNVEDLKRVGLVTKVIPLFFKKEYFKKDAQKEINNCVQPFYSFPYNVGNIHKPDEKDFLPSEERKKLWGDKKYKFKGYKAKVKSKKLTDKEKEEYRSYLEFQSWNKFERELRLVRNQDIVTWLLCTELIDKLKVEGLNVEELKKLRLKDIDTDTAKKEKNNILNRIMPMQLPVTVYEIDDSHNIVKDRPLHTVYIEETKTKLLKQGNFKALVKDRRLNGLFSFVDTSSEAELKSNPISKSVVEYELGEYQNARIEIIEDMLALEGALIEKDKNLPTDNFSDMLNGWLEGKDESDKARFQNDVKLLVAVRNAFSHNQYPMRNRIAFANINPFSLSSADTSEEKKLDIANQLKDKTKETIDKIIEIEKPIETKE

SEQ ID NO: 2349 - protein, 1121 aa, Artificial
  Synthetic
LQNTTNNHNFAPVLTNGILTNKKAYDMNIPALVENQKKYFGTYSVMAMLNVQTVLDHIQKVADIEGEQNENNENLWFHPVMSHLYKAKKGYDKQPEKTMFIIERLQSYFPFLKIMAESQREYSNKKNKQNRVEVNSNDIFEVLKRAFGVLKMYRDQTNHYKTYDEKLIDSCEFLTSTELPLSKMINDYYTVALRNIKERYGYKTEDLAFIQDNRYKFTKDAYGKRKSQVNTGFFLSLQDYNGDTTKKLHLSGVGIALLICLFLDKQYINLFLSRLPIFSSYNAQSEERRIIIRSFGINSIKQPKDRIHSEKSNKSVAMDMLNEVKRCPDELFTTLSAEKQSRFRIISDDHNEVLMKRSSDRFVQLLLQYIDYGKLFKNIRFHVNMGKLRYLLKADKKCIDGQIRVRVIEQPLNGFGKLDEVEVLRKQENGTFGKSGIRIRDFENMKRDDDNPADYPYIVDTYTHYMLENNKVEMYISKDDNPAPLLPEIEDDRYAVKTIPSCRMSTLEFPAMAFHMFLLGSERTERRIKDVYDRYKKLFRAMHKEEVTAENIASFGIAERDLPKKILDIINGNAQGKDVDAYIKATIDDMIADTEQRIKKLKDDRKAVRSAGNKMGKRSFKRISTGKLADFLAKDIVMFQPSINDGENKITGLNYRIMQSAIAVYDSGDNYESKQQFRLMFEKAQLIGKGITEAHPFLYKVFARSIPANAVDFYERYLIERKYYLTALFNEIKKGNKVDIPFIRRNQSKWKTPVMKTLGRIYNEELPVELPRQMFDDEIKSHLKSLSQMSGIDFDNANVTYLIAEYMKRVLGDDFQNFYQWNRNYRYMDMLKGEYDSKGTLLCNFTSVEEREALWKEREDRSGSYRKLAAKKIKSNRLMRNASTDEVNSILDKQLSNSRNEYQKNEKIIRRYKVQDALLFLLAKKSLTEMADFDGNKFKLKEIMSDTEKGILSEIMPMTFTFEKGGKRYTITSEGMKLKNYGDFFVLANDKRLYRLLKIVGSNTVSKEDIMEEFKKYDQSRPEVVGLVFDLEKWAFDTYPELLARVDRKEKVDFKAVLDVLIKNNNIDSKQLHVLKTIRNAFDHNDYPDKDKIENGIIEITTLPKIAIGIKNLFGEYAMMK

SEQ ID NO: 2350 - protein, 1149 aa, Artificial
  Synthetic
MKKILPCSYKSNFQNLIYLLPMDVTIKFKKIFDTKGIIAPISEKAHRNFKMKFKVDEQNRNKAIHYYGIGHVFKNLNTKSYFNFQVDNSNENVYPTRFLNLQKENFDFAENFERLLASIRDINSHYIHTFDRLSIAELDNLSPKIIPFLLEAFELACIDTMLKEKKLEPDYYYLDQVKGEKELVKFLGNKFYPNDEYQKTEREIFFKLSLNKAIQDILFIQVDEKITWKLFNDYEIFDIKEGKYLSFYASLFLISMFLYKNEAIQLISKIKGFKKTDGEVSQSKRNIFSFFSKKFSSQDVDSENLNLIKFRDIIQYLNHYPVCWNKHLELESSFPEMTNKLINSIIEIEISRIFPDGVKIDKERFILFSKQNLFSKYYPKKKLNLEYANAEYDIDEIELFQDKIINQSPKLKNIYSNLSALEIKLRKQNISEKEKKEILSTKRKLESELEIEIKTPNPDVTKLNQKLDNNLFISSYGRNKDRFFDFSLRFLAEINYFGEDAKFQCYQFYTTDEQVKFLIDIKDKIEKKEFEKLKYHQGKLTHFITYKEHLNKYDDWYIPFVKENNAFQIEIILGNSEKKIISIQRSLLIYFLHDALYNPTPNGLNSITNYYFHFLQDFETGLATLKNSENQSVLNNNKIKKIFPRKLFAKINNNQNSVNHNPYLAFLTETKNKELRYENLLTKARKFNREDDFLKKNKGKQFKLNFIKKAWQLMYFKPIYLEKVTINGHHKQYNITKAEFENYCRWMFGFETTPSYKTALENLFHSKGFFNNSDFKELFEKGTSLEDWYKKTKTKFEKWILNQTQNSKNKITDFANYPNLNKNQILYINLSHYLSYLESKGEIIRQENKQIHYPSLSNNIYLIDSYYYSTILIDKEQKKHGKLFNELRKARLEDSILYEIAMVYFSKNQNIVPNIKNNVYNILTETIEFEIKNAKQISLYKFEIPFSKIDSYLELIAHKNDQELEFKGSSFMSRVFEYLQKLNLHSNSLKVENELKEIYKCGSLTYDSLNKFYAYIMNQSLLFTDLNMAIELYFINRDKLKIHNSNRIEYKDILPLTKDNYYTSIIRNRAFHFGIPEKNYRELINEIQKIYFEKEIKNKGLINTSQLTKSHSLLIDKIITIMFNNLYDKNIDTRERIINARNKYLEGQN

SEQ ID NO: 2351 - protein, 1003 aa, Artificial; identical to SEQ ID NO: 2063
  Synthetic

SEQ ID NO: 2352 - protein, 1145 aa, Artificial; identical to SEQ ID NO: 1631
  Synthetic

SEQ ID NO: 2353 - protein, 1146 aa, Artificial; identical to SEQ ID NO: 1461
  Synthetic

SEQ ID NO: 2354 - protein, 1003 aa, Artificial; identical to SEQ ID NO: 1494
  Synthetic

SEQ ID NO: 2355 - protein, 1137 aa, Artificial
  Synthetic
MENNTTLGKGISYNPYKTADKHYFGGYFNLAMNNIEFVIAEFLTRIGRKETKIANLKKVFTENMSLVDYERYIHILEEYFPIIKHLDKIHFKINDTVKEVSKEKRITYFIDNFISLLDLTNNLRNFYTHYYHESIAIEENIFDFLDESLLTTVRDTKENYLKSDKTKQILSISLKQELEILCSEKLNYLKENKIKFNRNDKEALINAVYNDAFKNFLYKKGEHFHLTDYKKTKILNPDKLEKDFDLDLSTSGIVYLLSFFLNRKELELFKGNIKGFKASVIRGTSDFEKNSIHFMATHRIYSVHCYRGLKKKIRSSNHDTKQVLLMQMLDELSKVPHVIYNSLDKELKDTFVEDWNEYFKDNEENNENLENSRVIHPVIRKRYEDKFNYFALRFLDNCVDFPTLRFQVHVGDYVHHKMEKSLIDSKIISERIIKEKVTVFARLDEVNKAKADYFNSLQAENDNRWEFFPNPSYDFPKQNTEKIMGNAKQKNAEKIGIYIQLKNSNLIQQTADAKEKLNPHKRSNTKLRKQEIIEKIINLNTDYKSKTPIVHTGEPVAYLSTHDLHSILYDLLIKGETAQAVEMKIQKQIEKQLREIVDKDTSVKILKKYNKEQTFSNINFSKLQNDLVKERDNLISLLDEHDYRIEDYDRTKKQRNYPHKRTYILYAAEKGKIAAWLADDIKRFMPKDFKEQWKGYQHSELQKLLAYYDTNNKLIAELLKGLDIENLPFDLNNCLKKNTLEDFYPMYLEKRIGYISQLIEQIKNFKDEPKLLKKVLNECFKFLKEKNYKQCGLNDQVQRLLAMPVFIERGFLDEKPTMKPNISFDDNKEDFAEWFVYYKSKNNYQKFYDVELYPFLYNDKKELYKIQTKIKRQQKNDVFTLLMSKELFTEIFREEANFTLGELFQSREERLKNAQNAKETQERNLNFIWNKVVNLNLANGKINISDVKLKDIGNFKAYETDQRVISFLEYETNKKWLAYLPNNVSKENTALDVIECQLQNYEKVRAHQLFKEVQKLEQYIYHKVENKEVLKHKGNQNFRNYLLYGLYDRDLSQEFVVIKSENFENISIKEIKEKAAKLEQQLFILTYIRNKFAHNQMPNKEFYDFCQEIVPCENTNQFYADYYLMVFSSIVNELSIN

SEQ ID NO: 2356 - protein, 1003 aa, Artificial; identical to SEQ ID NO: 2063
  Synthetic

SEQ ID NO: 2357 - protein, 1003 aa, Artificial; identical to SEQ ID NO: 2063
  Synthetic

SEQ ID NO: 2358 - protein, 1251 aa, Artificial
  Synthetic
MQSKSLENKPVFAAYLNMARQNAFETLCHISRLMGIEVDDAEKEKENRLWEMKVVKELSVEEIKSVRKLKLIKLFHTHFPFLKPILDVEQRSPKGYIPTELDEDPSEEQIEKELNTKIVYASPLKYYAILENMFRLLNALRNEYTHASPEEVPLPEKKKLHENVVRYAYNCLDGGRRVVKQRFGNFELPADKDAFAFLTDMNVRYDKVKIPGKFKIIKKKGKEQKVQESKFVEKSNFPYRMKDEQGILSDVGILLFVCLFLHKKYISMFMDKVKPYREGADNVEQKVLLETFSVFRIRLPKERYDSERPDYALGLDMLNELQKCPKELYETFAESDKAKFRVPIKSTSEDVVMDDGVIVENGEVLQIRVQDRFPTMALRYIDQTQAFPKIRFQVSLGHYRYSFYDKECIDSKNKEKDRVRVLQKEINGFGRLNEIELKRKEMYASHIRTNDVVRKDTADSEPYITDCYANYVFNGNRIGFLFFDKDLGRTEIKSMNTAEDKEIMYIPELEFDKDLAKETKKNGTNAVCVPPIAWLSTYELPALVFHHHLCQRLNLVSPDKKISKNPTEYVIIQCIKTYYRFFNDVKEGRLHPEMIKDKESLAALIRKDYAPLQLKDIPVKLVDYLTKVKVNMGEVFKTRAKERMEKMLRGTEVRLKMFREERAKIGAKDNKFGKKSYVDIRPGKLAEYLAKDMLMFQPVDKDNKNKVTGLNFQVIQASLAIYDKTWDELRTIFENAKLIDPQNTINKNLNHPFLKKLFDSKKIPLNTMDFYERYLQEKIDYLKDRLSKGKFSEAFLHKDRMKWRKRDADYYKALAGRYLEDMLDDNRKNLKPIELPRGLFERSIVDILKDAYADESQDTYKKDLAAFVKEQMFAYEKGEQPPYNTSFFISAYFTHVSKDKVQPFYTSTSNTYKRTYKFFNMINNEIKRNALIAQYYTQEEFKVLRKKYKLTGKPDAKLAQYKKDAFDKEKKKPESRGKSNEEIRNIIDSRLRKYHYEYDDNERAIRRFMVQDILVFLMAKDLLLKNIGKDDVKGKTRDKIEQYKLQNINPTSDTGNILSLSIPFSLTLTLKDGSTRTITQQELKLKNYGDFFRFVYDERLATLLSQTKSVEINRDDLEKELLHYDLQRTKIFGWVHAMENYLFKQHPELGKKDKMEEGSHYYYAQKVKNKKTGEEETKYSPFRQNFRAMLNVPGNIPSRHLEAMVGIRNSFCHNHYVEDLNFGGYQSADIPKLADALEKILKELVEQHSKK

SEQ ID NO: 2359 - protein, 1160 aa, Artificial; identical to SEQ ID NO: 2200
  Synthetic

SEQ ID NO: 2360 - protein, 1146 aa, Artificial; identical to SEQ ID NO: 1461
  Synthetic

SEQ ID NO: 2361 - protein, 948 aa, Artificial; identical to SEQ ID NO: 1976
  Synthetic

SEQ ID NO: 2362 - protein, 1272 aa, Artificial; identical to SEQ ID NO: 2226
  Synthetic

SEQ ID NO: 2363 - protein, 1403 aa, Artificial; identical to SEQ ID NO: 1745
  Synthetic

SEQ ID NO: 2364 - protein, 1145 aa, Artificial
  Synthetic
MTLPTDNTFIEKADQEILGKNKLFFGAYLNMANHNAYLIIKDISERLKQEDALDIDAPSDEDNLAYAEIFSKILKKASDKNPKNRPQATIIDKVTNLLIHHFPAFEVFAYEHPFEQQNSYPELLYQKLSTASKLLNDLRNEHSHFYYKGSFDIDTVFSAAQEEITRFPYLTPEDIEELEYYKNDLLEPLTYFKKYGFVFFICTFLEKRYARYMLKEKQLDLIASDKERDATLENFTNYSCRLPRPKLESSVIELDMLNELSRCPKGIHDVLSSPMEKVLLKTDAKDDPNQVPMIRHNDRFPYFALSYFDKMERFPAMRFHIWAGKTRLAFYGKKLGKKNVLRDIQENVTIYARLNDIKADKIPDNWKDKIDVEDSEENKEKAKIQSYSPHYNIHNNRIAIKFIDTQKDELDTENFSEIKSKPQDPTKDKQLKYTVTHALPNAILSTYELQNLFLYDYLYRTYKDQKVLARPADSFIRNYISSFHRFCKDVKSGKIQPVSPHDFERLTEHTRSTTRDLGNREEELEIRKEALQKKKLDNYGLKVKNLPDALREYLLGYKQETYTEIALNKLRGKIQQTKVHYKLATKDDLFLDGKTDLKSGKIGDFLAADIVFLKPLDANRTGKPNNQQFNELQKAIARFHSQKKDVEDFINEELQIKEQSLPHAHPFLYKIQFEEHTDVQSFYIKYLELKIEWLECTKREIQGKSDYLKPWQWREEADKCKQYGIDIKPEGLSDAATENKYGYFLQINTKKGNERNYTNATTRSKANSKEFESLESKSPVILPRGLFNDAIIDAMMKIDEFKGKIKEGDNIVRCLDVLAEGDRQTFYDFERSYTVGKAAPTSVTIHQGANDEYIKNKLRSIKPIIKKLRTQQNAKDAKYKDKKILQNHIKALQAISDNERSIRFIRANDRALFLMIKHIFSEHKSYVVEGSKLTKSINTLPWKLNKVGYEIKENNILNEILPMNIQFNQKNIYTEGEYGTDPLNKLSIKHYGKFRKLLKDKRLSNKKKPGLLNYYTDQNVRWSAINKELEYYDENRDRLLDVIYKFEKAVWENEECREELKENIRLGYINHAAQLKAVGKIVRDFTASKQDQLALLRNKFLHNQIPYTENLKTGWVDNNPEYPLITQALLELAIIEYQNIKKNII

SEQ ID NO: 2365 - protein, 948 aa, Artificial; identical to SEQ ID NO: 1976
  Synthetic

SEQ ID NO: 2366 - protein, 1213 aa, Artificial; identical to SEQ ID NO: 2160
  Synthetic

SEQ ID NO: 2367 - protein, 1003 aa, Artificial; identical to SEQ ID NO: 1494
  Synthetic

SEQ ID NO: 2368 - protein, 1162 aa, Artificial; identical to SEQ ID NO: 1393
  Synthetic

SEQ ID NO: 2369 - protein, 1047 aa, Artificial; identical to SEQ ID NO: 1398
  Synthetic

SEQ ID NO: 2370 - protein, 1003 aa, Artificial; identical to SEQ ID NO: 1723
  Synthetic

SEQ ID NO: 2371 - protein, 1003 aa, Artificial; identical to SEQ ID NO: 1494
  Synthetic

SEQ ID NO: 2372 - protein, 1052 aa, Artificial
  Synthetic
MMKTCIKDSWNKQAEKLDKKVRLRNLLMRHFPFLEAAAYEKTTSKDSNSKEQKEKEQAEALSLDNLKNVLFIFLEKLQSLRNYYSHYKYSEEAQKPTFENDLLKNMYKIFDTNVRLVKRDYMHHENVDMQRDFSHLNRKKQEGQTRKIIANPNFRYHFADEKGDMTIAGLLFFVSLFLDKKDAIWMQKKLKGFKDGRNLREQMTNEVFCRSRISLPKLKLENVQTKDWMQLDMLNELVRCPKSLYERLREKDRESFKVPFDIFSDDYDAEEEPFKNTLVRHQDRFPYFVLRYFDLNEIFEQLRFQIDLGTYHFSIYNKRIGDEDEVRHLTHHLYGFARIQDFAPQNQPEEWRKLVKDLDHFETSQEPYISKTAPHYHLENEKIGIKFCSTHNNLFPSLKREKTCNGRSKFNLGTQFTAEAFLSVHELLPMMFYYLLLTKDYSRKESADKVEGIIRKEISNIYAIYDAFANNEINSIADLTCRLQKTNILQGHLPKQMISILEGRLKDMEKEAERKIGEMIDDTQRRLDLLCKQTNQKIRIGKRNAGLLKSGKIADWLVSDMMRFQPVQKDTNNAPINNSKANSTEYRMLQHALALFGSESSRLKAYFRQMNLVGNANPHPFLAETQWEHQTNILSFYRNYLEARKKYLKGLKPQNWKQYQHFLILKVQKTNRNTLVTGWKNSFNLPRGIFTQPIREWFEKHNNSKRIYDQILSFDRVGFVAKAIPLYFAEEYKDNVQPFYDYPFNIGNKLKPQKGQFLDKKERVELWQKNKELFKNYPSEKKKTDLAYLDFLSWKKFERELRLIKNQDIVTWLMFKELFKTTTVEGLKIGEIHLRDIDTNTANEESNNILNRIMPMKLPVKTYETDNKGNILKERPLATFYIEETETKVLKQGNFKVLAKDRRLNGLLSFAETTDIDLEKNPITKLSVDHELIKYQTTRISIFEMTLGLEKKLIDKYSTLPTDSFRNMLERWLQCKANRPELKNYVNSLIAVRNAFSHNQYPMYDATLFAEVKKFTLFPSVDTKKIELNIAPQLLEIVGKAIKEIEKSENKN

SEQ ID NO: 2373 - protein, 985 aa, Artificial; identical to SEQ ID NO: 1567
  Synthetic

SEQ ID NO: 2374 - protein, 1141 aa, Artificial
  Synthetic
MAQTRWKQSKTPAIKPVMAAYLNMARHNMYRVMLHISRQMQIIENKEEAEIAAFSVWQKLSSGTPTEQMKMIKLLQRHFPVLKPVFDVEKKKNVENAAISASPKEIKRIFTTILTALNRLRNEYSHYSPVPRKTEGEEKMIAYLYRCMDGSAREVRNRFSLTVKDPKGAKETAKVLEVNKAVFDIFQDAFRKEKVKALDKSGKVIKDNKGRTQFEFRDKEDYYYALKDANAALSDMGIVFFTCLFLEKRYAAMFLDAIKPWPQDFNEIERKAVLEVFTVYHIHLPKEKYDSTRPEYALGLDMLNELQKCPKELFDILSAKSRDALSVDIKADRPDVVTDDGVTVKDGKVQMRRVRDRFAPLALQYLDSQKAFNDIRFMVRLGHYRFKFYKKQCVADNAPDTLRVLQKEINGFGRLDEMEAARKKNYTPLFKATCVKTNDKGIEVHELVPDAPDSAPYITDTKAHYLIDNNRVGLRIDNPSFLPSLRGEKGAPIQSAGDISLLSPQAWLSTYELPGLVFYQYLYDTYDGHGKHLPSAEEIIKSYILAYKRLFVDLGEGSFDGWDEYAYAPLTLGDLPQKIKGFILHPSATIDPRFQDKANNRIDDMIKRTEAEIAGFDTKMKKLSDKSNKLGKKKYVDIRPGSIASRLVRDILFFTPVSEEKAKITSANFNSLQSALALSELGTNRIKDILRGLNHPFVMKAFEKYRVEDFHLFDFWKVYLNKRLDYLKGLDREKLEEVPFLHSSRTRWQKRDEKYIKLLAGRYEQFELPRSLFTAPTRVLLDEVALHFESGSDRDLSMGNLINLFFSKVLSDNNQPFYRWERHYDVFDKLAGVKSGNSLVHQFFKPEQLAKKMRERKTLKPSLYMCEKAVNSVNQNLKKGERRLNIHSSTDLKDSRVIAVAKENLKKAYQDYDDNERILRRFAIQDKVMYLMAKSILLGIKGIEAGSLDRFKLKDILPGKNNTILDILVPFSIVLEIDGIKVLIRQKEKVKIKRYGEFFRYNTDTRLRSLLPLLGKTLGAETEINVELDRDTLEEELSAYDRERVVVMRMVMSLEQSILSRSTGDVPEMDRENFNNLVSKVGHIPYKSHGQILINIRNSFCHNEYARDIVLPEGTPLPQVAETISKLFETERKRRPNQCQE

SEQ ID NO: 2375 - protein, 1128 aa, Artificial; identical to SEQ ID NO: 1436
  Synthetic

SEQ ID NO: 2376 - protein, 1126 aa, Artificial; identical to SEQ ID NO: 1409
  Synthetic

SEQ ID NO: 2377 - protein, 1003 aa, Artificial; identical to SEQ ID NO: 1494
  Synthetic

SEQ ID NO: 2378 - protein, 1003 aa, Artificial; identical to SEQ ID NO: 1494
  Synthetic

SEQ ID NO: 2379 - protein, 1003 aa, Artificial; identical to SEQ ID NO: 1494
  Synthetic

SEQ ID NO: 2380 - protein, 1285 aa, Artificial
  Synthetic
MAFDKPRPKRRQARSDFYITDKAIMGGYFNLAQLNFFKTLMEIFTKAGIDVSKIKQDNSPKYLMILIKKLTHDDEKIDDKKWADALDLSNECLLKLQQLLYKHFPFLGPVMGGEASYNIYKLKDGHPEVKVANDVMRGVKLEDCLTVLRHFALCLNDCRNFYTHFNPYNSIDAQKEQYLSQNKVAVWLDKVKDASRRIVKQNNQLTSQDMEFLTGIDHMKPQDKVDEFGNIMTDRRGYTIKEYVEYEDYYFRIRGKRYLVDAAGAKLADQEPRNALSDFGVVFLCTFFLESDQSRRMLDELRLFETGPYDGSRDGDEFKNDILREILLFYRARIPRGKRLDPMDDTTLLAMDMLNELRKCPMPLYDVLSREGQRFFEDEVKRPNDLTPEVAKRLRSSDRFPYLALRYIDLNKCFDNIRFQVQLGKFRYKFYDKTTIDGEQVVRGLQKEVNAYGRLQDVERYRQEKYADMLQQTELVETGEEDITIANFIPDTPQSSPYLSDRTASYNIHNNRIGLFWNMPGEQEVLTGDEKMYLPDLNVDDNGKADVFLPAPKASLSVRDLPALVFYLYLQNQHPDLMPAESIIQQKYNALVRFFEDVSTGRLQPVKGINELKAAIDRYEYLTIHEIPEKLRDYLAGVAGTEDDDDCADRLDCYAMGILEKRYRRVAARIDQLKEARKMVGDKMNRYGKKSYIDVRPRRLAEQLAQSIVEWQPATDNGRHKMTGKNFQRLIAFLARYTDEVPLQEIKDLMSRARLLDGPVAHPFLQQVLDKNPLNIEVLYDLYFKEEKRYLDKYIEIEIKEVFRKKASVDLSRIPFLNSGRLRFHKRDSAYYQRLAARYLKVDGRQSTILLPDGLFTPHILSALKSILYQENRDLQDHLQDQELNRNASYLMSAYLEHVLHDSAQPFYLSNSNDSHFARRYDLFAIMQNKKKGAELLPSPLTPVEINRRITGKTPDGSAKVIEHDIKALLDGMAHKTEERIHDLQQDYSRKKEQQVQEERVKLERYFMRKIADVKNQAQEERIKLQRRLKHKITDVKKNERTIRRYKTQDMAIFLMAQQMLANQLSWQNQEGEVPFKLANVCNDGFLRQTMKISFPYEVPLKEDKTKKVTIDIVHDNMSLKNYGLLYKLYHDERVVTLLQNIVDQQQISFAELTAELSLYDQNRSKAFSNFQQFERLAFETNKEALSNPEHSGFFLEKVNKKNQVIRYERRNNFDALLDLLDAIEAHQLNPRERQWLTSVRNAFCHNSYYKIDMQQIEKKLPTIIQQIVEIVQRITDKASHPSNQ

SEQ ID NO: 2381 - protein, 1175 aa, Artificial
  Synthetic
MTEQNERPYNGTYYTLEDKHFWAAFLNLARHNAYITLAHIDRQLAYSKADITNDEDILFFKGQWKNLDNDLERKARLRSLILKHFSFLEGAAYGKKLFESQSSGNKSSKKKELTKKEKEELQANALSLDNLKSILFDFLQKLKDFRNYYSHYRHPESSELPLFDGNMLQRLYNVFDVSVQRVKRDHEHNDKVDPHRHFNHLVRKGKKDRCGNNDNPFFKHHFVDREEKVTEAGLLFFVSLFLEKRDAIWMQKKIRGFKGGTEAYQQMTNEVFCRSRISLPKLKLESLRTDDWMLLDMLNELVRCPKSLYDRLREEDRARFRVPVDILSDEDDTDGAEEDPFKNTLVRHQDRFPYFALRYFDLKKVFTSLRFHIDLGTYHFAIYKKNIGEQPEDRHLTRNLYGFGRIQDFAEEHRPEEWKRLVRDLDYFETGDKPYITQTTPHYHIEKGKIGLRFVPEGQHLWPSPEVGATRTGRSKYAQDKRLTAEAFLSVHELMPMMFYYFLLREKYSEEASAERVQGRIKRVIEDVYAVYDAFARGEIDTRDELDACLADKGIRRGHLPRQMIAILSQEHKDMEEKVRKKLQEMIADTDHRLDMLDRQTDRKIRIGRKNAGLPKSGVIADWLVRDMMRFQPVAKDTSGKPLNNSKANSTEYRMLQRALALFGGEKERLTPYFRQMNLTGGNNPHPFLHETRWESHTNILSFYRSYLKARKAFLQSIGRSDREENHRFLLLKEPKTDRQTLVAGWKSEFHLPRGIFTEAVRDCLIEMGLDEVGSYKEVGFMAKAVPLYFERACKDRVQPFYDYPFNVGNSLKPKKGRFLSKEKRAEEWESGKERFRDLEAWSHSAARRIEDAFVGIEYASWENKKKIEQLLQDLSLWETFESKLKVKADKINIAKLKKEILEAKEHPYLDFKSWQKFERELRLVKNQDIITWMMCRDLMEENMVEGLDTGTLYLKDIRTEVQEQGSLNVLNRVKPMRLPVVVYRADSRGHVHKEQAPLATVYIEERDTKLLKQGNFKSFVKDRRLNGLFSFVDTGALAMEQYPISKLRVEYELAKYQTARVCAFEQTLELEESLLTRYPHLPDKNFRKMLESWSDPLLDKWPDLHRKVRLLIAVRNAFSHNQYPMYDETIFSSIRKYDPSSPDAIEERMGLNIAHRLSEEVKQAKEMVERIIQA

SEQ ID NO: 2382 - protein, 975 aa, Artificial
  Synthetic
MGAIENKHIFAAYANLAIDGLIKTLNFIAKKLDTQKQLSSWDIKHVITLIDSIFDQNPQNNLEQVVEGYLPWIKPIIEMKTPKKGERQSDKLCIEYKTIITAFASLLNDVRNYYTHYYHDPICIYPRGYDIPSSLNCIYDSAINIIKERFQAEEKEMEHLRNYTLVNNNGLSEKGYAFFISKFLERKYSYLFLKKLSGFKRGDSLQYRLTLEVFTALSTKPPVERLRTTKDTKQDRALDILNELSRIPIELYQTLEPKYREMYNETLQPTDAEDPYGLPDRSRIRFRSRFEAFALHFLDKQADFKEIGFYTYLGNYFHNGYQKTRVDRETKDRYINFQLAGFCKNIQDISAKKLSEALNVKSIDISTDSIPDINSFEPYLVQSTPHYIVNGNNIGIKVLPEGKDTYPTIDEKGAKMPIADFWLSKYELPAMLFYTYLRNNNIHKSHCPLSVKDIIERSIHKSTKQKHPEERSELMLRRVMKAIFWTDSKLNEVERIKSQKSAFGKRQHEILKAGRIAETLVRDMLWLQPSKNNGRDKVTEPNFQAIQVSLAYFGIRRNDLTEIFTRAGLINSSNPHPFLAQIGTNYTSLIEFYIAYLKERKVYFSRIQKKILQGKLNIQCHPLRDLQREPNKPQEKEEAIFLPRGLFNEAIINCLKKSKLKHLIESPTREKSPALNVSYLIHNYFRAYFEDQSQEFYAQPRNYRLFDKLSPNKGKSKSYLSLEQRIKKMEELRPSKIPVAEANKLLEKEDRLYRKNYNEICDNESIIRLYQIQDILLFMMTKEYLPSDLYNRINKYKLENVKGILNERVSYLIDLNPLKIQGEDIKIKDYGKLFYIHHDTRISSLNKVLSKVKRNNSISSSVKIQPYENYKRECLDFEEAQIQIIPIIHSFEIAMVSMFPDLKKATPGNYYDFNELITEYEKRTKQKIDSSFLIKTRNMFLHDKYEAECIKEISDDFVYAKKIIAEFKMKIENIK

SEQ ID NO: 2383 - protein, 1312 aa, Artificial; identical to SEQ ID NO: 2136
  Synthetic

SEQ ID NO: 2384 - protein, 1118 aa, Artificial
  Synthetic
MEDDKKTKESTNMLDNKHFWAAFLNLARHNVYITINHINKLLEIREIDNDEKVLDIKALWQKGNKDLNQKARLRELMTKHFPFLETAIYSKNKEDKEEVKQEKQATAQSFKSLEHCLFLFLEKLQEARNYYSHYKYSESTKEPMLEKELLKKMYNIFDDNIQLVIKDYQHNKDINPDEDFKHLDRTEEDFNYYFTRNKKGNITASGLLFFVSLFLEKKDAIWMQQKLKGFKDNRESKKKMTHEVFCRSRMLLPKLRLESTQTQDWILLDMLNELIRCPKSLYERLQGVDREKFKVPFDPADEDYDAEQEPFKNTLVRHQDRFPYFALRYFDYNEIFTNLRFQIDLGTYHFSIYKKLIGGQKEDRHLTHKLYGFERIQEFNKQNRPDEWKALVKDLDTYETSNERYISETTPHYHLENQKIGIRFRNGNKDIWPSLKTNGENNEKSKYKLDKQYQAEAFLSVHELLPMMFYYLLLKKEEPNNDKKNASIVEGFIKREIRDIYKLYDAFANGEINSIGDLEKYCEDKGIPKRHLPKQIVAILYDEPKDMVKEAKRKQKEMVKDTKKLLATLEKQTQGEIEDGGRNIRLLKSGEIARWLVNDMMRFQPVQKDNEGNPLNNSKANSTEYQMLQRSLALYNKEEKPTRYFKQVNLIESGNPHPFLNNTGWKECNNILSFYRSYLTKKIEFLNELKPEDWEKNQYFLKLKEPKTNRETLVQGWKNGFNLPRGIFTEPIREWFKRHQNDSEEYKKVEALKRVGLVTKVIPLFFKEEYFKEDAQKEINNCVQPFYSLPYNVGNIHKPDEEDFLLSEERKKLWGDKKYNFKGYKAKVKSKKLTDKEKEEYRSYLEFQSWNKFERELRLVRNQDIVTWLLCMELFDNLKVEGLNVEELQKLRLKDIDTDTAKKDKNNILNRIMPMQLPVTVYEIDDSHNIVKDRPLHTVYIEETKTKLLKQGNFKALVKDRRLNGLFSFVDTSSEAELKSKPISKLRVEYELGEYQNARIEIIEDMLALEGALIEKDKNLPTDNFSNMLNGWLKGKNDADKEETKKAIDFLVAVRNAFSHNQYPMRNRIAFANINPFSLSSANTSEEKGLGIANQLKDKTHKTIEKIIKIEKPIETKE

SEQ ID NO: 2385 - protein, 1105 aa, Artificial
  Synthetic
MQSFICYKNQSITYKEKIMNNDYQKNHVEKDNNYLWGTFLNQARLNAYITLCHISDLLEESTVDEDSIATMSVLDFLDSDKDIIKSERVFKLVEKHFPVLKIIYDKQKEKGKDDDAQCRSKKYKEILTRLLQAINFNRNKYCHICSGKKEPNYDVKTLIKHLDNCFDVSVDKIKNRLSLFENDKRDDDPKDEVIHLRRFKGAEKENGKKKSKANPKFHYHFNDNKGQLSEKGLAFLAALFLSKKDAHEFLKKQHGFKRSETPAARATLESFYCYRITIPKPVISSDVDKNGLALDTLNELKKCPKESFELLSKERQKEFRVIDSEDTEEDGNEILMRRYSDRFDYLSLRYCDENEVFDKIRFHIDLGRYYFKFYPKQTIDGDMRQRALDKRLKTFGRIKEVKDKVDLEWGDLIKAPGEKHGEQSDPYKTKTTPHYHLVDNQIGFVLGDRDLPDIKQPEGKISLKEPDAWLSIYELPGMIFHGLSNSRGFKRTEELIEQHITRQKEICKQVSETGVIPENAGKFLPKALRDAIAGKAKQSDYAKKKLQRMLDDTSHRIKALKATRQRMADPGNKPGKKKFFDLRAGKLADFLARDIMALQKFDPNKEGKDKLTSVNFQVLQATLAYYGAKKDTIENIFRTSGLLGGDNPHPFLNQIKPTRHNSIADFYEAYLNIKEKYLEGCQKDGNLDSYQFLRPSRQRYAKTARDLKQIAGRLFKQPVNIPKGFFKEQIEEIVCNKVPSPEGREMNTAYMIQGWFKKTQGNQQPFYGYAKTYPVVSKAKEYAKKRTNQKIAETLRSLSPEMSYKDLKMSIEENIPENGRYDPENLRDNLLKGCKDLKKNERALKRFRVQDIIMFMMVEKTLKDQLSIEGKFLQLEAITPTPEKKDKPFNKPILCHTDIKIPFNTNPNHHDASYVGFIQEQYKDLYATQGKKIILKYKITSENTKLKDIGKYRRYLYDRRTPGLLIWQYPPNAQSDVEIKYSEIERQIMAYDQNRLKIAEQLYLLEKLVIDCFVPKHELGDSHISFNAVAEKLQTELIGFEEKGNVLLKIRNALGHNQFPVFMGVIENAAGDTIAEKMFSITESYVQQATKQIEDGDRDKDIANV

SEQ ID NO: 2386 - protein, 1129 aa, Artificial
  Synthetic
MKEEETPVVSTYNKDNKHFWAAFLNLARHNVYITINHINKLLEIREIDNDEKVLDIKALWQKGNKDLNQKARLRELMTKHFPFLETAIYTKNKEDKKEVKQEKQAEAQSLESLKDCLFLFLEKLQEARNYYSHYKYSESTKEPMLEEGLLEKMYNIFDDNIQLVIKDYQHNKDINPDEDFKHLDRKGQFKYSFADNEGNITESGLLFFVSLFLEKKDAIWMQQKLRGFKDNRESKKKMTHEVFCRSRMLLPKLRLESTQTQDWILLDMLNELIRCPKSLYERLKGEDRKKFEVPFDSTDEDYDAEQDPFKNTLIRHQDRFPYFALRYFDYNEIFANLRFQIDLGTYHFSIYKKLIGGQKEDRHLTHKLYGFERIQEFAKQNRTDEWKALVKDLDTYETSNERYISETTPHYHLENQKIGIRNKKKKKKKNIWPSLETNTTVNEKSKYNLGKSFKAKAFLSVHELLPMMFYYLLLTKEEPNNKEINASKVEGIIEKKIRDMYKLYEAFANGEINSEDDLKKYCKGKDIEMVHLPKQMVAILKNKPKDVAEEAKHKQKKMVKAAECKQRKMVKDTKKLLAALEKQTQGEIEDGGRNIRLLKSGEIARWLVNDMMRFQPVQKDNEGNPLNNSKANSTEYQMLQRSLALYNKEEKPTRYFRQVNLIESGNPHPFLNNTGWKECNNILSFYRSYLTKKIEFLNELKPEDWEKNQYFLKLKEPKTNRETLVQGWKNGFNLPRGIFTEPIRKWFKRHQNDSEEYNKVEALDRVGLVTKVIPLFFKEEYFKDDAQKEINNCVQPFYSLPYNVGNIHKPDEKDFLHREERIELWGKKKDKFKGYKAPKKPKKITDEVKEEHRSYLEFQSWNKFERELRLVRNQDIVTWLLCMELFDNLKVEGLNVEELQKLRLKDIDTDTAKKDKNNILNRIMPMQLPVTVYEIDDSHNIVKDKPLHTVYIEETKTKLLKQGNFKALVKDRRLNGLFSFVDTSSEAELKDKPISKSVVEYELGEYQNARIETIKDMLLLEETLIEKYKTLPTNNFSAMLNAWLEGKDESDKARFQNDVDLLVAVRNAFSHNQYPMRNRIAFAKINPFSLSSADTSEEKKLNIANQLKDKTKETIEKIIKIEKPIETKE

SEQ ID NO: 2387 - protein, 1140 aa, Artificial; identical to SEQ ID NO: 1356
  Synthetic

SEQ ID NO: 2388 - protein, 1165 aa, Artificial
  Synthetic
MKKTNAEESNFNHTLNDQKYYFAGYLNLAENNIKTLEKAYGEHFLCSGKETIISNLNNTSSLIDWDLKVKFLSQYLPVVSYLNLDTDPNSTFKIIKKEFSENLSSLFDSIGSLRNFYSHYYHRPLTEELNIELLSFLDRTFVAVCINVKKKRMKDDKTKQLLKATLNNELDLLLKAKKEELLKKKKEGKKVSIDAISMKNSVLNDAFNHLVQLDKNSREEIPGRFYTSVLGDNNKYTENEINISMSGLLFLLSMFLTKKQNEDMRSRIFGFKGTIDPDKSISKSNNSFRNMATNWVFSYLSFKGMKKQLGNTFKKESLLVQIVDELSKVPHEVYQTLSPHHQEMFLEDMNEYLKEGNKKLCLEDSIVVHPVIRKRYEDKFNYFAIRYLDEFVEFPSLRFQVNVGNYVHDRRMKTIDGTKTETDRMVKEEIRAFGKLSVISKLKADFFAKDLPSDISWEMYPNPSYNISANNIPVYIDLIKSSVAGAVDVGKDHKSYQAKLDLDEDKRKRNRKEGKPGKTEIARILLGKKQILFEKPTVLLSLNELPALLYEVLKEGGDKQDIGKRIEDKIVEKIVAQYKLIDQYDGTIELPGSVIPKKLRKSGSEKCTNMDKLLRAVKRELEITQEKLDLIKNNKKKFESKEKDEKGKARQHVFYTNELGQEATWIANDIKRFMPRDVKEKWRGYHHSNLQKLLSQYNQSRNEAVKCITCFWNFDQQTPWGKGIKEAFYKSTFEEFYKAYLDNRMDVYKTLENNLIAAKGHSKLFNKEKKKAFVLFDKHLYNIPDINTQKERLKSTLFILPRGIFDSKPTFIKGIKYEEDPSCFADWYQFANNAGNEYQQFYNLTRSYTSLFEETKKNNEGLKENKKGLSADEQFDFFKMRQDLKIKKIKTQDLFLFQIVKDLYKKVFGRTFPEGLELKDMYQTPAERQANYELAVKQSQRTEGDKSDNLYNTNFLWNLTVPFETGKIKEPQVKLKDIGKFYKFAADEKVQTILSYSDREWSKLDLEKELELMPTSYEVIRREQLLRDIQQFEKRILENYPSDGNAHPRDFEIVRNGILSPSFNFYLLKGVIIKNNLASEEECQWFEQVHLNKTQFYPEVATKSTIIQSAYLLLLIRNKMLHNQLPSKQNFEFMTTLYPFQGYENYSTYLLSVTKQTIECLSSAM

SEQ ID NO: 2389 - protein, 1127 aa, Artificial
  Synthetic
MNTHQEELQSWITRKRLPDTEMKKYWAAYMNLARLNFFKTLMFISNSIGDLKPAKDNNGKGNTEVNMHNMGILTALLGPEDEEKARLLIFKHFPFLRTFCIEKELSLSKQRTILIDMACIIGRYRNMYSHSIFISDDNEKVLESEKRCSEYLQSILTVSTRIIKERYRSNKNDAQRGMIDDKSLKFISENKVKFVYDENGKRITAPNKKYYLSTIDKDNTHLSYFGKLMLTCILLEKKYATDFLTQCHFLDAFNDSEVAPKLSERRLMLEVMTALRIRLAEKKLSNEKSEVQISLDILNELKKCPFELYELLGSEDKRLFTIVADTGETILLRRHEDRFPQLALSWIDSSKAFDHLRFQVNAGKLRYLFRDNKHCIDGQTRMRVLEEPLNGYRRLMEFEEERIQKQSGEIRSLWPGLDILNKDETPRNDASVLPYISDYRVRYLFDGDNIGISIGDFTPSITKTDETKYRVTRKTADCCLSKYELLGLLFYHLLTLRHGDNKRSTKNAEDIIIDAIKRYKRLFSDVKEGILKPIKEENANQLGNRIWNSYGINIKDIPDKIIDYLLVRECNEDEKFTAWKNGFISEMLQSTKNRIKRFEKDSEAVISSDNKPGKKNHVSLKPGAYASFIANDIVFFQECGATEKMTGLNFKVMQSRLATFTKDGSTSFNILLQTLKNAHLVSTTYGKGDHPFLYRVIKQQPSDIVQFYKIYLNEKVLYLQSDIPDNAIFLHGERKRWENRNEQYYRDLAERYLQRPIQLPRQLFESHIRQLLLSDCIKGERGNDLKEAINSAASQGRCNTTYMIMEYFADYLCDGTQFFYGLFDGDLSHEYNYRFYSLISNNIENSKKLVLTLKKGNNSKESPFISALERGIHWSKMNPLMKKGLKNDSSEGDFVHAAKRAYKEMTETERMFRRYAVQDEVLFLAAKITIRRALGLSEQYNCLLGDIKPQGGSLLEQTIPSITTKHTINTGNKKQKPKQVQILQKNVKLKDFGKVFKLLNDRRIFDLLFNKGNEAVSMTDLCEELERYDRHRVDVFDSVLKYESKITKGYTNKELMNESGQIDFKAIQAFDKQNTTADKEDLRLIRNAFSHNQYPQYNNEPILFDKDIPEIADEISIIAKDIEENTK

SEQ ID NO: 2390 - protein, 1082 aa, Artificial
  Synthetic
MSIVDYEKNISILNGYLPIIDFLDDELENNLNTRVKNFKKSFIILAEALETLRNYYTHFYHDPITFGDNKEPLLELLDEVLLKTILDVKKKYLKTDKTKEILKDSLREEMDLLVIRKTDELREKKKTNPKFKFSTDPTQIRNSIFNDAFQGLLYEDKENNGKTQVSYRAKTKLNPKDIHKQEERDFEIPLSTSGIVFLMSLFLSKKEIEDFKSNIKGFKGKVVKDENHNSLKYMATHRVYSILAFKGLKYRIKTDTFSKVTLMMQMIDELSKVPDCVYQNLSETKQKDFIEDWNEYLKDNEENTENLENSRVVHPLIRKRYEDKFNYFAIRFLDEFANFKTLKFQVFMGYYIHDQRTKTIGTTNITTERTVKEKINVFGKLSKMDNLKKHFFSQLSDEENTDWEFFPNPSYNFLTQADNSPANNIPIYLELKNQQIIKEKDDIKAEVNNSQNRNPNKPSKRDLLNKISNTNEDFYQGDPTAILSLNEIPALLHLFLVQPDNKTGQQIENIIRIKIEKQFNSIKNPSKDDKGVPKSLFADTNVRVNAIKLKKDLGEELDMLNKKQIVFKENQKASSNYDELLKKHQFTPKNKRPALRKYVFYNSEKGEEATWLANDIKRFMPKGFKTKWKGYQHSELQRKLAFYDRHTKQDIKELLSGCEFDHFLLDINACFKEDDFEDFFSKYLKNRIETLNIILKQLHDFKNEPTPLKGVFKNCLKFLKQKNYVTENPEIIKKRILAKPAFLPRGIFDERPTMKKGKNPLIDRDEFAKWFVEYLENKDYQKFYNSEEYRIRDADFKKNAVIKKQKLKDFYTLQMVNYLLKEVFGKDEMNLQLSELFQTRQERLKLQGIAKKQMNKETGDSSENTRNQTYIWNKDVPVSFFNGKVTIDKVKLKNIGKYKRYERDERVKTFIGYEVDEKWMMYLPHNWKDRYSVKPINVIDLQIQEYEEIRSHELLKEIQNLEQYIYDHTTDKNTLLQDGNPNFKMYVLNGLLTGIKQVNIADFIVLKQNTNFDKIDFTGIASCSELEKKTIILIAIRNKFAHNQLPNKTIYDLANEFLKKEKRETYANYYLKVLKKMISDLA

SEQ ID NO: 2391 - protein, 1127 aa, Artificial; identical to SEQ ID NO: 2117
  Synthetic

SEQ ID NO: 2392 - protein, 1152 aa, Artificial
  Synthetic
MEIDENVKATNYLHTLNEDKHYFGGYLNLAENNIQLVFKLFRKRFDCGNAKLEFIIKESFNDKIAITDYQRRVDFLKQYFPVVVYIDLPPTNPLFNKIKNQDKECKRRDYFRTSFTCLIKAVKYLRNFYTHYYHEPICFDESFYELLDRLLLSVINDVKKHKLKVDQTRHLLKKDLNDELKQLIEQKTAFLVEKKKRGKEVDLSPEAIENSVLNDAFSHFLDGDNLCSYYQSKCNRGQDIENHVVISECGLLFLLSMFLYRNENETLRANIKGYKAKIVKDETKPIDRKNNSLKYMATHWTFNYLSAKKVKKRLNTTFLKETLILQIADELSKVPDELYQTYTEDTKNKFIVDVNEYFKDNEELRSFDNMMVSHPVIRKRYEDKFNYFVLRYLDEFIDFPSLRFQVHLGNYVHDRREKNMQSVHVKTDRIIKEKINAFGRLSELTDIKTGFFSNLKEDTKWELFPNPSYNFVGNNIPIYINLERCKVKKPSENISSNESKIRKRIDGKLTKDQIVHKLGRDIIWGKPTALLSLNELPALLYKVKQEIENEKSRIEIGKKIENLLLNTIIKKYQAIDKFETGDKVPVSKITKRLRRAKDVEDIQMGKLRNDIEKEIDICNVKLKLIATNRRELSLKHGINEKQGKFIFTSKELGCEAAWLADDLKRFMPKGTKFNWKGYQHSQLQQSLAFYDLRPNEAYNFLKEYWDFDDENYFINLWIRKAFRSNKFDEFYEKYLNNRKLFFENISNQIGGLSKKLVNKFIEQQYLWNIFYKRLYLIPSTEKQKEELLNQPIVFSRGIFDEKPSYIKGKSLEESPELYADWYRFIQDDNHQLQKFYYWERDYKELFEVHRNSEYMEENKYELSPKQQFELFTRKWNKKIKKVAGQDLFLHLILKDVLKELFAQEIPLQLKNFYLTQEERAAMQIEADRMNKRGEGDKSPNFVNEDFIWNMKVPFKSKQINDPAVKIKDLGKFVRFLEDEKVQRIFDYDGEKEWTKEALEMELESYEKVRRFRIFKTLQELERRILQKRGGNGVEYPEELLNGRNPNFKKCMVTGLLKYHTDVSIKDLDWLSELSKNAFESSETFELLKTKSQIVQDSFILIYIRNKFSHNQLPVKQYLEMIYNCNYYWSTYAEGIAKFVEELTNKFINILDS

SEQ ID NO: 2393 - protein, 1146 aa, Artificial; identical to SEQ ID NO: 1461
  Synthetic

SEQ ID NO: 2394 - protein, 1116 aa, Artificial
  Synthetic
MENTIEIQKQSIRTLNNAPQYFGLYLNMARLNIFNISNYLAEKFGLAVLDEEEKITISFLGDKGNKEYKTKQSYIYFNLIKYMPVAKVFDFEKLPKNEIDKTKNNSGKDFNKLSDTLKVIFKELNEFRNDYSHYFSTEKQDKRKLKISSELKDFLNINFSRALSYTKNRLKDVFSDDDFNIASQTVVVNNDNTITQDGIVFLISMFLDMENAFQFINKIIGLKGTQTKAFKAKREVLMTFCVKLPHDKFVSENPQQTFSLELINELNKCPKLLYNVITEEEKQIFKPQIQTEQIENIISNSVPDTIDDYENYIESITKKVRYENRFSYFALKYIDLKELFKKWRFQIDLGKVVLDKYSKQLNGKDEVRTVTENAKAFGRLQDFYDQEKILNKINIGENKTRFYQFAPHYNFDVQNNKIGISKKETTAKFISKNTTHKVKFNLLQPLPEVFLSIHELPKIILLEYLEQGKTEKLINNFIKLSNSTILNKKFIETIKYKLSDLDVFHKRSMGRKEISAYRKDILKYLIARKEKLNQILSEHNLSVKQIPTRILDYWLNIADVQEKTAISDRIKLMKRDCMDRLKAIKKNNAPKIGEMATFLAKDIVDMLISEGKKKKITSFYYDKMQECLVLFADKEKKELFISICSELKLNDADGHPFLKNINLSDIRYTSDLYKIYLQEKADNRNQRNRTDTSWLAKNFYTLKNVEVFDKKQQRKIFKLQTIVELPQDKSKIPFTIRQLEKEKSSFNKWLEYITKGKETTDKKKPVNLPANLFDDTLKKLLKTELSKNNIQYNKEANYNQLFKIWWKEFRKDNTQNFYTAEREYTFEEEKLNFKINTQPKFENYYTRFAENVFNKKQALRNEERKTKRNLPPIQKIHVIKKIRNKIGNTEKEIRMLQEEDRLMLLMFEKLTKENLNLKLEKVNELLNERIEIKEKIPGKLSFDDLGEKTITRNIVETRKRKEYSVLQKYIFDRRLPELFEYFNETDILIEKIKTELDAYNKAKDIVFDLIFKLEEAIIKKDETGIKELNKDQNGNIQTGNIQHKPYLHWLLKKNMITEKEFTFINMVRNTFSHNRFPQKKTMELFIKKWNDNNFAYQILETYKQKTNNIIEKLKDM

SEQ ID NO: 2395 - protein, 1317 aa, Artificial
  Synthetic
MENNKNQNNQKKQSNQKPIAQKPKRQRRRQSTDFKISLTGKHVYGAYFNMARTNFVKTINYILPIAGVRGNYSENQINKMLQALFLVQAGRNSELSTEQKQWEKKLRLNPEQQTNLQKLLFRHFPVLGPMMADVVGHKAYLNKKKSKVQTEDEAFAQLRGVSLADCIEMIHLMAVTLTECRNYYTHKDPYNSPSQLAAQCQHQEMIAKKLDKVVVASRRILKDREGLSVNEVEFLTGIDHLRQEDAKDDFGKKIIKDGKVMKTFVEYDDFYFKISGKRHIEGFSTLDKDGKPITFNTDLPALSDFGLLYFCVLFLSKPYAKFFIDETRLFEFSPFTEEENLIMSEMLSIYRIRTPRLHKIDSRDSKATLAMDIFGELRRCPIELYDLLSKKTGQPFFHDEIKRPNSHTPDISKRLRYDDRFPTLALRYIDETELFNRIRFQLQLGTFRFKFYEKECIDGRVRVRRLQKEINGYGRLQEVTDKRLEKWGDLIQKREERSVKLEHEEMYIDLDQFQRDTIDSTPYITDRRPTYNIHANRIGMYWESSQRPNEFTVFDANKMYIPIPTVTENEKTEVNMPAPRCTISVHDLSGMLFYEYLRNQLNNNTTSSAEEIIIDCENDYRRFFKAVADGSLMPFQKTKEFREYLKENYSKLRLADIPEKLVLYLTSKGQTYKGKPVTAREKMVLLAIEHLEERERSVQRRLEHYQEDRKMIGDKDNKYGKKSFADVRHGALARYLAQSMMEWQPSKDGEGHDKLTGLNYNVLTAYLATFGAPQVIEDENFVPRSLLEVLKETKMVDDGNPHPFINKVLALGNRNIEELYLHYLTEELNHIHSCMKSLKDNPTDKALSALPFVHYKRTRYRERTAEEMKALAARYTTIQLPDGLFTPYIVDLLKQSYPDNIALQNAINQDMPDKLNPIHNAAYLISLFYQTVKKDEAQPFYQSGVTYSRENENGELEKFSFKRSYELFSVLNNKKQATFPFELIPLFLTSDEIQERLTAKLLDDQGDPIPEAGKRGKAATDSQGNIIWQRQIKNTINSFVETLGYKDLKVSTNQPNHKKEEELANKREALRSRLTRQVNEIKNNERTLRRYKVQDMVLFLLAKGIFADIINEQGKDVNWEQMKLSKVCEDTFLRQTMTYRVPVIVGEKTIYVEQENMSLKNYGEFYRFLTDDRLMSLLENIVDNLNPNEKGELVIRHTDLMSELAAYDQNRSTIFKLIQQIEDIIIKNNDTLKNPHSEDFWAHEGLPKRNNFASLLELIDQLNGVALTDDERKLLIAIRNAFSHNSYNIDLSLIKDVKHLPEVAKGILQHLETKVGA

SEQ ID NO: 2396 - protein, 1168 aa, Artificial; identical to SEQ ID NO: 1357
  Synthetic

SEQ ID NO: 2397 - protein, 1140 aa, Artificial; identical to SEQ ID NO: 1482
  Synthetic

SEQ ID NO: 2398 - protein, 1003 aa, Artificial; identical to SEQ ID NO: 1510
  Synthetic

SEQ ID NO: 2399 - protein, 1003 aa, Artificial
  Synthetic
MGAIENKHIFAAYANLAIDGLIKTLNFIAKKLDTQKQLSSWDIKHVITLIDSIFDQNPQNNLEQVVEGYLPWIKPIIEMKTPKKGERQSDKLCIEYKTIITAFASLLNDVRNYYTHYYHDPICIYPGGYDIPSSLNCIYDSAINIIKERFQAEEKEMEHLRRYTRKKGRVVLKTEDDHFYYTLANNNDLSEKGYAFFISMFLERKYSYLFLKKLSGFKRGDSLQYRLTLEVFTALSTKPPVERLRTTKDTKQDRALDILNELSKIPIELYQTLEPKYREMYNETLQPTDAEDPYGLPDRSRIRFRSRFETFALHFLDKQPDFKEIGFYTYLGNYFHNGYQKTRVDRETKDRYINFQLAGFCKNIQDISAKKLSEALNVKSIDISTDSIPDINSFEPYLVQSTPHYIVNGNNIGIKVLPEGKDTYPTIDEKGAKMPIADFWLSKYELPAMLFYTYLRNNNIHKSHCPLSVKDIIERSIHKSTKQKHPEERSELMLRRVMKAIFWTDSKLNEVERIKSQKSAFGKRQHEILKAGRIAETLVRDMLWLQPSKNNGRDKVTEPNFQAIQVSLAYFGIRRNDLTEIFTRAGLINSSNPHPFLAQIGTNYTSLIEFYIAYLKERKVYFSRIQKKILQGKLNIQCHPLRDLQREPNKPQEKEEAIFLPRGLFNEAIINCLKKSKLKQLIESPTREKSPALNVSYLIQNYFRAYFEDQSQEFYAQPRNYRLFDKLSPNKGKSKSYLSLEQRIKKMEELRPSKIPVAEANKLLEKEDRLYRKNYNEICDNESIIRLYQIQDILLFMMTKEYLPSDLYNRINKYKLENVKGILNERVSYLIDLNPLKIQGEDIKIKDYGKLFYIHHDTRISSLNKVLSKVKRNNSISSSVKIQPYENYKRECLDFEEAQIQIIPIIHSFEIAMVSMFPDLKKATPGNYYDFNELITEYEKRTKQKIDSSFLIKTRNMFLHDKYEAECIKEISDDFVYAKKIIAEFKMKIENIKLEDLSNDSSA

SEQ ID NO: 2400 - protein, 1141 aa, Artificial; identical to SEQ ID NO: 2159
  Synthetic

SEQ ID NO: 2401 - protein, 985 aa, Artificial; identical to SEQ ID NO: 1567
  Synthetic

SEQ ID NO: 2402 - protein, 1175 aa, Artificial; identical to SEQ ID NO: 2006
  Synthetic

SEQ ID NO: 2403 - protein, 1179 aa, Artificial
  Synthetic
MKYPSISDHSSTNNGTTADKFKYPKQLNLILKKSLLSEKELLPLWAAYFNMARYNMYTTLVYIAASTGLSDEENMENRMDKMKVLNAPVEPEVELSLMKLLCRHFPFAVWICSSQTIKKMNSNGDNEDNNKNKRGISVKDLRDCLTTISFTLNFFRNYYSHTRHVENRSENIITASRESEKLTGIYLKEVCTVATRSVKRRFSDKNNKGQAGMIDDKSLKFITEQKGRVSTIDGENQFVSNPDYFLNPLVLVNEDILQNGANPERLSTVGKIQLICLLLDKKYITEFLTQSGFLNAFDNNSDAPKLSDRRLILEVLSDLRIRMPKKKIDSTRNDIQVALDMLNELKKCPNELFDLLSPEDKATFSIESSTGETILLRRSSDRFTPLVLQWFDANKTFKKIRFQVNAGVFRYLFNDSKTCIDGKTRLRVLQEPLNCFGRLQEVEDKRESNRDGHDGPWKGFCIKGFDEAARNDINCLPYINDARTRYIINTDTIAIRFGENDEVCGDYVPTIEKKDSSYNVACLPAQCMMSIYELQAMLFLHLLNPGKEGETAPVEKIIIDKVESYRRFFSDIKNGRLTPSGQTKDLLNKKLISDYGIQLSDTPDKMKDYLLGKVHEGRGFKAYRSRLIETLKEETEYKINRFNNDCEAVESDTNKPGKSGYVLIKPGSLASFISKDIVFFQEGNADQKMTGLNFSVMQGLIATFGSPEGATTDDLRMAFCNSGLIKTNGVCGTHPFLATAFNAGVKNTTDLYKEYLKARKAYLSGMVPDNRSILVLHSDRKRWAVRDDDYYKEYAERCLHRPILLPRRLFESSIRENLLDLKGIYAGKLKEVIREAGERCNSAYMIDSYFYHIKDDCPQTFHGTCEGDMVHTYGHRFFQVVRKHFDNAKAILSDLKKDSKTHSTYIKELSEAIKWAKKDIITQSTSSKERTKEEVAIMIKRAFNEYTATEKTLRRYVVQDELLFLAAMKTIKGMFNINESEWKLGNLGPKTDGSILDKELPSIKTPAKFIIKTDSVAFVIEQRNVNIKDYGEIYRILADERLYGLLKYHQNETVLASDLKSEIEEYDRQRVNVFKDIMEYEKKITRNVDDSQLCEIRNKLNLKDIDFKVMQTFDTMNDNLTKMEIRSIRNAFCHNSYPEKNAVDNKSKKERRMHDADLPGTAKKISRRINDISLETKSK

SEQ ID NO: 2404 - protein, 1119 aa, Artificial
  Synthetic
MDENINYYDFNNIEDKHFFAGYYNLANDNFYNVLKELKYISDKKLDITEINKASYSELDTRLNKLQRFLPFIPSLVVDKEIKDQKFEITTLLKFLWSEIEKQRNFYTHYAHNRPEFILESNQQILNHYFIKAVELIKKSVKDELCRNSIREHFSVEFNELKVLQKRYIEEKIRNSKSNSEKKKYSLDEESINNGIFNKLFKPYIIKDKVTGILSINNYRLLFDSSGYLTKHGHLFLLSLFLKRDQMESLMDKIEGYKASHKLYFHLTRRIYSHFCFKGIKRQIVSQHSKTKLMLQMADELGKIPEELYNLLNNNEKAEFIVDINEYYKDNDQNGENPDEKRVIHDVVRRRYKQTDKSFSDTYGTNKTIDKFEYFALRFFDEDSKLKNIKFMIDWGNVIIDKRSKNILDMQTERIIKKRVTVFENINTVIDKKIELVNSNNCNGQILIDEENSTCLIEGYPFPANPSYYFQGHNIPIYLSYNNKKEADCEDTEINKVRNAVLKNTLGDNVFPNKPNALLSLYELPAMLHVYFNHANKEKEVFKLLINKYFKYKKDLNFKENINDNQLVHLKKIKNNKILLEKNEYTFNRQKLVSDINKEIIKTEIKINEFNKCKLEYHDIKNKRKYLMYNSEKGLVATFLADEILRWMPRNLKENWKGYHHSELQKLLSFFQIEKNNINHLIIFDDKFDFLRDIFKKSNSLEDLYINYLNGKIEKLKSFLSILDIKEKKVLKKGLCDIWVFFKQSKYNIKNINSYSEELLKKPILLGRGIFDDTPTFYPSDLKDNPKANWFETVKKNQSYQSFYNLLEDKLKPVSGESSVEKRRRIEKYRSIEYQKIKDIYTLEMFKHLYKEIFGNEEIMENITLTDFYQSPAERKKMIANASSQNNRNQGNCSKNKYNELGIWNKVTPCNFENGRVVAPQIKLKEIGKFEQLLLDDKVKAILSYNDQIWQKQELERELESYRIVREEKLFKIIHNLEKVILEIETLHREDKSHPIIFNNGEYPNFRKYIENSKIFNWSQEDKNIINCFNSELLENSFPEIIVNANPRLQKAILLIYIRNKFAHNQLPSKHVHNFCKKISCINDERVTTYAEFYLMIVENFILDQNFIKTKQVYNNNSIS

SEQ ID NO: 2405 - protein, 1165 aa, Artificial; identical to SEQ ID NO: 2388
  Synthetic

SEQ ID NO: 2406 - protein, 957 aa, Artificial
  Synthetic
  misc_feature (31)..(40): Xaa can be any naturally occurring amino acid
  misc_feature (197)..(836): Xaa can be any naturally occurring amino acid
  misc_feature (885)..(898): Xaa can be any naturally occurring amino acid
MRNICSSRFSSVCSTSPRDAYAIVTPATMHXXXXXXXXXXLDVEPNLPIGVLENFKYSEQQTAIPSSTTILLYTDGVTEAVNANNNLYGIDRLKRICSNTSAPKELVSKIKNDIELFANKTEQSDDITMLAIRFTLNDDTDSEEISVEMTSDINQITRLEGLCNSLRDKFSIEQQLATRLNVALEEAVSNVILYGFXXXXXXXXXXXXXXXXXXXXXXXXXXXXXXXXXXXXXXXXXXXXXXXXXXXXXXXXXXXXXXXXXXXXXXXXXXXXXXXXXXXXXXXXXXXXXXXXXXXXXXXXXXXXXXXXXXXXXXXXXXXXXXXXXXXXXXXXXXXXXXXXXXXXXXXXXXXXXXXXXXXXXXXXXXXXXXXXXXXXXXXXXXXXXXXXXXXXXXXXXXXXXXXXXXXXXXXXXXXXXXXXXXXXXXXXXXXXXXXXXXXXXXXXXXXXXXXXXXXXXXXXXXXXXXXXXXXXXXXXXXXXXXXXXXXXXXXXXXXXXXXXXXXXXXXXXXXXXXXXXXXXXXXXXXXXXXXXXXXXXXXXXXXXXXXXXXXXXXXXXXXXXXXXXXXXXXXXXXXXXXXXXXXXXXXXXXXXXXXXXXXXXXXXXXXXXXXXXXXXXXXXXXXXXXXXXXXXXXXXXXXXXXXXXXXXXXXXXXXXXXXXXXXXXXXXXXXXXXXXXXXXXXXXXXXXXXXXXXXXXXXXXXXXXXXXXXXXXXXXXXXXXXXXXXXXXXXXXXXXXXXXXXXXXXXXXXXXXXXXXXXXXXXXXXXXXXXXXXXXXXXXXXXXXXXXXXXXXXXXXXXXXXXXXXXXXXXXXXXXXXXXXXXXXXXXXXXXXXXXYRILTPRPRVESTRPEYALALDIFNELQKAPIELFDTFSPDDQAKFRIXXXXXXXXXXXXXXLWCDIVTAFHILSCDILMTTVFSRKSAFKCRLENTVSNSTKSNALTLPIKTASVRYKKK

SEQ ID NO: 2407 - protein, 1003 aa, Artificial; identical to SEQ ID NO: 1450
  Synthetic

SEQ ID NO: 2408 - protein, 994 aa, Artificial
  Synthetic
MGAIKNKHIFAAYANLAIDGLIKTLNFIAKKLDTQKQLSSWDIKHVITLIDSIFDQNPQNNLEQVVEGYLPWIKPIIEMKTPKKGERQSDKLCIEYKTIITAFASLLNDVRNYYTHYYHDPICIYPGGYDIPSSLNCIYDSAINIIKERFQAEEKEMEHLRRYTRKKGRVVLKTEDDHFYYTLANNNDLSEKGYAFFISMFLERKYSYLFLKKLSGFKRGDSLQYRLTLEVFTALSTKPPVERLRTTKDTKQDRALDILNELSKIPIELYQTLEPKYREMYNETLQPTDAEDPYGLPDRSRIRFRSRFEAFALHFLDKQADFKEIGFYTYLGNYFHNGYQKTRVDRETKDRYINFQLAGFCKNIQDISAKKLSEALNVKSIDISTDSIPDINSFEPYLVQSTPHYIVNGNNIGIKVLPEGKDTYPTIDEKGAKMPIADFWLSKYELPAMLFYTYLRNNNIHKSHCPLSVKDIIERSIHKSTKQKHPEERSELMLRRVMKAIFWTDSKLNEVERIKSQKSAFGKRQHEILKAGRIAETLVRDMLWLQPSKNNGRDKVTEPNFQAIQVSLAYFGIRRNDLTEIFTRAGLINSSNPHPFLAQIGTNYTSLIEFYIAYLKERKILQGKLNIQCHPLRDLQREPNKPQDKEEAIFLPRGLFNEAIINCLKKSKLKQLIESPTREKSPALNVSYLIQNYFRTYFEDQSQEFYAQPRNYRLFDKLSPNKGKSKSYLSLEQRIKKMEELRPSKIPVAEANKLLEKEDRLYRKNYNEICDNESIIRLYQIQDILLFMMTKEYLPSDLYNRINKYKLENVKGILNERVSYLIDLNPLKIQGEDIKIKDYGKLFYIHHDTRISSLNKVLSKVKRNNSISSSVKIQPYENYKRECLDFEEAQIQIIPIIHSFEIAMVSMFPDLKKATPGNYYDFNELITEYEKRTKQKIDSSFLIKTRNMFLHDKYEAECIKEISDDFVYAKKIIAEFKMKIENIKLEDLSNDSSA

SEQ ID NO: 2409 - protein, 1127 aa, Artificial
  Synthetic
LQKQDKLFVDRKKNAIFAFPKYITIMENKEKTEPIYYELTDKHFWAAFLNLARHNVYTTVNHINKLLEIAELKNDEDVLNIKDSWNKQAEKLDKKVRLRNLLMRHFPFLEAAAYEKTTSKDSNSKEQKEKEQAEALSLDNLKNVLFIFLEKLQSLRNYYSHYKYSEEAQKPTFENDLLKNMYKIFDTNVRLVKRDYMHHENVDMQRDFSHLNRKKQEGQTRKIIANPNFRYHFADEKGDMTIAGLLFFVSLFLDKKDAIWMQKKLKGFKDGRNLREQMTNEVFCRSRISLPKLKLENVQTKDWMQLDMLNELVRCPKSLYERLREKDRESFKVPFDIFSDDYDAEEEPFKNTLVRHQDRFPYFVLRYFDLNEIFEQLRFQIDLGTYHFSIYNKRIGDEDEVRHLTHHLYGFARIQDFAPQNQPEEWRKLVKDLDHFETSQEPYISKTAPHYHLENEKIGIKFCSTHNNLFPSLKREKTCNGRSKFNLGTQFTAEAFLSVHELLPMMFYYLLLTKDYSRKESADKVEGIIRKEISNIYAIYDAFANNEINSIADLTCRLQKTNILQGHLPKQMISILEGRLKDMEKEAERKIGEMIDDTQRRLDLLCKQTNQKIRIGKRNAGLLKSGKIADWLVSDMMRFQPVQKDTNNAPINNSKANSTEYRMLQHALALFGSESSRLKAYFRQMNLVGNANPHPFLAETQWEHQTNILSFYRNYLEARKKYLKGLKPQNWKQYQHFLILKVQKTNRNTLVTGWKNSFNLPRGIFTQPIREWFEKHNNSKRIYDQILSFDRVGFVAKAIPLYFAEEYKDNVQPFYDYPFNIGNKLKPQKGQFLDKKERVELWQKNKELFKNYPSEKKKTDLAYLDFLSWKKFERELRLIKNQDIVTWLMFKELFKTTTVEGLKIGEIHLRDIDTNTANEESNNILNRIMPMKLPVKTYETDNKGNILKERPLATFYIEETETKVLKQGNFKVLAKDRRLNGLLSFAETTDIDLEKNPITKLSVDHELIKYQTTRISIFEMTLGLEKKLIDKYSTLPTDSFRNMLERWLQCKANRPELKNYVNSLIAVRNAFSHNQYPMYDATLFAEVKKFTLFPSVDTKKIELNIAPQLLEIVGKAIKEIEKSENKN

SEQ ID NO: 2410 - protein, 953 aa, Artificial
  Synthetic
MNTQPVGLGISYSHTSKNDKHFFGGFLNLGINNLEVLIAAFKLKFFSGDQKKIDIKNFVQTCFTANISDHDFESRVEFLQNYLPVVRYLDKRNKEGFKNQVELLFKSLDSLRNFYTHYYHAPLSLPQALFDLLDSTFAKVASDVKANKVKDDKSRHLLKSALSEELNARYKLQLERLKELKASGKKVNLHDHDAIRNGVLNSSFNHLIYKNEAGDTIVTRRYAARYSEIESAENGITISQSGLLFLAGLFLKRKEVEDLKSRVKGFKAKIIKEGEENISGLKYMATHWIFSYLSFKQPKQTLTNDFDRETLLLQIIDELSKVPDDVYQAFSEETRNLFVEDINQYLKEGNDDYTLEEAQVIHPVIRKRYENKFNYFAIRYLDEFAGFTSLKFQVHLGNYIHDKRTKHISGTELQTERRIKERVKVFGKLSDAQRLKNDFFADKSRRDQELGWEILPNPSYVFIENNIPIYFKVDNEVAEAVKSAKASRKSLSPDERKVRSGDKAQKHIILNSISERGLLRKDEPTALLSLNEIPALLYEILVKGTSPVEIEEILKSKAVERVQVIKNYTPEQPLPGSQISKRLRSNTAVTGKQYNVDKLQQLLKKEIFLADEKLALIYKNRVELHKKIGGKVLRNYVFGFSELGREATWIAEDIKRFMPLPARREWKGYQHSQLQQSLSYYESRPNEAFNILKDNWNFDDGAMLWNSWIKDSFNEKFFDRFYERYLHGKRKYLENFLENIQNFSPGSNKILEKFLCQQMPKNFFDKRLYVLEPLEQEKDKILSYPLVFPRGLFDPAPTFIKGVQVMEEPERFAAWYRYGYSPDHPFQRFYEMERDYTDLINDDTETRPDTDKNKSDFSSEQQYALIKKKQDLKIKNIKIQDLFLKLIAETLFSDIFDYDSEIRLSDLYLTQAERIEKEQNAAQQSIRPAGDDSDNIIKDNFIWSKTIPYIKDQ

SEQ ID NO: 2411 - protein, 1322 aa, Artificial
  Synthetic
MANNQFHLVSVDYSKPYDEQPECKRHIVGAYANLARHNMTVTINVIMQAIGMPLFNENDIDDAFNKGHRKKLDKLDIIQKVNLQNRLYRHFPFFKRMRLEDKNKKSVQLDTLMEVMSEFTACMAIIRNFYTHYHPYNSPNELANQLELKERMGKRLQYLFENTSQMFKSNEKLDHESNEVFAALRIPKDFVEEFVPGDEDYQALYDLLNDPKVSHSQKRGISLDMKTQKITKKTVRYIRNPEFQAYMMDKNNGMSDIAIIYFLCLFLEKKVSFELMKEVGLTQQIKFEGENADQQLLFVKEIMCMNRIRMTKTKLDSEMTDTALALDMINELRKCPKPLYEVLCKEARDEFKDDSTIQWEKEHGNEAVETEDNGDDSEEERTVEKETPRSTFVRWEDRFPKMALSYIDYQGLFKDIRFQLNLGKYRFSFYSHDKNQSVDGRERLRVLQKEIHGFGRIKEVNAKKSIKWADLYENKYVEDGLTKKKPDEAGQTPYVTEQYPQYAIDEKSHSIGLRWEGWKATGDSKKHYGDLDSQQMFIPYLPTKPLPEEKQTYQGEPLLPPQALLSLYELPGLLFYQYLSVKQGKNKYETENIIKDYCTHLQQFFNDVAKGVLNPLIGEPIKDVEKEKQLWERRKAELNKKLEAYHLRDCDIPTKLRDFLCNREIDYAQKLENSALNRLAERKNQIEKALSSFSEKKKRIGSKDNKFDRKRAIIKTGQLAQMLIRDIASWLPNNSQSLQKLTGQKYTVLQSALTMLGQNQTNTEVSPIWIKDIERYFAEALVIAKPNEEWLPTCHHPFLQEVMNKCEEDCSIEELYEKYLKKELEHIDNVKKKIDDGKDFDVYLLIPFLHCERQRWEEQDASTMRNLAKRYSERPVQLPNNMFVAYVVRLMMEIDNPELHKAIEKVKKYEKGEQLTNNVAYLIRLYFELVEHDHSQPFYNTSDIDGELSPYRHVYRLFKKLYGEKIPHTNRKTTPSYSIEELRNLRKQAIVDIEAYVNQEIQTWETKKKHRFVQNLKWKLKKENDRRYKNHKRQLNITEELNKAVQQEINEIRTTTTAKLLRQLKKVYDNERVIRRFKTQDMLMLIMAREILKAKSQDKDFTKDFCLKYVMTDSLLDKPIDFDWNVNIEKKRKNESGRIEKEIVLKTIRQEGMKMKNYGQFYKFASDHQRLESLLSRLPDNIFLRAEIENELSYYDTNRSEVFRQVYIIESEAYKLKPELENDNNAGEEWFCYVDKKGKKHPKRNNFLSLLEILAAGKDGILDEDEKRNLQSTRNAFGHNTYDVDLPTVFEGKEEKMKIPEVANGIKDKIEEQTVELKKNLN

SEQ ID NO: 2412 - protein, 1094 aa, Artificial; identical to SEQ ID NO: 1358
  Synthetic

SEQ ID NO: 2413 - protein, 1125 aa, Artificial
  Synthetic
MEDDKKTKESTNMLDNKHFWAAFLNLARHNVYITVNHINKVLELKNKKDQDILIDNDQDILAIKTHWEKVNGDLNKTERLRELMTKHFPFLETAIYTKNKEDKEEVKQEKQAKAQSFDSLKHCLFLFLEKLQEARNYYSHYKYSESTKEPMLEKELLKKMYNIFDDNIQLVIKDYQHNKDINPDEDFKHLDRTEEDFNYYFTRNKKGNITASGLLFFVSLFLEKKDAIWMQQKLRGFKDNRESKKKMTHEVFCRSRMLLPKLRLESTQTQDWILLDMLNELIRCPKSLYERLQGEDREKFKVPFDPTDENYDAEQEPFKNTLVRHQDRFPYFALRYFDYNEVFANLRFQIDLGTYHFSIYKKLIGGQKEDRHLTHKLYGFERIQEFAKQNRPDEWKAIVKDLDTYETSEEPYISETTPHYHLENQKIGIRFRNGNNDIWPSLETNGENNEKSKYKLDKQYQAEAFLSVHELLPMMFYYLLLKKEKPNNDEINASIVEGFIKREIRYIYKLYDAFANGEINNIDDLKKYCEDKGIPKRNLPKQMIAILESKPKDMVEEAERKQRKMVKDTKKLLATLEKQTQGEIEDGGRNIRLLKSGEIARWLVNDMMRFQPVQKDNEGNPLNNSKANSTEYQMLQRSLALYNKEEKPTRYFRQVNLIESSNPHPFLNNTEWKECNNILSFYRSYLTKKIEFLNELKPEDWEKNQYFLKLKEPKTNRETLVQGWKNGFNLPRGIFTEPIREWFKRHQNDSEEYKKVEALKRVGLVTKVIPLFFKEEYFKEDAQKEINNCVQPFYGFPYNVGNIHKPKEEDFLHREERIELWDKKKDKFKGYKAKKKFKEMTDKEKEEHRSYLEFKSWNQFERELRLVRNQDIVTWLLCMELIDKLKVEGLNVEELQKLRLKDIDTDTAKQEKNNILNRVMPMQLPVTVYEIDDSHNIVKDRPLHTVYIEETKTKLLKQGNFKALVKDRRLNGLFSFVDTSSEAELKSKPISKLRVEYELGEYQNARIEIIEDMLALEGALIEKDKNLPTDNFSDMLNGWLEGKDESDKARFQNDVKLLVAVRNAFSHNQYPMRNRIAFANINPFSLSSADISEEKGLNIANQLKDKTKETIDKIIEIEKPIETKE

SEQ ID NO: 2414 - protein, 1003 aa, Artificial; identical to SEQ ID NO: 2004
  Synthetic

SEQ ID NO: 2415 - protein, 1168 aa, Artificial; identical to SEQ ID NO: 1357
  Synthetic

SEQ ID NO: 2416 - protein, 1160 aa, Artificial
  Synthetic
MEQKQLESRFNQIFNNKGHTGPIAEKAVKNFETIRQHKVSPRERLHYFAVGHALRNIDKDLKESIFEYNLDEEQKKQKPTQFTTLQSDFFRFENALLTLLKDIRNCNGHYVHTFDKLQLDEILKLQEKNKEHGILNKDAGCQIIEFLKEAFEFSILIQFLKEKPKEYEKFKKRKNENKNQSLRNLIGGYEKKLVKYLCDKFFPNEEKQKEIRDKFIEHNLEEAIEDLLFIPVDEDIEWKLGEEHVVFVIKKGKYLSFYAQLFLLSMFLYKQEANQLISKIRGFKRSEDEFQYKRNIFTFFSKKVSSQDIHSEEKHLIYFRDIIQYLNRFPTAWNEYLSPERKNLPMTKLLEKYILEEEIFRTFSTYKNDCNRELFLKYTIKRLFRKKAELFDAEKISIDDNLRKKFNYEIDTSPELKNIHEKLKGKLKPKDYYKNIKRKEELEKEENPEKLKLIKKVTEEKLFTAYGRNRDRFMDFAVRYLAEQNYFGKDAEFKMYMFETTNEQENYLKEQKNTADKKVIDQNKYHQGRLTCFKTYQKHKDDYQNWDDPFVFQNNAFQIVLTFSNGERKKFSIQRKLLIYLLEDALFNHSDSIEDKGKQLLEDYFFNTLMPDFEEAKGSYKTSDDVNWKHRKLLPKRLIYTVHPPRRTDSEEQIHPFEKILRETQEQERRYRLLLGKAKNMKLKEEFIKRNKGKHFKLRFIRKAWHLMYFREIYERRAKEHSHHKSFHITRDEINDFSRWMYAFDEVPPYKVYLRNMLQRKKFMENEEFAELFEKGKSLDEFYHLTKQEFSKRIKNNLFQLKVDSERQYAEVLSKKLVYINLSHFIKYLNAKGKLTVENGIIQYKASTNKKYLIDEYYYTEVLPREEYKVHKHLFNKLRAAKLEDALLYELAMKYLKEDEEIVEKAKSKVSDIQSSEISFDIKDYYGNHLYTLIVPFNKLETLSILIRYKTGQENELKNKKTSFLGNIYHLLAFLDKNYKQLSKYKDDGGFKKIVKNFKNKKRLSFVELNTINGYIISGAVKFSKVHMELERYFINKHKIKANHIYIDLEDIKDDSNKQVFGNYYDSKLRIRNKAFHFGVPTNFFFNIEIEKIEKKFILEEVKLQNVSSFDKLNQNAKSVCRVFMEVLHSDLYRRDKNKSKEELRREFEEKYFNEIITTV

SEQ ID NO: 2417 - protein, 1144 aa, Artificial
  Synthetic
MNNLCNQSPREVYNLKDSPWYFGAYLNMARHNIYLISNEISDKLSLKHPLSNEEIIEKSFLTDKDFWNKNNPRLILSALSRFMPVVKTYSSDLLHKELREQTDIEGTDIAGLVEFLRLSFKELNAFRNDYSHYYSSKTYDKRKVVVAEDFAIMLRKQFQLAVSIARKRFEGVIPSQSFDFVEKKIAEELFNDSTTITTRGLVFFTCLFLDKENAFQFFNRVSGFKDTRTYDFLATREVFTVFCVKLPHDKFVSENPQQALQLDILNYLNRAPKELYNSLTEEGKKIFKPDLSEFAKINIAENSINETIADYDYDEYIQAITTKTRSEDRFPEFALRYLDQSDAFQYHFHIHLGKVITNKYPKPFLGESPDEDNRNIEKSIKTFGELTAFLKPHQTDTEGVKNSIIQEDEFKKLFQEQGLVGFTQYAPHYHIQNNKIGLLDKLNEQVSKLPCNLYRPLPPVAFLSIHELPKVVLLEILAKGKASKLITDFLQKNKELIYNRDFIEDIKKQLDFKPLQKLFFDEKSPKLVNNEETERKIEETQNQLKQSIPEKQKVKLKSTLKSLIYARYVNEVNERKAKLNLLLAERKLDANQIPGRIIEYWLNIDSVKKEHSIQNRIKAERKECKNRIKDLDKGKAPKIGEMATFLARDIVKLVINKDVKKKITSFYYNLLQECLALYADPTKRQLLLDLCGKKLNLFNKEIGHPFLADINFGEITKTKDLYRKYLELKGAGKKVEKKYNRKTNRFEEIEKEDDWIYNTFYFVKKDPITNKEFTKIKLPESNVPLSYLRFNQDKTSFDFWLNSVSKGNNKNPNPKPVDLPTNLFDNVLISILKRKVEISDDTKYNYSKLLALWLKETQPYYHLKREYTIFKDKPYQTIVEFDPNENKPFKEYYANSVEHAFRKRKREEKRIQKRQIATVFKKAIEDNEKVIRFYQTKDRITLLMLNELMGKDLQISLNELSPDSDKSPLEAHITICEKIHGKTITDRRKRKDFSVFRKLISDRRLKHLFDYYSSETIPYEVLREELNDYDRCKEKVFKAAFDLEKAIINVASKEEYQKIVEDGTKYGANIQHRPYLDWLTSHNAISKIEEKFLLEVRNRFSHNEYPKKDIVTKYIPHFANSTISSKIVATYVEIVNRLITTILR

SEQ ID NO: 2418 - protein, 1087 aa, Artificial
  Synthetic
MEAKHETQYFDFTNKEHKHFFAGLFNTAQHHFDLSLTELADRINEKGKTGKGFIKEAFSDAISEADWETRINYLSESLTFINYFDYDCRTAFREIMLLLYDTITNYRNYYSHYQHKKVALDDAIFPFLDELLFKSALNVKRNRAKSEIYKAHLSVKYKSEFDKIIAKSNEKIEAYNAQLKKGEKKRAFIKQKDEVNHVLNQVFRSFLYKNDNGEETLSEYALSKTDEGHLSTYGFVQLAALFLSKKQTESLLNYTKYLKDTRELRFVSSRWTFTFLCYRDIKRLFRSDYSNDSLLLQMISELNKCPDALYQHLSPEKKQEFLEDINTYYKDNSEFFGTQEKALVSHEVLQKRYSNKFAYFALRFLDEVCNFPTLRFSINLGKFNHDTSPKTFNSKVITERSLLEKITVFTKLSEATDAKKAYFKNPENIDLVHDWLEFPMPSYQFNRNNIGIWLAINDDSGKSDAATKRNREDKKTKYAIAEKLGLTDTVKKPIAFLSSNELPALLYALLIENKTPNDVESLLRKKIQIQRGLLDKFGKRELVNRKVFPKKLLQSRDKLTFDIEKLKQNITTEIKKNPLKDIRKKYKKKPKEPNELTNKEKGNIATWLADDIKRFTSKATKKDWKGYQYAEFQALLSFYDIDKEKPKSFLEQDLHYHFKIDNPFGGVNFNHKSLYTFYNTYLKKREKYLEDLTKTIDANYGDIPETVFIGFTKRIYEIKPVEIQKDTLLNKIPINLPRGIFDDKPTSYDKKEKPVALAGWFEKSNQLENAQRFYHFEKVYEYPITVLKWNPKKRKKEEKIVLKEQSINPNKGLKEQYYENLPVKNQREIYNNEKRIRKIMRQDFFVLEMAKHLLQKAKVKGLDDLQLKDIFLTKKEKNKIQEESKKQSERNTGDTSKNSITDSHILSRKIEISILDGRVKGTPKIKDVGKCRKFETDARVKELVNYFCDKTWSFTEIQNEIDDFDRVRKFELFKSVHQLEKKIYEDATKKNCTDALLNQGNPSFKRYVSHYFLETDKEAFNNLPIKIISATPEWQKFFLLAKIRNKFSHNQFLPTEDFKKLMEFVPLEKDELIATYLNRAFIELQKR

SEQ ID NO: 2419 - protein, 1000 aa, Artificial; identical to SEQ ID NO: 1602
  Synthetic

SEQ ID NO: 2420 - protein, 1116 aa, Artificial; identical to SEQ ID NO: 2394
  Synthetic

SEQ ID NO: 2421 - protein, 1129 aa, Artificial; identical to SEQ ID NO: 1592
  Synthetic

SEQ ID NO: 2422 - protein, 1131 aa, Artificial
  Synthetic
MEKTIENQTQSKRTLNNTPQYFGAYLNMARLNIFNISNHLAEKFGLAVLDDEEKITTSFLVDKGNKEYKTRQSLVYSNLTRYMHIAKVFDFEKLPDDERDKAENYGKDFGNLTDTLKEIFKELNEFRNDYSHYYSTEKKDKRKTIVSDKLKNFLNINYTRAIKYTKSRFINVFSDNNFCLAEEAKHVENDNTITQDGIVFFTSMFLDRENAFQFISKIIGLKGTQTKAFKAKRETLMAFCVNLPHDKFVSENSEQQFSLELINELNKCPKTLYNVISENEKQHFLPKLDDEQIDNVLENSVPYTIDDYENYIENITKKVRNKNRFSYFALKFIDQKKLFKNWRFQIDLGKIVLDEYSKQLNGKDEKRTVTENTKAFGMLQDLNDEENVLNKINTGESKAKFDQFAPHYNFDVQNNKIGISKKETTAKFITKNTDNKIKSNLLQPLPEAFLSINELPKIILLEYLEQGKTEQLINDFIEINNSKILNKEFIKAIKLKLNDLDVFYKRSQGRKQKHAYLTKDKKYDNEKINELKNRKEKLNQILAEYNLNVKQIPTRILDYWLNIADVQAKNAISDRIKLMKRDCINRLKSMKKGKAPKIGEMATFIAKDIVDMIIDEEKKKKITSFYYDKMQECLALFADKEKKELFILICNNELKLNDDDGHPFFKNINFSNYKYTSEIYQKYLEEKGHKMVKEYNPRKENYVEKDKSWLEINFYKKEWNENAKKDLTVVKLPDDKSKIPFTLRQLEKEKSSFENWFKYVTNGKETTDKKKPVDLPVNLFDETLKELLKKELSKNNIEFKEEDNYNELFKIWWDKCRNDKTQKFYSAEREYTFEEEKLNFHINTKSKFEEYINPEFAEKVFRLKNQNREKDNISGRRLPPLKMKEVTKNMVKRIGNTEKEIRMLQEEDRLMLLMFEKLVDNNLKLKLENVDKLLNESIEINQSISGKLSFDDSGDNENKKDRAIICRNITETRKRKEYSVLKKYVFDRRLPELFEYFEEENIPIEKIKIELDTYSKAKDVVFDLIFDLERAIINKDENRIKELNKDKNGVIQTGNIQHKPYLFWLLEKNLITEQEFTFMNMVRNTFSHNQFPQKKTMELFIKNWNENEFAKQILNVYNQKNNNLIKSIKDI

SEQ ID NO: 2423 - protein, 1116 aa, Artificial; identical to SEQ ID NO: 2394
  Synthetic

SEQ ID NO: 2424 - protein, 1129 aa, Artificial
  Synthetic
MKEEEEKGKTPVVSTYNKDDKHFWAAFLNLARHNVYITINHINKLLEIREIDNDEKVLDIKALWQKVNKDLNQKARLRELMTKHFPFLETAIYTKNKEDKKEVKEEKQAKAQSFDSLNHCLFLFLEKLQEARNYYSHYKYSESSKEPMLEKELLKKMYNIFDNNIQLVIKDYQHNKDINPDEDFKHLDRTEEDFNYYFARNKKGNITASGLLFFVSLFLEKKDAIWMQQKLTGFKDNRENKKKMTHEVFCRSRMLLPKLRLESTQTQDWILLDMLNELIRCPKSLYERLKGEDRKKFEVPFDSTDEDYDAEQDPFKNTLIRHQDRFPYFVLRYFDYNEIFKNLRFQIDLGTYHFSIYKKLIGGQKEDRHLTHKLYGFERIQEFTKQHRPDDWKAIVKDFDTYETSEEPYISETTPHYHLENQKIGIRFRNGNNDIWPSLETNGENNEKSKYKLDKPYQAEAFLSVHELLPMMFYYLLLKKEEPNNDKKNASRVEGFIKREIRDIFKLYDAFANDEINNIDDLKKYCKDKHIEIRHLPKQMIAILESKPKDMAKEAKRKQKEMVKDTKKLLATLEKQTQKEKEDDGRNVKLLKSGEIARWLVNDMMRFQPVQKDNEGKPLNNSKANSTEYQMLQRSLALYNKEENPTRYFRQVNLIESSNPHPFLKWTKWEECNNILTFYYTYLTKKIEFLNKLKPEDWKKNQYFLKLKEPKTNRKTLVQGWKNGFNLPRGIFTEPIREWFERHQNDSEEYKKVEKLNKAGLVTKVIPLFFKKEDSKDKEEYLKKDTQKEINDCVQPFYNFPYNVGNIHKSDEKDFLHREERIELWDKKKDKFKGYKEKIKSKKLTEKEKEEFRSYLEFQSWNNFERELRLVRNQDIVTWLLCKELIDKLKIDELNIEELKKLRLNNIDTDTAKKEKNNILNRVMPMELPVMVYEVNKAGNIIKNKPLHTIYIKEAKTKLLKQGNFKALVKDRRLNGLFSFVKTNSEAESKRNPISKLLVEHELGEYQEARIEIIKDMLALEETLINKYKDLPTNKFSDMLNSWLEGKDEADKARFQNDVDFLIAVRNAFSHNQYPMHNKIEFANIKPFSLYTMNNSEEKGLGIANQLKDKTKETKDKIIEIEKPIETKE

SEQ ID NO: 2425 - protein, 1126 aa, Artificial; identical to SEQ ID NO: 1409
  Synthetic

SEQ ID NO: 2426 - protein, 1127 aa, Artificial; identical to SEQ ID NO: 2409
  Synthetic

SEQ ID NO: 2427 - protein, 1113 aa, Artificial; identical to SEQ ID NO: 1386
  Synthetic

SEQ ID NO: 2428 - protein, 1363 aa, Artificial
  Synthetic
MPNVQFELVPVNYSIPYDEQPECKRHVIGAYANLARHNMALTINTIMQAIEMETFDENSIGDAFSKSHRLEIAQLDNVKKLTLQKRLYRHFPFFKRLKLEDEKKKSVQLKTLLEVMSDFTDYMAFLRNTYTHYNPYITPEKEIIYKELSERVGKLLDQLFENSCRVYKKGEKIPHENNEVFATQRKLTPHEKDILMNRDEEFATILLQVQNEIKKRKEEYVEAVKKQQEDLKKGIKPTKELKPVSETEVKIGKDTFIIGSDGKSIRKNWNQYDRNPQYYARMCDANNGISDAGIIYFLCLFLDKQVSIDFMDEVGFTEQCDFSEGNIVYLKELMCMNRIRMVKMRLDSEMNETALALDMMSELRKCPQPLYEVLDKFARDEFKDDSTVKWEMEHQQEATLADSQKDEESLERDSAPIKNTPRSTYVRWDDRFTELALQYIDRQCVFTDIRFQLRLGKYRFAFYNHNTKESIDGIERLRILQKEMHGFGRIHEVEKIVKDKWKNYFDKKNVEDGLTKKSPDMVGQAPYITEQRPQYDIDEKSHSIGLRWEGWENEDRKTIKDNNGKEKKEPHYGDLDQKKAFVPYLPNLQATKGDERQKNTAERLLSPQCMLSQYDLPALLFHQYLLEKYGKDKSQTEKIIKDYYKNLRDFFNDVNNSVKKPLDAYHLCSSDIPEKIRKYLNGTNTDNFERLKNAANRRLLERLERIQRMQQKFNEKKDRIGSKDNKFDKLRATIKTGQLGQWLMRDIMDWIPQNSQARKKLTGQNYVVLQSCITMLGQSFDENGNIIDITLSKLKKIMQDAKIIAMDDEENDAFIFHPFLYLVFSQSYINSVESFYEKYLEKELNWINIMIEDINKSREEDATICRYRLLPFLHHNRTRWQKADDKTIKALASRYLEHPIQLPNGLFTEKIRLLLAEIAKENNYQELSAELDKAENAAHLINLYHTLVEKDDSQRFYHNEPTQKGTIKSPNAYGHLYRLFKKIYGEKNETTNHKYKFGSTEINSLFTKKKDVFVSKYIISIKTIDYKIYDYIIKEMKKEKDLKPVDIHLFILDWKRKNYTDEEYNKITTSNEREEVKNQLPVILKKIKEDERKIILDHYKKMRRMVTKVQDNERTIRRFKTQDVLLLYMARNILKAKNNNKVDFTTDFLLKNVCQGDNLLDKTIDFEWIVNIEDKTNSDEEPKLIEKRIKQEKMKMKNYGQFYKFASDHQRLESLLSRLPETIFQRAEIENEFAYYDTNRSEVFRQVYIIESEAYKLQPELLDDANATEDWFWYIDPRSNKCRARRNNFMNLLETLAAGKDGILDEVEKRTLQSTRNAFGHNTYDVDMSVIFEGKEDKKKIPDIANGIKSKIDKQTKDLIENL

SEQ ID NO: 2429 - protein, 1128 aa, Artificial
  Synthetic
METQISNIENKYRILNDDPQYFGGYLNMARLNVFNISNHIAKEFNLPLLPEEGHLKNSFLCQKENKKVNWNHIFSKTNRFLSILKVFDVESLPKEEQKMTDSEGKEFALMSDSLKIVFGELQEFRNDYSHYYSTENGTSRKTTVSDEMSLFLRTNFLRAIQYTKERFKGVLNDEDYQLVASKKVLEADNTITVEGLVFLTSMFLEREYAFQFIGKITGLKGTQNNSFISTREVLMAFCLKLPHDRFQSDDTRQAFSLDLINELTRCPKELYNAITEEGKMKFQPKLDEPGIKNLLDNSTNNKKKIDAEDYDEYIESLTKRIRYNNRFSDFALKYIEETDILGDFRFQIDLGKLFVDEYDKFFNGEEVPRRIIENVKAFGKLNDFNDESILLAQIENGYPSKGFEQFAPHYNTENNKIGISVKVDTAKLRSNSKGEPGKNLNQPLPEAFLSLNELPKIILLDYLQKGEPEQLINDFILINNSKLMKMSFIEEIKNLLPKEWNEFRKRADTRKQAAYNNETLAYLLERKQILNQVLVSYQLNDKQIPGRILDYWLNIKEVEEGRAVSDRLKLMKRDCMSRLKALEKFKIDRNRSKIPKTGEMATFLAKDIVDMVVSEGIKKKITSFYYDKMQECLALFADPEKKRLFIHIVIRELRLNGTGGHPFLFQLNFDKINCTSDFYSEYLREKGHKMVKEKNLKTGKIVLTDHSWMALTFYKLEFNDKVDKLMTVVKLPLNKLNIPFTLRQLEGKTINTLEQWLQNITKGKNQNDGKHPVNLPTNLFDERLTACLQKELDKKQIIYPPYANWNELFKTWWKSRNDSTQSFYNAEREYIIFDEKVNFYPNRQEKFADYYHHAVKAAYQKKRNERTLQQKDDKHLPDILFAQVEKTFKQTIAGTEKEIRMVQEEDRIMLVMLESLLEDGKKLQLKLSEINTLLNATTEIKQVVTAKLSFNDSGEIIKDKTNPEITKTITAVRKRKDYSVLRKFVFDRRLPELFGYFDGDEIQFESLKAELDAYNKAKQEVLDVVFKLEKKIIAKDCNGVQQLFSDETGNLLTGNIQHKPYLTWLKSKGLIGDSTFTFLNMVRNCFSHNQYPQKKTMERFIDHWETNRFALTIATKYNHEITRIMEKI

SEQ ID NO: 2430 - protein, 1141 aa, Artificial; identical to SEQ ID NO: 1789
  Synthetic

SEQ ID NO: 2431 - protein, 1101 aa, Artificial
  Synthetic
MDNGKKYRTLTDKYYFAAYLNMARHNTYLILADINTRLGFEKVPPDDAMIMDMPIIKKLKVGGAAGAAVIVPTDIQLMIIKELHGHFAFLKPMLFAFKKPKGEATEEEIQKMEYAPNDYYNFFKIFADTLNNLRNEYTHVAPQPFDLPADLLNGLRVTFDAGVRKAKARFNFDPKEIEHLVRQGKGGKEKPTFKYKFQEKGSTSLSIYGITFFICLLLERKYVTLFTQKIQGIKGTHTRIFKATYEVFAVHSVNLPKARYTSDSGDGALLLDMLNELKKCPGILFPQLQPAHQDAFRVSIEGLPGMDEDGDSGFVLLKRHEDRFTYLAMRFIDEVKWFQHLHFPVDLGNYHYHLYDKTVDGVPRIGSLWKKMIGYGRLPDYQHDFLNKKLPATWLELWNNHEQKAETSTIPYMPRTMPHYHLPDDNIAMKIGAVSVTWPQVNIAGNDKSKNKPGIKSQPDLLISKYELFAFIFYGLLLGAGHKELEDKLINFVHKRRQLYRNIQEGKITPISLPPDTPKPNADDKEHPKYNKRKAELNQKLAANGFTFTADDLTDEIKCYLMGVVTESFEEKAKYRLIDLVKETENLQEKIKRQLSEKRKLGSKKDIEIKAGILATYLAKDIMLFQPALKTEDAKAQGKATTTLYRVLQAKLALYGANVDTLERTFTECGLLAGINPHPFLDKVVKLKNKNIVDFYTAYLSARKQYLLKCQNDKKYDSYQWLKNNQARSKKQPDFGKQLAGKMLELPVIIPRGFFTEGIKKELLALNNESLNNTITNARTPNASFMFMAYLKDHQGDDMQEFYKWERVYKIFNNYHDARSKTNKRDTLAAVPLTEEERKGQIKELNEWVNNQKSDEDFFKYKRRFDVFESNEKQIRQIKVQDIAISLMCDNLLRSINKNLINTTGKFYLKDISPVGEKGILDMPMNNFGRVFSYSCISPDPADTASISGNTRISQDDLKVKNIGDFNKFIKDRRLNNLLAYMQKSEIKRQELEKELERYDLIRADIFKTIHEFESMILTKFPGIDGTKFEIIIDQYQQISGLPNARKEQIKQIRHAFSHNQYPNPSHFLDDESIETVGSGNTRYYVDYFLEFVKTNLLKVS

SEQ ID NO: 2432 - protein, 1103 aa, Artificial
  Synthetic
MDTPSSIERKHIVLTDKYYFAAYLNMARHNVYMVLTDINTRLGFEKVPGDDAGAVSVIVLQKLKEDSTKKNVIAPDIQLKIIKELHAHFSFLKPMMFAWKKPIGEATEEEIQKMEYAPGDYYTFFAVFLKALNDLRNEYTHVATQPFDFPADLLHALRVTFDAGVRKAKARFSFEAKDVEHLVRQVKGGKEKPAFKYKFQLKGSKSLTTYGLSFFICLLLERKYASLFTQKLEGLKDKRTRAFKATYEVFAVHCITLPKARYTSDSGEGSLLLDMLNELKRCPDILFPHLQAKNQDVFRIPVEDVPGMEQEEDNNFVLLKRYEDRFPYLALRFMDEVKWFQKLHFPVDLGNYHYHLYDKTVDGMPRVGSLWEKMIGYGRLPDYQQAFLEKKVPDSWLRLWKNHEVRTEGAKAPYIPPAMPHYHLPDNNIAIRITTENGWPDLTINEADADKNKPGKKHQPDMLISKYELFGLIFYGLLLGDADAIRKNLEDKLVHYVHERKRLYREIQNGKMMPIALPPDVPKPSVDGKKHPKYDLRKSELNKKLAANGFTFTADDLPDEIKCFLMGIVTESFEEKAKYLLRDLLEETEGLYERVNRQLTEKRKLGSWKDVEIKSGVLATFLAKDIMRFQPAITDAGIKANGKATSTLYKVLQAKLALYGANIDTLERTFIECKLIGGSNPHPFLEKVVNFKKGTIVDFYIVYLQERKKYLSKCQEDKKYSTYQWLKNNQARSKVLPDFGKQLAKNMLEVPVVIPRGFFTQGIKSILTSLNNEKLNDVLNNARTPNNSFMLINYLQHCHNDDLQEFYGWERVYKIFNNYYDQRTKKDLQTALTQVPLSEQNRKEIFKEVSDWVNSIKDNDEYIKYKNRFDAFESNEKQIRQVKVQDIALFLMSNHLLKSINKNLIKTDGRFYLKDISPNGDKGILDTPMDNFGRHFLYSCSIVSDAGVPVYGTTKIYQNDLKVKNIGDFNKFIRDRRLNNLLGYIQQAEINRPLLEKELERYDTVRVDIFKIIHDFESQILALAPAIDGKNFDNIIAFHQQQTNLPDKLIKQIKKIRDAFSHNEYPNPLFFLDENNTLPGKEEKLYFADYFHDFIKNNLKTVK

SEQ ID NO: 2433 - protein, 1160 aa, Artificial; identical to SEQ ID NO: 1701
  Synthetic

SEQ ID NO: 2434 - protein, 1145 aa, Artificial; identical to SEQ ID NO: 1631
  Synthetic

SEQ ID NO: 2435 - protein, 1145 aa, Artificial; identical to SEQ ID NO: 1631
  Synthetic

SEQ ID NO: 2436 - protein, 1160 aa, Artificial; identical to SEQ ID NO: 1701
  Synthetic

SEQ ID NO: 2437 - protein, 1082 aa, Artificial
  Synthetic
MDKPKYHPKAAFALFLNQAEHNIVKALNHITGKEIKEKGNGSIENIIKEMKTEEFYWLENNYFKFLRIDDNSAIFELETINIEKEEDKKNKRLEIKKNIFLYTYLRLKDLRNFYSHFYHKNFKTLKINEENQQINIFEIKEGTKEDEYLRKFLKIRFKEAKEFYSNFIHQTPNGFEHKYKPEHLEHLDLEDHKKETYKHYQFFNYNKDNKSYYFDNGEKKHKKRNYKSTVFLTSFFLDKQHINMFLDQVKGFKRSSDKEAQATREVFTRFCMTTDSSFKSENTYVRFFVDAFTHLSKVPRLALDNYKTEDLQIKISYDSLKKTKEVIFQQEKPDTKYEITDKKYLIALELQNIFDKLNVIENNEFNSVSELKNKIDELIKKEIEKIIGTKKYENYKDILINFALTNEQIRTSRDRFTEFALQFIDDFKLFDKIRFKIYSGRVFEILHHKTYHSKTIFERNYIRSEKIYSRINEIEKTQIKKEDLDLEPYYINTKSKEVKNVEIFDNAQEPKYFIRNNNIFFEVKMFDGSQQKASMSVNELRNLIFALDDEQQVENRIIGYLTKYRKLLTEILSGKNPSEIKVNIPEAELPKYIVKYLKSESSNIDNYKKDVLNKLEYLNNQNKKSILNLSKIRKYEKVREITRFFNNYIPKYIDQNQHQELEKLLGNYPKSKNNIANFIKEQNLNKGWKQNLLNINTMFSYKSNYNSLDDILNDIYNKNIEWCKQKTNKINKTNEIDKSYLDKVAKIINVTERNYSFDRIKQNIETFLNENIVIPRGFIRKYIYNNINLSEKINKKVENELACVYCNKVKDLYTEAQSATNSKREKYIQAKKLNEQIIKDKVLFLMAKKYLEKKITGTGKKSELKVTNEIGEILKEGIEIEKFDKKIKFGINEFDRIHTVLNDKRLKNILKNYLPHLEEIYYVDRKKYDEKNLVTEKLWDLQDVYKTIDEQQLKLLDAILQKEEDILFEYLSKQAEKVEILPRYVERHINRTTIDEVLNKEEFNKYINKYRDILNDLISDLLTEENRIKTEDIFAKASIPFDEKIEGHQYSIRHYRNAAFHNGLPESGTFEDGINLLDQHIN

SEQ ID NO: 2438 - protein, 1159 aa, Artificial
  Synthetic
MKKERKSIMERNHDIHVNIVADKPFIAGYFNLATNHLEELRIAIQARFPNLKNARNFLSLTSVNTDQNEDQCIQKKISEMSESDYQTLLDFVSSYFRAVSLVKQSSFVNKVLDRIWLWKRINSILILQNSLRDYYIHYCHPEVIISDPDFKNLLEQMFIYSALDVKKKRLKGEQALRVIKSSFKDELKKLEIDQKKHLTEKTKVNPKISLDDDSVRNATLNHLIYRMVKKNKNTGEYDAINDKYQLFKLVEGSTDQWRFTDDGLAFFLGLFLTKKEGLEFRSQIRGFKDNNNLSHNVTQWVFSYPAFRRADRNFTTVFSKDAFIFQMIDELNKVPDEVYRNLSQEKQDEFLVDINSYFKDKTDAPGSTPEQETVVNLVIRKRYEDKFEYFALRYLDEFAGFTRIRFQVYVGDYIHDRREKEIGNSNLYTERECREKVKTFGNLTELQKGKTEYFEGKAVPEIPGWRRFPNPSYRIENHNILLSLSIKNEKIKDRIQKAQKALGSAGDKERSSRTEKPVRWEMLNEMYTKGPYKFNSTPFITQMSLNELPALLYALLIDQKRPEDIEDQIIQTYQEHFHEIEKGEGKHLPKSLPQSNKEGADMGKLQKDIQKVIDDSDERLLSFDKLKREKSKGRNSRPLYHVFDSKTMGETVSFLAKDILRFMPVTYRENWKGYMHSEWQALLSHYEVDRQAAIDLLFSCWKIQNDLKSIGMEIRNLFQKSETFEELYEEYLKFRKQYMRLLLVGLGSADIQTFFTEKGVWNYFHKRLYVRDPTATLTDRLLARPIVLPRGIFDKKPTYIKGKDPETNREDFADWYVYPYERECGVQMFYGYGLDTDLGFEDYRIFSESIRDNRYDWSEEHQKELFRKKELSRVKNVKRKDAFLYLMVKKMLEDEEVPFKLSLNDFYLPQDDISKRKGVALGQKNRQPGDKSENIRKETYIWNMTLPFYYEREDENEEKHKVFSEEKVQVKDLRTLAARMTDSKVQCLFDYDPSHLWNRKSLESELSNYEKIRRENLLVIIQGFEREVLLRYGWKEGEVAPDDLLKTDKKGKKFPNFKRYVFSSPLGFSKETIPQLLDNSWPQFKKNYPQSAAFPKVSQGYQLIQIRNKFAHNKLPDVSFFRECTAFLAKDPSEYYSQYYFRLAEKIINSLENNIHSDA

SEQ ID NO: 2439 - protein, 1003 aa, Artificial
  Synthetic
MGVIENKHIFAAYANLAIDGLIKTLNFIAKKLDTQKQLSSWDIKHVITLIDSIFDQNPQNNLEQIVEGYLPWIKPIIEMKTPKKGERQSDKLCIEYKTIITAFASLLNDVRNYYTHYYHDPICIYPGGYDIPSSLNCIYDSAINIIKERFQAEEKEMEHLRRYTRKKGRVVLKTEDDHFYYTLVNNNDLSEKGYAFFISMFLERKYSYLFLKKLSGFKRGDSLQYRLTLEVFTALSTKPPVERLRTTKDTKQDRALDILNELSKIPIELYQTLEPKYREMYNETLQPTDAEDPYGLPDRSRIRFRGRFEAFALHFLDKQADFKEIGFYTYLGNYFHNGYQKTRVDRETKDRYINFQLAGFCKNIQDISAKKLSEVLNVKSIDISTDSIPDINSFEPYLVQSTPHYIVNGNNIGIKVLPEGKDTYPTIDEKGAKMPIADFWLSKYELPAMLFYTYLRNNDIHKSHCPLSVKDIIERSIHKSTKQKHPEERSELMLRRVMKAIFWTDSKLNEVERIKSQKSAFGKRQHEILKAGRIAETLVRDMLWLQPSKNNGRDKVTEPNFQAIQVSLAYFGIRRNDLTEIFTRAGLINSSNPHPFLAQIGTNYTSLIEFYIAYLKERKVYFSRIQKKILQGKLNIQCHPLRDLQREPNKPQEKEEAIFLPRGLFNEAIINCLKKSKLKQLIESPTREKSPALNVSYLIQNYFRTYFEDQSQEFYAQPRNYRLFDKLSPNKGKSKSYLSLEQRIKKMEELRPSKIPVAEANKLLEKEDRLYRKNYNEICDNESIIRLYQIQDILLFMMTKEYLPSDLYNRINKYKLENVKGILNERVSYLIDLNPLKIQGEDIKIKDYGKLFYIHHDTRISSLNKVLSKVKRNNSISFSVKIQPYENYKRECLDFEEAQIQIIPIIHSFEIAMVSMFPDLKKATPGNYYDFNELITEYEKRTKQKIDSSFLIKTRNMFLHDKYEAECIKEISDDFVYAKKIIAEFKMKIENIKLEDLSNDSSA

SEQ ID NO: 2440 - protein, 1087 aa, Artificial; identical to SEQ ID NO: 2418
  Synthetic

SEQ ID NO: 2441 - protein, 1119 aa, Artificial
  Synthetic
MTEQNEKPYNGTYYTLEDKHFWAAFLNLARHNAYITLTHIDRQLAYSKADITNDEDILFFKGQWKNLDNDLERKARLRSLILKHFSFLEGAAYGKKLFESQSSGNKSSKKKELTKKEKEELQANALSLDNLKSILFDFLQKLKDFRNYYSHYRHPESSELPLFDGNMLQRLYNVFDVSVQRVKRDHEHNHKVDPHRHFNHLVRKGKKDRCGNNDNPFFKHHFVDREEKVTEAGLLFFVSLFLEKRDAIWMQKKIRGFKGGTETYQQMTNEVFCRSRISLPKLKLESLRTDDWMLLDMLNELVRCPKSLYDRLREEDRARFRVPIDILSDEEDTDGTEEDPFKNTLVRHQDRFPYFALRYFDLKKVFTSLRFHIDLGTYHFAIYKKNIGEQPEDRHLTRNLYGFGRIQDFAEEHRPEEWKRLVRDLDYFETGDKPYITQTTPHYHIEKGKIGLRFVPEGQHLWPSPEVGATRTGRSKYAQDKRFTAEAFLSVHELMPMMFYYFLLRENYSDEASAERVQGRIKRVIEDVYAVYDAFARGEIDTLDRLDACLADKGIRRGHLPRQMIAILSQEHKDMEEKVRKKLQEMIADTDHRLDMLDRQTDRKIRIGRKNAGLPKSGVIADWLVRDMMRFQPVAKDTSGKPLNNSKANSTEYRMLQRALALFGGEKERLTPYFRQMNLTGGNNPHPFLHETRWESHTNILSFYRSYLKARKAFLQSIGRSDRVENHRFLLLKEPKTDRQTLVAGWKGEFHLPRGIFTEAVRDCLIEMGYDEVGSYKEVGFMAKAVPLYFERACKDRVQPFYDYPFNVGNSLKPKKGRFLSKEDRAEEWESGKERFRLAKLKKEILEAKEHPYLDFKSWQKFERELRLVKNQDIITWMMCRDLMEENKVEGLDTGTLYLKDIRTDVYEQGSLNVLNRVKPMRLPVAVYRADSRGHVHKEQAPLATVYIEERDTKLLKQGNFKSFVKDRRLNGLFSFVDTGGLAMEQYPISKLRVEYELAKYQTARVCAFEQTLELEESLLTRYPHLPDESFREMLESWSDPLLDKWPDLHRKVRLLIAVRNAFSHNQYPMYDEAVFSSIRKYDPFSPDAIEERMGLNIAHRLSEEVKQAKEMAERIIQA

SEQ ID NO: 2442 - protein, 1127 aa, Artificial
  Synthetic
VNANLEKKLAKKKVQRPLWRKLLLANEELILIFVLLLIYCYFCYTRKVIYKKIEKYGLSSKKKILNSRIVNSKNIKSLIMDTKTNNNSKNYNLQAVFALYLNQAEHNLEKAIKEVTDQKGEVRWNRKVFIESINELSFEQLYKLEYKYFSFLRINSNNKEKYRYFSEFIDKNLEDKTKNEKTKEEEIFEIKKKILLYTYKQLDDFRNYYSHFYHSIYNANGENIFEIKDTDERKKFLKEFLEVRFRDAKDYYLNFTYKTQEGLKNKYDKSNFEHLDLNKKYYQFFHKDDSKNYYLFDNGLEKENYKSRVFLASFFLTKHQTNFLLSKVTGFKDTRTPKEKATRDFFKHFCMKTDSDFTTENPQVKFFIDAFNYLNKVPQLVYEEYKKDITNSIENILKNKKEKERKTNFTEIQNELKKSFKNKSVLLKIIDNTEFEKNVENLIRNSKGSKNYKDILKNAILDNIRIRTSKDLFTEFALQFIDDFKLFEKIRFKVYSGKMTAKRVEKKYDDKVFKKTHIESEKVYSRINELENNSEIENDRKPQYFIKNNNVFFEVDLDGYKQNASMSVHELRNLVFALLLNKNVEQKIIDYIKNYREFLLKDLKNVKTKINFTKIPKKDFPQYINKYKHQDKDQTQTDFKDKIKKRLEYIKNTEVQSNIKNLRKYDKIREIIKFVNRFNSVLRGGDRRGYLNIEQHQKLEKLLGTFPNSRNELYNFLENEKITTNFKDFKELIKEKDLYSILKKIFDTYKEWSEEALKDLGKKDLEELKSIGRVINVTEPEYSSDRLSKNIDIFLKNIVIPRGFIKRNFFEKTNISEEIDKKVGDKEACIYYEKINILFEIAKNADKNKDKRKKYKIAKTLNEQKLKDKLLYLMAKKYLENNFGNYTNEKDIKASVNNIMVATSIEDILKDGIDFIIKKGNSPQNSKKIKFRNREFDRIGTILKDKRLNKILKTYFEGEDTIYYINREKYKEKKSNTEKIWDLQDVLKRIDDEQFQIINEILKMEENILINYLSTKAHISAEDAPQIIKKSKKYKPNEMQQKDEEFQIIASLLKDKNIKNKNRIETKELLNIIDINNSSKNDKIDWDKIKPYRNSAYHNGLPENGTFKKGIELIKGYNIELIKRYNN

SEQ ID NO: 2443 - protein, 1127 aa, Artificial; identical to SEQ ID NO: 2442
  Synthetic

SEQ ID NO: 2444 - protein, 1029 aa, Artificial
  Synthetic
MHVTTTNKPLLAAYLNMARNNCYMALSHIAELMGKSSVMNEDAIQECAVIRALAGNIKPDESFRIIDMVDQHFPFIRLLLKSRNNSSPTDYANCLTDFIKQLNELRNFHTHQLHKPYITDAKVVAQLQFLFDASRREVKKRFSLEEQDVKHLVRKSIVIIDNNKVAVEKENYVYAFANKEGQFTNKGIAFLISLFIEKKYAYLFLKQLSGFKNSNTKQHKATLEVFCFYHIRIPQPKLQSNNTKIGFLLDALEELKRCPAELYEHIAKNDKQRFKSAGITEDTNDQPEAILKRNGDRFSYLALRYLELTNSLPGLQFYFDLGKYYFKVYEKSIDSELRLRRLHKNMRDFGRTNDFDTVKMPQLWQQLIKRTDELSENYAEPYIVYTIPHYHIVNNQIGIWLNKERQMPSLTPKISNAEPQIWLSLYELPALLFYHLLTKGNKGQKNVLQILSKHRTAIHSFFKDIESSKLLPGFTIETLNVELEKRNLKHDKIPKPLLQYLLQQKPLKSIVEIAGERLSELQNETIFLLDKIDIDIEKAKEKIGGKHYRPIQTGKIADFLARDMLFFQPAIDKIKGKATSTLFQVLQARLAFYGRDKELLEGLYKECNLIQSKNPHPFLSGLPITNNLMDYYRNYLIKRNQYLDKCLKKCKQGKIGSQDFHFLHLGERERKNGNTYYTNLAGKFIKMPLNFPRGLFMEELINYFESSGDLHMQNIIKNTPRLSTTFLLKEYINNVLSDDTPDFYNWKRSYTVFNRYYDKRKQNSRDAITKIYFDTSQLSEEANKIKAAIKKIEKSDIKGAESIKRNYKFYGDNEKQLRQAKACDTILFLAIRDLFPTIESSVFKGLAIEQFRLSDILPDAEKGILSQSIEIRLPLYNKFIIQKGLKLKNYGDFRRFLKDRRLESLMPYFEEDDIDRSSLEKELEDYDTARIEIHRVVLDFESHVITMYQLNYLNPEDPCINHETILNCFFQNDPSDIRKQLMENIRNRFSHNEYPDFEKFKEIIQENHQQKTIAGKFVTLANQYFSVEE

SEQ ID NO: 2445 - protein, 1166 aa, Artificial
  Synthetic
  misc_feature (1071)..(1163): Xaa can be any naturally occurring amino acid
MINNKNTNQAFWAAYSNVAAYNVAIIIAHINSKIENKTKEADEESLGKIEDLFDMVCVDNPNNKKKIDFLYKYMPFIWLFVDYIYNQDKTSNGIPFFEKRIINNNDKNDVESREVTLTEQIEIIKELFQLLLDIRNNQSHFVGSNYFVNDSMFRALEYCFDVSLRTTITRFWDDAKDANNKLEHLKRHDNKGKIKKEFIYKFKNIGVDKNNFTTNGLAFFLCLFLDKRMSKLMLDQISGFKRNDSKEYRATINVFTIDRIRLPKEKIESVFSLDSLGLDIINELQKCPKELYDLLSQEDRNKFVLIDEETEDETILKRSQNRFSYFVMRYFDEKEIFKNIRFHIDLGLYNKDCYEKTLKDGSKLEDRFISKRLKGFGRIQEMNTEFEKHKKEYPDFYVQDKNEKNYQIPNRMPTFPHYHYANEEKTLIGLKIKDKVDYKYSDIERNNFILEKPDAYISTYEFPAMYFCEYLKGNPEQVLIDTYNTIIDFLKKIASNDNSIEIFRDEITGKTEDEIKELFKNEFKLDINDIPKELKVYISTKPAKSKNTYQEYLKQKMDTMLEEAKKEYGWIIDKENRIKERRIKAGKKNYEKINIGDIALKLVKDIIYLTPISSKNNGKDGITSPNYNRLQEHFALWVEKERRFKAIEILNAFKIFDKHPFLNKLGKIEDISSIVILYKAYMLSKINYLNEKAVKGKYGIDILSNDKENKKALDYETYSIDLAKKLLELPINLPRNMFYEEIVKSKELETLRRYIYGKRANVSYLIKLYLNEKLKDDSQEFYKYDRMYKFFKEGRNNKNVYHELNRFDEKVSEIKEQIKNNQDNPNYKFYKQFTENEKQLRLLQTQDVLLFLMAKSILFNEVETKFIDKTIQSESILLKNIGIGGKSVLEEKTKVNLSLSVADYYLFIEDTLKIKNYGDFKYFCFDKRVSNYLECLLKTFNDNQYKKGGNPYKIKRQEIEKELENYETYRIAAFEKILEFERIFFQNYYTKEEFESINNGTHFSFEKIIKEFIEKTNAESEICKLIKSTRNAFSHSQYPMQDNWLRNRIDEKNKSNMLDIIYNDFSESIEXXXXXXXXXXXXXXXXXXXXXXXXXXXXXXXXXXXXXXXXXXXXXXXXXXXXXXXXXXXXXXXXXXXXXXXXXXXXXXXXXXXXXXXXXXXXXFER

SEQ ID NO: 2446 - protein, 1071 aa, Artificial
  Synthetic
  misc_feature (1071)..(1071): Xaa can be any naturally occurring amino acid
MINNKNTNQAFWAAYSNVAAYNVAIIIAHINSKIENKTKEADEESLGKIEDLFDMVCVDNPNNKKKIDFLYKYMPFIWLFVDYIYNQDKTSNGIPFFEKRIINNNDKNDVESREVTLTEQIEIIKELFQLLLDIRNNQSHFVGSNYFVNDSMFRALEYCFDVSLRTTITRFWDDAKDANNKLEHLKRHDNKGKIKKEFIYKFKNIGVDKNNFTTNGLAFFLCLFLDKRMSKLMLDQISGFKRNDSKEYRATINVFTIDRIRLPKEKIESVFSLDSLGLDIINELQKCPKELYDLLSQEDRNKFVLIDEETEDETILKRSQNRFSYFVMRYFDEKEIFKNIRFHIDLGLYNKDCYEKTLKDGSKLEDRFISKRLKGFGRIQEMNTEFEKHKKEYPDFYVQDKNEKNYQIPNRMPTFPHYHYANEEKTLIGLKIKDKVDYKYSDIERNNFILEKPDAYISTYEFPAMYFCEYLKGNPEQVLIDTYNTIIDFLKKIASNDNSIEIFRDEITGKTEDEIKELFKNEFKLDINDIPKELKVYISTKPAKSKNTYQEYLKQKMDTMLEEAKKEYGWIIDKENRIKERRIKAGKKNYEKINIGDIALKLVKDIIYLTPISSKNNGKDGITSPNYNRLQEHFALWVEKERRFKAIEILNAFKIFDKHPFLNKLGKIEDISSIVILYKAYMLSKINYLNEKAVKGKYGIDILSNDKENKKALDYETYSIDLAKKLLELPINLPRNMFYEEIVKSKELETLRRYIYGKRANVSYLIKLYLNEKLKDDSQEFYKYDRMYKFFKEGRNNKNVYHELNRFDEKVSEIKEQIKNNQDNPNYKFYKQFTENEKQLRLLQTQDVLLFLMAKSILFNEVETKFIDKTIQSESILLKNIGIGGKSVLEEKTKVNLSLSVADYYLFIEDTLKIKNYGDFKYFCFDKRVSNYLECLLKTFNDNQYKKGGNPYKIKRQEIEKELENYETYRIAAFEKILEFERIFFQNYYTKEEFESINNGTHFSFEKIIKEFIEKTNAESEICKLIKSTRNAFSHSQYPMQDNWLRNRIDEKNKSNMLDIIYNDFSESIEX

SEQ ID NO: 2447 - protein, 1127 aa, Artificial; identical to SEQ ID NO: 1991
  Synthetic

SEQ ID NO: 2448 - protein, 1123 aa, Artificial
  Synthetic
MKEEETPVVSTYNKDDKHFWAAFLNLARHNVYITINHINKLLEIREIDNDEKVLDIKALWQKVNKDLNQKARLRELMTKHFPFLETAIYTKNKEDKKEVKQEKQAEAQSLESLKDCLFLFLEKLQEARNYYSHYKYSESTKEPMLEEGLLEKMYNIFDDNIQLVIKDYQHNKDINPDEDFKHLDRKGQFKYSFADNEGNITESGLLFFVSLFLEKKDAIWMQQKFTGFKDNRENNKQMTHEVFCRSRILMPKLRLESTQTQDWILLDMLNELIRCPKSLYERLKGEDRKKFEVPFDSTDEDYDAEQDPFKNTLIRHQDRFPYFVLRYFDYNEIFKNLRFQIDLGTYHFSIYKKLIGGQKEDRHLTHKLYGFERIQEFTKQHRPDDWKAIVKDFDTYETSEEPYISETTPHYHLENQKIGIRFKNDNDKIWPSLETNGENNEKSKYKLDKQYQAEAFMSIHELLPMMFYYLLLKKEEPNNDKKNASRVEGFIKREIRDIFKLYDAFANDEINNIDDLKKYYKDKNVEIRHLPKQMIAILESKPKDMAKEAKRKQKEMVKDTKKLLATLEKQTQKEKEDDGRNVKLLKSGEIARWLVNDMMRFQPVQKDNEGKPLNNSKANSTEYQMLQRSLALYNKEEKPTRYFRQVNLIESSNPHPFLKWTKWEECNNILTFYHRYLTKKIEFLNKLKPEDWKKNQYFLKVKEPKTNRETLVQGWKNGFNLPRGIFTEPIREWFERHQNDSEEYKKVEKLNKAGLVTKVIPLFFKEESFKNKEEHFKEDTQKEINDCVQPFYNFPYNVGNIYRLKDEDFLHREERIKLWNNKKDKFKGYKEKIKSKKLTEKEKEEFRSYLEFQSWNNFERELRLVRNQDIVTWLLCKELIDKLKIDELNIEELKKLRLNNIDTDTAKKEKNNILNRVMPMELPVMVYEVNKAGNIIKNKPLHTIYIKEAKTKLLKQGNFKALVKDRRLNGLFSFVKTNSEAESKRNPISKLLVEYELGEYQEARIEIIKDMLALEETLINKYKDLPTNKFSDMLNSWLEGKDEADKARFQNDVDFLIAVRNAFSHNQYPMRNRIAFANINPFSLSSADISEEKGLNIANQLKDKTKETIDKIIEIEKPIETKE

SEQ ID NO: 2449 - protein, 1091 aa, Artificial
  Synthetic
MKEEEKGKTPVVSTYNKDDKHFWAAFLNLARHNVYITVNHINKILGEAEINIDGYDISLKNIWSGIRDINKKARLEELMIKHFPFLEAMTHQQRLTGNTKQKEEKQAKIQSFEILKDNLFLLLKMLQDLRNHYSHYKHSKSLERPKFDEDIRNKLYNIFDTSIRLVKEDYKHNPDIKPKEHFKHLDRKRNEKFRYSFADNEGNITISGLLFFVSLFLEKKDAIWVQKKLEGFRCSNESYQKMTNEVFCRNRILMPKLRLESTQTQDWILLDMLNELIRCPKSLYERLKGEDRKKFEVPFDSTDEDYDAEQDPFKNTLIRYQDRFPYFVLRYFDYNEIFENLRFQIDLGTYHFSIYKKLIGGQKEDRHLTHKLYGFERLQEFAKQNRPDEWKAIIKDLDTFKKQEDEKVNEKPYISETTPHYHLENEKIGIAFKNHNIWPTTNTEFTNNKRKKYNLGTSIKAEAFLSVHELLPMMFYYMLLKIKNEGPRKVEAIIESKIKDIFTLYDAFANDEIDNTDELEKYCEDKDIKIGHLPKQMIAILYNKHKDMVEKAKVKQEKMKLATENRLKTLDKLIEGKMKYAKRGISPLKSGEIASWLVNDMMRFQPVQRDENGEPLNNSKANSTEYQLLQRTLALFGSEHKRLTPYFKQMNLIGDNNSHPFLKQTEWEECNNILSFYRSYLEARKNFLKNLEPKDWKKNQYFLKIKEPKSNRQTLVQGWKNGFNLPRGIFTEPIKKWFIEHRKKMKVDELKSVGLVAKVIPLYFNEKYKDSVQPFYNYPFNVGDINKPKEKDFLDNGKRRKLWDKKQLEFKGKTEEEKRKNPSYLDFKSWKKFERELRLIRNQDIVTWLMCIELYNNQKVENLNTGHIYLKDIITNVKEERNNNILNQIKSMQLPVTVYENESSPKKKYLRTIYIEENGTKLLKQGNFKALVKDRRLNGLFSFVKTSSEAESKRNPISKLRVEHELREYQKARIDIIKDMLALEKTLIDNYDSLDTDNFHNMLTGWLELKGEAIKTKFNNDVKLLTAVRNAFSHNQYPMYDENLFINIERFSLSSSRILESKGLGIAVKLKEEVSNAIEKIKNEEDAKKET

SEQ ID NO: 2450 - protein, 1147 aa, Artificial; identical to SEQ ID NO: 1760
  Synthetic

SEQ ID NO: 2451 - protein, 1147 aa, Artificial; identical to SEQ ID NO: 1760
  Synthetic

SEQ ID NO: 2452 - protein, 1140 aa, Artificial
  Synthetic
MENTSLRTFKRFFDFKGSVAPIAEKANRNYALKKRNNVNLQQRLHYFAVGHAFKNIDVENIFRAELDEETKGKKPTKFLALQLSNFTFIKELGCLLSNIRNINSHFIHDFELIKLDKIDDKIIEFLKQSFYLAVIQTCIKEKETTYIDFISTKDYEKQIVNFLLEKFYPFNDKRKKLTEEEEKRVKEYKSFRNDFKNKSIDEAIDSILFVKVNETVEWNLFETHNVFNITSGKYLSFEACLFLLTMFLYKGEANQLISKIKGFKRNDDDKYRSKRNLFSFFSKKFSSQDIDSEENHLVKFRDLIQYLNHYPTPWNKDLELESANPAMTNKLKEKIIEMEIYRSFPDFANDERFFVFAKYQIFGKKYLGENIEKEYMDNSFTAAEKIAYEYEIKISPEIKDANNKLKELKAKQGPYGKQKERNEKIIRELESMIKDGKNDPNPITEKLKTRIVKNLLYVSYGRNQDRFMDFATRFLAEEKYFGEDAEFKMYKFFSSEEQENNISTLKKELSKKQYDNLKFHQGKLVHFCTFDEHLKNYESWDDPFVIENNAVQVKVYLSNGINKIVSIQQNLMIYFLEDALYCNENVKELGKTLLTDYYLMHKEEFEHTKLFLQQNPTISREDKTVFKKILPKRLLHHYSPAMQNNLPEFSTFQLLFEKAKRLEERYNKLKNKAEDEGNLDDFLKRNKGRQFKLQFIRKACHLMYFKESYLRQVQEAGHHKRFHISKDEFNDFSKWMYAFDETPKYKDYLRELFSQKGFFDNPAYKKLFEDSVSLDTMYLQTKKNYEEWLKTFVPGQRATDKYSLNNYVKFFDNDLFFINISHFIHFLESRNKLQREENGNIIYHSLSNSEYLINEYYFKDKLEKSEYKTCGKLYNKLKTIKLEDSLLYEMSMHYLQIDKSIVKNARTSIINLLVQDVKFSIEDANKNHLYDLFIPFNKIDSFVELIKHKEEQEQDKRFGGNSFLSKLSSYIEKVRNNKDIKPIFDRFIKKNSLNFDDLNKINNHIITNSAKFTKVELSLEEYFIFKDKILIKKENRINIDEIKNLSKYFNKVDRHNAFHFNVPNECYDIFLNKIESTYVKDEVRPVAPKQYPDLTKQQRSVCSTFLDAIHNDFFNRSDREKMREEAENKYFQKIILNRMN

SEQ ID NO: 2453 - protein, 1127 aa, Artificial
  Synthetic
MNTHQEELQSWITRKRLPDTEMKKYWAAYMNLARLNFFKTLMFISNSIGDLKPAKDNNGKGNTEVNMHNMGILTALLGPEDEEKARLLIFKHFPFLRTFCIEKELSLSKQRTILIDMACIIGRYRNMYSHSIFLSDDNEKVLESEKRCSEYLQSILTVSTRIIKERYRSNKNDAQRGMIDDKSLEFISENKVKFVYDENGKRITAPNKKYYLSTIDKDNTHLSYFGKLMLTCILLEKKYATAFLTQCHFLDAFNDSEAAPKLSERRLMLEVMTALRIRLAEKKLSNEKSEVQISLDILNELKKCPFELYELLGSEDKRLFTIVADTGETILLRRHEDRFPQLALSWIDSSKAFDHLRFQVNAGKLRYLFRDNKHCIDGQTRMRVLEEPLNGYRRLMEFEEERIQKQSGEIRSLWPGLDILNKDETPRNDASVLPYISDYRVRYLFDGDNIGISIGDFTPSITKTDETKYRVTGKTADCCLSKYELPGLLFYHLLTLRYGDNKRSTKNAEDIIIDAIKRYKRLFSDVKEGILKPIKEGNANQLGNRIWNSYGIDIKDIPDKIIDYLLVRECNEDEKFTAWKNGLISEMLQSTKNRIKRFEKDSEAVISSDNKPGKKNHVSLKPGAYASFIANDIVFFQECGATEKMTGLNFKVMQSRLATFTKDGSTSFNILLQTLKNAHLVSNTYGKGDHPFLYRVIKQQPSDIVQFYKIYLNEKVLYLQSDIPDNAIFLHGERKRWENRNEQYYRDLAERYLQRPIQLPRQLFESHIRQLLLSDCIKGERGNDLKEAINSAASQGRCNTTYMIMEYFADYLCDGTQFFYGLFDGDLSHEYNYRFYSLISNNIENSKKLVLTLKKGNNSKESPFISALERGIHWSKRNPLMKKGLKNDSSEGDFVHAAKRAYKEMTETERMFRRYAVQDEVLFLAAKITIRRALGLSEQYNCLLGDIKPQGGSLLEQTIPSITTKHTINTGNKKQKPKQVQILQKNVKLKDFGKVFKLLNDRRIFDLLFNKGNEAVSMTDLCEELERYDRHRVDVFDSVLKYESKITKGYTNKELMNESGQIDFKAIQAFDKQNTTADKEDLRLIRNAFSHNQYPQYNNEPILFDKDIPEIADEISIIAKDIEENTK

SEQ ID NO: 2454 - protein, 1127 aa, Artificial; identical to SEQ ID NO: 2453
  Synthetic

SEQ ID NO: 2455 - protein, 1127 aa, Artificial; identical to SEQ ID NO: 2453
  Synthetic

SEQ ID NO: 2456 - protein, 1118 aa, Artificial
  Synthetic
MKEKETPVASTVNKDEKHFWAAFLNLARHNVYITINHINKLLEIREIDNDEKVLDIKTLWQKVNKDLNQKARLRELMTKHFPFLETAIYSKNKEDKEEVKQEKQATAQSFKSLEHCLFLFLEKLQEARNYYSHYKYSESTKEPVLEKELLKKMYNIFDNNIQLVIKDYQHNKDINPDEDFKHLDRTEKEFNYYFTQDKKGKITESGLLFFVSLFLEKKDAIWMQQKFTGFKDNRENNKQMTHEVFCRSRMLLPKLRLESTQTQDWILLDMLNELIRCPKSLYERLKGEDRKKFEVPFDSTDEDYDAEQDPFKNTLIRHQDRFPYFILRYFDYNEIFKNLRFQIDLGTYHFSIYKKLIGGQKEYRHLTHKLYGFERIQEFTKQHRPDDWKAIVKDFDTYETSEEPYISETTPHYHLENQKIGIRFKNDNDKIWPSLETNGENNEKSKYKLDKQYQAEAFLSVHELLPMMFYYLLLKKEEPNNDKKNASRVEGFIKREIRDIFKLYDAFANDEINNIDDLKKYYKDKNVEIRHLPKQMIAILESKPKDMAKEAKRKQKEMVKDTKKLLATLEKQTQKEKEDEGRNVKLLKSGEIARWLVNDMMRFQPVQKDNEGKPLNNSKANSTEYQMLQRSLALYNKEEKPTRYFRQVNLIESSNPHPFLKWTKWEECNNILTFYHRYLTKKIEFLNKLKPEDWKKNQYFLKVKEPKTNRETLVQGWKNGFNLPRGIFTEPIREWFERHQNDSEEYKKVEKLNKAGLVTKVIPLFFKEEPFKEDTKKEINDWVQPFYSFPYNVGNIHKPKEEDFLHREERIELWDKKKDKFKGYKEKIKSKKLTEKEKEEFRSYLEFQSWNKFERELRLVRNQDIVTWLLCKELIDKLKIDELNIEELKKLRLNNIDTDTAKKEKNNILNRVMPMELPVTVYEVSKAGNIIKDKPLHTIYIKEAKTKLLKQGNFKALVKDRRLNGLFSFVKTNSEAESKRNPISKLRVEHELGEYQEARIEIIKDMLALEETLINKYKDLPTNKFSDMLNSWLEGKDEADKARFQNDVDFLIAVRNAFSHNQYPMHNKIEFANIKPFSLYTMNNSEEKGLGIANQLKDKTKETKDKIIEIEKPIETKE

SEQ ID NO: 2457 - protein, 1146 aa, Artificial; identical to SEQ ID NO: 1461
  Synthetic

SEQ ID NO: 2458 - protein, 1127 aa, Artificial; identical to SEQ ID NO: 2319
  Synthetic

SEQ ID NO: 2459 - protein, 1294 aa, Artificial
  Synthetic
MCIFAKLNIQMPSNNNSLNQFITTMDNNETSIKQFVLLGEDNSQYRDYAGSYFTKANLNFYRTMKTVFRRSGIMKDNRLGNVEWRDDNMETALSSFDITTISATQMSSLSDHLFRNLPMFGPIMSHDKNAFLSPLKRAKKALDKAKKDLKNAKKAHQDEDKYEKLKNVAEIEYNQQKENFKNEMYGTEAKDMWDKLINIAGALLYYRNLYTHKNPYSTEDDENKQKEREIKIAKWMNSVFEGEKGILIERKKYKYEDTLFLIDHQKETDRMEKRGNKYVERDNFYFKIKILDENNKCIGLTDFGRFFFCSLFLRRSDSELYAKSVKLFENSPYCLTEQELKIKQAEENKRAATESQKSDHQVNPKTIDITESAQINIIREMMQMHRIRIPREKKIDFTPSESMLLMDILNELRRCPQELYDTFNQTDKLKFVVDNPNEDPESDSKITLTRSKDRFAHLALRLIDHTDALGSIRFHLRLGLFRFRFYDKKLIDNSETLRRVHKEINGFGKWHVVESLRREKWGKYNQKFELNDDGLLQFVPDSAESDPYITDWQTTYNIHANRIGLFWNGNSQSEDYYIPELKTMVDENSKVIAPVEMKIPLCSLSIYDLPAILFYTYIFNLYNGNRLGLPNAEKIIKNKYTALNEFFGFAKKSESTPEELIKKQEELNLHDSEIPERLLYLMGKIKTPKGKIAEWKPNSKRNNHAKELLKKIIEEDEWRIKSFKDKKNKIEDKNRYGRKDYSDIRHGVLAKYLVESMMMWQPGKQKAETKISSANYRALRDYLSNYNNNSNNLQFVLKAAHLIDSENPHPFINKVKGSNIELYYTNYLHEELKHARGILSELEDNNYTGDKKEIIPPFAKPESDKWNKKSNTIQSCAAKYLEHPIQLPDGLFTQAIIDLLKAADIDETIKNDATKDSNATYIIRYWFDKVGQDSPQLFYDSTLFKRSYKFIDKCFLQKDEGNQTIKHFLTEKEILDNIKNFRGETGSLAGKLYPKDKLEESKKSIINQLNEVKDKEKAIRRYRVQDIALFLLARKRLVELLSKSENSNRNEARVETTHSQNNISKKANNLKLKDFGFDEDFHFLSGSEDNGDGLLFEYEYIVDNDANKKIMIVQEGLSLKNYGNIYRVLGDNRIKTLMQLLYEIKKDKVEDGTITFTFAELVKELTNNDKLHHEFYRLFQNIEQEAYDGTGGFDANKKNKEVLDNPDDEQFFFVRQRKNGEVTTKEAVRNSFKKLIELLKQYSTDEGIIVQLRNDAIHDRYPEPIAEMELKETGITESLIEYLNNLIKKNQEQL

SEQ ID NO: 2460 - protein, 1272 aa, Artificial; identical to SEQ ID NO: 2226
  Synthetic

SEQ ID NO: 2461 - protein, 1403 aa, Artificial; identical to SEQ ID NO: 1745
  Synthetic

SEQ ID NO: 2462 - protein, 1126 aa, Artificial; identical to SEQ ID NO: 1409
  Synthetic

SEQ ID NO: 2463 - protein, 1136 aa, Artificial
  Synthetic
METNHLGKRIEYNYLKTADKHYFGGFLNLAKNNIEVVFSVFCERFKITPTNYISLINDQLKDDVAPSEYQKKVDFLKQYFPAIHYLDLEITNEKFSKEKDKEKAKRKYFRENFIALIKAIGCLRDFYTHHYHKPIFFDVNLFDLLDELLITVVFDVRKRKMKGDQTRHLLKKGLHSEIEELVKLKTIHLKEQKKEGKRVNLDSEAIENAVFNDAFYHLLYKEGVSRNYQSKLISETENENNLNISESGLLFLLSIFLQRKENEQLRANIKGYKGKVIVENEKPIDRNNNSLKFMATHWVFNYLSVKTIKHRLNTTFQKETLLIQIADELSKVPDALYQTFTKEQKEEFVEDVNEYLKDGDSSESLEKSIIIHPVIRKRYENKFNYFSLRFLDEFVNFPSLRFQIYLGNYVQDRRVKPISGTNYTTERMIKEKINVFGKLSEISQIKSDYFGSSNEDTHWEMFPNPSYNFVGNNIPINLEKSKVKSVGKLNGLLNQLHKKQKIKNRKENKPSKTEMISELHEGIIFGKPTAVLSMNEMQALLHEVLVNNKTGEEVEEILINKLIERYDTIINFDPNEPLPTSKITKKLRKSTNEIKIDIDKLLRAIESEIRVTNEKLCLIKNNVQELNDRQQKRKFVFTNKELGQEATWLADDIKRFMPKETKENWKGYQHSLLQELLAFYESKPKEAHNFLNTHWNIKDNNYPFNEWLVKAFQNNKFDRFYRVYLSNRVKYFESLKTQISGFKNNRKLLNKFLKQQFVWSIFYKRLYVISTTENQKEQLLLKPLVFPRGIFDEKPTYIKGKNIVESPNLFADWYRFIQDKNQELQKFYLWERDYKELFEQHKIALEFSTNKYDLSEIDKFNLFKRKWDKKIKATIGQDLFLNLMNRKIIKDLYNHDVDLSLSDYYLTQKERIEKQNKALKQSQREKQDKSENIVKDDFIWSMTVSFKTEFIDEPSIKLKDVGKFTRFLNEEKVKRIFEYNTSKKWTKLEIEKELENYEKIRREEIFKLFQELEEKILEENKFDGVNHPNSFMQNGNPNFKKYITQGFLIKDKSLKKEDVEWIEGLKDKGSKNTFESNDTIKELQQKPEIIKQAFMFIYLRNKFAHNQLPIKTYFDMICPNFDTTKSITENIFNYLK

SEQ ID NO: 2464 - protein, 1140 aa, Artificial; identical to SEQ ID NO: 1356
  Synthetic

SEQ ID NO: 2465 - protein, 1152 aa, Artificial
  Synthetic
METDSTKEVQAYNLIETPWYFGAYLNMARHNMFLLINHLTEKFSYLNGEKLTNDEEICTTKHLLVTIFDPVQTIYEDERFKVYKYLVKRHYLPFIKIFHEKNGYQLDSNPIVDYKGLHNFLLSVFNSLNSCRNSFTHYLSVDNTGKKIDERKPILDKNMKSTLEQLFKLAPTFSLKRFEASHEENDFDHLNLYELFHPDSSQLTEHGFYFFINLFLERSYAIKFLKKIRGFKNDSTPSFRATIQAFTAYSLRIPDVKLDVEDKKLSLLLEMLNELQRCPKELHSHLSDEDRKIFQPSLDEKDKSNILLNSTDYENIKDEDIDSLISEITSLRRESNRFPYFALRFIDEFDLLPHIRFQITLGKLHVKSYEKIITGNKKNRRIVETIQAFGKLSDFEHSEDEILRDLQEVGVIEKGCYFEQYAPHYNMENNQLPFYLFDDKKTMKYPSTPTGFISLNDLPKIVILAKLFPVDSKSKKCKVEDIIKDFIEIDKTCYLNYDELQKIKQQLSLIPEEFTRRIIQEKSIKGRNGKPDYLNLHKEINLLTRLNKSKEELCLLTSDELRKLTRDRKELEYINQIRYLHFLDKRKQELQKYLPNGLLVNQLPEQITRYLLNINEPDTEKTIDQKIKAVYDDCNIRLKRIKKETEKPQYEQNIKLGELATFLARDIIKMVVDKDVKQKITSPYYNNLQNKIAYFSISQSEIIALCNELQLFDNNKGHVFLSRQLINKSNNIIDFYKNYLETKCKWITTHLSKEEAIPLSLLKIKEKVGRNDFNHWLSNKSTMPVSLPNTLFDKDVSTYLSKELHKNRMPFNQGDKFSILLSKFLQQDTQPFYRFKRIYFVNGEPKEIDINDLDGKTLKSRYGKQVEKNEKQIRFIQTQDRIIKLLCEHILSEYNSDSHHKSLKLASIVPFSEESPLNNPFQFKQRIIRKGNETYFTVIAKDNQRQLDEISAYSQLTTEDEKNSFKGQKGYEWTVKDFGRFKKMTFDRRISSLSSYFENKEVTFKFLDYQLKEYDKYREFIFESTFQLEQHICDIALEDIIRIEMKHRTNDNNFNNVQFNKYTEWIEDKGLLNEDKICQLKKIRNGFSHSQFPDNVSGIPKITQLNINQFEEIYGVEGRKGEIENLNLSLSKLIFEDYKSIINNIIPSVIDH

SEQ ID NO: 2466 - protein, 1145 aa, Artificial
  Synthetic
MTLPTDNTFIEKADQEILGKNKLFFGAYLNMANHNAYLIIKDISERLKQEDALDIDAPSDEDNLAYADIFSKILKKASDKNPKNRPQATIIDKVTNLLIHHFPAFEVFAYEHPFEQQNSYPELLYQKLTTALKLLNDLRNEHSHFYYKGSFDIDTVFSAAQEEITRFPYLTPEDIEELEYYKNDLLEPLTYFKKYGFVFFICTFLEKRYARYMLKEKQLDLIASDKERDATLENFTNYSCRLPRPKLESSVIELDMLNELSRCPKGIHDVLSSPMEKVLLKTDAKDDPNQVPMIRHNDRFPYFALSYFDKMERFPAMRFHIWAGKTRLAFYGKKLGKKNVLRDIQENVTIYARLNDIKADKIPDNWKDKIDVEDSEENKEKAKIQSYSPHYNIHNNRIAIKFIDTQKDELDTENFSEIKSKPQDPTKDKQLKYTVTHALPNAILSTYELQNLFLYDYLYRTYKDQKVLARPADSFIRNYISSFHRFCKDVKSGKIQPVSPHDFERLTEHTRSTTRDLGNREEELEIRKEALQKKKLDNYGLKVKNLPDALREYLLGYKQETYTEIALNKLRGKIKQTKVHYKLATKDDLFLDGKTDLKSGKIGDFLAADIVFLKPLDANRTGKPNNQQFNELQKAIARFHSQKKDVEDFINEELQIKEQSLPHAHPFLYKIQFEEHTDVQSFYIKYLELKIEWLECTKREIQGKSDYLKPWQWREEADKCKQYGIDIKPEGLSDAATENKYGYFLQINTKKGNERNYTNATTPSKANSKEFESLESKSPVFLPRGLFNDAIIDAMMKIDEFKGKIKEGDNIVRCLDVLAEGDRQTFYDFERSYTVGKAAPTSVTIHQGANGEYIKNKLRSIKPIIKKLRTQQNAKDAKYKDKKILQNHIKALQAISDNERSIRFIRANDRTLFLMIKHIFSEHKSYVVEGSKLTKSINTLPWKLNKVGYEIKENNILNEILPMNIQFNQKSIYTEGEHGTDPLNKLSIKHYGKFRKLLKDKRLSNKKKPGLLNYYTDQNVRWSAINKELEYYDENRDRLLDVIYKFEKAVWENEECREELKENIRLGYINHATQLKAVGKIVRGFTASKQDQLALLRNKFLHNQIPYTENLKTGWVDNNPEYPLITQALLELAIIEYQNITKNII

SEQ ID NO: 2467 - protein, 1145 aa, Artificial
  Synthetic
MTLPTDNTFIERPDEKILYQNKLFFGAYLNMAQHNAYLIIKDISEQFGLDISTLQENQLESADLIKKLKGKGGRPKNSVQMTNALVRRLPFLEAMKAPEESTYKAGTEKEKEVIHAKEIQSGEVGKILTTAFEFMGQLRNFYSHYHHEDVDFKDFSVIEIIFDNAIKRAIKRIPDVNEENTNHLLNAPTYAMYKDGKLTNLGLTFFICLFLERKYAYLFLMQLEHFKGQNDFVYSNRRCFTDLSCNLPKPKLGSSEIEMDILGELARCPKELFYRLSEEDKNKFFAEQKETEDEIPPPIMKRKDDRFASFALRYLEEKRLNKMRFQIHLGKVRRIGEKHQYDKTIAGVEAERVIMENLRTFAKLSETNTEKTPEHWRVFNRDTNKKDLIRTEIEQFRPRHQITGNRIALKFLTEERNSVFPDLKFDNNQTKLQALDTPDAILSTYELQNLVMYDQLHKEGAIEKDVETFIADYILNFRKFCEAVDKGEVTPVADADFIKVVKASGKSKPEYSEAQLVELKNRQQSLKGILTNYGLQIQQLPDNLREYLLGYAPVNYKREALRILETKFSETLKLRTDSQKGFGPKVGEMATFLARDINHLKPPREWKDSKVRLNDEQYDNLQAAISQFSGQIPQIEALFDELELTKSYSRSRAENEALQALMHPFLFRIKLQDSANQGGIHIFYQRYLNKKADWLQGLMLLLKQEPYGDFGPFNNFPEGYQNISLPEFTKKFDYVLRIDKKLNRKKQYLFSDKEKTQKSAIFLPRGLFNAPIMEALFFKKNIEVEPDDSLVMAMSKYKPDSQSFYNFERIYTLKGRDEAPDTLYTGDANQIGAQMQVLKKEIEQMQSKRKAMSLPADWWETYSQKNKGKKKKEELTSIQKTAQNLEYQINDLKKFRRSVMTNEQTLRYRQTNDRVLWLIVKNYFEDIDSHFNIDISEWELHNVGFEIKEKNVLNTKIDLSFPLYGYTIHTKQSEGENVPVHESDHLTIKRYGEFRYVLKDRRLWSEKVHQDGNIEKTGILRYYSPDTPIAWSILKRELDTYDGEDRHKLMNHIHAFEYDMYTMHEEKMERESGAKIINHLKQLEAVHNYIAQIDKPNHLMINELRSKFMHNQIPFNAWLENELKNTPKGSKVKQLLDIATKAYHN

SEQ ID NO: 2468 - protein, 1124 aa, Artificial
  Synthetic
MSVATQEHINSLKFIETAERNKFYYGMYLSVAQRNAYLSLKSIYEKLEIKEEKRQISEDNPHKADIFCELIPPDENTSNCDAHPYVQLRPSEIESRKRLLAKHFPAFRKLSETINEKGKVTGFDVVRLAKLLKCSLEYLNKLRNYFSHYYHKPISGDTIPDIYLPELLEAAVEKVQKRFPDINTEHGEYLKTLPLTVDNQYNYNGGILFMCMFLDRRNAFAFLKTTYMRGFKDSRTPDMRVKPEAFIYFCARPPQPKLGSSDLPLDMLTEISRCPNEIFQLLSTNDKKKFEADIDDDAKPTELDEFLKDELPPRTANMKRKAENSHFPRYAMRYFDEQKKFGRLRFQLLCAKFNCADYKSTILEQERNRKIEDTLTVFTRLNEITEDEIESSWKTEDTDNEHIGIKQYSPKYNIVGNRIAIKILPEEITNDIETTSIVHPKSTHTDKPRHKVNHPLPTAILSVHELQNLFLFRHLHNEENATENFIETYIKRFRDFCQEVNEGDFLPVSNFLDCLVSKKSKDQDKAARKTALQAKLKAKKLHINDLPDQMRDYLMGYTQDNHSNQLKAKLKAKIIETEALLSNAKRGKDAQGRDLKDGRMATYIARDLIFFKKKNNSGGKANNEQYNELQKAIALFPSHKGKLGQYFKDLNLLDSSTGHQFLHEIPWSYCVDTADFYTDYLEGKKTWLESCRRKLSSKQADIQQFFKLKKTDSKNLNYRFTVNQNSMTEEPAPIYLPRGLFNGAIRKAMKNQGFDVNKETSITKCFELISKQDTQTFYTHPRTYYDGIVITGKDDMKAVKADIQQKTEQTKTKLKRIKNKKSEDAKKLQYKINDLNKLPKEIYRNELKIRFIQANDRAAFMMIQEMLEAKIKADQVQLRAPDSDTSKWQLRKVGFDVKDNILDQKHLMQHTYKLEYKDKNNSNNDEYFGSRTIQALLPFKQYGKFRRFLKDKRLWSTRTKDGLRLPQGLLSYYSEGDVIELETIRREFVNFDTKCYEETLLHIYDFESILHQEFQTEFNEKIRNKKSLRHGDQLALVQTKILNNTSVLTNPDKDDTAIMRNKIFHHQIPNNDWLTQKVIVYKGLEANRKKQDEDNPFITQQIFVGIQTVYKDLTQRMKIRMNQP

SEQ ID NO: 2469 - protein, 1313 aa, Artificial
  Synthetic
MGNSGYKGTSNPSKKSDKKGNVINKIRRLQEKDFTIDLSGRHVFGAYFNMARTNFVKTINYILPIAGVRGNYAENQVNKMLDALFLIHANREKELTQEQLQWKKKLILNPEQQTRLQRLLFKHFPILRPMMADVAEHKAYLNKKKSNVTTEDEAFEQLRGISLADCLENLSLIAKTLTECRNTYTHRKPYNTPLQWAEQYRHQDQLACKLDKVIVASRRVLKDRDGLTVNELEFLTGIDHMKQVVTLDENGQAIIKDGKKLKTFKEYEDFYFKIKGKREVKGLEMANNSSVDTMLPAFSDFGLLYFCVQFLSKPYAKLFMDETHLFEFSPFKDDENIVMQEMMLIYRIRPPKLHRIDSRDSKSTLTMDIFAELGRCPIELYEILNKTGQSFFHDVVKHPNSHTPDVSKRIRYTDRFPQLVLRYIDENEVFKRIRFQLQLGAFRYKFYDKECIDGRPRVRRIQKDINGYGRLQEVEAKRYDKWGDLIQKREERNVKLEHEELYVDLDQFVQDTADSTPYITDRRPTYNIHANRIGLYWEDSQNPNDFTLFDANLMYLPQLTVTDDKKAPIKMPAPRSTLSVYDLPAMLFYEYLRTQQKGNLTSAEQIIMDYEADYHRFFTAVADGTIKPFGQSKEFREFLATNYPKLKMADIPEKLRLYLSSKSLTYGNKPETVRQRLIRITLGHLKEREERVCRRIHNYKEDRKKIGDKTNKIGKRDFVDVRHGALARYLAQSMMEWQPTQDGLGHDKLTGLNYNVLTAYLATYGTSQPVEEGFTPHTLAQVLTEAHLIGGHNPHPFIDKVLAKRNTNIEDFYLNYLNEELKHLRSRRQSLESNPTDKAFAALPFVHHTRNRYHEHTEEEMKKLAAEYDTIQLPDGLFTKYIYDLLKKYYTDNVELQQKLNEIAPDKLNPLNNAAYLITLFYQTELKDDAQPFYHSDRTYTVVNEEGKKINYSFKRAYELFSILRNKKKETFPYELIPFYQTSEQIQERISEKLLDEEGTPIPQQGKRGKAATDTQGNIIWERKLKYDIDEYVDSRTDKDLMIAQNQSWSKKNEERQEKREALSKRLNHQIKDVKNNERMLRRYKTQDMVLFLLATEMFDSILTEQNREVNWDNLRLDRVCERSFLSQTLTFQVPVTISGKTVYVEQENMSLKNYGEFYRFLTDDRLDSLLANIVDTLKPNKDGKLVIRHTDLMSELAAYDQQRSTVFRMIQKIEKLIIDKHGILRKPDTPDFWVKEGLPKRNNFASLLELVNRLGDVELNEEERKLLVAIRNAFSHNSYNIDLSQIQGIKKLPEVAKSILLHLEKILGDNKK

SEQ ID NO: 2470 - protein, 1003 aa, Artificial; identical to SEQ ID NO: 1494
  Synthetic

SEQ ID NO: 2471 - protein, 1147 aa, Artificial; identical to SEQ ID NO: 1760
  Synthetic

SEQ ID NO: 2472 - protein, 1132 aa, Artificial
  Synthetic
MKEEEKGKTPVVSTYNKDDKHFWAAFLNLARHNVYITINHINKLLEIREIDNDEKVLDIKALWQKGNKDLNQKARLRELMTKHFPFLETAIYTKNKEDKKEVKQEKQAEAQSLESLKDCLFLFLEKLQEARNYYSHYKYSESTKEPMLEEGLLEKMYNIFDDNIQLVIKDYQHNKDINPDEDFKHLDRKGQFKYSFADNEGNITESGLLFFVSLFLEKKDAIWMQQKLRGFKDNRESKKKMTHEVFCRSRMLLPKLRLESTQTQDWILLDMLNELIRCPKSLYERLKGEDRKKFEVPFDSTDEDYDAEQDPFKNTLIRHQDRFPYFALRYFDYNEIFANLRFQIDLGTYHFSIYKKLIGGQKEDRHLTHKLYGFERIQEFAKQNRTDEWKALVKDLDTYETSNERYISETTPHYHLENQKIGIRNKKKKKKKNIWPSLETNTTVNEKSKYNLGKSFKAKAFLSVHELLPMMFYYLLLTKEEPNNKEINASKVEGIIEKKIRDMYKLYEAFANGEINSEDDLKKYCKGKDIEMVHLPKQMVAILKNKPKDVAEEAKHKQKKMVKAAECKQRKMVKDTEKLLAALEKQTQEEIEDGGRNIRLLKSGEIARWLVNDMMRFQPVQKDNEGNPLNNSKANSTEYQMLQRSLALYNKEEKPTRYFKQVNLIESGNPHPFLNNTGWKECNNILSFYRSYLTKKIEFLNELKPEDWEKNQYFLKLKEPKTNRETLVQGWKNGFNLPRGIFTEPIREWFKRHQNDSEEYKKVEALKRVGLVTKVIPLFFKEEYSKDDAQKEINNCVQPFYSLPYNVGNIHKPDEKDFLHREERIELWGKKKDKFKGYKAKKKPKKITDEVKEEHRSYLEFQSWNKFERELRLVRNQDIVTWLLCMELFDNLKVEGLNVEELQKLRLKDIDTDTAKKDKNNILNRIMPMQLPVTVYEIDDSHNIVKDRPLHSVYIEETKTKLLKQGNFKALVKDRRLNGLFSFVDTSSEAELKSKPISKSVVEYELGEYQNARIETIKDMLLLEETLIKKYKKLPTDNFSDMLNGWLKGKDEADKARFQNDVKLLVAVRNAFSHNQYPMRNRIAFANINPFSLSSADTSEEKKLDIANQLKDKTKETIDKIIEIEKPIETKE

SEQ ID NO: 2473 - protein, 1003 aa, Artificial; identical to SEQ ID NO: 1888
  Synthetic

SEQ ID NO: 2474 - protein, 1167 aa, Artificial; identical to SEQ ID NO: 1781
  Synthetic

SEQ ID NO: 2475 - protein, 1142 aa, Artificial
  Synthetic
MEAHENELFENRRRTLADDPQYFGAYMNLARLNIFSINNYLAKEFQQTELKDDELIQNGFICIPSQKNRNDNKLFERLIRLMPVIKQFDAARLPDEEQKSGQAEGKDIKAMAKTLKVLFKDMQEFRNDYTHFYATDKQECRKLTVSPETATFLKESFARAIEYSKARFKDVLAEDDYTLVAGKELVGDDNTITTEGLVFLTSLFLDRENAFQFIGKVQGLKGTQFKSFIATREVLMAYCVRLPHDKLISDNPRQALLFDMLNELNKCPKKLYNVLSDEAKREFRPELSESGIENMLANSFNDEERERLLDEIDYKDYIKQLTIRVRHSNRFHYFAMRFIDEQELWSGIRFQIDLGKYILANYQKQMLGESIPRSVVENAKAFGRLGSFLMADPDSLEQRIDSNHQANGFEQFAPHYNADINKIGISFTEKEELLPYIVPTKNEKENRVKYSFKQPQPNAFISLHELAKAILLEQLQPGESEKLIRAFCSTAENKLFNLDFIESIKQKLPDWRTFNKQCDTKKRRAYMCIKNRQLVFNYEAKDRKKLLDELLAPYGLNSKQVPERILNYWLNIEEVHDARSIKERILLMKRDGLQRLKQLEKHRKDPSVRIPKVGEMATFLARDIVDMMIDSIKKKKITSIYYDKMQECLAFYADAEKRQQFINLVRELNLNAPDSHPFLKNLNLESIRKTSEFYKLYLMEKVEKMIENGYKRNGDKSFKNIAWIIRVFEEKQKNEKTGKDDTIYRIPNNRNDVPYTIRQWEKEPSTLTEWLRSINHGKQEGDRKRPIDLPTDLFDARLCKLMKEQLQAIGQAPAETAKYNEVMKQWWSVRGDETQPFYNGARHYVIKEEAVCFMPGKQERLTSCYAGAFEEAYNRLSAERNIARRNDKRLPPIQKQEMEKTFKRVLYDTEKEIRLLSEQDRILLLMAEQLSPGKETLKLKTVEEELTRPREIEREFSYKANYNTQGKKLPKEEVSPQLTLTVTDTMQLKNSNNLNRFAHDRRMPELVAYLPNATIDADTLRYELMDYNKARLTVFDTIFHLEKAIVDKDSEGVITLFTDEQGEAKQGRMQHKPYLQWLLLNGVITEQESCYLNMLRNSFSHNQFPHIAVATSDATAIPVKNIASAIAKTYKQKIETIIGKIG

SEQ ID NO: 2476 - protein, 1175 aa, Artificial
  Synthetic
MTEQNERPYNGTYYTLEDKHFWAAFLNLARHNAYITLTHIDRQLAYSKADITNDEDILFFKGQWKNLDNDLERKARLRSLILKHFSFLEGAAYGKKLFESQSSGNKSSKNKELTKKEKEELQANALSLDNLKSILFDFLQKLKDFRNYYSHYRHPESSELPLFDGNMLQRLYNVFDVSVQRVKRDHEHNDKVDPRRHFNHLVRKGKKDRYGNNDNPFFKHHFVDREEKVTEAGLLFFVSLFLEKRDAIWMQKKIRGFKGGTEAYQQMTNEVFCRSRISLPKLKLESLRTDDWMLLDMLNELVRCPKSLYDRLREEDRARFRVPVDILSDEDDTDGTEEDPFKNTLVRHQDRFPYFALRYFDLKKVFTSLRFHIDLGTYHFAIYKKNIGEQPEDRHLTRNLYGFGRIQDFAEEHRPEEWKRLVRDLDYFDTGDKPYITQTTPHYHIEKGKIGLRFVPEGQHLWPSPEVGATRTGRSKYAQDKRFTAEAFLSVHELMPMMFYYFLLREKYSDEASAERVQGRIKRVIEDVYAVYDAFARGEIDTRDELDACLADKGIRRGHLPRQMIAILSQEHKDMEEKVRKKLQEMIADTDHRLDMLDRQTDRKIRIGRKNAGLPKSGVIADWLVRDMMRFQPVAKDTSGKPLNNSKANSTEYRMLQRALALFGGEKERLTPYFRQMNLTGGNNPHPFLHETRWESHTNILSFYRSYLKARKAFLQSIGRSDRVENHRFLLLKEPKTDRQTLVAGWKSEFHLPRAIFTEAVRDCLIEMGLDEVGSYKEVGFMAKAVPLYFERACKDRVQPFYNYPFNVGNSLKPKKGRFLSKEERIKEWESGKERFRDLEAWSHGAARRIEDAFVGIEYASPGNKKKIEQLLQDLSLWETFESKLKVKADKINIAKLKKEILEAKEHPYLDFKSWQKFERELRLVKNQDIITWMMCRDLMEENKVEGLDTGTLYLKDIRTDVHEQGSLNVLNRVKPMRLPVVVYRADSRGHVHKEQAPLATVYIEERDTKLLKQGNFKSFVKDRRLNGLFSFVDTGALAMEQYPISKLRVEYELAKYQTARVCAFEQTLGLEESLLTRYPHLPDKNFRKMLESWSDPLLDKWPDLHGNVRLLIAVRNAFSHNQYPMYDETLFSSIRKYDPSSPDAIEERMGLNIAHRLSEEVKQAKEMVERIIQA

SEQ ID NO: 2477 - protein, 1147 aa, Artificial; identical to SEQ ID NO: 1760
  Synthetic

SEQ ID NO: 2478 - protein, 1091 aa, Artificial
  Synthetic
MKEEEKGKTPVVSTYNKDNKHFWAAFLNLARHNVYITVNHINKILGEAEINIDGYDISLKNIWSGIRDINKKARLEELMIKHFPFLEAMTHQQRLTGNTKQKEEKQAKIQSFEILKDNLFLLLKMLQDLRNHYSHYKHSKSLERPKFDEDIRNKLYNIFDTSIRLVKEDYKHNPDIKPKEHFKHLDRKRNEKFRYSFADNEGNITISGLLFFVSLFLEKKDAIWVQKKLEGFRCSNESYQKMTNEVFCRNRILMPKLRLESTQTQDWILLDMLNELIRCPKSLYERLKGEDRKKFEVPFDSTDEDYDAEQDPFKNTLIRHQDRFPYFVLRYFDYNEIFENLRFQIDLGTYHFSIYKKLIGGQKEDRHLTHKLYGFERLQEFAKQNRPDEWKAIIKDLDTFKKQEDEKVNEKPYISETTPHYHLENEKIGIAFKNHNIWPTTNTELTNNKRKKYNLGTSIKAEAFLSVHELLPMMFYYMLLKTKNESPRKVEAIIESKIKDIFTLYDAFANDEIDNTDKLEKYCEDTDIKIGHLPKQMIAILYNKHKDMVEKAKVKQEKMKLATENRLKTLDKLIEGKMKYAKRGISPLKSGEIASWLVNDMMRFQPVQRDENGEPLNNSKANSTEYQLLQRTLALFGSEHKRLTPYFKQMNLIGDNNSHPFLKQTEWEECNNILSFYRSYLEARKNFLKNLEPKDWKKNQYFLKIKEPKSNRQTLVQGWKNGFNLPRGIFTEPIKKWFIEHRKKMKVDELKSVGLVAKVIPLYFNEKYKDSVQPFYNYPFNVGDINKPKEKDFLDNGKRRKLWDKKQLEFKGKTEEEKRKNPSYLDFKSWKKFERELRLIRNQDIVTWLMCIELYNNQKVENLNTGHIYLKDIITNVKEERNNNILNQIKSMQLPVTVYENESSPKKKYLRTIYIEENGTKLLKQGNFKALVKDRRLNGLFSFVKTSSEAESKRNPISKLRVEHELREYQKARIDIIKDMLALEKTLIDNYDSLDTDNFHNMLTGWLELKGEAIKTKFNNDVKLLTAVRNAFSHNQYPMYDENLFINIERFSLSSSRILESKGLGIAVKLKEEVSNAIEKIKNEEDAKKET

SEQ ID NO: 2479 - protein, 1148 aa, Artificial
  Synthetic
MNSNFKASGRPNGRSNGFRGAGPVKKREYLTGDFARDMKSLRIKGPVRNPQTRKEIYVDETPQFITYLTLALQNISEIIGKGKDLSNFSDESSVKTALEESGRLFEVASFLWMYRVEEPGRDYDRIKKGEYADRAKEIVVALWKLRNMFVHPYEKNAAKALIVSPEFYRFIEGELYSEAREHALGPGRKSEKTFKLKLFNPHDDARATFEFTRKGLIFLTCLALYRHDASEFIQQFPDLQLPPREWQVEQGYRAKPSELELVELRKKGGAVKSILDAFTWYSMRASRTDIDVVNSDYLNFANILLYLNKVPSAAYNYLSLDEEARRLAEKAAASQESEENKRFRYLLQERKKDRFLTLALAYLEDFHRLDCISFKRLDITVRPDRKRYMFGPIPEGTVNERGEPLSDANGMDRHYAIQNGSAQFEFVPEQHYGPIQLKHLRGAVSEGEIMRLLLVMFDNGIRRKNPNDVIKEYLTAYHRILERMLNAGDTSAFTFDDPQYRADFKTVSGNGDDVFTKDRFVGEMKPFFSENVTRYFVGNELRPSPEALQKKLVKRFEAMQGRAEDFLLKMDRLTDWRKLDMEARKDKGFPVCAIGELKYPPRTCKVNDAQLVKWVLRYINLFLAKEEKFRQLPRGLRHRGVRDFEFQLLHTDIGRFGVNPDALWRTLEKRSSINGEGGALEMLKDRERKLFRSEQDRCRDKRDRNGRPLRVGHTLTMLATAAAELYREISESFRSEYSVPLSDEDKDLLPYVCPTYGVRAGLPLDQKSLVKTVLGIDLDTWSRAYDYATGRNFENRQLADARDLIVTQVPMPNAFAIRCVKPGENGEPFKFNPEFRAFMPYERGKMSLRRYYDAAPLIVAVKRFDEQSSLGMGGHKRANAEIRCSGTEGIETREWTDDGDIGSGKGPPRSRPSFARGDVNKAIQAIQLAERQDKVLLACAKAYWDRYMGEEVTATQNETGKKDQQKKNKIKNFHLSEAADIGEFFSLPMEDTVNGVKIRMMPNDFARPAYGVVTTHVKELVEDAKPLPGTDGVYSFYDLWLALRNLQHEENRIRLDFLPAAVKFNACVNIPPDLESLPNDDPEKAPRILSHCNKALRIRGNVKPLSEEEYLLLARFEPRLRHPAIKGLDLIHFDTDAVRAIYKRFGFM

SEQ ID NO: 2480 - protein, 1088 aa, Artificial
  Synthetic
MEKIDFKLKETDYTRLYSEQTDCKRHVVGAYANLALHNMTTVVNSIRQAVGLDTITDDTIKDAFSRDSFKGLDAGNQLKLQNKLFRHFPFLRRMKLEQHGTLDYSEVINDFIKLMSIIRDDFSHYCPYSDESQQTENSLIKKNASEKLKEIFTNSVSQYLHTAEENEVRDSVQNSKTQQDNKVTITENSIDMRDPASKDGLTDAGIVFFLCCFLEKHTAFEFLEEIKFTEGLNPANALYVKEILCMNRIRMTRSQIDSQMSDTALALDMMNELRKCPKPLYDVLDPASRNYFKDDANLQWEEDNPTQTDSQSPDSHNITDLRAKSVPRSTFVRWQNRFPEMALCFIDLKGLFKTTRFQLRLGNYRYRFYTHTAQQSLDGRERLRILQKELHGFGRINEIEQTIKKEWGQYIEKNTTDPKPKDQPDRTPYITHQRPQYNIDPVSHSIGLRWDFPNKKTKYYIPEIQPQQKCPSENLAPQCYLNTDELPALLFYQYIKNTYSPNKGSSAENIIRKCYINLHTLFSQLAKNEKISINELDKWELRPSDIPAKIRKLMEGHERSEKEIRDSLRRSIEHQLALIDKTTYERLVKYEAATDKKEQTDKKTTRFRPPILTGRLAQQLIDDIVWWLPTDSPCRSRLTSEKYNILQASIALLGQWTDASDPSQQTVTIDDLRQMMEKIGLLGPDGHPFLSQVFKQPIQSAGFFYHNYLYAEQDHIETLWQDFDHNLDQLISQAHAKLPFVHIDRPKWNVDKSNNLSQLAQEYLTHPLQLPLGLFAQPIAQLLRDIAEGEATETWKQLTAEIDRLTQKGQPSTLKLIELYHKNIEEDDFQNFYNSSPNAGFQHHYELFKKIYKEKGRSVEEVFNLLRRKSNPPQSKSQLDCDIHEYVEKHRKDKSKEWAEDQTTLMRKQAKQVEQTEHAIRRCQIEDIVMLYAARVMLYAARDILSAKNNRTPNGTDTHQPQKFKLKHVQNDDGLLERTIDFNWVVDIEGQQKTIRQQNMKMKDYGKFYKFASDGERLESLLAHLGGNEFQRADIEAEYAQYDDCRSQVFRYVYMLESKAYQLLAMQKDNPIDLLDDKNSTRDEFWFV

SEQ ID NO: 2481 - protein, 1095 aa, Artificial
  Synthetic
MENKRTLKDHPQYFGAFLNMARHNVFVINNHLAERFKLSPLPEDSHIPTSFLTRPIKERPNHIFSHLIRFIPIAKVFDPEQLPKEERTEEKSKTGKDFNKLKETFKICFSKLNDFRNDYSHFFSTKKRTERKLMVDKLLADFLTTNYSRAIQYSIKRFTGVFKDEHFELARKNIILVDNENKITEDGLVFFTCLFLDRENAFQFINKIIGFKGTHTLEFKATREVFCAFCVNLPHDRFISDDPEQAFILDMLNELNRCPSELFNSLTEEGKKPFQPTLDSKQITNIEDNNAVAKELPDEDFYEYMQSITKRIRHEDRFPYLALKYLDTTKAFNKIRFQIDLGKFQIDEYKKQFNNAEEDRMIIENAKAFGRLDEFTSIEKTKDELEKVIGKMINKDGFKNVDSKQFAFEQFSPRYNYDKEKNKIGFQFFPNGIGVPIYPKLKKSENEKSNVKYNLFQNNPHAFLSIHELPKVVLLELLEKGKVETIIEEFINSNNTKILNKDFIEEIKNKLKFEKPFYKKFQKKNLHAYDNPSIEDYTERKNKLNEILNDLKTRKEQLNELLSHYNLNHTQIPTRIVNYWLDIKEIKEETAIVNRIKAFRSECAERLKDKKKGKAPKIGVMATFLAKDIVNMVIDENIKKKITPFYYDKMQECLALFAGDENKQLFITICNELNLFNKETGHPFLQHLNIKEQIHYTPDFYQKYLEKKQNWIEDVFYKLEWNEKAKKKLTIVALPENLTLPFSIRNLDRTKSDFDSWLNNLINGKKEKDNPKPLDLPTDLFDNALVEVLTNKTGIERNPKHNYSYLLTQWLKDTQPFYNFEREYEIYKDKVYKETVKFKLGSKPTFKDYFLSSIKTVLQKLNIERKIERKPLLNENDILRVFNHAITENEKLIRFYQTKDRVMLLMLKELMKSDRDLNITLHNIEAALNETVEIEQKVKGLLSYDAQGNLISGEDKKIPIEKTITDKRKRKDFSVFKKFISDRRLPELFQYFKENEIPYQQLKDELDEYNKEKEKVFDETFKLETAIIEKAENEIKELFRDKKGNKIEGNIQFEPYLKWLKEKNFIGDTEFKILKVIRNAFSHNQFPPKIVMDKN

SEQ ID NO: 2482 - protein, 940 aa, Artificial
  Synthetic
MEEFTFKLKETDYTRLYSEQTDCKRHVVGAYANLALHNMTTVVNSIRQAVGLDTITDDTIKDAFSGESFKGLDAGNQLKLQNKLFRHFPFLRRMKLEQHGTLEYSKVINVMKDFIKLMSIIRDDFSHYCPYSNKSQQTENSSIKKNASKKLDEIFTNSVSQNLHTAEENEVRDSVLNSKTQQDKKASTPLVSIPMRDNAGLTDAGIVFFLCCFLEKHSAFEFLEEIEFTEGLNPANALYVKEILCMNRIRMTRSQIDSQMSDTALALDMMNELRKCPKPLYDVLDPSSRNYFKDDANLQWEEDNPTQTDSQSPDSHNITDLRAKSVPRSTFVRWQNRFPEMALCFIDLKGLFQTTRFQLRLGNYRYRFYTHTAQQSLDGRERLRILQKELHGFGRINEIEQTIKKEWGQYIEKNTTDPKPKDQPDRTPYITHQRPQYNIDPVSHSIGLCWDFPDEKTYYIPEFPPKKQDDHTQQQKCPSENLAPQCYLNTDELPALLFYQYIKDKYSLNEVSSAENIIQKCYINLHTLFSQLAKNEKISINELDKWELRPSDIPAKIRKLMEGHERNEKEIRDSLRRSIEHQLALIDKTTYERLVKYEAATDKKEQTDQKTTRFRPPILTGRLAQQLIDDIVWWLPTDSPCRSRLTSEKYNILQASIALLGQRTNPSDPSQQTVTIDDLQQMMERIGLLGPDGHPFLNRVFKQPNQSAGIFYHNYQYAEQDHIETLWQDFDLNLDQLISQAHAKLPFVHINRPKWNVDKSNSLSQLAQKYLTHPLQLPLGLFAQPIAQLLRDIAEGEATETWKQLTAEIDRLTQNGQPSTLKLIELYHKNIEEDDFQNFYNSSPNAGFPHHYELFKKLYKEKGRSVEEVFNLLRRKSNPPQSKSQLDCDIHKYVEKHCKDKSKEWAEDQTALMRKQAKQVEQTEHAIRRCQIEDIVMLYA

SEQ ID NO: 2483 - protein, 1266 aa, Artificial
  Synthetic
MAFDKPRPKRRQARSDFYITDKAIMGGYFNLAQLNFFKTLMEIFTKAGIDVSKIRQDNSPKYLMILIKKLTHDDEKIDDKKWADALDLSNECLLKLQQLLYKHFPFLGPVMGGEASYNIYKLKDGHPEVKIANNVMRGVKLEDCLAVIRHFALCLNDCRNFYTHFNPYNPIDAQKEQYLSQNKVAVWLDKVKDASRRIIKQNNQLTSQDMEFLTGDRMKPQDKVDEFGNIMTDKKGYTIKEYVEYEDYYFRIRGKRYLVDAAGAKLVDQEPRNALSDFGVVFLCTLFLESDQARRMLDELRLFETGPYDGSRDGDEFKNDILREILLFYRTRVPRGKRLDPMDDTTLLAMDMLNELRKCPMPLYDVLSREGQGFFEDEVKRPNDLTPEVAKRLRSSDRFPYLALRYIDLNKCFGNIRFQVQLGEFRYKFYDKTTIDGEQVVRGLQKEVNAYGRLQDVERYRLEKYADMLQQTELVETGEEDITIANFIPDTPQSSPYLSDRTASYNIHNNRIGLLWNMPGEHEVLTGDEKMYLPDLKVDENGKADVFLPAPRASLSVRDLPALVFYLYLHNQYPDLTPAEAIIQQKYNALVRFFDDVSTGHMLPVNGIEELEKAIDQYGHLTVNEIPEKLRDYLAGSARAENDDDCGVRFDWYALGVLEKRYKQVRARIDQLKEARKMVGDKMNRYGKKSYIDVRPRRLAEQLAQSIVDWQPSTDNGRHKMTGKNFQRLIAFLARYTDEVPVQEIKDLMTRARLLEGPVAHPFLQQVLDKNPLNIEVLYDLYFKEEKRYLDKYIDIEINKQGEEVYWIKPDADLSKIPFLNSSRLRFHKLDSAYYQRLAARYLQVDGRQSTILLPDGLFTPHILSVLKSTLYQENRDLQDHLQDQELNRNASYLMSVYLEHVLHDSAQPFYMPNSNDSPFARRYDLFAIVQNNKKGIELLPCPLTPVEINRRLTGKTPDCRAKLIERDILALLEDMARKTEQRIHKLPQGLYRKKKNEAQEERIKLQQRMRHKIANVKKNERAIRRYKTQDMAVFLMAKQMLANQLSWQNQEGEVPFKLANVCKEGFLRQTMKVSFPYEVPLKEDKTQKATINIVQDDMSLKNYGLLYKLYHDERVVTLLQNIVDQQQISFAELTAELSLYDQNRSKAFSNFQQFEKLAFETNKEALSNPEHRGFFLEKVNKKNQVIRYERRNNFDALLDLLDAIEAHQLDPRERQWLTSVRNAFCHNSYYKIDMQQIEKKLPTIIQQIVEIVQRITDKASHPSNR

SEQ ID NO: 2484 - protein, 1141 aa, Artificial; identical to SEQ ID NO: 1789
  Synthetic

SEQ ID NO: 2485 - protein, 1119 aa, Artificial
  Synthetic
MEDDKKTTESISYELEDKHFWAAFLNLARHNVYITINHINKLLEIREIDNDEKVLDIKALWQKGNKDLNQKARLRELMTKHFPFLETAIYTKNKEDKEEVKQEKQAEAQSLESLKDCLFLFLEKLQEARNYYSHYKYSEFSKEPEFKEELLEKMYNIFDANIQLVINDYQHNKDIDPEEDFKHLDTIEDSSYSFTVKDNKEKITASGLLFFVSLFLEKKDAIWMQQKLTGFKDNRESKKKMTHEVFCRSRMLLPKLRLKSTQTQDWILLDMLNELIRCPKSLYERLQGEDREKFRVPLDPIDEDYDAEQEPFKNTLVRHQDRFPYFALRYFDYNEVFTNLRFQIDLGTYHFSIYKKLIGGQKEDRHLTHKLYGFERIQEFAKQNRTDEWKALVKDLDTYETSNERYISETTPHYHLENQKIGIRKKKKKKNIWPSLEINTTVNERSKYNLGKSFKAEAFLSVHELLPMMFYYLLLTKEEPNNKEINASKVEGIIEKKIRDMYKLYDAFANGEINSKEELKEYLKGKDIEIVHLPKQMIAILESKPKDMVKEAKRKQKEMVKDTKKLLATLEKQTQEEIEDGGRNIRLLKSGEIARWLVNDMMRFQPVQKDNEGNPLNNSKANSTEYQMLQRSLALYNKEEKPTRYFRQVNLINSSNPHPFLKWTKWEECNNILSFYRNYLTKKIEFLNKLKPEDWEKNQYFLKLKEPKTNRETLVQGWKNGFNLPRGIFTEPIREWFKRHQNDSKEYEKVEALKRVGLVTKVIPLFFKEEYFKEDAQKEINNCVQPFYGFPYNVGNIHKPDEKDFLSSEERKKLWGDKKYKFKGYKAKVKSKKLTDKEKEEYRSYLEFQSWNKFERELRLVRNQDIVTWLLCTELIDKLKVEGLNVEELKKLRLKDIDTDTAKQEKNNILNRVMPMQLPVTVYEIDDSHNIVKDRPLHTVYIEETKTKLLKQGNFKALVKDRRLNGLFSFVDTSSEAELKSKPISKSVVEYELGEYQNARIEIIEDMLALEGALIKKDKNLPTDNFSDMLNGWLEGKDESDKARFQNDVKLLVAVRNAFSHNQYPMRNRIAFANINPFSLSSADTSEEKKLDIANQLKDKTHKTIEKIIEIEKPIETKE

SEQ ID NO: 2486 - protein, 1134 aa, Artificial; identical to SEQ ID NO: 1986
  Synthetic

SEQ ID NO: 2487 - protein, 1242 aa, Artificial; identical to SEQ ID NO: 2085
  Synthetic

SEQ ID NO: 2488 - protein, 905 aa, Artificial
  Synthetic
MKENTISKEKSAYTPHPKTELCIALNLARQRFVEVLRYVLDDDNITEENWKTPFQEKSQKQINSIELKQKWLLKQQQLLKELSIYLPFIKPENDNQIELKMLILIGNLLSQERNYYSHHFHKPIILNYDKDRKSDSVINKLTDLFAEAIDSKLSNNDNGFTKDDMSHLILNDDRKEETMPQWLNPYISKTEPEVTEYALFFKSENGFELSKRGAIFLASLFLDKKEATEILGGMIGFKKTDGNKFRLTREVFTYYCGKVVYDRKDTKNANVSLFFTMVSYLDKKPLEIPAKEGEETRVRDLFGYFATRYLLMDNSDFKIRQFTGKLLPKEREVKIKNDKIIPVSDSTHEKIYSEHLQQKFALTGNNIYFEYNNEKGVLGFKALSQLVFAKLLRNESGFENLYGDVKKKMIGYVKQYRAIMEQIKINTIKDDESLKKYLDGKLIKINEIPLAIRNSFSGGKEDDKIFTDRVLHRLKNKIKECDEKLEKLNFNEKEIRIYDIVTFMLQDYMNSIGRNKQRKPGKGLYERLHNNLTFYGRYRGKLIDTLKNKYADDFNYSILANAFEETDLHRAYERYLKGLKIWCEEKLAIIEKGDSESKRHHDANVLSFKLGLRQKSFESKSIKKHERTSSPEDISDMILDKPIPIPDNFISGIIRDKINLTKDGKKIEQLNTLIDIYIPEKAFDIGRNEKEKNIMLPDFYNEIERIYTKKEIKKIRLLRTHDKLIRLMLGEYAKGFFKERVELKLPDDKPVSELYESIVEMKFLEDKKIKFPFKKYNKVKRLLYDKRIENIIKYNIDASVKLFEFTDDSEKKFIIDDQKDLFKKSQKRLISASLSFEERFWKNNKPDDLLRKFTKSGNYISHNNILSEIGKDEKFGKMRGNALHNNVPEVKGYFKDAIKDYDKLL

SEQ ID NO: 2489 - protein, 1141 aa, Artificial
  Synthetic
MENNNNTKESTYTLDNKHFWAAFLNLARHNVYITVNHINKTLELKNKKDQEIIIDNDQDILAIKTLWENVNGDLNKTERLRELMTKHFPFLETAIYSKNKEDNEEVKQEKQAAAQSFKSLKHCLILFLEKLQEARNYYSHYKYSESTKEPILKKELLKKMYNIFDENIQLVKKDYQHNKDINPDEDFKHLDRTEEEFNYYFTKDKKGNITESGLLFFVSLFLEKKDAIWMQQKLRGFKDNREDKKKMTHEVFCRRRMLLPKLRLESTQTQDWILLDMLNELIRCPKSLYERLQGVDRKKFNVPFDPADEDYDAEQEPFKNTLVRHQDRFPYFALRYFDYNEIFTNLRFQIDLGTYHFSIYKKLIGGQTEDRHLTHKLYGFERIQEFAKQNRPDKWKAIVKDLDTYETSNERYISETTPHYHLENQKIGIRFRNGNNDIWPSLETNGENNEKSKYKLDKQYQAEAFLSVHELLPMMFYYLLLKKEDTDNGKKNKKVRTKKKDNKNNEQEKHKIEEIIENKIKDIYTLYDAFANGEINSKDELEKYCKGKDIEIVHLPKQMIAILENKSKDMAKKAKRKQKEMVKDTKKLLATLEKQTQREIEYDGRNVRLLKSGEIARWLVNDMMRFQPVQRDEKGEPLNNSKANSTEYQMLQRSLALYSKEEKPTRYFRQINLIESSNPHPFLKWTKWEECNNILSFYHRYLTKKIEFLNELKPEDWKKNQYFLKLKEPKTNRETLVQGWKNGFNLPRGIFTEPIRDWFKRHQNNSEEYKKVEDLNRVGLVTKVIPMFFKEEYFKEDAQKEINNCVQPFYSFPYNVGNIHKLEEKNFLHREERRELWGEKKDKFKGYKEKVKSKKLTDKEKEEYRSYLEFQSWNKFERELRLVRNQDIVTWLLCTELIDKLKVDELNIEELQKLRLKDIDTDTAKKEKNNILNKIMPMQLPVTVYEVDDSYKIVKDKPLHTIYIEEKETKLLKQGNFKALVKDRRLNGLFSFVDTSSEAESKSNPISKLRVEYELGEYQNARIETIKDMLLLEETLINKYKTLPTDKFSDMLNSWLKGKGEADKARFQNDVKLLTAVRNAFSHNQYPMRNAIEFANIIPYSLSSANNSKEKGLSIANQLKDKTHKIIGTIKEIEMQIENKK

SEQ ID NO: 2490 - protein, 1131 aa, Artificial
  Synthetic
MEKTIENQTQSKRTLNNDPQYFGAYLNMARLNIFNISNHLAEKFGLAVLDDEEKITTSFLVDKGNKEYKTRQSLVYSNLTRYMHIAKVFDFEKLPDDERDKAENYGKDFGNLTDTLKEIFKELNEFRNDYSHYYSTEKKDKRKTIVSDKLKNFLNINYTRAIKYTKSRFINVFSDNNFCLAEEAKHVENDNTITQDGIVFFTSMFLDRENAFQFISKIIGLKGTQTKAFKAKRETLMAFCVNLPHDKFVSENSEQQFSLELINELNKCPKTLYNVISENEKQHFLPKLDDEQIDNVLENSVPYTIDDYENYIENITKKVRNKNRFSYFALKFIDQKKLFKNWRFQIDLGKIVLDEYSKQLNGKDEKRTVTENTKAFGMLQDLNDEENVLNKINTGESKAKFDQFAPHYNFDVQNNKIGISKKETTAKFITKNTDNKIKSNLLQPLPEAFLSINELPKIILLEYLEQGKTEQLINDFIEINNSKILNKEFIKAIKLKLNDLDVFYKRSQGRKQKHAYLTKDKKYDNEKINELKNRKEKLNQILAEYNLNVKQIPTRILDYWLNIADVQAKNAISDRIKLMKRDCINRLKSMKKGKAPKIGEMATFIAKDIVDMIIDEEKKKKITSFYYDKMQECLALFADKEKKELFILICNNELKLNDDDGHPFFKNINFSNYKYTSEIYQKYLEEKGHKMVKEYNPRKENYVEKDKSWLEINFYKKEWNENAKKDLTVVKLPDDKSKIPFTLRQLEKEKSSFENWFKYVTNGKETTDKKKPVDLPVNLFDETLKELLKKELSKNNIEFKEEDNYNELFKIWWDKCRNDKTQKFYSAEREYTFEEEKLNFHINTKSKFEEYINPEFAEKVFRLKNQNREKDNISGRRLPPLKMKEVTKNMVKRIGNTEKEIRMLQEEDRLMLLMFEKLVDNNLKLKLENVDKLLNESIEINQSISGKLSFDDSGDNENKKDRAIICRNITETRKRKEYSVLKKYVFDRRLPELFEYFEEENIPIEKIKIELDTYSKAKDVVFDLIFDLERAIINKDENRIKELNKDKNGVIQTGNIQHKPYLFWLLEKNLITEQEFTFMNMVRNIFSHNQFPQKKTMELFIKNWNENEFAKQILNVYNQKNNNLIKSIKDI

SEQ ID NO: 2491 - protein, 1091 aa, Artificial
  Synthetic
MNNKHVFAAYLNQATHNYHLLLNDISQKIGKTMLEDENLQVHPVISLLADSKDARLSLRAINSFNKGFGFIEKLQRRIMAYRYLSAKKSEPEDNAKPKKHIKKSQEYSLLPADYAYQLKSLASTLNDERNHATHAYLQPVKPDANLIEFLYDIFDMAVRVCKIRHQIDENDLKHLRRKMRNPDKSKDAPKSIFDPKFKYPFLDKQGQFTDHGRAFLTCLFLNKQDSYQFLKQLSGFKSSNSNTHKATLRVFSCFSIRLPNERINSTTDAQTLGLDMLNELARCPSLLFPVLPKIEKTIYEIPVEVNEQNNSDDGNDLLFIRHDERFISLMMRYFDETNAFEKLRFHIDLGDFYFAAYLKTLYEDVQDTRRLKQKLHTFARLNEVENTAIPAEWQTLIRDNREITETDLNPYLVNTTPHYHLLDDNIALKIVGPNTVIYPKLTPHDSIENRYKSPENQQPDFWLSKHEMLHLAFYQLLRQKHTQLNRGQIEDTVFAQYKQALHHCLDQLAENPERYTSKEAIHDLAQQYTYSPLKQAMMLDEIPKVVRDALIKKDSRYQNSALTAISTLINIGEKRLDALKRSTSTDKKDKSTRPGDKKQRPVKAGLMGEHLAEDIVRFQPAQDDSDNKGKPTSLIVAELQARLAFYGRDKAQLPALCKAMKLIDNVDTSKNHPFLAAVLKENHAGIIGFYQSYYRARAHYLQRVEADITQNTSHISRYHWLKTPTRDKPDFSIKSHVKKLKAQPVNLPRGLFLPYIKHALLQLNHDTLTPAIEKSATLNTSYLIALYYQHVLQDKPQAVYEKPREYKIIAQTFDNRTNQFKPLPAHPTQTQQAYGTTNALHTKIKQHLQAKYPDEDKTQQLAAYRKFEQYEKNIRQIRTQDQVLFLACQQLLALNHGLNQEISQLKLHQLDKTLLDKQTHYQLHIHGKTISQAQIRIKKIGEFRRFLKDRRLKGLLSYYGQHDIPREVIAKELEEYQHCRLKVFERLHAFEQFSYQHFGLDAQYQGSEHGQLLSAYFKANPQANHEAQMHCMLVLRNAFAHNQYPMPQSKYPLANAMLTQAQQHLTQSGAPQVAQYLLQQVEAFYPNPITT

SEQ ID NO: 2492 - protein, 1003 aa, Artificial
  Synthetic
MGAIENKHIFAAYANLAIDGLIKTLNFIAKKLDTQKQLSSWDIKHVITLIDSIFDQNPQNNLEQVVEGYLPWIKPIIEMKTPKKGERQSDKLCIEYKTIITAFASLLNDVRNYYTHYYHDPICIYPGGYDIPSSLNCIYDSAINIIKERFQAEEKEIEHLRRYTRKKGRVVLKTEDDHFYYTLVNNNDLSEKGYAFFISMFLERKYSYLFLKKLSGFKRGDSLQYRLTLEVFTALSTKPPVERLRTTKDTKQDRALDILNELSRIPIELYQTLEPKYREMYNETLQPTDAEDPYGLPDRSRIRFRSRFEAFALHFLDKQADFKEIGFYTYLGNYFHNGYQKTRVDRETKDRYINFQLAGFCKNIQDISAKKLSEALNVKSIDISTDSIPDINSFEPYLVQSTPHYIVNGNNIGIKVLPEGKDTYPTIDEKGAKMPIADFWLSKYELPAMLFYTYLRNNNIHKSHCPLSVKDIIERSIHKSTKQKHPEERSELMLRRVMKAIFWTDSKLNEVERIKSQKSAFGKRQHEILKAGRIAETLVRDMLWLQPSKNNGRDKVTEPNFQAIQVSLAYFGIRRNDLTEIFTRAGLINSSNPHPFLAQIGTNYTSLIEFYIAYLKERKVYFSRIQKKILQGKLNIQCHPLRDLQREPNKPQDKEEAIFLPRGLFNEAIINCLKKSKLKQLIESPTREKSPALNVSYLIQNYFRTYFEDQSQEFYAQPRNYRLFDKLSPNKGKSKSYLSLEQRIKKMEELRPSKIPVAEANKLLEKEDRLYRKNYNEICDNESIIRLYQIQDILLFMMTKEYLPSDLYNRINKYKLENVKGILNERVSYLIDLNPLKIQGEDIKIKDYGKLFYIHHDTRISSLNKVLSKVKRNNSISSSVKIQPYENYKRECLDFEEAQIQIIPIIHSFEIAMVSMFPDLKKATPGNYYDFNELITEYEKRTKQKIDSSFRIKTRNMFLHDKYEAECIKEISDDFVYAKKIIAEFKMKIENIKLEDLSNDSSA

SEQ ID NO: 2493 - protein, 1402 aa, Artificial; identical to SEQ ID NO: 1812
  Synthetic

SEQ ID NO: 2494 - protein, 1162 aa, Artificial
  Synthetic
METAENLKSYNCRNSFKRIFDFKGEIAPIAEKACRNFEVKAKNKVNREQRLHYFAIGHTFKHIDTERQFEKALNEELREKRPTRFLALQAFDRSFCDELEKIIIDKDNKKKYQGIIPDIRNINSHYVHDFQKIKLDTLSCRMISFIKESFELAITQTYLKEKEISYQQLVEQENVDKALVTFMHDKFYPLDDKGTNLPEEVQRSLDEYKAIRDNFKSLSKEDAIDSLLFVEVDNDFDWKLYGVHPVFKITTGKYLSFYACLFLLSMFLYKSEAEKLIGKIKGFKKQEKTEEKSKRRIFSFFSKKFSSQDIDSEENHLVKFRDLIQYLNHYPLAWNKELELESQHPAMTDKLKAKIIEMEINRSFPTYSNNERFHVFAKYQIWGKKYFGKSIEQEYIKQSFTEKEIEAFNYEIDASPELKDANEKLDKLKAVTGLYGAKNDRNTKEIKKTEGIINRITREKATNPVKEKLKNRIEKNLLFVSYGRNQDRFMNFAIRYLAETKYFGEDAQFKTYRFSSTEEQDDELLKLKETQSKKEYDKLKFHQGKPVHFTTFKDHLEHYESWDTPFVIENNAVQVKLTFATGIKKIVSVQRGLMVYFLEDALTKESDKIENAGKSLLEDYYAFHQKEFSQCKSVLEQSSSISSKEKTIFKKLLPKRLLYHYSPAVQNGKPQNTLSLLLERATNAEKRYDDLLTKAKAEGNFDDFVKRNKGKQFKLQFVRKAWHLMFFKESYMQQAAFSGHHKRFHIAKDEFNDFSRFMFAFDEVPHYKAYLTEMLEKKGFFDNPGFKTLFRDGVSLDDLYLKTKKAYEAWLSEQDIRVQEEDKYALGNYEHFFGDEMFYINISHFINYLDAKSRLKRDEQGLMKFTALENVKFLIPEYYYTDKLEKAEYKTCGKLYNKLKSSKLEDALLFEMAMRYLKIDKQIVQKAKSHATEILKQDVEFDIRDLNSNHLYHLMVPFNKIESYIGLIKLKEEQEESKFKTSFLANIVSYIELVKEKKEIKGIYKTFSTNPAKRVLTFDELNKIDGHLISSSVKFTKLALTLEQYYVSERMLSIIADHRIEYDEIKDLKKYYNTKTRNKAFHFGVPENSYDNIISKIEQEFVRNEIKSTQSHKFEELSKPLKSICSLFMDTIHNNYFDPRERDGKKKHKDAEQKYFDTVISK

SEQ ID NO: 2495 - protein, 1162 aa, Artificial; identical to SEQ ID NO: 2494
  Synthetic

SEQ ID NO: 2496 - protein, 1160 aa, Artificial; identical to SEQ ID NO: 2416
  Synthetic

SEQ ID NO: 2497 - protein, 1144 aa, Artificial; identical to SEQ ID NO: 2417
  Synthetic

SEQ ID NO: 2498 - protein, 997 aa, Artificial
  Synthetic
MYEHRKPHDPSWPALTMADKTAELCLFYNLALNRVNDLVRKYEKDDTLHIEDVNWETFGGFRNVSTYLHLQVFMWKEPLSASFTTLSTADKKRIHELLRKLVDLRNYQSHYYHDASVLKFPQELIDFIYSRYANARNALELKYPEFVTWFHDLNEDKVIFKNSKGEEREDVYRHFYFFNANGNIEPEGKNFFLSFFLLKGEMSKFLKKRSRCKRDNGEKYQVKTRLYTYYCHRDGSNRFFLEGKEEYMDTEERLRRQGNTLLNYLKSRPLVDLKYLPPAPPPQLLSKKEVEERKNRAESQAEEEKTYIRRTDKFASLVVRYFMDRAFLGYEQEPCFYWHVKSLDLEEVQKQKQENRVYDAEGAYYYQKESRWSPHFVPGEFPVFVNGHIKFRLGPEGMEYAISTGELKNMLYLLLNSPRKNMTEIQDALLRYGTQFSNAMRELTTEHNIRYEAYPLVFEKGRDSVLLSKMHRKVLDKEKFDAAIYTAALEKALDSRLRWVEYNCKPEVYTLYTRNRMNRILLSCFNWYLPDDAKLKPTEVNKLSIYNFVSDNSYTSDATRESIVVGIQQKLNRAQFGAFALLRTASGLQDAYLKMLGKLRDSLLVEKQQLLAGTHGHVLKLGARLGLALPGTDVSRNGTDRMQELKQTIRSKPILVRNGFFKQYFMPEEPAAARRNSISARLWKNRLLTQNLVQGQYKLQNQSEFINHPEYGLADIAPDILALVGDHFDACMMEHTQGSRQTFAQLVDRFEALYTGSKSPEKRKQIADAINYSRVLKEIQAQDALLLQVFFEYHNRKLPLNRRELKYKPLSTLFEEEYELQIDASYKVQLKYKQLDDLSTHWNRTKIEQLFKNEAYWNLAIIAELDAKGKKSMQEKIRIVMDRVWNDSYHYIKAFLHIEKEAVEIQKKEGIPATELISRSQAIRSPGLPRIEGKVLLSTFAGLDEGKINRFIQLRNAAFHAGIPEECVKYEKVKDDLYAATGVKKPVVKPKKYEKKK

SEQ ID NO: 2499 - protein, 1146 aa, Artificial
  Synthetic
MCEPVQVRKQVTYHSGNWGDKHYFAPFLNLSVSNFTSVMEALALQLGQAPENREATVSDRLASLFHKQLSTADWKKRIKLISQYFPVVRYLNGMLIEKEINGIREKANTGSRALIRKFTCEEAMRTAFIHNFSSLIITLDRLRSYYTYYRHDPITLHPDPHSFYRLMDDLFTDVARDVFVKRVRFSSTKEALKQNLTLDFLEMVSEKRDQLHRKDQQLGSTKTPERNWRMLSNAVIYDAFSPMIGKNISMGISSSPYRAEPAGTGDPTSTASLLFLCSCFLSTHQMERMKQGVHMFHAKGDDNDSKLKLMALHWVYNHLTFRGLKQNTVHHFESLLVRVMDELSKVPDPLYRVTKDKRAYFLAINPCCAHHLRDSNGVNHDPAIDHTVRKRTTERFPSLALRYLDEVVGFKNLRFQVYVGDYIHDQRVKTRDLSGRQIHRTVKERVNVFGRLSRVIKAKRDLFCGTGADGTGSQLWEPFQEPQYNITEGGIYIHLKLEKLGYPREAREMAGRHPGDSCREKRIPKREIVAHILAGDQGYQGQPTALLSLNELPALLYELLVNKKSPEEIEQTLAGKVVSQYQKIRDFSGTPGQLQDAQLPDNLRKAAKKDQKNLKKLKNHIARDWQAVIDQREQLRDMKRQYRQGKRKRLLSIYEIHDMAQWIARDIKNLMPPQTKAQWKLYDQKELQNGLANYQSGRLEVRTLLESKWNMTSEGPFWSRELRNLFKNKDLWSFLLNYLHLKSSVLKQLLDTIELTRNNKKLLKQALEYIFILYKPRIYTINSMDKEKEKLLNQPVVLPRGLFDPKPSYIKGTSLENNPQRFASWLVYLRKEAKTDHQKFYDLERDYTKAYNVIWDKKKYKHLNHFIYKTDKAIRKCMQNDVVLKLIANDLLKNIRHNNTDNHPVNISLSEMFLPIEEVNTLKQKAWSQHKGKPVDIKHLLCQPEEVYNISFLKCFDHICFRELPLKDFDYAQKLAGEDRVKRLESWHNRPWTLRELEEELLIGPDAYETIQQYEFFKIMHDLERGVFLNNNHKDAFSIQQLKHSFTSLIVNGVLKDHPRINESDYAFLTGNNADVDYDLVRNSKPMVRKAFFLLTLHGAFAVNRLPGKPVFELMIEDYKHLNTSTYSRFLMNVTRKIVDELVGDA

SEQ ID NO: 2500 - protein, 1185 aa, Artificial
  Synthetic
MEINEKIVNKGTNVYKTLENDPQYFGGYLNMARHNIFLIINQLTEVFDYLKSDEGSKFSVLSDDEQITSPKHILSQIFDPSIKKFEQERVRVYRYLVKRHHLPFLKIFDPENVNLKDDYSGVDYHRLHRFILLSLKLLDDLRNSYSHYLAIDDKGNRIVNRNNDVEPSLKQDIKLLFKNAPEYSFLRHQETHSEDDYKHLEKYLIFEKNTGLFTDQGFYFFINLFLERNQAVKFLKRFKGFKNETTPPFRATIKAFTSYALKLPDVRLGNENPRFSLLMDMLTELNKCPRELFNHLTEKDKKEFEPLLNDAEKRNVILNSTNYEAISDDEIDQTINELSALKRYNDRFPYFALRFLDETDAFKNIRFQITIGKLIVNRYDKEIAGVVQDRRLIKTIHAFGKLSDFADNETKVLAALKKDIPGDDSIRFEQFAPHYNTNNNKIAFYIFDPNDDKLKYPSVFENKAANTDAHNKPTGFISLHDLPKLLLLAHLVPNEPEQLICDFIRNTNPELLDKQLLDTIRQRAHYNPSTFTKRIPNEKVLIGKKGVQYLNKKSEDDLLKELNVSKAELLELDKQSLLKKTKNKKQFEHIAQIKYQHLLSERIEELKKHLPGDLKFDMLPARILDYLMKIEDADTVKQIHHKIKAIRDEAKQLTKEIEKPQSERQIKLGELVTFIARDIIKMVVSKEVKDKITTPYYNKLQNKIAYFSLNQKELIAICEELNLFNNREGHVFLSKNGILNSSGIIDFALYYLKAKDRWIESTLLKKGKTGGYLLPHDKSIPLSLQKINTEVNTFDFHQWLKAKSQMPVDLPRSLFDEQLGKILKGRLTTKGVSYNEGDTFSVLLGKYLDNDSQAFYHYTRSYRINKELVELQIQGKTGKDLKAKYRIPVEKNEKLIRFTQTKDRILKLLCDQLLTLDNTIGLQGGFNLTNIHPNARYNPLKHPATFQQSIIRKGNAVYCNIIAKDTEDQIKSVERFELLQTEAQREAYPDQKWYQWTIKDFGRFKRFVKDRRIPDLTSYFQNKDIPFDLLEFQIREYNKYREAIFDASFKLEKHISHFDFEGIKRLELNNNRLLKTHRPKDFHDIQFHIYLEWLDIKHIKYNKELVNECRNKYAHSQCPQLKEIPLISTEQMMDFEAHKHIKDYKHGSGISIPEKICSLYTMEIDKIIENINRLQKKNNTTMEGI

SEQ ID NO: 2501 - protein, 1254 aa, Artificial; identical to SEQ ID NO: 1332
  Synthetic

SEQ ID NO: 2502 - protein, 1165 aa, Artificial
  Synthetic
MTTDQFSGKGIKYTLEDKFFWAAVFNLARHNAFITINHINQQLGIKPIENDQDINSIKISWNASFDSENLERKAKLYALINKHFPFLIASSYGQRSYEVMSSIPIGKNGRTRLKSNVERKTEQADSLDLKMLLDLLIVFIEKLRDFRNYYSHYKHSKQNSLPKLDVGLMNRLYDIFDSNVRMVKQDHKHNTKIDPRKDFDHLIRKSKSGVNPKFKSHFANGEEITEAGLLFFASIFLEKKDAIWIQRKIFGFKGSNQTFMQMTNEVFCRTRILLPKLRLESNYDNDQLLLEMLGELAKCPKTFFDRLSENDRQKFMIPIEIYDFENDESIDNDPFKNILVRHHNRFSYFALRYFDLNNVFKDLRFQIDLGNYHFSIYDKKIGDQIEKRHLTRNLFSFGRIQSFDEVNLPLEWKNLVRDLDYYESSDLPFISKTTPHYHLVSNKIGLKFANYDSKWPGLEITDAHERKAKYVYDNQFVADGFLSVYELVPMMFYYLLTEDGQKVEGVLKSTKEKAYKIFEEFQEYRLNSIQDLKNLTSQTNIHPGQLPKRLINILNDTEKNLENEARRKISILIENTEKRIKQLHEQTNQKIRIGKPNNGLLKPGKIADWLIKDLMRFQPVAFDQFNQPLNRSKANSTEYQLLQKTFALYGSEKDRLPAYLRQLNLVGSNNPHAFLSEFNWANQSNLLSFYEAYLTARLIFLQKLNVEKWMEYQYFLLLRTKKTDRNKLVAGWKNGFNFPRGLFTQPIKEWFAKFDSGISKEIENYESTGLIARVIPLFFEKKYNDSAQAFYSFDFNIGNPEKPKDGVFLSKSQREDLWKITKSKLRLDKDSPDLENTIAKIEKAFEDINYSNIDWNIRRERLHKLIHELNIQDKVLPELEKRNSNLKLKTKISEAASEKFRETFNFRKWQGFEKELRLYKNQDMLIWLLCRNLRTDSQLINLNINNLYLKNIDTDVHSTQSLNILNRVLPMKLSIPIYPTDEKGNVFKKMTPTVVVQIEEKETKVLKHGNFKALVKDRRLNNLFTFIDAGPADFGNFSISKKRIEAELAKYQVSRIEVFKITLEIEKNIVDAYPNLPTDNFRELLGEWLNIKVNQSELRCFTQILVSIRNAFAHNQYPRYCDEKFGSINRFNISNPNTAESNGLNIAIQLLDLATTIKSLIIKEL

SEQ ID NO: 2503 - protein, 1242 aa, Artificial; identical to SEQ ID NO: 2085
  Synthetic

SEQ ID NO: 2504 - protein, 1029 aa, Artificial; identical to SEQ ID NO: 2444
  Synthetic

SEQ ID NO: 2505 - protein, 1029 aa, Artificial; identical to SEQ ID NO: 2444
  Synthetic

SEQ ID NO: 2506 - protein, 1129 aa, Artificial; identical to SEQ ID NO: 2424
  Synthetic

SEQ ID NO: 2507 - protein, 1141 aa, Artificial; identical to SEQ ID NO: 1789
  Synthetic

SEQ ID NO: 2508 - protein, 1152 aa, Artificial; identical to SEQ ID NO: 2320
  Synthetic

SEQ ID NO: 2509 - protein, 1147 aa, Artificial
  Synthetic
MTEQNEKPYNGTYYTLEDKHFWAAFFNLARHNAYITLTHIDRQLAYSKADITNDEDILFFKGQWKNLDNDLERKARLRSLILKHFSFLEGAAYGKKLFESQSSGNKSSKNKELTKKEKEELQANALSLDNLKSILFDFLQKLKDFRNYYSHYRHPESSELPLFDGNMLQRLHNVFDVSVQRVKRDHEHNDKVDPHRHFNHLVRKGKKDRYGNNDNPFFKHHFVDREEKVTEAGLLFFASLFLEKRDAIWMQKKIRGFKGGTETYQQMTNEVFCRSRISLPKLKLESLRTDDWMLLDMLNELVRCPKSLYDRLREEDRARFRVPVDILSDEDDTDGAEEDPFKNTLVRHQDRFPYFALRYFDLKKVFTSLRFHIDLGTYHFAIYKKNIGEQPEDRHLTRNLYGFGRIQDFAEEHRPEEWKRLVRDLDYFETGDKPYISQTTPHYHIEKGKIGLRFVPEGQHLWPSPEVGATRTGRSKYAQDKRFTAEAFLSVHELMPMMFYYFLLREKYSEEASAERVQGRIKRVIEDVYAVYDAFARDEIDTLDRLDACLADKGIRRGHLPKQMIAILSQEHKDMEEKVRKKLQEMIADTDHRLDMLDRQTDRKIRIGRKNAGLPKSGIIADWLVRDMMRFQPVAKDTSGKPLNNSKANSTEYRMLQRALALFGGEKERLTPYFRQMNLTGGNNPHPFLHETRWESHTNILSFYRSYLKARKAFLQSIGRSDRVENHRFLLLKEPKTDRQTLVAGWKGEFHLPRGIFTEAVRDCLIEMGYDEVGSYKEVGFMAKAVLLYFERACKDRVQPFYDYPFNVGNSLKPKKGRFLSKEKRAKEWESGKERFRDLEAWSHSAARRIEDAFVGIENASRENKTKIEQLLQDLSLWETFESKLKVKADKINIAKLKKEILEAKEHPYLDFKSWQKFERELRLVKNQDVITWMMCRDLMEENKVEGLDTGTLYLKDIRTDVQEQGSLNVLNHVKPMRLPVVVYRADSRGHVHKEQAPLATVYIEERDTKLLKQGNFKSFVKDRRLNGLFSFVDTGGLAMEQYPISKLRVEYELAKYQTARVCAFEQTLELEESLLTRYPHLPDENFRKMLESWSDPLLDKWPDLQREVRLLIAVRNAFSHNQYPMYDETIFSSIRKYDPSSPDAIE

SEQ ID NO: 2510 - protein, 1162 aa, Artificial; identical to SEQ ID NO: 1393
  Synthetic

SEQ ID NO: 2511 - protein, 1184 aa, Artificial
  Synthetic
MERIFGHCCPHHDSVCFVRFLGTMVSNQDGRENVLDILYIADRTRKLKPMNTVPASENKGQSRTVEDDPQYFGLYLNLARENLIEVESHVRIKFGKKKLNEESLKQSLLCDHLLSVDRWTKVYGHSRRYLPFLHYFDPDSQIEKDHDSKTGVDPDSAQRLIRELYSLLDFLRNDFSHNRLDGTTFEHLEVSPDISSFITGTYSLACGRAQSRFADFFKLDDFVLAKNRKEQLISVADGKECLTVSGLAFFICLFLDREQASGMLSRIRGFKRTDENWARAVHETFCDLCIRHPHDRLESSNTKEALLLDMLNELNRCPRILYDMLPEEERAQFLPALDENSMNNLSENSLNEESRLLWDGSSDWAEALTKRIRHQDRFPYLMLRFIEEMDLLKGIRFRVDLGEIELDSYSKKVGRNGEYDRTITDHALAFGKLSDFQNEEEVSRMISGEASYPVRFSLFAPRYAIYDNKIGYCHTSDPVYPKSKTGEKRALSNPQSMGFISVHDLRKLLLMELLCEGSFSRMQSDFLRKANRILDETAEGKLQFSALFPEMRHRFIPPQNPKSKDRREKAETTLEKYKQEIKGRKDKLNSQLLSAFDMDQRQLPSRLLDEWMNIRPASHSVKLRTYVKQLNEDCRLRLRKFRKDGDGKARAIPLVGEMATFLSQDIVRMIISEETKKLITSAYYNEMQRSLAQYAGEENRRQFRAIVAELRLLDPSSGHPFLSATMETAHRYTEDFYKCYLEKKREWLAKTFYRPEQDENTKRRISVFFVPDGEARKLLPLLIRRRMKEQNDLQDWIRNKQAHPIDLPSHLFDSKVMELLKVKDGKKKWNEAFKDWWSTKYPDGMQPFYGLRRELNIHGKSVSYIPSDGKKFADCYTHLMEKTVRDKKRELRTAGKPVPPDLAADIKRSFHRAVNEREFMLRLVQEDDRLMLMAINKMMTDREEDILPGLKNIDSILDEENQFSLAVHAKVLEKEGEGGDNSLSLVPATIEIKSKRKDWSKYIRYRYDRRVPGLMSHFPEHKATLDEVKTLLGEYDRCRIKIFDWAFALEGAIMSDRDLKPYLHESSSREGKSGEHSTLVKMLVEKKGCLTPDESQYLILIRNKAAHNQFPCAAEIPLIYRDVSAKVGSIEGSSAKDLPEGSSLVDSLWKKYEMIIRKILPILDPENRFFGKLLNNMSQPINDL

SEQ ID NO: 2512 - protein, 1253 aa, Artificial; identical to SEQ ID NO: 1347
  Synthetic

SEQ ID NO: 2513 - protein, 1145 aa, Artificial; identical to SEQ ID NO: 1631
  Synthetic

SEQ ID NO: 2514 - protein, 1132 aa, Artificial; identical to SEQ ID NO: 2472
  Synthetic

SEQ ID NO: 2515 - protein, 1029 aa, Artificial; identical to SEQ ID NO: 2444
  Synthetic

SEQ ID NO: 2516 - protein, 1124 aa, Artificial
  Synthetic
MKIPQIIENNKHLFGAYSTMALSNIRNILDHIATLADIENDFYSDSDSYWYHPCIKIIDPRNNCTDAAKADFVIEKIKSHFPFVPIVAEAQRQSDILRAKKQLDIAVRNRDYQKQEELKHRQKSLLSVTNADIYRVLNNMLWVLANYRNQTVHYLISDIKFEDGSDFLNYNEQPLSRMLNNYFTIALRDTANKYSYSPEALSFIQSSRYKTENRRKILDTNFFLSIQHNNSDTNPKNLHLSGVGVALLICLFLEKKYVNVFLQKLPIYGPYKKQSMEANIIRQSFSIHTVKLPKERIVSEKSDFTIALDMLNELKRCPKQLFSTLSYADQNAFRIVSSDMSDVLQVRHTDRFAQLSLEYIDRRELFSDIRFHLNMGKLRYLKTADKHCIDGVSRVRVLEGKINAFGRIHEFEARRKEQGFVEWHEQTDRLIKTNKNIEIRDFEHVKRDDATPDSYPYIIDTYTHYLLENNKIEMRFGDYLPKLVKVDDQKWTVYNEMPTCCMSALELPAMMFHMMLCGSEATEHLIKAEVEKYKKLFGAMANGTLSKENIGNFGIAMEDLPKKVIDCVNRKKSGKSFVKQIKKEIAEMLADTNLRIVRLKSDKRSVASTQNKMGKRGFRSIQPGKLADWLAADIVKHQPSLRTGDDYGTDRITGMNYRVMQSTIATFNAATPEHSLDELKRVFSAAQLIQCQEREHPFLQKALNRNPQNTIDFYEFYLQAKRAYYQSLRQSIENGEDVKLPYLNPDRNKWVRRGASFYSTMGDIYLEDMPIELPRQMFDKEIKKALAQLPSMKGVDMKQSNVTFLIAEYLKRELKDDFQPFYKWNRNYRFTDMMICEENCDTKALASKFIPLELREEIWEKRGELKDAYKRWAFGRLNKNPDIKRLSPAEKDELLEKRIAKCRNEYQKSEKIIRRYKVQDVLMFMMVKSMFAQGVFTAESKEFALSTITPDAERGILSEVVPIDFKFSIDGKTYTIHSNGMKIKNYGDFYKLINDKRMKSLLNIVTHSTIEKDLLEKEFSTYDDKRPEAVEIIFEFEKAAYEKHPELKELLTPERKFDFRALLEELQAKSDLSQIDARYLSQIRNAFNHNAYPRNLKITSNIPEIAQEMVNIFRITDPYKKGKK

SEQ ID NO: 2517 - protein, 1107 aa, Artificial; identical to SEQ ID NO: 2341
  Synthetic

SEQ ID NO: 2518 - protein, 944 aa, Artificial
  Synthetic
MKANNQIVKGISYDHLKPDDKHYFGGFLNLAQNNIDGVIQEFTMRLNLKYDPENKNQSLFSYFDINASFTDWERGVNILKEYWPVMEFIDRPATDKQFESEKPENREAAKRKYFIATLRILLKSIKELRHYYTHYYHPPVQLSEDLFRFLDHTLLYTAFDVKKTKMKDDKTRQLLNQNLSLELEKLKKLKVEELKKKKEKGIKVNLQDEKGILNAIYNDAFAHIITKEKDSDKDKLETRYKSILPQDEAAETGINISISGLIFLLSLFLSRKEIEQLKSNIEGYKGKVLNIETEVDRKHNSLKYMATHWVFSILAFKGLKQRLTNSFEKESLLIQMMDELNKVPDELYQTLSETAKKEFLEDINEYVSEGDDNEKATYVVHPVIRKRYESKFNYFAIRYLDEFAQFPTLKFQIFVGQYLHDNRPKTLASNGMTAQRMIKEKINLFGNLSEVTKHKSDFFEKESAAQGWEFFPNPSYNWAGNNIPVYIDMIGKEGKAKEIQVQINKYRKQLNPAPQRDKRISKKEIIEQLYKEKVVYGDPTLMLSANELMALLYELIVNGKSGAELENKIVEQIIARYEQIEAYDPTTQQLPTNQMPHKLQKSRKDSKVTDTDKLLKTIDKEIDEGNKKLELIACHRKEWEEAEQRKKSGKRNNPGTKSRKHLFYASEMGEEATWIANDLKRFMPKPARAEWKGTHHSELQRLLAFYSTQRLEAWQLVESVWTANTHSFWEENFKEAFYKPEFENFYGAYIKIRTKILTTCRNFVENNPEVTINKHTRKEWDKVFTLFDKRLFRINTTDEQKKQLLAKPFAFPRGLFDDKPTFLPGSKPNENPERFAAWYSYGYIYSGKFQSFYDMPRDYSDWYKKLKEDGKLPPLDKKTEQEKILRFRMDCDLNIKYIRFQDIYVKLMVDSLYKAVFGQQPEFDLSHLYDTRYERYENNTIAQR

SEQ ID NO: 2519 - protein, 1003 aa, Artificial; identical to SEQ ID NO: 1723
  Synthetic

SEQ ID NO: 2520 - protein, 1153 aa, Artificial; identical to SEQ ID NO: 2296
  Synthetic

SEQ ID NO: 2521 - protein, 1090 aa, Artificial; identical to SEQ ID NO: 2227
  Synthetic

SEQ ID NO: 2522 - protein, 1098 aa, Artificial
  Synthetic
MNNEQNLEQRIFAQAKNIRDDKAYFGAHLNLARHNAFIILHHINQRLGFIDQNVQDDAQFKKFKCLTILKQSSKPDLIAKSLDLIRFHFPFLQILTDKLSDIRSSNGERKILTPQEEGEIIESLLTDLNGYRNEYCHGENKSHVPDSYLIKNLKSIYDASLRMVKERFKLEPHKIKHLERNNKDGEKLNFKYALSNNSSISEKGLVFFINLFLEVKDSYSFIKKIEGFKNAGTNSLNATTYCFTIQHVRLPNPKITSQEYTKEELLLRMMNYLEKVPDQIFKTLSPADQENCKSNVDVFETPIEGDLIEKSLHKRYRDQFPEFALNYIDYYKLFPNIRFQINLGKFIFSVKDKEILGETRKRRQIQMLRGFGQIQDYQNKKNIPEIWQSLINKSHEIPEDFPDPYINDMEPHYHIENNNIYFKFMEPDTTHWPRIDARIENQNNINAHPRPRLLQADGILSVYELAPLLFYEMIRSDKSKSAETILSIQKSNIERLLNDIKSGELTKVALDKIPNPYSPSTKKFNTAKQVILKEKIEKRKIELNEKLKKYKLALDDLPKMILYYLLNIEHEDISLKVIPIIKSMQVETNHLLNKLQHNLEKRNKPGEKGSKLILSGELASFLAQDMLALQAKSDNSRDKANSQEYQHLQYKLAYYSLYIDEFKSIFKKLNLIDSDKFSHPFLSKLTKIFPNIIQFYEWYLNERKKWLMDIETKPEEALKFIKLKKSVNITGEQLVDQFLVKTNGNQAGIPYNFPRGIFDDAIKSELEKNDKMKAIISNTKRVNSHFLINRYIEHEKNNKSQSFYEWKRNYEIYDRLEDDRKKMFDPLPKKYKTNDELGHGLKKHREYIKTLAERDVIKRGNSNLSKEKLTTLFKNYEENEKEIRLQKTQDQVLYLMIVKSISDNFSPGEFNNIALQDFVPNAINSPLAKRIPFEIKYGEKKIFQEEIQIKKIGEFHRFLKDRRLINLMAYIKKERISRSELEYELGEYQKQRILFLEKVLEFEQKLYAYDKFYFDNIIAENNRVEHWQYLRYFEEKFVLTPEQKEQSSNLRNKFSHNEYPEIMYFEDVCSGEEKIGVASQLAQIGIKLYEDMVSQIQK

SEQ ID NO: 2523 - protein, 1128 aa, Artificial; identical to SEQ ID NO: 2278
  Synthetic

SEQ ID NO: 2524 - protein, 1121 aa, Artificial
  Synthetic
MEDDKKTTESISYELEDKHFWAAFLNLARHNVYITINHINKLLEIREIDNDEKVLDIKALWQKGNKDLNQKARLRELMTKHFPFLETAIYTKNKEDKEEVKQEKQAEAQSLESLKDCLFLFLEKLQEARNYYSHYKYSEFSKEPEFKEELLEKMYNIFDANIQLVINDYQHNKDIDPEEDFKHLDTIEDSSYSFTVKDNKEKITASGLLFFVSLFLEKKDAIWMQQKLRGFKDNRESKKKMTHEVFCRSRMLLPKLRLKSTQTQDWILLDMLNELIRCPKSLYERLQGKYREKFKVPFDPADEDYDAEQEPFKNTLVRHQDRFPYFALRYFDYNEIFTNLRFQIDLGTYHFSIYKKLIGGQKEDRHLTHKLYGFERIQEFDKQNRPDEWKALVKDLDTYETSNERYISETTPHYHLENQKIGIRNKKKKKKKNIWPSLEINTTVNERSKYNLGKSFKAEAFLSVHELLPMMFYYLLLTKEEPNNKEINASKVEGIIEKKIRDMYKLYDAFANGEINSKEELKEYLKGKDIEIVHLPKQMIAILESKPKDMVEEAKRKQKEMVKDTKKLLATLEKQTQGEIEDGGRNIRLLKSGEIARWLVNDMMRFQPVQKDNEGNPLNNSKANSTEYQMLQRSLALYNKEEKPTRYFRQVNLINSSNPHPFLKWTKWEECNNILSFYRNYLTKKIEFLNKLKPEDWEKNQYFLKLKEPKTNRETLVQGWKNGFNLPRGIFTEPIREWFKRHQNDSKEYEKVEALKRVGLVTKVIPLFFKEEYFKEDAQKEINNCVQPFYGFPYNVGNIHKPKEEDFLHREERIELWDKKKDKFKGYKAKKKFKEMTDKEKEEHRSYLEFKSWNQFERELRLVRNQDIVTWLLCMELIDKLKVEGLNVEELQKLRLKDIDTDTAKQEKNNILNRVMPMQLPVTVYEIDDSHNIVKDRPLHTVYIEETKTKLLKQGNFKALVKDRRLNGLFSFVDTSSEAELKSNPISKSVVEYELGEYQNARIETIKDMLLLEKTLIKKDKNLPTDNFSDMLNGWLEGKDKADKTRFQNDVDLLVAVRNAFSHNQYPMRNRIAFANINPFSLSSANTSEEKKLDIANQLKDKTHKTIKKIIEIEKPIETKE

SEQ ID NO: 2525 - protein, 1196 aa, Artificial; identical to SEQ ID NO: 2258
  Synthetic

SEQ ID NO: 2526 - protein, 1197 aa, Artificial
  Synthetic
MSNNFRTQSTHRPPHLQKTTPPSKLETWTGGKRPELAVFYNVAYFRIAGMLSHYLNKTHEHDKDALELLFKKVVSGEDQLSDAVCSKLRDYLWKSYTTQQENSSGYALNQEDRDLVLLMLRKLQDVRNFQSHVWHDNRALVFPMELCAHIERMHEAAIMAQGIDMASAVVTYHDNYKVYDSKMRFNQGRKDLQAFFDRWDTDHYITQEGRIFFLSFFLTRSEMARLLQQSKGSKRNDKPEFKIKHAIYRYFTHRDAASRNHYGLHDNILSELPNEQRAQIMAARQVYKIINYLNDIPYRSHDPALFPLFLADGTEAIDEHGLLQWKQETDFLPEITAKARKVPALSETERFGVRGRKATKAIDDRTLEVERGFELQWVGNDRYNFTIPTRHFHRCALDAIRNGDKGATFADRLKVFIGDREHLLDRLHKEFTILPLRQADFTLEKELDEYYKFRLRGDGKLTKSLGQWLDAIDRQNVRKYPEALAKLKEQLRNSPIILTYHGLSFTNERKPRAADRFTEFAVKYLIDHRVVPDWLWGIEHFEPVTEEKLDRRSGATMKREVLKRKITYHDHVPEKDEKDIGILNPELSSEPRLAISDSHALVKHRQDDGILFRIGHRALKNILIAHQQGKPVRNLLPRLIEDLQLVNGARRNGTTLNLSTLKLFDKNSLAEATRNAIAPIAAESIQRTAALAKALHGNTDRMGQRTPGRIASLITELERFGVPDSEMPRMSRDSKNRQIMRCYKYFDWKYLNDAQYKFLRQHEYQNMSIYHYMLWDIRKDRGLAHGKYGDLLKGITPHMPPTVQQLLFKSRDLNDLLRNTATATIVLLNSWKEELLKPSIDDERLNAIMSRLGVPVSEANRVFNQHLPIAIHPMLPVRAYYSAQDISKLSLSRSIWKNKEERQPLVDEHYAYEDYLAQYAFVPERKPLRKRVIGQMNELITEDALLWKCAMTYLNNASVVVRDVIKQALVRGDQAMKVGSLFDATISIPLQPLEVKNQGLRKLLQEEFDSLKIAAIEVDLKFKQLDDYLFMESRPQLLKAACQVVRRFVASGKPDEVNVVEENGRKKYSMPYGVIYQEIQRIQNQAVSWAGTLLANEERVVRAMTTEERDSLGAGHVKDDSQFAYIGFADVCVKLGLSPSLTTMVRSIRNTTLHADLPMGWTYEEYEKDPVLFAVLGHVPKQPRAPKPSEVQAEEGK

SEQ ID NO: 2527 - protein, 1175 aa, Artificial; identical to SEQ ID NO: 1626
  Synthetic

SEQ ID NO: 2528 - protein, 1091 aa, Artificial; identical to SEQ ID NO: 2491
  Synthetic

SEQ ID NO: 2529 - protein, 1246 aa, Artificial
  Synthetic
MRLDQAVLAAFYNDARLNILSCLNDIREKQGLSFIGDDAQIVSAFYDLSHILTQGTPEEASALIDRLRYRFPFIDTRTDASSRHKDFTPVPDNFQHIFQRIFKLINSLRNTLVHPVNSPLLLDMDQHKNLFFMLNDIYDDARRLLKTRFDWSTRDIEPLLRHDHKGKPKLVNKFSFALCSAPGSDPKSRSNSPVIGYNRVLYDFGHVLLCSLFLDKSQSADLIHYFWQSGHGKFWQSQKHREMIKELISAYHIRLPLQRLKADSLTTLTIDALSELSRCPQPLLKTLKKEDKDKFREALGTLDNIDISDDAGNGAGNAAANSARKQSQAEQQASYLLARSHEDRFVPLMMRFLEHDPANKLRFAIDLGQFYYHVRLKSGDFFTDNKPRVRRLGQKLICYGHLNNLNKSDFWQQLEDNFALSSQEAKQAETLASAEPLQLKPYLVKTIPHYHFDNNKIGIRLAQSTGKSTDKRANKSANQKTDYPKYPEDKGISVEDIRQPIQLDKIPAEQMQAEFWISPAQMLHIGFYHYLYQHQQNATSGKATQSKSIEVLLNTYKAGTLRLFKALKKQMPELAGEAFSAERHQAVQDYINGFYAAKGNNSDNSDYHISMANLPKVLVNALLGAQQQQVIPKQQIIDRANKLLQSTEQRQRQLERQLNAFKKRGHKDFRPIKCGNIGDFLTDDIIRFQAVDPSQNDGGKLNSQQYQILQKTLAYYGKYIDEPPQIIDLFQDFGLIEGDFKHPFLDKLGLQKNPHKYKGLLDFYKDYLKYRKAYIKEYLNQVSSHSNNDDRQQHQQHQQNQQQPLQAAHWLRLKKLSTLDGFFKENLTDNETLAQPLPLAKDFFYKPILNLLADALNISPETIEQEGMQTFTRNNKTVKIRPAISWMIKYYHQHKNLDGNKDGNEDGDDSSDDVQTMYTFERSHKVFNYFLDKRGKKNKYKEKVSHYLSEQDRKRYLPEIREKISSLRAMVNQQKTNKKQPKDNISDEEKLSNKLQSELKSYKHQEKIIRHTAIQDILLSLYVRQYLDRLMQNQNPVNWKLKDIENTLLNQPIYHEFSVPDSSKKLFHPACKIRKLGELRLLARDRRLPSLLDYYPEEESLINQAEIRAELYNYRRARVDVMKLAHSLEQQIVKKYGMPKDEEAPKEQQKFFGAGRHGAFLHLLHESMGVQVNDTNGDKTRIKQALAIRNAFSHSEYPDTNTLPQVKDAIASEAIPVNPAQNRKIALKLVAEMERLYQPWLKFLKD

SEQ ID NO: 2530 - protein, 1003 aa, Artificial; identical to SEQ ID NO: 1450
  Synthetic

SEQ ID NO: 2531 - protein, 1075 aa, Artificial
  Synthetic
MNTHQEELQSWITRKRLPDTEMKKYWAAYMNLARLNFFKTLMFISNSIGDLKPAKDNNGKGNTEVNMHNMGILTALLGPEDEEKARLLIFKHFPFLRTFCIEKELSLSKQRTILIDMACIIGRYRNMYSHSIFISDDNEKVLESEKRCSEYLQSILTVSTRIIKERYRSNKNDAQRGMIDDKSLKFISENKVKFVYDENGKRITAPNKKYYLSTIDKDNTHLSYFGKLMLTCILLEKKYATDFLTQCHFLDAFNDSEVAPKLSERRLMLEVMTALRIRLAEKKLSNEKSEVQISLDILNELKKCPFELYELLGSEDKRLFTIVADTGETILLRRHEDRFPQLALSWIDSSKAFDHLRFQVNAGKLRYLFRDNKHCIDGQTRMRVLEEPLNGYRRLMEFEEERIQKQSGEIRSLWPGLDILNKDETPRNDASVLPYISDYRVRYLFDGDNIGISIGDFTPSITKTDETKYRVTGKTADCCLSKYELPGLLFYHLLTLRHGDNKRSTKNAEDIIIDAIKRYKRLFSDVKEGILKPIKEENANQLGNRIWNSYGINIKDIPDKIIDYLLVRECNEDEKFTAWKNGFISEMLQSTKNRIKRFEKDSEAVISSDNKPGKKNHVSLKPGAYASFIANDIVFFQECGATEKMTGLNFKVMQSRLATFTKDGSTSFNILLQTLKNAHLVSTTYGKGDHPFLYRVIKQQPSDIVQFYKIYLNEKVLYLQSDIPDNAIFLHGERKRWENRNEQYYRDLAERYLQRPIQLPRQLFESHIRQLLLSDCIKGERGNDLKEAINSAASQGRCNTTYMIMEYFADYLCDGTQFFYGLFDGDLSHEYNYRFYSLISNNIENSKKLVLTLKKGNNSKESPFISALERGIHWSKMNPLMKKGLKNDSSEGDFVHAAKRAYKEMTETERMFRRYAVQDEVLFLAAKITIRRVLGLSEQYNCLLGDIKPQGGSLLEQTIPSITTKHTINTGNKKQKPKQVQILQKNVKLKDFGKVFKLLNDRRIFDLLFNKGNEAVSMTDLCEELERYDRHRVDVFDSVLKYESKITKGYTNKELMNESGQIDFKAIQAFDKQNT

SEQ ID NO: 2532 - protein, 1197 aa, Artificial
  Synthetic
MSNNFRTQSTHRPPHLQKTTPPSKLETWTGGKRPELAVFYNVAYFRIAGMLSHYLNKTHEHDKDALELLFKKVVSGEDQLSDAVCSKLRDYLWKSYTTQQENSSGYALNQEDRDLVLLMLRKLQDVRNFQSHVWHDNRALVFPVKLCAHIERMHEAANMAQGIDMASAVVTYHDNYKVYDSTMRFNQGRKDLQAFFDRWDTDHYITQEGRIFFLSFFLTRSEMARLLQQSKGSKRNDKPEFKIKHAIYRYFTHRDAASRNHYGLNDNILSELPNEQRAQIMAARQVYKIINYLNDIPYRSHDPALFPLFLADGTEALDEHGLLQWKKETDFLPEITAKARKVPALSETERFGVRGRKATKAIDDRTLEVERGFELQWVGNDRYNFTIPTRHFHRCALDAIRNGDKGATFADRLKVFIGDREHLLDRLHKEFTILPLRQADFTLEKELDEYYKFRLRGDGKLTKSLGQWLDAIDRQNVRKYPEALAKLKEQLRNSPIILTYHGLSFTNERKPRAADRFTEFAVKYLIDHGVVPEWLWGIEHFEPVTEEKLDRRSGATMKREVLKRKITYHDHVPEKDEKDIGILNPELSSEPRLAISDSHALVKHRQDDRILFRIGHRALKNILIAHQQGKPVRNLLPRLIEDLQLVNGARRNGTTLNLSTLKLFDKNSLAEATRNAIAPIAAESIQRTAALAKALHGNTDRMGQRTPGRIASLITELERFGVPDSEMPRMSRDSKNRQIMRCYKYFDWKYLNDAQYKFLRQHEYQNMSIYHYMLWDIRKDRGLAHGKYGDLLKGITPHMPPTVQQLLFKSRDLNDLLRNTATATIVLLNSWKEELLKPSIDDERLNAIMSRLGVPVSEANRVFNQHLPIAIHPMLPVRAYYSAQDISKLSLSRSIWKNKEERQPLVDEHYAYEDYLAQYAFVPERKPLRKRVIGQMNELITEDALLWKCAMTYLNNASVVVRDVIKQALVRGDQAMKVGSLFDATISIPLQPLEVKNQGLRKLLQEEFDSLKIAAIEVDLKFKQLDDYLFMESRPQLLKAACQVVRRFVASGKPDEVNVVEENGRKKYSMPYGVIYQEIQRIQNQAVSWAGTLLANEERVVRAMTTEERDSFGAGHVKDDSQFAYIGFADVCVKLGLSPSLTTMVRSIRNTTLHADLPMGWTYEEYEKDPVLFAVLGHVPKQPRAPKPSEVQAEEGK

SEQ ID NO: 2533 - protein, 1025 aa, Artificial; identical to SEQ ID NO: 1668
  Synthetic

SEQ ID NO: 2534 - protein, 1162 aa, Artificial
  Synthetic
MEENINKKNDANPFGLFFNEKAYIGSHAMKAEINFLSNNNTFKISGANDVENDNRRISRMYYFSIRHAFKNIDTKKVFKYEIENSQHKMAPTRFKNLQPGCFNKDLIEILSKLIHSIRNICSHYAHVFNEINMDKDGNLKEKFIPFLKDAFELAVMQACGDESGEASDEQIVDFLRINFLFNTDLQMTKSQAIERTLFINVDETYPTFVGYGDKRHELMKIEKGKYLSFYACLFLLTMFLYRDEAVSMISGIRGFKKNSDSFSAKRNVYTFFAKKPSSRDVDNEETPLVKFRDIIQYLSHYPTAWNDVLLNNPDDQRAKDLLNKIVEMEIKRIFPEMFKEEKENAHFMIYAKNEIFSSLYSESLANEYIKAGLTSEEEDKFSATIERSHELTGERKKLNDLLNAKDCQSKKPDIKRKENIRQCRQRINELENNGNNAEMEKIEKRINDNLFIQSYGRNKDRFMQFAVWYLAETNYFGGNAMYEIYQFNTSDEQHTYLKSAKTKVSNGDMTKKEYDALRVSHGRIVTYVTYKEIANKYSLLDDPFVYENNAIQVYLPKDGNNYNYKSKSELNDNGTFYIIQRSLIVYLLEHCLYSNIPFKYIIKNYKKSRDKKLNEYKATLSSENVSITAEQSREMSKLLPKRLLHHYMPDTAETTSNGSALFNILNVANEHEKRYNLLHEQAKKNNTSADFDKKNKGKQFKLNFVWKAWNRMYFADMFRKQVADSSDGKNHKRFNVTRDEFNDFSRWMYAFDEVPQYKEYLRRLFAPKLFFEIKKFKDLFEKGNSLNDYYASTKELYKKWADNQLKNSQKERYTWSKYDDNIINGSTVCINLHTFINKMKEMKLINCYNDHIQYESCRNAQNLVDFYYLSSLFNKEYREKHDKTKSAAYKKLYNSLNTSRLEDTLLYEIAMQYLKSVNPGTNIDDLKRPVVDFFNSDICFGIYDSNNTSGKHLYNVAIPFNKIEAFGQLLVLNKKSEYLQRPIITQLKEYLSDEKYSSAFDTDELKAIRDSFINVKADEYPTIRYNDMFKVIKSLKDDALQMSRLTLLIEKYAIANDRDKKISEKENEIDFDPSILFDSDNNFKDMRDSALHFNIPPVPYKDYIRLMEMAFINKWIKSDHPTSWNSLNSSQQEICNVFMKCLYNYRKTDAATYYSKVIKELL

SEQ ID NO: 2535 - protein, 1097 aa, Artificial
  Synthetic
MEYTRYKEWGKDLFYFNHFANMARHNAFLIINDILNTVYKAEDQLTEESLSNLYKKVLAKSKGRPDELALLSSLLKKHFPFLHYYDNVQSDEIAPYLNSIKDLNIYSNKPEEVPKDDDPGMCIWWLSYVFLPILNRLRNETAHYGHTKLGGDIPFLEQSFNETIKEAQKRMNYSHEDVEHLLRTDSYYKPLSINKSLSEKGIFYLYCLFLDKKNGYQFLSHIKGFKDRRETAKKATTEVFTHNHCRLPYPKLDSSDLALDILNELNRCPGALYSVLSDDDRKKFVTTLPTAEEGDEVMESVMKRGKEDRFPYFALRYLEQEGVLRGISFQLFLGRFEQKEAHHKIVGQEMREHKLLKNIHTFGQLERFKTEAANNFFLNEKKGIVEFYAPAYRMVGNRIGLILKDANINDTGFEEVLDNYKLPLEERNCPDAIMSTHELTALFFYNYLHREGIIRTSPKEHILSFLQNFKRFREDLKKGKLKPIPGEHKLYKMKCHKQGSSNELNRKRILLQEILNEYGLKVAWLPDACREYLLGYTSSDNTHIIKQEFLKMLNSSKSRRDKIIAFNKSISEYKKRNEIKLTQAKLEIRTGELATQLARDIIYMTSPMNKEGKSKKMNDLEYNVLQSMLAYFPLHKNELTAYLGILKEGKVWKHPFLEDVLKELHSAQSLADFYSLYYDAKIDWINHKIIKEQVEHDNNKKKYSWTLRVGAEKMVTEQYAYLLNLEKKTKTAPQKEYADKAVFLPTGLFDEAISKSLIDKGYELRENSNTAGCLKVYLNKETQPMYSELKRYYRYVTGRGPRLTGRMMEREEAKNFLSHNFANSSLQPMKKESLKQFGKKIKEKEAEILRQQNNDRALFLMLYAMPDANGVSRIVKEKTGLCKLGFDLNDNLLNTEYTVKQTLVRMVNNVRVERVVTATLPVKRYGEMRRFLKDRRIDGLLLYYPEGKEIPLGTLESSKTALKGEKYSYSNLIDELDVYDRKRNELMERIYEVDRLMAVNFPLIKKKTKGNASYYEHYDCLDYARTNLGLANQVSLLQRERITLLRSKLAHNQIPYEAWICEEIEKMDDPLITSRIINLVASCYEELLLSIKKKIKE

SEQ ID NO: 2536 - protein, 1242 aa, Artificial; identical to SEQ ID NO: 2085
  Synthetic

SEQ ID NO: 2537 - protein, 1128 aa, Artificial
  Synthetic
MEILTIPEVIKCRTLSDDPQYFGGYLNMARLNVLNISNHIAKEFKLPLLPEEAHLKNSFLCKKENKKIDWNHVYARTIRFLSVMKVFDAESLPKEEQKTIDWEGKDFASMCDTLNIVFSELQEFSNDYSHYYSTEKETKRKTTVSDELALFLRTNFKRAIEYTKVRFKGILNDEDYQLVVSKKMLETNHTITHEGLVFLTSMFLEREYAFRFIRKIHGLSGPKDNSFIATCEVLMAFCLKLPQEQFRSDNRRQAISLELMNELKKCPKVLYHVITEEWKQKLKSVPEELETKNLHYNTKRETKIEFEDYDLYIESLTKQVRYNNRFSEFALKYIDETGIFSEFRFQLDLGKILVDEYLKNFNDERVQRCIIENAKAFGKLNDYTNETKVMSLIVNGSPLKSFDRFAPHYNIESNKIGISTHEVTAKLVPNSKGEPAKKLHQPLPEAFLSLHELPKIILLEYLQKGEPEKLINEFILVNNSKLMNMSFIEEVKNQLPKEWDKFQRRTNAKHELAYDENTLAFLLQRKQILNKTLLAYQLNDKQIPTRILDYWLNISDADEERAISNRLKSIKRDCMSRLKALSKFNENGNRNKIPGIGEMATFLAKDIIEMVVSEGKKRKITSFYYDKMQECLALFGDPDKKQLFIHIVTKELKLNDPGGHPFLDKLDLQKINSTTGFYEIYLQEKGHKMVPENNPKTGKVIYTDHSWMALTFYKIEFNDKVDMLMTVVKLPLKKLNIPFTLRQLSGKTNNTLKQWLNNLTQGKKRNDGKRPINLPTNLFDERLAELLRKDLDNKKIVYWPYANWNELFKTWWSSRNDGLQSFYNAEREYRIFDEKVNFYPNRKENFADYYQHALKLAFQKKQSKRILEQMYDQHLPDILFDQVEKTFRHTIAETEKEIRILQEEDHIMLLMLESLLDDGSKQQLKLSEIRTHLNRTTNIRQVVKGKLSFDDSGELIKDNTNSEIVRTVSVTNQLKKFHLRPRFISDSRLPELFEYFPDKEIQMESLKNEFDTYNAARQVVLNLSFNLEKMIIEKGRLDRINQLLTSATGDLLTGHIGHKTYLTWLKNHGIIDNDTFIFMNMVQYCFSHNQYPQKKTMARLISRWDQHRFALQIEATYIQKIAGIIEDL

SEQ ID NO: 2538 - protein, 1129 aa, Artificial; identical to SEQ ID NO: 1396
  Synthetic

SEQ ID NO: 2539 - protein, 1127 aa, Artificial; identical to SEQ ID NO: 2409
  Synthetic

SEQ ID NO: 2540 - protein, 1127 aa, Artificial; identical to SEQ ID NO: 2453
  Synthetic

SEQ ID NO: 2541 - protein, 1003 aa, Artificial; identical to SEQ ID NO: 1615
  Synthetic

SEQ ID NO: 2542 - protein, 1178 aa, Artificial
  Synthetic
MTERQTSSKFNELFENKCNLCSISEKAFRNLQLKVSRFSKDNAKKNYICDNTKLQPSAVHYFAIGHTFKNFDVNDVFEMKVDGNSLNKTATKFRHLLDTKDNRENGFFDIDRIFKLIQDIRHINSHYIHDFENIAIDDSDNLFIFLKESFELASLNVSGIIGKEDQNKKLANFLYDKFHLSIKKNSTKDECIEDILFIDNTKEDKKTEWTLKNGKKAFDINPNKYLSFYACLFLLSMFLYKDESNLLISRIKGFKRNETEEEQAKRNVFTFYSKKLSSQDIDSEESDLVKFRDIIQYLNKYPYAWTKAYNDKEISREFKDKFIKNILKFEIERALLNNDKNRFYFIKDEEKEAFYLYTMYQVWGLDKSKFKKMSFTLSQIDNFNNVITHSLKIQGILKEQKELIKKYGKFDKKVKDLETKLKTAIKTDKVNAEKEIKARGKEIGMPASFEIEKIKTRFYNGKLFNSYGRNTDKFMKYATRFLAENKFFGEEAKFKCYKWFTSDEQNVDIIKLKGSLSKKEFDSLKYHQGRLIEYIKYSDFLEKKEHNYIPFVIQNNAIQVKITIDGFERILSIQRKLMVNLLHYALSDYSSQKKSSDPLSNRSINNLGLDLITSYYKEYKNDFNNGIEYLKQIEEIDTNKFSNLNKLFPKRLLHNYSSNYEYKAPEISVNKQFLEKTKEQNKKYNELYEEAKNKDILEDFLKKNKGKKYKLDFIKKAWNQMYFKEIYLEQTNIAKSHHKGFNITKEEYNDFCKAMYSFNGYDDVYKKFLTDLFKSKKFLDNQEFKTLFNDSECLEDLYIKTIKAYEKWLDNSSHIKNTEEKFKLNSYKFINEPNKHILYINISHFLNFLKKQNKINVKNNQIQYILLYQHKSVLIQEYYLDYKSINKNDKASLRLFNKLNDIRFEDVLLYEIAIWYFELDKTTVKNLKNIDVRKIYNSDITYKFNKISVVVPFKKLLDFELWLNRDYEKSKSKKNNGTYITKISTYLDILEKEIKTSYTNCHESKRVDLNDLTEVMNSYSENKTLSLDSFYKFNTHLVNNARKFSRIWLVLEEYYIKKYDKDLNIIFKDHRIEYEELEFLKNYKRKSSKNMRDMRNAAFHINIPMNYSFHLAIKMIGKRFIQEEIKTLPKSVSVLSKDIQSVCGEFINILYPIKYSKSDSDCKWKSYDRIIKYYLTEA

SEQ ID NO: 2543 - protein, 1196 aa, Artificial; identical to SEQ ID NO: 2258
  Synthetic

SEQ ID NO: 2544 - protein, 1196 aa, Artificial; identical to SEQ ID NO: 2258
  Synthetic

SEQ ID NO: 2545 - protein, 1145 aa, Artificial; identical to SEQ ID NO: 1631
  Synthetic

SEQ ID NO: 2546 - protein, 1156 aa, Artificial
  Synthetic
MELSQAVLAAFYNDARLNILACLNDIRNKQGLSLMQGDEHIVSAFYDLSQILTNGTPEESSALIKDLRYRFPFLDARTDASEKNKGFTPLPENYHQILEWMFKLLNGLRNSVVHPCDQPFLIDIELHKNIFFLLNDIYDDGHRLLKTRFDWTTNDIKPLLRYDQRGKLKIKRFSFVLCSDPKKRSNSPVLGQKKVFYSFGHVLFCSLFLDKSQSADLISHFWESGHGKFWQDNKYREMIKELISFYRVRLPLLRLKADSQTTLTIDALSELSRCPRPLLGALSQQDKNKFREVVDDVDTDNNSQQSSTYLLARSHQNRFIPLMMSFFEQSANSRLRFAIDFGHFYFNVRLKSGSHFTDNEPRVRRIGQKIIGYGHLQAVEKPIIWQQLQDNFTSSNDEAINAKASISKQSNTDEQLQLKPYLVKTFAHYHFDEHKIGFKLVQDNDLSAFPDLPADIDVTEPIKLTKISGQLMQPDFWMSPAQMLHLSFYYYLYEQYPDSATNSNSKSVDVLFNIYRGGIQRLFQNLFEASPSLSGEPFSEERHQAVQAYINNYFNTDDFTISMADLPKVIVRHLLGAEDKPISKLQIIQRAKQLKEKTEQKIHQLEHLQNAYKKRGHKDFRPIKCGHIGDFLSEDLIRFQAVNKAQADGGKLNSQQYQILQATLAYYGKYIDQPPKVIDLFKNFGLLDGEFRHPFLYKLGLQNNPEKYQGLLAFYEDYLVARKNYLKDYIKETEASDSPKAAHWLRLKQISTLQGWFNENLTSNQKLKQPLPIAKNFFYQPILKLLADVLKQGPEDLQKNGMQCFIRGGKEVQIRPAISWFIHYYQQSKDDNVQEMYGFKRNHEVFDNFLDRRGNNSFKERKIHFLSEDERKSHLPEIRQKIQILDQQITEQDKQNKTDKAKQYYKLINDLKAYKKQEKVIRHTATQDILLSLYVRQNLKHLMQNSDDINWKLNNIENSLLNESIYHCFSIPDSTKKLFHPDCKIRKLGELRLLARDKRLPSLLEYYPAEETEINQAEIRAELNDYRRARIDIMRAVHTLEKKISSVCGLPEKGSVPIDREAFFGKARHGEYLYHLCVANSDKIGFKQEDFYKALLIRNAFAHSEYPKTEYFPEIVAATRSEAIPENPALNRNIALRLAEELKRLYQPWLDFLSGA

SEQ ID NO: 2547 - protein, 1094 aa, Artificial
  Synthetic
MKKYYDLYKKDDKHFFAGLFNTAVNNFDLSIRELERRIKSKSNNSIGVLKFAFSNERPFHELENNFNFLKESLVFMNEINGFYNKKKTNKDIPESQNIYLFTGDFLVELYNTLNSLRNYYTHYEHSDIEIGNDIADFLNDVLFHSAIRIKKDRAKNADVKARLKTKYKTEIDEYFKAHNNKGEVKHKIKQEDKTNYVINKMFNVFFYEDKDKNIFELKNLVKTKNNETNRLTKSGIALVLSLFLTKKQINLLFDNFKYFYDDDSELQKLIIRWVYTYRSYKSIRYLFKSDYDTHSLLLQMVNELNKAPKHLYPYLSEAKKKEFIEDVNIYLKDNAKNYDDSLVAHEVIRRRYEEKFAYFALRFLDDFIEFPTLRFHVNLGKFNHNSMKKTYKNNLITERSILEKINVFEKLTMVTKKKKEYFQNNNIDTEEGWREFPMPKYVFHGNSIGIYLGKRDEVEMKREENKPTKTALIEKLGLPKDAYQKPMAFLSVYELPALLHYLLVDRKTPKEVEEKITQQINKQKKELNSIDESNISDIKIKKDISINNKIIRKLTKINDLKNFYDLEKIKKIIEEEIKISDPENEKSPLKEIRKNYKKTPKNPNILSNSEKGKIATWLSKDIKRFTKKEVRENWKGYQFAEFQSLLSYYDIDKNAVKNFLLEDLYENKNLQNNFLLKNLNFNNITLYEFYIDYLTKRNTYLEKKLLLKLLQGKDKTDEIFVFLPKNKFVLTDIKNYKIRKNNAPIMLSRGIFYDEPTGYKPDDYNKKNELAEWFTKASDIDKAQEFYKYQRQYPIDDNNFLSINTDKGLKDQFSYFEKTENNGYITKTIDKKQQKFIYKNEAKIRRTMRNDYYILQMIKHFYKESTEIDKQRLDKITLKDFYLTKAEKEKIQKEASEKQNEFNQDFILRKKVEISMYEGKIKGEVKLKESGKYKRLLLDSKVKMLTEYFPDKKWTIDDIMLELDNYEQVRSKEFFKNVHQLEQIIYTKADEQKELEKLLLNGFPNFRKYLVYYYECPKLDNINVIKTKLTDLETEKEKLLFILIMLRNKFAHNQLVPKEIFVYLQEKYTINKNEKIGTYLNRVFEKIYEELNNN

SEQ ID NO: 2548 - protein, 1242 aa, Artificial; identical to SEQ ID NO: 2085
  Synthetic

SEQ ID NO: 2549 - protein, 1160 aa, Artificial; identical to SEQ ID NO: 2416
  Synthetic

SEQ ID NO: 2550 - protein, 1140 aa, Artificial
  Synthetic
MSKECKKQRQEKKRRLQKANFSISLTGKHVFGAYFNMARTNFVKTINYILPIAGVRGNYSENQINKMLHALFLIQAGRNEELTTEQKQWEKKLRLNPEQQTKFQKLLFKHFPVLGPMMADVADHKAYLNKKKSTVQTEDETFAMLKGVSLADCLDIICLMADTLTECRNFYTHKDPYNKPSQLADQYQHQEMIAKKLDKVVVASRRILKDREGLSVNEVEFLTGIDHLHQEVLKDEFGNAKEKDGKVMKTFVEYDDFYFKISGKRLVNGYTVTTKDDKPVNVNTMLPALSDFGLLYFCVLFLSKPYAKLFIDEVRLFEYSPFDDKENMIMSEMLSIYRIRTPRLHKIDSHDSKATLAMDIFGELRRCPMELYNLLDKNAGQPFFHDEVKHPNSHTPDVSKRLRYDDRFPTLALRYIDETELFKRIRFQLQLGSFRYKFYDKENCIDGRVRVRRIQKEINGYGRMQEVADKRMDKWGDLIQKREERSVKLEHEELYINLDQFLEDTADSTPYVTDRRPAYNIHANRIGLYWEDSQNPKQYKVFDENGMYIPELVVTEDKKAPIKMPAPRCALSVYDLPAMLFYEYLREQQDNEFPSAEQVIIEYEDEYRKFFKAVAEGKLKPFKRPKEFRDFLKKEYPKLRMADIPKKLQLFLCSHGLCYNNKPETVYERLDRLTLQHLEERELHIQNRLEHYQKDRDMIGNKDNQYGKKSFSDVRHGALARYLAQSMMEWQPTKLKDKEKGHDKLTGLNYNVLTAYLATYGHPQVPEEGFTPRTLEQVLINAHLIGGSNPHPFINKVLALGNRNIEELYLHYLEEELKHIRSRIQSLSSNPSDKALSALPFIHHDRMRYHERTSEEMRALAARYTTIQLPDGLFTPYILEILQKHYTENSDLQNALSQDVPVKLNPTCNAAYLITLFYQTVLKDNAQPFYLSDKTYTRNKDGEKAESFSFKRAYELFSVLNNNKKDTFPFEMIPLFLTSDEIQERLSAKLLDGDGNPVPEVGEKGKPATDSQGNTIWKRRIYSEVDDYAEKLTDRDMKISFKGEWEKLPRWKQDKIIKRRDETRLQMRDELLQRMPRYIRDIKDNERTLRRYKTQDMVLFLLAEKMFTNIISEQSSEFNWKQMRLSKVCNEAFLRQTLTF

SEQ ID NO: 2551 - protein, 1085 aa, Artificial; identical to SEQ ID NO: 1453
  Synthetic

SEQ ID NO: 2552 - protein, 1145 aa, Artificial; identical to SEQ ID NO: 1631
  Synthetic

SEQ ID NO: 2553 - protein, 1003 aa, Artificial
  Synthetic
MGAIENKHIFAAYANLAIDGLIKTLNFIAKKLDTQKQLSSWDIKHVITLIDSIFDQNPQNNLEQVVEGYLPWIKPIIEMKTPKKGERQSDKLCIEYKTIITAFASLLNDVRNYYTHYYHDPICIYPGGYDIPSSLNCIYDSAINIIKERFQAEEKEMEHLRRYTRKKGRVVLKTEDDHFYYTLANNNDLSEKGYAFFISMFLERKYSYLFLKKLSGFKRGDSLQYRLTLEVFTALSTKPPVERLRTTKDTKQDRALDILNELSKIPIELYQTLEPKYREMYNETLQPTDAEDPYGLPDRSRIRFRSRFETFALHFLDKQADFKEIGFYTYLGNYFHNGYQKTRVDRETKDRYINFQLAGFCKNIQDISAKKLSEALNVKSIDISTDSIPDINSFEPYLVQSTPHYIVNGNNIGIKVLPEGKDTYPTIDEKGAKMPIADFWLSKYELPAMLFYTYLRNNNIHKSHCPLSVKDIIERSIHKSTKQKHPEERSELMLRRVMKAIFWTDSKLNEVERIKSQKSAFGKRQHEILKAGRIAETLVRDMLWLQPSKNNGRDKVTEPNFQAIQVSLAYFGIRRNDLTEIFTRAGLINSSNPHPFLAQIGTNYTSLIEFYIAYLKERKVYFSRIQKKILQGKLNIQCHPLRDLQREPNKPQEKEEAIFLPRGLFNEAIINCLKKSKLKQLIESPTREKSPALNVSYLIQNYFRTYFEDQSQEFYAQPRNYRLFDKLSPNKGKSKSYLSLEQRIKKMEELRPSKIPVAEANKLLEKEDRLYRKNYNEICDNESIIRLYQIQDILLFMMTKEYLPSDLYNRINKYKLENVKGILNERVSYLIDLNPLKIQGEDIKIKDYGKLFYIHHDTRISSLNKVLSKVKRNNSISSSVKIQPYENYKRECLDFEEAQIQIIPIIHSFEIAMVSMFPDLKKATPGNYYDFNELITEYEKRTKQKIDSSFLIKTRNMFLHDKYEAECIKEISDDFVYAKKIIAEFKMKIENIKLEDLSNDSSA

SEQ ID NO: 2554 - protein, 1097 aa, Artificial; identical to SEQ ID NO: 2535
  Synthetic

SEQ ID NO: 2555 - protein, 1113 aa, Artificial
  Synthetic
MEDDKKTTDSISYELKDKHFWAAFLNLARHNVYITVNHINKILEEDEINRDGYENTLENSWNEIKDINKKDRLSKLIIKHFPFLEAATYRQNPTDTTKQKEEKQAEAQSLESLKKSFFVFIYKLRDLRNHYSHYKHSKSLERPKFEEDLQNKMYNIFDVSIQFVKEDYKHNTDINPKKDFKHLDRKRKGKFHYSFADNEGNITESGLLFFVSLFLEKKDAIWVQKKLEGFKCSNESYQKMTNEVFCRSRMLLPKLRLESTQTQDWILLDMLNELIRCPKSLYERLRGEDREKFRVPIEIADEDYDAEQEPFKNTLVRHQDRFPYFALRYFDYNEIFTNLRFQIDLGTYHFSIYKKLIGGQKEDRHLTHKLYGFERIQEFNKQNRPDEWKALVKDLDTYETSEEPYISETTPHYHLENQKIGIRFRNGNNDIWASLETNGENNEKSKYKLDKQYQAEAFLSVHELLPMMFYYLLLKKEKPNNDEINASIVEGFIKREIRYMYKLYDAFANGEINNIDDLEKYCEDKGIPKRHLPKQMVAILYDEHKDMVEEAKRKQKEMVKDTKKLLATLEKQTQGEIEDGGRNIRLLKSGEIARWLVNDMMRFQPVQKDNEGKPLNNSKANSTEYQMLQRSLALYNKEEKPTRYFIQVNLIKSSNPHPFLEETEWEKCNNILSFYRSYLKARKSFLESLKPEDWEKNQYFLMLKEPKTNRKTLVQGWKNGFNLPRGIFTEPIRKWFMEHWKNIKVDDSKRVGLVAKVIPLFFSEKYKDSVQPFYNYPFNVGDVNKPKEEDFLHREERIELWGKKKDKFKGYKAKKKFKEMTDKEKEEHRSYLEFKSWNQFERELRLVRNQDIVTWLLCMELFDKLKVEGLNVEELKKLRLKDINTDTAKKEKNNILNRVMPMELPVTVYEVNKGGYIIKNKPLHTIYIKEAKTKLLKQGNFKALVKDRRLNGLFSFVKTPSEAESESNPISKSRVESELGKYQNARLNIIEDMLALEKTLIDNYNSLDTDNFSLDTDNFHNMLTGWLELKGEANKARFQNEVDLLVAVRNAFSHNQYPMYDENLFVNIERFCLSSSKILESKGLSIAVKLKEEVSKAVEKIQNEEDNKKEKET

SEQ ID NO: 2556 - protein, 1119 aa, Artificial
  Synthetic
MEDDKKTTESISYELEDKHFWAAFLNLARHNVYITINHINKLLEIREIDNDEKVLDIKALWQKGNKDLNQKARLRELMTKHFPFLETAIYTKNKEDKEEVKQEKQAKAQSFDSLKHCLFLFLEKLQEARNYYSHYKYSESTKEPMLEKELLKKMYNIFDANIQLVINDYQHNKDIDPEEDFKHLDTIEDSSYSFTVKDNKEKITASGLLFFVSLFLEKKDAIWMQQKLRGFKDNRESKKKMTHEVFCRSRMLLPKLRLESTQTQDWILLDMLNELIRCPKSLYERLQGKYREKFKVPFDPADEDYDAEQEPFKNTLVRHQDRFPYFALRYFDYNEIFTNLRFQIDLGTYHFSIYKKQIGGQKEDRHLTHKLYGFERIQEFDKQNRTDEWKALVKDLDTYETSNERYISETTPHYHLENQKIGIRFRNGNNDIWPSLETNGENNEKSKYKLDKPYQAEAFLSVHELLPMMFYYLLLKKEKPNNDEINASIVEGFIKREIRDIYKLYDAFANGEINSEDDFKKYCKGKDIEMVHLPKQMVAILKNKPKDVAEEAKHKQKKMVKAAKRKQRKMVKDTEKLLAALEEQTQGEIEDGGRNIRLLKSGEIARWLVNDMMRFQPVQKDNEGNPLNNSKANSTEYQMLQRSLALYNKEEKPTRYFRQVNLINSSNPHPFLKWTKWEECNNILSFYRSYLTKKIEFLNKLKPEDWEKNQYFLKLKEPKTNRETLVQGWKNGFNLPRGIFTEPIREWFKRHQNDSEEYKKVEALKRVGLVAKVIPLFFKEEYFKEDAQKEINNCVQPFYGFPYNVGNIHKPDEKDFLLSEERKKLWGDKKNKFKGYKAKKKPKKITDEVKEEYRSYLEFQSWNKFERELRLVRNQDIVTWLLCTELIDKLKVEGLNVEELKKLRLKDIDTDTAKQEKNNILNRIMPMQLPVTVYEIDDSHNIVKDRPLHTVYIEETKTKLLKQGNFKALVKDRRLNGLFSFVDTSSEAELKSNPISKSLVEYELGEYQNARIETIKDMLLLEETLIEKDKNLPTDNFSDMLNGWLEGKDEADKARFQNDVKLLVAVRNAFSHNQYPMYNSEVFEGIKLLNPSSAEFKDKELGIANQLKKKVKEAIEKIN

SEQ ID NO: 2557 - protein, 1094 aa, Artificial; identical to SEQ ID NO: 1358
  Synthetic

SEQ ID NO: 2558 - protein, 1124 aa, Artificial
  Synthetic
MTLPINNTFTSRADREILSQNKLFFGTYLNMAQHNTFLMLTDSSEKVGKTPPSSEGLWKDAGTFSLLNTQQRPSIRSKAGRLAVKQFVALESLVIEREEGEAETPPDVEKLHDFLYSALELLNNLRREYSHYYHETAQNIDYPKLEAIFREAKRVAIERLPKDDDKAKNKAEKKIVKYMLRNEDEKLVFFISLFLSRQQAEAFMSQINDFKGEHNALKRRVFAQLCCRLPRPKLESAALELDALNELARCPDEVFRYLNTEDKNRFVVPLKELDKDDTSGNTITLKRYEDRLPYLLMRYLDEHAENFGIHFQIWAGKLRTADYPKTIYDIEDNRNIHENLTAYDTLQNLRNGDNIPDNWKMQDGELLTKIEQFSPHYNIINNRIALKLGDTAYTEIYPLSEDSKLDFRVKNPLPDLIISTYDIPNLFLYQYLHQQGKIRLRPDIFIRQFSGKLRKVFKDVQSGELKPLQAEAFEKQQRYSERRQEILEERRSQLQAILDNKYKLVKVSHLPDALREYLFNYKAQDFNRQVLHKITERMEADWQRKKKAEYGSGTDEPELKAGNIGTYIARDIVALQPPNPQEVNLGKPNNDQYNELQESIAYFGREYHVLPAYLRKELGVMGERNDKTKHPFLVHLNWNKCHTAKEFYIEYLDVKRRWMRAVRDDIKAVSPQTEQPHFVKMQRNAKHFGININKSALTDEQIQERYGYFLRINSKAAKDRNYLKTMRKNPISGDFEPTDNAPIMLPRGIFNDAIREALRTNYPDQINDKSGMSDFTRIMANDEDLQTCYSYPRHYRYEADNDKLFKNDREKARHTIDIKGDTAQIWQGLCDLKTELKDNLTRAKNSQLKRLFEQVDRQKKLWRRIFRNEQAIRTVAFKDRLVWLMVKDILTRKSQAEQSNLQLEQWQLQDTGFDVRKTEVWILDQAIPTSLTIHDKDICANFQSAELDKARENELPVKRYGEFRKMLKDRRLFVANNSGLLRYYPEKSILWTTLQDELRDYDQCRAELLNAIFAFEQRVLSNQQCRQHLSLTENRIDHKVYLEAYKATYGNMPQPISNINQLRNKFMHNQIPYDTWISQAIEHNTNANLPIEDHRNKNVVKQLIEFATELYDGMNEILFYNKEN

SEQ ID NO: 2559 - protein, 1152 aa, Artificial; identical to SEQ ID NO: 2465
  Synthetic

SEQ ID NO: 2560 - protein, 1131 aa, Artificial
  Synthetic
MEKTIENQTQSKRTLNNDPQYFGAYLNMARLNIFNISNHLAEKFGLAVLDDEEKITTSFLVDKGNKEYKTRQSLVYSNLTRYMHIAKVFDFEKLPDDERDKAENYGKDFGNLTDTLKEIFKELNEFRNDYSHYYSTEKKDKRKTIVSDKLKNFLNINYTRAIKYTKSRFINVFSDNNFCLAEEAKHVENDNTITQDGIVFFTSMFLDRENAFQFISKIIGLKGTQTKAFKAKRETLMAFCVNLPHDKFVSENSEQQFSLELINELNKCPKTLYNVISENEKQHFLPKLDDEQIDNVLENSVPYTIDDYENYIENITKKVRNKNRFSYFALKFIDQKKLFKNWRFQIDLGKIVLDEYSKQLNGKDEKRTVTENTKAFGMLQDLNDEENVLNKINTGESKAKFDQFAPHYNFDVQNNKIGISKKETTAKFITKNTDNKIKSNLLQPLPEAFLSINELPKIILLEYLEQGKTEQLINDFIEINNSKILNKEFIKAIKLKLNDLDVFYKRSQGRKQKHAYLTKDKKYDNEKINELKNRKEKLNQILAEYNLNVKQIPTRILDYWLNIADVQAKNAISDRIKLMKRDCINRLKSMKKGKAPKIGEMATFIAKDIVDMIIDEEKKKKITSFYYDKMQKCLALFADKEKKELFILICNNELKLNDDDGHPFFKNINFSNYKYTSEIYQKYLEEKGHKMVKEYNPRKENYVEKDKSWLEINFYKKEWNENAKKDLTVVKLPDDKSKIPFTLRQLEKEKSSFENWFKYVTNGKETTDKKKPVDLPVNLFDETLKELLKKELSKNNIEFKEEDNYNELFKIWWDKCRNDKTQKFYSAEREYTFEEEKLNFHINTKSKFEEYINPEFAEKVFRLKNQNREKDNISGRRLPPLKMKEVTKNMVKRIGNTEKEIRMLQEEDRLMLLMFEKLVDNNLKLKLENVDKLLNESIEINQSISGKLSFDDSGDNENKKDRAIICRNITETRKRKEYSVLKKYVFDRRLPELFEYFEEENIPIEKIKIELDTYSKAKDVVFDLIFDLERAIINKDENRIKELNKDKNGVIQTGNIQHKPYLFWLLEKNLITEQEFTFMNMVRNTFSHNQFPQKKTMELFIKNWNENEFAKQILNVYNQKNNNLIKSIKDI

SEQ ID NO: 2561 - protein, 1113 aa, Artificial
  Synthetic
MESLIQQEENKARNLINDPQYFGGYLNMARHNIFSIDNHLASYFETSKLSNEEHISDSFLLSADKRKNKTNNEPINENLLFERTLRFMPILRVFDTERLPKEVRLNTVDIGKDFDEMRNCLKQVFSELNKFRNDYTHYFSTKTETNRKIQVTSELGEFLTRSFKLAIAFTKQRMRDVLKEEDYSLVEKKVMVHPEEMSITTEGIVFLACMFLEREYAFQFIGKVVGLKGTHRNEFIATREVLMAYCVKLPHDKFISEDSKQALILDIANELNKCPLTLYDVITDEGRKQFRPELTDDAKKSVIENCINEDLEVDYNEYIQILTKKVRYKNRFPYFAFQYIEETKLLDNLRFSIDLGQFVLAEYEKRLAGELTSRTVVENVKAFRYLREVIDEDVVLELMKSNPSLNRFLQFSPHYSSNNNKIGISSKPRISVVKSKGKIESKIDCLVRQPLPEAFVSIHELTKIILLDYLNKGIVVEIINRFIDTNRSIIMDRDKIKEIKEKLPNNEVWVPFRRLTDSKKHSAYSEEQKDEILRRKKMLNEILSSYSLNIKQIPSRIIDYWLNIIDVRKERSFSDRIKLMKRDCADRYKAVKRNEKDKTVSIPKIGEMATFLAKDIVAMIVDEDKKSKITSFYYDKLQECLALYSNIEKKNLFIHLVTNELKLNEKGGHPFLKRINLNSITRTKELYEIYLSEKAYKLNSKENDESWMSMTFYHLEWNEKAKKKMTKVVYPVNDEQIPYTIKQWNKSTQPLFDRFTNEQGKSSDWVRLKPLDLPTNLFDEEICVQLRSRLQEAKIPFDNKSNYSELLKLWWKSRDDSTQPFYQLERQYNIYDESVRFTLNSKNKFKDYYQAALKKVFNQKKAEREAKRRFNKRLPDIQFKDVERVFKHAIAETEKQIRIIQEEDRIMLLMLEKLMDDQQLKLGKAEALLSSTVPIKQKIGDKTNSSRVIVAQRKQKHYTVLRKYQYDRRLPELFKYTTEKEELKLEWLEDELKAYNKGKLKVFDLVFSLEKRIIDVAKQDIIALFDKPGSNDSKFNVVHSPYITWLEKMELINSVEAGFMKKIRNSFSHNQFPECQTVELMISLKSDIPIATQIVNEYERLILRINCQIEKMK

SEQ ID NO: 2562 - protein, 1153 aa, Artificial; identical to SEQ ID NO: 2296
  Synthetic

SEQ ID NO: 2563 - protein, 1184 aa, Artificial
  Synthetic
MENKENKVKSVRTTPEYFGSYLNMARHNVFLLINHLTKTFNYLPFQLLKDDSWISVVENNLLLNIFDSSKREFEDDRHKVYNYIIKRHHFPVIKYLGLSDDQLVDFDKVHNFLLLAFTELNNYRNEYTHYLSIDNHGNKLARKLDIDDKLKSNINDLFTHAPEISYLRKSETQTKEDYEHILSQYRLFDEHKMFTEQGLYFFINLFLERKYAIKLLKKIRGFKNETTPTFKGTLQAFTSYCIKIPDTRLGNEFPKHSLLMEMLSELNKCPKELFNHLTTQDKEKFEPKMDEERQNNVRLNSINYENIEDEDIESIVKELISLKRYEDRFPYFALRFIEDTNSFKQINFQITLGKLIIKRYDKTIIGISQDRRVLKTINAFGKLSDFIDKEDEVLSELKKELQDENIAFEQYAPHYNISGNKIGFKIFDKEVDRKQLPLVFENKKENPTIQNNPSGFISIHDLHKIILLNLVDSTIPAEGKIIDFIDNTNANILDIKILDEIKAMTQYDQESFTKKTMNDKKTLKLTSLGDEFIKNYLNLDKENFTNQLNQCSDQQKKDFAINKDVSTLLIKQTLIENHSKERYKILLKQRVKILQDNLPQDILVNQLPEKIKDYLLNISESNAEKKVHLKIRAILKDTELLLKDAKKEPQEGEIIKLGKYATYIARDILNMIIDKDVKQKVTQPYYNKIQNKISYFSINKEELIAILKELDIFDFNSGHVFLREFHITNSKGLKDFYKNYLEQKIKWINRKLFEKGKAGGYRLNNPSVKLPYSFTVIQKEAEAVDFEKWLNNKSMMPVNIPNSLFDQSANDILKVILKNTGTDFKETDTLSVLLRKICSKDTQPFYSYDRVYRDSNKEPITIKQLSGLQSKTIKAKYGSFAEANEKLIRFYQTKDRVVKLMCDFLLNEDQNLADEKGFLLKNIYPNSEISILNHPAKFKHSLKKEGKSTDILFNVIAEDSPEQIAQVENWKKLDIEHRKIWTDIQTREEQQAFLENCTPEERKLYNGQKGFQWKFKDYGRFRRFLKDKRLVGLSEYFEVKEIPFEFLEYQMMEYDRVRDKVFELVFMLEKAIFEKDPNGIINIEMQERSGKKKTFDQVEFKTYLRWLEEKQIYFSKDIIQWGRNKFSHSQFPKFENIQKITDEEIANFNYYKDVFAGKSNIDISIAEKIIKKFESEINRIVSTI

SEQ ID NO: 2564 - protein, 1003 aa, Artificial; identical to SEQ ID NO: 1494
  Synthetic

SEQ ID NO: 2565 - protein, 1091 aa, Artificial; identical to SEQ ID NO: 2449
  Synthetic

SEQ ID NO: 2566 - protein, 1169 aa, Artificial; identical to SEQ ID NO: 1433
  Synthetic

SEQ ID NO: 2567 - protein, 1272 aa, Artificial; identical to SEQ ID NO: 2226
  Synthetic

SEQ ID NO: 2568 - protein, 1091 aa, Artificial; identical to SEQ ID NO: 2491
  Synthetic

SEQ ID NO: 2569 - protein, 1156 aa, Artificial; identical to SEQ ID NO: 2546
  Synthetic

SEQ ID NO: 2570 - protein, 1131 aa, Artificial; identical to SEQ ID NO: 2490
  Synthetic

SEQ ID NO: 2571 - protein, 1197 aa, Artificial
  Synthetic
MSNNFRTQSTHRPPHLQKTTPPSKLETWTGGKRPELAVFYNVAYFRIAGMLSHYLNKTHEHDKDALELLFKKVVSGEDQLSDAVCSKLRDYLWKSYTTQQENSSGYALNQEDRDLVLLMLQKLQDVRNFQSHVWHDNRALVFPMELCAHIERMHEAAIMAQGIDMASAVVTYHDNYKVYDSKMRFNQGRKDLQAFFDRWDTDHYITQEGRIFFLSFFLTRSEMARLLQQSKGSKRNDKPEFKIKHAIYRYFTHRDAASRNHYGLNDNILSELPNEQRAQIMAARQVYKIINYLNDIPYRSHDPALFPLFLADGTEALDEHGLLQWKQETDFLPEITAKARKVPALSETERFGVRGRKATKAIDDRTLEVERGFELQWVGNDRYNFTIPTRHFHRCALDAIRNGDKGATFADRLKVFIGDREHLLDRLHKEFTILPLRQADFTLEKELDEYYKFRLRGDGKLTKSLGQWLDAIDRQNVRKYPEALAKLKEQLRNSPIILTYHGLSFTNERKPRAADRFTEFAVKYLIDHRVVPDWLWGIEHFEPVTEEKLDRRSGATMKREVLKRKITYHDHVPEKDEKDIGILNPELSSEPRLAISDSHALVKHRQDDRILFRIGHRALKNILIAHQQGKPVRNLLPRLIDDLQLVNGARRNGTTLNLSTLKLFDKNSLAEATRNAIAPIAAESIQRTAALAKALHGNTDRMGQRTPGRIASLITELERFGVPDSEMPRMSRDSKNRQIMRCYKYFDWKYLNDAQYKFLRQHEYQNMSIYHYMLWDIRKDRGLAHGKYGDLLKGITPHMPPTVQQLLFKSRDLNDLLRNTATATIVLLNSWKEELLKPSIDDERLNAIMSRLGVPVSEANRVFNQHLPIAIHPMLPVRAYYSAQDISKLSLSRSIWKNKEERQPLVDEHYAYEDYLAQYAFVPERKPLRKRVIGQMNELITEDALLWKCAMTYLNNASVVVRDVIKQALVRGDQAMKVGSLFDATISIPLQPLEVKNQGLGKLLQEEFDSLKIAAIEVDIKFKQLDDYLFMESRPQLLKAACQVVRRFVASGKPDEVNVVEENGRKKYSMPYGVIYQEIQRIQNQAVSWAGTLLANEERVVRAMTTEERDSFGAGHVKDDSQFAYIGFADVCVKLGLSPSLTTMVRSIRNTTLHADLPMGWTYEEYEKDPELFAVLGHVPKQPRAPKPSEVQAEEGK

SEQ ID NO: 2572 - protein, 1147 aa, Artificial; identical to SEQ ID NO: 2196
  Synthetic

SEQ ID NO: 2573 - protein, 1131 aa, Artificial; identical to SEQ ID NO: 2422
  Synthetic

SEQ ID NO: 2574 - protein, 1180 aa, Artificial
  Synthetic
MKKNINPFNLFFLEKGYIGSIAQKAENNFSTNCKALNGSQISDKENKATSRIYYFAVGHAFKNIDTKAIFAYKYDDDKKNLRATQYVHIQRNVFDQGLRDFIGEKVHAIRNMCSHYVHLFNDIKLEDEDSDKANIIQDQFIPFVKEAFKLAVVQAYPGESDMTIDKVDDAKIIRFLYDNFISKGEYDDLEEKKQFFKLSSDKALEKVLFIDLDEDQSICIGPGYEVFTATKGRYLSFYASLFLLSMFLYRNEAEILISRIKGFKDKRDIGNIAKRSVFTFFSKKVSSRDVDNEEMPLVKFRDIMQYLNHYPTAWNDQLSDYSSSESSKNLCNKIVEMDIKRLFHEMFETENEESLRFLTYVKLTQYEALYPKKYVRAEFLKADFTSRETEHFDIIIKESKELKGCRKKLQDLLHADSLGNEKEKEIAECTEKIQELEGAETNPDLDAVRKQIDDHLFITSYGRNQDRFMDFAARFLAEVEYFGKDAFFKVYRFETIEEQSKYLEKVKNQLPKEQYDKLKMHRGRLATYMNHNQIINYYSSFDIPFVIENNSIQVFMPSSKIIEDMDDQMLKKIFKGKGTFYVIQRPLIIYLLEQFLYEPSGRKKMTFKALIENYCGRRKKGLEKYETLLLNDSDSKAAELQDQRSEMGKLLPKRLLHHYLSDLPREFMPLGLTELLEDAKQQEARYDKMFDEAERYGHSDDLLKKNKGKQFKLRFVRKAWNLMYFTDIYWVQRMECGDKHHKQFNITRDEFNHFSQWMYAFDEVPEYKECLNRLFLSKRFFEVKEFATLFESGKSLEDFYSKTKGLYKRWLGNKGYLNSNNKPKIEKNTWNNYKKILDGSTVCINLSLFIKILEDKNLLEKDADNHIIYKAQENMQYLISDYYMDQTFDRVYKDRLGDDESHAYKKLYNKLRTNRLEDALLYEMALYYMSRVNIGVKEARTHVCDLFNKEIDFSVYKDDDKENYLYKVQIPFYKIDAFDRLAVMNKSYDKFPPFTHQLYGYLTEDKYQSVFLSSERNAIRKRFIETKILTFDDFCKLLSSLRDDSLHFSNVHMFIEKYTIIAGGREIKNGEDMIEFDAATLFDLQDDRDMYAKVRNAAMHFNVPEIPYKRFLMKMQEGFIHKWIIPSNPTAWESLNKGMQEVCYKFMNVIYNRKKGDESWYFNNVIKELIYVYDSKSEKK

SEQ ID NO: 2575 - protein, 1174 aa, Artificial
  Synthetic
MAFSSKQLEQHILASYYNDARLNILACLNDIREKSGKRPIENEDQIKHAFTDLALSKATPERQTELIKQLRHRFHFLDLLTDASPQVSQKKKQDNATPLPHYYESHLTWMLELVNGLRNTMAHPVDKEITIAYAIHKKLYFALSKLYDSSFHTIKTRFSHETNAMQPFQRCDSKGKPKSAKQFAFALCTDPLDLSESSDLPQSKVLHDFGHILFCSLFLEKSQSAELINYFWQTQQGSKWGDTVQRTIIREMIAVYRVRLPLQRLKSDDTSTAVTLDTLSELSRCPRALLDALSPDDQARFRGDVGSNDSTDAADADTSENTYLFARSRQERFIPLMMRFFDFNPANKLRFAVDLGQFYYNVRLKPASQFTDETARVRRLGQKILAYGRLSDFDPDDKPAEWQQLENNYSVSRDEEEQTLQNASDTIQVLKPYIVPTYPHYHYFDDKIGFRLESKPATGYPDLQALAVDSAVILNSPASRDMMPEFWVSPAQLLALVFYSQLQPASPNQQRYLALDILLTKYRVGMKNLLNALAHGNVSLSGAPHSAERREQAQQWVDKHFDHNAGTRFAVPLSHLPKVVIQHLLGAEDRQVAVAEVVARAEHVLAETQHKQDQLKQLLQHADKKRGQKGFKAIKCGHIGDFLTDDLMRFQPVDADKSDGGKINSQQYQILQAALAYYGAHVNEPPKVVDLLRDAGLLHGKFAHPFIADLNLESQPNQYRGLISFYEAYLKARARYLKAFIKEQQQRRTVTFVPQWLRLRQPSSLQNWLNEQRDANGNLTQPLPLMDNMLYPPILALVGEALDIDPHTLEQEGMQRFMRGDEEIAIPPAVTWLIKRYLGARGDTSQLMYQYPRHHGLFDTWLDKRTPKQRFQEKPTHYLPEAERQAYRDEIRHFVQTNTSAKQADVELREKLGKLLKAYQRDEQTIRHSVSQDMLLYLSARQYLESLHLSNGGLAAKPAWSLQGIEKTLLRTEIHYALPVPGTDKQVFHPACKIRNLGELGLLVRDRRLPSLLRYYSCDENAIHHAEIRAELNSYRRAKVAVMAMVHELEKTLLKVLGDIPERTKEQEKQSKDFGKGRHGDFLFALYQQQRQRTGNEAETFSPARFKRTLLIRNAFSHNQYPDAAAFIPIAAQVQGEAVPSNPANHRKVAERLMQEMENLYSPWMRYLRQYKAE

SEQ ID NO: 2576 - protein, 1147 aa, Artificial
  Synthetic
MENQGQNKRTWGKDPQYFGAYLNMARSNIYNINNQLAETFVITPIDDEGKISSSFLGDKSNQTFKNKRNHIYSKIAVHMPIAKVFDFEKLPDDEKDKSENNFGKDFNKLSDTLKVVFDEINEFRNDYSHYYSTEKKDERKQKVSDELSIFLKNNYIRAKQYTQIRFKDVFSDEDFNIASQSVVVKDDNTITQDGIIFLTSMFLDRENAFQFINKITGLKGTQTKGFKAKREVLMAFCVKLPHDKFVSENTEQAFSLELINELNKCPKTLYNVITEEEIKKYKFRPQLEAEQIENILNNSVPDTIDDYKNYIESITKRIRNKNRFSYFALKYIDLKGLFKRLRFQIDLGKVVLDEYSKLLNEKEETRTVVENAKAFGMLQDFNDKERVLNKINTGENKTCFEQFAPHYNFNDKNNKIGISSKKEITTKYLPKNTNKKVKFYLKQPLPEAFLSIRELPKIILLEYLESGKAEQLINDFIGTNNLKILNKQFIEIIKSKLSEFDIFFKRSQGRKDKSAYKEGTLNYLRERKDKLNQILAEHKLNVKQIPTRILDYWLNIKAVQTKTTISDRIKLMKRDCMDRLKAIEKKKTPKIGEMATFLAKDIVDMIIGEEKKKIITTFYYDKMQECLALFADKEKKELFIHICNNELKLNDDDGHPFLKNINIQNIRYTTDLYKRYLEEKSDNRNERNKMDTSWLARTFYVIEKVEVFDKKKKRKVSKPQTVVKLPQDKSKLPFTLRQLEKEKSSFDKWLEHVTKGKETTDKKKPIDLPTNLFDDELKELLKTELSKNNIKIKSEANYNELFKIWWKECRKDSTQSFYEAEREYSFEEEKLNFKINTQPKFVEYIQPDFTEKVLNIKHALKNVKRKFPPIEKIQVIKTITSKIGNTEKKIRMLQEEDRLMLLMFEKMIDSDLNLRLKEADKLLSESILIKQNITGELSFNDYGEVVNKKDRKIITKTITETRKRKEYSVLVKYIFDRRLPELFEYFKEDVITLERIKLELDAYSKTKDIVFDSVFELEKLIITNNLQNILDINHKLYEEEKELLINRLNENSKNYEVEKKKIIDRIDSRKNIPHKSYLIWLFKNEIIDEKEFTFMNIVRNTFSHNQFPQKSTMELFITKWNNNKFACQILEIYKQKTDNIIKKLKDM

SEQ ID NO: 2577 - protein, 1131 aa, Artificial
  Synthetic
MEKTIENQTQSKRTLNNTPQYFGAYLNMARLNIFNISNHLAEKFGLAVLDDEEKITTSFLVDKGNKEYKTRQSLVYSNLTRYMHIAKVFDFEKLPDDERDKAENYGKDFGNLTDTLKEIFKELNEFRNDYSHYYSTEKKDKRKTIVSDKLKNFLNINYTRAIKYTKSRFINVFSDNNFCLAEEAKHVENDNTITQDGIVFFTSMFLDRENAFQFISKIIGLKGTQTKAFKAKRETLMAFCVNLPHDKFVSENSEQQFSLELINELNKCPKTLYNVISENEKQHFLPKLDDEQIDNVLENSVPYTIDDYENYIENITKKVRNKNRFSYFALKFIDQKKLFKNWRFQIDLGKIVLDEYSKQLNGKDEKRTVTENTKAFGMLQDLNDEENVLNKINTGESKAKFDQFAPHYNFDVQNNKIGISKKETTAKFITKNTDNKIKSNLLQPLPEAFLSINELPKIILLEYLEQGKTEQLINDFIEINNSKILNKEFIKAIKLKLNDLDVFYKRSQGRKQKHAYLTKDKKYDNEKINELKNRKEKLNQILAEYNLNVKQIPTRILDYWLNIADVQAKNAISDRIKLMKRDCINRLKSMKKGKAPKIGEMATFIAKDIVDMIIDEEKKKKITSFYYDKMQECLALFADKEKKELFILICNNELKLNDDDGHPFFKNINFSNYKYTSEIYQKYLEEKGHKMVKEYNPRKENYVEKDKSWLEINFYKKEWNENAKKDLTVVKLPDDKSKIPFTLRQLEKEKSSFENWFKYVTNGKETTDKKKPVDLPVNLFDETLKELFKKELSKNNIEFKEEDNYNELFKIWWDKCRNDKTQKFYSAEREYTFEEEKLNFHINTKSKFEEYINPEFAEKVFRLKNQNREKDNISGRRLPPLKMKEVTKNMVKRIGNTEKEIRMLQEEDRLMLLMFEKLVDNNLKLKLENVDKLLNESIEINQSISGKLSFNDSGDNENKKDRAIICRNITETRKRKEYSVLKKYVFDRRLPELFEYFEEENIPIEKIKIELDTYSKAKDVVFDLIFDLERAIINKDENRIKELNKDKNGVIQTGNIQHKPYLFWLLEKNLITEQEFTFMNMVRNTFSHNQFPQKKTMELFIKNWNENEFAKQILNVYNQKNNNLIKSIKDI

SEQ ID NO: 2578 - protein, 1174 aa, Artificial
  Synthetic
  misc_feature (681)..(684): Xaa can be any naturally occurring amino acid
  misc_feature (927)..(930): Xaa can be any naturally occurring amino acid
METNNTTITRRYGLKETPWYFGAYLNMARHNMFLLVNHVTEKFAYLNEKPLASDEDIVKDDHLLVKIFDPDKSVYETERMKVYKYLTSRHYLPCIRIFHEGPGDVTDTNPIVDYDGLHAFLRSAFNLLNAWRNAFTHYLAIDDNGNRLQERSLVIEQDMKGYLERLFARAPDFSLKRFEATHEEKDFDHLSFYRLFSEDNDLQLSEQGFYFFINLFLERGYAMKFLKKFRGFKNETTPSFRATLQAFTAYTPRVPDVRLDTEDSRQTLLLEMLNELNRCPREIYKRLKEEDKQKLVPHKGRAEEASHVLATTDYRDISDEDIDGLLSDISPLYRGGDRFPYFAARYIDEFDLLPNIRFQITLGKLQVDAYEKNIAGEIIERRVVRTVHAYGKLSDFTNRQNEVLEILQQQSVAGEGSYFQQYAPHYNMENNQLSFYLFNEEDQDKVKYPSQLPGNTSGNAPTGFLSLNDLPKLALLGMDKNKLIAEQVIRDFININRGLILNFEALEKLRARLSLVPKEFTRRVVNEKSIKGRDGMPDYLNKKKEARLLQSLRLSREELCRLESDELKRRIRNSKQLEYANQIRYVHFLENRKKELQEHLPEGLRVDQLPEQVVRHLLNINDHSSEKIIHHKIKAIYDDCRIRLRRIETQELKPEEERNLKLGELATFLSRDIIDMVVDQXXXXKQKITSPYYNKLQTKISYFSVSREEIIALCNELQLFQRESGHVFLSREMIMQSRGIVDFYKHYLTDKLEWIKNTLLSDNPRGGRYTLPEKAILPLSFFKIREKAGSGDFRQWLERKKQMPVSLPHSLFDKELEDRLSWRLHKENISFNEGDKFTIRLEKMLEGDMQPFYNFPRIYEVNGEPAEIDGSSLDGKTLKSRYGNSVEQSEKEIRFIRTRDRILKLFCEHILETYSNDKNTPFHPFQXXXXIYPSSETSPLNRPFSFKQPIIRKGNEAYITVIARDTEQQLKEVSEYSLLTTDEEKDAFTGQKGHEWTIKDFGRFKRLSADRRIPSLSDYFEFKEVPFKLLEYQLKEYDKYREEIFDITFEIEKHACDVALEDITRLELNKRQADGSKNFNNVQFGIYLQWIGDNDLLSSDEINRLRNIRNKFSHSEFPTYWDAIPKITKEAVARFEDNYRITGRIEQLDISLSKLIAEDYRSIANKILQRSNAS

SEQ ID NO: 2579 - protein, 1160 aa, Artificial; identical to SEQ ID NO: 2416
  Synthetic

SEQ ID NO: 2580 - protein, 1166 aa, Artificial
  Synthetic
METRPMENKNAYNHLTTDDKHYFGGFLNLAQNNIDRIFQEFCDRLNLKCEPGKHKDIINGFFKDKASYTDWEYGILILKEYLPVISIIDIPLSNKRIEVLAEKKEYKGKSKEEIKRAYFRRTFCMLLTAVNDLRNYYTHYYHAPIALDEGLFFFLDEALLHTVKDVRNNKMKADKTRQLLKKSLTAELEKLCALRKEELKEKKKLQPKVNLNDSAGIENAVLNRAFSPLLYKDKESDCEALSKYFSARLPEEMQHEAGVPISISGLIFLLSMFLRRKEVEQFMSNIERFKIRQIEIEEVSEKQNTLRIIALRWVFSTMAFKGVKRRITSTFEKETLMMQMIDELNKVPDEVYQTLSNKNKDQFIEDINEYVSETNKENEDPLYVIHPVIRKRYENKFNYFAIRFLDEYAQFPTLRFQVFAGQYLHDKREKKIAGIKLLSERLVKEKINVFGKLSDVVQKKNDYFKTHQTLKDKCWELFPNPSYNFATNNIYVYIDLFRHGERAKEVQVHINRLSKNLNRDRTQRISKEQIIKIVFDGLEVNRHPTLQLSMHELMSILYEFLVKKRTGEEIEKRIVEKIVEKYDLLMGYDSKQTDVSKKELPKKLLKSIPGNDQIDYAKLQRAIKQEIKNGEEKLKLIRDNRKEAKAYEGLREKKGKRKFVFYSKEKGREATWIANDLKKFMPVFTRTNWKGIQHSELQKLIAYYDTEYNQVKTLLGSVWDIHTDADKGKILFEAFNERVFEQFYIRYINQRNKVLNVFLTTIRHNLNEPRALKKVLKDVFTVFDKRLYQINSTNKQKDALLTKPFALSRGIFDDKPTVVPGHRPQDNPELFADWYVYGYHYNGAFQAFYETAREYDQWYTQKKKEGALPAFSGKDEAYKIQRFRKDCDLNIKRIKFQDVYTKLMVDFLFEKTFNGEKLLFDLSKLYESREQRLANQIKALQQKDRPEGDISENIRNENYIWNKTVDITLLEGRIVEKNIKLKDLGKFRRFVTDQKVEALLSYDTKTWSKQNLEDELENDKDCYEAIRRKVLLMHIQQFEKVILEKGGFDGKNHPEDFMVKGSPNFRMYIINGVLRRIGGISEGDLQLLNDMPFEKITIKEVEKMNELSQKAYLLIYLRNKFGHNQLPDKERYDLMRKLYPDCIISTFSSFFNKVTMLIIEELKMLI

SEQ ID NO: 2581 - protein, 1120 aa, Artificial; identical to SEQ ID NO: 1776
  Synthetic

SEQ ID NO: 2582 - protein, 985 aa, Artificial; identical to SEQ ID NO: 1567
  Synthetic

SEQ ID NO: 2583 - protein, 1003 aa, Artificial; identical to SEQ ID NO: 1936
  Synthetic

SEQ ID NO: 2584 - protein, 1131 aa, Artificial
  Synthetic
MEKTIENQTQSKRTLNNDPQYFGAYLNMARLNIFNISNHLAEKFGLAVLDDEEKITTSFLVDKGNKEYKTRQSLVYSNLTRYMHIAKVFDFEKLPDDERDKAENYGKDFGNLTDTLKEIFKELNEFRNDYSHYYSTEKKDKRKTIVSDKLKNFLNINYTRAIKYTKSRFINVFSDNNFCLAEEAKHVENDNTITQDGIVFFTSMFLDRENAFQFISKIIGLKGTQTKAFKAKRETLMAFCVNLPHDKFVSENSEQQFSLELINELNKCPKTLYNVISENEKQHFLPKLDDEQIDNVLENSVPYTIDDYENYIENITKKVRNKNRFSYFALKFIDQKKLFKNWRFQIDLGKIVLDEYSKQLNGKDEKRTVTENTKAFGMLQDLNDEENVLNKINTGESKAKFDQFAPHYNFDVQNNKIGISKKETTAKFITKNTDNKIKSNLLQPLPEAFLSINELPKIILLEYLEQGKTEQLINDFIEINNSKILNKEFIKAIKLKLNDLDVFYKRSQGRKQKHAYLTKDKKYDNEKINELKNRKEKLNQILAEYNLNVKQIPTRILDYWLNIADVQAKNAISDRIKLMKRDCINRLKSMKKGKAPKIGEMATFIAKDIVDMIIDEEKKKKITSFYYDKMQECLALFADKEKKELFILICNNELKLNDDDGHPFFKNINFSNYKYTSEIYQKYLEEKGHKMVKEYNPRKENYVEKDKSWLEINFYKKEWNENAKKDLTVVKLPDDKSKIPFTLRQLEKEKSSFENWFKYVTNGKETTDKKKPVDLPVNLFDETLKELLKKELSKNNIEFKEEDNYNELFKIWWDKCRNDKTQKFYSAEREYTFEEEKLNFHINTKSKFEEYINPEFAEKVFRLKNQNREKDNISGRRLPPLKMKEVTKNMVKRIGNTEKEIRMLQEEDRLMLLMFEKLVDNNLKLKLENVDKLLNESIEINQSISGKLSFDDSGDNENKKDRAIICRNITETRKRKEYSVLKKYVFDRRLPELFEYFEEENIPIEKIKIELDTYSKAKDVVFDLIFDLERAIINKDENRIKELNKDKNGVIQTGNIQHKPYLFWLLEKNLITEQEFTFMNMVRNTFSHNQFPQKKTMELFIKNWNENEFAKQILNVYNQKNNNLIKSIKDI

SEQ ID NO: 2585 - protein, 1023 aa, Artificial
  Synthetic
MDAPINNKPLFAAYLNMARNNCHIALSHIAEKTHKDGGINEDAMHNCAVIGILQADKRPDESRRIVELIDQHFPFAKLFIHNRINPAPADYALLLINFIFQLNQLRNFYTHHTHKPYTTDEKIMGQLQFLFDVSRRKVRQRFSLHQDDVKHLVRKTTKIINGERTAVEKENYPYAFADKNGSFTEKGLAFFICLFLEKKYGYLFLKQLRGFKNSSTKQTKATLEAYCFFHIKVPQPKLQSTNTDISYLLDVLEELKRCPDELYSHLSETDKKSFISIDEADQDEEQPENILKRYNDRFPYFALRYLELTNALGGLQFYYDLGKYYFKVYEKAVDGEMRLRRLHKDMRGFGRLADFKVENMPEPWPQLSKRTDELAENYAEPYIAYTIPHYHIVNNQIGLCLGPKQIPSLSSPLGSPEPDMWLSIYELPALIFYHLLTKGDNKIKSAKEVLSTHCKAIRLLFSNIKDKKLVPGYERESLAAELKSRNLDTDQVPSVLLEYLLGQSPSISAIQKAQSRLKELKNETELLKNKIDIDIQRSKEKVGSKVYRPIKTGKIADFLARDMLLFQPPIDKIKGKATSTLFQVLQARLAFYGRDKHLLHNLYKECNLMDSKNPHPFLNELSITDSLIEYYRNYLFKREAYLDKCLKKCMQGKIGSPELHFLHLGEREKRNGADYYIKLAEKFLTMPINLPRGIFMDALIRHFKQAENEAFKNLVKTDRVNTSFLLQEYLTKILSDNTQNFYNLKRTYRVFNNYYDNRKPNSRDGLSELYFNVPQLSLESEKIKAAILKTKDPEVKENVHRNYKYYTENEKQIRKAKTCDIVLFLILRDLFPSLESSVFKGLAINQIRLADILPNAETGILSQQIEIKLPLHGKFIVQRNIKLKNYGDFRRFLKDRRLESLLPYFEEEYIDRAKIERELEDYDTARVLMHSMVLEFERQVVVKNKLDYASPESGVINFEEILNSFFQNNDTNIKREQMMNLRNKFSHNQYPDFSIFNEVIKSNTKDISIAKKFIEIAEQLFLP

SEQ ID NO: 2586 - protein, 1091 aa, Artificial; identical to SEQ ID NO: 2449
  Synthetic

SEQ ID NO: 2587 - protein, 1112 aa, Artificial; identical to SEQ ID NO: 2039
  Synthetic

SEQ ID NO: 2588 - protein, 1047 aa, Artificial; identical to SEQ ID NO: 1398
  Synthetic

SEQ ID NO: 2589 - protein, 1047 aa, Artificial; identical to SEQ ID NO: 1398
  Synthetic

SEQ ID NO: 2590 - protein, 1042 aa, Artificial
  Synthetic
MENTATITKAPGIAYDIDNPAHKFYFGHYLNNARHNLFKIFNHLLHGYGQPTVGENKLADCILLSPVKFQSFTSPAALYEYMKQYLPVIEYLKETNKEEQVFGTLRRLLLDLNTFRNYFSHHHYTAPLAFNNFKESGKFKKSMPYLFGSAVAAARKKTRLPHDAFEEIFKWKTSEKHGHVLEPSWQQEMMKHASSIPTVFGLVFFTCLFLEAKDAGLFISRIKGLKNATEDKFKANREAFLAFTITLPKPPKLESSDIKLDIINELFRVPRSVYKTWEPEQQRAFIITNEETQQQSIMKRYKNRFDYFALRYFEDNAALSNIFFHIKLGEAYLAEYEKPKPGDDIKTNRLVTKQLNTFGPLQFFHNKKNLSNLGYDISDLITGQMIKINGMSVKYMPQYRMTDNKIGLKVVNQSAAPVIPQVGKSDRPLNDIYPYAFTNLSPDIILSTYELPNLYLYNYFHRLGFIKTAPHEFLETCLKQQEVLFTSLKNQEASTMNDAGYKKTKLPVKIRKHITGSTSIAEEVRKKLRSLLNDTNETLDRLAEQGKLEKGKGKTGFTAGSVATWIATDIQFFSRPDDKKQKLSDFEYRSLQEYIAFFGSNRNKIDALLKSFQITGTDNNRHPFLKTVQGMIDEFTARVKERQKKGRGPKRNFDTAIYSLSTFFKDYLFERRRYIEDLLKNINDNMIDNISYFTKIKRNAQAELDYHEPVMLPRNIFNKSIVVGLKDFMQSKNIPFSTGDVKKCSPSFFLKQLMPKLQEFYDLRRTYKKYDVVEGEYEFVEDIVIDKDNDLRKCQIKLKADGEAYTELLNRIDNNELDIRLEQYRDRVLFMMLQEYFNNQGIEELDFSDKTLKDFSKDFRDNTTKTILDTEIDMSIRLNDVDIKARLPIGRYGEFRKILRDRRINELLGYFEIEVAWNTLQEELEYYNQNREKVLKACIEFEEAVYAKHGSKMNHLVKDNHISHYNFLQYYHFSVKKLNDDYLGKDGEIKVAELRNRFLHNQIIDKQFFTEVFRDVEFNSSLITKQIIDSVTDVYSQLKSSV

SEQ ID NO: 2591 - protein, 1131 aa, Artificial
  Synthetic
MEKTIENQTQSKRTLNNDPQYFGAYLNMARLNIFNISNHLAEKFGLAVLDDEEKITTSFLVDKGNKEYKTRQSLVYSNLTRYMHIAKVFDFEKLPDDERDKAENYGKDFGNLTDTLKEIFKELNEFRNDYSHYYSTEKKDKRKTIVSDKLKNFLNINYTRAIKYTKSRFINVFSDNNFCLAEEAKHVENDNTITQDGIVFFTSMFLDRENAFQFISKIIGLKGTQTKAFKAKRETLMAFCVNLPHDKFVSENSEQQFSLELINELNKCPKTLYNVISENEKQHFLPKLDDEQIDNVLENSVPYTIDDYENYIENITKKVRNKNRFSYFALKFIDQKKLFKNWRFQIDLGKIVLDEYSKQLNGKDEKRTVTENTKAFGMLQDLNDEENVLNKINTGESKAKFDQFAPHYNFDVQNNKIGISKKETTAKFITKNTDNKIKSNLLQPLPEAFLSINELPKIILLEYLEQGKTEQLINDFIEINNSKILNKEFIKAIKLKLNDLDVFYKRSQGRKQKHAYLTKDKKYDNEKINELKNRKEKLNQILAEYNLNVKQIPTRILDYWLNIADVQAKNAISDRIKLMKRDCINRLKSMKKGKAPKIGEMATFIAKDIVDMIIDEEKKKKITSFYYDKMQECLALFADKEKKELFILICNNELKLNDDDGHPFFKNINFSNYKYTSEIYQKYLEEKGHKMVKEYNPRKENYVEKDKSWLEINFYKKEWNENAKKDLTVVKLPDDKSKIPFTLRQLEKEKSSFENWFKYVTNGKETTDKKKPVDLPVNLFDETLKELLKKELSKNNIEFKEEDNYNELFKIWWDKCRNDKTQKFYSAEREYTFEEEKLNFHINTKSKFEEYINPEFAEKVFRLKNQNREKDNISGRRLPPLKMKEVTKNMVKRIGNTEKEIRMLQEEDRLMLLMFEKLVDNNLKLKLENVDKLLNESIEINQSISGKLSFNDSGDNENKKDRAIICRNITETRKRKEYSVLKKYVFDRRLPELFEYFEEENIPIEKIKIELDTYSKAKDVVFDLIFDLERAIINKDENRIKELNKDKNGVIQTGNIQHKPYLFWLLEKNLITEQEFTFMNMVRNTFSHNQFPQKKTMELFIKNWNENEFAKQILNVYNQKNNNLIKSIKDI

SEQ ID NO: 2592 - protein, 1194 aa, Artificial
  Synthetic
MENTFAAFLRHFDNAGIVGPISEKAVKNIELKRSNKINRMQRIHYFAIGHTFKQIDTKTVFQYEFSEDDKDEVPTKFLSLQSYNFLFEEKLFSLIKSIRNLNSHYAHTFDSLEVENTIGSKLINFLKESFELASLQTYLKEKGNLPIDDFELTNFLKRMFIPKKKGRDKDNNERKQKNKNWNLYVDSLKTKEQVIDAILFISVDNEFFWKINNEVEVLKITEGTYLSFEACLFLISMFLYRNEANSLISKIQGYKKSNNDKMRSKRELISFFSKKFSSQDVDSNETHLVKFRDIIQYLNHYPITWNKDLKLQSENDNPKMTKVLIDRIISMEIYRAFPDYADNIGFSEFVKKYLFSNSKKIQINYVMNKLSDIEREYYEVVTQDPHIKIFKKDIEQAVKPISYNRKEDAFKIFVKQYVLKTYFPKIKGFEKFTSHKFKYNRRTGKTEDVENDFQSKLFTNLETGKLKRRIIHKSLFKSYGRNQDRFMNFAMRFLAQRNYFGKTVEYKTYQFYNSLEQEAFIEELKANKCNKTPKELKNEIDNLKYHNGKLVHFTTYDKHCENYPEWDAPFVNQNNAISIKITLGQVEKIIPIQRSLIIYFLEDALYSDNPDGKGLITNYYYNSYLKDFYKYNNSVINDKINADDKREFKKLLPRRLLNQYVPAVQNNLPKHTVLEKLLIEAEKKEETYSLLIAEAKKTEFKINQAYTEEKATLLEDFKNRNKGKRFKLQFIRKACHIMYFKETYDLQVADGKHHKRFHITKDEFNDFCKWMYAFEGEDNYKRYLNELFEVKGFYLNMDFKKIFNDSTSIESMYQKVKMAYKTWLVNNDVKKERQINYAIEKVEIKKDIYKKVYKINTNMFYINVSHFIKFLESKNKIKRDSKNRLIYNSLENETFLIKEYYYKKQLEKSEYKDCGKLYNKLKKNKLEDALLFEIALNYMVNKDIISKNNVNDMLLQNLVFDIKNRIDKDSYKITVPFSKIDNYLEFVTQKNMQEDSVYATSFLGDLQEYLKLNQIPNGKKGDKSIYIGDLQFSDLTAINNHIIKEALKFSEMLMSAEAYYIHKDKMQIKDNAYNIDSKDIPSLQVIAKAWRIWGSEQEEDDKPEIDFRNLVCHFNLPLKKKLVDIMHDAEQRFVKAEISKNITDFEQLSDTQKNICQVFIANLHNAICYPNYKQGKDKHANAKKIYFNKIIKAN

SEQ ID NO: 2593 - protein, 1049 aa, Artificial
  Synthetic
MDISNEKTSRYKDLENDPYYFNHFINMGRHNAYLILHDVYKTVYKEELSLEENNLAVFRKKVLEKSQNKPDEIAKVVNMLLRHFPFLAYYEERQQYVKEKHEYESLNRLADYLGALNKIRNQTSHYKHNKEDIYLPDYQGLFQMSVKEAQNRMKYEDKDVKHLYRTQYYNLVNNNILTEAGISYFVCLFLDKKNGYLFLSRIKGFKDRNKTSERYKSATLEAFTQFHSHVPYPKLDSSDIALDMLNELNRCPKQLYNVLSAEDQNKFIATLSEDGDDELPKPLMKRSEDRFPYFALRYFEKSGKLDNITFQLYLGRKHAQEPHTKKIAGVERTHFLLKNMHVFGKLPFYKEEEAHRFYGENEEVEFYAPAFRMVGNRIGLVLREELQSHYTVPATNKTEKDKNYPDAILSTRELSGLFFYNFLYKKGWIEDSPQKFIRNYLLEFRRFINDLQEKKIVPISTTSFIGKRKRHKDEDLRILNERSNKLQALLDEYGLKIDWIPDDCREYLLNYRVSSDAYIIKEKFVVMRKNANSKLARMKAFSEVESEAEKEGVRTMSVARKQLRIGELAQELARDIVFLTPPQEICGGEKKKINNMEFDVLQKMLAYFPVYKDELKTYFDVLKEKDKKWKHPFLHWVVTSRYTSYSSLIKMYEAYYQSKIKWIDKEILDGIRGTEGYITGWRLKDIDAVVSKYEYILKLKQKTKLAIDKEYLDKAVYLPTDLFKCAIVKTMRGHGYTLKEGSSVAGCLMIYLKNKKQPMYGLPRYYQAKDLGFGQEKSRDEIKEHIKNKFESVDAEVQRDMKIVAKRIRENETEILRQQANDRTLFLMVNDLLPASFEEDDIERLGFNQQDNILESEYDMSERIYGRKVTTRLPIKRYGEFRRFLKDRRLENLLKYYPEESDIALGIIESGKTQQRGEKFMYSNLAEELELYDMERDHLLELMYKVDKTLVDNFSEIPKKNNKYYEHYDCLEYAKNSLGLTEDVELLEKETFKTLRNSMLHNQIPYEEWIKEEIDKMEGEPMITKRIITLIGDVYNRLLSGIELKISNS

SEQ ID NO: 2594 - protein, 1024 aa, Artificial
  Synthetic
MPYYHSTIDKALFGAYLNMARNNLRMVLTNIEEKVYGKSGNWKEDSMRHSSVIKALEKNEQPDVSKRITDMLLRDLPFLKLTVKSKLNPSANDYATSLIEFIEQLSQLRNFHCHYLHNPYKTNPEIIESLRHIFDAARRRVKIRFNYTTEEVEHLVRKIAGMVNGKRVGIEKKNYSFAFADAHEEITEIGIAFFTCLFLNKKYITLFLKQLKGFKDSRTRKTRATINTFGFFNIRIPQPKLQSNDTKEGLLMDILEDLKRCPNELFEHLSAEDQERFRVKSDNQEEENEVLQKRFSDRFPYLALRYFELTEHVKDFQFHTDLGKYNFKHYKKQVGGEERIRQLQKNMKGTGRLKDFTEDKMPEEWNVLVKRSDELPGDYMEPHIVFTNPHYHFVNNQIGVCINDFAKYPDAKTRKNPEPDIWLSIYELPALVFLHLLTKRDDGSSEIKWVLYRHNQNIKSFFIAVAEENLQPGFTKETLQTELKKYNLEYNHIPKVLIEYLLKKTAKNVQEKAEGKLHVLISETIVLLRKLDEDVEKAKEKEGGKRYKPIQSGKIADFIARDMLFLQPPVNEKEGKATSTLFQVLQARLAYYGRDKNLLNSLYKECNLIDSANAHPFLNNVPLAYSIVDYYKNYLLKRKEYLEKLREKCMKGKINSNEFHFLHLGAREKRSGDSYYKNLAKTFSEKPINFPRGLFLNAIKQQSKNKNGESIKKLLEEHERVNTIFLIQEHFKTVEEDEAQPFYNFERNYFLIDQLLDKRKQNSREARKQYYYSAKELAEEVNKIKEEIKKIPVRYDDEKRMRIIAEKNYHHLTENEKILRHIKTCDIILFLLVKDLLQSLEEPLFGATDLKNIKLRDIMPDAEKGILSMPINFKLKYGDKFICQNNMKLKNYGDFRRFLKDNRIKNLITYFPEKDITKEKLEKELEQYDKARIEVQKIILEFEKQCSERYNICIGDSDRYIDHKTILDKWQANNLNNPDRDQMEDLRSSFMHNDYPVKISLDAKEDSTIAEKLVEKARELFILN

SEQ ID NO: 2595 - protein, 1091 aa, Artificial; identical to SEQ ID NO: 2449
  Synthetic

SEQ ID NO: 2596 - protein, 1146 aa, Artificial
  Synthetic
MEEDTTMVSKNNPFEIFFNEKIHIGSLAEKAKKNFISNNVDGPNKLSRLYYFSIGHALKKIDYNATFKCEFSKDRDEKIPTRFLNLCSNSFDDKRVKYMDLLIGDIRNICSHYLHNFDKISISDNFTYKENGKTITLLLEEVFASFLNEAFELAVRQTCSKGKNDETDKDVVAFLCDKFFIGKNLNISKDEAIKRVLYIVVDKDSPVMDGSHVLFTAHKGTYLSFYACLFFLSMFLYKHEAVKLISRIKGFKRSDKVFSEKRDLFTFYSKKVSSRDVTNEEEPLVKFRDIIQYLSHYPTVWNDFLLLNPENTHVKDLLNGIVAMESKRLFPKMFVNPVKAGRFIIYVKYHLFVSLYSKKALEREYFDAELTGAEEEKFNKIVSNSRELLGVCKKLNDLRSSAQANREDTEKEAKIKACKEQIKELVNNGTNAELEKIAKRIDSNLFISSYGRNQDRFMTFAMRYLAETMYFGDDALFEIYRFETIKEQVDFFNEAKKELNKKQYDRIRMKHGRVTEFVTYQDLVKNHSGMPFVFENNAIQVFIPKEEQSINAIDRDKLNGLGTFYVIQRSLMVYLLEHALFHDEEISFRDLITRYDEVRHDKLDEYNKELNSDVSLSAERKKEMKKLLPKRLLNHYLPAESDNSLSAKASFYDLIDKTEEQGKRYTSLRKQAEKGHYLEYFDKKNKGKSYKLVFVWEAWNRMFFADIFREQVAESSDGKNHKHFNVTRDEYKIFMKWMYGLGDTPQYKDCLQRLFQPKKFFENNDFKLLFERGNSLDDFYQSTLQLYKQWADRQSLPNKENKYKLENYVDLLDSNIVYINLHTFMDVMRERNILNLKPNGHNKYKTYSNIKYLIDFYYISATFDSGYEGKDKKEYRKLYNKLNSVRIEDALLYEIAIKYLISANSNNNNYRIKTSVTNFYDRYILYPIKDNHTHQRLYDVSIPFNNIDAFDRLIILNNESDMVKQLKEYLSEEKYVTVFSTEEMRTIRNSFIENNVITYNNLVKVTQKLQGESLQFSNLILAIERYYFNSKNISLKDEDGGYFSFDSSILCDEDHGKSEFNEIRRAACHFDIPPQPYRTYMKKMEQKFIEKYIVPSLPMSWNSMNCSLQDVCRMFMVTLNQKRRDESDEEAFNRCMQGISGNIKVG

SEQ ID NO: 2597 - protein, 1122 aa, Artificial
  Synthetic
MKEEETPVVSTYNKDDKHFWAAFLNLARHNVYITINHINKLLEIREIDNDEKVLDIKALWQKGNKDLNQKARLRELMTKHFPFLETAIYTKNKEDKKEVKQEKQAEAQSLESLKDYLFLFLEKLQEARNYYSHYKYSESTKEPMLEKELLKKMYNIFDDNIQLVIKDYQHNKDINPDEDFKHLDRKGQFKYSFADNEGNITESGLLFFVSLFLEKKDAIWMQQKLTGFKDNRENKKKMTHEVFCRSRMLLPKLRLESTQTQDWILLDMLNELIRCPKSLYERLKGEDRKKFEVPFDSTDEDYDAEQDPFKNTLIRHQDRFPYFVLRYFDYNEIFKNLRFQIDLGTYHFSIYKKLIGGQKEDRHLTHKLYGFERIQEFTKQHRPDDWKAIVKDFDTYETSEEPYISETTPHYHLENQKIGIRFKNDNDKIWPSLETNGENNEKSKYKLDKQYQAEAFLSVHELLPMMFYYLLLKKEEPNNDKKNASRVEGFIKREIRDIFKLYDAFANDEINNIDDLKKYCKDKHVEIRHLPKQMIAILESKPKDMAKEAKRKQKEMVKDTKKLLATLEKQTQKEKEDDGRNVKLLKSGEIARWLVNDMMRFQPVQKDNEGKPLNNSKANSTEYQMLQRSLALYNKEENPTRYFRQVNLIESSNPHPFLKWTKWEECNNILTFYHRYLTKKIEFLNKLKPEDWKKNQYFLKLKEPKTNRKTLVQGWKNGFNLPRGIFTEPIREWFERHQNDSEEYKKVEKLNKAGLVTKVIPLFFKKEDSKDKEEYLKKDTQKEINDCVQPFYNFPYNVGNIHKPDEKDFLHREERIELWDKKKDKFKGYKEKIKSKKLTEKEKEEFRSYLEFQSWNNFERELRLVRNQDIVTWLLCTELIDKLKVEGLNVEELQKLRLKDIDTDTAKQEKNNILNRIMPMQLPVTVYEIDDSHNIVKDRPLHTVYIEETKTKLLKQGNFKALVKDRRLNGLFSFVDTFEAELKDKPISKSVVEYELGEYQNARIETIKDMLLLEETLIKKYKTLPTNKFSAMLNGWLEGKDEADKARFQNDVKLLVAVRNAFSHNQYPMRNRIAFANINPFSLFSADTSEEKKLDIANQLKDKTKETIDKIIEIEKPIETKE

SEQ ID NO: 2598 - protein, 1003 aa, Artificial; identical to SEQ ID NO: 1494
  Synthetic

SEQ ID NO: 2599 - protein, 1242 aa, Artificial; identical to SEQ ID NO: 2085
  Synthetic

SEQ ID NO: 2600 - protein, 1003 aa, Artificial
  Synthetic
MGAIENKHIFAAYANLAIDGLIKTLNFIAKKLDTQKQLSSWDIKHVITLIDSIFDQNPQNNLEQVVEGYLPWIKPIIEMKTPKKGERQSDKLCIEYKTIITAFASLLNDVRNYYTHYYHDPICIYPGGYDIPSSLNCIYDSAINIIKERFQAEEKEMEHLRRYTRKKGRVVLKTEDDHFYYTLANNNDLSEKGYAFFISMFLERKYSYLFLKKLSGFKRGDSLQYRLTLEVFTALSTKPPVERLRTTKDTKQDRALDILNELSRIPIELYQTLEPKYREMYNETLQPTDAEDPYGLPDRSRIRFRSRFEAFALHFLDKQADFKEIGFYTYLGNYFHNGYQKTRVDRETKDRYINFQLAGFCKNIQDISAKKLSEALNVKSIDISTDSIPDINSFEPYLVQSTPHYIVNGNNIGIKVLPEGKDTYPTIDEKGAKMPIADFWLSKYELPAMLFYTYLRNNNIHKSHCPLSVKDIIERSIHKSTKQKHPEERSELMLRRVMKAIFWTDSKLNEVERIKSQKSAFGKRQHEILKAGRIAETLVRDMLWLQPSKNNGRDKVTEPNFQAIQVSLAYFGIRRNDLTEIFTRAGLINSSNPHPFLAQIGTNYTSLIEFYIAYLKERKVYFSRIQKKILQGKLNIQCHPLRDLQREPNKPQEKEEAIFLPRGLFNEAIINCLKKSKLKQLIESPTREKSPALNVSYLILNYFRTYFEDQSQEFYAQPRNYRLFDKLSPNKGKSKSYLSLEQRIKKMEELRRSKFPDGETNIVLEKEDRLYRKNYNEICDNESIIRLYQIQDILLFMMTKEYLPSDLYNRINKYKLENVKGILNERVSYLIDLNPLKIQGEDIKIKDYGKLFYIHHDTRINSLNKVLSKVKRNNSISSSVKIQPYENYKRECLDFEEAQIQIIPIIHSFEIAMVSMFPDLKKATPGNYYDFNELITEYEKRTKQKIDSSFLIKTRNMFLHDKYEAECIKEISDDFVYAKKIIAEFKMKIENIKLEDFSNDSSA

SEQ ID NO: 2601 - protein, 1094 aa, Artificial; identical to SEQ ID NO: 2547
  Synthetic

SEQ ID NO: 2602 - protein, 1147 aa, Artificial; identical to SEQ ID NO: 2196
  Synthetic

SEQ ID NO: 2603 - protein, 1147 aa, Artificial; identical to SEQ ID NO: 2196
  Synthetic

SEQ ID NO: 2604 - protein, 1127 aa, Artificial
  Synthetic
LQKQDKLFVDRKKNAIFAFPKYITIMENKEKTKPIYYELTDKHFWAAFLNLARHNVYTTVNHINKLLEIAELKNDEDVLNIKDSWNKQAEKLDKKVRLRNLLMRHFPFLEAAAYEKTTSKDSNSKEQKEKEQAEALSLDNLKNVLFIFLEKLQSLRNYYSHYKYSEEAQKPTFENDLLKNMYKIFDTNVRLVKRDYMHHENVDMQRDFSHLNRKKQEGQTRKIIANPNFRYHFADEKGNMTIAGLLFFISLFLDKKDAIWMQKKLKGFKDGRNLREQMTNEVFCRSRISLPKLKLENVQTKDWMQLDMLNELVRCPKSLYERLREKDRESFKVPFDIFSDDYDAEEEPFKNTLVRHQDRFPYFVLRYFDLNEIFEQLRFQIDLGTYHFSIYNKLIGDEDEVRHLTHHLYGFARIQDFAPQNQPEEWRKLVKDLDHFETSQKPYISKTAPHYHLENEKIGIKFCSTHNNLFPSLKREKTCNGRSKFNLGTQFTAEAFLSVHELLPMMFYYLLLTKDYSRKESADKVEGIIRKEISNIYAIYDAFANGEINSIADLTCRLQKTNILQGHLPKQMISILEGRQKDMEKEAERKIGEMIDDTQRRLDLLCKQTNQKIRIGKRNAGLLKSGKIADWLVNDMMRFQPVQKDQNNIPINNSKANSTEYRMLQRALALFGSENFRLKAYFNQMNLVGNDNPHPFLAETQWEHQTNILSFYRNYLEARKKYLKGLKPQNWKQYQHFLILKVQKTNRNTLVTGWKNSFNLPRGIFTQPIREWFEKHNNSKRIYDQILSFDRVGFVAKAIPLYFAEEYKDNVQPFYDYPFNIGNKLKPQKGQFLDKEERVELWQKNKELFKNYPSEKKKTDLAYLDFLSWKKFERELRLIKNQDIVTWLMFKELFKTTTVEGLKIGEIHLRDIDTNTANEESNNILNRIMPMKLPVKTYETDNKGNILKERPLATFYIEETETKVLKQGNFKVLAKDRRLNGLLSFAETTDIDLEKNPITKLSVDHELIKYQTTRISIFEMTLGLEKKLIDKYSTLPTDSFRNMLERWLQCKANRPELKNCVNSLIAVRNAFSHNQYPMYDATLFAEVKKFTLFPSVDTKKIELNIAPQLLEIVGKAIKEIEKSENKN

SEQ ID NO: 2605 - protein, 1091 aa, Artificial; identical to SEQ ID NO: 2491
  Synthetic

SEQ ID NO: 2606 - protein, 1160 aa, Artificial
  Synthetic
METQEQIAKNIYYAHDIYEDKHYFGAFLNLAQNNIGQVFSEFCTRLNEPKDENVHNIIIKYFSNNVSYSDWDKRIKILKEYLPVIEHLNLPTSDNIFEEYQINEKENKKRDYFRKNFQSLIKSVNDLRNFYTHYYHPPVVIDESLFDFLDSLLLKTCLTVRKKKMKNDKTRQILKKGIIAEWKVLEELKVNELKKNKEKNKWINIDDKEGIRNAILNDSFHHLIFKDKDSFCLKDYHKAKYSKNIFAENKIPISKSGLVFLLSLFLTKKETEQLKANIEGFKAKVIGKEDEVTKKNNSLKYMATHWVFSYLTYKGLKRRVSTSFNKVTLLTQMLDELSKVPDEVYQTFSISDKDEFLEDINEFVQESTGDDKSLIESTVVHPVIRKRYENKFNYFAIRFLDEYANFPTLKFQIFAGLFQHDHKTKNIGESNYISDRQIKEKINVFGKLSKVAKYKSDYFTENENENEWHLFPNPSYNFVGNNIHIYFDMYRKGAEVKSVQEEINALRKIINPKKDRVNRKGKKEIIDMIYNKSSKIEYNEPTALFSLNELPAILYEFLINKKTGEDLENILVQKIVERYKTIKNYNTTQQLSNSFITKKLRKSSLKQDQINIEKLLRSINKEIEINGEKLNLIKTNKEETTKTNKQDKPERKYIFYTNELGQEATWLANDLVRFMPKFAKTNWKGYQHSELQRLLAFYDRHKNEAKTLLTTNWDLNSFPIWGSDINEAFDKDKFDEFYEEYLKKRKKTLEGFANTIELNKNDPKLLKKVLKEVFIAFDKRLFVISSIDKQKNELLAKPIVFPRGIFDNKPTFILGQKVEQAPSLYADWYSYCYDKSLRFQKFYDFNRECTDSFEKYEVENKESKLNKKNLSRQQKIDLFKKKQDLLIKKVQHKDIFIKHMIDYLFFKVFKKEIDISLNEIYQTKEERLNNQIVAIEQRDREKGDKSENKLIDNFIWNKTISMSLLNGQIIEPDVKLKDIGKFKKLETDKKVHHLLSYDKTKIWNKLMLEDELENKLDSYERIRREKLLKLVQLFEKGIIENHSENNDEHPKEFEKDGKPNFRKYIAKGVLKKNTKIAESEINWLSDIKDMETVEISEVNSKSVILQKAYTLILLRNKFGHNQLPDKNAFDMMQTLYKTAENETYSKYFLRVTEQIINEFS

SEQ ID NO: 2607 - protein, 1146 aa, Artificial; identical to SEQ ID NO: 1461
  Synthetic

SEQ ID NO: 2608 - protein, 1029 aa, Artificial; identical to SEQ ID NO: 2444
  Synthetic

SEQ ID NO: 2609 - protein, 1131 aa, Artificial; identical to SEQ ID NO: 2584
  Synthetic

SEQ ID NO: 2610 - protein, 1131 aa, Artificial; identical to SEQ ID NO: 2422
  Synthetic

SEQ ID NO: 2611 - protein, 1116 aa, Artificial; identical to SEQ ID NO: 2394
  Synthetic

SEQ ID NO: 2612 - protein, 1003 aa, Artificial; identical to SEQ ID NO: 2553
  Synthetic

SEQ ID NO: 2613 - protein, 1146 aa, Artificial; identical to SEQ ID NO: 1461
  Synthetic

SEQ ID NO: 2614 - protein, 967 aa, Artificial
  Synthetic
VDAYKEESKQAHLFKDNYITTEGRVFFLSFFLTSGEMSSFLQQHRGSKRTDELKFRIKHIVYRYYTHRDGSTRQKFSQEDDVLSSFSPNDQQDVLMARQSFKLRTYLNDVPDSANNIDLYPLFTDSGERKPAETAQELKAFCDQRELFTTIQITDVANKKGEIQTGVLNFSIPALGDTAVRLGRGTFHKLIIDTLRRHDNGKFVYDGLTWLITERLKLIEELQKLDTLQHLDETSGMAQRKFFEEYMLHKLNGNLYLQQLMRNWFYAFEKDLKKEGKLRDKLVQGCIQDPVAPGYYDFYFEEGEKPRNTDRFSEFAVKYLIDFNLAPDWEWMMESFGVADKHGKAISGKNKAFFSHFKSGTAWRLSVTDGCVIVRLKRLPDFRFQLGHRALKNLLIAHFYQKANIGTLLNKLTKDTQKIRNVLYNKTSHTLTDLALLERKNLPRFVLLTLGDAQTAAGETVENATVATLKRISNLIAKLRDWRTNHKTISRNEKNRIIMDCYQLFDWKYPDTGTYKFLRRDEYQNMSIYHYMLERVLNLREDITYFQQKIQDAEDYGKKKKYQMAIFDNNKQIERTETILSKLLKDVKNRIPEEVNQILENSESLDDLLKNATTDAIIKLSEWQLELEKGNNELFETVRQKLGIPQPVPVVNEAVKLRWTDKQNGHFFHQVHPAVVVHHFFKSEISDPANSNSNQGFSLSKLIRGDESYTGGLRHAHYNYKPYLATLNTGNATEKAVLHKAIRFNNTQLTEDALLWKVAQVYLGKVNPVVKSVLDAQLNKSGILKIENLHATELPLQVNIGNDTLTLSLRFHQLDDILLFASKAALQKAAAHYLNRISPEERAALLTEPNTLPYNEMKQEMMRINHQSLEFAHYILDYERGIIDAADEKTLPAKEEPFPAVCKRAQLSDEQSAELILLRNHAFHNKIPMGWNYTQKRQTEWLRKLLNITEKEPVDYEALAREQKKNI

SEQ ID NO: 2615 - protein, 1003 aa, Artificial; identical to SEQ ID NO: 1936
  Synthetic

SEQ ID NO: 2616 - protein, 1003 aa, Artificial; identical to SEQ ID NO: 1510
  Synthetic

SEQ ID NO: 2617 - protein, 1124 aa, Artificial; identical to SEQ ID NO: 2558
  Synthetic

SEQ ID NO: 2618 - protein, 1097 aa, Artificial
  Synthetic
MEYTRYKEWGKDLFYFNHFANMARHNAFLIINDILNTVYKAEDQLTEESLSNLYKKVLAKSKGRPDELALLSSLLKKHFPFLHYYDNVQSDEIAPYLNSIKDLNIYSNKPEEVPKDDDPGMCIWWLSYVFLPILNRLRNETAHYGHTKLGGDIPFLEQSFNETIKEAQKRMNYSHEDVEHLLRTDSYYKPLSINKSLSEKGIFYLYCLFLDKKNGYQFLSHIKGFKDRRETAKKATTEVFTHNHCRLPYPKLDSSDLALDILNELNRCPGALYSVLSDDDRKKFVTTLPTAEEGDEVMESVMKRGKEDRFPYFALRYLEQEGVLRGISFQLFLGRFEQKEAHHKIVGQEMREHKLLKNIHTFGQLERFKTEAANNFFLNEKKGIVEFYAPAYRMVGNRIGLILKDANINDTGFEEVLDNYKLPLEERNCPDAIMSTHELTALFFYNYLHREGIIRTSPKEHILSFLQNFKRFREDLKKGKLKPIPGEHKLYKMKCHKQGSSNELNRKRILLQEILNEYGLKVAWLPDACREYLLGYTSSDNTHIIKQEFLKMLNSSKSRRDKIIAFNKSISEYKKRNEIKLTQAKLEIRTGELATQLARDIIYMTSPMNKEGKSKKMNDLEYNVLQSMLAYFPLHKNELTAYLGILKEGKVWKHPFLEDVLKELHSAQSLADFYSLYYDAKIDWINHKIIKEQVEHDNNKKKYSWTLRVGAEKMVTEQYAYLLNLEKKTKTAPQKEYADKAVFLPTGLFDEAISKSLIDKGYELRENSNTAGCLKVYLNKETQPMYSELKRYYRYVTGRGPRLTGRMMEREEAKNFLSHNFANSSLQPMKKESLKQFGKKIKEKEAEILRQQNNDRALFLMLYAMPDANGVSRIVKEKTGLCKLGFDLNDNLLNTEYTVKQTLVRMVNNVRVERVVTATLPVKRYGEMRRFLKDRRIDGLLLYYPEGKEIPLGTLESSKTALKGEKYSYSNLIDELDVYDRKRNELMERIYEVDRLMAVNFPLIKKKTKGNASYYEHYDCLDYARTNLGLANQVSLLQRERITLLRSKLAHNQIPYEAWICEEIEKMDDPLITSRIINLVASCYEELLLSIKKKITE

SEQ ID NO: 2619 - protein, 1129 aa, Artificial
  Synthetic
METNQQTHENRRRTLTNDPQYFGGYLNMARLNIYNINNHVATDFKQATLPEEGQIPASFLCNKTIKNLNWNHVHTRALRFLPILKVFDSESLPKDERENSDTEGKDFTSMSDTLKFVFSELQEFRNDYSHYYSTEKQDSRKLTVSPELANFLTVNFQRAIAYTKARMKDVLTDADYALVENLQMAATDNRITTEGLVFLIAMFLEREQAFQFIGKIQGLKGTQFNSFIATREVLMSFCVKLPHDKFVSENLEQALTLDIINELNRCPKTLYSVITDKEKQQFRPELDAQGIDNLIANSTNDDERETILDEIDYQDYIEGLTKRVRYSNRFSYFAMRYIDEKNVFDKLRFHIDLGKYEVDNYTKQFAGEQAERKVLENAKAFGKLSSFTDPELIQQRIDKQQHTAGFDQFAPHYNADNNKIGLSNKENIATLIAKSKAGSKVEHNLKQPLPQAFLSLHELPKIILLEYLQKGQAEELINDFILLNDTRLMDITFIEEVKSQLPANWDEFSKRSDAKKKKAYSDSTLKYLRQRKTTLNTILSKSNLNDKQIPTKILNYWLNIKEVDDKRSVSDRIKLMKRDCMTRLKAVEKHKLNKSVKIPKVGEMATFLAKDIVDMIVSKEKKQKITSFYYDKMQECLALFANAEKKALFIHIVTNELKLFENGGHPFLQNINLQQIRKTSQFYQAYLVEKGNKMVPRLNPKTNKTSKVDESWMMKQFYVKEWKEEIAKQLTVVKLPANKSQIPFTIRQWDEKEKYDLNAWLQHVTVGKNKDGKKAVNLPTNLFDEALCDLLREQLDTKIVNYNPAANYNELLKIWWKTRNDDTQQFYQSEREYDIYNEKVRFKIDSSTHFADYYKNALSRAFTRLKAERETARQTNKRLPPLEYKQVERVFKNTIAETEKEIRMLQEEDRMAVLMLERLMDNSPNLRLSKIETLLNDTTPISEKISATLSFDASGERITDKSNPTVTKTLVAERKQKNYTELQKYRYDRRLPELFEYVQADEIPLEWLLDELSAYNNAKQQVFDTVFALEKKIIQTDPDELKSLFTGANGELQTGNIQHKPYVQWLTNKGLINKEEKQFINMVRKCFSHNQFPQRKTMELLIPAWNEKKLGLQIATVYNQLIADLTDKI

SEQ ID NO: 2620 - protein, 1119 aa, Artificial
  Synthetic
METQTKTEHQAAKIYKTIESDPQYFGGYLNMARHNIYSISNHASSKFNIKPLSDEEKIIDSFLCNEKRKHLNWNHVFSIALKFLPIIKVFDFEGLPKNEKADNNNTGKDFAQMAQTLKKLFSEIQQLRNDYSHYYSINNKDIRKISVSNEVAIFLQDNIKRAIEYTKSRFSGVLSDEDFENASNRKLIEQNNILTTDGFVFLISMFLEREHAFQFIGKIKGLKGTQSKSFIATREVFMAFCLKLPHDRFVSEDKTQALTLDIINTLNRCPKELYSIITEKEKQQFKPTLDNLKLNNLLENSLNNTEVIEDYDTYIESLTRKIRHSNRFSYFALKYIDETNIFQNIRFQINLGKLLIDKYEKPINNEMYPRTIIENVKAFGKLSDFEDETEALHQIDKNGNSLGFEQFAPHYNTSNNKIALYTNNAKAIIINNPKAKSKIKNNLKQPLPEAFLSLHELPKIILLEYLQKGKSEEIINDFILANNTKITNRKFIEEVKRMLPNDWDIFKKKTDPKNSQAYKPSELTKLKTRKKILNTVLEPHNLNDKQIPTRILDYWLNIVDVNIDRAIADKIKLMKRDGTDRLKAFNKFKKEGKGKIPKIGEMATFLAKDIVNMIISEDKKKKITSFYYDKMQECLALFADPEKKALFIEIITKDLQLNKFDGHPFLKEIQLRDIHYTQDFYSIYLQHKVCKLVSVKNYKKGRTDSIDKSWMTKNFYCKEWDNKLSKQKTVVKLPADLSNIPFSLRQLIEKKSSSLYDWLDNIVNGKNSNDSKRPISLPTNLFDDELINLLQMKLNEKNVSYPHDAKYNELFKIWWTTRNDDTQSFYKAEREYVIYDQKINFKLQKGAKFADFYTDSLKQAFKNQQDKRAIEKRVDRKLPNIELTQVEKVFKRTISNTEKQIRLTQEQDQIMALMLEKLMSDDKNLNIKLSEISTLLNDTITVRKTVSGKLSFSNENPISKIILDQRKRKDHSMLNKYSNDKRLPELLEYFVDNEIPIDKLKLELEAYNNAKHIVLDSAFKLEATLISKNYKNQILSFIDNNFKGQSIQHKPYLMFLQSKGVINENEFRFLNMVRNCFSHNQFPQKSTMNLLINDWDKNNFALQIATIYNNKTETIMTKL

SEQ ID NO: 2621 - protein, 1165 aa, Artificial; identical to SEQ ID NO: 2502
  Synthetic

SEQ ID NO: 2622 - protein, 1165 aa, Artificial; identical to SEQ ID NO: 2502
  Synthetic

SEQ ID NO: 2623 - protein, 1124 aa, Artificial; identical to SEQ ID NO: 2288
  Synthetic

SEQ ID NO: 2624 - protein, 1167 aa, Artificial; identical to SEQ ID NO: 2025
  Synthetic

SEQ ID NO: 2625 - protein, 1131 aa, Artificial; identical to SEQ ID NO: 2584
  Synthetic

SEQ ID NO: 2626 - protein, 1104 aa, Artificial; identical to SEQ ID NO: 2299
  Synthetic

SEQ ID NO: 2627 - protein, 1219 aa, Artificial
  Synthetic
MYNFFEKSDKYFFAGLFNTALDNFQEALEEVYSRVNGGIGAEAIEFPDNTVSLINKLFPRKKAGMSVKVTLFEIERNLKLLVKNVRTFELLNVFYEKLIKNQKEGKVADPLSIDYREFVNRAILTLWHVINHRRNFYTHLNSIDDFTFYRFGNSEDADLEWGKEFLFRYLDFVLLRNAHDIKNDRMKNPNVRIFLEKKPFFKDDKNHIAQNHFKKLQTKYENSNNQNDKKKIRKVSNEHKSGFAFNSTTKRFIFEHHDKSKQVLSTSLKKSKHSKNESSRLTREGLIGLLCMLLNKGQAQILFDNIAYTENSTDTKLQKLVSRWVFTTRSYKNVKSLHYSDYEDDGFLLQLVNELSKCPKELYEQLNENDKAEFLEAIDYNISEEQANYDGDGDTNYEVIRKRYENKFPYFAIRFLDEKVDFPTLKFHVNVGSFKRNTQQKEYPNSDYSPNRTINENLAVFQKLSIVADKKRSYLEHPNFQDEKRRESEENTGNIWKEYPKPSYRYHKNNIPIWLDVSSCDALKNIELGNYSRGNEQEGVLRTSGRYNKHRILQLMFLQHDIKRPVALLSFNELPSLIHEILVKKTPPKDVEVMLLKKIKSRVEQLLNYSSDEELPSKLKNRIADIEQYNLDKISRHIHNMTKENPLKDIRGDRYESGKVLSNSEKGKLAVWLSEDIKRMVKKRLDQRLNHNSENKEKTFEGWKGHEFAEFQKLLSYYDFPEEKKNFKEHCIHILKLNLSTDLPFDGIDLDQNSLLDLFNIYFEARKKYLYSFLNRDKVKVVNDEKLFEFRENSLKEVLLILNENKFKKKSLERFKKNLGKNPICLDRGIFQDLPTFTKRTNEKTVPINPEFADGGFAQWFIDSSDRMQAQEFYSYTRCYRLSENKKITLNNSKNIKDAFNNTLSIAKSEKLSSDVFTKRNVYQTEAAIRKRMREDYFMLEMIKYFYENSNEEDTSLDVLNLNKFYLTKTEIEEVKERLKYEHVRAPGDNSDSVLNMSKVLSKPIRVSFLNGCIKGEVKLKEKSKYRKFSERQLVKQIVEYYPKHPLTSEAWTFEQMAKEVHNYDLNRARTIFKEIHVLENRIYSIAERKGKVDELKDHNGNLNFRFYLQHAFLIGNQKVQFKNLYDKILQGNNLMPHELENEKFMNLALVLDIRNKFSHSYLPYRIMFDYAKSKVLLKKEEIEGAQNIEMLGDYFHRVLSFLSLKLIEELEFEKRLNA

SEQ ID NO: 2628 - protein, 1220 aa, Artificial; identical to SEQ ID NO: 1568
  Synthetic

SEQ ID NO: 2629 - protein, 1145 aa, Artificial
  Synthetic
METLTIPEVIKCRTLSDDPQFFGGYLNMARLNVFNISNHIAKEFNLSLLSEEAHLKDSFLCKKENKKINWNHVYSQTKRFLSVLKVFDAACLPKEEQKTINWEGKDFASMCDTLNIVFGELQEFSNDYSHYYSTEKGTIRKTTVSEEMALFLKINFNRAIEYTKEKFKGVLNDEDYLLVASIELFGAENRITTEGLVFLISMFLEREYAFRLIGKIKELLGTQNNCFIAIREVLMAFCLKLPHNRFQSDNTRQAFSLDLINELNRCPKVLYNAIAEEGKKKLRSIPGEPENKNLHDNNTKKEAKIEAEAYELYIESLTRQIRYSNRFPDFALKFIDETDIFSEFRFQIDLGKLLVDEYLKFFNGEQVQRRIIENVKAFGKINDFNDEAKVMNRIGNGHSLKRFEQFAPHYNTENNKIGISRHQSTAKLGSGSKGETEQKLHQPLPEAFLSLHELPKVILLDYLQKGEPEKLINDFILINNSKLMNMSFIEAVKTQLPPEWDEFQRRTDAKKEMAYNEKTLAYLLQRKQILNQVLTAYQLNDKQIPGRILDYWLNVTDAEEERAISNRIKSIKRDCMSRLKALGKFNEDRNRNKIPGIGEMATFLAKDIVDMVVSEGKKRKITSFYYNKMQECLELFADPDKKQLFIHIVTKELKLNDSGGHPFLDKLDLQKINSTSGFYEIYLQEKGHKMVPEKNLKTGKVVNTDQSWMALTFYKLVFNDKADKLMTVVKLPLNKLNLPFTIRQLSGKTNSTLGQWLNNLTQGKKPDDGKHPVNLPTNLFDEKLSDLLRQDLDNKKIAYRPYANWNELFKTWWSSRNDGLQSFYNAEREYHIFDEKVNFYPNRKENFADYYQHALKVAFQKKRSKRILEQMYDRHLPDILFEQVEKTFKHTIAETEKEIRILQEEDRIMLLMLERLLEDWNKQQLKLSEIKTLLNATTNFRQSVPGNLSFDNSGELIKDNTNPEIVKTITVLRKQKDHSIMRTFFADSRLPELFEYYPDEEIQMESLKKEFDTYNKARQVVFDLSFKLEKMIIEKGRKDRINQLCAGATGELLTGHIRHKTYLTWLKNKGMIDNDTFIFMNMVHHCFSHNQYPQKNTMERIISHWEPDHFALTIAATYNQKIAGILEDIGTFPFIRSRKTMPDIV

SEQ ID NO: 2630 - protein, 1126 aa, Artificial
  Synthetic
METLTIPEVIKCRTLSDDPQFFGGYLNMARLNVFNISNHIAKEFDLPLLAEEDHLRNSFLCNKENKKINWNHLYSRTNRFLSVLKVFDAESLPKEEQKTTNLEGKDFALMSDTLKIVFGELQDFRNDYSHYYSTEKGTIRKTTVSDEMALFLKVNFNRAIEYTKERFKGVLNEEDFQLVASKKVMEANLTITTEGLVCLISMFLEREYAFQFIGKITGLKGTENKSFIATREVLMAFCLKLPHDRFQSDNTRQAFSLDLINELNRCPKVLYNSITASGKQIFQPKLDILGIKNLLDNSTNIDEEVEDYDEYIEALTKRIRHSNRFSDFALKYIDETGIFDKFRFQIDLGKLLVDEYAKFFNSEEVPRRIIENVKAFGKLNSFNDEAKVLTRIGNGYPSKEFEQFSPHYNTENNKIGISVKEDTAKLRPNSKGETGKKLHQPLPEAFLSLHELPKVIILDYLQKGEPERLIEDFILINNSKLMTMPFIEAVKSQMPKEWDDFRRRTDTKKEMAYNEKTLTYLLERKNTLNQVLAEYQLNDKQIPGRILDYWLNIKDVEEGRAVSDRIKSIKRDCMSRLRALEKFKIDRNRNKIPKIGEMATFLAKDIVDMVAGEEKKQKITSFYYDKMQECLALFADSDKKQLFIHTVCNELRLNETGGHPFLYKLDLQHINSTSEFYGKYLQEKGHKMVREKNLRTGRVAEVDQSWMATTFYKKEWNEKIGKQLTVVKLPLNKSKIPFTLRLLEEKTIYTLDQWLQNLTKGRNPNDAKHPVNLPTNLFDERLTVLLRHDLDERQISYPSNSYDNELFKIWWKSRSDSTQSFYNAEREYVIFGEKVNFMPNTKDNFADYYQHAFTTAYQKKRKERTLQQKEDRRLPNIQLEQVEKTFKQTIAGTEKEIRMLQEEDRIMLLMIESLLEDGKKMQLKLSEIDTLLNAATEVKQTVSAKLSFNDSGELIKDKTNPAIVRTITVSRKRKDYSMLRKFIFDRRLPELFEYFPEKEIQLDSLKEELDAYNKAKHEVFDVVFELEAKIIAKDSDGIQQLFADESGKPLTGNIQHKPYLTWLKNKGLLDDNTFTFLNMVRNCFSHNQYPQKKTMERLIHHWEPNRFALTIASKYKQEIARIMEDL

SEQ ID NO: 2631 - protein, 1145 aa, Artificial
  Synthetic
MTLPTDNTFIEKADQEILGKNKLFFGAYLNMANHNAYLIIKDISERLKQEDALDIDAPSDEDNLAYADIFSKILKKASDKNPKNRPQATIIDKVTNLLIHHFPAFEVFAYEHPFEQQNSYPELLYQKLTTALKLLNDLRNEHSHFYYKGSFDIDTVFSAAQEEITRFPYLTPEDIEELEYYKNDLLEPLTYFKKYGFVFFICTFLEKRYARYMLKEKQLDLIASDKERDATLENFTNYSCRLPRPKLESSVIELDMLNELSRCPKGIHDVLSSPMEKVLLKTDAKDDPNQVPMIRHNDRFPYFALSYFDKMERFPAMRFHIWAGKTRLAFYGKKLGKKNVLRDIQENVTIYARLNDIKADKIPDNWKDKIDVEDSEENKEKAKIQSYSPHYNIHNNRIAIKFIDTQKDELDTENFSEIKSKPQDPTKDKQLKYTVTHALPNAILSTYELQNLFLYDYLYRTYKDQKVLARPADSFIRNYISSFHRFCKDVKSGKIQPVSPHDFERLTEHTRSTTRDLGNREEELEIRKEALQKKKLDNYGLKVKNLPDALREYLLGYKQETYTEIALNKLRGKIKQTKVHYKLATKDDLFLDGKTDLKSGKIGDFLAADIVFLKPLDANRTGKPNNQQFNELQKAIARFHSQKKDVEDFINEELQIKEQSLPHAHPFLYKIQFEEHTDVQSFYIKYLELKIEWLECTKREIQGKSDYLKPWQWREEADKCKQYGIDIKPEGLSDAATENKYGYFLQINTKKGNERNYTNATTPSKANSKEFESLESKSPVILPRGLFNDAIIDAMMKIDEFKGKIKEGDNIVRCLDVLAEGDRQTFYDFERSYTVGKAAPTSVTIHQGANDEYIKNKLRSIKPIIKKLRTQQNAKDAKYKDKKILQNHIKALQAISDNERSIRFIRANDRALFLMIKHIFSEHKSYVVEGSKLTKSINTLPWKLNKVGYEIKENNILNEILPMNIQFNQKNIYTEGEYGTDPLNKLSIKHYGKFRKLLKDKRLSNKKKPGLLNYYTDQNVRWSAINKELEYYDENRDRLLDEIYKFEKAVWENEECREELKENIRLGYINHAAQLKAVGKIVRDFTASKQDQLALLRNKFLHNQIPYTENLKTGWVDNNPEYPLITQALLELAIIEYQNITKNII

SEQ ID NO: 2632 - protein, 974 aa, Artificial
  Synthetic
MSIPKLRRPDRYLTNLSLGFNWALDNLQKIDPEFSPGSPVPEERRQAIIEFIMGRKVPYKLDTDPKENKELVEEMFTTKKDGSTLYSQLRNLLREYRNYHCHVCHKDENLNNPAPGAIAWVEKRFNEAKEHAYKKIEEYRLATIVNEDGKTNPDSASELNAIIDATHRKMDEITLFDAKNKRRFSSRYGVIFFMNIFLYKWQANFILSQLRGFKATNITEYDGIDKGRPTKFYGKPRREFFTFFSLRDGFQLFSEAGNYVKFRQIVNLLYTKPIEYERIVNPTYYEKKILSRDKKSKEQYDQLNKTKQQKEKNTIRRNTEKIFIEWACRSIEDSFTANKRSEENFTLAFRVYEKGEAHSRQRKHDGVTAREYVEKIKSRVFAPGALHDYKYVITHKNVFFRITYPNGVHAYYQIGVHELKFWVLALLAGKNFQGILKKIVAEADTGQKKEKSKTDARQKLINRLQYVKNITGRLVEENNRYPAVKRWRFASKRKISLIMLYVNRFLLQGKYLNRYQYKLVEELVRWHYATNKPRILSIMKETGSQDAYRLFANANSIEELFVESADKLSMRVHRALEMLRTNSVDDATYATLETLLPFNGKLHRQEPKNVGPDNRIHYIKINSGFFKRHLFGISSAKYNLSAVIRKMEFESLVYSSGTPIIKDEYARVELRNFYSGAVPDDMKFQKVDAALQTASQKEENKRKYKALKPLLNVETLDRLLWMIALFYYRKEFQVEKIPKTATIETIQDEKVVMPFSHSLEVKHGGPSVLDAIQNSIQEIPGKVRVSRIKKAEDKESLIITLSNISLQIPPYMLKRNLVYANEDNLAAALLMCPEINVAGTVDYEVVNKFIEKTMAINKGEEFAASDIRQLLFALERKVLKKNELKVNEILGSQPYVSFREVSEMIKREFVQRKFQQQISLPELEQLLYLRNCAMHNKIPLGFRFAYAGEVLKKLGITKKGSEREDWRGRGRRMR

SEQ ID NO: 2633 - protein, 1081 aa, Artificial
  Synthetic
MQAQSLFDEYKHLFGTYSVMSIMNIITVLNHIHQIAGLKRNELGDDDNIYSHPVLKYIAPENNSTTLPEKRDLIKELLLEYLPFLEAMKDCYKEVKVEKDKRNNKYVKDKKQVFIRNYSDIYCIYWTLYNIFSTLINYRDKSCHYRFIPSKDQEEYSKRTEYDTVRIINKYYTYALRKTKEKYGYTTEQLSFIQNNRYTDDKKVNFNFFLSMQSSNNNLSHVGVAQLICLFLQKKDVDNFLENLPIYDNRYCLGIDEHMIIKRSLALHSIKLPKERLNSEKKDMAIAMDMLNELKRCPKELFNTLPFDKQERFRIISSDHKEVLLMRSTDRFVPLILQYIDCNKKFKDIRFHVNMGKLRYLFSPNKLCIDNQERVRMLEHLLNGYGRIDEVEYLRKAPNGTFGNTNIPIKGFGEIERDSADSNNYPYIVDTHTHYILNNNKVEFCFCEDSKNKNVFPTIEKEINGKWYVEKTAPHCRISFFEIPAMAFHMFLCGSEKTEKLIKDVYNNYISLFNALKNGALTEENYKDFNIPECDMPKKILDFLKGKAEGKSIDGYVKNILKKELKDTRKRIEQAPSEKDQMPSKRNKIGTKSYKRVLTGKLADFLAKDIVKYQPTLCAGDDYGIDRMTGMNYRIMQATIATYNDDDDFDTFYNVFKMAGLVDGDERKNHPFLKKVLLSKPQNTVAFDIKYLKEKEIYLRNIEKKNIIPPFVNRERNKWCERDCEYYRILGENLLDLPIELPRQMFYKDIRAQLEPLMPEIDFSQTNTTYLIAEYLKRVRGDDFQEFYSWERNYRYIDFLKCIRDDNGRICAQYTTTEERESLWEDSKNRTAEYKRSEEQKNEKKDKNFEDSLEERISSSHIKFQNTEKHIRRYKVQDALLFMIAEKQFGKYLDDIKAKNFKLKDIMPDTDKGILSETMPIDFTFTKKNIKYNIHAKNLKFKEYGDLFILANDKRLESLWKILATDTVNKEEISEEFAKYDFCRPDITKLVLDFEKDVLEKYPEIIEEAEKEYKKFDFKFILDWLINKKKLNYGIRNKLLLIRNAFNHNSYPDKKYAEVRELPEIATNLKKTFDENAKKYE

SEQ ID NO: 2634 - protein, 1029 aa, Artificial; identical to SEQ ID NO: 2444
  Synthetic

SEQ ID NO: 2635 - protein, 1003 aa, Artificial; identical to SEQ ID NO: 1494
  Synthetic

SEQ ID NO: 2636 - protein, 1124 aa, Artificial; identical to SEQ ID NO: 2558
  Synthetic

SEQ ID NO: 2637 - protein, 1029 aa, Artificial; identical to SEQ ID NO: 2444
  Synthetic

SEQ ID NO: 2638 - protein, 1124 aa, Artificial; identical to SEQ ID NO: 2558
  Synthetic

SEQ ID NO: 2639 - protein, 1196 aa, Artificial; identical to SEQ ID NO: 2258
  Synthetic

SEQ ID NO: 2640 - protein, 1119 aa, Artificial
  Synthetic
MEDDKKTKESTNMLDNKHFWAAFLNLARHNVYITVNHINKILEEGEINRDGYETTLKNSWDEIKDINKKDRLSKLIIKHFPFLEAATYRQNPTDTTKQKEEKQAEAQSLESLKKSFFVFIYKLRDLRNHYSHYKHSKSLERPKFEEDLQEKMYNIFDVSICLVKKDYQYNKDINPDEDFKHLDRKRKGKFKYSFADNEGNITESGLLFFVSLFLEKKDAIWVQKKLEGFKCSNESYQKMTNEVFCRSRMLLPKLRLESTQTQDWILLDMLNELIRCPKSLYERLRGDDREKFRVPLDPIDEDYDAEQEPFKNTLVRHQDRFPYFALRYFDYNEIFTNLRFQIDLGTYHFSIYKKLIGGQKEDRHLTHKLYGFERIQEFDKQNRPDEWKAIVKDSDTFKKKEEKEEEKPYISETTPHYHLENKKIGIAFKNHNIWPSTQTELTNNKRKKYNLGTSIKAEAFLSVHELLPMMFYYLLLKTENTKNDNKVEGKKETKKQEKHKIESIIESKIKDMYALYDAFANGEINSEKELEEYLKGKDIEIVHLPKQMIAILKNEHKDMAEKAEAKQEKMKLATENRLKTLDKQLKGKIQNGKRYNSAPKSGEIASWLVNDMMRFQPVQRDENGEPLNNSKANSTEYQLLQRTLAFFGSEHERLAPYFKQTKLIESSNPHPFLNDTEWEKCSNILSFYRSYLKAKKNFLESLKPEDWEKNQYFLMLKEPKTNRKTLVQGWKNGFNLPRGIFTEPIRKWFMEHWKNIKVDDSKRVGLVAKVIPLFFSEKYKDSVQPFYNYPFNVGDVNKPKEEDFLHREERIELWDKKKDKFKGYKAKKKFKEMTDKEKEEHRSYLEFQSWNKFERELRLVRNQDIVTWLLCTELINKLKIDELNIKELKKLRLKDINTDTAKEEKNNILNRVMPMELPVTVYEVNKGGYIIKNKPLHTIYIKEAKTKLLKQGNFKALVKDRRLNGLFSFVKTPSEAESESNPISKSRVESELGKYQNARLNIIEDMLALEKTLIDKYNSLDTDNFHNMLTGWLKLKGKANKARFQNEVDLLVAVRNAFSHNQYPMYNENLFGNIERFSLSSSNIIESKGLDIAVKLKEEVSKAAKKIQNEEDNKKEKET

SEQ ID NO: 2641 - protein, 994 aa, Artificial
  Synthetic
MDSKYILGSYLNMANDNFINTIHLLAKKLKTPKGEDQNLDQVVSYITRIFDNSNQVPETEQIVEFYFPWLEALKNANGFGKSELPELKIFYKDVLCSFAENLKDLRNNYTHYIHKTISYHPIIYKKEGNTLQSSLPKALLQIYDASIKLAKERFSADENAVTHLRRYKMVGKKVVRKTEADHFLYLLEKDHLLTEKGIAFFTSLFLNRKYGYLMLKQLKGFKQGGTLAYRLTLETFLAYSNIKPVERLKADKYSDVAFIMDLLGEISKIPKELYHILPETYILQYKNKLHIELNEDISLEAYCSRGRNRFDQLALTYLDRLEDFKQIGFYTYLGNYIHNGYMKVRIDGTEQERYLSEKMYGCCKNIYRDLSAIVAKQYNIKVKDSTETSYMLPNDFQPHVIRAYPHYVINNNNIGIRLLDEGESGFPILENRGTKNVVPHFWMSKYDLPALLFYAYLRSDSRFASKCKKTIDEILRGYLSKSKDKKPKQAEKVSVLMLRRIDKAIIWTQTKLNEAEKQRDNKKSFKIGEKADILAHDMLWLQPAKESKDKVSGANFRALQTSLAFFKRNELEDIFKKSFLIGGNNPHPFLSRIKINTMPSLFDFYLAYMRERLNYWEKIKLKLLKGHINVSCHPLRKLNHGKPVDQDNKKDEQPIFLPRGIFNDVIKNCLQKTKLGIYLKDQGVETRSWNVAYQILKFHEIINDDDIQEFYKQPRKYAILDENHYLTLEERTDRLKDLKPECIEVSKANDILEKEDYLLRKSYNQVCDNESAIRLYQVQDILLFMIAQRLCNEIILGDKQEKKEKVETSFSLTLKNLSKKFDQPVHFEIKMNNVNLFSDTDIPVKNFGKMLRLKKDARFISYDKLFKGQKQNINYNDYCKEEEYFDICRIQMVKLCHELEEKLLEEGIITESPNSGYYPFADLVQIIINQGVVISSSDVKFILEARNMFLHNEYKQCCVNSINSIDSFIAEKVHNLFKQKMDNILGQLESIKSS

SEQ ID NO: 2642 - protein, 1123 aa, Artificial; identical to SEQ ID NO: 1835
  Synthetic

SEQ ID NO: 2643 - protein, 1081 aa, Artificial
  Synthetic
MKKTNTYFDFKDKTQKYFFAGLFNTALNNFDLSLDELANRTGLKCNGKELIAVAFNDTCSQTDYNNRLSYLSESLAFIELIKTKERSYIRLHLTELYNLIDNYRNYFTHLEHPGLIIKPLIFKLLDLFILESARTVIKERVKTEENKSYLSKKFKLEITSTFEAANNAINLENKNNPHSKTHKKLITQNDKINFVLINAFYNFLINTDEIPTLKETARSINKDTGQISQNGIIQLLAIFLNKKQLEILFDNTHYLKGTLKLNHLCTRWTYSQLAYRNIKKLLKSDYSNDSLILQMLSELTKCPKHLYPNLPNNSKQEFIEDLNEYLKETEYFKDSIAQETVSNEVIRKRYEDKFPYFAIRFLDEFIDFPNLRFQINLGKFNHNTCLKKFENTAVYTERQILEKLTIFEKLTLATNKKTEYFLNNNLPDSEGWQEYPKPSYQFYNNNIGFWLGIKNGAVTDAKEKRENDKSSKFDILKKIGLECCLKKPVAYLSFNELPALLYTVLIEKKTAKEVERIFLKKIGEQTGAINKFADINNFEKKIIPHKFKEILENKESNVKWEKLKKDIEKEMLISPLDEIRIHYKTASKHPNDLSFSEKGKIATWLAHDIKRFVKAETKKDWKGYQFSEFQSLLAYYDLKKMELLNFVNFVLKINIKQDIVFEGIDFNQKTLYDFYKNYLSNRKKFLEGNLYSIDQKDEVPAKLWRKRELSIFTGFDDKLYKYKNFKTYKENLMNMPLNLPRGIFSDKQTCYNKNSQNNNELAEWFTKSNNINDFQKFYSFTRFYENCQLTLNPLKGLKEQNNNKGVPKEVYKNEKNIRNTMRQDFYIFEMVKYYFKINESLKSDLNDLKLNTLFLTKQEKENNLKVLNQQHSRSKGDKSENILNENYILSKHIMMSILEGKIQGMVALKSVGKYRFLSQDKRVKQLVTYIPDKIWSFEEINSEIDEYDKIRAFSFFKIIHEIEEKIFNKAINNKEESYLLVDGHPNFKAYIIYYFLKTQDEKDFFNKLDVKNVNINDIAISKFKLLFLIIKIRNKICHNQLISSDEFNFLLEFTPIEPDELYMSYLLKAYKKIVNISWNLV

SEQ ID NO: 2644 - protein, 1119 aa, Artificial
  Synthetic
MDTIERIEIKSANVYKTLENDPQYFGAYLNMARLNIFSINNSVADKIKVAPIPNEEKILDSFLCNHNRKHLNWNLAHAIAVKFLPIIKVFNFEGLPKSERTSDFNNINTGKDFAAMADALRSLFGEIQEFRNDYSHYYSIANGNKRKTTISKEVAEFLTKNFARAIEYTKERFNGVLNNEDFYHVKERVLVNQDNTISTDGFVFLIAMFLEREHAFQFIGKIKGLKGTQHNSFIATREVLMAFCAKLPHDRFVSEDKKQAFTLDIISTLNRCPKELYAVITEEERKAFKPNLDSLKIENLLDNSTNDKADIENYDKYIEALTRKIRHSNRFSYFALKFIDETNIFKQLRFQINLGKLELDEYEKPINNELYPRSIVQDVKAFGKLSDFEDEKEVLKQIDKEGNSLGFDQYAPFYNTKSNKIGLHTNNAKSIVINKPKSESKIKNKLKKALPEAFLSLHELPKIIVLEYLEKGKSEELINDFILASNSKITNKQFIDEVKGKLPNDWNEFNKRSDSKKETAYKPNALAYLRNRKKILDEVLAQYNLNHKQIPTRILDYWLSVVDINSERAISDRIKRMKREGMDRLKSYQKYKKTRKGRIPKIGEMATFLAKDIIDMIISTDKKKKITSFYYDKMQECLALFADPDKKALFIDIISKELHLNELDGHPFLKYIQFGKISYTQDLYESYLQEKVNKMLDVKNHRTGKTSQIDKSWMMTTFYKKEWNEEVGKQLTEVKLPHNLSYIPFSLRQLKEKTSYSLDHWLHNITKGKEVNDGKKPINLPTNLFDETLIRLLKSDLDTQHEQYPEDAKYNELFKIWWRKRGDSTQSFYNAEREYLIYDEKVNFKLQENAKFADFYSDNLRKAYKAKQAARRIEKRTNRRLPDVQFSDVEKVFKRTISNTEKQIRLLKEEDQIMLLMLEKLMTSDQDLNLKLSQIDTLLNDTITVKKSVSGQLSFDNNAEITKIIIDQRKRKDFSMLHKYSFDRRLPELFEYFKESEIPLHDLKNELEAYNNAKQMVLDAAFNLEKAVITNNNAEDLIDPDYRNGHIQHKLYLQWLKKEGKINENEFSFLNMVRNSFSHNQYPQKTTMSLFVNQWADNNFALQIAEIYNVKIDSTIAKY

SEQ ID NO: 2645 - protein, 1067 aa, Artificial
  Synthetic
MKDKPLIKSKRTLSDDPQYFGSYLNIARHNVFLICNHLAEKFKEKLLKDDEKIHDSFLCTKAKDLYVFTQLIRFLPIAKVFDPEMWPKDERVSESVNLDDLPKIMKACFNDLNGFRNDYTHYYSVATETERKTEVNEDVAQFIRENFQRAISYTLNRFKDTFTDADIEKVRLYPLFESGNKLNQNGLVFFTCLFLDREDAFHFINRVYGLKGTQTREFQATREVFCAYCVRLPYDKFISEDTTQALSLDILNELNRCPKELFDCMDEQSKKEFQPEIGSEEKENIIKSSINPETIEEEDYEEYVRRISSRKRNNDRFDYFALTYLDSLDDSNINFHLNLGKGCIRSYKKAFNGEQIDREIVEDVKIFKKLHDVKSRDVIEDEKKMVQLIDKRKLESEDERFAFTTFNPHFHIANNKIGLRLCQGNAALKTNQEGQPNLKLPSPEVFLSIHELPKLLLLELLQKGKAEVLIKDFIHSNVSLILNATKIEEIKQRIDLPLVKKREVQGKQTFKDMEAYSAEINKRKKCLDNILPSYNLNIRQIPSRIIDYWLNIVDVSPEKNFEFRTKALLKDCKHRLENLEQSNKSPKVGQMATFLAKDLVDMVIDNTPQLSVKNKITSFYYNKLQESLALFSGIEHKEVFYVLCSTKECGFDSPNIHPFLYKTNYRRAKNISELYKSYLNQKQNWIEKCFYVKQGQKTKIILPDETLEPYSKIPFTIKNQIRPTSDFNDWLKNVTHKPIDLPTNLFDETLCHLLREKTGLSNDNKEKYSVLLARWMENDTQPFYNSDRVYKVYDETVTFTPGTKKAYKDYFQDAMKKPFKLRKSENSKLEIENIRSVFNHAIVDNEKNIRYSQTKDRILLLLFRELCKDGVFNKLKLCTIKDALNQNVSVKESISGKPKNGNELSRTVVGERKMKDFSVFRKLIFDRRLPDLFEYYETEEIPYLKLIDELNSYNAVKELVFDRVFELEKAIMSKSVFKSEIIGMVDNETNVQHKPYLSWLLHKGLISQSDYNFLLEIRDAFSHSQFPQQNEVGRFMNRDCNKSFSVQIFEKYDEKMKEVIKKIEAIG

SEQ ID NO: 2646 - protein, 1124 aa, Artificial; identical to SEQ ID NO: 2558
  Synthetic

SEQ ID NO: 2647 - protein, 1129 aa, Artificial; identical to SEQ ID NO: 1592
  Synthetic

SEQ ID NO: 2648 - protein, 1119 aa, Artificial
  Synthetic
MDTIERIEIKSANVYKTLENDPQYFGAYLNMARLNIFSINNSVADKIKVAPIPNEEKILDSFLCNHNRKHLNWNLAHAIAVKFLPIIKVFNFEGLPKSERTSDFNNINTGKDFAAMADALRSLFGEIQEFRNDYSHYYSITNGNKRKTTISKEVAEFLNKNFARAIEYTKDRFNGVLNNEDFYHVKERVLVNKDNTITTDGLVFLIAMFLEREHAFQFIGKIKGLKGTQYNSFIATREVLMAFCAKLPHDRFVSEDKKQAFTLDIINTLNRCPKELYAVITEEERKAFKPNLDSLKIENLLNNSTNDRADIENYDKYIEALTRKVRHSNRFSYCALKFIDETNIFKQLRFQINLGKLGLDEYEKPINNELYPRSIVQNVKAFGKLSDFEDEKEVLKQIDKEGNSLGFDQYAPFYNTKNNKIGLHTNNAKSIVINKAKSESKIKNKLKKALPEAFLSLNELPKIIVLEYLEKGKSEELINDFILASNSKITNKQFIDEVKGKLPNDWNKFNKRSDSKKGTAYKPSALAYLRNRKRTLDEVLAQYDLNHKQIPTRILDYWLSVVDINSERAISDRIKQMKREGMDRLKVYQKYKKTGKGRIPKIGEMATYLAKDIVDLIISTDKKKKITSFYYDKIQECLALFADPDKKALFIDIISKELHLNELDGHPFLKYIRFSKISYTQDLYESYLQEKANKMIDVKNHRTGRTNQIDKSWMMTTFYRREWNKEAGKQLTEVKLPHNLSCIPFSLRQLKEKTSNNLDEWLHNITKGKEVNDGKKPINLPTNLFDETLIRLLKSELDTQHEQYPTDAKYNELFKIWWRNRGDSTQSFYNAEREYLIYDEKVNFKLQENAEFADFYSDNLRKAYKAKQADRRIEKRTNRRLPDVQFSDVEKVFKRTISNTEKQIRLLKEEDQIMLLMLEKLMTSDQDLNLKLSQIDTLLNDTITVKKSVSGQLSFDNNAEITKIIIDQRKRKDFSMLHKYSFDRRLPELFEYFKESEIPLHDLKNELEAYNNAKQMVLDAAFNLEKAVITNNNAEDLIDPDYRNGHIQHKLYLQWLKKEGKINENEFSFLNMVRNSFSHNQYPQKTTMSLFVNQWADNNFALQIAEIYNVKIDSTIAKY

SEQ ID NO: 2649 - protein, 994 aa, Artificial; identical to SEQ ID NO: 2641
  Synthetic

SEQ ID NO: 2650 - protein, 1131 aa, Artificial; identical to SEQ ID NO: 2490
  Synthetic

SEQ ID NO: 2651 - protein, 994 aa, Artificial; identical to SEQ ID NO: 2641
  Synthetic

SEQ ID NO: 2652 - protein, 1127 aa, Artificial
  Synthetic
LQKQDKLFVDRKKNAIFAFPKYITIMENKEKPEPIYYELTDKHFWAAFLNLARHNVYTTINHINRRLEIAELKDDGYMMGIKGSWNEQAKKLDKKVRLRDLIMKHFPFLEAAAYEITNSKSPNNKEQREKKQSEALSLNNLKNVLFIFLEKLQVLRNYYSHYKYSEESPKPIFETSLLKNMYKVFDANVRLVKRDYMHHENIDMQRDFTHLNRKKQVGRTKNIIDSPNFHYHFADKEGNMTIAGLLFFVSLFLDKKDAIWMQKKLKGFKDGRNLREQMTNEVFCRSRISLPKLKLENVQTKDWMQLDMLNELVRCPKSLYERLREKDRESFKVPFDIFSDDYDAEEEPFKNTLVRHQDRFPYFVLRYFDLNEIFEQLRFQIDLGTYHFSIYNKLIGDEDEVRHLTHHLYGFARIQDFAPQNQPEEWRKLVKDLDHFETSQKPYISKTAPHYHLENEKIGIKFCSTHNNLFPSLKREKTCNGRSKFNLGTQFTAEAFLSVHELLPMMFYYLLLTKDYSRKESADKVEGIIRKEISNIYAIYDAFANNEINSIADLTCRLQKTNILQGHLPKQMISILEGRQKDMEKEAERKIGEMIDDTQRRLDLLCKQTNQKIRIGKRNAGLLKSGKIADWLVSDMMRFQPVQKDTNNAPINNSKANSTEYRMLQHALALFGSESSRLKAYFRQMNLVGNANPHPFLAETQWEHQTNILSFYRNYLEARKKYLKGLKPQNWKQYQHFLILKVQKTNRNTLVTGWKNSFNLPRGIFTQPIREWFEKHNNSKRIYDQILSFDRVGFVAKAIPLYFAEEYKDNVQPFYDYPFNIGNKLKPQKGQFLDKKERVELWQKNKELFKNYPSEKKKTDLAYLDFLSWKKFERELRLIKNQDIVTWLMFKELFNMATVEGLKIGEIHLRDIDTNTAKAESNNILNRIMPMKLPVKTYETDNKGNILKERPLATFYIEETETKVLKQGNFKVLAKDRRLNGLLSFAETTDIDLEKNPITKLSVDHELIKYQTTRISIFEMTLGLEKKLIDKYSTLPTDSFRNMLERWLQCKANRPELKNYVNSLIAVRNAFSHNQYPMYDATLFAEVKKFTLFPSVDTKKIELNIAPQLLEIVGKAIKEIEKSENKN

SEQ ID NO: 2653 - protein, 1131 aa, Artificial; identical to SEQ ID NO: 2584
  Synthetic

SEQ ID NO: 2654 - protein, 1156 aa, Artificial
  Synthetic
MTDKVELNMYNSENSWKNFSTSKGTVGPFAQKAVRNIELLINGTQPERRMHYFAIGHTFKQIDTKSVFKLTLDEESRTIRPAAFMALQSFDSSFCRKLAERIGSIRNINSHCVHDFSMLKQEGLSEKMIYFLRESFELAVCLIYLKEKELNYQDYSVLTDKDERLVAFLLDKFYPLDKTKSIADDKKQRFQKVRMQFKNLTKQEAIDAILFTNVDTAFEWKLYNLYPAFAVETGVYLSFYASLFLLTMFLYKNEAEKFISMIRGFKKNKTPEEQSKRDIFTFFSKKFSSQDIDSEENDLVKFRDLVQYLNHYPVEWNQELEQTPAHPTMVKVLISKIIDMEIGRCFSDYAKNERFRIFAKYKLWGKRYLGREAQREYIAQAFTEEEIAAFNYEIDTSPELKGCYRKLEKLNFKKNLSEIEKKNNRSEIFKTEERIARIKDEPNLNVERLKERIQENYRSWGRNQDRFMQFATRFLAETNYFGGDVSFKMYCYFSMDEENAGREEKKNSLSKEKYDKLKYHNGKLVDYLIYQKHLQQYPEWDIPFVIENNSIQIKMSLGDDPNKIVSIQRGLMIYFLEDALFFVPENRIENAGKHLLEAYYIYHQEAFNSNYSVLEQQADISPKEKNQFKKLFPVRLLYHYLPAVSSDMNEPAPLESLLNKTIEAEKRYLDLVQKAINEGNSEDFLKHNKGKQFKLQFIRKAWQLLFFREIYDRRRAFSNEHHKSYHITRDEFNDFCRYMYAFDEVPEYKDYLHELLAAKGFFDNSTFKTLFESGHSLDDFYKNTKIAYKSWVVKQEQHFVPADKYTLSKYDKLLNKQILYINLSHFLEFLKHKDEPERRNLGEMKFKALENVQYLIQAYYYAERLDPLEQKNNRNLFNELRKIKLEDALLYEIALRYLKTDERILSNTKCLVTALLTQDIQFDIKNADGNHLYNLIVPFKQIDSLACLLKQKEEQEQERFKSSFLGNLADYLEKNKNQKELKGIYTDYNSNPQNKVLKLDELNKIKDHLVTSSIKFTKLDMALEAYYISIPIKTGNADFLSKIEKADTGCNFIRFENTGIPRKYYDTKIRNRAFHFGVPDKNYDQILREIESKFIVDEVKPIKPANFESLSVPLKAICCLFLDEIHGDFFDHGEKVNKRKHQNAENKYFEKVILMK

SEQ ID NO: 2655 - protein, 966 aa, Artificial
  Synthetic
MNPENNIVKNYSVKETPWYFGAYLNMARHNVYLLINHLTDKFSYLKNYKKLSLEKQTGTSKFELRPQPFSILTDDEQIVNENILTKIFDTSYPQYDNDRFRIYKYMVRKHSLPFIKNFSETGGRNLDDNPIIDYDGLHQYINEAFALLVRLRDSFSHYLAIDKFGNKIEDRNLTVSTNIHTQVINLYTNSPNYSLERFSATQSDFDYEHLSLYKIFEADNITFTEQGLYFFINLFLERGYGIKFLKKIRGFKNDTNPAFRATIKTFTTYALKVPDERLDNDDPRMSLLMDVLNELKRCPAILSKHLSDQDQKKFNPQLNDDSKANVLLNSVNYDDIDDEQIDYLLNSITTFKRHQDRFPYFALRCIDELNLLPNIRFQVALGSIERRSYDKVVGDVIIDRRILKKLNAFGKLSYFEGKEEQVLLELNRKVKDQDLLFDQFNPHYNINNNKIGFYTFSSGKEKIQWPTIADFPKEGNLHQKRDNSIPKSFLSIHELPKLLLLALKDPELAEKTITDFLDVNKNLVLNKAALGQIRDKIKLCPSIFNRRRVEEKALKQKGRIQFLNHAQIKNLRQRNKITDERLADLKFMDSMISNTKNIKIKEYLKQINYNQVLETRKDALRQVLPAGLKVNQLPTIVIDYLLGMVGQDPHKKILARFKEIKTDTNKRLKQLDRDDDSRLKVGEIATFLTKDIINLVISEDLKKKITSAYYGRIQYQFANFSISKGELTTIIEQLGLFDNIKGHPFLASSMLNKVKGIREFYDNYLSAKLKWINGIIANKNLKDLLKNNKISLPFKIKSIISKSEAKNLDNWLKSKKDMPVDLPVSIFDDQLNTYLKKELQHVNIAFQETDKFSVLLTKLLNGDKQPFYNHTRWYRSEEGDVPFSPDGHSSLTIKNNYSSYAELTEKKIRHVQTQDRVLRLACQSILGQLSDVDDTLTFYLQDILAFTNTNPLNRPATFKHKLKEIS

SEQ ID NO: 2656 - protein, 1126 aa, Artificial; identical to SEQ ID NO: 2630
  Synthetic

SEQ ID NO: 2657 - protein, 1216 aa, Artificial
  Synthetic
MGVANMRALRIVYYSLKQLVMKRFSSLLRREEISSFDLYTDFGTKSPLLAIYYNVACVNWEQTQKLIRGFPPDRQTAYLAQYLWRANLVKRNAEGYKFTEDDRRIAALLPEKLDAIRNFHSHIWHDNSVLQADGDLKAFVEKKHEEAKARLFEQNPQSLLDYEAYAKGKSKYALFKYVKDKRADYFTIEGRIFYLSFFLTAGQMNQLLQQCSGFKRADMPLFKIKRQLYTYYCHRDGATLLDFNHDQEVLASMPPVEKQAIIRARTAFKLVNYLYDYPEYWGSADWMPLYDEAGERINSGEALKQWLDKNPDTLPGISFSFIPIKKSPADADKKEHESRVRSGTLAFTVEGIEKYEFHITFPALHRLVVLQRLYQLKKEGVSPLELLKKNLQQQVDNRASLYAILSKRERLRTEDEWEYLTDRSHQQLRGGRKLTELSITFFENLTKGGAENPVVTTRLLNLIRPAESTPLPTPLNKLGKTRFTDDTEPDAIQVYEQDYIMGATQKFRAGNRFMYYSAKYLMDFGGQDWRWGMEKFAMDKKKNSDTKESLLKIKEYLTPREILESNDHRLTLEEDHVYLAIPRPAPKGSANHQQYYQFAIGPRAMRYLMAWVFEKRDKSPEEISSFLMELSQDLELLYQEGAWNSELPVKWLEPAFVMGYLKEYETGGLDTVRQRIQSRISHITKVWDHAVEHTQLLSRSEKNRLIMEAYRFYEWPAGGNGVPRFLRADEYNQMSVCHYSLGLKKKQQTVFVHKGRNYNNKYDYVYKGLFELDKRKPPIPKDVERQLQTAENLDELLVNVITSIRDLLNDKIKSILGAPPAIQKKELPGLCRRLGISIPASLLKGPETESMRQKHLTTLQVQPLAIHPMLMVKKLFPGFYSPAQTDSQSGSTDKTLKRPNLPVFDKLRKNASYRKRLHPDFYNKEFASHLFPEDGNKKQREKLIGEMDRTCAEDILLWQMAHHYLRDNHYTETLAQHLQQLEPGHQPLYDWLKLPIVIQLKPRNEGKDLYISILLHQLDDLLFRQERDRLRKLADHFTYRITQETALWEDDLKDMQLNQLSVGPLPDGSRQNPIPFGILMAEAELIRRCGQQLAERLLDWETGIFEQLLSVHADDKQSLHDWLSQHVDGVDYYRQFKYAFMNFDDVLAVAVSLGIEISEIDSKLMSSLRNCTFHNDIPESGSYSWITRSGERVRNILNMETDLHARKDRSAYEKKD

SEQ ID NO: 2658 - protein, 1146 aa, Artificial; identical to SEQ ID NO: 1461
  Synthetic

SEQ ID NO: 2659 - protein, 1126 aa, Artificial; identical to SEQ ID NO: 2630
  Synthetic

SEQ ID NO: 2660 - protein, 1116 aa, Artificial
  Synthetic
LQQTNSRNGKFTLIKHSINQYNFTTMRIPSLIENNKKYYAIHSEMALLNAQAVLDHIQKMAGIEACAYNEKEKKPSDEDLWVHPVMIFLDKAKTSEVKAEKVQYVIERLCSYFPFMNIMAQFQREYDNEHNKTNRLEVNANDMYDALNKIFRVLKKYRDYSAHYKFEDNCFIDGCAFLRYSEQPLASMVRKYYDVALRNIKEKYNYKTEELAFIQNKRYKITKGIDGRKKTFGNPNFFLTLTSNNGDTTNKWHLSGVGVALLISLFLDKQYVNLFWTRLPIFSDNKLKEDERRVIIRSMGINSVKLPKDRIHMDKDDMSVAMDMLNELKRCPDELFDILPAEKQAHFRIISSDHNEVLMKRSTDRFTSMLLQYIDYGKKFKQIRFHVNMGKLRYLLNAEKNCIDGNIRTRVIEHPLNGYGRIDEIEELRKNEDMTYADTGIRIKDFESMTRDDSDTANYPYVVDTYTHYLLENNKVEFSFCGNASLPEVSERNGKWYVSKVVPACRMSILELPAMAFHMLLLGSEKTEARIKSVYDNYCRLFEAMRKGQVSMDNLSDFGIAPEDIPQRVMNCINGSGQGKDLVGFISRKLEAMSEDTRYRLERLSEDRKAIGSRDNKMGKRGYRQIRTGVFADFLAKDIVLLQLAGNNGTNKMTGLNYRVMQSSIATYDSHGDIETKKEFKALFERANLLVCNPKSGHPFLFKVFARSIPENAIEFYERYLYERQAYLDGIRIKIAKGKTPDVPFVNKNQMKWKSPAQEDLSLSYTDNLAIELPRQMFDADIKDCLMRMDKMKDVDFSNANVTYLIAEYMHRVLNDDFQPFYGWERNYPFIDMLRLKTDKKGSLCASFTSVDERAELWKRRDELMDAYRQWVVRNSGRKGMSRDEAEECADRRLVSSRNEYQKTEKVIRRYKVQDALLFLMAKDVMTKYAEYDGDMFSLKEIMPNSDKGILSVIMPMTFTFEKNGEKITIKSSGMKLKNFGDFFPLANDRRLINLSRLIGTNTISKEDLEEEFKNYDQCRPEMASLILDIEKYAFDMYPQLEKKLNSTNNKVQFKDILQALKQDAKIDDARGNVLRLIRNAFEHNNYPDKGIVEISTLPEVARELKAVFEKYTICK

SEQ ID NO: 2661 - protein, 1146 aa, Artificial
  Synthetic
MESIIGLGLSFNPYKTADKHYFGSFLNLADNNLKAVFAEFKERISDKSKDEDISNLIEKHFIDNMSIVDYEKNISILNGYLPIIDFLDDELENNLNTRVKNFKKSFIILAEALETLRNYYTHFYHDPITFGDNKEPLLELLDEVLLKTILDVKKKYLKTDKTKEILKDSLREEIDLLVIRKTDELREKKKANPRFKFSTDPTQIRNSIFNDAFQGLLYEDKENNGKTQVSYRAKTKLNPKDIHKQEERDFEIPLSTSGIVFLMSLFLSKKEIEDFKSNIKGFKGKVVKDENHNSLKYMATHRVYSILAFKGLKYRIKTDTFSKVTLMMQMIDELSKVPDCVYQNLSETKQKDFIEDWNEYLKDNEENTENLENSRVVHPLIRKRYEDKFNYFAIRFLDEFANFKTLKFQVFMGYYIHDQRTKTIGTTNITTERTVKEKINVFGKLSKMDNLKKHFFSQLSDEENTDWEFFPNPSYNFLTQADNSPANNIPIYLELKNQQIIKEKDDIKAEVNNSQNRNPNKPSKRDLLNKISNTNEDFYQEDPTAILSLNEIPALLHLFLVQPDNKTGQQIENIIRIKIEKQFNSIKNPSKDDKGVPKSLFADTNVRVNAIKLKKDLGEELDMLNKKQIVFKENQKASSNYDELLKKHQFTPKNKRPALRKYVFYNSEKGEEATWLANDIKRFMPKGFKTKWKEYQHSELQRKLAFYDRHTKQDIKELLSGCEFDHFLLDINACFKEDDFEDFFSKYLKNRIETLNIILKQLHDFKNEPTPLKGVFKNCLKFLKQKNYVTENPEIIKKRILAKPAFLPRGIFDERPTMKKGKNPLIDRDEFAKWFVEYLENKDYQKFYNSEEYRIRDADFKKNAVIKKQKLKDFYTLQMVNYLLKEVFGKDEMNLQLSELFQTRQERLKLQGIAKKQMNKETGDSSENTRNQTYIWNKDVPVSFFNGKVTIDKVKLKNIGKYKRYERDERVKTFIGYEVDEKWMMYLPHNWKDRYSVKPINVIDLQIQEYEEIRSHELLKEIQNLEQYIYDHTTDKNTLLQDGNPNFKMYVLNGLLTGIKQVNIADFIVLKQNTNFDKIDFTGIASCSELEKKTIILIAIRNKFAHNQLPNKTIYDLANEFLKKEKRETYANYYLKVLKKMISDLA

SEQ ID NO: 2662 - protein, 1127 aa, Artificial
  Synthetic
LQKQDKLFVDRKKNAIFAFPKYITIMENKEKPEPIYYELTDKHFWAAFLNLARHNVYTTVNHINKLLEIAELKNDEDVLNIKDSWNKQAEKLDKKVRLRNLLMRHFPFLEAAAYKKTTSKDSNSKEQKEKEQAEALSLDNLKNVLFIFLEKLQSLRNYYSHYKYSEEAQKPTFENDLLKNMYKIFDTNVRLVKRDYMHHENVDMQRDFSHLNRKRQEGQTRKIIANPNFRYHFADEKGDMTIAGLLFFISLFLDKKDAIWMQKKLKGFKDGRNLREQMTNEVFCRSRISLPKLKLENVQTKDWMQLDMLNELVRCPKSLYERLREKDRESFKVPFDIFSDDYDAEEEPFKNTLVRHQDRFPYFVFRYFDLNEIFEQLRFQIDLGTYHFSIYNKLIGDEDEVRHLTHHLYGFARIQDFAPQNQPEEWRKLVKDLDHFETSQKPYISKTAPHYHLENEKIGIKFCSTHNKLFPSLKREKTCNGRSKFNLGTQFTAEAFLSVHELLPMMFYYLLLTKDYSRKESADKVEGIIRKEISNIYAIYDAFANNEINSIADLTGRLQKTNILQGHLPKQMISILEGRQKDMEKEAERKIGEMIDDTQRRLDLLCKQTNQKIRIGKRNAGLLKSGKIADWLVSDMMRFQPVQKDTNNAPINNSKANSTEYRMLQHALALFGSESSRLKAYFRQMNLVGNANPHPFLAETQWEHQTNILSFYRNYLEARKKYLKGLKPQNWKQYQHFLILKVQKTNRNTLVTGWKNSFNLPRGIFTQPIREWFEKHNNSKRIYDQILSFDRVGFVAKAIPLYFAGEYKDNVQPFYDYPFNIGNKLKPQKGQFLDKKERVELWQKNKELFKNYPPEKRKTDLAYLDFLSWKKFERELRLIKNQDIVTWLMFKELFKTTTVEGLKIGEIHLRDIDTNTANEESNNILNRIMPMKLPVKTYETDNKGNILKERPLATFYIEETETKVLKQGNFKVLAKDRRLNGLLSFAETTDIDLEKNPITKLSVDHELIKYQTTRISIFEMTLGLEKKLIDKYSTLPTDSFRNMLERWLQCKANRPELKNYVNSLIAVRNAFSHNQYPMYDATLFAEVKKFTLFPSVDTKKIELNIAPQLLEIVGKAIKEIEKSENKN

SEQ ID NO: 2663 - protein, 1120 aa, Artificial
  Synthetic
MEDDKKTTDSIRYELKDKHFWAAFLNLARHNVYLTVNHINKILEEDEINRDGYENTLENSWNEIKDINKKDRLSKLIIKHFPFLEATTYRQNPTDTTKQKEEKQAEAQSLESLKKSFFVFIYKLRDLRNHYSHYKHSKSLERPKFEEDLQNKMYNIFDVSIQFVKEDYKHNTDINPKKDFKHLDRKRKGKFHYSFADNEGNITESGLLFFVSLFLEKKDAIWVQKKLEGFKCSNKSYQKMTNEVFCRSRMLLPKLRLESTQTQDWILLDMLNELIRCPKSLYERLQRAYREKFKVPFDSIDEDYDAEQEPFRNTLVRHQDRFPYFALRYFDYNEVFANLRFQIDLGTYHFSIYKKLIGDNKEDRHLTHKLYGFERIQEFDKQNRPDEWKAIVKDSDTFKKKEEKEEEKPYISETTPHYHLENKKIGIAFKNHNIWPSTQTELTNNKRKKYNLGTSIKAEAFLSVHELLPMMFYYLLLKTENTKNDNKVGGKKETKKQGKHKIEAIIESKIKDIYALYDAFANGEINSEDELKEYLKGKDIKIVHLPKQMIAILKNEHKDMAEKAEDKQEKMKLATENRLKTLDKQLKGKIQNGKRYNSAPKSGEIASWLVNDMMRFQPVQKDNEGKPLNNSKANSTEYQLLQRTLAFFGSEHERLAPYFKQTKLIESSNPHPFLNDTEWEKCNNILSFYRSYLTKKIEFLNKLKPEDWEKNQYFLMLKGPKINRKTLVQGWKNGFNLPRGIFTEPIRKWFMEHWKNIKVDDSKRVGLVAKVIPLFFSEKYKDSVQPFYNYPFNVGDVNKPKEEDFLHREERIELWDKKKDKFKGYKAKEKSKKMTDKEKEEHRSYLEFQSWNKFERELRLVRNQDIVTWLLCTELIDKLKIDELNIKELKKLRLKDIDTDTAKKEKNNILNRVMPMELPVTVYEVNQGGYIIKNKPLHTIYIKEAETKLLKQGNFKALVKDRRLNGLFSFVKTPSEAESESNPISKSRVESELGKYQNARLDIIKDMLALEKKLIDKYNSLDTDNFHNMLTGWLELKGEAKKARFQNDVDLLVAVRNAFSHNQYPMYDENLFGNIERFSLSSSNIIESKGLDIAVKLKEEVSKAVEKIQNEEDNKKEKET

SEQ ID NO: 2664 - protein, 1174 aa, Artificial; identical to SEQ ID NO: 2575
  Synthetic

SEQ ID NO: 2665 - protein, 1131 aa, Artificial; identical to SEQ ID NO: 2422
  Synthetic

SEQ ID NO: 2666 - protein, 1131 aa, Artificial; identical to SEQ ID NO: 2591
  Synthetic

SEQ ID NO: 2667 - protein, 1124 aa, Artificial; identical to SEQ ID NO: 2558
  Synthetic

SEQ ID NO: 2668 - protein, 1097 aa, Artificial; identical to SEQ ID NO: 2279
  Synthetic

SEQ ID NO: 2669 - protein, 1137 aa, Artificial; identical to SEQ ID NO: 2355
  Synthetic

SEQ ID NO: 2670 - protein, 1029 aa, Artificial; identical to SEQ ID NO: 2444
  Synthetic

SEQ ID NO: 2671 - protein, 1000 aa, Artificial
  Synthetic
MESIIGLGLSFNPYKTADKHYFGSFLNLADNNLKAVFAEFKERISDKSKDEDISNLIEKHFIDNMSIVDYEKNISILNGYLPIIDFLDDELENNLNTRVKNFKKSFIILAEALETLRNYYTHFYHDPITFGDNKEPLLELLDEVLLKTILDVKKKYLKTDKTKEILKDSLREEMDLLVIRKTDELREKKKTNPKFKFSTDPTQIRNSIFNDAFQGLLYEDKENNGKTQVSYRAKTKLNPKDIHKQEERDFEIPLSTSGIVFLMSLFLSKKEIEDFKSNIKGFKGKVVKDENHNSLKYMATHRVYSILAFKGLKYRIKTDTFSKVTLMMQMIDELSKVPDCVYQNLSETKQKDFIEDWNEYLKDNEENTENLVNSRVVHPLIRKRYEDKFNYFAIRFLDEFANFKTLKFQVFMGYYIHDQRTKTIGTTNITTERTVKEKINVFGKLSKMDNLKKHFFSQLSDEENTDWEFFPNPSYNFLTQADNSPANNIPIYLELKNQQIIKEKDDIKAEVNNSQNRNPNKPSKRDLLNKISNTNEDFYQGDPTAILSLNEIPALLHLFLVQPDNKTGQQIENIIRIKIEKQFNSIKNPSKDDKGVPKSLFADTNVRVNAIKLKKDLGEELDMLNKKQIVFKENQKASSNYDELLKKHQFTPKNKRPALRKYVFYNSEKGEEATWLANDIKRFMPKGFKTKWKGYQHSELQRKLAFYDRHTKQDIKELLSGCEFDHFLLDINACFKEDDFEDFFSKYLKNRIETLNIILKQLHDFKNEPTPLKGVFKNCLKFLKQKNYVTENPEIIKKRILAKPAFLPRGIFDERPTMKKGKNPLIDRDEFAKWFVEYLENKDYQKFYNSEEYRIRDADFKKNAVIKKQKLKDFYTLQMVNYLLKEVFGKDEMNLQLSELFQTRQERLKLQGIAKKQMNKETGDSSENTRNQTYIWNKDVPVSFFNGKVTIDKVKLKNIGKYKRYERDERVKTFIGYEVDEKWMMYLPHNWKYSCVYPSK

SEQ ID NO: 2672 - protein, 985 aa, Artificial; identical to SEQ ID NO: 1401
  Synthetic

SEQ ID NO: 2673 - protein, 1059 aa, Artificial
  Synthetic
MSYKKEPKEIYRNALAVYLNMAVDNLPKWLNLEVPKGQSIKKELENVDNTEKMRSIWGAAQKNIYFVEWAVNNKRYFAPFPEEENMQDVVLKDNYDKLVGLVDMLVNIRNYWSHIKHSNSVIENELKESNELKDFLLELYLRACGSTEVEIPQMYKGSEGLYVCDKDPKSEPEPFKVICITNEFSITGYVFYACMFLDGQQINSFMEAMEQSNYKFDELEKRRMFRLTNPKEAYPDELTKKTKGFLYARDVYVYWRVRGHRDNVFEEHSLDDKEAYYSMLEYLKRCPKERMELVNGVPDLMKQYSVGDTLYDVREKNKFMECGLEFWDNEIERLSTVSTKSNPLATWKWGHHQSADYKHKIKVELEKEAKEHGRPYRFPRYQKVVFDLPTTDEEKLNYRNDEHGFPYYLIKDDSNTFTKAMFCYEFMNREKVIGLMGSRLLCSILEYYLWKYPVTDTSHATENNRYKFWVELFKACYSYIKDFTVPEKEKNLVTLEKVEKRINLLTERYKAITEDEKIRPHSKILFILDTWNQMLTFGQPTNLAHANDSDKGVIGGKNGYQELMRCLSKMDDLEENRNFAYLELCKKLQILGKDKTKTSYFYIINSSFQKYGVTKSPTELNKCQTIDSIFDLCKKYREAMLAKFRLLLIDFSVDSLRPAYEMRWLGLSDSRTHEASQQTKPTGNRTLETNIINVDKKLYAAVGLPRDIRQLPGLSKYIDAENLQNIHAKIYPSPNNCTLLIPDFYTKDGLELSTLRGDQSIRKRLFLIRRQDTVLSHIAYQKGIKAEGRMTEDMQLINSNFQEAEMTLPINKEGETILSIHFYYRYYKQNRYQLPKKLTTDLCELLVFRNILQKGAVIKFNRMELVTKETLTPDELMNHLSKEEQMLPEIERQRIIEERFAAMKTNVFKPSTNRSLFYMDELLNSYTICRRAIIEKLFKLEQRVLSISNMKIDDTFVSFRRISNWLFEDRVINESEMILLEEIRNTAMHGKIPSPEYLPIDIVDETKFKDITVEKKQYLNIFGKGMEITKEILNRLDQTYPQKQQETNGKRYAKSRFSR

SEQ ID NO: 2674 - protein, 1112 aa, Artificial; identical to SEQ ID NO: 2039
  Synthetic

SEQ ID NO: 2675 - protein, 1131 aa, Artificial; identical to SEQ ID NO: 2584
  Synthetic

SEQ ID NO: 2676 - protein, 1131 aa, Artificial; identical to SEQ ID NO: 2422
  Synthetic

SEQ ID NO: 2677 - protein, 1131 aa, Artificial; identical to SEQ ID NO: 2422
  Synthetic

SEQ ID NO: 2678 - protein, 1131 aa, Artificial; identical to SEQ ID NO: 2584
  Synthetic

SEQ ID NO: 2679 - protein, 1029 aa, Artificial; identical to SEQ ID NO: 2444
  Synthetic

SEQ ID NO: 2680 - protein, 1082 aa, Artificial
  Synthetic
MIFLNLARHNVYTTVNHINKLLEIAELKNDEDVLNIKDSWNKQAEKLDKKVRLRDLIMKHFLFLEAAAYEITNSKSPNNKEQREKEQSEALSLNNLKNVLFIFLEKLQVLRNYYSHYKYSEESPKPIFETSLLKNMYKVFDTNVRLVKRDYMHHENIDMQRDFTHLNRKKQVGRTKNIIDSPNFHYHFADKEGNMTIAGLLFFVSLFLDKKDAIWMQKKLKGFKDSRNLHEQMTNEVFCRNRIYLPKLKMETVQTREWMQLDMLNELIRCPKSLYERLREEDRESFKVPFDIFSDDYNAEEEPFKNTLVRHQDRFPYFVLRYFDLNEIFTQLRFQIDLGTYHFSIYNKRIGDEDEVRHLTHHLYGFARIQDFAQQNQPEVWRKLVKDLDYFEVSQEPYISKTTPHYHLENEKIGIKFCSAHNNLFPSLQTDKTCNGRSKFNLGTQFTAEAFLSVHELLPMMFYYLLLTKDYSKKESADKVEGIIRKEISNIYAIYDAFANGEINSIADLTRRLQNTNILQGHLPKQMISILKGRQKDMEKEAERKIGEMIDDTQRRLDLLYKQVNQKIRIGKRNAGLLKSGKIADWLVSDMMRFQPVQKDTNNAPINNSKANSTEYRMLQHALALFGSESSRLKAYFRQMNLVGNANPHPFLAETQWEHQNNILYFYRKYLEARKKYLKGLKPQNWKQYQHFLMLKEQKSNRNTLVAGWKNGFNLPRGIFTEPIRKWFEEHNNSEGLYDQILSFGRVGFVAKAIPLYFAEECKDCVQPFYDYPFNVGNKLKPKKGQFLDKKDRVELWRKNKELFKNYPPEKRKTDLAYLDFLSWKKFERELRLIKNQDIVTWLMFKELFKTTTVEGLKIGEIHLRDIDTNTANEESNNILNRIMPMKLPVKTYETDNKGNILKERPLATFYIEETETKVLKQGNFKVLAKDRRLNGLLSFAETTDIDLEKNPITKLSVDHELIKYQTTRISIFEMTLGLEKKLIDKYSTLPTDSFRNMLERWLQCKANRPELKNYVNSLIAVRNAFSHNQYPMYDATLFAEVKKFTLFPSVDTKKIELNIAPQLLEIVGKAIKEIEKSENKN

SEQ ID NO: 2681 - protein, 1131 aa, Artificial; identical to SEQ ID NO: 2422
  Synthetic

SEQ ID NO: 2682 - protein, 1131 aa, Artificial; identical to SEQ ID NO: 2584
  Synthetic

SEQ ID NO: 2683 - protein, 1131 aa, Artificial; identical to SEQ ID NO: 2584
  Synthetic

SEQ ID NO: 2684 - protein, 1131 aa, Artificial
  Synthetic
MEKTIENQTQSKRTLNNDPQYFGAYLNMARLNIFNISNHLAEKFGLAVLDDEEKITTSFLVDKGNKEYKTRQSLVYSNLTRYMHIAKVFDFEKLPDDERDKAENYGKDFGNLTDTLKEIFKELNEFRNDYSHYYSTEKKDKRKTIVSDKLKNFLNINYTRAIKYTKSRFINVFSDNNFCLAEEAKHVENDNTITQDGIVFFTSMFLDRENAFQFISKIIGLKGTQTKAFKAKRETLMAFCVNLPHDKFVSENSEQQFSLELINELNKCPKTLYNVISENEKQHFLPKLDDEQIDNVLENSVPYTIDDYENYIENITKKVRNKNRFSYFALKFIDQKKLFKNWRFQIDLGKIVLDEYSKQLNGKDEKRTVTENTKAFGMLQDLNDEENVLNKINTGESKAKFDQFAPHYNFDVQNNKIGISKKETTAKFITKNTDNKIKSNLLQPLPEAFLSINELPKIILLEYLEQGKTEQLINDFIEINNSKILNKEFIKAIKLKLNDLDVFYKRSQGRKQKHAYLTKDKKYDNEKINELKNRKEKLNQILAEYNLNVKQIPTRILDYWLNIADVQAKNAISDRIKLMKRDCINRLKSMKKGKAPKIGEMATFIAKDIVDMIIDEEKKKKITSFYYDKMQECLALFADKEKKELFILICNNELKLNDDDGHPFFKNINFSNYKYTSEIYQKYLEEKGHKMVKEYNPRKENYVEKDKSWLEINFYKKEWNENAKKDLTVVKLPDDKSKIPFTLRQLEKEKSSFENWFKYVTNGKETTDKKKPVDLPVNLFDETLKELFKKELSKNNIEFKEEDNYNELFKIWWDKCRNDKTQKFYSAEREYTFEEEKLNFHINTKSKFEEYINPEFAEKVFRLKNQNREKDNISGRRLPPLKMKEVTKNMVKRIGNTEKEIRMLQEEDRLMLLMFEKLVDNNLKLKLENVDKLLNESIEINQSISGKLSFDDSGDNENKKDRAIICRNITETRKRKEYSVLKKYVFDRRLPELFEYFEEENIPIEKIKIELDTYSKAKDVVFDLIFDLERAIINKDENRIKELNKDKNGVIQTGNIQHKPYLFWLLEKNLITEQEFTFMNMVRNIFSHNQFPQKKTMELFIKNWNENEFAKQILNVYNQKNNNLIKSIKDI

SEQ ID NO: 2685 - protein, 1127 aa, Artificial; identical to SEQ ID NO: 2389
  Synthetic

SEQ ID NO: 2686 - protein, 1091 aa, Artificial
  Synthetic
MRIPSLIENNKKYYAIHSEMALLNAQAVLDHIQKMAGIEAYAYNENEKKPSDEDLWVHPVMIFLDKAKTSEVKAEKVQYVIERLCSYFPFMNIMAQFQREYDNEHNKTNRLEVNANDMYDALNKIFRVLKKYRDYSAHYKFEDNCFIDGCAFLRYSEQPLASMVRKYYDVALRNIKEKYNYKTEELAFIQNKRYKMTKGIDGRKKTVGNPNFFLTLTSNNGDTTNKWHLSGVGVALLISLFLDKQYVNLFWTRLPIFSDNRLKEEERRVIIRSMGINSVKLPKDRIHMDKDDMSVAMDMLNELKRCPDELFDILPAEKQAHFRIISSDHNEVLMKRSTDRFTSMLLQYIDYGKKFKQIRFHVNMGKLRYLLNAEKNCIDGNIRTRVIEHPLNGYGRIDEIEELRKNEDMTYADTGIRIKDFESMTRDDSDTANYPYVVDTYTHYLLENNKVEFSFCGNSSLPEVSERNGKWYVSKDVPACRMSILELPAMAFHMLLLGSEKTEARIKSVYDNYCRLFEAMRKGQVSMDNLSDFGIAQEDIPQRVMNCINGSGQGKDLVGFISRKLEAMSEDTRYRLERLSEDRKAIGSRDNKMGKRGYRQIRTGVFADFLAKDIVLLQLAGNNGANKMTGLNYRVMQSSIATYDSHGDIETKKEFKALFERANLLVCNPKSGHPFLFKVFARSIPENAIEFYERYLYERQAYLDGLRIKIAKGKTPDVPFVNKNQMKWKSPAQEDLSLSYTDNLAIELPRQMFDADIKDCLMRMDKMKDVDFSNANVTYLIAEYMHRVLNDDFQPFYGWERNYPFIDMLRLKTDKKGSLCASFTSVDERAELWKRRDELMDAYKQWVVRNSGRKGMSRDEAEECADRRLVSSRNEYQKTEKVIRRYKVQDALLFLMAKDVMTKYAEYDGDMFSLKEIMPNSDKGILSVIMPMTFTFEKNGEKITIKSSGMKLKNFGDFFPLANDRRLINLSRLIGTNTISKEDLEEEFKNYDQCRPEMASLILDIEKYAFDMYPQLEKKLNSTNHKVYFKDILQALKQDSKVDDAKGNVLGLIRNAFEHNNYPDKGVVEISTLPEVARELKAVFEKYTICK

SEQ ID NO: 2687 - protein, 1085 aa, Artificial; identical to SEQ ID NO: 1453
  Synthetic

SEQ ID NO: 2688 - protein, 1081 aa, Artificial
  Synthetic
MKKTNTYFDFKDKTQKYFFAGLFNTALNNFDLSLDELANRTGLKCNGKELIAVAFNDTCSQTDYNNRLSYLSESLAFIELIKTKERSYIRLHLTELYNLIDNYRNYFTHLEHPGLIIKPLIFKLLDLFILESARTVIKERVKTEENKSYLSKKFKLEITSTFEAANNAINLENKNNPHSKTHKKLITQNDKINFVLNKAFHNFLINTDGVPTLKETARSINKDTGQISQNGIIQLLAIFLNKKQLEILFDNTHYLKGTLKLNHLCTRWTYSQLAYRNIKKLLKSDYSNDSLILQMLSELTKCPKHLYPNLPNNSKQEFIEDLNEYLKETEYFKDSIAQETVSNEVIRKRYEDKFPYFAIRFLDEFIDFPNLRFQINLGKFNHNTCLKKFENTAVYTERQILEKLTIFEKLTLATNKKTEYFLNNNLPDSEGWQEYPKPSYQFYNNNIGFWLGIKNGAVTDAKEKRENDKSSKFDILKKIGLECCLKKPVAYLSFNELPALLYTVLIEKKTAKEVERIFLKKIGEQTGAINKFADINNFEKKIIPHKFKEILENKESNVKWEKLKKDIEKEMLISPLDEIRIHYKTASKHPNDLSFSEKGKIATWLAHDIKRFVKAETKKDWKGYQFSEFQSLLAYYDLKKMELLNFVNFVLKINIKQDIVFEDIDFNQKTLYDFYKNYLSNRKKFLEGNLYSIDQKDEVPAKLWRKRELSIFTGFDDKLYKYKNFKTYKENLMNMPLNLPRGIFSDKQTCYNKNSQNNNELAEWFTKSNNINDFQKFYSFTRFYENCQLTLNPLKGLKEQNNNKGVPKEVYKNEKNIRNTMRQDFYIFEMVKYYFKINESLKSDLNDLKLNTLFLTKQEKENNLKVLNQQHSRSKGDKSENILNENYILSKHIMMSILEGKIQGMVALKSVGKYRFLSQDKRVKQLVTYIPDKIWSFEEINSEIDEYDKIRAFSFFKIIHEIEEKIFNKAINNKEESYLLVDGHPNFKAYIIYYFLKTQDEKDFFNKLDVKNVNINDIAISKFKLLFLIIKIRNKICHNQLISSDEFNFLLEFTPIEPDELYMSYLLKAYKKIVNISWNLV

SEQ ID NO: 2689 - protein, 1131 aa, Artificial; identical to SEQ ID NO: 2422
  Synthetic

SEQ ID NO: 2690 - protein, 1003 aa, Artificial; identical to SEQ ID NO: 1494
  Synthetic

SEQ ID NO: 2691 - protein, 1131 aa, Artificial
  Synthetic
MEKTIENQTQSKRTLNNTPQYFGAYLNMARLNIFNISNHLAEKFGLAVLDDEEKITTSFLVDKGNKEYKTRQSLVYSNLTRYMHIAKVFDFEKLPDDERDKAENYGKDFGNLTDTLKEIFKELNEFRNDYSHYYSTEKKDKRKTIVSDKLKNFLNINYTRAIKYTKSRFINVFSDNNFCLAEEAKHVENDNTITQDGIVFFTSMFLDRENAFQFISKIIGLKGTQTKAFKAKRETLMAFCVNLPHDKFVSENSEQQFSLELINELNKCPKTLYNVISENEKQHFLPKLDDEQIDNVLENSVPYTIDDYENYIENITKKVRNKNRFSYFALKFIDQKKLFKNWRFQIDLGKIVLDEYSKQLNGKDEKRTVTENTKAFGMLQDLNDEENVLNKINTGESKAKFDQFAPHYNFDVQNNKIGISKKETTAKFITKNTDNKIKSNLLQPLPEAFLSINELPKIILLEYLEQGKTEQLINDFIEINNSKILNKEFIKAIKLKLNDLDVFYKRSQGRKQKHAYLTKDKKYDNEKINELKNRKEKLNQILAEYNLNVKQIPTRILDYWLNIADVQAKNAISDRIKLMKRDCINRLKSMKKGKAPKIGEMATFIAKDIVDMIIDEEKKKKITSFYYDKMQECLALFADKEKKELFILICNNELKLNDDDGHPFFKNINFSNYKYTSEIYQKYLEEKGHKMVKEYNPRKENYVEKDKSWLEINFYKKEWNENAKKDLTVVKLPDDKSKIPFTLRQLEKEKSSFENWFKYVTNGKETTDKKKPVDLPVNLFDETLKELFKKELSKNNIEFKEEDNYNELFKIWWDKCRNDKTQKFYSAEREYTFEEEKLNFHINTKSKFEEYINPEFAEKVFRLKNQNREKDNISGRRLPPLKMKEVTKNMVKRIGNTEKEIRMLQEEDRLMLLMFEKLVDNNLKLKLENVDKLLNESIEINQSISGKLSFDDSGDNENKKDRAIICRNITETRKRKEYSVLKKYVFDRRLPELFEYFEEENIPIEKIKIELDTYSKAKDVVFDLIFDLERAIINKDENRIKELNKDKNGVIQTGNIQHKPYLFWLLEKNLITEQEFTFMNMVRNTFSHNQFPQKKTMELFIKNWNENEFAKQILNVYNQKNNNLIKSIKDI

SEQ ID NO: 2692 - protein, 1126 aa, Artificial; identical to SEQ ID NO: 2630
  Synthetic

SEQ ID NO: 2693 - protein, 1126 aa, Artificial; identical to SEQ ID NO: 2630
  Synthetic

SEQ ID NO: 2694 - protein, 1131 aa, Artificial
  Synthetic
MEKTIENQTQSKRTLNNTPQYFGAYLNMARLNIFNISNHLAEKFGLAVLDDEEKITTSFLVDKGNKEYKTRQSLVYSNLIRYMHIAKVFDFEKLPDDERDKAENYGKDFGNLTDTLKEIFKELNEFRNDYSHYYSTEKKDKRKTIVSDKLKNFLNINYTRAIKYTKSRFINVFSDNNFCLAEEAKHVENDNTITQDGIVFFTSMFLDRENAFQFISKIIGLKGTQTKAFKAKRETLMAFCVNLPHDKFVSENSEQQFSLELINELNKCPKTLYNVISENEKQHFLPKLDDEQIDNVLENSVPYTIDDYENYIENITKKVRNKNRFSYFALKFIDQKKLFKNWRFQIDLGKIVLDEYSKQLNGKDEKRTVTENTKAFGMLQDLNDEENVLNKINTGESKAKFDQFAPHYNFDVQNNKIGISKKETTAKFITKNTDNKIKSNLLQPLPEAFLSINELPKIILLEYLEQGKTEQLINDFIEINNSKILNKEFIKAIKLKLNDLDVFYKRSQGRKQKHAYLTKDKKYDNEKINELKNRKEKLNQILAEYNLNVKQIPTRILDYWLNIADVQAKNAISDRIKLMKRDCINRLKSMKKGKAPKIGEMATFIAKDIVDMIIDEEKKKKITSFYYDKMQECLALFADKEKKELFILICNNELKLNDDDGHPFFKNINFSNYKYTSEIYQKYLEEKGHKMVKEYNPRKENYVEKDKSWLEINFYKKEWNENAKKDLTVVKLPDDKSKIPFTLRQLEKEKSSFENWFKYVTNGKETTDKKKPVDLPVNLFDETLKELLKKELSKNNIEFKEEDNYNELFKIWWDKCRNDKTQKFYSAEREYTFEEEKLNFHINTKSKFEEYINPEFAEKVFRLKNQNREKDNISGRRLPPLKMKEVTKNMVKRIGNTEKEIRMLQEEDRLMLLMFEKLVDNNLKLKLENVDKLLNESIEINQSISGKLSFDDSGDNENKKDRAIICRNITETRKRKEYSVLKKYVFDRRLPELFEYFEEENIPIEKIKIELDTYSKAKDVVFDLIFDLERAIINKDENRIKELNKDKNGVIQTGNIQHKPYLFWLLEKNLITEQEFTFMNMVRNTFSHNQFPQKKTMELFIKNWNENEFAKQILNVYNQKNNNLIKSIKDI

SEQ ID NO: 2695 - protein, 1196 aa, Artificial
  Synthetic
MVEITNNKNVYAAFSNMAQDNLYMVFNHILKCLGKNAGKNAADKIQQTFASKKVNEKAKAIDLLNRHLPFMEPLVASVMDKKGNNFSLPEAYAYVTKRIVEIARFYRNYTTHYDSDESGEILNLNSYEGSMCHGLNELFKASIRVVRQRYGYTEDDVKFVANRGKAPGNEKSYKYFLHKTVTSAANSTQRKEFSLKGLVFFLCLLLEKKYISEFLDKTKAFYTYQDLTNPKRKSILLESIAVYRVKLPRKRYDSETSLTVLALDIMNELQRCPRELFDILSPADQKLFRSVKGDENGESVLMMRSSDRFPTLAMRWIDLCETFKQIRFQINLGKYRFAFYNKRCIKYGEDNGVQVRSLEKELHGFGRLDDIEKDRREKWATLIREYDEVREDTADSVPYITDHRASYLISNNRVGLYWKASVTDPFPGLPQLSTTPQARDLRERKKAGEKLASLATPKCFLSVHELPSLVFYTMLFKQADPSVLQKSGAISAEAIIMRWVKNFHSFIDGVLSGEISKDNCEDKAADLGIDYKRHLPKKLQEFISGSGADEQELNKRLRDRLDKHIADTDRRIERHRRDAERQADEANKRGKKNFVEIKPGRLGSWLAHDMIAMQPQPRGGENKLTGLNFQILQSALSMFDNLENMRQVLISARLIGSSYSHPFLEKVLNKQPRNTIELYKIYLDEKVAWLRSLKPEEIRALGFITRGTDKWSARDEEYYKRVLLRYKTMPVELPRGLFSQAIKKLLSEQFGPSFVKGETRDEANVSFLVSKYFRDKCNDDSQEFYTQPNGTYKRYYTFFRLLAGAPTIKSVPEYGKIVTEIDAFLKSDPSLDLLLTKQHADVATAQPTFDLSREIEEVNIKLVKAKAKNPNLDVAKRIEEIISSSMKLKSLSPAQKMQLMSKFLGKNVASAQNQPRLVEKYLNGIEKSEREQEKVKLSRTLRLMKETERLIRNYRVKDILLFLMARNILFAEDEMPSDAAVKHFKLSEIRPIRRQDGVGTLEIKIPFSITLHIKGSNVPVRITQDSIKLKNYGDFQKFLYDTRLETLIPYLVDDENAVRIDVSKAELDDEFAKYDTARIEVFANVHKIERLILERHSELKDKTSASYYYQENGKNLPVRGNFGKMLSYDKRYADEDQSEMVNIRNSFSHNSYRGDGFGNVNISTSKVGEIAPAIKGKLKNKADQISADAKKDNVQN

SEQ ID NO: 2696 - protein, 1160 aa, Artificial; identical to SEQ ID NO: 2416
  Synthetic

SEQ ID NO: 2697 - protein, 1150 aa, Artificial
  Synthetic
MEENHDIHVNIVADKPFIAGYFNLASNHLKELSDAIHARFPNLKNASNFLIPTPVNTGQNEDQCVQKKISEMSESDYQMLLDLVSSYFRAVSLVKRSSFVNGVLDRIWLWKRINYILILQNSLRNYYTHYCHPEVIISDSDFKNLLEQMFISSALDVKEKRLKGEQALRVIKSSFEDELKKLEIDQKKYLTEKTKENPKISLDDDSVRNATLNHLIYRMVKKNKQTGDYEINKGYQLFKLVEGRTDQWRFTDDGLAFFLGLFLTKKEGLEFRSRIKGFKDNNNLSHNVTQWVFSYPAFRRADRNFTTVFSKDAFIFQMIDELNKVPDEVYRNLPEEKQDEFLVDINSYFKDKTDVPGSTPEQETVVNPVIRKRYEDKFEYFALRYLDEFAGFTRIRFQVYVGDYIHDRREKKIGNSNLYTERECREKVKTFGKLTELQKVKTEYFEGKAVPEIPGWRRFPNPSYRIENHNILLALYIKNEEIKDRIQKAQKALGNAGDKERSSRTEKPVRGEMLNEMYNKCPYKFNSTPFIAQMSLNELPALLYALLIDHKSPEDIEDQIIQTYQEHFHEIEKGEGKHLPKNLTQSDKEGADMGKLRRDIQGVIDDSDERLLSFDKLKREKSKGRNSRPLYHVFDSKTMGETVSFLAKDILRFMPVIYRENWKGYMHSEWQALLSHYEVNRQAAIDLLFSCWKTQNAPESTGMEILNLFQKSETFEELYEEYLKFRKQYMRLLLVGLGSADIQMFFTEKGVWNYFHKRLYVRDPTATLTDRLLARPIVLPRGIFDKKPTYIKGKNPEMNREDFADWYVYPYERECGVQMFYGYGLDTDRGFEDYRIFSESIRDNRYDWSEEHQRELFKKKELSRVKNVKRKDAFLYLMVKKMLEDEGVPFKLSLNDFYLPQEAISKRKGVALGQKNRQPGDKSENIRKETYIWNMTLPFYYEREDKNEKKHKVFYEEKVQVKDLRTLAARMTNLKVLRLFDYDPSHLWNRKSLESELSNYEKIRRENLLVIIQRFEREVLLRYGWKEGEVAPDDLLITDKKGKKIPNFKRYVFSSPLGFSKEAIPQLLDNSWLQLKRNYPQIAAFSKVSQGYQLIQIRNNFAHNKLPDVSFFRECTAFLAKDPSEYYSQYYFRLAEKIINLLENNIHSDA

SEQ ID NO: 2698 - protein, 1204 aa, Artificial
  Synthetic
MKTNYQNFCIKSFFQIFENKGTVGSVAEKALNNFKSKKKKNESIERLYYFAIGHAFKQIDKKNIFGLDENDEQKDLVYTKFLHLLKPHFERCLENNEKGKPKLLQVIEDIRNQNSHFLHTFDELSLDKIEKETIVPFLKESFELALIQSFLKEKIDSENQNRENRKAPLLSNVEKEEILKKIIEKDGNNELFINFIKRIFFQSLYITKNDQKLNEVQKSEKDFIDKNYQTKDELIDFILLIKVENEFTWELNQKGSGKPDDHIHEMIEIKKRTYLSFEACIFLLSMFLYKNEANQLIPKIRGFKKNKTNEDKSKRNVFTFFAKKFKSQDIDSEESNLVRFRDIIQYLSKYPTEWNAEIEKIKSENPMTTHLKNAIIEMEVSRCFPEMSHDKEFQKFAIQYLFYNEIIESKNKKIYLDIIDKNDEVRKTYYAIKDRKLNFKEYKPNTSKGFTLNYVKQKYFNYKNIRPIDIQKKNIKKFTKELNTNKNVLKLKNRIEHNLLFVSYGRNRDRFMQYAARFLAETNYFGNDAEFKMYQFYTTDEQNAELEKLQENLSKKEFEKLKFHQGKLTHFSTYSKHLKNFPEWDMPFVVQNNAIHVKIKDIPKTVCIQRNLMIYFLEDALFKKSEGKIQFGGYKLIGYYNQLKEEKQSILGNLKNNTPDDEDDEQKAEYKKLFPRKLIQNYFPAEQNNLPEKNSFQLLLDEAIQSEQRYKELKEKAKLERNLEFFENKNKGKNFKLKFIRKACHLMYFRNAYLDQKEEQLALEIRNGESFDGKNHEHEKAHHKRFHITRDEYKDFSKWMFAMDSVSFYKEHLNQLFEDKGFFRNPEFKQLFKDVDSLDKMYFRTKEKFKEWLKTHSPETEKNNKYNLESYQSYLENSVFYINVSHYKKYLEDKKLIETENGRYIYKSLENKNHLIESYYYKPHFDIPKDNAHHREYYKLNHRLRTAKHEDCLLYEMAIFYLKADKVKAGELKNNITEILQQKINFPVEDVKETKYEIEVPFKEIEKFLQILFFNQLQKNSYSIIKNLPGYLEKTKNEDDIKEIFNHFNEYNLLKLDDLNKVHNHLINQQSKFTPCVMAMEEYFIWRHKQNLKELNRLPIGSIEGLKDYFTGDDQPLRGNAFHFNLPNKSYKKFFEQLEDKFIREEFPKEKIENFEDLKLPLQKIFQVFLDQMRNDEDKNDPKVKKKKAQAKYLKTIHQKKKNQ

SEQ ID NO: 2699 - protein, 1003 aa, Artificial; identical to SEQ ID NO: 1723
  Synthetic

SEQ ID NO: 2700 - protein, 1127 aa, Artificial
  Synthetic
LQKQDKLFVDRKKNAIFAFPKYITIMENKEKPEPIYYELTDKHFWAAFLNLARHNVYTTVNHINKLLEIAELKNDEDVLNIKDSWNKQAEKLDKKVRLRNLLMRHFPFLEAAAYKKTTSKDSNSKEQKEKEQAEALSLDNLKNVLFIFLEKLQSLRNYYSHYKYSEEAQKPTFENDLLKNMYKIFDTNVRLVKRDYMHHENVDMQRDFSHLNRKRQEGQTRKIIANPNFRYHFADEKGDMTIAGLLFFISLFLDKKDAIWMQKKLKGFKDGRNLREQMTNEVFCRSRISLPKLKLENVQTKDWMQLDMLNELVRCPKSLYERLREKDRESFKVPFDIFSDDYDAEEEPFKNTLVRHQDRFPYFVLRYFDLNEIFEQLRFQIDLGTYHFSIYNKLIGDEDEVRHLTHHLYGFARIQDFAPQNQPEEWRKLVKDLDHFETSQKPYISKTAPHYHLENEKIGIKFCSTHNKLFPSLKREKTCNGRSKFNLGTQFTAEAFLSVHELLPMMFYYLLLTKDYSRKESADKVEGIIRKEISNIYAIYDAFANNEINSIADLTGRLQKTNILQGHLPKQMISILEGRQKDMEKEAERKIGEMIDDTQRRLDLLCKQTNQKIRIGKRNAGLLKSGKIADWLVSDMMRFQPVQKDTNNAPINNSKANSTEYRMLQHALALFGSESSRLKAYFRQMNLVGNANPHPFLAETQWEHQTNILSFYRNYLEARKKYLKGLKPQNWKQYQHFLILKVQKTNRNTLVTGWKNSFNLPRGIFTQPIREWFEKHNNSKRIYDQILSFDRVGFVAKAIPLYFAGEYKDNVQPFYDYPFNIGNKLKPQKGQFLDKKERVELWQKNKELFKNYPPEKRKTDLAYLDFLSWKKFERELRLIKNQDIVTWLMFKELFKTTTVEGLKIGEIHLRDIDTNTANEESNNILNRIMPMKLPVKTYETDNKGNILKERPLATFYIEETETKVLKQGNFKVLAKDRRLNGLLSFAETTDIDLEKNPITKLSVDHELIKYQTTRISIFEMTLGLEKKLIDKYSTLPTDSFRNMLERWLQCKANRPELKNYVNSLIAVRNAFSHNQYPMYDATLFAEVKKFTLFPSVDTKKIELNIAPQLLEIVGKAIKEIEKSENKN

SEQ ID NO: 2701 - protein, 1131 aa, Artificial; identical to SEQ ID NO: 2584
  Synthetic

SEQ ID NO: 2702 - protein, 1158 aa, Artificial
  Synthetic
MKTTTDHRVIIFNDKRQTFNLDYAHIIGSYSALARNNIFTQFIIIEERLVRNGQLRKITLTNDIDFHSCGLVSELIAGTDPSIKSYLYGSGDPQRKIIIYEHLLRAFPWTKIFVTEVKDNEAMVEEYYNRLRGFLRFLDECRHYGVHSQHDPPEILKGYDVKLLEFLYDQAYHGVKERFGLDKNMIDHENILGHLVRKNNNGLIPSCRYQLRCIGGRDIETKMMISRAGIIFFLGLWLTKEQSVNWLKQHSGYKGMRPDAKTGMNTKVDGLNKERATIELFCYHNIRLPKPLIEPQKDTVQFFLDMINELHRCPRELYDRLDNDNKLLFMSTFEGLDNFDIKEYKDYNSIVKLVRYKNRFAIHAIRFLDYNKLLGSYDFHINLGKYVFVQKEKNYKEGSQVRFLDQKVLRFGNPQDYDQNFKRKIAPVYQIEHEGAEPEEGVSLIADQSSLTVPYWMYANTHYHYSGNQIAIRKKIADNAKNMAFEKLENYSLPQVPATALLPFDAFPVLVFYSILLKDFNNDKPSLEDIIDDFILSFERLVELIESDAFSTNLIGLSEKLTPYKADIAIYRKEKGKEISSWLRTKGLQHRYGIIPRQLRMYFDIDKVGKGEEELCRMMIQKEIEATQKWIDGIKKAENNLSRIKNVTQRTIEYKKEKYLNSGQTATSLIKDIIKYVPALINKEDGKVRNKPNSLQYDMMQKELAYFSISKPDLIKSFEEFGIIGGPSPHPFVSTGLVKESEHNIGFCKNYLREKLDYLSICQSEKNYSSYYFLRRAFKKRGSEQFISAIKENGFSVGIPKAYFCMRLKQLISRPSNVEKLNGWEYLEDCISDATNNENKLRSSRLVKSLSSFYFNQNPQEFYEYNRTYSAVNELKNRSAKYNKKNYYVSQEEFRDMSVQHRVAMESGSKEKCLWSKGNRQDARIRQLELNDQVLILMARAQLQENDHALFERLKNDFLLQNVRKEGSVNVFTQEFNAEIEIPHKGQSSGFHFYITGDVNLKNAGFFFALRKNRLVISLGIALSSLYGSVTIKMNYQDLMNELKRFESVRIDGIKIIREFEKSIYNQNPAFFDKDNLLNSHNAYLEYLVAEDKLSEDDKKAMNLFRNCIMHNQYKSMKPDWLNVISSYDERGFVSHGSVSILLRSLLEILYGRFVKLS

SEQ ID NO: 2703 - protein, 1116 aa, Artificial; identical to SEQ ID NO: 2394
  Synthetic

SEQ ID NO: 2704 - protein, 1141 aa, Artificial
  Synthetic
MAQTRWKQSKTPAIKPVMAAYLNMARHNMYRVMLHISRQMQIIENKEEAEIAAFSVWQKLSSGTPTEQMKMIKLLQRHFPVLKPVFDVEKKKNVENAAISASPKEIKRIFTTILTALNRLRNEYSHYSPVPRKTEGEEKMIAYLYRCMDGSAREVRNRFSLTVKDPKGAKETAKVLEVNKAVFDIFQDAFRKEKVKALDKSGKVIKDNKGRTQFEFRDKEDYYYALKDANAALSDMGIVFFTCLFLEKRYAAMFLDAIKPWPQDFNEIERKAVLEVFTVYHIHLPKEKYDSTRPEYALGLDMLNELQKCPKELFDILSAKSRDALSVDIKADRPDVVTDDGVTVKDGKVQMRRVRDRFAPLALQYLDSQKAFNDIRFMVRLGHYRFKFYKKQCVADNAPDTLRVLQKEINGFGRLDEMEAARKKNYTPLFKATCVKTNDKGIEVHELVPDAPDSAPYITDTKAHYLIDNNRVGLRIDNPSFLPSLRGEKGAPIQSAGDISLLSPQAWLSTYELPGLVFYQYLYDTYDGHGKHLPSAEEIIKSYILAYKRLFVDLGEGSFDGWDEYAYAPLTLGDLPQKIKGFILHPSATIDPRFQDKANNRIDDMIKRTEAEIAGFDTKMKKLSDKSNKLGKKKYVDIRPGSIASRLVRDILFFTPVSEEKAKITSANFNSLQSALALSELGTNRIKDILRGLNHPFVMKAFEKYRVEDFHLFDFWKVYLNKRLDYLKGLDREKLEEVPFLHSSRTRWQKRDEKYIKLLAGRYEQFELPRSLFTAPTRVLLDEVALHFESGSDRDLSMGNLINLFFSKVLSDNNQPFYRWERHYDVFDKLAGVKSGISLVHQFFKPEQLAKKMRERKTLKPSLYMCEKAVNSVNQNLKKGERRLNIHSSTDLKDSRVIAVAKENLKKAYQDYDDNERILRRFAIQDKVMYLMAKSILLGIKGIEAGSLDRFKLKDILPGKNNTILDILVPFSIVLEIDGIKVLIRQKEKVKIKRYGEFFRYNTDTRLRSLLPLLGKTLGAETEINVELDRDTLEEELSAYDRERVVVMRMVMSLEQSILSRSTGDVPEMDRENFNNLVSKVGHIPYKSHGQILINIRNSFCHNEYARDIVLPEGTPLPQVAETISKLFETERKRRPNQCQE

SEQ ID NO: 2705 - protein, 1003 aa, Artificial; identical to SEQ ID NO: 1510
  Synthetic

SEQ ID NO: 2706 - protein, 1090 aa, Artificial
  Synthetic
MKHTYDFLKKEDKYFFAGLFNTAKDNFDLSLNELNKRLNYKEIKGKDKELRIIEYAFHKDRTQLDFDNSFKYLSESLSFLNRIQSFIAKKNNRTLILRNFIKDFLIDLYKLLDSNRNYYTHFEHEKVTIDNPLITEFLDYILFNSISRIKDDKVKTESVKDKLLSKYKDDYSIIINNKNKWIDENNIKLKKEGKRTNKRINNNTVAGYNYVLNSIFRRFIDDSTKKPHLKEDSKSTENNGLSYVGYIQFLALFLNKRQINLLFDNISYTKYTDTLLQRIITRWIFTYESYRNVKHLFKSSYDHHALLLQMVSELTKCPNNLYPHLSDKKKDEFVEDLNIYFQENDNSFEDDTLISHEVIRKRYEDKFPYFAIRFLDDFMNFPSLRFQVNMGKFIHDSREKEFNSTGKKTERLILEKLIVFENLSEATKKKNLYFEKTKNNKNTDWVEHPRPKYQFYNNSIGIWLDCDGLGYYEEEATLRKSKPTKYEILDKLKLKDSYKKPLAYLSVNELPAILYSILMEGRDSMYIENKIKGKIIQQRKFIENISLEKDYNNEEIKSFPKKLKLILTENSSINKAKIKRQITKEKEVNPLGEIRKYYTPKNETELSLSEKGKIATWLSKDIKRFVAKEVKGPSEEDKNKSWKGYQFSEFQALLSYYDIDKSKLSLFLQKDLRLKIEDFPFKGLSFTHKSLYDFYVNYLASRKEYLEFLLKNIEHLKDDILLLPFNASKFKIQQLEKYKENKLKGAVMLPRGIFDKKPTTSKENDKTKFADWFAMSMNNNHAQEFYNYNKTYLINDNTITINPNIGIKEQYKNIASEHQKTIYKNEVVIRKTMRNDFYVLQMIKSFFKDTSEVDKETFKNITLKDFYLTKAEKEQTKKRALEQSERQKGNKEENIFNENYILNKRIKLSLLEGKIVGEVSLKESSKYKRLSKDPRVIQLTNYNENKVWGFQEIIYEIIDYELIKSNVLFKTIHELEKEIFLKAKSKNDLELLTYNGHPNFKKYLAYYFIKEESKKEEFNRINIQTVDLLTIDDDLKNLVVLLLIRNKFSHNQLVSKLVFDYLITYYPKNPNEKVASYLNRVFGIIIDSLK

SEQ ID NO: 2707 - protein, 1131 aa, Artificial; identical to SEQ ID NO: 2422
  Synthetic

SEQ ID NO: 2708 - protein, 1131 aa, Artificial; identical to SEQ ID NO: 2584
  Synthetic

SEQ ID NO: 2709 - protein, 1131 aa, Artificial; identical to SEQ ID NO: 2584
  Synthetic

SEQ ID NO: 2710 - protein, 1003 aa, Artificial; identical to SEQ ID NO: 1936
  Synthetic

SEQ ID NO: 2711 - protein, 1003 aa, Artificial; identical to SEQ ID NO: 1984
  Synthetic

SEQ ID NO: 2712 - protein, 1129 aa, Artificial
  Synthetic
METNQQTHENRRRTLTNDPQYFGGYLNMARLNIYNINNHVATDFKRKPLPEEGQIPDALLCNKTIKNLNWNHVHTRALRFLPILKVFDSESLPKDERKNSDTEGKDFTSMSDTLKVVFSELQEFRNDYSHYYSTEKGDSRKLIVSPELANFLTINFKRAITYTKARMKDVLTDADYALVENLQMVATDNKITTEGLVFLIAMFLEREQAFQFIGKIQGLKGTQFNSFIATREVLMSFCVKLPHDKFVSENQEQALTLDIINELNRCPKTLYSIITDKEKQQFRPELDAQGIENLIANSTNNEERERILDEIDYQDYIEGLTKRVRYNNRFSYFAMRYIDEKNIFDKLRFHIDLGKYEVDNYTKQFAGEQAERKVLENAKAFGKLSSFTDPELSQQRIDKQQQTAGFEQFAPRYHADNNKIGLSNKENIATLTAKSKAGSKVEHNLKQPLPQAFLSLHELPKIILLEYLQKGQAEELINDFILLNDTRLMDITFIEEVKSQLPDGWNEFNKRSDAKKKKAYSDSTLRYLHQRKTILNTILSKYNLNDKQIPTRILNYWLNIKEVDDKRSVSDRIKLMKRDCMTRLKAVEKHKLNKSVKTPKVGEMATFLAKDIVDMIVSEEKKQKITSFYYDKMQECLALFANAEKKALFIHIVTNELKLLENDGHPFLQNINLQQIRKTSQFYQAYLIEKGNKMVPRLNPKTNKTSKVDESWMMKQFYVKEWKEEIAKQLTVVKLPANKSRIPFTIRQWDEKEKYDLNTWLRHVTVGKNNDGKKAVNLPTNLFDEALCDLLREQLDTKIVNYNPAANYNELLKIWWKTRNDDTQQFYQSEREYNIYNEKVRFKIDSSAHFADYYKNALSRAFTRLKAERETARQSNKRLPPLEYKQVERVFKNTIAETEKEIRMLQEEDRMAVLMLERLMDNSPNLRLSKIETLLNDTTPIREKISATLSFDASGERISGKSNPTVTKTLVAERKQKNYTELRKYRYDRRLPELFEYVQADEIPLEWLLEELSAYNNAKQQVFDTVFTLEKKIIGTDPDGLKSLFTGANGELQTGNIQHKPYVQWLTNKGLINKEEKQFINMVRKCFSHNQFPQRKTMELLIPAWNEKKLALQIATVYNQLIADLTNKI

SEQ ID NO: 2713 - protein, 1139 aa, Artificial
  Synthetic
MENNPSNRFSKPAVPPKTRRSEGCEKPDSHSAELKPVFAAYLNMAQMNLFDTLMYIGKKVDVVDKVKASEMDQMKIVHYAELVKPELVAKVREELERSIPFLFKLLKDGREEPTNEYVSRTLGDIIKIIDYRRNEYTHTQHKRNNAKDEESRLLSVKKKAEGKDTSFEPLQTALMSERKAVAQEMCLSKKEMEFIDKEAYLNMGDDDNALLSDMGMAFLICKLLQKKYAYQFLQQSKLFTSRGKGGHSPFSAEKNKVLARIFCSDTIKLPKGRIEVESNDPKAALGIDMLNELQKCPEELYRTLSKDGRELFVVDGLADGEYIEMKRHGDRFPILALRYIDELDILNGMAFQVRLGTYRYKFYNKKAIDANKPNRVRILQKEINGFGPIQKMESLRKENYKNLIRWTEQEEEYTRDTANTKPYLTNSRTSYIINSNRIGLTWNDLGQNILDEKNCFLPTLPTPQKNGDDWTVEWPRGGCENNENCQIPKCWLSVYDLPALLFLHHLGGDPSGIIKGFRENMLRLLVEIAEGSRKAYFGTPLPGNKDERKTEIKRRKGELDTFLRQDYCWEIDYNAYCLQVRNLPVKIVDYLIGISGGSREVEEPKAETDFNNWAKEKVCREIQEIRKIKNSIERAEQDNNDKKKRTADKEKIDLRPGKLAQYLAKDIMKMQPADMEKNHQGKLTGFDYDVMQGAIATYTGSTVECKHTKLGELFSNAGLIDSTSKNKHPFLDKVMEKRISGTLDFYKKYLNEKEKYLKNVCDSKSFKEAYFLHDGLNNHKAKDLQYIRELALRYKDTLQLPDGLFTEAIVAKLKRDNVTKTHIKDLSDSQLNNAAYLIRVYFEEKYKDKSQPFYLSDDPVFKRYYKLSENKGEYKSEEEICKLLQQLKKEKKNNSDDYRKRLNFCRDNEKAIRRYKTQDMLLFLMSKDLLFKQRVLGDKFINSLQDFKLSKIQPIGREDGPKDNTLNQQISSLTVKVELWKENKSTGLKKEISCDDLKLKNIGDFYRMVFDPRVGYLLSLFDDKTFKQDDIRRELEVFDNSRVEVFSIVHRIENAIYKDNKNEIDDYVSKETYIGFREMIEKYNSRYDAQTKENIIAIRNMVSHNNYMDKDEIVKIIPKDKIQLPQVMSQLVEWLRQHA

SEQ ID NO: 2714 - protein, 1126 aa, Artificial; identical to SEQ ID NO: 2630
  Synthetic

SEQ ID NO: 2715 - protein, 1126 aa, Artificial; identical to SEQ ID NO: 2630
  Synthetic

SEQ ID NO: 2716 - protein, 1141 aa, Artificial
  Synthetic
MEDDKKTTESTNMLDNKHFWAAFLNLARHNVYITVNHINKVLELKNKKDQDIIIDNDQDILAIKTHWEKVNGDLNKTERLRELMTKHFPFLETAIYTKNKEDKEEVKQEKQAKAQSFDSLKHCLFLFLEKLQEARNYYSHYKYSESTKEPMLEKELLKKMYNIFDNNIQLVIKDYQHNKDINPDEDFKHLDRTEEEFNYYFTRNKKGNITASGLLFFVSLFLEKKDAIWMQQKLRGFKDNRESKKKMTHEVFCRRRMLLPKLRLESTQTQDWILLDMLNELIRCPKSLYERLQGEDREKFKVPFDPADEDYDAEQEPFKNTLVRHQDRFPYFALRYFDYNEIFTNLRFQIDLGTYHFSIYKKLIGGQKEDRHLTHKLYGFERIQEFAKQNRTDEWKAIVKDLDTYETSNERYISETIPHYHLENQKIGIRFRNDNDEIWPSLKTNGENNEKRKYKLDKQYQAEAFLSVHELLPMMFYYLLLKMENTDNGKENNEVGTKKKRNKNNEQEKHKIEEIIENKIKDIYALYDAFANGEINSEEELKEYLKGKDIEIVHLPKQMIAILESKPKDMVKEAKRKQKEMVKDTKKLLAALEKQTQGEIEDGGRNIRLLKSGEIARWLVNDMMRFQPVQKDNEGNPLNNSKANSTEYQMLQRSLALYNKEEKPTRYFRQVNLINSSNPHPFLKWTKWEECNNILSFYRSYLTKKIEFLNKLKPEEWKKNQYFLKLKEPKTNRETLVQGWKNGFNLPRGIFTEPIREWFKRHQNDSKEYEKVEALDRVGLVAKVIPLFFKEEYFKEDAQKEINNCVQPFYSFPYNVGNIHKPDEKDFLPSEERKKRWGDKKYKFKGYKAKVKSKKLTDKEKEEYRSYLEFQSWNKFERELRLVRNQDIVTWLLCTELIDKLKVEGLNVEELQKLRLKDIDTDTAKQEKNNILNRIMPMQLPVTVYEIDDSHNIVKDKPLHTVYIEETKTKLLKQGNFKALVKDRRLNGLFSFVDTSSKAELKDKPISKSVVEYELGEYQNARIETIKDMLLLEETLIKKYKTLPTNKFSAMLNGWLEGKDEADKARFQNDVKLLVAVRNAFSHNQYPMRNRIAFANINPFSLSSANTSEEKKLDIANQLKDKTHKTIEKIIEIEKPIETKE

SEQ ID NO: 2717 - protein, 1144 aa, Artificial
  Synthetic
MNNLCNQSPREVYNLKDSPWYFGAYLNMARHNIYLISNEISDKLSLKHPLSNEEIIEKSFLTDKDFWNKNNPRLILSALSRFMPVVKTYSSDLLHKELREQTDIEGTDIAGLVEFLRLSFKELNAFRNDYSHYYSSKTYDKRKVVVAEDFAIMLRKQFQLAVSIARKRFEGVIPAKSFDFVEKKIAEELFNDSTTITTRGLVFFTCLFLDKENAFQFFNKVSGFKDTRTYEFLATREVFTMFCVKLPHDKFVSENPQQALQLDILNYLNRAPIELYNSLTEEGKKIFQPDLSEFAKINIAENSINETISEYDYDEYIQAITTKTRSEDRFPEFALRYLDQSDAFQYHFHIHLGKVITNKYPKPFLGESPDEDNRNIEKSIKTFGELTAFLKPHQTDTEGVKNSIIQEDEFKKLFQEQGLVGFTQYAPHYHIQNNKIGLLDKLNEQVSKLPCNLYRPLPPVAFLSIHELPKVVLLEILAKGKASKLITDFLQKNKELIYNRDFIEDIKKQLDFKPLQKLFFDEKSPKLVNNEETERKIEETQNQLKQSIPEKQKVKLKSTLKSLIYARYVNEVNERKAKLNLLLAERKLDANQIPGRIIEYWLNIDSVKKEHSIQNRIKAERKECKNRIKDLDKGKAPKIGEMATFLARDIVKLVINKDVKKKITSFYYNLLQECLALYADPTKRQLLLDLCGKKLNLFNKEIGHPFLADINFGEITKTKDLYRKYLELKGAGKKVEKKYNRKTNRFEEIEKEDDWIYNTFYFVKKDPITNKEFTKIKLPESNVPLSYLRFNQDKTSFDFWLNSVSKGNNKNPNPKPVDLPTNLFDNVLISILKRKVEISDDTKYNYSKLLALWLKETQPYYHLKREYTIFKDKPYQTIVEFDPNENKPFKEYYANSVEHAFRKRKREEKRIQKRQIATVFKKAIEDNEKVIRFYQTKDRITLLMLNELMGKDLQISLNELSPDSDKSPLEAHITICEKIHGKTITDRRKRKDFSVFRKLISDRRLKHLFDYYSSETIPYEVLREELNDYDRCKEKVFKAAFDLEKAIINVASKEEYQKIVEDGTKYGANIQHRPYLDWLTSHNAISKIEEKFLLEVRNRFSHNEYPKKDIVTKYIPHFANSTISSKIVATYVEIVNRLITTILR

SEQ ID NO: 2718 - protein, 1131 aa, Artificial; identical to SEQ ID NO: 2584
  Synthetic

SEQ ID NO: 2719 - protein, 1081 aa, Artificial
  Synthetic
MKKTNTYFDFKDKTQKYFFAGLFNTALNNFDLSLDELANRTGLKCNGKELIAVAFNDTCSQTDYNNRLSYLSESLAFIELIKTKERSYIRLHLTELYNLIDNYRNYFTHLEHPDLIIKPLIFELLDLFILESAKTVKKERVKTEENKSYLSKKFKLEITSTFEAANNAINLENKNNPHSKTHKKLITQNDKINFVLINAFYNFLINTDEIPTLKETARSINKDTGQISQNGIIQLLAIFLNKKQLEILFDNTHYLKGTLKLNHLCTRWTYSQLAYRNIKKLLKSDYSNDSLILQMLSELTKCPKHLYPNLPNNSKQEFIEDLNEYLKETEYFKDSIAQETVSNEVIRKRYEDKFPYFAIRFLDEFIDFPNLRFQINLGKFNHNTCLKKFENTAVYTERQILEKLTIFEKLTLATNKKTEYFLNNNLPDSEGWQEYPKPSYQFYNNNIGFWLGIKNGAVTDAKEKRENDKSSKFDILKKIGLECCLKKPVAYLSFNELPALLYTVLIEKKTAKEVERIFLKKIGEQTGAINKFADINNFEKKIIPHKFKEILENKESNVKWEKLKKDIEKEMLISPLDEIRIHYKTASKHPNDLSFSEKGKIATWLAHDIKRFVKAETKKDWKGYQFSEFQSLLAYYDLKKMELLNFVNFVLKINIKQDIVFEDIDFNQKTLYDFYKNYLSNRKKFLEGNLYSIDQKDEVPAKLWRKRELSIFTGFDDKLYKYKNFKTYKENLMNMPLNLPRGIFSDKQTCYNKNSQNNNELAEWFTKSNNINDFQKFYSFTRFYENCQLTLNPLKGLKEQNNNKGVPKEVYKNEKNIRNTMRQDFYIFEMVKYYFKINESLKSDLNDLKLNTLFLTKQEKENNLKVLNQQHSRSKGDKSENILNENYILSKHIMMSILEGKIQGMVALKSVGKYRFLSQDKRVKQLVTYIPDKIWSFEEINSEIDEYDKIRAFSFFKIIHEIEEKIFNKAINNKEESYLLVDGHPNFKAYIIYYFLKTQDEKDFFNKLDVKNVNINDIAISKFKLLFLIIKIRNKICHNQLISSDEFIFLLEFTPIEPDELYMSYLLKAYKKIVNISWNLV

SEQ ID NO: 2720 - protein, 1003 aa, Artificial
  Synthetic
MGAIENKHIFAAYANLAIDGLIKTLNFIAKKLDTQKQLSSWDIKHVITLIDSIFDQNPQNNLEQIVEGYLPWIKPIIEMKTPKKGERQSDKLCIEYKTIITAFASLLNDVRNYYTHYYHDPICIYPRGYDIPSSLNCIYDSAINIIKERFQAEEKEMEHLRRYTRKKGRVVLKTEDDHFYYTLANNNDLSEKGYAFFISMFLERKYSYLFLKKLSGFKRGDSLQYRLTLEVFTALSTKPPVERLRTTKDTKQDRALDILNELSKIPIELYQTLEPKYREMYNETLQPTDAEDPYGLPDRSRIRFRSRFETFALHFLDKQADFKEIGFYTYLGNYFHNGYQKTRVDRETKDRYINFQLAGFCKNIQDISAKKLSEALNVKSIDISTDSIPDINSFEPYLVQSTPHYIVNGNNIGIKVLPEGKDTYPTIDEKGAKMPIADFWLSKYELPAMLFYTYLRNNNIHKSHCPLSVKDIIERSIHKSTKQKHPEERSELMLRRVMKAIFWTDSKLNEVERIKSQKSAFGKRQHEILKAGRIAETLVRDMLWLQPSKNNGRDKVTEPNFQAIQVSLAYFGIRRNDLTEIFTRAGLINSSNPHPFLAQIGTNYTSLIEFYIAYLKERKVYFSRIQKKILQGKLNIQCHPLRDLQREPNKPQDKEEAIFLPRGLFNEAIINCLKKSKLKQLIESPTREKSPALNVSYLIQNYFRTYFEDQSQEFYAQPRNYRLFDKLSPNKGKSKSYLSLEQRIKKMEELRPSKIPVAEANKLLEKEDRLYRKNYNEICDNESIIRLYQIQDILLFMMTKEYLPSDLYNRINKYKLENVKGILNERVSYLIDLNLLKIQGEDIKIKDYGKLFYIHHDTRISSLNKVLSKVKRNNSISSSVKIQPYENYKRECLDFEEAQIQIIPIIHSFEIAMVSMFPDLKKATPGNYYDFNELITEYEKRTKQKIDSSFLIKTRNMFLHDKYEAECIKEISDDFVYAKKIIAEFKMKIENIKLEDLSNDSSA

SEQ ID NO: 2721 - protein, 1131 aa, Artificial; identical to SEQ ID NO: 2584
  Synthetic

SEQ ID NO: 2722 - protein, 1168 aa, Artificial
  Synthetic
MERIFGHCCPHHDSVCFVRFLGTMVSNQDGRENVLDILYIADRTRKLKPMNTVPASENKGQSRTVEDDPQYFGLYLNLARENLIEVESHVRIKFGKKKLNEESLKQSLLCDHLLSVDRWTKVYGHSRRYLPFLHYFDPDSQIEKDHDSKTGVDPDSAQRLIRELYSLLDFLRNDFSHNRLDGTTFEHLEVSPDISSFITGTYSLACGRAQSRFADFFKPDDFVLAKNRKEQLISVADGKECLTVSGLAFFICLFLDREQASGMLSRIRGFKRTDENWARAVHETFCDLCIRHPHDRLESSNTKEALLLDMLNELNRCPRILYDMLPEEERAQFLPALDENSMNNLSENSLNEESRLLWDGSSDWAEALTKRIRHQDRFPYLMLRFIEEMDLLKGIRFRVDLGEIELDSYSKKVGRNGEYDRTITDHALAFGKLSDFQNEEEVSRMISGEASYPVRFSLFAPRYAIYDNKIGYCHTSDPVYPKSKTGEKRALSNPRSMGFISVHDLRKLLLMELLCEGSFSRMQSDFLRKANRILDETAEGKLQFSALFPEMRHRFIPPQNPKSKDRREKAETTLEKYKQEIKGRKDKLNSQLLSAFDMNQRQLPSRLLDEWMNIRPASHSVKLRTYVKQLNEDCRLRLRKFRKDGDGKARAIPLVGEMATFLSQDIVRMIISEETKKLITSAYYNEMQRSLAQYAGEENRRQFRAIVAELHLLDPSSGHPFLSATMETAHRYTEDFYKCYLEKKREWLAKTFYRPEQDENTKRRISVFFVPDGEARKLLPLLIRRRMKEQNDLQDWIRNKQAHPIDLPSHLFDSKIMELLKVKDGKKKWNEAFKDWWSTKYPDGMQPFYGLRRELNIHGKSVSYIPSDGKKFADCYTHLMEKTVQDKKRELRTAGKPVPPDLAADIKRSFHRAVNEREFMLRLVQEDDRLMLMAINKMMTDREEDILPGLKNIDSILDEENQFSLAVHAKVLEKEGEGGDNSLSLVPATIEIKSKRKDWSKYIRYRYDRRVPGLMSHFPEHKATLDEVKTLLGEYDRCRIKIFDWAFALEGAIMSDRDLKPYLHESSSREGKSGEHSTLVKMLVEKKGCLTPDESQYLILIRNKAAHNQFPCAAEMPLIYRDVSAKVGSIEGSSAKDLPEGSSLVDSLWKKYEMIIRKILPILDHENR

SEQ ID NO: 2723 - protein, 1150 aa, Artificial; identical to SEQ ID NO: 2697
  Synthetic

SEQ ID NO: 2724 - protein, 1081 aa, Artificial
  Synthetic
MKKTNTYFDFKDKTQKYFFAGLFNTALNNFDLSLDELANRTGLKCNGKELIAVAFNDTCSQTDYNNRLSYLSESLAFIELIKTKERSYIRLHLTELYNLIDNYRNYFTHLEHPDLIIKPLIFELLDLFILESAITVKKERVKTEENKSYLSKKFKLEITSTFEAANNAINLENKNNPHSKTHKKLITQNDKINFVLINAFYNFLINTDEIPTLKETARSINKDTGQISQNGIIQLLAIFLNKKQLEILFDNTHYLKGTLKLNHLCTRWTYSQLAYRNIKKLLKSDYSNDSLILQMLSELTKCPKHLYPNLPNNSKQEFIEDLNEYLKETEYFKDSIAQETVSNEVIRKRYEDKFPYFAIRFLDEFIDFPNLRFQINLGKFNHNTCLKKFENTAVYTERQILEKLTIFEKLTLATNKKTEYFLNNNLPDSEGWQEYPKPSYQFYNNNIGFWLGIKNGAVTDAKEKRENDKSSKFDILKKIGLECCLKKPVAYLSFNELPALLYTVLIEKKTAKEVERIFLKKIGEQTGAINKFADINNFEKKIIPHKFKEILENKESNVKWEKLKKDIEKEMLISPLDEIRIHYKTASKHPNDLSFSEKGKIATWLAHDIKRFVKAETKKDWKGYQFSEFQSLLAYYDLKKMELLNFVNFVLKINIKQDIVFEDIDFNQKTLYDFYKNYLSNRKKFLEGNLYSIDQKDEVPAKLWRKRELSIFTGFDDKLYKYKNFKTYKENLMNMPLNLPRGIFSDKQTCYNKNSQNNNELAEWFTKSNNINDFQKFYSFTRFYENCQLTLNPLKGLKEQNNNKGVPKEVYKNEKNIRNTMRQDFYIFEMVKYYFKINESLKSDLNDLKLNTLFLTKQEKENNLKVLNQQHSRSKGDKSENILNENYILSKHIMMSILEGKIQGMVALKSVGKYRFLSQDKRVKQLVTYIPDKIWSFEEINSEIDEYDKIRTFSFFKIIHEIEEKIFNKAINNKEESYLLVDGHPNFKAYIIYYFLKTQDEKDFFNKLDVKNVNINDIAISKFKLLFLIIKIRNKICHNQLISSDEFIFLLEFTPIEPDELYMSYLLKAYKKIVNISWNLV

SEQ ID NO: 2725 - protein, 1131 aa, Artificial; identical to SEQ ID NO: 2490
  Synthetic

SEQ ID NO: 2726 - protein, 1000 aa, Artificial
  Synthetic
MGAIKNKHIFAAYANLAIDGLIKTLNFIAKKLDTQKQLSSWDIKHVITLIDSIFDQNPQNNLEQVVEGYLPWIKPIIEMKTPKKGERQSDKLCIEYKTIITAFASLLNDVRNYYTHYYHDPICIYPGGYDIPSSLNCIYDSAINIIKERFQAEEKEMEHLRRYTRKKGRVVLKTEDDHFYYTLANNNDLSEKGYAFFISMFLERKYSYLFLKKLSGFKRGDSLQYRLTLEVFTALSTKPPVERLRTTKDTKQDRALDILNELSKIPIELYQTLEPKYREMYNETLQPTDAEDPYGLPDRSRIRFRSRFEAFALHFLDKQADFKEIGFYTYLGNYGYQKTRVDRETKDRYINFQLAGFCKNIQDISAKKLSEALNVKSIDISTDSIPDINSFEPYLVQSTPHYIVNGNNIGIKVLPEGKDTYPTIDEKGAKMPIADFWLSKYELPAMLFYTYLRNNNIHKSHCPLSVKDIIERSIHKSTKQKHPEERSELMLRRVMKAIFWTDSKLNEVERIKSQKSAFGKRQHEILKAGRIAETLVRDMLWLQPSKNNGRDKVTEPNFQAIQVSLAYFGIRRNDLTEIFTRAGLINSSNPHPFLAQIGTNYTSLIEFYIAYLKERKVYFSRIQKKILQGKLNIQCHPLRDLQREPNKPQDKEEAIFLPRGLFNEAIINCLKKSKLKQLIESPTREKSPALNVSYLIQNYFRTYFEDQSQEFYAQPRNYRLFDKLSPNKGKSKSYLSLEQRIKKMEELRPSKIPVAEANKLLEKEDRLYRKNYNEICDNESIIRLYQIQDILLFMMTKEYLPSDLYNRINKYKLENVKGILNERVSYLIDLNPLKIQGEDIKIKDYGKLFYIHHDTRISSLNKVLSKVKRNNSISSSVKIQPYENYKRECLDFEEAQIQIIPIIHSFEIAMVSMFPDLKKATPGNYYDFNELITEYEKRTKQKIDSSFLIKTRNMFLHDKYEAECIKEISDDFVYAKKIIAEFKMKIENIKLEDLSNDSSA

SEQ ID NO: 2727 - protein, 1131 aa, Artificial; identical to SEQ ID NO: 2422
  Synthetic

SEQ ID NO: 2728 - protein, 1025 aa, Artificial; identical to SEQ ID NO: 1668
  Synthetic

SEQ ID NO: 2729 - protein, 1124 aa, Artificial; identical to SEQ ID NO: 2468
  Synthetic

SEQ ID NO: 2730 - protein, 1145 aa, Artificial; identical to SEQ ID NO: 2466
  Synthetic

SEQ ID NO: 2731 - protein, 1098 aa, Artificial
  Synthetic
MENLNKRTLTTDPQYFGGYLNSARHNIFTISNYIAERINPLMKKGKLSIRKDDDEIADSFICTKIIEKPNLFFTNLVRFLPIVKVYDSDKLPKAEKEKPSSEGIDFETLADDMKICFKELNGFRNDYSHYFSKETGTERKIVIDERLSVFLRTNYQRAIEYTKIRFKDVYEESHFKIAADKILVNESNVITQDGLVFFTCLFLDRENAFHFINRIIGFKDTRTLGFRATREVFSAYCVTLPHDKFTSDDEKQGFILDLLNELNKCPKELYDNITEEERKIFRPDVSESIDKITESSIPEDLAFEDYDEYIQSIITKKRKSDRFPYFAIKYLDGKKDFDINFHLNLGKVELLSRKKKFLGEEVDRDIVEDVKVFGKLAEYTNEKEVSRKLGLEFQLFNPHYQIENNKMGISFSPKLCSVKSENDKPNLKLNPPDAFLSVHELPKIVLAELFEKGKAKEIIESFIGINKDKILNREFIEEVKSKLVFEKPFYRSFQSKRGAAYNDKGLQILKERKTKLNEILREYNLNDRQIPERILDYWLNINDVKSESEIANRIKAMKKDCRDRVKAKAKNKAPKAGEMATYLAKDIVDMVIDEKVKQKITSFYYDKMQECLALYGDDGKKQIFIKMCGEELNLFDKEKGHPFLFDLNLQSIKKTSEFYEKYLIKKAKEKQDIWNAKTKKNQKVETNWLYVSFYVKVWNEEKKKMETKIQLPKDLSRIPFSIRNLAKEKSTLDKWLMNVSKGFVEKDKAKPVDLPTNIFDDTLVSILRERLNGKKILFKETDRFSRLLELWCNDTQPFYSAERLYNVYEKPVKFKLGDKKSFKEYFKEIIEKVYSEKDAERKSEKGKPPIQKKDILTVFNDAITENEKVIRFYQTKDRVMLFMINDLIGKDLDISLKEISPVLEKSPLNVEEEIKQRVEGKLSYDGEGNFISKKERTQDISRIITDRRKRKDFTVLKKFTFDKRLPELFEYYTEEEVPHEKLKTELEEYNQYREMVFDRIFELEKKIIAKGVLKEMKGTGKSNVQHEPYLNWLREKGLIDEKQYGFLKVMRNSFSHNQYPPKVVVEKNLDLKEGKITSQIFKKYDEEITGILEKLQRL

SEQ ID NO: 2732 - protein, 903 aa, Artificial
  Synthetic
MESQPKRTDGITYYDHKSNSDKHYFGGYLNQALNNYTVIEKLFEQKFEESLENFLQKNKKVSYAQWERMLNFLKHHFPVVHYIDLPVREATKDNPDPFPRNDAERRQHFITTFTSIKKLLFDLRNFYSHYFHEPIDTKIDTLSHLDQIFVAVCEHVKTKRMKTDETRLLLKETLADELTHLFILKEKELLELKKKVGITGKTTAEEVRNAIFNDSFKHLYYEKQPSRIYRSSLQEEAATENGITISQSGLSLILSFFLSKREMEGFKSRLRGLKGRVLNLENGNIDLRNNSLRFMATHWVFSYLCFKGPNQKLNTSYLEETLLVQIIDELTKVPHEVYEALHVVQRDKFVEDINEFMRQDLEDGSEENALVVHPVIRKRCENKFNYFALRYLDEFAGFKTLRFQINIGNYIHDRRSKELKSGSFITDREVKERINVFGRLSAVTTLKDDFFRSESYEGSSWERFPNPSYNINGNNIAIYLDLGKDHGKDTKVIYDARSKRNKKEERVDRSNGKPTKDDILKELQQAVEVKSDTIHRKEPTALLSLHELPALLYELLVNHVKPETIETILAGKISERLKVIQEYTPQSDLPLSQIPKNLKVSGQEPKVQYDKLIRLIDNLIAAGEDKSALISKNQREIANPKIKRNFVFTITERGREANWLANDIKRFMPESTKGQWKGYHHSQLQEILAFYFARKQDAISLLNSVWQLKQSDFGASLEVLFLKPGFDSFYIAYLQNRKEHLGQIRDRILQYQSEKNVIKKVLKSIDHIFPKKVYTIRSTQDQIENLLGKPIAFSRGIFDSKPTFITDTTFEGNEHLFADWYRTSRDKSIAFQSFYNLPKDYSELISHAKETGKRIHDLSARVKMNTDLNIKNVQIKDFFLKKIADALFQKCLGQTFANSEGND

SEQ ID NO: 2733 - protein, 1029 aa, Artificial; identical to SEQ ID NO: 2444
  Synthetic

SEQ ID NO: 2734 - protein, 1029 aa, Artificial; identical to SEQ ID NO: 2444
  Synthetic

SEQ ID NO: 2735 - protein, 994 aa, Artificial
  Synthetic
MDSKYILGSYLNMANDNFINTIHLLAKKLKTPKGEDQNLDQVVSYITRIFDNSNQVPETEQIVEFYFPWLEALKNANGFGKSELPELKIFYKDVLCSFAENLKDLRNNYTHYIHKTISYHPIIYKKEGNTLQSSLPKALLQIYDASIKLAKERFSADENAVTHLRRYKIVGKKVVRKTEADHFMYLLEKDHLLTEKGIAFFTSLFLNRKYGYLMLKQLKGFKQGGTLAYRLTLETFLAYSNIKPVERLKADKYSDVAFIMDLLGEISKIPKELYHILPETYILQYKNKLHIELNEDISLEAYCSRGRNRFDQLALTYLDRLEDFKQIGFYTYLGNYIHNGYMKARIDGTEQERYLSEKMYGCCKNIYRDLSAIVAKQYNIEVKDSTETSYMLPNDFQPHVIRAYPHYVINNNNIGIRLLDEGESGFPILENRGTKNVVPHFWMSKYDLPALLFYAYLRSDSRFASKCKKTIDEILRGYLSKSKDKKPKQAEKASVLMLRRIDKAIIWTQTKLNEAEKQRDNKKSFKIGEKADILAHDMLWLQPAKESKDKVSGANFRALQTSLAFFKRNELEDIFKRSFLIGGNNPHPFLSRIKINTMPSLFDFYLAYMRERLNYLGKIKLKLLKGHINVSCHPLRKLNHEKLVDQDNKKDEQPIFLPRGIFNDVIKNCLQKTKLGIYLKDQGAETRSWNVAYQILKFHEIINDDDIQEFYKQPRKYAILDENHYLTLEERTDRLKDLKPECIEVSKANDILEKEDYLLRKSYNQVCDNESAIRLYQVQDILLFMIAQRLCNEIILGDKQEKKEKVETSFSLTLKNLSKKFDQPVHFEIKMTNVNLFSDTDIPVKNFGKMLRLKKDARFISYNKLFNCQKQNINYNDYCKEEEYFDICRIQTIKLCHELEEKLLEKGIITESPDSGYYPFADLVQRIINQGVVICSSDVKFILEARNTFLHNEYKQCCVNSINSIDSFIAEKVYNLFKQKMDNILGQLESIKPS

SEQ ID NO: 2736 - protein, 962 aa, Artificial
  Synthetic
MKIPQIIEDNKHLFGTYSTMALANIRNILDHIATLACIENDFNADSDDFWHHPCMEIINPQNLCNDVTKADFVTEKLKSHFPFVVIMAEAKRQKDIAWAKNQAKKAFENRDFQKQQEFNKKQKSLLSITNADIYRVLNNLFRVLTSYRHYTSHYLINYIYFNEGSNLLKYHEQPLSYNINDYFTIALRDTAQKYSYSPEALSFIQSSRYKIENRRKILDTDFFLSIQHRNGDSSPKNLHISGVGVALLICLFLEKKYVNVFLQKLPIYGTYKKQSMEANIIRQTFGIHTAKLPKERIVSEKSDFSIGMDMLNELKRCPKALFSTLSYADQNAFRIVSSDLNDVLQVRHTDRFAQLSLEYIDRRELFSDIRFHLNMGKLRYLKTADKHCIDGISRVRVLEDKINAFGRIHEQGGRAISTNTNIEIRDFEHVKRDDSNPDSYPYIIDTYTHYILENNKIGMHIGDYWPDLIKLDEHKWTVYNENPTCFMSSLELPAMMFHMMLCGSDATESLIKAEVDKYKKLFGAMANGTLTKENISGFGIAEENIPQKVIDCVNGKTSGKGLDKQIKKEIDEMLADTNLRIERLKSDKRSVASTQNKMGKRGFRSIQPGKLADWLAADIVKHQPSLLKGVDYGTDRITGMNYRVMQSTIATFNATTPEHSLEELKKVFSAAQLIQCEKKEHPFLYKALDRNPQNTIDLYEFYLSARQSYYKSMRRNIENGENVKLPYLNTDRNKWMRRGSVYYSTMGEIYLKDMPIELPRQMFDKKIKEALAKLPSMKDVDMQHSNVTFLIAEYLKKELKDDFQPFYQWNRNYRFTDMMICEENRSTRALSTHFIPVALREEIWEKRSELKAAYKEWALPRLSKNRDTERLSPAQKSELLDARIAKCRNEYQKNEKIIRRYKVQDALMFMMVKDMFGKGVFTAESKEFALSAITPDAKRGILSEVIPIDFKFSMDGLSTTSE

SEQ ID NO: 2737 - protein, 910 aa, Artificial
  Synthetic
LYTKQSEMESQPKRTDGITYYDHKSNSDKHYFGGYLNQALNNYTVIEKLFEQKFEESLENFLQKNKKVSYAQWERMLNFLKHHFPVVHYIDLPVREATKDNPDPFPRNDAERRQHFITTFTSIKKLLFDLRNFYSHYFHEPIDTKIDTLSHLDQIFVAVCEHVKTKRMKTDETRLLLKETLADELTHLFILKEKELLELKKKVGITGKTTAEEVRNAIFNDSFKHLYYEKQPSRIYRSSLQEEAATENGITISQSGLSLILSFFLSKREMEGFKSRLRGLKGRVLNLENGNIDLRNNSLRFMATHWVFSYLCFKGPNQKLNTSYLEETLLVQIIDELTKVPHEVYEALHVVQRDKFVEDINEFMRQDLEDGSEENALVVHPVIRKRCENKFNYFALRYLDEFAGFKTLRFQINIGNYIHDRRSKELKSGSFITDREVKERINVFGRLSAVTTLKDDFFRSESYEGSSWERFPNPSYNINGNNIAIYLDLGKDHGKDTKVIYDARSKRNKKEERVDRSNGKPTKDDILKELQQAVEVKSDTIHRKEPTALLSLHELPALLYELLVNHVKPETIETILAGKISERLKVIQEYTPQSDLPLSQIPKNLKVSGQEPKVQYDKLIRLIDNLIAAGEDKSALISKNQREIANPKIKRNFVFTITERGREANWLANDIKRFMPESTKGQWKGYHHSQLQEILAFYFARKQDAISLLNSVWQLKQSDFGASLEVLFLKPGFDSFYIAYLQNRKEHLGQIRDRILQYQSEKNVIKKVLKSIDHIFPKKVYTIRSTQDQIENLLGKPIAFSRGIFDSKPTFITDTTFEGNEHLFADWYRTSRDKSIAFQSFYNLPKDYSELISHAKETGKRIHDLSARVKMNTDLNIKNVQIKDFFLKKIADALFQKCLGQTFANSEGND

SEQ ID NO: 2738 - protein, 922 aa, Artificial
  Synthetic
MTEQNEKPYNGTYYTLEDKHFWAAFLNLARHNAYITLAHIDRQLAYSKADITNDEDILFFKGQWKNLDNDLERKARLRSLILKHFSFLEGAAYGKKLFESQSSGNKSSKKKELTKKEKEELQANALSLDNLKSILFDFLQKLKDFRNYYSHYRHPESSELPLFDGNMLQRLYNVFDVSVQRVKRDHEHNDKVDPHRHFNHLVRKGKKDRCGNNDNPFFKHHFVDREGTVTEAGLLFFVSLFLEKRDAIWMQKKIRGFKGGTEAYQQMTNEVFCRSRISLPKLKLESLRTDDWMLLDMLNELVRCPKSLYDRLREEDRARFRVPVDILSDEDDTDGAEEDPFKNTLVRHQDRFPYFALRYFDLKKVFTSLRFHIDLGTYHFAIYKKNIGEQPEDRHLTRNLYGFGRIQDFAEEHRPEEWKRLVRDLDYFETGDKPYITQTTPHYHIEKGKIGLRFVPEGQHLWPSPEVGATRTGRSKYAQDKRFTAEAFLSVHELMPMMFYYFLLREKYSEEVSAEKVQGRIKRVIEDVYAVYDAFARDEINTRDELDACLADKGIRRGHLPRQMIAILSQEHKDMEEKVRKKLQEMIADTDHRLDMLDRQTDRKIRIGRKNAGLPKSGVIADWLVRDMMRFQPVAKDTSGKPLNNSKANSTEYRMLQRALALFGGEKERLTPYFRQMNLTGGNNPHPFLHETRWESHTNILSFYRSYLKARKAFLQSIGRSDRVENHRFLLLKEPKTDRQTLVAGWKGEFHLPRGIFTEAVRDCLIEMGYDEVGSYKEVGFMAKAVPLYFERACKDRVQPFYDYPFNVGNSLKPKKGRFLSKEKRAEEWESGKERFRDLEAWSQSTARRIEDAFAGIKYASWENKKKIEQLLQDLSLWEAFESKLKVKADKINIAKLKKEILEAKEHPYLDFKSWQKFEREL

SEQ ID NO: 2739 - protein, 1003 aa, Artificial; identical to SEQ ID NO: 2004
  Synthetic

SEQ ID NO: 2740 - protein, 1146 aa, Artificial; identical to SEQ ID NO: 1461
  Synthetic

SEQ ID NO: 2741 - protein, 1131 aa, Artificial; identical to SEQ ID NO: 2422
  Synthetic

SEQ ID NO: 2742 - protein, 930 aa, Artificial
  Synthetic
VKMKEKETPVASTVNKDEKHFWAAFLNLARHNVYITINHINKLLEIREIDNDEKVLDIKTLWQKVNKDLNQKARLRELMTKHFPFLETAIYSKNKEDKEEVKQEKQATAQSFKSLEHCLFLFLEKLQEARNYYSHYKYSESTKEPMLEKELLKKMYNIFDNNIQLVIKDYQHNKDINPDEDFKHLDRTEKEFNYYFTQDKKGKITESGLLFFVSLFLEKKDAIWMQQKFTGFKDNRENNKQMTHEVFCRSRMLLPKLRLESTQTQDWILLDMLNELIRCPKSLYERLKGEDRKKFEVPFDSTDEDYDAEQDPFKNTLIRHQDRFPYFILRYFDYNEIFKNLRFQIDLGTYHFSIYKKLIGGQKEYRHLTHKLYGFERIQEFTKQHRPDDWKAIVKDFDTYETSEEPYISETTPHYHLENQKIGIRFKNDNDKIWPSLETNGENNEKSKYKLDKQYQAEAFLSVHELLPMMFYYLLLKKEEPNNDKKNASRVEGFIKREIRDIFKLYDAFANDEINNIDDLKKYYKDKNVEIRHLPKQMIAILESKPKDMAKEAKRKQKEMVKDTKKLLATLEKQTQKEKEDEGRNVKLLKSGEIARWLVNDMMRFQPVQKDNEGNPLNNSKANSTEYQMLQRSLALYNKEEKPTRYFRQVNLIESSNPHPFLKWTKWEECNNILTFYHRYLTKKIEFLNKLKPEDWKKNQYFLKVKEPKTNRETLVQGWKNGFNLPRGIFTEPIREWFERHQNDSEEYKKVEKLNKAGLVTKVIPLFFKEEPFKEDTKKEINDWVQPFYSFPYNVGNIHKPKEEDFLHREERIELWDKKKDKFKGYKEKIKSKKLTEKEKEEFRSYLEFQSWNKFERELRLVRNQDIVTWLLCKELIDKLKIDELNIEELKKLRLKDIDTDTAKQEKNNILNRVMPMQLPVTVYEIDDSH

SEQ ID NO: 2743 - protein, 1116 aa, Artificial; identical to SEQ ID NO: 2394
  Synthetic

SEQ ID NO: 2744 - protein, 1003 aa, Artificial; identical to SEQ ID NO: 1494
  Synthetic

SEQ ID NO: 2745 - protein, 1146 aa, Artificial; identical to SEQ ID NO: 1461
  Synthetic

SEQ ID NO: 2746 - protein, 1012 aa, Artificial
  Synthetic
MENDQQILENRRRTLANDPQYFGGYLNMARLNIYNISNHLAASFEQKVLPEEGQIPASFLCNKSIKKINWNHVYSKARRFLPILKVFDADSLPKEERETTDKEGKDFTAMNETLKLVFDELQAFRNDYSHYYSTEKADSRKLTISVELADFLTVNFKRAIAYTKVRMKDVLADDDYTMVESKQIVTPDNLITTEGLVFLTCMFLEREQAFQFIGKVQGLKGTQFNSFIATREVLLAYCVKLPHDKFVSEDLGQALTLDIINELNRCPKTLYEVITEEEKQQFRPELDAQGIDNLIANSTNEEEREKILDEIDYEDYIESLTRRVRHSNRFSYFAMRYIEEKNVFDKLRFHIDLGKYEVDKYNKQFDGEATECKVVENAKAFGKLSSFTNQETVELKIDSAQRTNGFEQFAPHYNADNNKIGLSNKESEARLLTKAKPESKVSYNLKQPLPQAFLSLHELPKIILLEYLQKGKAEEMINDFIKVNDSQLMSMQFIDEIKEQLPADWNEFGKRSDSKKKKAYTNAALQYLLQRKATLNKVLANYQLNDKQVPTRILNYWLNIKEVDDSRSVSDRIKLMKRDCMSRLKVVEKHKLDKSARTPKVGEMATFLAKDIVDMIVSTDKKQKITSFFYDKMQECLALYADTDKKATFIHIVTNELKLLEKGGHPFLANINLRQIRKTSQLYELYLVEKANKQVKKMNPKTQRTSNVDESWMMKSFYAKEWNEEMGKQLTVVKLPVNKTNIPFTIRQWEEKEKHNLQAWLHNITKGKTSKDGKKAIDLPTNLFDDTLCELLREALINQGIDATPTTKYNELLKQWWTAREDSTQDFYLSERQYDIYDEKVCFTINSSAHFADYYAPALNKAYSRLRAERDVARRTDKRLPPVERKDVERVFKNTIAETEKEIRMLQEEDRMAVLMLEQLMDNQQQLKLSKMDSLLNETKRIEQTINTQLSFDHKGKEIKDKTNSEIVKTIVAERKQKNYTEMRKYVHDRRLPELFEYIDGNELPLDVLLNE

SEQ ID NO: 2747 - protein, 1003 aa, Artificial; identical to SEQ ID NO: 1494
  Synthetic

SEQ ID NO: 2748 - protein, 1131 aa, Artificial; identical to SEQ ID NO: 2591
  Synthetic

SEQ ID NO: 2749 - protein, 1081 aa, Artificial
  Synthetic
MKKTNTYFDFKDKTQKYFFAGLFNTALNNFDLSLDELANRTGLKCNGKELIAVAFNDTCSQTDYNNRLSYLSESLAFIELIKTKERSYIRLHLTELYNLIDNYRNYFTHLEHPGLIIKPLIFKLLDLFILESARTVIKERVKTEENKSYLSKKFKLEITSTFEAANNAINLENKNNPHSKTHKKLITQNDKINFVLINAFYNFLINTDEIPTLKETARSINKDTGQISQNGIIQLLAIFLNKKQLEILFDNTHYLKGTLKLNHLCTRWTYSQLAYRNIKKLLKSDYSNDSLILQMLSELTKCPKHLYPNLPNNSKQEFIEDLNEYLKETEYFKDSIAQETVSNEVIRKRYEDKFPYFAIRFLDEFIDFPNLRFQINLGKFNHNTCLKKFENTAVYTERQILEKLTIFEKLTLATNKKTEYFLNNNLPDSEGWQEYPKPSYQFYNNNIGFWLGIKNGAVTDAKEKRENDKSSKFDILKKIGLECCLKKPVAYLSFNELPALLYTVLIEKKTAKEVERIFLKKIGEQTGAINKFADINNFEKKIIPHKFKEILENKESNVKWEKLKKDIEKEMLISPLDEIRIHYKTASKHPNDLSFSEKGKIATWLAHDIKRFVKAETKKDWKGYQFSEFQSLLAYYDLKKMELLNFVNFVLKINIKQDIVFEDIDFNQKTLYDFYKNYLSNRKKFLEGNLYSIDQKDEVPAKLWRKRELSIFTGFDDKLYKYKNFKTYKENLMNMPLNLPRGIFSDKQTCYNKNSQNNNELAEWFTKSNNINDFQKFYSFTRFYENCQLTLNPLKGLKEQNNNKGVPKEVYKNEKNIRNTMRQDFYIFEMVKYYFKINESLKSDLNDLKLNTLFLTKQEKENNLKVLNQQHSRSKGDKSENILNENYILSKHIMMSILEGKIQGMVALKSVGKYRFLSQDKRVKQLVTYIPDKIWSFEEINSEIDEYDKIRTFSFFKIIHEIEEKIFNKAINNKEESYLLVDGHPNFKAYIIYYFLKTQDEKDFFNKLDVKNVNINDIAISKFKLLFLIIKIRNKICHNQLISSDEFIFLLEFTPIEPDELYMSYLLKAYKKIVNISWNLV

SEQ ID NO: 2750 - protein, 1124 aa, Artificial; identical to SEQ ID NO: 2468
  Synthetic

SEQ ID NO: 2751 - protein, 994 aa, Artificial; identical to SEQ ID NO: 2735
  Synthetic

SEQ ID NO: 2752 - protein, 976 aa, Artificial
  Synthetic
MGAIENKHIFAAYANLAIDGLIKTLNFIAKKLDTQKQLSSWDIKHVITLIDSIFDQNPQNNLEQVVEGYLPWIKPIIEMKTPKKGERQSDKLCIEYKTIITAFASLLNDVRNYYTHYYHDPICIYPGGYDIPSSLNCIYDSAINIIKERFQAEEKEMEHLRRYTRKKGRVVLKTEDDHFYYTLANNNDLSEKGYAFFISMFLERKYSYLFLKKLSGFKRGDSLQYRLTLEVFTALSTKPPVERLRTTKDTKQDRALDILNELSRIPIELYQTLEPKYREMYNETLQPTDAEDPYGLPDRSRIRFRSRFEAFALHFLDKQADFKEIGFYTYLGNYFHNGYQKTRVDRETKDRYINFQLPGFCKNIQDISAKKLSEALNVKSIDISTDSIPDINSFEPYLVQSTPHYIVNGNNIGIKVLPEGKDTYPTIDEKGAKMPIADFWLSKYELPAMLFYTYLRNNNIHKSHCPLSVKDIIERSIHKSTKQKHPEERSELMLRRVMKAIFWTDSKLNEVERIKSQKSAFGKRQHEILKAGRIAETLVRDMLWLQPSKNNGRDKVTEPNFQAIQVSLAYFGIRRNDLTEIFTRAGLINSSNPHPFLAQIGTNYTSLIEFYIAYLKERKVYFSRIQKKILQGKLNIQCHPLRDLQREPNKPQDKEEAIFLPRGLFNEAIINCLKKSKLKQLIESPTREKSPALNVSYLIQNYFRTYFEDQSQEFYAQPRNYRLFDKLSPNKGKSKSYLSLEQRIKKMEELRPSKIPVAEANKLLEKEDRLYRKNYNEICDNESIIRLYQIQDILLFMMTKEYLPSDLYNRINKYKLENVKGILNERVSYLIDLNPLKIQGEDIKIKDYGKLFYIHHDTRINSLNKVLSKVKRNNSISSSVKIQPYENYKRECLDFEEAQIQIIPIIHSFEITMVSMFPDLKKATPGNYYDFNELITEYEKRTKQKIDSSFLIKTRNMFLHDKYEAECIKEISDDFV

SEQ ID NO: 2753 - protein, 994 aa, Artificial
  Synthetic
MDSKYILGSYLNMANDNFINTIHLLAKKLKTPKGEDQNLDQVVSYIPRIFDNSNQVPETEQIVEFYFPWLEALKNANGFGKSELPELKIFYKDVLCSFAENLKDLRNNYTHYIHKTISYHPIIYKKEGNTLQCSLPKALLQIYDTSIKLAKERFSADENAVTHLRRYKMVGKKVVRKTEADHFMYSLEKDHLLTEKGIAFFTSLFLNRKYGYLMLKQLKGFKQGGTLAYRLTLETFLAYSNIKPVERLKADKYSDVAFIMDLLGEISKIPKELYHILPETYILQYKNKLHIELNEDISLEAYCSRGRNRFDQLALTYLDRLEDFKQIGFYTYLGNYIHNGYMKVRIDGTEQERYLSEKMYGCCKNIYRDLSAIVAKQYNIKVKDSTETSYMLPNDFQPHVIRAYPHYVINNNNIGIRLLDEGESGFPILENRGTKNVVPHFWMSKYDLPALLFYAYLRSDSRFASKCKKTIDEILRGYLSKSKDKKPKQAEKVSVLMLRRIDKAIIWTQTKLNEAEKQRDNKKSFKIGEKADILAHDMLWLQPAKESKDKVSGANFRALQTSLAFFKRNELEDIFKRSFLIGGNNPHPFLSRIKINTMPSLFDFYLAYMRERLNYWEKIKLKLLKGHINVSCHPLRKLNHGKPVDQDNKKDEQPIFLPRGIFNDVIKNCLQKTKLGIYLKDQGVETRSWNVAYQILKFHEIINDDDIQEFYKQPRKYAILDENHYLTLEERTDRLKDLKPECIEVSKANDILEKEDYLLRKSYNQVCDNESAIRLYQVQDILLFMIAQRLCNEIILGDKQEKKEKIVTSFSLTLKNLSKKFDQPVHFEIKMNNVDLFSDTDFPVKNFGKMLRLKKDARFISYDKLFKGQKQNINYNDYCKEEEYFDICRIQMVKLCHELEEKLLEKGIITESPNSGYYPFADLVQRIINQGVVISSSDVKFILEARNMFLHNEYKQYCVNSINSIDSFIAEKVYNLFKQKMDNILGQLESIKPS

SEQ ID NO: 2754 - protein, 1131 aa, Artificial; identical to SEQ ID NO: 2422
  Synthetic

SEQ ID NO: 2755 - protein, 908 aa, Artificial
  Synthetic
METLTIPEVIKCRTLSDDPQFFGGYLNMARLNVFNISNHIAKEFDLPLLAEEDHLRNSFLCNKENKKINWNHLYSRTNRFLSVLKVFDAESLPKEEQKTTNLEGKDFALMSDTLKIVFGELQDFRNDYSHYYSTEKGTIRKTTVSDEMALFLKVNFNRAIEYTKERFKGVLNEEDFQLVASKKVMEANLTITTEGLVCLISMFLEREYAFQFIGKITGLKGTENKSFIATREVLMAFCLKLPHDRFQSDNTRQAFSLDLINELNRCPKVLYNSITASGKQIFQPKLDILGIKNLLDNSTNIDEEVEDYDEYIEALTKRIRHSNRFSDFALKYIDETGIFDKFRFQIDLGKLLVDEYAKFFNSEEVPRRIIENVKAFGKLNSFNDEAKVLTRIGNGYPSKEFEQFSPHYNTENNKIGISVKEDTAKLRPNSKGETGKKLHQPLPEAFLSLHELPKVIILDYLQKGEPERLIEDFILINNSKLMTMPFIEAVKSQMPKEWDDFRRRTDTKKEMAYNEKTLTYLLERKNTLNQVLAEYQLNDKQIPGRILDYWLNIKDVEEGRAVSDRIKSIKRDCMSRLRALEKFKIDRNRNKIPKIGEMATFLAKDIVDMVAGEEKKQKITSFYYDKMQECLALFADSDKKQLFIHTVCNELRLNETGGHPFLYKLDLQHINSTSEFYGKYLQEKGHKMVREKNLRTGRVAEVDQSWMATTFYKKEWNEKIGKQLTVVKLPLNKSKIPFTLRLLEEKTIYTLDQWLQNLTKGRNPNDAKHPVNLPTNLFDERLTVLLRHDLDERQISYPSNSYDNELFKIWWKSRSDSTQSFYNAEREYVIFGEKVNFMPNTKDNFADYYQHAFTTAYQKKRKERTLQQKEDRRLPNIQLEQVEKSLSKPLPEPKKRSVCCRKKTASCC

SEQ ID NO: 2756 - protein, 1003 aa, Artificial; identical to SEQ ID NO: 1723
  Synthetic

SEQ ID NO: 2757 - protein, 1115 aa, Artificial
  Synthetic
MTPQYFGAYLNMARLNIFNISNHLAEKFGLAVLDDEEKITTSFLVDKGNKEYKTRQSLVYSNLTRYMHIAKVFDFEKLPDDERDKAENYGKDFGNLTDTLKEIFKELNEFRNDYSHYYSTEKKDKRKTIVSDKLKNFLNINYTRAIKYTKSRFINVFSDNNFCLAEEAKHVENDNTITQDGIVFFTSMFLDRENAFQFISKIIGLKGTQTKAFKAKRETLMAFCVNLPHDKFVSENSEQQFSLELINELNKCPKTLYNVISENEKQHFLPKLDDEQIDNVLENSVPYTIDDYENYIENITKKVRNKNRFSYFALKFIDQKKLFKNWRFQIDLGKIVLDEYSKQLNGKDEKRTVTENTKAFGMLQDLNDEENVLNKINTGESKAKFDQFAPHYNFDVQNNKIGISKKETTAKFITKNTDNKIKSNLLQPLPEAFLSINELPKIILLEYLEQGKTEQLINDFIEINNSKILNKEFIKAIKLKLNDLDVFYKRSQGRKQKHAYLTKDKKYDNEKINELKNRKEKLNQILAEYNLNVKQIPTRILDYWLNIADVQAKNAISDRIKLMKRDCINRLKSMKKGKAPKIGEMATFIAKDIVDMIIDEEKKKKITSFYYDKMQECLALFADKEKKELFILICNNELKLNDDDGHPFFKNINFSNYKYTSEIYQKYLEEKGHKMVKEYNPRKENYVEKDKSWLEINFYKKEWNENAKKDLTVVKLPDDKSKIPFTLRQLEKEKSSFENWFKYVTNGKETTDKKKPVDLPVNLFDETLKELLKKELSKNNIEFKEEDNYNELFKIWWDKCRNDKTQKFYSAEREYTFEEEKLNFHINTKSKFEEYINPEFAEKVFRLKNQNREKDNISGRRLPPLKMKEVTKNMVKRIGNTEKEIRMLQEEDRLMLLMFEKLVDNNLKLKLENVDKLLNESIEINQSISGKLSFDDSGDNENKKDRAIICRNITETRKRKEYSVLKKYVFDRRLPELFEYFEEENIPIEKIKIELDTYSKAKDVVFDLIFDLERAIINKDENRIKELNKDKNGVIQTGNIQHKPYLFWLLEKNLITEQEFTFMNMVRNTFSHNQFPQKKTMELFIKNWNENEFAKQILNVYNQKNNNLIKSIKDI

SEQ ID NO: 2758 - protein, 994 aa, Artificial; identical to SEQ ID NO: 2641
  Synthetic

SEQ ID NO: 2759 - protein, 1089 aa, Artificial
  Synthetic
MKENTHTLSEVSKVYTLETTPEYFGAYLNIARHNVFMISQEMSRKFNKKDPAQEDGQIGDSFLTKSLVPTDSGDFIYQNLCRYLPLANAFSSDFRRSIGMDDDATGMDIIKLSGFLKIAFKELSDFRNEYTHYFSKKTGTHRKVHIEDELAIQLKVLFEVAVKLAQKRFQDVIPDKCFDTVEKNIESELFVKDTNQITTKGLVFFCCLFLDKENAFHFINKIYGFKKTGTPDFQATREVFSVLCVKLPHNKLSSRDYQQALLMDALNYLQRAPNELYNALNENDQKQFKPTLNANYDDKDYESYLKDISTLKRSRDRFPEFALKFLDASKNFKYDFQIYLGKVETKSYSKRVLGQMPEEKNRSIVKDVKTFGTLSTYNDDVQKKIIEEKEFIELFKGTEVKFIQYAPRYHISGNKIALAFSDQKPSFNKESPQAFLSISALPKVVLLELLSQGAASTLIKIFLDKNEHCLLNRQWIDKIKKQLTSYSILKRVSADSKEPLNCRTKEKYDEYRAEFNHRKFSLDEILKAKGLDCKQIPSRIIDYWLNIEDTGNNYTFKERIKEAANDCKKQIKDIEKGRQLKVGEMASELARDIIKLVIDRDVKTKITSFYYNLLQECLALYANNEKKQLFWELCKRDLNLLDKGKGHPFLADLECKKTNSTLEFYKAYLLLKKYWLHNTFYSIKWNEKKRKNETVIPIPKNKLELPLTYQKWIESDHDFDSWLESVQTQNSTSTQQTPKPADLPTNLFDSALIAKLKEEEVTISDDKETYNYSRLLGMWLKDLQPFYQQKRHYTIFKNRPYECVVKVDPTENKPIKDYYTSKLDDVIKQCKKEKEKLSEEQLKVIFKKAVAEKEKKIRYYCTEDRILMKIINYVFREMNTKNSDSGISKFTISLNDIYPNSAKNPLEEEEDMEARLYDRTIVAHRKRKDYSFFIRFLHDERMQNLLPYFNEEKIDFDKLVAEMKDYEKYREVVFSKSFELEESILSVISPEGKIKLFNDNTTDCGNVQFICYLNRLKDNGLIDQNDYDLLFEIRNKFCHNEFPRKAKIKFIPSFDVSQYKFSQQIVSWYEKKINMILENLRKLDKNCLL

SEQ ID NO: 2760 - protein, 934 aa, Artificial
  Synthetic
MGAIKNKHIFAAYANLAIDGLIKTLNFIAKKLDTQKQLSSWDIKHVITLIDSIFDQNPQNNLEQVVEGYLPWIKPIIEMKTPKKGERQSDKLCIEYKTIITAFASLLNDVRNYYTHYYHDPICIYPGGYDIPSSLNCIYDSAINIIKERFQAEEKEMEHLRRYTRKKGRVVLKTEDDHFYYTLANNNDLSEKGYAFFISMFLERKYSYLFLKKLSGFKRGDSLQYRLTLEVFTALSTKPPVERLRTTKDTKQDRALDILNELSKIPIELYQTLEPKYREMYNETLQPTDAEDPYGLPDRSRIRFRSRFEAFALHFLDKQADFKEIGFYTYLGNYFHNGYQKTRVDRETKDRYINFQLAGFCKNIQDISAKKLSEALNVKSIDISTDSIPDINSFEPYLVQSTPHYIVNGNNIGIKVLPEGKDTYPTIDEKGAKMPIADFWLSKYELPAMLFYTYLRNNNIHKSHCPLSVKDIIERSIHKSTKQKHPEERSELMLRRVMKAIFWTDSKLNEVERIKSQKSAFGKRQHEILKAGRIAETLVRDMLWLQPSKNNGRDKVTEPNFQAIQVSLAYFGIRRNDLTEIFTRAGLINSSNPHPFLAQIGTNYTSLIEFYIAYLKERKVYFSRIQKKILQGKLNIQCHPLRDLQREPNKPQDKEEAIFLPRGLFNEAIINCLKKSKLKQLIESPTREKSPALNVSYLIQNYFRTYFEDQSQEFYAQPRNYRLFDKLSPNKGKSKSYLSLEQRIKKMEELRPSKIPVAEANKLLEKEDRLYRKNYNEICDNESIIRLYQIQDILLFMMTKEYLPSDLYNRINKYKLENVKGILNERVSYLIDLNPLKIQGEDIKIKDYGKLFYIHHDTRISSLNKVLSKVKRNNSISSSVKIQPYENYKRECLDFEEAQIQIIPIIHSFEIAMVSMFPDLKKATPGNYYDFNEL

SEQ ID NO: 2761 - protein, 1115 aa, Artificial
  Synthetic
METLELQKKTEYNAAHIYKTIKEDPQYFGGYLNMARHNIYSISNHASSKFNLKPLSDEEKIIDSFLCNEKKKHLNWNHVFSIALKFLPIIKVFDFESLPKNEQANNNNTGKDFAQMAQTLKKLFSEIQQLRNDYSHYYSINNNDIRKISVSNEVAIFLQDNIKRAIEYTKSRFSGVLSDEDFENASNRKLIEQNNILTTDGFVFLISMFLEREHAFQFIGKIKGLKGTQSKSFIATREVFMAFCLKLPHDRFVSEDKTQALTLDIINTLNRCPKELYSIITEKEKQQFKPTLDNLKLNNLLENSLNDTEVIEDYDTYIESLTRKIRHSNRFSYFALKYIDETNIFQNIRFQINLGKLLIDKYEKPINNEMYPRTIIENVKAFGKLSDFEDETEALHQIDKNGNSLGFEQFAPHYNTSNNKIALYTNNAKAIIINNPKAKSKIKNNLKQPLPEAFLSLHELPKIILLEYLQKGKSEEIINDFILANNTKITNRKFIEEVKRMLPNDWDIFKKKTDPKNSQAYKPSELTKLKTRKKILNTVLEPHNLNDKQIPTRILDYWLNIVDVNIDRAIADKIKLMKRDGTDRLKAFNKFKKEGKGKIPKIGEMATFLAKDIVNMIISEDKKKKITSFYYDKMQECLALFADPEKKALFIEIITKDLQLNKFDGHPFLKEIQLRDIHYTQDFYSIYLQHKVCKLVSVKNYKKGRTDSIDKSWMTKNFYCKEWDNKLSKQKTVVKLPADLSNIPFSLRQLIEKESSSLYEWLDNIINGKNSNDGKRPISLPTNLFDEELINLLQMKLNEKNASYPSDAKYNELFKIWWTTRNDDTQSFYNAEREYVIYDQKINFKLQKGAKFAYFYADSLKQAFKNQQDKRAIKKRIDRKLPDIELTQVEKVFKRTISNTEKHIRLTQEQDQIMALMLEKLMSVDKNLNIKLSEISTLLNDTITVRKTVSGKLSFSNENTISKIILDQRKRKDHSMLNKYIHDRRLPELFEYFADTEIPINNLKVELESYNTAKHIVLDSAFKLEATLIKKNYTDQLLSLIDKKFNGQSIQHKPYLMFLRSKGVINENEFLFLNMVRNCFSHNQFPQKSTMNLLINDWDKNNFALQIATIYNNKT

SEQ ID NO: 2762 - protein, 1131 aa, Artificial; identical to SEQ ID NO: 2422
  Synthetic

SEQ ID NO: 2763 - protein, 1131 aa, Artificial; identical to SEQ ID NO: 2422
  Synthetic

SEQ ID NO: 2764 - protein, 1115 aa, Artificial; identical to SEQ ID NO: 2757
  Synthetic

SEQ ID NO: 2765 - protein, 947 aa, Artificial
  Synthetic
MYKVFDANVRLVKRDYMHHENIDMQRDFTHLNRKKQVGRTRKIIANPNFRYHFADEKGNMTITGLLFFISLFLDKKDAIWMQKKLKGFKDGRNLREQMTNEVFCRSRISLPKLKLENVQTKDWMQLDMLNELVRCPKSLYERLREKDRESFKVPFDIFSDDYDAEEEPFKNTLVRHQDRFPYFVLRYFDLNEIFEQLRFQIDLGTYHFSIYNKLIGDEDEVRHLTHHLYGFARIQDFAPQNQPEEWRKLVKDLDHFETSQKPYISKTAPHYHLENEKIGIKFCSTHNNLFPSLKREKTCNGRSKFNLGTQFTAEAFLSVHELLPMMFYYLLLTKDYSRKESADKVEGIIRKEISNIYAIYDAFANNEINSIADLTCRLQKTNILQGHLPKQMISILEGRQKDMEKEAERKIGEMIDDTQRRLDLLCKQTNQKIRIGKRNAGLLKSGKIADWLVSDMMRFQPVQKDTNNAPINNSKANSTEYRMLQHALALFGSESSRLKAYFRQMNLVGNANPHPFLAETQWEHQTNILSFYRNYLEARKKYLKGLKPQNWKQYQHFLILKVQKTNRNTLVTGWKNSFNLPRGIFTQPIREWFEKHNNSKRIYDQILSFDRVGFVAKAIPLYFAEEYKDNVQPFYDYPFNIGNKLKPQKGQFLDKKERVELWQKNKELFKNYPSEKKKTDLAHLDFLSWKKFERELRLIKNQDIVTWLMFKELFKTTTVEGLKIGEIHLRDIDTNTANEESNNILNRIMPMKLPVKTYETDNKGNILKERPLATFYIEETETKVLKQGNFKVLAKDRRLNGLLSFAETTDIDLEKNPITKLSVDHELIKYQTTRISIFEMTLGLEKKLIDKYSTLPTDSFRNMLERWLQCKANRPELKNYVNSLIAVRNAFSHNQYPMYDATLFAEVKKFTLFPSVDTKKIELNIAPQLLEIVGKAIKEIEKSENKN

SEQ ID NO: 2766 - protein, 994 aa, Artificial; identical to SEQ ID NO: 2753
  Synthetic

SEQ ID NO: 2767 - protein, 916 aa, Artificial
  Synthetic
MESIIGLGLSFNPYKTADKHYFGSFLNLADNNLKAVFAEFKERISDKSKDEDISNLIEKHFIDNMSIVDYEKNISILNGYLPIIDFLDDELENNLNTRVKNFKKSFIILAEALETLRNYYTHFYHDPITFGDNKEPLLELLDEVLLKTILDVKKKYLKTDKTKEILKDSLREEMDLLVIRKTDELREKKKTNPKFKFSTDPTQIRNSIFNDAFQGLLYEDKENNGKTQVSYRAKTKLNPKDIHKQEERDFEIPLSTSGIVFLMSLFLSKKEIEDFKSNIKGFKGKVVKDENHNSLKYMATHRVYSILAFKGLKYRIKTDTFSKVTLMMQMIDELSKVPDCVYQNLSETKQKDFIEDWNEYLKDNEENTENLENSRVVHPLIRKRYEDKFNYFAIRFLDEFANFKTLKFQVFMGYYIHDQRTKTIGTTNITTERTVKEKINVFGKLSKMDNLKKHFFSQLSDEENTDWEFFPNPSYNFLTQADNSPANNIPIYLELKNQQIIKEKDDIKAEVNNSQNRNPNKPSKRDLLNKISNTNEDFYQGDPTAILSLNEIPALLHLFLVQPDNKTGQQIENIIRIKIEKQFNSIKNPSKDDKGVPKSLFADTNVRVNAIKLKKDLGEELDMLNKKQIVFKENQKASSNYDELLKKHQFTPKNKRPALRKYVFYNSEKGEEATWLANDIKRFMPKGFKTKWKGYQHSELQRKLAFYDRHTKQDIKELLSGCEFDHFLLDINACFKEDDFEDFFSKYLKNRIETLNIILKQLHDFKNEPTPLKGVFKNCLKFLKQKNYVTENPEIIKKRILAKPAFLPRGIFDERPTMKKGKNPLIDRDEFAKWFVEYLENKDYQKFYNSEEYRIRDADFKKNAVIKKQKLKDFYTLQMVNYLLKEVFGKDEMNLQLSELFQTRQERLKLQGIAKP

SEQ ID NO: 2768 - protein, 909 aa, Artificial
  Synthetic
MGAIKNKHIFAAYANLAIDGLIKTLNFIAKKLDTQKQLSSWDIKHVITLIDSIFDQNPQNNLEQVVEGYLPWIKPIIEMKTPKKGERQSDKLCIEYKTIITAFASLLNDVRNYYTHYYHDPICIYPGGYDIPSSLNCIYDSAINIIKERFQAEEKEMEHLRRYTRKKGRVVLKTEDDHFYYTLANNNDLSEKGYAFFISMFLERKYSYLFLKKLSGFKRGDSLQYRLTLEVFTALSTKPPVERLRTTKDTKQDRALDILNELSKIPIELYQTLEPKYREMYNETLQPTDAEDPYGLPDRSRIRFRSRFEAFALHFLDKQADFKEIGFYTYLGNYFHNGYQKTRVDRETKDRYINFQLAGFCKNIQDISAKKLSEALNVKSIDISTDSIPDINSFEPYLVQSTPHYIVNGNNIGIKVLPEGKDTYPTIDEKGAKMPIADFWLSKYELPAMLFYTYLRNNNIHKSHCPLSVKDIIERSIHKSTKQKHPEERSELMLRRVMKAIFWTDSKLNEVERIKSQKSAFGKRQHEILKAGRIAETLVRDMLWLQPSKNNGRDKVTEPNFQAIQVSLAYFGIRRNDLTEIFTRAGLINSSNPHPFLAQIGTNYTSLIEFYIAYLKERKVYFSRIQKKILQGKLNIQCHPLRDLQREPNKPQDKEEAIFLPRGLFNEAIINCLKKSKLKQLIESPTREKSPALNVSYLIQNYFRTYFEDQSQEFYAQPRNYRLFDKLSPNKGKSKSYLSLEQRIKKMEELRPSKIPVAEANKLLEKEDRLYRKNYNEICDNESIIRLYQIQDILLFMMTKEYLPSDLYNRINKYKLENVKGILNERVSYLIDLNPLKIQGEDIKIKDYGKLFYIHHDTRISSLNKVLSKVKRNNSISSSVKIQPYENYKRECLDFEEAQIQIIPIIHSF

SEQ ID NO: 2769 - protein, 916 aa, Artificial; identical to SEQ ID NO: 2767
  Synthetic

SEQ ID NO: 2770 - protein, 1018 aa, Artificial
  Synthetic
MKKNINPFNLFFLEKGYIGSIAQKAENNFSTNCKALNGSQISDKENKATSRIYYFAVGHAFKNIDTKAIFAYKYDDDKKNLRATQYVHIQRNVFDQGLRDFIGEKVHAIRNMCSHYVHLFNDIKLEDEDSDKANIIQDQFIPFVKEAFKLAVVQAYPGESDMTIDKVDDAKIIRFLYDNFISKGEYDDLEEKKQFFKLSSDKALEKVLFIDLDEDQSICIGPGYEVFTATKGRYLSFYASLFLLSMFLYRNEAEILISRIKGFKDKRDIGNIAKRSVFTFFSKKVSSRDVDNEEMPLVKFRDIMQYLNHYPTAWNDQLSDYSSSESSKNLCNKIVEMDIKRLFHEMFETENEESLRFLTYVKLTQYEALYPKKYVRAEFLKADFTSRETEHFDIIIKESKELKGCRKKLQDLLHADSLGNEKEKEIAECTEKIQELEGAETNPDLDAVRKQIDDHLFITSYGRNQDRFMDFAARFLAEVEYFGKDAFFKVYRFETIEEQSKYLEKVKNQLPKEQYDKLKMHRGRLATYMNHNQIINYYSSFDIPFVIENNSIQVFMPSSKIIEDMDDQMLKKIFKGKGTFYVIQRPLIIYLLEQFLYEPSGRKKMTFKALIENYCGRRKKGLEKYETLLLKDSDSKAAELQDQRSEMGKLLPKRLLHHYLSDSPKESMPLGLTELLEDAKQQEARYNRMFDEAERYGHLGDFLKKNKGKQFKLRFVRKAWNLMYFTDIYWVQRMECGDKHHKQFNITRDEFNNFSQWMYAFDEIPEYKECLNRLFLSKRFFDVKEFATLFESGKSLEDFYLKTKGLYKRWLDNKEYLNSNNKPKIEKNTWNNYKKILDGSTVCINLSLFIKILEDKNLLEKDADNHIIYKAQENMQYLISDYYMDLSFDRVYKDRLGDDESHAYKKLYNKLRTNRLEDALLYEMALYYMSMVNIGVKEARTHVCDLFNKEIDFSVYKDDDKESYLYKVQIPFYKIDAFDGLAVMNKSYDKFPPFTHQLYGYLTEDKYQSVFLSSERNA

SEQ ID NO: 2771 - protein, 905 aa, Artificial
  Synthetic
MNPVDIKEASKKAVYYIDQYKGDKKWCFAIVLNRAYDNLEDNPNLLNESLLRFENISLMSWFDFQEDEKQMRDSVFQGYENINKAEQKKEIKLKPDIQKAVVKRLEDLRNYFSHRLHTDDCLTFLKEDPIRFILEKAYEKAKLVHLGRETQESKDFSVPLFEDDKITTAGVILFASFFVEMRILIRVLGLKDVRGFTLTEGKFNLTRKAICHYALPDSYSIKTPRDTKLFRDILGYLSRMPSESYDHYFPEAKKKAEEGEKDKEGEGKDKENKEPQWSKRNTDKFMVFAMRYLEDFQPDVFRICFARQDIQQPQREKDQERKPHKQKGKRKLQFPENLQEARDNPAVRYFIRQNNIDIQIQKNNQKIHCRMGLNELKYLILLCLKGQGGEAIEAIYNEAGQVGNKLPHLAKMRKEGFQDYQKWMPGFVLNHHGLMPEGPNRKEPVAARVGYIRQKWERKRDGSKEARLDSKARDILQYINECGQEYALQQDRERKGTLNIDKYRKIHDFLVNKNIEAFRQELDGLKVDEKVREDLKKRQTVNDLHQRVCNLMIRKLEDLQQSGDLEQLKCYIGLAPAWEYRDEDQTGKEQKEQRFENKVKNLKPMLYRGFLRERFFAEYRSKENKRNFADLVEDVRQKKGEGDVPVDLIYYQIEGDTQEIQVANKKLTETLARDRLCLLIGREYLEQLNRTLSQNAIEERHGPKRKYFIKTEWSKEPVQMGDGKERMRDVIICRIRENPEDENPLCSIRFAVKHWTKLYVMDDPFFLSDVHSYFLSKSNEIDYHTLNQKGICQYTNLQADCMVNILKLEKKVFERVTKRDIDKEKDIKKLINEINNKLQHLPAKKEDNRVPFLLVCEAALEKGILKEKSEIDVVSMVRNSAFHYQLYFSKSEKETFDRIMRREGI

SEQ ID NO: 2772 - protein, 900 aa, Artificial
  Synthetic
MQTATQEQKQKQSIYSILNYQGQRKWCFAIVLNRALDNINPKRETETGKYKNKELFYKSLLRFEGIKKQPWFDETKAEKENVTAKEIIDSKDKAAELLLNLRNYFSHNYHTEKCLYFGTESQHKQIRLIMEAAYERAKAELTGRRTGQEISAEAEKDKDGNIKKYKLSDVPWPPLFDEKDIITTAGVVFFASFFTEAGQIFRLMNWINGLKRNDDKFNITRRALSFYSLPDSYAEAIAEYEVEEDGASRTIRYKAKIFKDILNYLRRIPSETYKLYHSGEENKISGKKEEKGEDENTPVERKTDKFAEFAMRYLEDFEGVRFARYRINTKTRENEVFFDEDELKKLIDKKGVPEQEKDKKFEDYRYYYVKNNAILKTEKGSIRIGINELKYFVLLSLDKMGQQAKEKINSFLSKFTGDNLGNREFIKANIEELPPFILKKFDPLAEDKEKRIEKRVDYLIRKWKRKKEDYEKMRINDKVGGILRYVNENLKPGKKLNAEGYKYLQKLLTMERFSEFEKEINKFEDERESRLKRGALSEIERLKSIDKMFLKVCSIVLKKLESLEGDELAGYIGLKKQPLTDEKAAENQEYDNVLQRYIETKIALPKGTLRDLYLKTGGKNNFSDAVEDVLEKKKLDFDIELDKKYYDYEIDKRKEAPKDREGLKTARKLRETMAKDRLCLLTGMKFYENIREDLNIRWERRVGKNVIYADIYKKGDKTKKLFTLKFSEKDYVKMYVIDNTDFLRQVWEKFVKGKEGQEVNYHEFYQKGIQKGLGDFQRDVALKVLKFEETVVEKNAGTGLPVSGINNKLSGIIKNRGREMKSDFNKHRDVFVSNDTICKAFFDDADDIERVKKIRNSAFHYNADFEDEDYTGFNKIMDREGIKIKEIDGKKQEGKQRKRF

SEQ ID NO: 2773 - protein, 1137 aa, Artificial
  Synthetic
MEKFRRQNRNSIIKIIISNYDTKGIKELKVRYRKQAQLDTFIIKTEIVNNDIFIKSIIEKAREKYRYSFLFDGEEKYHFKNKSSVEIVKKDIFSQTPDNMIRNYKITLKISEKNPRVVEAEIEDLMNSTILKDGRRSARREKSMTERKLIEEKVAENYSLLANCPMEEVDSIKIYKIKRFLTYRSNMLLYFASINSFLCEGIKGKDNETEEIWHLKDNDVRKEKVKENFKNKLIQSTENYNSSLKNQIEEKEKLLRKESKKGAFYRTIIKKLQQERIKELSEKSLTEDCEKIIKLYSELRHPLMHYDYQYFENLFENKENSELTKNLNLDIFKSLPLVRKMKLNNKVNYLEDNDTLFVLQKTKKAKTLYQIYDALCEQKNGFNKFINDFFVSDGEENTVFKQIINEKFQSEMEFLEKRISESEKKNEKLKKKFDSMKAHFHNINSEDTKEAYFWDIHSSSNYKTKYNERKNLVNEYTELLGSSKEKKLLREEITQINRKLLKLKQEMEEITKKNSLFRLEYKMKIAFGFLFCEFDGNISKFKDEFDASNQEKIIQYHKNGEKYLTYFLKEEEKEKFNLEKMQKIIQKTEEEDWLLPETKNNLFKFYLLTYLLLPYELKGDFLGFVKKHYYDIKNVDFMDENQNNIQVSQTVEKQEDYFYHKIRLFEKNTKKYEIVKYSIVPNEKLKQYFEDLGIDIKYLTGSVESGEKWLGENLGIDIKYLTVEQKSEVSEEKNKKVSLKNNGMFNKTILLFVFKYYQIAFKLFNDIELYSLFFLREKSEKPFEVFLEELKDKMIGKQLNFGQLLYVVYEVLVKNKDLDKILSKKIDYRKDKSFSPEIAYLRNFLSHLNYSKFLDNFMKINTNKSDENKEVLIPSIKIQKMIQFIEKCNLQNQIDFDFNFVNDFYMRKEKMFFIQLKQIFPDINSTEKQKKSEKEEILRKRYHLINKKNEQIKDEHEAQSQLYEKILSLQKIFSCDKNNFYRRLKEEKLLFLEKQGKKKLSMEENKDKIAGDISDLLGILKKEITRDIKDKLTEKFRYCEEKLLNISFYNHQDKKKEEGIRVFLIRDKNSDNFKFESILDDGSNKIFISKNGKEITIQCCDKVLETLMIEKNTLKISSNGKIISLIPHYSYSIDVKY

SEQ ID NO: 2774 - protein, 1035 aa, Artificial
  Synthetic
MTNNKKPANKNSIIRVIISNFDENSIKEIKVLYTKQGGVDTIHIKKMSMCEEDKSLYFEEVECNSQFGNIDIKIEKDNRSVIVEKYDKYTGLIIRKYKIFGTYVITNKNIKLVKVYVQDILNEKSTNKRRIESYTERLLIDPAVINDYKKIMENNQDIDSKNIYKLNRFINYRSNMMLYFTFVYRFLGMELGTNGEVYKLDQECNLEKQKKVVDYVASNIEKFVENHNNYAQKRNEETEEKKLHRDKEILIEIDKKLLEKDIKNIITIVASVRHKLAHYNYTFFQDLLEGKEIVLEKQKPLNELLDLNIFKEIGKIKNLKEEKATTYLEDDTKVYVLGKHKKAKKLYNYYDKLCTRKDGFNNFINSFFSVDGNENPDFKKHINEHFEKRIDELNYQVNNTKKVREDIKRELVEMQEIKKLIGEAYIWDIHQCKEYKRIYNKRKNLVEEVSQLSRKANRDKVDKDKISKLNNEILKMNTQMEKYTKLNSKFRLQYKLQMAYGFLYEEYGFDLKRFGDRFNSSILDELKPYKENGLKYLKTKVTSNDNIGFSLGEFEKKINAMKAMDNGLFNPTHSNNLFKWYVLMYILLPTEIRGDFLGFVKNQYYELKHVDYIEDQVIEKDLFFHRMRLFEKNTKKLSFISYGIDSLFDIKEYFNYLLPQLNPMEMDDHFVNNFTRSMVLPMLKYYQNIFKLLNDLEVASLIKYSNVNNIHLLSEAIANEKLKKNGNYNFNTMLQETYCIDAKCGWELSRLRNEIAHLNIDRLFIEIPKNDELDRDIDKLIDFLKKPEVNNNGMAKTIINDFYMRHEQFMHKLNVQINDSTSKQELEDKYKAQKKLLNRFQMNPEAATILKKYEELKAIENINQIDLDLWGKIGDIEIIDHKKHKKISDLKPLERNLKGDLIIDKINEMAELLFGIYKRYMVRDIKKILHKQLTKNESRYINLLIYDKMNSEEALRNKEIIYTVHMKKDKEKWKIENDEVVNEVMQLHNIEIISNEKGLLRCIPKNEASIMELDINRSYIQKMKIIVSNNSVDHE

SEQ ID NO: 2775 - protein, 1117 aa, Artificial
  Synthetic
MENKNKTKPNRGSIVRIIISNYDTKGIKEIKVRYRKQAQLDTFILQTTLDKGNNSILISEFRVKAREKNRYSFTYDGKEKFSAPSNSVVITKIDNAAPEKFKEIRKYKITLEIDEKCKTGNMITAAIEDLLEDDIAREGIRNPRRKASKTERKLIAESICHNYAQIAQCPVEEIDAVKIYKVKRFLSYRSNMLLFFALINDFLCKNLKNKKGEKINEIWKMENKGNNKKIDFDENYNILVAQIKEYFTKEIENYNNRIDNIIDKKELLKYSEKKEESEKNKKLEELNKLKSQKLKILTDEEIKADVIKIIKIFSDLRHSLMHYEYKYFENLFENKKNEELAELLNLNLFKNLTLLRQMKIENKTNYLEGREEFNIIGKNIKAKEVLGHYNLLAEQKNGFNNFINSFFVQDGTENLEFKKLIDEHFVNAKKRLERNIKKSKKLEKELEKMEQHYQRLNCAYVWDIHTSTTYKKLYNKRKSLIEEYNKQINEIKDKEVITAINVELLRIKKEMEEITKSNSLFRLKYKMQIAYAFLEIEFGGNIAKFKDEFDCSKMEEVQKYLKKGVKYLKYYKDKEAQKNYEFPFEEIFENKDTHNEEWLENTSENNLFKFYILTYLLLPMEFKGDFLGVVKKHYYDIKNVDFTDESEKELSQVQLDKMIGDSFFHKIRLFEKNTKRYEIIKYSILTSDEIKRYFRLLELDVPYFEYEKGTDEIGIFNKNIILTIFKYYQIIFRLYNDLEIHGLFNISSDLDKILRDLKSYGNKNINFREFLYVIKQNNNSSTEEEYRKIWENLEAKYLRLHLLTPEKEEIKTKTKEELEKLNEISNLRNGICHLNYKEIIEEILKTEISEKNKEATLNEKIRKVINFIKENELDKVELGFNFINDFFMKKEQFMFGQIKQVKEGNSDSITTERERKEKNNKKLKETYELNCDNLSEFYETSNNLRERANSSSLLEDSAFLKKIGLYKVKNNKVNSKVKDEEKRIENIKRKLLKDSSDIMGMYKAEVVKKLKEKLILIFKHDEEKRIYVTVYDTSKAVPENISKEILVKRNNSKEEYFFEDNNKKYVTEYYTLEITETNELKVIPAKKLEGKEFKTEKNKENKLMLNNHYCFNVKIIY

SEQ ID NO: 2776 - protein, 1117 aa, Artificial; identical to SEQ ID NO: 2775
  Synthetic

SEQ ID NO: 2777 - protein, 1064 aa, Artificial
  Synthetic
MVYNVLSCNIKKKISINYRGQFMSINRVKKVKSNKGSIVRVIISNFDDKRVKEIKVLYSKHGGVDVIRLKDTEPDENGDMKLVFDYAYNRYEDEDTYVTEESEKQSFIVTPNGNSTKLHFVKKNEATGAVLREYTIQGKYETLKSGKAKVTVSINDIMVYDNSNASDLIRAKRTLVQDTNRILLSADTIDYYRQIASGNLDEINNALEIDSQEIYKINKFLSYRSDMIIYFQMINNFLLYNSDIEEIYEYEKKDVDKNNILNNCLENIIKNQSSLINIYGGDIKEIDEKINIDKILVKQDLEKIILLLTKLRHAMLHYDYTFWKSLYSGEDFILTFEKDNDKKVPVSELLDLNIFKELRKIKLVKDKAVTNYLDKSSKIYVLGRNVNAIKALDMYRDICDKKLGFNKLVNSIITSSGEENKEYKRIVTEHFNNSITNMNSFLEKLKNEDDFKTNWKKKKTYNLIKQRYDEHQKLSKWFGGPYVYDIHDSKAYKELYIERKNLVHRHTKLIEKGIDDTNKKEFIEINEELSKLNKDMKAMTTINSTYRLQYKMQLFFGFISEKYNLQVDKFLNDFDLNNDDFRKVFIENYDLYINKTLEKQDKNLNNLIKDYTCRDTEDIFFEDRDNNLVKLYIVMHLLLPSEIRGDFLGHVKKNYYDMKHVDFIDKEDKSEGDTFFHDLRLFEKNARKLEIVDYSLSQMFLTKDDNNYIEEKLNELILNKYDIELPEDINIKQFYKSFMLPLIKNYQIIFKLLNDIEIKGLFKISKDENISLKEAINKCRINDHINFSKIMRLSLNEQGPNKKNIYAIRNSIAHIDMKELYIDPLDIYIDPLDIYIGINNGETISEKIEHIIERWVKEETVGKELNKSIINDYYMKKEELVLYLKLGEHNNVVIDAQEESKRKETVLRKYRLENNNVDTQIKKVIEKIKVLKEESQTFGEKDKQKKVLYNDISDLTGIVRRYISLKIKKILLDIIRRGEYRYVNINIYDKETGSNVNKEIKIKYCINKGEEIYTVNSDAVDDFNFEINNKSLIIKFDKDRHPEKRVQTINLESNYIQNAKFIVS

SEQ ID NO: 2778 - protein, 1071 aa, Artificial
  Synthetic
LIEKIYLGKKRDFMSIGDEKKLKPNKSSIIRVMISNFDDKQIKEIKVLYNKQGGVDVIRLNGTEPDEKGRMKFNFNYAYNRLEDEKTNSLEEMDEQSFFVTTNEDITELYITKKHKMTGEIIKKYTLHGKYIFLNSNKTKVIVSIVDNIDHSVTKDLSDMIRSPRSLTQDTNRVLLDTEVMKNYRQIICSDLERIDETIKMDSQEIYKINRFLSYRSDMIVYYQMINNFLLHYDGEEGIDNKSSQDNSGKDDNKNLINEIWQYEDKKDDEKNKIVERSYRSIEKSINQFILNHNNKVEKDKKGEKIDISQEMIEEDLRKILMLFSKLRHSMVHYNYEFYQALYSGKDFVISSKNDSENRMISQLLDLNIFKELSKIKLIKDKDISNYLDKNTTVHVLGQNINAMRLLDIYRDICESKNGFNKFINAMITISGEEDREYKEKIIEHFNKKIDDLFNYLKKLEKKYGAKRNNKRDYNSLMQTLVEQQKLKEWFGGPYVYDIHSSKRYKELYIERKKLVDRHSKLFKEGLDEKNKKELTKINVELSKLNSEMKEMTKLNSKYRLQYKLQLAFGFILEEFDLNIDTFINDFDKDKDLIISNFMKKRDIYLNRVLDRGNDRLKNIVKEYKFRDTEDIFCNDRNNNLAKLYILMYILLPVEIRGDFLGFVKKNYYDMKHVDFIDREDKDTFFHDLRLFEKNIRKLEVINYSLSSGFLSKEHKADIEEKLNKFINRNGIMKLPENITIDEFNKSLILPIMKNYQIIFKLLNDIEISALFKIAKDKNITFKQAIDEVKNKDKYKNINFSQVMKMALNKGGIYQIRNNISHINMKQLYIDPLNSHMNNRKDIGTISEQIEKVIDVCITGGLTGKELNKNIINDYYMKKEKLVFNLKLRKQNDTVSIDLQEKNKEEEFVFKKYGLDYKDGDINIIEVMQKVNKLEEELKSIKETSKEKLKNKETLFKDISLINGVTRKNINFKIKEIVLDIIRMGEIKRININIYYKSENYNKNTIIKFKYTIDGENKKYYFKQHKISDVDLELKNKSVRLTCHKDKDPKKNKQTINLESNYIQNVKFIIS

SEQ ID NO: 2779 - protein, 1238 aa, Artificial
  Synthetic
MNQYIHANKKENKKRPNKSSIIRIMVSDFDDEYIQEIKVLYIKQGGVDTFKINKMSYDSASKKIIFEEVATQNMLSVEDSNLNFKRPMVECKNGDIYVVKPSEKVNEKGQAIEPLRSYKIHGKYLDLTEEIGKDNAEQSGKKQIYLHVEDLLGMHTTADSIDRRRLESETQRTLLSKEVMENYALIMGHEIKLDESDETYKLASSKEIYKANRFLDYRSRLLYYYSFINHFLVGLSKGATYEYAGKSLVAKIPDGEVWQLCELEVTAYHGIYINKKRNELVNENSLKIDAIYAQMAKNMKETINEFVDNYNAMIEKQNELKDNKSYKINKKAQNTTKFENFTEEKINQDLHNIVYILSDLRHKLMHFEYHYFELLMTGKKMGEKSEVIVCVPDRNSELPASKNEPSKDKFRKEKKLSELLDLNILKELDTFVKVKESYQTTYLETNDKIEILGKLKTAKSIYQIYHQICQRKNGFNKFINSFFTVDGEENTEVKDCINEVFRKEIHYFEMVIAKSNEDTLNDKNKNKSKKTRDRMKNQIQECKRYQDDESNIDTWVAYHKDIHYSKRYKKLYCEHITLVDNLNSAVSNGLNGQVIKEINDDIAIKKREMNEITKANSKSRLRYKMQMAYGFLFVEYGLKIPKFLNDFDLSHVRTASKIKGYKSPVKVTQYLTNDEGNKDNFNLETLMEDIDKKSKINFEFLKSNEDNNLIKLYILIYQLLPRELKGDFLGFVKNNYYDLKHVDFQTRETEAKDQFFHNMRLFEKNVKAFDLIQYSIGDEMSQLGNETFNFSQALSKIVSDDTILNSATEIPNINRLVYGSLLKYYENAFRLSSEIEIRALIKIARGKQIDNHSIDEAYKDALIFQKSGQTVKFSSILKYFNIDDLNKKNDSKIYNKASNLRNKIAHCDYTVLFITNIICEAENINVKAKYLIDVSNKIGLNTVDLGNDMVNDYLMSYDKQMTYLAKTSEELLKESSLDKSKEKKERRDNLKNETRSHSEIYMEYEWISDYLVKLKDNHEILSKKNKTEDLKLNRAYELIKNYNVALNKKSKIKIRALTTDHINNNWVNIWGALTHELQEIKGLYLYKVTPKIKKGIYFVLTDKKNYCLNINLYTLKKVPSKDDSEMTEERYLRDISEKYYFTVGEDSIKALKERLQTINDKCIITYVNEIDCKNENIKEKPEFKIAEDYNSWDKKYLSISNEELHHWSVETRRDKKYKENLILNLMEKSSFKLNLHQL

SEQ ID NO: 2780 - protein, 1147 aa, Artificial
  Synthetic
MEGGTKIKANRSSIIRIIISNYDSNGIKEIKVRYNKQAQLDTFLIESKLEKGVFTLKDVKWKAKEKNRYNIIREEIIDNSVKITKIDKLSNKAIRGYIIKFSVSPKNKNVVVVDIKDCMEHNLTIKGERSNTRRDTSQTERKLLSKETQITYSKIACCPPENIDSLKIYKIKRYLSYRSNMLLFFSLINDFICEGIKKEKIVELYKITSKVDENIIEERVTKIAQYLRENLSNELKNYNNGIEKTISKKSNSINDCNNRIESCKKKITKLDKIKDKKQIRNLERIIQDSENKIKECNKIIAEKRKERLIALAEEKIKEDVYKILELYSDLRHKLAHYNYAYFENLFENNVEDSNMVNMAKLLDLNIFKYLELSKKLRIENKTNYLDDDTKFSILGVRGKAKKYYSIYNTLCEQKNGFNTFINNFFTKDGIEDIDFKDKVNARFKEEIKELEEFEAKQKEKKKKFKDKELELLKEQDTELETAYVWDIHNSIRYKGFYKDRKDIVEKYNQTLSGNRNKIALRDYGAKLLEIKNKMDNITKRNSIIRLKYKLQVAYAFLMKEFNGNIARFKSEFDVSNVEQVEKYQAHKKEYLCYTDKKNFNIEKFQEILGELEASNKVTWLSSDTKNNLFKFYVLTYILLPFEFKGDFLGFVKKHYYDIKNVEYLDENNEELTNEQLEKMKDDSFFNKIRLFEKNSKKYNIFSKSFLTNERVKEYFEKLNIGAKHYEYVGANGETKGIFNKNIIIPIFKYYQIIIKLYNDVEIAILLYLSKLKGDIPIDEVIDKVTQKQSITEGRELDFYSLNGLFGFFKLINDNLAEFDTTEKIPKDYLKSEVTFIRNKVFHFDYKNFIDNLLEIDCENGSKFSVSTEIGKLRKFIQDNLDKLTEVNLDYNFLNDYYMKKEQFIFGQLKQIDYTITNKEEKEQVAKNKNLLGICNLFLKGNDIEVINKIYEKYEILKKISDSPEIKNYDEIIPNGIKLNEIRYIKKELEKKSKNENYRLNIDRIKEEIGKCSSDLLGLYKQQIITLLKRKIIEKIQYKEEKVLTILTYEIETKYKNIYSVLLVRKNSSNNFSFLEGSPNKRQIKIGDKTTLILEIGTLDKDKNRENKYNLYLSLNKNTKGKKVFKREVIDLRQHYLFTEEVKFKDLK

SEQ ID NO: 2781 - protein, 1152 aa, Artificial
  Synthetic
MENKNKTKPNRGSIVRIIISNYDTKGIKEIKVRYRKQAQLDTFILQTALDKENNSILINEFRVKAREKNRYSFTYDGKEKFSAPSNSVIVAKIDNVAPEKFKEIRKYKITLEIDEKCKTGSMITAAIEDLLEDDIAREGIRNPRRKASKTERKLIAESICHNYAQIAQCPVEEIDAVKIYKVKRFLSYRSNMLLFFALINDFLCKNLKNEKGEKIREIWRIENKGNNKKIDFDENYTILVAQIKEYFIKEIENYNNRIDNIIDKKELLKYSEEKEESEKNKKLKELNKLESQKLKILTDEEIKADVIKIIKIFSDLRHSLMHYEYKYFENLFENKKNEELAELLNLNLFKNLTLLRQMKIENKTNYLEGDEKFNILGKDVRAKNALGYYNLLAEQKNGFNNFINSFFVQDGTENLEFKKLIDENFIKAQKELEEDIKNCKESVKKLEKKLKENPKKTEDLEKKLEKKQKKLKELKKELEKMKQHYKRLNCAYVWDIHSSTVYKKLYNERKNLIEKYNKQLNGLQDKNAITGINAQLLRIKKEMEEITKSNSLFRLKYKMQIAYAFLEMEYEGNIAKFKNEFDCSKTEKIQEWLEKNEEYLNYCVEKEEDGKNYKFHFKEISEIKDTHNEEWLENTSENNLFKFYILTYLLLPMEFKGDFLGVVKKHYYDIKNVDFTDESEKELSQEQIDKMIGDSFFHKIRLFEKNTKRYEIIKYSILTLDEIKKYFELLELKVPYLEYKGIDEIGIFNKNIILPIFKYYQIIFRLYNDLEIHGLFNVSSDINKILSDLKSYGNENINFREFLYVIKQNNNSSTEEEYQKIWENLEAKYLKKSLLTQEKKEIKTKTKEELEKLNETSFLRNKISHLEYNKIIEEILKTEISEKNKEATLNEKIRKVINFIKENELDKVELGFNFINDFFMKKEQFMFGQIKQVKEANSDSITTERKRKEENNKKLKADYGLNYNNLSKIYEISNTLREIVNSPLFLNDSTLLKKVDLSKVMLKEKPICSLQYENNTKLEDDIKRILLKDSSDIMGIYKAEVVKKLKEKLVLIFKYDEEKRIYVTVYDTSKAVPENISKEILVKRNNSKEEYFFEDNKKKYTTQYYTLEITKENELKVIPAKKLEGKEFKTEKKEENKLMLNNHYCFNVKIIY

SEQ ID NO: 2782 - protein, 1151 aa, Artificial
  Synthetic
MSKEIKPNRSSIIRVIISNYDNKGIKEVKVRYNKQAQLDTFIIESQIEEGAFILKNIKWKAKEKYRYELFIREVNSTSVEIIKKDRFLNNEIVRGYILNFKVSSKNKDVVVVEIEDILPLKSVQQGERANIRRITSQTERKLLNIETQISYSKIASCSPEDIDSIKIYKIKRYLSYRSNMLLFFSLINDFFCEGLYDEKGKKISELWRITNKVDKDIIDERVNKIAKNLYNTLSTELENYNNGIRKSIEKKNNSITDCKNKIVSCERKIEKLDEEKNRKKINQFKRDIANCNEKIKEYEESIALKEKEKLFNLGFEKIKADVYKILEIYTELRHKLSHYNYIYFENLFENREKDLKLAELLNLNIFNYLTLSKKLRIENKTNYLEEDTKFSILGVSGSAKKYYSLYNTLCEQKNGFNNFINSFFVKDGVENSEFKEKVEAKLKEDIKYLESLETKNNLNKKIHKKNKELELLKTQYNELGTAYFWDIHSSSNYKELYNKRKDTIENYNQILKGNRNKTTLRNYGRELFSKKNEMEKITKRNSIVRLKYKLQIAYAFIMKEFEGDISRFKSDFDISKIEQIKKYQNRGEEYLNYCDQDNFKIKDFQKMIGEIESSSEITWLSNKVENNLFKFYVLTYILLPIEFKGDFLGFVKKHYYDIKNVEYLDENLNELTNEELDKIKNDSFFNKIRLFEKNSKKYNIFSKSILTQERVKEYFRRLEIPAKHYEYTGSSGETKNIFNKNIVIPIFKYYEIVVKLYNDIEIAMLLYLSNIKNISIEEVINRIIEKQSNLKEEHKEFYTLTELFGFFKLVNEKAEEFDSNIPIPKNYLNSKPISLRNNIFHYNYEGFIGQLLDIDSEGASNFSVNIEIRKLLKFIDPYLKKLKILHLDYNFINDYYMKKEQFMFGQLKQVDFTITNNEEKERVIKNKRLLEICKLKLEKDNIEDINKIYEKSVLLKEIGETLKVETFNELDKLKENENRVDLNKIKYIEDLCKKQKNNKQKINMSKVKEEIIKCSSDVLGLYKQQIITLLKNKIIRKLKSKEEKLLTIITYEVETKAKNIYTILIGRKNSSDSFYFLNGSPNKQQIEIGKKTKLILEIGIQDKEKIRINTSNLYFSLNKKIKNENVFSKKSIYLKKHYSFLVEVKFKDLNK

SEQ ID NO: 2783 - protein, 1147 aa, Artificial
  Synthetic
MEGGTKIKANRSSIIRIIISNYDSNGIKEIKVRYNKQAQLDTFLIESKLENGVFTLKNVEWKAKEKNRYNIIREEIIDNSVKITKIDKFSNEAIRGYIIKFSVSPKNKNVVVVDIKDCMEHNLTIKEERSNTRRDTSRTERKLLSKETQITYSKIACCPLENIDSLKIYKIKRYLSYRSNMLLFFSLINDFICEGIKEEKIVELYKITSKVDENILEERVTKIAQYLRENLSNELKNYNNGIEKTISKKNNSINDCNNRIESCKKKIKKLDKIKDKKQIRNLERIIQDSENKIKEYSKIIAEKEKERLVALAEDKIKEDVYKILELYSDLRHKLAHYNYAYFENLFENNIEDSNMVNMAKLLDLNIFKYLELSKKLRIENKTNYLDDDTKFSILGVRGKAKKYYSLYNTLCEQKNGFNTFINNFFTKDGIEDIDFKDKVNARFKEEIKELEEFETKQKEKKKKFKDKELELLKKQDTELKTAYIWDIHNSIDYKKFYSRRKDIVEKYNQTLSGNRNKIALRDYGAKLLEIKNKMDNITKRNSIIRLKYKLQVAYAFLMKEFNGNIARFKSEFDVSKVEQVEKYQARREEYLYYIDKKNFKIEKFQEILGELEASNKVTWLSSDTENNLFKFYVLTYILLPFEFKGDFLGFVKKHYYDIKNVEYLDENNDELTNEQLEKMKDDSFFNKIRLFEKNSKKYNIFSKSFLTNERVKEYFEKLNIGAKHYEYVGANGETKGIFNKNIIIPIFKYYQIIIKLYNDVEIAILLYLSKLKGDIPIDEVIDKVTQKQSITKGRELDFYSLNGLFVFFKLINDNLAEFDTTEKIPKDYLKSEVTFIRNKVFHFDYKNFIDNLLEIACENGSKFSVSTEIGKLRKFIQDNLDKLTEVNLDYNFLNDYYMKKEQFIFGQLKQIDYTITNKEEKEQVAKNKNLLGICNLFLKGNDIEVINKIFEKYEILKKISDSPEIKNYDEIIPNGIKLNEIRYIKKELEKKSKNENYRLNIDRIKEEIGKCSSDLLGLYKQQIITLLKRKIIEKIQYKEEKVLTILTYEIETKYKNIYTILLVRKNSSNNFSFLEGSPNKRQIKIGDKTTLILEIGTLDKDKNRENKYNLYLSLNKNTKGKKVFKRKVIDLRQHYLFTEEVKFKDLK

SEQ ID NO: 2784 - protein, 1147 aa, Artificial
  Synthetic
MEGGTKIKANRSSIIRIIISNYDSNGIKEIKVRYNKQAQLDTFLIESKLENGVFTLKNVEWKAKEKNRYNIIRGEIIDNSVKITKIDKLSNKAIREYIIKFSVSPKNKNVVVVDIKDCMEHNLTIKGERSNTRRDTSQTERKLLSKETQITYSKIACCPPENIDSLKIYKIKRYLSYRSNMLLFFSLINDFICEGIKEEKIVELYKITSKVDKNIIEERVTKIAQYLRENLSNELKNYNNGIEKTISKKSNSINDCNNRIESCKKKIKKLDKIKDKKQIRNLERIIQDSENKIKEYSKIIAEKEKERLVALAENKIKEDVYKILELYSDLRHKLAHYNYAYFENLFENNVEDSNMVNMAKLLDLNIFKYLELSKKLRIENKTNYLDDDTKFSILGVRGKAKKYYSLYNTLCEQKNGFNTFINNFFTKDGIEDIDFKNKVNTRFKEEIKELEEFEAKQKEKKKNFKDKELKLLKEQDTELETAYVWDIHNSIDYKKFYSRRKDIVEKYNQTLSGNRDKTALRDCGTKLLDIKNKMDNITKRNSIIRLKYKLQVAYAFLMKEFNGNIARFKSEFDVSKVEQVEKYQAHREEYLYYVDKENFKIEKFQEILGELEASNKVTWLSSDTENNLFKFYVLTYILLPFEFKGDFLGFVKKHYYDIKNVEYLDENNEELTNEQLEKMKDDSFFNKIRLFEKNSKKYNIFSKSFLTNERVKEYFEKLNIGAKHYEYVGANGETKGIFNKNITIPIFKYYQIIIKLYNDVEIAILLYLSKLKGDIPIDEVIDKVTQKQSITEGKELDFYSLNGLFGFFELINDNLAEFGTTEKIPKSYLESKATFIRNKVFHFEYENFIDNLLEIDCENGSKFSVSTEMGKLRKFIQNNLDKLTGINLDYNFLNDYYMKKEQFIFGQLKQIDYTITNKEEKEQVAKNKNLLGICNLFLKGNDIEVVNKIYEKYEILKKISDSPEIKNYDEIIPNGIKLNEIRYIKKELEKKSKNENYRLNIDRIKEEIGKCSSDLLGLYKQQIITLLKRKIIEKIQYKEEKILTIFTYEIETKHKKTYTILLARKNSSDNFYFLERSPNQKQINIGDKTILKLEIGTLDKDKNRENKYNLYLSLNKNAKGKKVFKREVIDLRQHYLFTEEIKFKDLK

SEQ ID NO: 2785 - protein, 992 aa, Artificial
  Synthetic
MLLFFSLINDFLCEGLYDEKGKKINELWRITNKVDKDIIDERVNKIAKNLYNTLSTELENYNNGIRKSIEKKNNSITDCKNKIVSCERKIEKLDEEKNRKKINQFKRDIANCNEKIKEYEESIALKEKEKLFNLGFKKIKADVYKILEIYTELRHKLSHYNYIYFENLFENREEDLKLVELLNLNIFNYLTLSKKLRIENKTNYLEEDTKFSILGVSGLAKKYYSLYNTLCEQKNGFNNFINSFFVKDGVENSEFKEKVEAKLKEDIKYLESLETKNNLNKKIPRKNKELELLKTQYSELGIVYFWDIHSSSNYKELYNKRKDTIENYNQILKGNRNKTTLRNYGRELFSKKNEMEKITKRNSIVRLKYKLQIAYAFIMKEFEGDISRFKSDFDISKIEQIKKYQNRGEEYLNYCDQDNFKIKDFQKMIGEIESSSEITWLSNKVENNLFKFYVLTYILLPIEFKGDFLGFVKKHYYDIKNVEYLDENLNELTNEELDKIKNDSFFNKIRLFEKNSKKYNIFSKSILTQERVKEYFRRLEIPAKHYEYTGNSGETKNIFNKNIVIPIFKYYEIVVKLYNDIEIAMLLYLSNIKNISIEEVINRIIEKQNNLKEEHKEFYTLTELFGFFKLVNEKAEEFDSNISIPEKYLNSKPISLRNNIFHYNYEGFIGQLLDINSEGASNFSVNIEIRKLLKFIDPYLKKLKILHLDYNFINDYYMKKEQFMFGQLKQVDFTITNNEEKERVIKNKRLLEICKLKLEKDNIEDINKIYEKSVLLKEIGETLKVETFNELNSLKENRVNLNKIKYIEDLCKKQKKNEQKINVNKVKEEIIKCSSDVLGLYKQQIITLLKNKIIRKLKYKEEKLLTIITYEVETKAKNIYTILIERKNSSNNFYFLNDFRNKQQSINGEKIIEKNITIKGGHSQQRLNIGDKTTLILEIGREDEEKNRIDSFNLYFSLNKKKVEEKIFKKESLDLREHYSFLAEVKFKDLNK

SEQ ID NO: 2786 - protein, 1035 aa, Artificial; identical to SEQ ID NO: 2774
  Synthetic

SEQ ID NO: 2787 - protein, 1149 aa, Artificial
  Synthetic
MAKEIKSNRSSIIRIIISNYDNKGIKEVKVRYNKQAQLDTFIIESQIEEGAFILKNIKWKAKEKYRYEMLIKELNNTSVEIIKKDKFLNNEIVRSYRLNFKISPKNKDVVVVEIEDLLSLEPVQQRERVNVRRITSQTERKLLNIETQISYSKIASCFPEDIDSIKIYKIKRYLNYRSNMLLFFSLINDFLCEGLYDEKGNKINELWRITNKVDKNIIDERVNKIAKNLDNTLSIELKNYNNRIKKSIEKKKNSITDCKNKIVSCERKIEKLDEEKDRKKISQFKRDIANCNEKIKEYEENIVLKEKEKLFNLGFEKIKDDVYKVLEIYTELRHKLSHYNYIYFENLFENREEDLKLAELLNLNIFNYLTLSKKLRIENKTNYLEEDTKFSILGVSGSAKKYYSLYNTLCEQKNGFNNFINSFFVKDGVENSEFKEKVEAKLKEDIEYLESLEIKNNLNKRIPKKNKELELLKSQYNELGTVYFWDIHSSLNYKELYNKRKGTIENYNQILKGNRNKTTLRNYERELFSKKNEMEKITKRNSIVRLKYKLQIAYAFIMKEFKGDISRFKSDFDISKIEQIKEYQSRGEEYLNYCDQNNFKIKDFQKMIGEIESSSEITWLSNKVENNLFKFYVLTYILLPIEFKGDFLGFVKKHYYDIKNVEYLDENLNELTNEELDKIKNDSFFNKIRLFEKNSKKYNIFSKSILTQERVKDYFKRLDITAKHYEYTGSSGETKNIFNKNIVIPIFKYYEIVVKLYNDIEIAMLLYLSNIKNISIKEVINRIIEKQSSLKEGHKEFYTLTELFGFFKLANEKVEEFDSNMPIPKKYLNSKPVLLRNNIFHYNYEGFIEKLLDIDSEGTSTFSVNVEIGKLFKFIDPYLKEFKILHLDYNFINDYYMKKEQFMFGQLKQVDFTITNNEEKERVIKNKRLLEICKLKLEKDNIEDINKIYEKSVLLKEIGETLKIETFNDLNSLKENRVNLNKINYIEDLCKKQKKNKQKIDVNKVKEEIIKCSSDVLGLYKQQIITLLKNKIIRKLKYKEEKLLTVITYEIETKAKNIYTILIGRKNSSDSFYFLNGSPNKQQIEIGKKTKLILEIGIQDKEKTRINTSNLYFSLNKKTGKEKVFNKENIDLREHYSYLVEVKFKDLNK

SEQ ID NO: 2788 - protein, 1094 aa, Artificial
  Synthetic
MEKRKNKSSIIRIIISNFNSVEMKEFKVLYTKQGGVDTFLTTTKFDDNGKLIFTSVKEKARNKKFYDIEVVVLENGNKIEIKKYDKIRNQLIRYYEVEGTYKNTNNHGKKIILKVTDLYYDNISNPRGIRSKTSETERLLLSKDLIRKYSKIALCSEDEIDSKKLYKIKKFFNYRSNMLIYFNFINDFLTKGTEKKELWEIDTNSNENMDIILENIKNYLSIGIENYNNYVKNINKKISRENEEALQLRELSEDELREDILKIIKIFSSFRHKLMHYNYEFFEKLFDNEKVDLFQEDLRELLNLNLFKIIDLLKVERVRNKTNYITKDSKIILLGKIRSAKTTYEFYNDLCGRKNGFNNFINGFFVKDGIEDSDFKEVIRNSFNEDYKRLEKKKLKDENKPGKKKNNPGDYNKFLEKIYNFQNEYKDIFYWDINDSPKYKELYNERKELIEKYNKQINGIRDKKYIAELNKKLLSKKVKMDKITKDNSLIRLRYKLQIAYGFLMEEFKGDIEKFKTKFDTSRLEEIQGYYKKRNDYLNYQVDDKVKLNMNSLKNLFDETYINQPDKINEKNYSMKFYILNYILLPTEIRGDFLGFIKKYYYDIKNVDFVDENLKENELEKCLEKETFFHDIRLFEKNIKHYQLINYELVDFYNLRDKLGEYLESLKITNWRSQNYRNSSDRNIFGKNIILPIFKFYENIFKLLNDIELHSIFHLMEKNSWNIIEEAILTINEGAENPLRINFSKLLNSIASSNRKPKVAIDFQIRNDIAHMSYYNTLENILFETDIDFYSHLSEKAIKELSDKKIKQVEKKKVETINERVDTIINGSEVRKILNMNLGFNFINDYYMRKEKFIFNQRGLEKEDILNPQQKEQKEMEKEILSFYKVNRDNQISLNKLYSYGKDLLEGNYKSNKELWNILQNKKIIMNKGETNTLSYYHKNPSEEQLDKIKKFIYREGSHLLGVYKKIMIRKIKESLIKKFTKNENKYLKVILTDTSSLEKNKNKEYTVILKREDISEKFIILDEKNLNNKEGLKRKDITKEIEIITDDNEKFYLNNKENFEEKRLIVDFSKKFNEENNNKIFVPGKYIYKIKEKI

SEQ ID NO: 2789 - protein, 1149 aa, Artificial
  Synthetic
MENKNKSNRGSIVRIIISNYDMKGIKELKVRYRKQAQLDTFILQTTLDKSNNSILISEFRVKVREKYRYSFTYDGKEKFSVPSNSVIVTKIDNAAPEKSKEIRKYKITLGIDEKCKTGSMITAAIEDLLEDDRVREGIRNPRRKVSKTERKLIAETICHNYAQIAQCPVEEIDAVKIYKVKRFLSYRSNMLLFFALINDFLCKNLKDKKGEKIREIWKIENKGNKNWIDYDRYYNILVAQIKEYFTKEIENYNNRIDNIISKKELLKYSEEKKESEKNKKLEELNKLESQKLQILTDEEIKADVIKIIKIFSDLRHSLMHYEYKYFENLFENKKNEELAELLNLNLFKNLTLLRQMKIENKTNYLEGSEKFNIIGKNIKAKEVLGHYNLLAEQKNGFNNFINSFFVQDGVENLEFKKLIDENFIKAQKELEEDIKNCKESVKKLEKKLKENPKKSEDLEKKLEKKQKKLKELKQELEKMKQHYQRLNCAYVWDIHSSTVYKKLYNKRKSLIEEYNKQINEIKDKEAITAINAELLRIKKEMEEITKSNSLFRLKYKMQIAYAFLEIEFGGSIAKFKDEFDCSKMEEVQEYLKKDIKYLKYYKDKEAQKNYEFPFEEIFEIKDTHNEEWLENTSENNLFKFYILTYLLLPMEFKGDFLGVVKKHYYDIKNVDFTDESEKELSQEQIDKMIGDSFFHKIRLFEKNTKRYEIIKYSILTSDEIKKYFESLELDVPYFEYEKGTDKIGIFNKNIILTIFKYYQIIFKLYNDLEIHGLFNISSDLNKILSDLKSNGNKNINFGKLLYLIKQNNNLSAEENHQKIQKNLEVEYWKKSLPTPEKKEIKIKTEEELEKLKKISDLRNGICHLNYKEMIEEILKPEISEKNKEATLNEKIRELINFIKENELDKVELGFNFINDFFMKKEQFMFGQIKQVKEGNSDSITTEREKKEKNNKKLKETYELNYDNLSEFYETSNNLRERANSSSLLEDSAFLKKVGLYKIIPEKRRNNKANTKVKDEEKRIENIKRKLLKDSSDIMGMYKAEVVKKLKEKLILIFKHDEEKRIYVTVYDTSKAVPENISKEILVKRNNSKEEYSFEDNNKKYVTEYYTLEITETNELKVIPAKKLEGKEFKTEKNKLMLNNHYCFNVKIIY

SEQ ID NO: 2790 - protein, 1149 aa, Artificial; identical to SEQ ID NO: 2787
  Synthetic

SEQ ID NO: 2791 - protein, 1035 aa, Artificial; identical to SEQ ID NO: 2774
  Synthetic

SEQ ID NO: 2792 - protein, 1035 aa, Artificial; identical to SEQ ID NO: 2774
  Synthetic

SEQ ID NO: 2793 - protein, 1035 aa, Artificial; identical to SEQ ID NO: 2774
  Synthetic

SEQ ID NO: 2794 - protein, 1035 aa, Artificial; identical to SEQ ID NO: 2774
  Synthetic

SEQ ID NO: 2795 - protein, 1035 aa, Artificial; identical to SEQ ID NO: 2774
  Synthetic

SEQ ID NO: 2796 - protein, 1035 aa, Artificial; identical to SEQ ID NO: 2774
  Synthetic

SEQ ID NO: 2797 - protein, 1035 aa, Artificial; identical to SEQ ID NO: 2774
  Synthetic

SEQ ID NO: 2798 - protein, 1023 aa, Artificial
  Synthetic
MGEEKKDSYGTKKKSWPKCYGLKSVLDYQGHIVVTSVAKEADTAKNETGGFDQETQPDCTLIRGVDDMEFSLADGEKKIKVKAKDAKQDFLVEKPFSYAKTEDGAPKLSPKEDYLGIAKYICHDIFGQPLEERYDDNIHYQIAYNIADLEKIIFYEVNDACFAVDNILKAKDFDEAASLRPIDRSTLSKEEVKRAEMERDFIGEFNPKPTFNEEVAFAASKPTDEDGKAKVMAANVQLDTFARFNRLAEPYSPFFNSLFIYRDKKIESRKQPGDDYFAEHNYNVIRVLASLRHFFTHRTWGKADVADGEASDTSFFDFSHELVNKYKGVADFASMTFANKANELNESFANTCATDLVILCAYFGTDTKDEAGVRKHLRSYYDFVVGESAKNIGINMTKVREKMIDAHYGEGSDNNLRSKEHDSYRGRLYRLFSYVLFLDVESDPTKFVDPNVAKLRLARTDEDKGAIYAQMAEDCFQAFKDDFSEMIRLVRENVRINGEKSKQKFPFAITVENPLLGDEETLIFVQMVFFLSLFLGEKESNDLLTSLSNKFDNIVQFMKVLVFLDPEHKQVHINGKYSLFRVENAEKIATQLRVAQKVSRMRKNLKKADVSASLLGEAMNVFSRHDFYAPDDVGADGKVVRDPRLAKMLDDTFNSKKGSDDRTFRNFLLNNVLASRRFAYIIRYFDARGVRRLMDADSAVRFVLGTIPETQIRRYYGVMAQNPAPLPQMIDFLASQMKLLDIDFLLGKKGAMQQWAKSVGRVPADKQVFLTQVGLYLTVAYLIVKNVVNANARFSSAFASYECDRSLYAKSMGEKAVSKAGGDLNSYDADLTRFFIGQLPGKDADGNDALVGLNKYYFKSQRYLLDYCRYFERLEKECNIDKLSVGKLYRNHVVHLNYIAGLANIKEIEHVRSYYDIYVYLVEKGMVTSFEDPATKAIVLASVPSDGADKPADKSLLADLKFSLDKYHSYSWMFFKWLNAMFGYCLPRFQNLTTANLFNERDYGRSVIKRPEPKSQFDAAKAK

SEQ ID NO: 2799 - protein, 946 aa, Artificial
  Synthetic
MKKFSNIKRLGVKSVHYANNTVIVEDHFSKNTNILFTAEYENIDDLKSCTNIDKTAENKGVRFTDLKNKNGFELSAMAQKQILKSRVNRVKKVSYTQELFDITTDNNIEVQIFSNLEDVKKVIAPYYNNVAYAINSLYRDISNDDSYGFDKIGSIPVDADWYNFLKDAPDKKEKWTTYIIPSYKKVIARFGIQMEKNQQVNFCKCLEYVAIRNGLFVKFKDEKVDPDKLLNKKIQEKLDKLISDKEVNDKLFELAKTPVSEFCAEANAIPLYRYAFIGQKGKRIEKIVLDKLEENEILSSLVRKIDENETTYNYLRLLSAIRQYVVHNSRKVRIDKNVFINDTAKRDVEEFAKQFQKNNYKYFCILKELYSDSDILEQFFDYTVFDEARNLKISIDKIKKGITANIDISADVEPDKLSEYANKFRTVTMFALTKYLKENVGEIEDFLANIKVCSSDEEKAGVYEQKAKEFITKFDSFKDIRSVVKKHLGTQKVNEKFDFYPSDINFGRDSNVFFNMLYVMSKFLTVNEARIMFQKIKSKYDSVKSLLKIAELTGVTLSDNLFDRFRMIFDKERVDEYQKQLIVLQSIRTRNGVSQEGFAKELKRIFDMFKKDDISYEEFEKELSLDENQNEIKNKSFKLKPLKSYLRNDVYKSKQYQYISSFASAGICQKIMENKDIVAFVLNGMLYQEGKLSMPMHKYVAKVYHDFRREKIDENSANYLLDQNQISSLVNSLCDLKLENIIEAIFKESRVNYKALVRLYLNICYLFVKNIISLNSTYLIQFQDYENIYKQLHLEDLMDITYDFGVLNNFVENAPNKKCRSYMQLQTLLEKDYIKDYIYTPEYQVLQDRYRNLVVHSSLLFGLDKIDFDFGEVQNISSYFAIYQTLVQRLVEQDAREVWGEKFDEYFALNNGKTYSTKLCIALNMPYAYNISRFNNNTIEKYSNKR

SEQ ID NO: 2800 - protein, 960 aa, Artificial
  Synthetic
MAKKLNAKEKRLLSQQAQKDKYKKMEEERQAAEQARLAEEARQKAETERKKKEALEKEAREKLEKELLEKNPSLKKVKKSKAKAAGLKSTFAIGNELLMTSFGKGNEAVPEHYIFENGMISMQNPPAFDVENRGTSFSIAGKNAMNAIADDPRRTSKKVIGEDLIGAKSALEKRYFGKTFEDNIHIQLIYNILDIEKILSKHINNIVFSINNIRGIADPERDDLIGYMSLRDSYEYFMDEKNEKRKVLRESYRKLFKSSRLSYFGSAFYVEKQSTQKKKSGQKNFELRNEKDCYYMLALLGELRQVLAHSSAQKQGKEQTEARSSVYNLRTVGNNDMRKILNSLYAERVDALNENFMNYAKKDLTILFGIMDASSYEKKAEIARDFYDFTVRKSYKNIGFSIKKIRERMMDCFFANVKEITPDSPDFQSVRQKFYKILDFLLFTYYKDNKEETKKIIAALRASLTELEKELFYQKQANILWNKMQMVVTEQIYPRTKGSAIQNLIADPEISADMLKGVMITPESVDYFSKMIYLLTLFIDGKEINDLLTTMINKFENIASFVSVLKDRGLPCNFRNDYSVFNNALKISAELREINSFARMEKATPGAKKQMFLDAAIILGSNESAEELSEYFDEMLDKQKGKRTPGGKKDMGFRNFLIKNVIESDRFHYLIRYGHPLHIRKLAENKNVIAFVLKQIPEPQIDRYCKICALPAESNFAQKILRLTDLIAEMNFRQFENVRQTEKNEQKQILQGILSLYLTVLYLLTKNLVYVNSRYFLAFHCLERDTELLGSQAGHKNAEKQLIASYSALTQQFLDEGKLNRHAREYLTVNIQNSDDWTIAQYRNNAAHLNAIRNAHLYIREMKSVRSYFELYHYLTQRALLDKYENVPYHPQVNEKTLKYFELLKENGWYCKDFVKALNVPFGYNLPRYKNLSIDALFDKDRPQEEDENHLYTCQNIKKS

SEQ ID NO: 2801 - protein, 946 aa, Artificial; identical to SEQ ID NO: 2799
  Synthetic

SEQ ID NO: 2802 - protein, 1141 aa, Artificial
  Synthetic
MGVEKNKVFESVIMNFDQERKYGFIEYKETNNLFFHMENVKNPKEIVKGAKVRFEIYENPKPKKQNQRFSAINVEVITDETHKEAKIQKNEFKTFDQFTKELQETQKVNGETKKEHITKNKHTNVKAAGVKSVFAVDDGNVLITSFGRGNAADIETLKSDDDKTINLTETENQKKYVVTNKRSNVKGLADNPTKVESIIPGETQIGFKSILEKHFFGRTFNDNIHIQIIHNILDIKKILAVHTNNIVYALDNIHERGRENSAEKPIDMIGAGGISTSKEYEQYCSEKSDYEDNFLKQLINNERIAYFGNAFFKDEGNKKVMRTEKEIYYILGMLNEVRNVSTHFTEEDNRDWAKANLYNLSNRLKVGSKEVLNQLYKEKIDKIDANGFVNKGCKRDFSILFKSLNLTTDKDKGELVVGFYDFSIRKNYKNIGFSIKTLREYMLKISNSTLCADTISNNAIRPKAYKLYDFIIWHYYMNKPDKINDFVEKLRTQNKNDEKIKLYYDEAVCLLSELGREIHTMTSCVHNIENTSYEITDKKQKEYYKMQINSLNSADKVSDFSKVIYLVTLFLDGKEINDLLTTLINKFDNIASLLSVLEKQSGKKVEFVENYSFFNSSNLLKEKTLNKSENYTCKIVEELREINSFARMTGDCKIRKSAFEDASQLLGYHDKTVNNLFEVLRLKELESKDWKKRTDDEQQEYDRLLNKHHYFKSGKKLPDTGLRNFIINNVIESRRFNYIVRYADPKKIRKCTENNELLKFAFKDVPDSQVDRYYNICVTNKITNATREEKIERLVDIIKSMNLSKVATVKQRDKQDNVEKQKQLAIMSLYLNILYQIAKNLVYVNSRYVMAFHSLERDSQMLFDAYYDVKRGYCDLSTVLLFGVDDLQNRNRGSYKYLRDNRRSNKDVIETFGDFKGKVSKVVEKKNQGLTNEIYDSLCNVAGTTKTEVQNEIKSILKSNGLDESASSYLSHKLVNKVHSYKYLKQNLDCADNTMINQFRNNVAHLNTIRNMDGIENVTGITSYFQIYHYLMQKALYKEFKKCRENAVRKWIPYITENAEPKYVYWNKKEQQEVEVSFNPKIFGYMENIKNHSNTYCKDFVKALCAPFAYNLPRFKNLSIEELFDMHELSEEPKESMKLTD

SEQ ID NO: 2803 - protein, 1023 aa, Artificial; identical to SEQ ID NO: 2798
  Synthetic

SEQ ID NO: 2804 - protein, 1023 aa, Artificial; identical to SEQ ID NO: 2798
  Synthetic

SEQ ID NO: 2805 - protein, 1023 aa, Artificial; identical to SEQ ID NO: 2798
  Synthetic

SEQ ID NO: 2806 - protein, 1141 aa, Artificial; identical to SEQ ID NO: 2802
  Synthetic

SEQ ID NO: 2807 - protein, 960 aa, Artificial; identical to SEQ ID NO: 2800
  Synthetic

SEQ ID NO: 2808 - protein, 1141 aa, Artificial; identical to SEQ ID NO: 2802
  Synthetic

SEQ ID NO: 2809 - protein, 946 aa, Artificial; identical to SEQ ID NO: 2799
  Synthetic

SEQ ID NO: 2810 - protein, 960 aa, Artificial; identical to SEQ ID NO: 2800
  Synthetic

SEQ ID NO: 2811 - protein, 946 aa, Artificial; identical to SEQ ID NO: 2799
  Synthetic

SEQ ID NO: 2812 - protein, 960 aa, Artificial; identical to SEQ ID NO: 2800
  Synthetic

SEQ ID NO: 2813 - protein, 946 aa, Artificial; identical to SEQ ID NO: 2799
  Synthetic

SEQ ID NO: 2814 - protein, 960 aa, Artificial; identical to SEQ ID NO: 2800
  Synthetic

SEQ ID NO: 2815 - protein, 922 aa, Artificial
  Synthetic
MAKKNKMKPRELREAQKKARQLKAAEINNNAAPAIAAMPAAEVIAPAAEKKKSSVKAAGMKSIFVSENKMYITSFGKGNSAVLEYEVDNNDYNQTQLSSKGSSNIELHGVNEVNITFSSKHGFGSGVEINTSNPTHRSGESSPVRWDMLGLKSELEKRFFGKTFDDNIHIQLIYNILDIEKILAVYVTNIVYALNNMLGVKGSESYDDFMGYLSARNTYEVFTHPDKSNLSDKAKGNIKKSFSTFNDLLKTKRLGYFGLEEPKTKDTRVSQAYKKRVYHMLAIVGQIRQSVFHDKSSKLDEDLYSFIDIIDPEYRETLDYLVDERFDSINKGFIQGNKVNISLLIDMMKGYEADDIIRLYYDFIVLKSQKNLGFSIKKLREKMLDEYGFRFKDKQYDSVRSKMYKLMDFLLFCNYYRNDVAAGEALVRKLRFSMTDDEKEGIYADEAAKLWGKFRNDFENIADHMNGDVIKELGKADMDFDEKILDSEKKNASDLLYFSKMIYMLTYFLDGKEINDLLTTLISKFDNIKEFLKIMKSSAVDVECELTAGYKLFNDSQRITNELFIVKNIASMRKPAASAKLTMFRDALTILGIDDNITDDRISEILKLKEKGKGIHGLRNFITNNVIESSRFVYLIKYANAQKIREVAENEKVVMFVLGGIPDTQIERYYKSCVEVPDMNSSLEAKRSELARMIKNISFDDFKNVKQQAKGRENVAKERAKAVIGLYLTVMYLLVKNLVNVNARYVIAIHCLERDFGLYKEIIPELASKNLKNDYRILSQTLCELCDDRDESPNLFLKKNKRLRKCVEVDINNADSSMTRKYRNCIAHLTVVRELKEYIGDIRTVDSYFSIYHYVMQRCITKREDDKKQEEKIKYEDDLLKNHGYTKDFVKALNSPFGYNIPRFKNLSIEQLFDRNEYLTEK

SEQ ID NO: 2816 - protein, 957 aa, Artificial
  Synthetic
MILILGEGTIRMAKKKNARQRREEEKNRIKAIIEKIKNKVVEKEETEEIVENNETKNVESIVVEPKKKSLAKASGVKSVFINNDEIIMTSFGRGNDAVIEKIIKDNNIDNENKDKPVYDVVAIENEGNIIKVQSERFKAIESANTEIPPERNGMDLIKRKDKLEEVYFGHTFNDNIHIQLIYNILDIEKILSVYINNIVYALGNLERKDTDEEKDLIGYSSARAKYEDFIENEKLEDRKKLLEEFIENGDRLGYFGNVFFKNDKELKSKKEIYNILGLLGSLRQFCFHYNEAVFENEEGKINQEYKSNSWLYNLGQLFDEFKDTLNGFYNEKIDSINKDFIKTNQINLHIICSELGMNMDKEQVVGDYYDFIISKKHKNMGFSIKKIREYMFDIYEAFDIKDKEFDSVRSILYKIIDFIIYYSFIHYKNDIAENIVSRLRVSLSEEDKDKVYEEIARDTWNEYKDQINKLKELLTKRIGEFSDAKNKNVYYKEFESIKFDEIGKKKLGENADYFCKLMYLLTLFLDGKEINDLLTTLINKFDNIRSFIEIMEEKQIECNFDEKFSFFDESKNVCDTLREVNSFARMQRPLDNKSVQREMYRDAIKILLKDTWVEEKNIDRILDEYIPNKENKSIKKDFRNFIIKNIIKSNRFIYLIKYSNPTDVRKLASNKDVVKFVLNTIPEAQIDRYYNSCGLPLEEDNNVQIEKLSEIITNIDYIEFLDVQQSYKNEDKSQKQAVVTLYLTILYILTKNLVNVNSRYVIALHCLERDSTLYGIKLKKEKNKPSKYHKLTQYFIDNRYFDRKKKDRKNGEYVSKKISGYIEKNMKNYIECEQIETTEQYKETGVDMFINYRNSIAHLNTVRKASKYIKDIKYFGTYFELYHYIMQRYLKDNIELKGENNALEGYFDNLCKYGTYVKDFVKTLNVPFAYNYPRYKNLSIDELFDKNNTRKTKKSSL

SEQ ID NO: 2817 - protein, 922 aa, Artificial
  Synthetic
MAKKNKMKPRELREAQKKARQLKAAEINNNAAPAIAAMPAAEAAAPAAEKKKSSVKAAGMKSILVSENKMYITSFGKGNSAVLEYEVDNNDYNKTQLSSKGSSNIELHGVNEVNITFSSKHGFESGVEINTSNPTHRSGESSPVRGDMLGLKSELEKRFFGKTFDDNIHIQLIYNILDIEKILAVYVTNIVYALNNMLGEGDDESHDDFMGYLSTFNTYKVFTNPNGSTLSDDKKENIRKSLSKFNALLKTKRLGYFGLEEPKTKDTRASEAYKKRVYHMLAIVGQIRQSVFHDKSNELDEYLYSFIDIIDSEYRETLDYLIDERFDSINKGFIQGNKVNISLLIDMMKGYEADDIIRLYYDFIVLKSQKNLGFSIKKLREKMLDEYGFRFKDKQYDSVRSKMYKLMDFLLFCNYYRNDVVAGEALVRKLRFSMTDDEKEGIYADEAEKLWGKFRNDFENIADHMNGDVIKELGKADMDFDEKILDSEKKNASDLLYFSKMIYMLTYFLDGKEINDLLTTLISKFDNIKEFLKIMKSSAVDVECELTAGYKLFNDSQRITNELFIVKNIASMRKPAASAKLTMFRDALTILGIDDKITDDRISEILKLKEKGKGIHGLRNFITNNVIESSRFVYLIKYANAQKIREVAKNEKVVMFVLGGIPDTQIERYYKSCVEFPDMNSSLEVKRSELARMIKNISFDDFKNVKQQAKGRENVAKERAKAVIGLYLTVMYLLVKNLVNVNARYVIAIHCLERDFGLYKEIIPELASKNLKNDYRILSQTLCELCDNRDESPNLFLKKNKRLRKCVEVDINNADSSMTRKYRNCIAHLTVVRELKEYIGDIRTVDSYFSIYHYVMQRCITKREDDKKQEEKIKFEDDLLKNHGYTKDFVKALNSPFGYNIPRFKNLSIEQLFDRNEYLTEK

SEQ ID NO: 2818 - protein, 939 aa, Artificial
  Synthetic
MAKKKRITAKERKQNHRESLMKKADSNAEKEKAKKPVVENKPDTAISKDNIPKPNKEIKKSKAKLAGVKWVIKANDDVAYISSFGKGNNSVLEKRIMGDVSSNVNKDSHMYVNPKYTKKNYEIKNGFSSGSSLVTYPNKPDKNSGMDALCLKPYFEKDFFGHIFTDNMHIQAIYNIFDIEKILAKHITNIIYTVNSFDRNYNQSGNDTIGFDINYRVPYSEYGGGKDSNGEPKNKSKWEKRKNFIKFYNKSKPHLGYYENIFYDHGEPISEEKFYNYLNILNFIRNNTFHYKNDDIELYSENYSEEFVFINCLNKFVKNKFKNVNKNFISNEKNNLYIILNAYGKDTENVEVVKKYSKELYKLSVLKTNKNLGVNVKKLRESAIEYGYCPLPYDKEKEVAKLSSIKHKLYKTYDFVITHYLNSNDKLLLEIVEALRLSKNDDEKENVYKKYAEKLFKADDVINPIKAISKLFAEKGNKLFKEMVIIKKEYVEDISIDKNIYDFTKVIFFMTCFLDGKEINDLLTNIISKLQVIEDHNNVIKFISNNKDAVYKDYSDKYAIFRNAGKIATELEAIKSIVRMENKIENAPQEPLLKDALLSLGVSDDTKVLENTYKKYFDSKEKADKQSQKVSTFLMNNVINNNRFKYVIKYINPADINGLAKNRYLVKFVLSNIPEEQIDSYYKLFSNEEEPSCEEKIKLLTKKISKLNFQTLFENNKIPNVEKERKKAIITLYFTIVYILVKNLVNINGLYTLALYFVERDGYFYKDICGKKDKKKSYNGVDYLLLPEIFSGSKYREQTKNLKLPKEKDRDIMKKYLPNDKDREGYNKFFRAYRNNIVHLNIIAKLSELTSNIDKDINSYFDIYHYCTQRVMFNYCKENNNIVLAKMKDLAHIKSDCDEFSSKHTYPFSSAVLRFMNLPFAYNVPRFKNLSYKKFFDKQ

SEQ ID NO: 2819 - protein, 922 aa, Artificial
  Synthetic
MAKKNKMKPRELREAQKKARQLKAAEINNNAVPAIAAMPAAEVIAPAAEKKKSSVKAAGMKSILVSENKMYITSFGKGNSAVLEYEVDNNDYNKTQLSSKDNSNIELGDVNEVNITFSSKHGFESGVKINTSNPTHRSDESSPVRGDMLGLKSELEKRFFGKTFDDNIHIQLIYNILDIEKILAVYVTNIVYALNNMLGIKDSESHDDFIGYLSTNNIYDVFIDPDNSSLSDDKKANVRKSLSKFNALLKTKRLGYFGLEEPKTKDTRVSQAYKKRVYHMLAIVGQIRQCVFHDKSGAKRFDLYSFINNIDPEYRETLDYLVDERFDSINKGFIQGNKVNISLLIDMMKGYEADDIIRLYYDFIVLKSQKNLGFSIKKLREKMLDEYGFRFKDKQYDSVRSKMYKLMDFLLFCNYYRNDVVAGEALVRKLRFSMTDDEKEGIYADEAAKLWGKFRNDFENIADHMNGDAIKELGKADMDFDEKILDSEKKNASDLLYFSKMIYMLTYFLDGKEINDLLTTLISKFDNIKEFLKIMKSSAVDVECELTAGYKLFNDSQRIANELFIVKNIASMRKPAASAKLTMFRDALTILGIDDNITDDRISEILKLKEKGKGIHGLRNFITNNVIESSRFVYLIKYANAQKIREVAKNEKVVMFVLGGIPDTQIERYYKSCVEFPDMNSSLEAKRSELARMIKNISFDDFKNVKQQAKGRENVAKERAKAVIGLYLTVMYLLVKNLVNVNARYVIAIHCLERDFGLYKEIIPELASKNLKNDYRILSQTLCELCDDRDESPNLFLKKNKRLRKCVEVDINNADSSMTRKYRNCIAHLTVVRELKEYIGDIRTVDSYFSIYHYVMQRCITKRENDTKQEDKIKYEDDLLKNHGYTKDFVKALNSPFGYNIPRFKNLSIEQLFDRNEYLTEK

SEQ ID NO: 2820 - protein, 1666 aa, Artificial
  Synthetic
  misc_feature (50)..(620): Xaa can be any naturally occurring amino acid
  misc_feature (1215)..(1663): Xaa can be any naturally occurring amino acid
LSTSKRGIFQGFARLVPHKTTDKIVLFFVTGISAFRLRLSVSICSSQREXXXXXXXXXXXXXXXXXXXXXXXXXXXXXXXXXXXXXXXXXXXXXXXXXXXXXXXXXXXXXXXXXXXXXXXXXXXXXXXXXXXXXXXXXXXXXXXXXXXXXXXXXXXXXXXXXXXXXXXXXXXXXXXXXXXXXXXXXXXXXXXXXXXXXXXXXXXXXXXXXXXXXXXXXXXXXXXXXXXXXXXXXXXXXXXXXXXXXXXXXXXXXXXXXXXXXXXXXXXXXXXXXXXXXXXXXXXXXXXXXXXXXXXXXXXXXXXXXXXXXXXXXXXXXXXXXXXXXXXXXXXXXXXXXXXXXXXXXXXXXXXXXXXXXXXXXXXXXXXXXXXXXXXXXXXXXXXXXXXXXXXXXXXXXXXXXXXXXXXXXXXXXXXXXXXXXXXXXXXXXXXXXXXXXXXXXXXXXXXXXXXXXXXXXXXXXXXXXXXXXXXXXXXXXXXXXXXXXXXXXXXXXXXXXXXXXXXXXXXXXXXXXXXXXXXXXXXXXXXXXXXXXXXXXXXXXXXXXXXXXXXXXXXXXXXXXXXXXXXXXXXXXXXXXXXXXXXXXXXXXXXXXXXXXXXXXXXXXXXXXXXXXXXXXXXLGLKNALEERFFGRTFDDTIHIQIIYNILDIEKILAVYATNISAALNHMTDEEPDKDFIGYMGTINTYDVFLNPSINPSLDTKKINNIDSNRALFESLLRNRRLGYFGFTYDPNLTADKKLPENEKDRKKIQKQIQKNEEEKKRIYHLLALAGQLRQWSFHGNSEGIRNPLWLYQLETSTDREFLLTLDHYFDDRFNDINKDFIKQNEVNLAKLEIVYGKKNFEKVAKRYYDFIVYKHYKNMGFSIKKLRETMFTFDGGEQITSPRMDSVRDKLYKLMDFCLYWFYMENPEKIDENVNILRAAVSEEEKEKFYTEEAGRLWEKFRRRFLDFCDHSRDKDFLKPKVNINQWESRVDVSKLSLQGDVSYFAKLLYAICFFLDGKEINDLLTTLINKFDNIRSFIATGKTLGLDVSFQSEYDFFNQDCARYVAELNLVKNIARMKKPDLSAKQTMYRDALHILGVSKDMTDEAFEEELNTMLDTDDGDTNFRNFICNNVIKSNRFIYVIKFCKAETVHKFAENTVLTEFVLRRMPETQINRYYQSCFGIKNPVDYSLDRKVEDLADMMKELHFDDFKDVKQKTETREERMRKERYKAXXXXXXXXXXXXXXXXXXXXXXXXXXXXXXXXXXXXXXXXXXXXXXXXXXXXXXXXXXXXXXXXXXXXXXXXXXXXXXXXXXXXXXXXXXXXXXXXXXXXXXXXXXXXXXXXXXXXXXXXXXXXXXXXXXXXXXXXXXXXXXXXXXXXXXXXXXXXXXXXXXXXXXXXXXXXXXXXXXXXXXXXXXXXXXXXXXXXXXXXXXXXXXXXXXXXXXXXXXXXXXXXXXXXXXXXXXXXXXXXXXXXXXXXXXXXXXXXXXXXXXXXXXXXXXXXXXXXXXXXXXXXXXXXXXXXXXXXXXXXXXXXXXXXXXXXXXXXXXXXXXXXXXXXXXXXXXXXXXXXXXXXXXXXXXXXXXXXXXXXXXXXXXXXXXXXXXXXXXXXXXXXXXXXXXXXXXXXXXXXXXXXXXXXXXXXXXXXXXXXXXXXXXXXXXXXXXXXXXXXXXXXXXXXXSSI

SEQ ID NO: 2821 - protein, 922 aa, Artificial
  Synthetic
MAKKNKMKPRELREAQKKARQLKAAEINNNAAPTIAAMPAAEVIAPAAEKKKSSVKAAGMKSILVSKNKMYITSFGKGNSAVLEYEVDNNDYNKTQLSSKDNSNIELGNVNEVNITFSSRRGFESGVEINTSNPTHRSGESSSVRGDMLGLKSELEKRFFGKTFDDNIHIQLIYNILDIEKILAVYVTNIVYALNNMLGVKGSESYDDFMGYLSAQNTYYIFTHPDKSNLSDKVKGNIKKSLSKFNDLLKTKRLGYFGLEEPKTKDKRVSEAYKKRVYHMLAIVGQIRQSVFHDKSNELDEYLYSFIDIIDSEYRDTLDYLVDERFDSINKGFVQGNKVNISLLIDMMKGYEADDIIRLYYDFIVLKSQKNLGFSIKKLREKMLDEYGFRFKDKQYDSVRSKMYKLMDFLLFCNYYRNDVVAGEALVRKLRFSMTDDEKEGIYADEAAKLWGKFRNDFENIADHMNGDVIKELGKADMDFDEKILDSEKKNASDLLYFSKMIYMLTYFLDGKEINDLLTTLISKFDNIKEFLKIMKSSAVDVECELTAGYKLFNDSQRITNELFIVKNIASMRKPAASAKLTMFRDALTILGIDDNITDDRISEILKLKEKGKGIHGLRNFITNNVIESSRFVYLIKYANAQKIREVAENEKVVMFVLGGIPDTQIERYYKSCVEVPDMNSSLEAKRSELARMIKNIRFDDFKNVKQQAKGRENVAKERAKAVIGLYLTVMYLLVKNLVNVNARYVIAIHCLERDFGLYKEIIPELVSKNLKNDYRILSQTLCELCDERDKSPNLFLKKNKRLRKCVEVDINNADSIMTRKYRNCIAHLTVVRELKEYIGDIRTVDSYFSIYHYVMQRCITKRENDTKQEDKIKYEDDLLKNHGYTKDFVKALNSPFGYNIPRFKNLSIEQLFDRNEYLTEK

SEQ ID NO: 2822 - protein, 918 aa, Artificial
  Synthetic
MAKKNKMKPRELREAQKKARQLKAAEINNNAVPAIAAMPAAEAAAPAAEKKKSSVKAAGMKSILVSENKMYITSFGKGNSAVLEYEVDNNDYNKTQLSSKDNSNIELCDVGKVNITFSSRRGFESGVEINTSNPTHRSGESSSVRGDMLGLKSELEKRFFGKNFDDNIHIQLIYNILDIEKILAVYVTNIVYALNNMLGEGDESNYDFMGYLSTFNTYKVFTNPNGSTLSDDKKENIRKSLSKFNALLKTKRLGYFGLEEPKTKDTRASEAYKKRVYHMLAIVGQIRQCVFHDKSGAKRFDLYSFINNIDPEYRETLDYLVDERFDSINKGFIQGNKVNISLLIDMMKGYEADDIIRLYYDFIVLKSQKNLGFSIKKLREKMLEEYGFRFKDKQYDSVRSKMYKLMDFLLFCNYYRNDIAAGEALVRKLRFSMTDDEKEGLYADEAAKLWGKFRNDFENIADHMNGDVIKELGKADMDFDEKILDSEKKNASDLLYFSKMIYMLTYFLDGKEINDLLTTLISKFDNIKEFLKIMKSSAVNVECELTAGYKLFNDSQRITNELFIVKNIASMRKPAASAKLTMFRDALTILGIDDKITDDRISEILKLKEKGKGIHGLRNFITNNVIESSRFVYLIKYANAQKIRKVAENEKVVMFVLGGIPDTQIERYYKSCVEFPDMNSSLEVKRSELARMIKNISFDDFKNVKQQAKGRENVAKERAKAVIGLYLTVMYLLVKNLVNVNARYVIAIHCLERDFGLYKEIIPELASKNLKNDYRILSQTLCELCDKSPNLFLKKNERLRKCVEVDINNADSSMTRKYRNCIAHLTVVRELKEYIGDIRTVDSYFSIYHYVMQRCITKRENDTKQEEKIKYEDDLLKNHGYTKDFVKALNSPFGYNIPRFKNLSIEQLFDRNEYLTEK

SEQ ID NO: 2823 - protein, 946 aa, Artificial; identical to SEQ ID NO: 2799
  Synthetic

SEQ ID NO: 2824 - protein, 1141 aa, Artificial; identical to SEQ ID NO: 2802
  Synthetic

SEQ ID NO: 2825 - protein, 919 aa, Artificial
  Synthetic
MAKKNKMKPRELREAQKKARQLKAAEINNNAAPAIAAMPAAEVIAPAAEKKKSSVKAAGMKSILVSKNKMYITSFGKGNSAVLEYEVDNNDYNQTQLSSKNSSNIELHGVNEVNITFSSKHGFESGVEINTSNPTHRSGESSPVRGDMLGLKSELEKRFFGKTFDDNIHIQLIYNILDIEKILAVYVTNIVYALNNMLGEGDDESHDDFMGYLSAKNTYDVFTDPDESDLSKNIKGNIKKSLSKFNDLLKTKRLGYFGLEEPKTKDTNALEAYKKRVYHMLAIVGQIRQSVFHDKSSKLDEDLYSFIDIIDSEYRETLDYLVDERFDSINKGFIQGNKVNISLLIDMMKGYEADDIIRLYYDFIVLKSQKNLGFSIKKLREKMLEEYGYRFKDKQYDSVRSKMYKLMDFLLFCNYYRNDVVAGEALVRKLRFSMTDDEKEGIYADEAAKLWGKFRNDFENIADHMNGDVIKELGKADMDFDEKILDSEKKNASDLLYFSKMIYMLTYFLDGKEINDLLTTLISKFDNIKEFLKIMKSSAVDVECELTAGYKLFNDSQRITNELFIVKNIASMRKPAASAKLTMFRDALTILGIDDKITDDRISEILKLKEKGKGIHGLRNFITNNVIESSRFVYLIKYANAQKIREVAENEKVVMFVLGGIPDTQIERYYKSCVEFPDMNSPLEAKRSELARMIKNIRFDDFKNVKQQAKGRENVAKERAKAVIGLYLTVMYLLVKNLVNVNARYVIAIHCLERDFGLYKEIIPELASKNLKNDYRILSQTLCELCDKSPNLFLKKNERLRKCVEVDINNADSSMTRKYRNCIAHLTVVRELKEYIGDIRTVDSYFSIYHYVMQRCITKREDDIKQEEKIKYEDDLLKNHGYTKDFVKALNSPFGYNIPRFKNLSIEQLFDRNEYLTEK

SEQ ID NO: 2826 - protein, 926 aa, Artificial
  Synthetic
MLLCAIIQASTKRDRKGGVRMEREVKKPPKKSLAKAAGLKSTFVISPQEKELAMTAFGRGNDALLQKRIVDGVVRDVAGEKQQFQVQRQDESRFRLQNSRLADRTVTADDPLHRAETPRRQPLGAGMDQLRRKAMLEQKYFGRTFDDNIHIQLIYNILDIHKMLAVPANHIVHTLNLLGGYGETDFVGMLPAGLPYDKLRVVKKKNGDTVDIKADIAAYAKRPQLAYLGAAFYDVTPGKSKRDAARGRVKREQDVYTILSLMSLLRQFCAHDSVRIWGQNTPAALYHLQALPQDMKDLLDDGWRRALGGVNDHFLDTNKVNLLTLFEYYGAETKQARVALTQDFYRFVVLKEQKNMGFSLRRLREELLKLPDAAYLTGQEYDSVRQKLYMLLDFLLCRLYAQERADRCEELVSALRCALSDEEKGAVYQAEAAALWQALGDTLRRELLPLLKGKKLQDKDKKKLDELGLSRDVLDGVLFRPAQQGNRANADYFCRLMHLSTWFMDGKEINTLLTTLISKLENIDSLRSVLESMGLACSFVPAYAMFDHSRYIAGQLRVVNNIARMRKPAITAKREMYRAAVVLLGVDSPEAAAAITDDLLQIDPETGKVRPRGDSTRDTGLRNFIANNVVESRRFTYLLRYMTPEQARVLAQNEKLIAFVLSTVPSAQLERYCRTCGWEDITDRPAQIRYLTAQIMGVRYESFTDVEQRGRGDNPKKERYKALIGLYLTVLYLAVKNMVNCNARYVIAFYCRDRDTALYQKEVCWYDLEEDKKSGKQRQVEDYTALTRYFVSQGYLNRHACGYLRSNMNGISNGLLTAYRNAVDHLNAIPPLGGLCRDIGRVDSYFALYHYAVQQYLNGRYYRKTPREQELFAAMAQHRTWCSDLVKALNTPFGYNLARYKNLSIDGLFDREGDHVVREDGEKPAE

SEQ ID NO: 2827 - protein, 984 aa, Artificial
  Synthetic
MKKKNIRATREALKAQKIKKSQENEALKKQKLAEEAAQKRREELEKKNLAQWEETSAEGRRSRVKAVGVKSVFVVGDDLYLATFGNGNETVLEKKITPDGKITTFPEEETFTAKLKFAKTELTEATSIGISNGRIVLPEISVDNPLHTTMQKNTIKKSAGEDMLQLKDVLENRYFDRSFNNDLHIRLIYNILDIEKILAEYTTNAVFAIDNVSGCSDDFLSNFSTRNQWDEFQNPEQHREHFGNKDNVICSVKKQQDLFFNFFKNNRIGYFGKAFFHAESERKIVKKTAKEVYHILTLIGSLRQWITHSTEGGISRLWLYQLEDALSSEYQETMNNCYNSTIYGLQKDFEKTNAPNLNFLAEILGKNASELAEPYFRFIITKEYKNLGFSIKTLREMLLDQPDLQEIRENHNVYDSIRSKLYKMMDFVLVYAYSNERKSKADALASNLRSAITEDAKKRVYQNEADQLWTSYQELFKRIRGFKGAQVKEYSSQNMPIPIQKQIQNILKPAEQVTCFTKLMYLLTMFLDGKEINDLLTTLINKFDNISSLLKTMEQLELQTTFKEDYTFFQQSSCLCEEITQLKSFARMGNPISNLKEVMMVDAIQILGTEKSEQELQSMACFFFRDKNGKKLNAGEHGMRNFIGNNVISNTRFQYLIRYGNPQKLHTLSQNETVVRFVLSRIAKNQRVQGMNGKNQIDRYYETCGGTNSWSVSEEEKINFLCKILTNMSYDQFQDVKQSDKIITAEEKRKKERYKAIISLYLTVLYQLIKNLVNINARYIIAFHCLERDAILYSLKFNTSINLKKRYTALTEMILGYETDEKARRKDTRTIYEKAEAAKNRHLKNVKWNCKTRENLENADKNAIVAFRNIVAHLWIIRDADRFITEMGAMKRYFDCYHYLLQRELEYILEKSNQGSKYTKKSLEKVQQYHSYCKDFLHMLCLPFAYCIPRYKNLSIAELFDRHELEAEPKEEASPANNSQFITT

SEQ ID NO: 2828 - protein, 922 aa, Artificial
  Synthetic
MAKKNKMKPRELREAQKKARQLKAAEINNNAAPAIAAMPAAEVIAPAAEKNKSSVKAAGMKSILVSENKMYITSFGKGNSAVLEYEVDNNDYNKTQLSSKDNSNIELGDVNEVNITFSSKHGFGSGMKINTSNPTHRSGESSPVRWDMLGLKSELEKRFFGKTFDDNIHIQLIYNILDIEKILAVYVTNIVYALNNMLGVKGSESHDDFIGYLSTNNIYDVFIDPDNSSLSDDKKANVRKSLSKFNVLLKTKRLGYFGLEEPKTKDNRVSEAYKKRVYHMLAIVGQIRQCVFHDKSGAKRFDLYSFINNIDPEYRDTLDYLVEERLKSINKDFIQGNKVNISLLIDMMKGYEADDIIRLYYDFIVLKSQKNLGFSIKKLREKMLEEYGFRFKDKQYDSVRSKMYKLMDFLLFCNYYRNDVVAGEALVRKLRFSMTDDEKEGIYADEAAKLWGKFRNDFENIADHMNGDVIKELGKADMDFDEKILDSEKKNASDLLYFSKMIYMLTYFLDGKEINDLLTTLISKFDNIKEFLKIMKSSAVDVECELTAGYKLFNDSQRITNELFIVKNIASMRKPAASAKLTMFRDALTILGIDDNITDDRISEILKLKEKGKGIHGLRNFITNNVIESSRFVYLIKYANAQKIREVAKNEKVVMFVLGGIPDTQIERYYKSCVEFPDMNSSLEAKRSELARMIKNISFDDFKNVKQQAKGRENVAKERAKAVIGLYLTVMYLLVKNLVNVNARYVIAIHCLERDFGLYKEIIPELASKNLKNDYRILSQTLCELCDDRDESPNLFLKKNKRLRKCVEVDINNADSSMTRKYRNCIAHLTVVRELKEYIGDIRTVDSYFSIYHYVMQRCITKRENDTKQEEKIKYEDDLLKNHGYTKDFVKALNSPFGYNIPRFKNLSIEQLFDRNEYLTEK

SEQ ID NO: 2829 - protein, 1025 aa, Artificial
  Synthetic
MAKKITAKQKREEKERLNKQKWAKQDTPVVPKSKTEEKPVAASDDKLLKTTQVKKVQTKSKAKAMGLKTVLSFDDKIAIASFVNDKKTKLPHIERVTDKSGTTIHENARMFDSSVDEQNVNIEKRMTIEEKQNDGTFKKDEIDVKATVCNPYFKTCGKDYIGIKDVAEKYFFGKTFPNENLRVQIAYNVFDIQKILGTYVNNIIYSFYNLRRDGKSDVDIIGSLYAFADFDNQLKDKPAFREAKDLLKNTEAYFSYFGDVFKKSKKGKKDENNEDYEKNLRHNFNVLRVLSFLRQICTHAYVKCTSGAKNNGDSTKTESLDALFNITEYFDKTAPELSKTINEIYKEGVDRINNDFVTNGKNNLYILSKVYPDMQRNELVKKYYQFVVCKEGNNVGINTRKLKESIISQNPWITTPQDNNKANDYESCRHKLYTIMCFILVAELDAHESIRDNMVAELRANMDGDDGRDAIYEKYAKDIYHIVKDKLLAMQKVFDEELVPVKVDGKNDPQQFTHGKLSKKEIESFCLSDKNTSDIAKVVYFLCNFLDGKEINELCCAMMNKFDGIGDLIDTAKQCGEEVKFIEEFACLSNYRKITNDIRVAKSISKMKNKVNIDNDIIYLDAIELLGRRIEKYQKDENGKILLGTDGKRLYTKEYKDFNDMFFNAGNHKVRNFIANSVMKSKWFFYVVRYNKPAECQIIMRNKTLVKFTLDDLPDMQIQRYYSSVFGDNNMPAVDEMRKLLLKKINQFSVRGFLDEIVLMSDEESKRNKSSEKEQKKSLIRLYLTIAYLITKSMVKINTRFSIACATYERDYALLCQSEMKGGPWDGGAQALAVTRKFLNHDREVFDRYCAREAEIARLPIEERKPLRKANDKLLKQTHYTNHSYTYIVNNLNSFTDIDYCAKDVGLPAPNDKNDNASILGEMRNDIAHLNIVHDMVKYIEELKDISSYYAFYCYVLQRRLVGKDPNCQNKFKAKYAKELNDYGTYNKNLMWMLNLPFAYNLPRYKNLSSEFLFYDMEYNKKDDE

SEQ ID NO: 2830 - protein, 918 aa, Artificial
  Synthetic
MAKKNKMKPRELREAQKKARQLKAAEINNNAVPAIAAMPAAEAAAPAAEKKKSSVKAAGMKSILVSENKMYITSFGKGNSAVLEYEVDNNDYNKTQLSSKDNSNIELCDVGKVNITFSSRRGFESGVEINTSNPTHRSGESSSVRGDMLGLKSELEKRFFGKNFDDNIHIQLIYNILDIEKILAVYVTNIVYALNNMLGEGDESNYDFMGYLSTFNTYKVFTNPNGSTLSDDKKENIRKSLSKFNALLKTKRLGYFGLEEPKTKDTRASEAYKKRVYHMLAIVGQIRQCVFHDKSGAKRFDLYSFINNIDPEYRETLDYLVDERFDSINKGFIQGNKVNISLLIDMMKGYEADDIIRLYYDFIVLKSQKNLGFSIKKLREKMLDEYGFRFKDKQYDSVRSKMYKLMDFLLFCNYYRNDIAAGESLVRKLRFSMTDDEKEGIYADEAAKLWGKFRNDFENIADHMNGDVIKELGKADMDFDEKILDSEKKNASDLLYFSKMIYMLTYFLDGKEINDLLTTLISKFDNIKEFLKIMKSSAVDVECELTAGYKLFNDSQRITNELFIVKNIASMRKPAASAKLTMFRDALTILGIDDKITDDRISEILKLKEKGKGIHGLRNFITNNVIESSRFVYLIKYANAQKIREVAKNEKVVMFVLGGIPDTQIERYYKSCVEFPDMNSSLGVKRSELARMIKNISFDDFKNVKQQSKGRENVAKERAKAVIGLYLTVMYLLVKNLVNVNARYVIAIHCLERDFGLYKEIIPELASKNLKNDYRILSQTLCELCDKSPNLFLKKNERLRKCVEVDINNADSSMTRKYRNCIAHLTVVRELKEYIGDICTVDSYFSIYHYVMQRCITKRENDTKQEEKIKYEDDLLKNHGYTKDFVKALNSPFGYNIPRFKNLSIEQLFDRNEYLTEK

SEQ ID NO: 2831 - protein, 918 aa, Artificial; identical to SEQ ID NO: 2830
  Synthetic

SEQ ID NO: 2832 - protein, 960 aa, Artificial; identical to SEQ ID NO: 2800
  Synthetic

SEQ ID NO: 2833 - protein, 925 aa, Artificial
  Synthetic
MAKKNKMKPRELREAQKKARQLKAAEINNNAAPAIAAMPAAQVIAPAAEKKKSSVKAAGMKSILVSENKMYITSFGKGNSAVLEYEVDKVDNNNYNKTQLSSKDNSNIELGDVNEVNITFSSKHGFESGVEINTSNPTHRSGESSSVRGDMLGLKSELEKRFFGKTFDDNIHIQLIYNILDIEKILAVYVTNIVYALNNMLGVKGSESYDDFMGYLSAQNTYYIFTHPDKSNLSDKVKGNIKKSLSKFNDLLKTKRLGYFGLEEPKTKDKRVSEAYKKRVYHMLAIVGQIRQSVFHDKSNELDEYLYSFIDIIDSEYRDTLDYLVDERFDSINKGFVQGNKVNISLLIDMMKGYEADDIIRLYYDFIVLKSQKNLGFSIKKLREKMLDEYGFRFKDKQYDSVRSKMYKLMDFLLFCNYYRNDIAAGEALVRKLRFSMTDDEKEGLYADEAAKLWGKFRNDFENIADHMNGDVIKELGKADMDFDEKILDSEKKNASDLLYFSKMIYMLTYFLDGKEINDLLTTLISKFDNIKEFLKIMKSSAVNVECELTAGYKLFNDSQRITNELFIVKNIASMRKPAASAKLTMFRDALTILGIDDNITDDRISEILKLKEKGKGIHGLRNFITNNVIESSRFVYLIKYANAQKIREVAKNEKVVMFVLGGIPDTQIERYYKSCVEFPDMNSSLEVKRSELARMIKNIRFDDFKNVKQQAKGRENVAKERAKAVIGLYLTVMYLLVKNLVNVNARYVIAIHCLERDFGLYKEIIPELASKNLKNDYRILSQTLCELCDNRDESPNLFLKKNKRLRKCVEVDINNADSSMTRKYRNCIAHLTVVRELKEYIGDIRTVDSYFSIYHYVMQRCITKREDDTKQEDKIKYEDDLLKNHGYTKDFVKALNSPFGYNIPRFKNLSIEQLFDRNEYLTEK

SEQ ID NO: 2834 - protein, 922 aa, Artificial
  Synthetic
MAKKNKMKPRELREAQKKARQLKAAEINNNAAPAIAAMPAAEVIAPAAEKKKSSVKAAGMKSILVSENKMYITSFGKGNSAVLEYEVDNNDYNKTQLSSKDNSNIELGDVDEVNITFSSKHGFGSGVEINTSNPTHRSGESSPVRWDMLGLKSELEKRFFGKTFDDNIHIQFIYNILDIEKILAVYVTNIVYALNNMLGIKDSESYDDFIGYLSARNTYKVFTHPDKSNLSDKAKGNIKKSFSTFNDLLKTKRLGYFGLEEPKTKDTRVLEAYKKRVYYMLAIVGQIRQCVFHDLSEHSEYDLYSFIDNSKKVYRECRETLDYLVDERFDSINKGFIQGNKVNISLLIDMMKGYEADDIIRLYYDFIVLKSQKNLGFSIKKLREKMLDEYGFRFKDKQYDSVRSKMYKLMDFLLFCNYYRNDVVAGEALVRKLRFSMTDDEKEGIYADEAAKLWVKFRNDFENIADHMNGDVIKELGKADMDFDEKILDSEKKNASDLLYFSKMIYMLTYFLDGKEINDLLTTLISKFDNIKEFLKIMKSSAVDVECELTAGYKLFNDSQRITNELFIVKNIASMRKPAASAKLTMFRDALTILGIDDNITDDRISEILKLKEKGKGIHGLRNFITNNVIESSRFVYLIKYANAQKIRKVAKNEKVVMFVLGGIPDTQIERYYKSCVEFPDMNSSLEVKRSELARMIKNISFDDFKNVKQQAKGRENVAKERAKAVIGLYLTVMYLLVKNLVNVNARYVIAIHCLERDFGLYKEIIPELASKNLKNDYRILSQTLCELCDKSPNLFLKKNERLRKCVEVDINNADSSMTRKYRNCIAHLTVVRELKEYIGDIRTVDSYFSIYHYVMQRCITKRENDTKQEEKIKYEDDLLKNHGYTKDFVKALNSPFGYNIPRFKNLSIEQLFDRNEYLTEK

SEQ ID NO: 2835 - protein, 981 aa, Artificial
  Synthetic
VEKRLNESLQKQREQQTVTDESERKKKPLKSGAKAAGLKSVFVLSEGKELLTSFGRGNEAVPEKRVTGGTIANARTDNKEAFSAALQNKRFEVFGRTAGSSDDPLAVSRAPGQDLIGAKTALEERYFGRAFADNIHMQVIYAIQDINKILAVHANNIVYTLNNLDREADPETDDFIGSGYLTLKNTFETYCDPAALNEREREKVTVSKQHFDAFMQNPRLAYYGNAFFRKLSKAERLARGREIFDKESPERRQEILGSRGKNKSVDDEIRALAPEWVKREERDVYSELVLMSELRQSCFHGQQKNSARIFRLDNDLGPGVDGARELLDRLYAEKINDLRSFDKTSASSNFRLLFNAYHADNEKKKELAQEFYRFSVLKVSKNTGFSIRTLREKIIEDHAAQYRDKIYDSMRKKLFSTFDFFLWRFYEEREDEAEELRACLRAARSDEEKEQIYAEAAASCWPSVKPFVESVAATLCDVVKGRTKLNKLKLSADESTLVRNAIDGVRISPRASYFTKLIYLMTLFLDGKEINDLLTTLIHAFENIDSFLSVLGSERLERTFDANYRIFADSGVIAQELRAVNSFARMTTEPFNSKLVMFEDAAQLFGMSGGLVEHAEELREYLDNKMLDKTKLRLLPDGKVDTGFRNFIISNVTESRRFRYLVRYCEPRAVRDYMSCRPLIRLTLRDMPDTILRRYYEQSVGAATVDRERILDTLADKLLSLRFTDFENVNQRANAERNREKQKMMGIISLYLNVAYQIVKNLVYVNARYTMAYHCAERDTELLLNAAGEGNLLRRDRSWPARLHLPRRALARRRDRVEVMERDVARGPEAYNRDEWLGLVRTLRREKRVCDNLHNNYAYLCGADAEPGDASLSLLFVYRNKAAHLSVLNKGGRLSGDLKEAKSWFYVYHFLMQRVLEEEFRNTQALPERLRELLMMAERYRGCSKDLIKVLNLTFAYNLPRYKNLSIDGRFDKNHPDPSDE

SEQ ID NO: 2836 - protein, 921 aa, Artificial
  Synthetic
MAKKNKMKPRELREAQKKARQLKAAEINNNAVPAIAAMPAAEAAAPAAEKKKSSVKAAGMKSILVSENKMYITSFGKGNSAVLEYEVDNNDYNKTQLSSKDNSNIELCDVGKVNITFSSRRGFESGVEINTSNPTHRSGESSSVRGDMLGLKSELEKRFFGKNFDDNIHIQLIYNILDIEKILAVYVTNIVYALNNMLGEGDESNYDFMGYLSTFNTYKVFTNPNGSTLSDDKKENIRKSLSKFNALLKTKRLGYFGLEEPKTKDKRVSEAYKKRVYHMLAIVGQIRQSVFHDKSNELDEYLYSFIDIIDSEYRDTLDYLVDERFDSINKGFVQGNKVNISLLIDMMKGYEADDIIRLYYDFIVLKSQKNLGFSIKKLREKMLDEYGFRFKDKQYDSVRSKMYKLMDFLLFCNYYRNDIAAGEALVRKLRFSMTDDEKEGIYADEAEKLWGKFRNDFENIADHMNGDVIKELGKADMDFDEKILDSEKKNASDLLYFSKMIYMLTYFLDGKEINDLLTTLISKFDNIKEFLKIMKSSAVDVECELTAGYKLFNDSQRITNELFIVKNIASMRKPAASAKLTMFRDALTILGIDDKITDDRISEILKLKEKGKGIHGLRNFITNNVIESSRFVYLIKYANAQKIREVAENEKVVMFVLGGIPDTQIERYYKSCVEFPDMNSSLEAKRSELARMIKNISFDDFKNVKQQAKGRENVAKERAKAVIGLYLTVMYLLVKNLVNVNARYVIAIHCLERDFGLYKEIIPELASKNLKNDYRILSQTLCELCDDRDESPNLFLKKNRRLRKCVEVDINNADSSMTRKYRNCIAHLTVVRELKEYIGDIRTVDSYFSIYHYVMQRCITKREDDTKQEDKIKYEDDLLKNHGYTKDFVKALNSPFGYNIPRFKNLSIEQLFDRNEYLTEK

SEQ ID NO: 2837 - protein, 919 aa, Artificial; identical to SEQ ID NO: 2825
  Synthetic

SEQ ID NO: 2838 - protein, 922 aa, Artificial
  Synthetic
MAKKNKMKPRELREAQKKARQLKAAEINNNAAPAIAAMPAAEVIAPAAEKKKSSVKAAGMKSILVSENKMYITSFGKGNSAVLEYEVDNNDYNKTQLSSKDNSNIELGDVNEVNITFSSKHGFGSGMKINTSNPTHRSGESSPVRWDMLGLKSELEKRFFGKTFDDNIHIQLIYNILDIEKILAVYVTNIVYALNNMLGVKGSESHDDFIGYLSTNNIYDVFIDPDNSSLSDDKKANVRKSLSKFNVLLKTKRLGYFGLEEPKTKDNRVSEAYKKRVYHMLAIVGQIRQCVFHDKSGAKRFDLYSFINNIDPEYRDTLDYLVEERLKSINKDFIQGNKVNISLLIDMMKGYEADDIIRLYYDFIVLKSQKNLGFSIKKLREKMLEEYGFRFKDKQYDSVRSKMYKLMDFLLFCNYYRNDVVAGEALVRKLRFSMTDDEKEGIYADEAAKLWGKFRNDFENIADHMNGDVIKELGKADMDFDEKILDSEKKNASDLLYFSKMIYMLTYFLDGKEINDLLTTLISKFDNIKEFLKIMKSSAVDVECELTAGYKLFNDSQRITNELFIVKNIASMRKPAASAKLTMFRDALTILGIDDNITDDRISEILKLKEKGKGIHGLRNFITNNVIESSRFVYLIKYANAQKIREVAKNEKVVMFVLGGIPDTQIERYYKSCVEFPDMNSSLEAKRSELARMIKNISFDDFKNVKQQAKGRENVAKERAKAVIGLYLTVMYLLVKNLVNVNARYVIAIHCLERDFGLYKEIIPELASKNLKNDYRILSQTLCELCDDRDESPNLFLKKNKRLRKCVEVDINNADSSMTRKYRNCIAHLTVVRELKEYIGDIRTVDSYFSIYHYVMQRCITKREDDTKQEDKIKYEDDLLKNHGYTKDFVKALNSPFGYNIPRFKNLSIEQLFDRNEYLTEK

SEQ ID NO: 2839 - protein, 923 aa, Artificial
  Synthetic
MAKKNKMKPRELREAQKKARQLKVAEINNNAVPAIAAMPAAEAAAPAAEKKKSSVKAAGMKSILVSKNKMYITSFGKGNSAVLEYEVDKVDNDNYNKTQLSSKDNSNIELGDVDEVNITFSSKHGFESGVEINTSNPTHRSGESSPVRWDMLGLKSELEKRFFGKTFDDNIHIQLIYNILDIEKILAVYVTNIVYALNNMLGIKKSESYDDFMGYLSARNTYEVFTHPDKSNLSDKVKGNIKKSLSKFNVLLKTKRLGYFGLEEPKTKDTNALEAYKKRVYHMLAIVGQIRQSVFHDKSSKLHEDLYSFIDIIDSEYRETLDYLIDERFDSINKGFIQGNKVNISLLIDMMKDDYEADDIIRLYYDFIVLKSQKNLGFSIKKLREKMLDEYGFRFKDKQYDSVRSKMYKLMDFLLFCNYYRNDVVAGEALVRKLRFSMTDDEKEGIYADEAEKLWGKFRNDFENIADHMNGDVIKELGKADMDFDEKILDSEKKNASDLLYFSKMIYMLTYFLDGKEINDLLTTLISKFDNIKEFLKIMKSSAVDVECELTAGYKLFNDSQRITNELFIVKNIASMRKPASSAKLTMFRDALTILGIDDNITDDRISEILKLKEKGKGIHGLRNFITNNVIESSRFVYLIKYANAQKIRKVAKNEKVVMFVLGGIPDTQIERYYKSCVEFPDMNSSLEVKRSELARMIKNISFDDFKNVKQQAKGRENVAKERAKAVIGLYLTVMYLLVKNLVNVNARYVIAIHCLERDFGLYKEIIPELASKNLKNDYRILSQTLCELCDKSPNLFLKKNRRLRKCVEVDINNADSSMTRKYRNCIAHLTVVRELKEYIGDIRTVDSYFSIYHYVMQRCITKRENDTKQEEKIKYEDDLLKNHGYTKDFVKALNSPFGYNIPRFKNLSIEQLFDRNEYLTEK

SEQ ID NO: 2840 - protein, 922 aa, Artificial
  Synthetic
MAKKNKMKPRELREAQKKARQLKAAEINNNAAPAIAAMPAAEAAAPAAEKKKSSVKAAGMKSILVSENKMYITSFGKGNSAVLEYEVDNNDYNQTQLSSKGSSNIELHGVNEVNITFSSKHGFESGVEINTSNPTHRSGESSPVRWDMLGLKSELEKRFFGKTFDDNIHIQLIYNILDIEKILAVYVTNIVYALNNMLGVKGSESHDDFIGYLSTNNTYDVFIDPDNSSLSDDKKANVRKSLSKFNVLLKTKRLGYFGLEEPKTKDTRVSQAYKKRVYHMLAIVGQIRQCVFHDKSGAKRFDLYSFINNIDPEYRETLDYLVDERFDSINKGFIEGNKINISLLIDMMKGYEADDIIRLYYDFIVLKSQKNLGFSIKKLREKMLDEYGFRFKDKQYDPVRSKMYKLMDFLLFCNHYRNDVAAGEALVRKLRFSMTDDEKEGIYADEAAKLWGKFRNDFENIADHMNGDVIKELGKADMDFDEKILDSEKKNASDLLYFSKMIYMLTYFLDGKEINDLLTTLISKFDNIKEFLKIMKSSAVDVECELTAGYKLFNDSQRITNELFIVKNIASMRKPAASAKLTMFRDALTILGIDDNITDDRISEILKLKEKGKGIHGLRNFITNNVIESSRFVYLIKYANAQKIREVAKNEKVVMFVLGGIPDTQIERYYKSCVEFPDMNSSLEAKRSELARMIKNISFDDFKNVKQQAKGRENVAKERAKAVIGLYLTVMYLLVKNLVNVNARYVIAIHCLERDFGLYKEIIPELASKNLKNDYRILSQTLCELCDDRDESPNLFLKKNKRLRKCVEVDINNADSSMTRKYRNCIAHLTVVRELKEYIGDIRTVDSYFSIYHYVMQRCITKRENDTKQEEKIKYEDDLLKNHGYTKDFVKALNSPFGYNIPRFKNLSIEQLFDRNEYLTEK

SEQ ID NO: 2841 - protein, 922 aa, Artificial
  Synthetic
MAKKNKMKPRELREAQKKARQLKAAEINNNAAPAIAAMPAAEVIAPAAEKKKSSVKAAGMKSILVSENKMYITSFGKGNSAVLEYEVDNNDYNKTQLSSKDNSNIELGDVDEVNITFSSKHGFGSGVEINTSNPTHRSGESSPVRWDMLGLKSELEKRFFGKTFDDNIHIQFIYNILDIEKILAVYVTNIVYALNNMLGIKDSESYDDFIGYLSARNTYKVFTHPDKSNLSDKAKGNIKKSFSTFNDLLKTKRLGYFGLEEPKTKDTRVLEAYKKRVYYMLAIVGQIRQCVFHDLSEHSEYDLYSFIDNSKKVYRECRETLDYLVDERFDSINKGFIQGNKLNISLLIDMMKGYEADDIIRLYYDFIVLKSQKNLGFSIKKLREKMLDEYGFRFKDKQYDSVRSKMYKLMDFLLFCNYYRNDVVAGEALVRKLRFSMTDDEKEGIYADEAAKLWVKFRNDFENIADHMNGDVIKELGKADMDFDEKILDSEKKNASDLLYFSKMIYMLTYFLDGKEINDLLTTLISKFDNIKEFLKIMKSSAVDVECELTAGYKLFNDSQRITNELFIVKNIASMRKPAASAKLTMFRDALTILGIDDKITDDRISEILKLKEKGKGIHGLRNFITNNVIESSRFVYLIKYANAQKIREVAENEKVVMFVLGGIPDTQIERYYKSCVEFPDMNSPLEAKRSELARMIKNIRFDDFKNVKQQAKGRENVAKERAKAVIGLYLTVMYLLVKNLVNVNARYVIAIHCLERDFGLYKEIIPELASKNLKNDYRILSQTLCELCDKSPNLFLKKNERLRKCVEVDINNADSSMTRKYRNCIAHLTVVRELKEYIGDIRTVDSYFSIYHYVMQRCITKREDDIKQEEKIKYEDDLLKNHGYTKDFVKALNSPFGYNIPRFKNLSIEQLFDRNEYLTEK

SEQ ID NO: 2842 - protein, 906 aa, Artificial
  Synthetic
MEREVKKPPKKSLAKAAGLKSTFVISPQEKELAMTAFGRGNDALLQKRIVDGVVRDVAGEKQQFQVQRQDESRFRLQNSRLADRTVTADDPLHRAEVPHRQPLGAGMDQLRRKAVLEQKYFGRTFDDNIHIQLIYNILDIHKMLAVPANHIVHTLNLLGGYGEMDFVGMLPAGLPYDKLRVVKKKNGDTVDIKADIAAYAKRPQLAYLGAAFYDVTPGKSKRDAARGRVKREQDVYTILSLMSLLRQFCAHDSVRIWGQNTPAALYHLQALPQDMKDLLDDGWRRALGGVNDHFLDTNKVNLLTLFEYYGAETKQARVALTQDFYRFVVLKEQKNMGFSLRRLREELLKLPDAAYLTGQEYDSVRQKLYMLLDFLLCRLYAQERADRCEELVSALRCALSDEEKDAVYQAEAAALWQALGDTLRRELLPLLKGKKLQDKDKKKPDELGLSRDVLDGVLFRPAQQGNRANADYFCRLMHLSTWFMDGKEINTLLTTLISKLENIDSLRSVLESMGLACSFVPAYAMFDHSRYIAGQLRVVNNIARMRKPAIGAKREMYRAAVVLLGVDSPEAAAAITDDLLQIDPETGKVRPRGDSARDTGLRNFIANNVVESRRFTYLLRYMTPEQARVLAQNEKLIAFVLSTVPDTQLERYCRTCGREDITGRPAQIRYLTAQIMGVRYESFTDVEQRGRGDNPRKERYKALIGLYLTVLYLAVKNMVNCNARYVIAFYCRDRDTALYQKEVCWYDLEEDKKSGKQRQVEDYTALTRYFVSQGYLNRHACGYLRSNMNGISNGLLVAYRNAVDHLNVIPPLGSLSRDIGRVDSYFALYHYAVQQYLNGRYYRKTPREQELFAAMAQHRTWCSDLVKALNTPFGYNLARYKNLSIDGLFDREGDHVVREDGEKPAE

SEQ ID NO: 2843 - protein, 924 aa, Artificial
  Synthetic
MAKKNKMKPRELREAQKKARQFKAAEINNNAAPAIAAMPAAEVIAPVAEKKKSSVKAAGMKSILVSENKMYITSFGKGNSAVLEYEVDNNDYNKTQLSSKDNSNIELCGVNEVNITFSSKHGFESGVEINTSNPTHRSGESSPVRWDMLGLKSELEKRFFGKTFDDNIHIQLIYNILDIEKILAVYVTNIVYALNNMLGEGDESNYDFMGYLSTFNTYKVFTNPNGSTLSDDKKENIRKSLSKFNALLKTKRLGYFGLEEPKTKDTRVLEAYKKRVYHMLAIVGQIRQCVFHDLSEHSEYDLYSFIDNSKKVYRECRETLDYLVDERFDSINKGFIQGNKVNISLLIDMMKGYEADDIIRLYYDFIVLKSQKNLGFSIKKLREKILDEYGFRFKDKQYDSVRSKMYKLMDFLLFCNYYRNDIAAGESLVRKLRFSMTDDEKEGIYADEAAKLWGKFRNDFENIADHMNGDVIKELGKADMDFDEKILDSEKKNASDLLYFSKMIYMLTYFLDGKEINDLLTTLISKFDNIKEFLKIMKSSAVDVECELTAGYKLFNDSQRITNELFIVKNIASMRKPAASAKLTMFRDALTILGIDDKITDDRISEILKLKEKGKGIHGLRNFITNNVIESSRFVYLIKYANAQKIREVAKNEKVVMFVLGGIPDTQIERYYKSCVEFPDMNSSLEAKRSELARMIKNIRFDDFKNVKQQAKGRENVAKERAKAVIGLYLTVMYLLVKNLVNVNARYVIAIHCLERDFGLYKEIIPELASKNLKNDYRILSQTLCELCDNGDESPNLFLKKNKRLRKCVEVDINNADSNMTRKYRNCIAHLTVVRELKEYIGDIRTVDSYFSIYHYVMQRCITKREDDTKQEEKIKYEDDLLKNHGYTKDFVKALNSPFGYNIPRFKNLSIEQLFDRNEYLTEK

SEQ ID NO: 2844 - protein, 919 aa, Artificial
  Synthetic
MAKKNKMKPRELREAQKKARQLKAAEINNNAAPAIAAMPAAEVIAPAAEKKKSSVKAAGMKSILVSENKMYITSFGKGNSAVLEYEVDNNDYNKTQLSSKDSSNIELRGVNEVNITFSSKHGFGSGVEINTSNPTHRSGESSPVRWDMLGLKSELEKRFFGKTFDDNIHIQLIYNILDIEKILAVYVTNIVYALNNMLGIKKSESHDDFMGYLSAKNTYDVFTNPNGSTLSDDKKKNIRKSLRKFNDLLKTKRLGYFGLEEPKTKDTRVSQAYKKRVYHMLAIVGQIRQSVFHDKSSKLHEDLYSFIDIIDSEYRETLDYLVDERFDSINKGFIQGNKVNISLLIDMMKGYEADDIIRLYYDFIVLKSQKNLGFSIKKLREKMLDEYGFRFKDKQYDSVRSKMYKLMDFLLFCNYYRNDVAAGEALVRKLRFSMTDDEKEGIYADEAAKLWGKFRNDFENIADHMNGDVIKELGKADMDFDEKIIDSEKKNASDLLYFSKMIYMLTYFLDGKEINDLLTTLISKFDNIKEFLKIMKSSAVDVECELTAGYKLFNDSQRITNELFIVKNIASMRKPAASAKLTMFRDALTILGIDDNITDDRISEILKLKEKGKGIHGLRNFITNNVIESSRFVYLIKYANAQKIRKVAKNEKVVMFVLGGIPDTQIERYYKSCVEFPDMNSSLEVKRSELARMIKNISFDDFKNVKQQAKGRENVAKERAKAVIGLYLTVMYLLVKNLVNVNARYVIAIHCLERDFGLYKEIIPELASKNLKNDYRILSQTLCELCDKSPNLFLKKNRRLRKCVEVDINNADSSMTRKYRNCIAHLTVVRELKEYIGDIRTVDSYFSIYHYVMQRCITKRENDTKQEEKIKYEDDLLKNHGYTKDFVKALNSPFGYNIPRFKNLSIEQLFDRNEYLTEK

SEQ ID NO: 2845 - protein, 922 aa, Artificial; identical to SEQ ID NO: 2841
  Synthetic

SEQ ID NO: 2846 - protein, 954 aa, Artificial
  Synthetic
MGKKIHARDLREQRKTDRTEKFADQNKKREAERAVQKKDAAVSVKSVSSVSSKKDNVTKSMAKAAGVKSVFAVGNTVYMTSFGRGNDAVLEQKIVDTSHEPLNIDDPAYQLNVVTMNGYSVTGHRGETVSAVTDNPLRRFNGGKKDEPEQSVPTDMLCLKPTLEKKFFGKEFNDNIHIQLIYNILDIEKILAVYSTNAIYALNNMSADENIENSDFFMKRTTDETFDDFEKKKESTNSREKADFDAFEKFIGNYRLAYFADAFYVNKKNPKGKAKNVLREDKELYSVLTLIGKLRHWCVHSEDGRAEFWLYKLDELKDDFKNVLDVVYNRPVEEINNRFIENNKVNIQILGSVYKNTDIAELVRSYYEFLITKKYKNMGFSIKKLRESMLEGKGYADKEYDSVRNKLYQMTDFILYTGYINEDSDRADDLVNTLRSSLKEDDKTTVYCKEADYLWKKYRESIREVADALDVDNIKNLSGSNIEIRDNELRKCFISYADSVSEFTKLIYLLTRFLSGKEINDLVTTLINKFDNIRSFLEIMDELGLDRTFTAEYSFFEGSTKYLAELVELNSFVKSCSFDINAKRTMYRDALDILGIKSGKTEEDIEKMIDNILQIDANGDKKLKKNNGLRNFIASNVIDSNRFKYLVRYGNPKKIRETAKCKPAVRFVLNEIPDAQIERYYEACCPKNTALCSANKRREKLADMIAEIKFENFSDAGNYQKANVTSRTSEAEIKRKNQAIIRLYLTVMYIMLKNLVNVNARYVIAFHCVERDTKLYAESGLEVGNIEKNKTNLTMAVMGVKLENGTIKTEFDKSLAENAANRYLRNARWYKLILDNLKKSERAVVTEFRNTVCHLNAIRNININIKEIKEVENYFALYHYLIQKHLENRFADKKVERDTGDFISKLEEHKTYCKDFVKAYCTPFGYNLVRYKNLTIDGLFDKNYPGKDDSDKQK

SEQ ID NO: 2847 - protein, 919 aa, Artificial
  Synthetic
MAKKNKMKPRELREAQKKARQLKAAEINNNAAPAIAAMPAAEVIAPAAEKKKSSVKAAGMKSILVSENKMYITSFGKGNSAVLEYEVDNNDYNQTQLSSKNSSNIELCGVNEVNITFSSKHGFGSGVEINTSNPTHRSGESSPVRWDMLGLKSELEKRFFGKTFDDNIHIQLIYNILDIEKILAVYVTNIVYALNNMLGVKGSESHDDFIGYLSTNNIYDVFIDPDNSSLSDDKKANVRKSLSKFNVLLKTKRLGYFGLEEPKTKDTRVSQAYKKRVYHMLAIVGQIRQCVFHDKSGAKRFDLYSFINNIDPEYRDTLDYLVEERLKSINKDFIEGNKVNISLLIDMMKDYEADDIIRLYYDFIVLKSQKNLGFSIKKLREKMLDEYGFRFKDKQYDSVRSKMYKLMDFLLFCNYYRNDVIAGEALVRKLRFSMTDDEKEGIYADGAAKLWGKFRNDFEYIADHMNGDVIKELGKADMDFDEKILDSEKKNASDLLYFSKMIYMLTYFLDGKEINDLLTTLISKFDNIKEFLKIMKSSAVDVECELTAGYKLFNDSQRITNELFIVKNIASMRKPAASAKLTMFRDALTILGIDDNITDDRISEILKLKEKGKGIHGLRNFITNNVIESSRFVYLIKYANAQKIREVAKNEKVVMFVLGGIPDTQIERYYKSCVEFPDMNSSLEAKRSELARMIKNISFDDFKNVKQQAKGRENVAKERAKAVIGLYLTVMYLLVKNLVNVNARYVIAIHCLERDFGLYKEIIPELASKNLKNDYRILSQTLCELCDKSPNLFLKKNERLRKCVEVDINNADSIMTRKYRNCIAHLTVVRELKEYIGDIRTVDSYFSIYHYVMQRCITKREDDTKQEDKIKYEDDLLKNHGYTKDFVKALNSPFGYNIPRFKNLSIEQLFDRNEYLTEK

SEQ ID NO: 2848 - protein, 922 aa, Artificial
  Synthetic
MAKKNKMKPRELREAQKKARQLKAAEINNNAAPAIAAMPAAEAAAPAAEKKKSSVKAAGMKSILVSENKMYITSFGKGNSAVLEYEVDKVDNNDYNQTQLSSKGSSNIELHGVNEVNITFSSKHGFESGVEINTSNPTHRSGESSPVRWDMLGLKSELEKRFFGKTFDDNIHIQLIYNILDIEKILAVYVTNIVYALNNMLGIKDSESYDDFMGYLSAKNTYDVFTDPDESDLSKNIKGNIKKSFSTFNDLLKTKRLGYFGLEEPKTKDTRVSEAYKKRVYHMLAIVGQIRQCVFHDKSGAKRFDLYSFINNIDPEYRDTLDYLVEERLKSINKDFIEGNKVNISLLIDMMKGYEADDIIRLYYDFIVLKSQKNLGFSIKKLREKMLDEYGFRFKDKQYDSVRSKMYKLMDFLLFCSYYRNDVVAGEALVRKLRFSMTDDEKEGIYADEAEKLWGKFRNDFENIADHMNGDVIKELGKADMDFDEKILDSEKKNASDLLYFSKMIYMLTYFLDGKEINDLLTTLISKFDNIKEFLKIMKSSAVDVECELTAGYKLFNDSQRITNELFIVKNIASMRKPAASAKLTMFRDALTILGIDDKITDDRISEILKLKEKGKGIHGLRNFITNNVIESSRFVYLIKYANAQKIREVAKNEKVVMFVLGGIPDTQIERYYKSCVEFPDMNSSLEVKRSELARMIKNISFDDFKNVKQQAKGRENVAKERAKAVIGLYLTVMYLLVKNLVNVNARYVIAIHCLERDFGLYKEIIPELASKNLKNDYRTLSQTLCELCDKSPNLFLKKNERLRKCVEVDINNADSIMTRKYRNCIAHLTVVRELKEYIGDIRTVDSYFSIYHYVMQRCITKRENDTKQEDKIKYEDDLLKNHGYTKDFVKALNSPFGYNIPRFKNLSIEQLFDRNEYLTEK

SEQ ID NO: 2849 - protein, 922 aa, Artificial
  Synthetic
MAKKNKMKPRELREAQKKARQLKAAEINNNAAPAIAAMPAAEVIAPAAEKKKSSVKAAGMKSILVSENKMYITSFGKGNSAVLEYEVDNNDYNKTQLSSKDNSNIELGDVNEVNITFSSKHGFGSGMKINTSNPTHRSGESSPVRWDMLGLKSELEKRFFGKTFDDNIHIQLIYNILDIEKILAVYVTNIVYALNNMLGVKGSESHDDFIGYLSTNNIYDVFIDPDNSSLSDDKKANVRKSLSKFNVLLKTKRLGYFGLEEPKTKDNRVSEAYKKRVYHMLAIVGQIRQCVFHDKSGAKRFDLYSFINNIDPEYRDTLDYLVEERLKSINKDFIQGNKVNISLLIDMMKGYEADDIIRLYYDFIVLKSQKNLGFSIKKLREKMLEEYGFRFKDKQYDSVRSKMYKLMDFLLFCNYYRNDVVAGEALVRKLRFSMTDDEKEGIYADEAAKLWGKFRNDFENIADHMNGDVIKELGKADMDFDEKILDSEKKNASDLLYFSKMIYMLTYFLDGKEINDLLTTLISKFDNIKEFLKIMKSSAVDVECELTAGYKLFNDSQRITNELFIVKNIASMRKPAASAKLTMFRDALTILGIDDNITDDRISEILKLKEKGKGIHGLRNFITNNVIESSRFVYLIKYANAQKIREVAKNEKVVMFVLGGIPDTQIERYYKSCVEFPDMNSSLEAKRSELARMIKNISFDDFKNVKQQAKGRENVAKERAKAVIGLYLTVMYLLVKNLVNVNARYVIAIHCLERDFGLYKEIIPELASKNLKNDYRILSQTLCELCDDRDESPNLFLKKNKRLRKCVEVDINNADSSMTRKYRNCIAHLTVVRELKEYIGDIRTVDSYFSIYHYVMQRCITKRENDTKQEEKIKYEDDLLKNHGYTKDFVKALNSPFGYNIPRFKNLSIEQLFDRNEYLTEK

SEQ ID NO: 2850 - protein, 926 aa, Artificial
  Synthetic
MAKKNKMKPRELREAQKKARQLKAAEINNNAAPAIAAMPAAEVIAPAAEKKKSSVKAAGMKSILVSENKMYITSFGKGNSAVLEYEVDKVDNDDYNKTQLSSKGSSNIELHGVNEVNITFSSKHGFESGVEISTSNPTHRSGESSPVRWDMLGLKSELEKRFFGKTFDDNIHIQFIYNILDIEKILAVYVTNIVYALNNMLGVKDSESYDDFMGYLSARNTYKVFTHPDKSNLSDKVKGNIKKSFSTFNDLLKTKRLGYFGLEEPKTKDTRVSQAYKKRVYHMLAIVGQIRQCVFHDKSSKLHEDLYSFINNIDPEYRDTLDYLVEERLKSINKDFIEGNKVNISLLIDMMKDDYEADDIIRLYYDFIVLKSQKNLGFSIKKLREKMLDEYGFRFKDKQYDSVRSKMYKLMDFLLFCNYYRNDVAVGEALVRKLRFSMTDDEKEGIYADEAEKLWGKFRNDFENIADHMNGDVIKELGKADMDFDEKILDSEKKNASDLLYFSKMIYMLTYFLDGKEINDLLTTLISKFDNIKEFLKIMKSSAVDVECELTAGYKLFNDSQRITNELFIVKNIASMRKPAASAKLTMFRDALTILGIDDKITDDRISEILKLKEKGKGIHGLRNFITNNVIESSRFVYLIKYANAQKIREVAKNEKVVMFVLGGIPDTQIERYYKSCVEFPDMNSSLEAKRSELARMIKNIRFDDFKNVKQQAKGRENVAKERAKAVIGLYLTVMYLLVKNLVNVNARYVIAIHCLERDFGLYKEIIPELASKNLKNDYRILSQTLCELCDDRDESPNLFLKKNKRLRKCVEVDINNADSIMTRKYRNCIAHLTVVRELKEYIGDIRTVDSYFSIYHYVMQRCITKREDDTKQEEKIKYEDDLLKNHGYTKDFVKALNSPFGYNIPRFKNLSIEQLFDRNEYLTEK

SEQ ID NO: 2851 - protein, 960 aa, Artificial; identical to SEQ ID NO: 2800
  Synthetic

SEQ ID NO: 2852 - protein, 922 aa, Artificial
  Synthetic
MAKKNKMKPRELREAQKKARQLKAAEINNNAAPAIAAMPAAEVIAPAAEKKKSSVKAAGMKSILVSENKMYITSFGKGNSAVLEYEVDKVDNNNYNKTQLSSKDNSNIELGDVNEVNITFSSKRGNESGVEINTSNPTHRSGESSPVRWDMLGLKSELEKRFFGKTFDDNIHIQLIYNILDIEKILAVYVTNIVYALNNMLGIKKSESYDDFMGYLSARNTYEVFTHPDKSNLSDKAKGNIKKSFSTFNDLLKTKRLGYFGLEEPKTKDTRVSQAYKKRVYHMLAIVGQIRQSVFHDKSNELDEYLYSFIDIIDSEYRDTLDYLVDERFDSINKGFVQGNKVNISLLIDMMKGYEADDIIRLYYDFIVLKSQKNLGFSIKKLREKMLDEYGFRFKDKQYDSVRSKMYKLMDFLLFCNYYRNDVVAGEALVRKLRFSMTDDEKEGIYADEAAKLWGKFRNDFENIADHMNGDVIKELGKADMDFDEKILDSEKKNASDLLYFSKMIYMLTYFLDGKEINDLLTTLISKFDNIKEFLKIMKSSAVDVECELTAGYKLFNDSQRITNELFIVKNIASMRKPAASAKLTMFRDALTILGIDDNITDDRISEILKLKEKGKGIHGLRNFITNNVIESSRFVYLIKYANAQKIREVAKNEKVVMFVLGGIPDTQIERYYKSCVEFPDMNSSLEAKRSELARMIKNISFDDFKNVKQQAKGRENVAKERAKAVIGLYLTVMYLLVKNLVNVNARYVIAIHCLERDFGLYKEIIPELASKNLKNDYRILSQTLCELCDKSPNLFLKKNERLRKCVEVDINNADSSMTRKYRNCIAHLTVVRELKEYIGDIRTVDSYFSIYHYVMQRCITKRENDTKQEDKIKYEDDLLKNHGYTKDFVKALNSPFGYNIPRFKNLSIEQLFDRNEYLTEK

SEQ ID NO: 2853 - protein, 960 aa, Artificial; identical to SEQ ID NO: 2800
  Synthetic

SEQ ID NO: 2854 - protein, 1023 aa, Artificial; identical to SEQ ID NO: 2798
  Synthetic

SEQ ID NO: 2855 - protein, 1023 aa, Artificial; identical to SEQ ID NO: 2798
  Synthetic

SEQ ID NO: 2856 - protein, 923 aa, Artificial
  Synthetic
MAKKNKMKPRELREAQKKARQLKAAEINNNAAPAIAAMPAAEAAAPAAEKKKSSVKAAGMKSILVSENKMYITSFGKGNSAVLEYEVDNNDYNQTQLSSKGSSNIELHGVNEVNITFSSKHGFESGVEINTSNPTHRSGESSPVRWDMLGLKSELEKRFFGKTFDDNIHIQLIYNILDIEKILAVYVTNIVYALNNMLGIKKSESYDDFMGYLSARNTYEVFTHPDKSNLSDKVKGNIKKSLSKFNVLLKTKRLGYFGLEEPKTKDTNALEAYKKRVYHMLAIVGQIRQSVFHDKSSKLHEDLYSFIDIIDSEYRETLDYLVDERFDSINKGFIQGNKVNISLLIDMMKDDYEADDIIRLYYDFIVLKSQKNLGFSIKKLREKMLDEYGFRFKDKQYDSVRSKMYKLMDFLLFCNYYRNDVAAGEALVRKLRFSMTDDEKEGIYADEAEKLWGKFRNDFENIADHMNGDVIKELGKADMDFDEKILDSEKKNASDLLYFSKMIYMLTYFLDGKEINDLLTTLISKFDNIKEFLKIMKSSAVNVECELTAGYKLFNDSQRITNELFIVKNIASMRKPAASAKLTMFRDALTILGIDDKITDDRISEILKLKEKGKGIHGLRNFITNNVIESSRFVYLIKYANAQKIREVAKNEKVVMFVLGGIPDTQIERYYKSCVEFPDMNSSLEAKRSELARMIKNISFDDFKNVKQQAKGRENVAKERAKAVIGLYLTVMYLLVKNLVNVNARYVIAIHCLERDFGLYKEIIPELASKNLKNDYRILSQTLCELCDDRDESPNLFLKKNKRLRKCVEVDINNADSSMTRKYRNCIAHLTVVRELKEYIGDIRTVDSYFSIYHYVMQRCITKRENDTKQEEKIKYEDDLLKNHGYTKDFVKALNSPFGYNIPRFKNLSIEQLFDRNEYLTEK

SEQ ID NO: 2857 - protein, 935 aa, Artificial
  Synthetic
VLLFSVSLEKKNLAQWEETSAEGRRSRVKAVGVKSVFVVGDDLYLATFGNGNETVLEKKITPDGKITTFPEEETFTAKLKFAKTELTEATSIGISNGRIVLPEISVDNPLHTTMQKNTIKKSAGEDMLQLKDVLENRYFDRSFNNDLHIRLIYNILDIEKILAEYTTNAVFAIDNVSGCSDDFLSNFSTRNQWDEFQNPEQHREHFGNKDNVICSVKKQQDLFFNFFKNNRIGYFGKAFFHAESERKIVKKTAKEVYHILTLIGSLRQWITHSTEGGISRLWLYQLEDALSSEYQETMNNCYNSTIYGLQKDFEKTNAPNLNFLAEILGKNASELAEPYFRFIITKEYKNLGFSIKTLREMLLDQPDLQEIRENHNVYDSIRSKLYKMMDFVLVYAYSNERKSKADALASNLRSAITEDAKKRVYQNEADQLWTSYQELFKRIRGFKGAQVKEYSSQNMPIPIQKQIQNILKPAEQVTCFTKLMYLLTMFLDGKEINDLLTTLINKFDNISSLLKTMEQLELQTTFKEDYTFFQQSSCLCEEITQLKSFARMGNPISNLKEVMMVDAIQILGTEKSEQELQSMACFFFRDKNGKKLNAGEHGMRNFIGNNVISNTRFQYLIRYGNPQKLHTLSQNETVVRFVLSRIAKNQRVQGMNGKNQIDRYYETCGGTNSWSVSEEEKINFLCKILTNMSYDQFQDVKQSDKIITAEEKRKKERYKAIISLYLTVLYQLIKNLVNINARYIIAFHCLERDAILYSLKFNTSINLKKRYTALTEMILGYETDEKARRKDTRTIYEKAEAAKNRHLKNVKWNCKTRENLENADKNAIVAFRNIVAHLWIIRDADRFITEMGAMKRYFDCYHYLLQRELEYILEKSNQGSKYTKKSLEKVQQYHSYCKDFLHMLCLPFAYCIPRYKNLSIAELFDRHELEAEPKE

SEQ ID NO: 2858 - protein, 954 aa, Artificial
  Synthetic
MGKKIHARDLREQRKTDRTVKFADQNEKREAQRAVQKKDAAVSVKSVSSVSSKKDNVTKSMAKAAGVKSVFAVENTVYMTSFGRGNDAVLEQKIVDTSHEPLNIDDPAYQLNVVTMNGYSVTGHRGETVSAVTDNPLRRFNGGKKDEPEQSVPTDMLCLKPTLEKKFFGKEFNDNIHIQLIYNILDIEKILAVYSTNAIYALNNMSADENIENSDFFMKRTTDETFDDFEKKKESTNSREKADFDAFEKFIGNYRLAYFADAFYVNKKNPKGKARNVLREDKELYSVLTLIGKLRHWCVHSEDGRAEFWLYKLNELKDDFKNVLDVVYNRPVEEINNRFIENNKVNIQILGSVYKNTDIAELVRSYYEFLITKKYKNMGFSIKKLRESMFEGKGYADKEYDSVRNKLYQMTDFILYTGYINEDSDRADDLVNTLRSSLKEDDKTTVYCKEADYLWKKYRESIREVADALDGDNIKKLSKSNIEIQEDKLRKCFISYADSVSEFTKLIYLLTRFLSGKEINDLVTTLINKFDNIRSFLEIMDELGLDRTFTAEYSFFEGSTKYLAELIELNSFVKSCSFDINAKRTMYRDALDILGIESGKTEEDIEKMIDNILQIDANGDKKLKKNNGLRNFIASNVIDSNRFKYLVRYGNPKKIRETAKCEPAVRFVLNEIPDAQIERYYEACCPKNTALCSANKRREKLADMIAEIEFENFSDAGNYQKANVTSRTHEAEIKRKNQAIIRLYLTVMYIMLKNLVNVNARYVIAFHCVERDTKLYAESGLEVGNIEKNKTNLTMAVMGVKLENGIIKTEFDKSLAENAANRYLRNARWYKLILDNLKKSERAVVNEFRNTVCHLNAIRNININIKEIKEVENYFALYHYLIQKHLENRFADKKVERDTGDFISKLEEHKTYCKDFVKAYCTPFGYNLVRYKNLTIDGLFDKNYPGKDDSDEQK

SEQ ID NO: 2859 - protein, 984 aa, Artificial; identical to SEQ ID NO: 2827
  Synthetic

SEQ ID NO: 2860 - protein, 921 aa, Artificial
  Synthetic
MAKKNKMKPRELREAQKKARQLKAAEINNNAAPAIAAMPAAEVIAPAAEKKKSSVKAAGMKSILVSENKMYITSFGKGNSAVLEYEVDNNDYNKTQLSSKDNSNIELGNVNEVNITFSSRRGFESGVEINTSNPTHRSGESSSVRGDMLGLKSELEKRFFGKTFDDNIHIQLIYNILDIEKILAVYVTNIVYALNNMLGEGDESNYDFMGYLSTFNTYKVFTNPNGSTLSDDKKENIRKSLSKFNVLLKTKRLGYFGLEEPKTKDNRVSEAYKKRVYHMLAIVGQIRQCVFHDKSGAKRFDLYSFINNIDPEYRDTLDYLVEERLKSINKDFIQGNKVNISLLIDMMKGYEADDIIRLYYDFIVLKSQKNLGFSIKKLREKMLEEYGFRFKDKQYDSVRSKMYKLMDFLLFCNYYRNDIAAGEALVRKLRFSMTDDEKEGIYAGEAAKLWGKFRNDFENIADHMNGDVIKELGKADMDFDEKILDSEKKNASDLLYFSKMIYMLTYFLDGKEINDLLTTLISKFDNIKEFLKIMKSSAVDVECELTAGYKLFNDSQRITNELFIVKNIASMRKPAASAKLTMFRDALTILGIDDNITDDRISEILKLKEKGKGIHGLRNFITNNVIESSRFVYLIKYANAQKIREVAKNEKVVMFVLGGIPDTQIERYYKSCVEVPDMNSSLEAKRSELARMIKNIRFDDFKNVKQQAKGRENVAKERAKAVIGLYLTVMYLLVKNLVNVNARYVIAIHCLERDFGLYKEIIPELASKNLKNDYRILSQTLCELCDDRDKSPNLFLKKNKRLRKCVEVDINNADSNMTRKYRNCIAHLTVVRELKEYIGDIRTVDSYFSIYHYVMQRRITKRKDDTKQEEKIKYEDDLLKNHGYTKDFVKALNSPFGYNIPRFKNLSIEQLFDRNEYLTEK

SEQ ID NO: 2861 - protein, 939 aa, Artificial
  Synthetic
MAKKKRITAKERKQNHRELLMKKADSNAEKEKAKKPVVENKPDTAISKDNTPKPNKEIKKSKAKLAGVKWVIKANDDVAYISSFGKGNNSVLEKRIMGDVSSNVNKDSHMYVNPKYTKKNYEIKNGFSSGSSLVTYPNKPDKNSGMDALCLKPYFEKDFFGHIFTDNMHIQAIYNIFDIEKILAKHITNIIYTVNSFDRNYNQSGNDTIGFGLNYRVPYSEYGGGKDSNGEPKNKFKWEKRDNFSKFYNESKPHLGYYENIFYDHGEPISEEKFYNYLNILNFIRNNTFHYKDNDIELYSENYSEEYVFINCLNKFVKNKFKNVNKNFISNEKNNLYIILNAYGKDTENVEVVKKYSKELYKLSVLKTNKNLGVNVKKLRESAIEYGYCPLPYDKEKEVAKLSSVKHKLYKTYDFVITHYLNSNDKILLEIVEALRLSKNDDEKENVYKKYAEKLFKADDVINPIKAISKLFVEKGNKLFKEKIIIKKEYIEDVSIDKNIYDFTKVIFFMTCFLDGKEINDLLTNIISKLQIIEDHNNVIKFISHNKDAVYKDYSDKYAIFRNAGKIATELEAIKSIARMENKIENASQEPLLNDALLSLGVSDDTKVLENTYKKYFDSKEKTDKQSQKVSTFLMNNVINNNRFKYVIKYINPADINGLAKNRYLVKFVLSKIPEEQIDSYYKLFSNEEEPGCEEKIKLLTKKISKLNFQTLFENNKIPNVEKEKKKAIITLYFTIVYILVKNLVNINGLYTLALYFVERDGYFYKDICGKKDKKKSYNDVDYLLLPEIFSGSKYREETKNLKLPKEKDRDIMKKYLPNDKDREKYNKFFTAYRNNIVHLNIIAKLSELTKNIDKDINSYFDIYHYCTQRVMFNYCKEKNDVVLAKMKDLAHIKSDCNEFSSKHTYPFSSAVLRFMNLPFAYNVPRFKNLSYKKFFDKQ

SEQ ID NO: 2862 - protein, 923 aa, Artificial
  Synthetic
MAKKNKMKPRELREAQKKARQLKAVEINNNAVPEIAAMPAAEVIAPVAEKKKSSVKAAGMKSILVSENKMYITSFGKGNSAVLEYEVDNNDYNKTQLSSKNSSNIELRGVNEVNITFSSKHGFESGVEINTSNPTHRSGESSPVRWDMLGLKSELEKRFFGKTFDDNIHIQLIYNILDIEKILAVYVTNIVYALNNMLGIKGSESYDDFMGYLSARNTYEVFTHPDKSSLSDDKKANVRKSLSKFNVLLKTKRLGYFGLEEPKTKDTRVSQAYKKRVYHMLAIVGQIRQSVFHDKSSKLHEDLYSFIDIIDSEYRETLDYLVDERFDSINKGFIQGNKVNISLLIDMMKDDYEADDIIRLYYDFIVLKSQKNLGFSIKKLREKMLDEYGFRFKDKQYDSVRSKMYKLMDFLLFCNYYRNDVIAGEALVRKLRFSMTDDEKEGIYADEAAKLWGKFRNDFENIADHMNGDVIKELGKADMDFDEKILDSEKKNASDLLYFSKMIYMLTYFLDGKEINDLLTTLISKFDNIKEFLKIMKSSAVDVECELTAGYKLFNDSQRITNELFIVKNIASMRKPAASAKLTMFRDALTILGIDDNITDDRISEILKLKEKGKGIHGLRNFITNNVIESSRFVYLIKYANAQKIREVAKNEKVVMFVLGGIPDTQIERYYKSCVEFPDMNSSLEAKRSELARMIKNISFDDFKNVKQQAKGRENVAKERAKAVIGLYLTVMYLLVKNLVNVNARYVIAIHCLERDFGLYKEIIPELASKNLKNDYRILSQTLCELCDNGDESPNLFLKKNKRLRKCVEVDINNADSSMTRKYRNCIAHLTVVRELKEYIGDIRTVDSYFSIYHYVMQRCITKRENDTKQEDKIKYEDDLLKNHGYTKDFVKALNSPFGYNIPRFKNLSIEQLFDRNEYLTEK

SEQ ID NO: 2863 - protein, 900 aa, Artificial
  Synthetic
LSTKKRFRYSVAAKAAGLKSSLAVDTDRTVMTSFGHGNAAILEKEIVDGEISVLNIENPAFDAVINDKKYALTGHHAGVHALVDQPQNRSDAVHIRGALEKKYFGDTFADNIHVQIAYNILDITKILTVYANNVVYALNNLVHADDDTQADELDSLGNFSAGTSYAKSKSKSKSKQQDFVELFIKKKEIHGYFGDTFAFLDKRIADADKEKQVYAMLACLGSLRQACSHYRIRYSVNGKNVDADADTWLFSSAQLDQTDPLFSEMLNRIYSHKIKTVNQNFFENNRKANFPILKKMYPETTLKVLMNEYYDFSIRKGYKNFGFSIKSLREALLSPQYESLIGVQIKDNKEYDTVRSKLYQLFDFALTRYFNQHPDMVDAFVVELRSLAKDEDAKNAVYEKYAKAVWNDVKQPIAVMLSYMNGSAIKNIKAFELKPDQKELNGIMNSNALDVPHFCKLVYFLTRFLDGKEINDLLTTLVNKFDNIHSFNQVLTALGLSASYEADYKIFEDSGRVVEYLREINSFARMTVDMEKIKRSAYKKALLILGSSKYSDEDLDARVDEMLGVDYNQNGEKIKVRVDTGFRNFIANNVVESSRFHYLIRYCHPRKIRNLAGNAALIEYQLRRLPELQILRYYEACTEPIKRTARTMDEKIGTLIDLIVKMDFSQFEDVQQNDRVRVFSDAEKKEKIRKMREKQRYQSIISLYLTMLYLIVKNLVNINARYVMAFQAWERDNYLLLQLSGKEAEAEYLNLTRHFIEPLDGAKPYLKKRPVEYLKKDMAMVGNSSIRHFRNATVHLNVIMEAHRYTKDIKYIGSYYALYHYILQRHLLDKIEEDSYAEKTVSEKLWESQISQYGTYSKDFVKALCCPFGYNLPRFKNLSIEQLFDRNESKEITDATAPRQ

SEQ ID NO: 2864 - protein, 960 aa, Artificial; identical to SEQ ID NO: 2800
  Synthetic

SEQ ID NO: 2865 - protein, 925 aa, Artificial
  Synthetic
MAKKNKMKPRELREAQKKARQLKAAEINNNAAPAIAAMPAAEVIAPVAGKKKSSVKAAGMKSILVSENKMYITSFGKGNSAVLEYEVDKVDNNDYNQTQLSSKGSSNIELCGVNEVNITFSSKHGFESGVEINTSNPTHRSGESSPVRWDMLGLKSELEKRFFGKTFDDNIHIQLIYNILDIEKILAVYVTNIVYALNNMLGIKKSESYDDFMGYLSARNTYEVFTHPDKSNLSDKAKGNIKKSFSTFNDLLKTKRLGYFGLEEPKTKDTRVSQAYKKRVYHMLAIVGQIRQSVFHDKSSKLDEDLYSFIDIIDSEYRETLDYLVEERLKSINKDFIEGNKVNISLLIDMMKGFEADDIIRLYYDFIVLKSQKNLGFSIKKLREKMLEEYGYRFKDKQYDSVCSKMYKLMDFLLFCNYYRNDVVAGEALVRKLRFSMTDDEKEGIYADEAAKLWGKFRNDFENIADHMNGDVIKELGKADMDFDEKILDSEKKNASDLLYFSKMIYMLTYFLDGKEINDLLTTLISKFDNIKEFLKIMKSSAVDVECELTAGYKLFNDSQRITNELFIVKNIASMRKPAASAKLTMFRDALTILGIDDKITDDRISEILKLKEKGKGIHGLRNFITNNVIESSRFVYLIKYANAQKIREVAKNEKVVMFVLGGIPDTQIERYYKSCVEFPDMNSSLEVKRSELARMIKNISFDDFKNVKQQAKGRENVAKERAKAVIGLYLTVMYLLVKNLVNVNARYVIAIHCLERDFGLYKEIIPELASKNLKNDYRILSQTLCELCDDRDKSSNLFLKKNKRLRKCVEVDINNADSSMTRKYRNCIAHLTVVRELKEYIGDIRTVDSYFSIYHYVMQRCITKREDDTKQEDKIKYEDNLLKNHGYTKDFVKALNSPFGYNIPRFKNLSIEQLFDRNEYLTEK

SEQ ID NO: 2866 - protein, 946 aa, Artificial; identical to SEQ ID NO: 2799
  Synthetic

SEQ ID NO: 2867 - protein, 921 aa, Artificial; identical to SEQ ID NO: 2836
  Synthetic

SEQ ID NO: 2868 - protein, 922 aa, Artificial; identical to SEQ ID NO: 2828
  Synthetic

SEQ ID NO: 2869 - protein, 984 aa, Artificial; identical to SEQ ID NO: 2827
  Synthetic

SEQ ID NO: 2870 - protein, 919 aa, Artificial
  Synthetic
MAKKNKMKPRELREAQKKARQLKAAEINNNAAPAIAAMPAAEVIAPAAEKKKSSVKAAGMKSIFVSENKMYITSFGKGNSAVLEYEVDNNDYNQTQLSSEDSSNIELCGVTKVNITFSSKHGLESGVEINTSNPTHRSGESSPVRWDMLGLKSELEKRFFGKTFDDNIHIQLIYNILDIEKMLAVYVTNIVYALNNMLGIKKSESYDDFMGYLSARNTYEVFTHPDKSNLSDKVKGNIKKSFSTFNDLLKTKRLGYFGLEEPKTKDTRVLEAYKKRVYHMLAIVGQIRQCVFHDKSGAKRFDLYSFINNIDPEYRETLDYLVDERFDSINKDFIEGNKVNISLLIDMMKGYEADDIIRLYYDFIVLKSQKNLGFSIKKLREKMLDEYGFRFKDKQYDSVRSKMYKLMDFLLFCNYYRNDVVAGEALVRKLRFSMTDDEKEGIYADEAAKLWGKFRNDFENIADHMNGDVIKELGKADMDFDEKILDSEKKNASDLLYFSKMIYMLTYFLDGKEINDLLTTLISKFDNIKEFLKIMKSSAVDVECELTAGYKLFNDSQRITNELFIVKNIASMRKPAASAKLTMFRDALTILGIDDKITDDRISEILKLKEKGKGIHGLRNFITNNVIESSRFVYLIKYANAQKIREVAKNEKVVMFVLGGIPDTQIERYYKSCVEFPDMNSSLEAKRSELARMIKNISFDDFKNVKQQAKGRENVAKDRAKAVIGLYLTVMYLLVKNLVNVNARYVIAIHCLERDFGLYKEIIPELASKNLKNDYRTLSQTLCGLCDKSPNLFLKKNERLRKCVEVDINNADSNMTRKYRNCIAHLTVVRELKEYIGDIRTVDSYFSIYHYVMQRCITKRENDTKQEDKIKYEDDLLKNHGYTKDFVKALNSPFGYNIPRFKNLSIEQLFDRNEYLTEK

SEQ ID NO: 2871 - protein, 936 aa, Artificial
  Synthetic
MSNKSIAKASGLKSTFKIGKDTYLMTSFGRGNTALAEKDIKEGTIEDILHTFSAFLIGDKDVRIQKNKLHAVVQLPVQDHNQLQAKSAIEKIFFGASYEDNFHVQIAYNVMDIKKLLTVYANNIVFTVNNLLRIEDEDFLGVFGVMNDFEKAQIAYAIISTGLITRDKGTNPTYYINNNVWNKNQNGLLATLKNRVNQHKNPKILFFTNVSNYIVNHLGFRKFSDIQKAAKSFESIKKMGLDKCANYFSDAFSDSNGNIDLEFIYESLRLLGSMRQTAFHSYDINGMSPGGKNFYSLFDIDIKASARTKEIIDTITGNKLNALNENFVETNTVNLNILFSAYPHIEKKELVKQFYDFSVRKVFKNMGFSVKNLRENILANEPAVKELNGKKYDSVRSKLYSLMDFVIYNYYLSHPQEADDFIEFIRMNCVSKRDAKLEKIEDEKKQAIYREESARLWKQISGIVLENILPGIDKVQSRDKKLNKGLDSELQKAVLSVVQTPDDLNYFAKAMYCICAFLDGKEINMFLDSLINSFENIESLREIAAEVNCPVEFNSSYSFFNHCGKMADELRFIKSIARMNKGKKASKNSKLHIKSYQYFDSAAILGEYDEEKIKELFRLEERTQKGQKVDHTLRNFFINNVIVSNRFNYVIRFINPKHARAIMENEALVSFTLQEIDEKQIIRYYLSVRNNEDPLEADSDYMRKKLVDKLMNVSFSAFEKVSNDSSEAVEKERLKALVGLYLTIIYLIAKALVRINTSYSIAFGIFERDCEIIKQKAHDEKNVSLEDKMKIILSKNKEDPEPEYCSITQYFDDCGRINRRVKRLIERNSIHYDENTFRKIRNCAEHLSVVSSFPAYVSEIKRVESYFDLYHYILLRVLKDGAHIKQEATLKGYEAVLRHQTAYKDYLYGILAPFAYNQARYINLACKKRFIKSYGK

SEQ ID NO: 2872 - protein, 923 aa, Artificial; identical to SEQ ID NO: 2839
  Synthetic

SEQ ID NO: 2873 - protein, 918 aa, Artificial; identical to SEQ ID NO: 2830
  Synthetic

SEQ ID NO: 2874 - protein, 925 aa, Artificial; identical to SEQ ID NO: 2833
  Synthetic

SEQ ID NO: 2875 - protein, 926 aa, Artificial
  Synthetic
MAKKNKMKPRELREVQKKARQLKAAEINNNAAPAIAAMPAAEVIAPAAEKKKSSVKAAGMKSIFVSENKMYITSFGKGNSAVLEYEVDNNDYNQTQLSSEGSSNIELHGVNEVNITFSSKHGFGSGVEINTSNPTHRSGESSPVRGDMLGLKSELEKRFFGKTFDDNIHIQLIYNILDIEKILAVYVTNIVYALNNMLGEGDDESHDDFMGYLSARNTYEVFTHPDKSNLSDKVKGNINKVKGNIKKSFSTFNDLLKTKRLGYFGFEEPKTKDTRVSQAYKKRVYHMLAIVGQIRQSVFHDKSSKLDEDLYSFIDIIDSEYRETLDYLVDERFDSINKGFIQGNKVNISLLIDMMKGYEADDIIRLYYDFIVLKSQKNLGFSIKKLREKMLEEYGYRFKDKQYDSVRSKMYKLMDFLLFCNYYRNDVVAGEALVRKLRFSMTDDEKEGIYADEAAKLWGKFRNDFENIADHMNGDVIKELGKADMDFDEKILDSEKKNASDLLYFSKMIYMLTYFLDGKEINDLLTTLISKFDNIKEFLKIMKSSAVDVECELTAGYKLFNDSQRITNELFIVKNIASMRKPAASAKLTMFRDALTILGIDDKITDDRISEILKLKEKGKGIHGLRNFITNNVIESSRFVYLIKYANAQKIREVAKNEKVVMFVLGGIPDTQIEHYYKSCVEVPDVNSSLEAKRSELARMIKNISFDDFKNVKQQAKGRENVAKERAKAVIGLYLTVMYLLVKNLVNVNARYVIAIHCLERDFGLYKEIIPELASKNLKNDYRILSQTLCELCDKSPNLFLKKNERLRKCVEVDINNADSNMTRKYRNCIAHLTVVRELKEYIGDIRTVDSYFSIYHYVMQRCITKREDDKKQEEKIKFEDDLLKNHGYTKDFVKALNSPFGYNIPRFKNLSIEQLFDRNEYLTEK

SEQ ID NO: 2876 - protein, 919 aa, Artificial
  Synthetic
MAKKNKMKPRELREAQKKARQFKAAEINNNAAPAIAAMPAAEVIAPVAEKKKSSVKAAGMKSILVSENKMYITSFGKGNSAVLEYEVDNNDYNKTQLSSKDNSNIELCGVNEVNITFSSKHGFESGVEINTSNPTHRSGESSPVRWDMLGLKSELEKRFFGKTFDDNIHIQLIYNILDIEKILAVYVTNIVYALNNMLGVKGSESHDDFIGYLSTNNTYDVFIDPDNSSLSDDKKANVRKSLSKFNVLLKTKRLGYFGLEEPKTKDNRVSEAYKKRVYHMLAIVGQIRQCVFHDKSGAKRFDLYSFINNIDPEYRDTLDYLVEERLKSINKDFIQGNKVNISLLIDMMKGYEADDIIRLYYDFIVLKSQKNLGFSIKKLREKMLEEYGFRFKDKQYDSVRSKMYKLMDFLLFCNYYRNDIAAGEALVRKLRFSMTDDEKEGLYADEAAKLWGKFRNDFENIADHMNGDVIKELGKADMDFDEKILDSEKKNASDLLYFSKMIYMLTYFLDGKEINDLLTTLISKFDNIKEFLKIMKSSAVNVECELTAGYKLFNDSQRITNELFIVKNIASMRKPAASAKLTMFRDALTILGIDDKITDDRISEILKLKEKGKGIHGLRNFITNNVIESSRFVYLIKYANAQKIRKVAENEKVVMFVLGGIPDTQIERYYKSCVEFPDMNSSLEVKRSELARMIKNISFDDFKNVKQQAKGRENVAKERAKAVIGLYLTVMYLLVKNLVNVNARYVIAIHCLERDFGLYKEIIPELASKNLKNDYRILSQTLCELCDKSPNLFLKKNERLRKCVEVDINNADSSMTRKYRNCIAHLTVVRELKEYIGDIRTVDSYFSIYHYVMQRCITKREDDKKQEEKIKFEDDLLKNHGYTKDFVKALNSPFGYNIPRFKNLSIEQLFDRNEYLTEK

SEQ ID NO: 2877 - protein, 919 aa, Artificial
  Synthetic
MAKKNKMKPRELREAQKKARQLKAAEINNNAVPAIAAMPAAEVIAPAAEKKKSSVKAAGMKSILVSENKMYITSFGKGNSAVLEYEVDNNDYNQTQLSSDGSSNIELRGVNEVNITFSSKHGFESGVEINTSNPTHRSGESSPVRGDMLGLKSELEKRFFGKTFDDNIHIQLIYNILDIEKILAVYVTNIVYALNNMLGVKGSESYDDFMGYLSAQNTYYIFTHPDKSNLSDKVKGNIKKSLSKFNDLLKTKRLGYFGLEEPKTKDKRVSEAYKKRVYHMLAIVGQIRQSVFHDKSNELDEYLYSFIDIIDSEYRDTLDYLVDERFDSINKGFVQGNKVNISLLIDMMKGYEADDIIRLYYDFIVLKSQKNLGFSIKKLREKMLDEYGFRFKDKQYDSVRSKMYKLMDFLLFCNYYRNDVVAGEALVRKLRFSMTDDEKEGIYADEAEKLWGKFRNDFENIADHMNGDVIKELGKADMDFDEKILDSEKKNASDLLYFSKMIYMLTYFLDGKEINDLLTTLISKFDNIKEFLKIMKSSAVDVECELTAGYKLFNDSQRITNELFIVKNIASMRKPASSAKLTMFRDALTILGIDDNITDDRISEILKLKEKGKGIHGLRNFITNNVIESSRFVYLIKYANAQKIRKVAKNEKVVMFVLGGIPDTQIERYYKSCVEFPDMNSSLEVKRSELARMIKNISFDDFKNVKQQAKGRENVAKERAKAVIGLYLTVMYLLVKNLVNVNARYVIAIHCLERDFGLYKEIIPELASKNLKNDYRILSQTLCELCDKSPNLFLKKNRRLRKCVEVDINNADSSMTRKYRNCIAHLTVVRELKEYIGDIRTVDSYFSIYHYVMQRCITKRENDTKQEEKIKYEDDLLKNHGYTKDFVKALNSPFGYNIPRFKNLSIEQLFDRNEYLTEK

SEQ ID NO: 2878 - protein, 925 aa, Artificial
  Synthetic
MAKKNKMKPRELREAQKKARQLKAAEINNNAAPAIAAMPAAEVIAPVAGKKKSSVKAAGMKSILVSENKMYITSFGKGNSAVLEYEVDKVDNNDYNKTQLSSKDSSNIELHGVNEVNITFSSKHGFESGVEINTSNPTHRSGESSPVRWDMLGLKSELEKRFFGKTFDDNIHIQLIYNILDIEKILAVYVTNIVYALNNMLGIKDSESYDDFMGYLSAKNTYEVFTHPDKSNLSDKVKGNIKKSFSTFNDLLKTKRLGYFGLEEPKTKDTRVSQAYKKRVYHMLAIVGQIRQSVFHDKSSKLDEDLYGFIDIIDSEYRETLDYLVDERFDSINKGFIQGNKVNISLLIDMMKGYEADDIIRLYYDFIVLKSQKNLGFSIKKLREKMLDEYGFRFKDKQYDSVRSKMYKLMDFLLFCNYYRNDIAAGEALVRKLRFSMTDDEKEVIYADEAAKLWGKFRNDFENIADHMNGDVIKELGKADMDFDEKILDREKKNASDLLYFSKMIYMLTYFLDGKEINDLLTTLISKFDNIKEFLKIMKSSAVDVECELTAGYKLFNDSQRITNELFIVKNIASMRKPAASAKLTMFRDALTILGIDDKITDDKISEILKLKEKGKGIHGLRNFVTNNVIESSRFVYLIKYANAQKIREVAKNEKVVMFVLGGIPDTQIERYYKSCVEFPDMNSSLEAKRSELARMIKNIRFDDFKNVKQQAKGRENVAKERAKAVIGLYLTVMYLLVKNLVNVNARYVIAIHCLERDFGLYKEIIPELASKNLKNDYRILSQTLCELCDDRDKSPNLFLKKNKRLRKCVEVDINNADSIMTRKYRNCIAHLTVVRELKEYIGDIRTVDSYFSIYHYVMQRRITKRKDDTKQEEKIKYEDDLLKNHGYTKDFVKALNSPFGYNIPRFKNLSIEQLFDRNEYLTEK

SEQ ID NO: 2879 - protein, 922 aa, Artificial
  Synthetic
MAKKNKMKPRELREAQKKARQLKAAEINNNAAPAIAAMPAAQVIAPAAEKKKSSVKAAGMKSILVSENKMYITSFGKGNSAVLEYEVDKVDNNNYNKTQLSSKDNSNIELGDVNEVNITFSSKHGFESGVEINTSNPTHRSGESSPVRWDMLGLKSELEKRFFGKTFDDNIHIQLIYNILDIEKILAVYVTNIVYALNNMLGIKGSESYDDFMGYLSARNTYEVFTHPDKSNLSDKVKGNIKKSLSKFNDLLKTKRLGYFGLEEPKTKDTRVSQAYKKRVYHMLAIVGQIRQSVFHDKSSKLDEDLYSFIDIIDSEYRETLDYLVDERFDSINKGFIQGNKVNISLLIDMMKGYEADDIIRLYYDFIVLKSQKNLGFSIKKLREKMLDEYGFRFKDKQYDSVRSKMYKLMDFLLFCNYYRNDVVAGEALVRKLRFSMTDDEKEGIYADEASKLWGKFRNDFENIADHMNGDVIKELGKADMDFDEKILDSEKKNASDLLYFSKMIYMLTYFLDGKEINDLLTTLISKFDNIKEFLKIMKSSAVDVECELTAGYKLFNDSQRITNELFIVKNIASMRKPAASAKLTMFRDALTILGIDDKITDDRISEILKLKEKGKGIHGLRNFITNNVIESSRFVYLIKYANAQKIREVAENEKVVMFVLGGIPDTQIERYYKSCVEFPDMNSPLEAKRSELARMIKNIRFDDFKNVKQQAKGRENVAKERAKAVIGLYLTVMYLLVKNLVNVNARYVIAIHCLERDFGLYKEIIPELASKNLKNDYRILSQTLCELCDKSPNLFLKKNERLRKCVEVDINNADSSMTRKYRNCIAHLTVVRELKEYIGDIRTVDSYFSIYHYVMQRCITKREDDIKQEEKIKYEDDLLKNHGYTKDFVKALNSPFGYNIPRFKNLSIEQLFDRNEYLTEK

SEQ ID NO: 2880 - protein, 922 aa, Artificial
  Synthetic
MAKKNKMKPRELREAQKKARQLKAAEINNNAAPAIAAMPAAEAAAPAAEKKKSSVKAAGMKSILVSENKMYITSFGKGNSAVLEYEVDNNDYNKTQLSSKGSSNIELHGVNEVNITFSSKHGFESGVEINTSNPTHRSGESSPVRWDMLGLKSELEKRFFGKTFDDNIHIQLIYNILDIEKILAVYVTNIVYALNNMLGVKGSESHDDFIGYLSTNNTYDVFIDPDNSSLSDDKKANVRKSLSKFNVLLKTKRLGYFGLEEPKTKDTRVSQAYKKRVYHMLAIVGQIRQCVFHDKSGAKRFDLYSFINNIDPEYRETLDYLVDERFDSINKGFIEGNKINISLLIDMMKGYEADDIIRLYYDFIVLKSQKNLGFSIKKLREKMLDEYGFRFKDKQYDPVRSKMYKLMDFLLFCNHYRNDVAAGEALVRKLRFSMTDDEKEGIYADEAAKLWGKFRNDFENIADHMNGDVIKELGKADMDFDEKILDSEKKNASDLLYFSKMIYMLTYFLDGKEINDLLTTLISKFDNIKEFLKIMKSSAVDVECELTAGYKLFNDSQRITNELFIVKNIASMRKPAASAKLTMFRDALTILGIDDNITDDRISEILKLKEKGKGIHGLRNFITNNVIESSRFVYLIKYANAQKIREVAKNEKVVMFVLGGIPDTQIERYYKSCVEFPDMNSSLEAKRSELARMIKNISFDDFKNVKQQAKGRENVAKERAKAVIGLYLTVMYLLVKNLVNVNARYVIAIHCLERDFGLYKEIIPELASKNLKNDYRILSQTLCELCDDRDESPNLFLKKNKRLRKCVEVDINNADSSMTRKYRNCIAHLTVVRELKEYIGDIRTVDSYFSIYHYVMQRCITKRENDTKQEEKIKYEDDLLKNHGYTKDFVKALNSPFGYNIPRFKNLSIEQLFDRNEYLTEK

SEQ ID NO: 2881 - protein, 921 aa, Artificial
  Synthetic
MAKKNKMKPRELREAQKKARQLKAAEIKNNAVPAIAAMPAAEAAAPAVEKKKSSVKAAGMKSILVSENKMYITSFGKGNSAVLEYEVDKVDNNNYNKTQLSSKDNSNIELGDVNEVNITFSSKRGNESGVEINTSNPTHRSGESSPVRWDMLGLKSELEKRFFGKTFDDNIHIQLIYNILDIEKILAVYVTNIVYALNNMLGEGDESNYDFMGYLSTFNTYKVFTNPNGSTLSDDKKENIRKSLSKFNALLKTKRLGYFGLEEPKTKDTRASEAYKKRVYHMLAIVGQIRQCVFHDKSGAKRFDLYSFINNIDPEYRDTLDYLVDERFDSINKGFIQGNKVNISLLIDMMKGYEADDIIRLYYDFIVLKSQKNLGFSIKKLREKMLEEYGYRFKDKQYDSVRSKMYKLMDFLLFCNYYRNDVVAGEALVRKLRFSMTDDEKEGIYADEAAKLWGKFRNDFENIADHMNGDVIKELGKADMDFDEKILDSEKKNASDLLYFSKMIYMLTYFLDGKEINDLLTTLISKFDNIKEFLKIMKSSAVDVECELTAGYKLFNDSQRITNELFIVKNIASMRKPAASAKLTMFRDALTILGIDDKITDDRISEILKLKEKGKGIHGLRNFITNNVIESSRFVYLIKYANAQKIREVAKNEKVVMFVLGGIPDTQIERYYKSCVEFPDMNSSLGVKRSELARMIKNISFDDFKNVKQQAKGRENVAKERAKAVIGLYLTVMYLLVKNLVNVNARYVIAIHCLERDFGLYKEIIPELASKNLKNDYRILSQTLCELCDKSPNLFLKKNERLRKCVEVDINNADSSMTRKYRNCIAHLTVVRELKEYIGDIRTVDSYFSIYHYVMQRCITKREDDIKQEEKIKYEDDLLKNHGYTKDFVKALNSPFGYNIPRFKNLSIEQLFDRNEYLTEK

SEQ ID NO: 2882 - protein, 1023 aa, Artificial; identical to SEQ ID NO: 2798
  Synthetic

SEQ ID NO: 2883 - protein, 933 aa, Artificial
  Synthetic
MLLCAIMQASTKKDRKGGVRMEREVKKPPKKSLAKAAGLKSTFVISPQEKELAMTAFGRGNDALLQKRIVDGVVRDVAGEKQQFQVQRQDESRFRLQNSRLADRTVTADDPLHRAEAPHRQPLGAGMDQLRRKAVLEQKYFGRTFDDNIHIQLIYNILDIHKMLAVPANHIVHTLNLLGGYGETDFVGMLPAGLPYDKLRMPDAGDTRRNVKRDVKADIAAYAKRPQLAYLGAAFYDVTPGKSKRDAARSRVKREQDVYTILSLMSLLRQFCAHDSVRIWGQNTPAALYHLQALPQDMKDLLDDGWRRALGGVNNHFLDTNKVNLLTLFEYYGADAKQERVALTQDFYRFVVLKEQKNMGFSLRRLREELLKLPDAAYLTGQKYDSVRQKLYMLLDFLLCRLYAQERADRCEELVSALRCALSNEERDAVYQAEAAALWQALGDTLRRKLLPLLKGKKLQDKDKKTLDELGLSRDVLDGVLFRPAQQGSRANADYFCRLMHLSTWFMDGKEINTLLTTLISKLENIDSLRNVLESMGLSCSFVPAYAMFDHSRYIAGQLRVVNNIARMRKPAITAKREMYRAAVVLLGVDSPEAAAAITDDLLQIDPETGKVRPRGDSARDTGLRNFIANNVVESRRFTYLLRYMTPEQARALAQNEKLIAFVLSTVPDTQLERYCRTCGREDITGRPAQIRYLTAQIMGVRYESFTDVEQRGRGDNPKKERYKALIGLYLTVLYLAVKNMVNCNARYVIAFYCRDRDTALYQKEVCWYDLEEDKKSGKQRQVEDYTALTRYFVSQGYLNRHACGYLRSNMNGISNGLLVAYRNAVDHLNVIPPLGSLCRDIGLVDSYFALYHYAVQQYLNGRENQRPPYKTSREQELFAAMAQHRTWCSDLVKALNTPFGYNLARYKNLSIDGLFDREGDHVVREDGEKPAE

SEQ ID NO: 2884 - protein, 931 aa, Artificial
  Synthetic
MEGRDMTETKPKREDIAKTPAAKSRSKAAGLKSTFAVNGSVLLTSFGRGNDAVPEKLITEKAVSEINTVKPRFSVEKPATSYSSSFGIKSHISATADNPLAGRAPVGEDAIHAKEVLEQRVFGKTFSDDNIHIQLIYNILDIRKILSTYANNVVFTINSMRRLDEYDREQDYLGYLYTGNSYERLLDIADKYAVDGEDWRNTAAGISNDFEKKQFQTINGFWDLLDMIEPYMCYFSEAFFCETTVKDPDSGRIVPCLEQRSDGDIYNILRILSIVRQTCMHDNASMRTVMFTLGQNSVRDRKNGFDELAELLDYLYDEKIDIVNRDFLRNQKNNIELLSRIYGSSADSPERDRLVQNFYDFRVLSQDKNLGFSIKKLREKLLDSPALSVVRSKKYDTMRSKIYSLIDFMIYRKFSENHVAVDDFVEELRSLLTEDEKESAYSRWAETLINDGFAQEILVKLLPQTDPAVIGKIKGKKLLNDSIAGIKLKKDASFFTKIINVLCMFQDGKEINELVSSLVNKFANIQSFVDVMRSQGIDSGFTADYAMFAESGRISRELHILKGIARMQHSIAGLGDVKIYGSDDKFHGVSRRVYTDAAYILGFGERSEDNDGYVDDYVSSKLLGGADKNLRNFITNNVIKNRRFLYTVRYMNPKRAKKLVQNDALVVLALSGIPETQIDRYYKSCIEKRSFNPDLNEKIAALSEMITTLKIDDFEDVKQNPEKNANYEAKKNQRISKERYKACIGLYLTVLYLICKNLVKINARYSIAIGCLERDTQLHGVDFKGAAYMTRDVFIAKGWINPKKPTVKSIKEQYAFLTPYIFTTYRNMIAHLAAVTNAYKYIPQMDRFKSWFHLYHTVIQHSLIQQYEYDRDYGRKGAPVVSERVLQLLEQCREHSNYSRDLLHILNLPFGYNLPRYLNLSSEKYFDANAI

SEQ ID NO: 2885 - protein, 922 aa, Artificial
  Synthetic
MAKKNKMKPRELREAQKKARQLKAAEINNNAVPAIAAMPAAEAAAPAAEKKKSSVKAAGMKSILVSENKMYITSFGKGNSAVLEYEVDNNDYNKTQLSSKDNSNIELCDVDEVNITFSSKHGFESGVKINTSNPTHRSGESSSVRGDMLGLKSELEKRFFGKTFDDNIHIQLIYNILDIEKILAVYVTNIVYALNNMLGLENESNNDFMGYLSAKNTYDVFTDPDESDLSKNIKGNIKKSLSKFNDLLKTKRLGYFGLEEPKTKDKRVSEAYKKRVYHMLAIVGQIRQSVFHDKSNELDEYLYSFIDIIDSEYRETLDYLIDERFDSINKGFIQGNKVNISLLIDMMKDDYEADDIIRLYYDFIVLKSQKNLGFSIKKLREKMLDEYGFRFKDKQYDSVRSKMYKLMDFLLFCNYYRNDVIAGEALVRKLRFSMTDDEKEGIYADEAAKLWGKFRNDFENIADHMNGDVIKELGKADMDFDEKILDSEKKNASDLLYFSKMIYMLTYFLDGKEINDLLTTLISKFDNIKEFLKIMKSSAVNVECELTAGYKLFNDSQRITNELFIVKNIASMRKPAASAKLTMFRDALTILGIDDKITDDRISEILKLKEKGKGIHGLRNFITNNVIESSRFVYLIKYANAQKIREVAENEKVVMFVLGGIPDTQIERYYKSCVEFPDMNSSLEVKRSELARMIKNISFDDFKNVKQQAKGRENVAKERAKAVIGLYLTVMYLLVKNLVNVNARYVIAIHCLERDFGLYKEIIPELASKNLKNDYRILSQTLCELCDDRDESPNLFLKKNRRLRKCVEVDINNADSSMTRKYRNCIAHLTVVRELKEYIGDIRTVDSYFSIYHYVMQRCITKREDDTKQEEKIKYEDDLLKNHGYTKDFVKALNSPFGYNIPRFKNLSIEQLFDRNEYLTEK

SEQ ID NO: 2886 - protein, 926 aa, Artificial
  Synthetic
MAKKNKMKPRELREAQKKARQLKAAEINNNAAPAIAAMPAAEVIAPAAEKKKSSVKAAGMKSILVSKNKMYITSFGKGNSAVLEYEVDNNDYNKTQLSSKDNSNIELGNVNEVNITFSSRRGFESGVEINTSNPTHRSGESSSVRGDMLGLKSELEKRFFGKTFDDNIHIQLIYNILDIEKILAVYVTNIVYALNNMLGVKDSESYDDFMGYLSARNTYKVFTHPDKSNLSDKVKGNINKVKGNIKKSFSTFNDLLKTKRLGYFGLEEPKTKDTRVSQAYKKRVYHMLAIVGQIRQSVFHDKSSKLHEDLYSFIDIIDSEYRETLDYLVDERFESINKGFIQGNKVNISLLIDMMKGYEADDIIRLYYDFIVLKSQKNLGFSIKKLREKMLDEYGFRFKDKQYDSVRSKMYKLMDFLLFCNYYRNDVIAGEALVRKLRFSMTDDEKEGIYADEASKLWGKFRNDFENIADHMNGDVIKELGKADMDFDEKILDSEKKNASDLLYFSKMIYMLTYFLDGKEINDLLTTLISKFDNIKEFLKIMKSSAVDVECELTAGYKLFNDSQRITNELFIVKNIASMRKPAASAKLTMFRDALTILGIDDNITDDRISEILKLKEKGKGIHGLRNFITNNVIESSRFVYLIKYANAQKIRKVAENEKVVMFVLGGIPDTQIERYYKSCVEFPDMNSSLEVKRSELARMIKNISFDDFKNVKQQAKGRENVAKERAKAVIGLYLTVMYLLVKNLVNVNARYVIAIHCLERDFGLYKEIIPELASKNLKNDYRILSQTLCELCDKSPNLFLKKNERLRKCVEVDINNADSSMTRKYRNCIAHLTVVRELKEYIGDIRTVDSYFSIYHYVMQRCITKREDDTKQEEKIKYEDDLLKNHGYTKDFVKALNSPFGYNIPRFKNLSIEQLFDRNEYLTEK

SEQ ID NO: 2887 - protein, 921 aa, Artificial
  Synthetic
MAKKNKMKPRELREAQKKARQFKAAEINNNAAPAIAAMPAAEVIAPVAEKKKSSVKAAGMKSILVSENKMYITSFGKGNSAVLEYEVDNNDYNKTQLSSKDNSNIELCGVNEVNITFSSKHGFESGVEINTSNPTHRSGESSPVRWDMLGLKSELEKRFFGKTFDDNIHIQLIYNILDIEKILAVYVTNIVYALNNMLGEGDESNYDFMGYLSTFNTYKVFTNPNGSTLSDDKKENIRKSLSKFNALLKTKRLGYFGLEEPKTKDTRVLEAYKKRVYHMLAIVGQIRQCVFHDLSEHSEYDLYSFIDNSKKVYRECRETLDYLVDERFDSINKGFIQGNKVNISLLIDMMKGYEADDIIRLYYDFIVLKSQKNLGFSIKKLREKILDEYGFRFKDKQYDSVRSKMYKLMDFLLFCNYYRNDIAAGESLVRKLRFSMTDDEKEGIYADEAAKLWGKFRNDFENIADHMNGDVIKELGKADMDFDEKILDSEKKNASDLLYFSKMIYMLTYFLDGKEINDLLTTLISKFDNIKEFLKIMKSSAVDVECELTAGYKLFNDSQRITNELFIVKNIASMRKPAASAKLTMFRDALTILGIDDKITDDRISGILKLKEKGKGIHGLRNFITNNVIESSRFVYLIKYANAQKIREVAKNEKVVMFVLGGIPDTQIERYYKSCVEFPDMNSSLGVKRSELARMIKNISFDDFKNVKQQAKGRENVAKERAKAVIGLYLTVMYLLVKNLVNVNARYVIAIHCLERDFGLYKEIIPELASKNLKNDYRILSQTLCELCDKSPNLFLKKNERLRKCVEVDINNADSSMTRKYRNCIAHLTVVRELKEYIGDICTVDSYFSIYHYVMQRCITKRENDTKQEEKIKYEDDLLKNHGYTKDFVKALNSPFGYNIPRFKNLSIEQLFDRNEYLTEK

SEQ ID NO: 2888 - protein, 954 aa, Artificial
  Synthetic
MTKPEKKQIKQATLTKRMGLKSTLVFDNKITVTSFANSSNSEKASAHIEKRTDFWGKTIMQDEKMFRTDVEKQQIYIEKEFPDENNKIITQTAMFENPALRNCGKDYIGMKNSVEKVMFGKEFPNDNLHIQIAYNILDIKKIICPYINNVVNIFYNLGRGKLKDDKNDLLGNKIGLKSEEKIEDLLINSSAYFVYFGDVFKQVKLSKEQQEKSEEEKRRIWQELWNKNFDHNKNIVNSLIKFRQMCFHQNYENSDKEVSSTALFNIEQFLNKEEKASLDEIYTGAIDKVNYDFNKNSSNNLYILEQIYCNDKNLGQRYYDFVVKKSQCNLGLDTKLIRELLIRKLSDEGLDINDSRYDTYRNKIYTVFGFILYYELTKNETFCQEIVAKLRRFGGDEIEKNKIYNEYFLRKEAVYNQIAEKFKQSVCWFKKEKEKKKEFSSKTKIDLKSVQKIEDQNASVFAKMVYLISRFLDGKEINELCTKLLNKFKNINELVETAKRCGETIEFCPEYKMFKNSAKLAEEMRFVQSVSKMKKLTKKEDKSIKPQVIDDALELLGLKIEKYKKDDQGNFVLDDQNHNVWTDEYKSYRKEYFTPKNSDSMNDAEKSFVAKGHQKRNFIISNVVLNKRFLYVAKYGSPTACNQMMKNQKIVRMALESISEDQLRKYARRVYDNKEHFQNQTADEIRENLAKKLKNFNIGAELKTVGNLSKKDFCSSKNTVKDKSKSLIGLYLTVAYLITKNMIKINTRFSIAFGAYERDMEFLLQQKKEKGNRFDWLALTQKFLSEDKNYYFEHDLRRKEINKISDRDERKKQHRENDKYYDSRMHFSRHSFEYISKNFAEVQSHPDPLKLFIKYRNNVMHLNIIRDLNDYLPDFKRGKAFEKTDTFYDLYCYCLQKMLLSEVDGFSAINENIDKYCTASKDFMNLLNIIFAYNVPRYKNLSNKELFYRLDSEQ

SEQ ID NO: 2889 - protein, 925 aa, Artificial
  Synthetic
MAKKNKMKPRELREAQKKARQLKAAEINNNAVPAIAAMPAAEVIAPAAEKKKSSVKAAGMKSILVSENKMYITSFGKGNSAVLEYEVDKVDNNNYNKTQLSSESSSNIELCGVTKVNITFSSKHGFGSGVEINTSNPTHRSGESSPVRWDMLGLKSELEKRFFGKTFDDNIHIQLIYNILDIEKILAVYVTNIVYALNNMLGVKGSESYDDFMGYLSAQNTYYIFTHPDKSNLSDKVKGNIKKSLSKFNDLLKTKRLGYFGLEEPKTKDTRVSQAYKKRVYHMLAIVGQIRQCVFHDKSGAKRFDIYSFINNIDPEYRETLDYLVDERFDSINKGFIQGNKVNISLLIDMMKGYEADDIIRLYYDFIVLKSQKNLGFSIKKLREKMLDEYGFRFKDKQYDSVRSKMYKLMDFLLFCNYYRNDIAAGEALVRKLRFSMTDDEKEGIYADEAAKLWGKFRNDFENIADHMNGDVIKELGKADMDFDEKILDSEKKNASDLLYFSKMIYMLTYFLDGKEINDLLTTLISKFDNIKEFLKIMKSSAVDVECELTAGYKLFNDSQRITNELFIVKNIASMRKPAASAKLTMFRDALTILGIDDKITDDRISEILKLKEKGKGIHGLRNFITNNVIESSRFVYLIKYANAQKIREVAKNEKVVMFVLGGIPDAQIERYYKSCVEFPDMNSSLEVKRSELARMIKNISFDDFKNVKQQAKGRENVAKERAKAVIGLYLTVMYLLVKNLVNVNARYVIAIHCLERDFGLYKEIIPELASKNLKNDYRILSQTLCELCDDRDESPNLFLKKNKRLRKCVEVDINNADSSMTRKYRNCIAHLTVVRELKEYIGDIRTVDSYFSIYHYVMQRCITKREDDKKQEEKIKYEDDLLKNHGYTKDFVKALNSPFGYNIPRFKNLSIEQLFDRNEYLTEK

SEQ ID NO: 2890 - protein, 956 aa, Artificial
  Synthetic
MAKKKRITAKERKQNHRESLMKKADSNAEKEKAKKPVVENKPDTAISKDNTPKPNKEIKKSKAKLAGVKWVIKANDDVAYISSFGKGNNSVLEKRIIGDVSSDVNKDSHMYVNPKYTKKNYEIKNGFSSGSSLTTHPNKPDKNSGMDALCLKIYFEKEIFKDKFNDNMHIQTIYNIFDIEKTLAKHITNIIYAVNSLDRSYIQSGNDTIGFGLNYRIPYAKYGRGKDSNGKPNNSNLKKRESFIKFYNNAKDRFGYFESVFYQNGKPISREKLYIYLNILNFVRNSTFHYNNTSTYLYRKEYKYTDKDNCSVKEFEFVSYLNEFVKNKFKNVNKNFISNEKNNLYIILNAYGEDIEDVEVVKKYSKELYKLSVLKTNKNLGVNVKKLRESAIEYGYCPLPYDKEKEVAKLSSIKHKLYKTYDFVITHYLNSNDKLLLEIVEALRLSKNDDEKENVYKIYAEKIFKAEYVINPIKTISNLFAEKGDKLFNEKVSISEEYVEDIRIDKNIHNFTKVIFFLTCFLDGKEINDLLTNIISKLQVIEDHNNVIKAIANNNDAVYKDYSDKYAVFKNSGKIATKLEAIKSIARMENKINKAFKEPLLKDAMLALGVSPNDLDEKYEKYFKTDVDADKDHQKVSTFLMNNVINNSRFKYVVKYINPADINRLAKNKHLVKFVLDQIPHKQIDSYYNSVCTVEEPSYKGKIQLLTKKITGLNFYSLFENCKIPNVEKEKKKAVITLYFTIIYILVKNLVNINGLYTLALYFVERDGFFYKKICEKKDKKKTNKDVDYLLLPEIFSGSKYREETKNLKLPKEKDREIMKKYLPNDEDRKEYNKFFKQYRNNIVHLNIIANLSKLTSTIDKEINSYFEIFHYCAQRVMFDYCKNNNKVVLAKMKDLAHIKSDCDEFSSKYTYPYSSAVLRFMNLPFAYNVPRFKNLSYQKFFDKQRLEALEKNLNI

SEQ ID NO: 2891 - protein, 922 aa, Artificial
  Synthetic
MAKKNKMKPRELREAQKKARQLKAAEINNNAAPAIAAMPAAEAAAPAAEKKKSSVKAAGMKSILVSENKMYITSFGKGNSAVLEYEVDNNDYNQTQLSSKGSSNIELHGVNEVNITFSSKHGFESGVEINTSNPTHRSGESSPVRWDMLGLKSELEKRFFGKTFDDNIHIQLIYNILDIEKILAVYVTNIVYALNNMLGVKGSESHDDFIGYLSTNNTYDVFIDPDNSSLSDDKKANVRKSLSKFNVLLKTKRLGYFGLEEPKTKDTRVSQAYKKRVYHMLAIVGQIRQCVFHDKSGAKRFDLYSFINNIDPEYRETLDYLVDERFDSINKGFIEGNKINISLLIDMMKGYEADDIIRLYYDFIVLKSQKNLGFSIKKLREKMLDEYGFRFKDKQYDPVRSKMYKLMDFLLFCNHYRNDVAAGEALVRKLRFSMTDDEKEGIYADEAAKLWGKFRNDFENIADHMNGDVIKELGKADMDFDEKILDSEKKNASDLLYFSKMIYMLTYFLDGKEINDLLTTLISKFDNIKEFLKIMKSSAVDVECELMAGYKLFNDSQRITNELFIVKNIASMRKPAASAKLTMFRDALTILGIDDNITDDRISEILKLKEKGKGIHGLRNFITNNVIESSRFVYLIKYANAQKIREVAKNEKVVMFVLGGIPDTQIERYYKSCVEFPDMNSSLEAKRSELARMIKNISFDDFKNVKQQAKGRENVAKERAKAVIGLYLTVMYLLVKNLVNVNARYVIAIHCLERDFGLYKEIIPELASKNLKNDYRILSQTLCELCDDRDESPNLFLKKNKRLRKCVEVDINNADSSMTRKYRNCIAHLTVVRELKEYIGDIRTVDSYFSIYHYVMQRCITKRENDTKQEEKIKYEDDLLKNHGYTKDFVKALNSPFGYNIPRFKNLSIEQLFDRNEYLTEK

SEQ ID NO: 2892 - protein, 919 aa, Artificial
  Synthetic
MAKKNKMKPRELREAQKKARQLKAAEINNNAVPAIAAMPVAEVIAPTAEKKKSSVKAAGMKSILVSENKMYITSFGKGNSAVLEYEVDNNDYNQTQLSSDGSSNIELRGVNEVNITFSSKHGFESGVEINTSNPTHRSGESSPVRWDMLGLKSELEKRFFGKTFDDNIHIQLIYNILDIEKILAVYVTNIVYALNNMLGEGDDESHDDFMGYLSAKNTYDVFTDPDESDLSKNIKGNIKKSLSKFNDLLKTKRLGYFGLEEPKTKDTNALEAYKKRVYHMLAIVGQIRQSVFHDKSSKLDEELYSFIDIIDSEYRETLDYLVDERFDSINKGFIQGNKVNISLLIDMMKGYEADDIIRLYYDFIVLKSQKNLGFSIKKLREKMLEEYGYRFKDKQYDSVRSKMYKLMDFLLFCNYYRNDVVAGEALVRKLRFSMTDDEKEGIYADEAAKLWGKFRNDFENIADHMNGDVIKELGKADMDFDEKILDSEKKNASDLLYFSKMIYMLTYFLDGKEINDLLTTLISKFDNIKEFLKIMKSSAVDVECELTAGYKLFNDSQRITNELFIVKNIASMRKPAASAKLTMFRDALTILGIDDKITDDRISEILKLKEKGKGIHGLRNFITNNVIESSRFVYLIKYANAQKIREVAENEKVVMFVLGGIPDTQIERYYKSCVEFPDMNSPLEAKRSELARMIKNIRFDDFKNVKQQAKGRENVAKERAKAVIGLYLTVMYLLVKNLVNVNARYVIAIHCLERDFGLYKEIIPELASKNLKNDYRILSQTLCELCDKSPNLFLKKNERLRKCVEVDINNADSSMTRKYRNCIAHLTVVRELKEYIGDIRTVDSYFSIYHYVMQRCITKREDDIKQEEKIKYEDDLLKNHGYTKDFVKALNSPFGYNIPRFKNLSIEQLFDRNEYLTEK

SEQ ID NO: 2893 - protein, 919 aa, Artificial
  Synthetic
MAKKNKMKPRELREAQKKARQLKAAEINNNAAPAIAAMPAAEVIAPAAEKKKSSVKAAGMKSIFVSENKMYITSFGKGNSAVLEYEVDNNDYNQTQLSSEDSSNIELCGVTKVNITFSSKHGLESGVEINTSNPTHRSGESSPVRWDMLGLKSELEKRFFGKTFDDNIHIQLIYNILDIEKILAVYVTNIVYALNNMLGIKKSESYDDFMGYLSARNTYEVFTHPDKSNLSDKAKGNIKKSFSTFNDLLKTKRLGYFGLEEPKTKDTRVSQAYKKRVYHMLAIVGQIRQCVFHDKSGAKKFDLYSFINNIDSEYRETLDYLVDERFDSINKGFIQGNKVNISLLIDMMKGYKADDIIRLYYDFIVLKSQKNLGFSIKKLREKMLDEYGFRFKDKQYDSVRSKMYKLMDFLLFCNYYRNDVIAGEALVRKLRFSMTDDEKEGIYADEAEKLWGKFRNDFENIADHMNGDVIKELGQADMDFDEKILDSEKKNASDLLYFSKMIYMLTYFLDGKEINDLLTTLISKFDNIKEFLKIMKSSAVDVECELTAGYKLFNDSQRITNELFIVKNIASMRKPAASAKLTMFRDALTILGIDDKITDDRISEILKLKEKGKGIHGLRNFITNNVIESSRFVYLIKYANAQKIREVAKNEKVVMFVLGGIPDTQIERYYKSCVEFSDMNSSLEAKRSELARMIKNISFDDFKNVKQQVKGRENVAKERAKAVIGLYLTVMYLLVKNLVNVNARYVIAIHCLERDFGLYKEIIPELASKDLKNDYRILSQTLCELCDKSPNLFLKKNERLRKCVEVDINNADSSMTRKYRNCIAHLTVVRELKEYIGDIRTVDSYFSIYHYVMQRCITKREDDTKQEEKIKYEDDLLKNHGYTKDFVKALNSPFGYNIPRFKNLSIEQLFDRNEYLTEK

SEQ ID NO: 2894 - protein, 919 aa, Artificial
  Synthetic
MAKKNKMKPRELREAQKKARQLKAAEINNNAVPAIAAMPAAEVIAPAAEKKKSSVKAAGMKSILVSENKMYITSFGKGNSAVLEYEVDNNDYNQTQLSSDGSSNIELRGVNEVNITFSSKHGFESGVEINTSNPTHRSGESSPVRGDMLGLKSELEKRFFGKTFDDNIHIQLIYNILDIEKILAVYVTNIVYALNNMLGVKGSESYDDFMGYLSAQNTYYIFTHPDKSNLSDKVKGNIKKSLSKFNDLLKTKRLGYFGLEEPKTKDKRVSEAYKKRVYHMLAIVGQIRQSVFHDKSNELDEYLYSFIDIIDSEYRDTLDYLVDERFDSINKGFVQGNKVNISLLIDMMKGYEADDIIRLYYDFIVLKSQKNLGFSIKKLREKMLDEYGFRFKDKQYDSVRSKMYKLMDFLLFCNYYRNDVVAGEALVRKLRFSMTDDEKEGIYADEAEKLWGKFRNDFENIADHMNGDVIKELGKADMDFDEKILDSEKKNASDLLYFSKMIYMLTYFLDGKEINDLLTTLISKFDNIKEFLKIMKSSAVDVECELTAGYKLFNDSQRITNELFIVKNIASMRKPAASAKLTMFRDALTILGIDDKITDDRISEILKLKEKGKGIHGLRNFITNNVIESSRFVYLIKYANAQKIREVAENEKVVMFVLGGIPDTQIERYYKSCVEFPDMNSPLEAKRSELARMIKNIRFDDFKNVKQQAKGRENVAKERAKAVIGLYLTVMYLLVKNLVNVNARYVIAIHCLERDFGLYKEIIPELASKNLKNDYRILSQTLCELCDKSPNLFLKKNERLRKCVEVDINNADSSMTRKYRNCIAHLTVVRELKEYIGDIRTVDSYFSIYHYVMQRCITKREDDIKQEEKIKYEDDLLKNHGYTKDFVKALNSPFGYNIPRFKNLSIEQLFDRNEYLTEK

SEQ ID NO: 2895 - protein, 926 aa, Artificial
  Synthetic
MLLCAIIQASTKRDRKGGVRMEREVKKPPKKSLAKAAGLKSTFVISPQEKELAMTAFGRGNDALLQKRIVDGVVRDVAGEKQQFQVQRQDESRFRVQNSRLADRTVTADDPLHRAETPRRQPLGAGMDQLRRKAILEQKYFGRTFDDNIHIQLIYNILDIHKMLAVPANHIVHTLNLLGGYGETDFVGMLPAGLPYDKLRVVKKKNGDTVDIKADIAAYAKRPQLAYLGAAFYDVTPGKSKRDAARGRVKREQDVYTILSLMSLLRQFCAHDSVRIWGQNTPAALYGLQALPQDMKDLLDDGWRRALGGVNDHFLDTNKVNLLTLFEYYGAETKQERVALTQDFYRFVVLKEQKNMGFSLRRLREELLKLPDAAYLTGQEYDSVRQKLYMLLDFLLCRLYAQERAGRCEELVSALRCALSDEEKDTVYQAEAAALWQALGDTLRRELLPLLKGKKLQDKDKKKPDELGLSRDVLDGVLFRPAQQGNRANADYFCRLMHLSTWFMDGKEINTLLTTLISKLENIDSLRNVLESMGLACSFVPAYAMFDHSRYIAGQLRVVNNIARMRKPAITAKREMYRAAVVLLGVDSPEAAAAITDDLLQIDPETGKVRPRSDSARDTGLRNFIANNVVESRRFTYLLRYMTPEQARVLAQNEKLIAFVLSTVPDTQLERYCRTCGREDITGRPAQIRYLTAQIMGVRYESFTDVEQRGRGDNPRKERYKALIGLYLTVLYLAVKNMVNCNARYVIAFYCRDRDTALYQKEVCWYDLEEDKKSGKQRQVEDYTALTRYFVSQGYLNRHACGYLRSNMNGISNGLLTAYRNAVDHLNAIPPLGSLCRDIGRVDSYFALYHYAVQQYLNGRYYRKTPREQELFAAMAQHRTWCSDLVKALNTPFGYNLARYKNLSIDGLFDREGDHVVREDGEKPAE

SEQ ID NO: 2896 - protein, 922 aa, Artificial
  Synthetic
MAKKNKMKPRELREAQKKARQLKAAEINNNAAPAIAAMPAAEVIAPAAEKKKSSVKAAGMKSILVSENKMYITSFGKGNSAVLEYEVDNNDYNKTQLSSKDNSNIELGDVDEVNITFSSKHGFGSGVEINTSNPTHRSGESSPVRWDMLGLKSELEKRFFGKTFDDNIHIQLIYNILDIEKILAVYVTNIVYALNNMLGVKGSESHDDFIGYLSTNNTYDVFIDPDNSSLSDDKKANVRKSLSKFNVLLKTKRLGYFGLEEPKTKDTRASEAYKKRVYHMLAIVGQIRQCVFHDKSGAKRFDLYSFINNIDPEYRDTLDYLVDERFDSINKGFIQGNKVNISLLIDMMKGYEADDIIRLYYDFIVLKSQKNLGFSIKKLREKMLDEYGFRFKDKQYDSVRSKMYKLMDFLLFCNYYRNDVVAGEVLVRKLRFSMTDDEKEGIYADEAAKLWGKFRNDFENIADHMNGDVIKELGKADMDFDEKIIDSEKKNASDLLYFSKMIYMLTYFLDGKEINDLLTTLISKFDNIKEFLKIMKSSAVDVECELTAGYKLFNDSQRITNELFIVKNIASMRKPAASAKLTMFRDALTILGIDDNITDDRISEILKLKEKGKGIHGLRNFITNNVIESSRFVYLIKYANAQKIREVAKNEKVVMFVLGGIPDTQIERYYKSCVEFPDMNSSLEAKRSELARMIKNIRFDDFKNVKQQAKGRENVAKERAKAVIGLYLTVMYLLVKNLVNVNARYVIAIHCLERDFGLYKEIIPELASKNLKNDYRILSQTLCELCDNGDESPNLFLKKNKRLRKCVEVDINNADSNMTRKYRNCIAHLTVVRELKEYIGDIRTVDSYFSIYHYVMQRCITKRENDTKQEEKIKYEDDLLKNHGYTKDFVKALNSPFGYNIPRFKNLSIEQLFDRNEYLTEK

SEQ ID NO: 2897 - protein, 918 aa, Artificial
  Synthetic
MAKKNKMKPRELREAQKKARQLKAAEINNNAAPAIAAMPAAEAAAPAAEKKKSSVKAAGMKSILVSENKMYITSFGKGNSAVLEYEVDNNDYNKTQLSSKGSSNIELHGVNEVNITFSSKHGFESGVEINTSNPTHRSGESSPVRGDMLGLKSELEKRFFGKTFDDNIHIQLIYNILDIEKILAVYVTNIVYALNNMLGEGDESNYDFMGYLSTFNTYKVFTNPNGSTLSDDKKENIRKSLSKFNALLKTKRLGYFGLEEPKTKDTRASEAYKKRVYHMLAIVGQIRQCVFHDKSGAKRFDLYSFINNIYPEYRDTLDYLVEERLKSINKDFIQGNKVNISLLIDMMKGYEADDIIRLYYDFIVLKSQKNLGFSIKKLREKMLDEYGFRFKDKQYDSVRSKMYKLMDFLLFCNYYRNDVVAGESLVRKLRFSMTDDEKEGIYADEAAKLWGKFRNDFENIADHMNGDVIKELGKADMGFDEKILDSEKKNASDLLYFSKMIYMLTYFLDGKEINDLLTTLISKFDNIKEFLKIMKSSAVDVECELTAGYKLFNDSQRITNELFIVKNIASMRKPASSAKLTMFRDALTILGIDDNITDDRISEILKLKEKGKGIHGLRNFITNNVIESSRFVYLIKYANAQKIRKVAKNEKVVMFVLGGIPDTQIERYYKSCVEFPDMNSSLEVKRSELARMIKNISFDDFKNVKQQAKGRENVAKERAKAVIGLYLTVMYLLVKNLVNVNARYVIAIHCLERDFGLYKEIIPELASKNLKNDYRILSQTLCELCDKSPNLFLKKNERLRKCVEVDINNADSSMTRKYRNCIAHLTVVRELKEYIGDIRTVDSYFSIYHYVMQRCITKREDDTKQEEKIKYEDDLLKNHGYTKDFVKALNSPFGYNIPRFKNLSIEQLFDRNEYLTEK

SEQ ID NO: 2898 - protein, 922 aa, Artificial
  Synthetic
MAKKNKMKPRELREAQKKARQLKAAEINNNAAPAIAAMPAAEVIAPAAEKKKSSVKAAGMKSILVSENKMYITSFGKGNSAVLEYEVDNNDYNKTQLSSKDNSNIELGDVDEVNITFSSKHGFGSGVEINTSNPTHRSGESSPVRWDMLGLKSELEKRFFGKTFDDNIHIQLIYNILDIEKILAVYVTNIVYALNNMLGVKGSESHDDFIGYLSTNNTYDVFIDPDNSSLSDDKKANVRKSLSKFNALLKTKRLGYFGLEEPKTKDNRVSEAYKKRVYHMLAIVGQIRQCVFHDKSGAKRFDLYSFINNIDPEYRETLDYLVDERFDSINKGFIQGNKVNISLLIDMMKGYEADDIIRLYYDFIVLKSQKNLGFSIKKLREKMLDEYGFRFKDKQYDSVRSKMYKLMDFLLFCNYYRNDVVAGEALVRKLRFSMTDDEKEGIYADEAAKLWGKFRNDFENIADHMNGDVIKELGKADMDFDEKILDSEKKNASNLLYFSKMIYMLTYFLDGKEINDLLTTLISKFDNIKEFLKIMKSSAVDVECELTAGYKLFNDSQRITNELFIVKNIASMRKPAASAKLTMFRDALTILGIDDKITDDRISEILKLKEKGKGIHGLRNFITNNVIESSRFVYLIKYANAQKIREVAKNEKVVMFVLGGIPDTQIERYYKSCVEFPDMNSSLEAKRSELARMIKNISFDDFKNVKQQAKGRENVAKERAKAVIGLYLTVMYLLVKNLVNVNARYVIAIHCLERDFGLYKEIIPELASKNLKNDYRILSQTLCELCDERDKSPNLFLKKNKRLRKCVEVDINNADSSMTRKYRNCIAHLTVVRELKEYIGDIRTVDSYFSIYHYVMQRCITKREDDTKQEEKIKYEDDLLKNHGYTKDFVKALNSPFGYNIPRFKNLSIEQLFDRNEYLTEK

SEQ ID NO: 2899 - protein, 919 aa, Artificial
  Synthetic
MAKKNKMKPRELREAQKKARQLKAAEINNNAVPAIAAMPAAEAAAPAAEKKKSSVKAAGMKSILVSENKMYITSFGKGNSAVLEYEVDNNDYNKTQLSSKDNSNIELCDVNEVNITFSSKHGFESGVEINTSNPTHRSGESSPVRWDMLGLKSELEKRFFGKTFDDNIHIQLIYNILDIEKILAVYITNIVYALNNMLGVKGSESHDDFIGYLSTNNIYDVFIDPDNSSLSDDKKANVRKSLSKFNALLKTKRLGYFGLEEPKTKDNRVSEAYKKRVYHMLAIVGQIRQSVFHDKSSKLHEDLYSFIDIIDSEYRETLDYLVDERFDSINKGFIQGNKVNISLLIDMMKGYEADDIIRLYYDFIVIKSQKNLGFSIKKLREKMLDEYGFRFKDKQYDSVRSKMYKLMDFLLFCNYYRNDVVAGEALVRKLRFSMTDDEKEGIYADEAEKLWGKFRNDFENIADHMNGDVIKELGKADMDFDEKILDSEKKNASDLLYFSKMIYMLTYFLDGKEINDLLTTLISKFDNIKEFLKIMKSSAVNVECELTAGYKLFNDSQRITNELFIVKNIASMRKPAASAKLTMFRDALTILGIDDKITDDRISEILKLKEKGKGIHGLRNFITNNVIESSRFVYLIKYANAQKIREVAKNEKVVMFVLGGIPDTQIERYYKSCVEFPDMNSPLEAKRSELARMIKNIRFDDFKNVKQQAKGRENVAKERAKAVIGLYLTVMYLLVKNLVNVNARYVIAIHCLERDFGLYKEIIPELASKNLKNDYRILSQTLCELCDKSPNLFLKKNERLRKCVEVDINNADSSMTRKYRNCIAHLTVVRELKEYIGDIRTVDSYFSIYHYVMQRCITKREDDIKQEEKIKYEDDLLKNHGYTKDFVKALNSPFGYNIPRFKNLSIEQLFDRNEYLTEK

SEQ ID NO: 2900 - protein, 954 aa, Artificial
  Synthetic
MGKKIHARDLREQRKTDRTEKFADQNKKREAERAVQKKDAAVSVKSVSSVSSKKDNVTKSMAKAAGVKSVFAVENTVYMTSFGRGNDAVLEQKIVDTSHEQLNIDDPAYQLNVVTMNGYSVTGHRGETVSAVTDNPLRRFNGGKKDEPEQSVPTDMLCLKPTLEKKFFGKEFNDNIHIQLIYNILDIEKILAVYSTNAIYALNNMSADENIENSDFFMKRTTDETFDDFEKKKESTNSREKADFDAFEKFIGNYRLAYFADAFYVNKKNPKGKARNVLREDKELYSVLTLIGKLRHWCVHSEEGRAEFWLYKLNELKDDFKNVLDVVYNRPVEEINNRFIENNKVNIQILGSVYKNTDIAELVRSYYEFLITKKYKNMGFSIKKLRESMLEGKGYADKEYDSVRNKLYQMTDFILYTGYINEDSDRADDLVNTLRSSLKEDDKTTVYCKEADYLWKKYRESIREVADALDGDNIKRLSKSNIEIQEDKLRKCFISYADSVSEFTKLIYLLTRFLSGKEINDLVTTLINKFDNIRSFLEIMDELGLDRTFTAEYSFFEDSTKYLAELVELNSFVKSCSFDINAKRTMYRDALDILGIKSGKTEEDIEKMIDNILQIDANGDKKLKKNNGLRNFIASNVIDSNRFKYLVRYGNPKKIRETAKCKPAVRFVLNEIPDAQIERYYEACCPENTALCSANKKREKLADMIAEIEFENFSDAGNYQKANVTSKTHEAEIKRKNQSIIRLYLTVMYIMLKNLVNVNARYVIAFHCVERDTKLYAESGLEVGNIEKNKTNLTMAVMGVKLENGIIKTEFDKSFAENAANRYLRNARWYKLILDNLKKSERAVVNEFRNTVCHLNAIRNININIDGIKEVENYFALYHYLIQKHLENRFADKKVERDTGDFISKLEEHKTYCKDFVKAYCTPFGYNLVRYKNLTIDGLFDKNYPGKDDSDKQK

SEQ ID NO: 2901 - protein, 960 aa, Artificial
  Synthetic
MAKKLNAKEKRLLSQQAQKDKYKKMEEERQAAEQARLAEEARQKAETERKKKEALEKEAREKLEKELLEKNPSLKKVKKSKAKAAGLKSTFAIGNELLMTSFGKGNEAVPEHYIFENGMISMQNPPAFDVENRGTSFSIAGKNAMNAIADDPRRTSKKVIGEDLIGAKSALEKRYFGKTFEDNIHIQLIYNILDIEKILSKHINNIVFSINNIRGIADPERDDLIGYMSLRDSYEYFMDEKNEKRKVLRESYRKLFKSSRLSYFGSAFYVEKQSTQKKKSGQKNFELRNEKDCYYMLALLGELRQVLAHSSAQKQGKEQTEARSSVYNLRTVGNNDMRKILNSLYAERVDALNENFMNYAKKDLTILFGIMDASSYEKKAEIARDFYDFTVRKSYKNIGFSIKKIRERMMDCFFANVKEITPDSPDFQSVRQKFYKILDFLLFTYYKDNKEETKKIIAALRASLTELEKELFYQKQANILWNKMQMVVTEQIYPRTKGSAIQNLIADPEISADMLKGVMITPESVDYFSKMIYLLTLFIDGKEINDLLTTMINKFENIASFVSVLKDRGLPCNFRNDYSVFNNALKISAELREINSFARMEKATPGAKKQMFLDAAIILGSNESAEELSEYFDEMLDKQKGKRTPGGKKDMGFRNFLIKNVIESDRFHYLIRYGHPLHISKLAENKNVIAFVLKQIPEPQIDRYCKICALPAESNFAQKILRLTDLIAEMNFRQFENVRQTEKNEQKQILQGILSLYLTVLYLLTKNLVYVNSRYFLAFHCLERDTELLGSQAGHKNAEKQLIASYSALTQQFLDEGKLNRHAREYLTVNIQNSDDWTIAQYRNNAAHLNAIRNAHLYIREMKSVRSYFELYHYLTQRALLDKYENVPYHPQVNEKTLKYFELLKENGWYCKDFVKALNVPFGYNLPRYKNLSIDALFDKDRPQEEDENHLYTCQNIKKS

SEQ ID NO: 2902 - protein, 933 aa, Artificial
  Synthetic
MERQKRKMKSKSKMAGVKSVFVIGDELLMTSFGDGDDAVLEKDIDENGVVNDCRNPAAYDAVYGTDSIRVKKTNNNIRAKVNNPLAKSNIRSEESALFRTRVNEYKREQKDKYETLFFGKTFDDNIHIQLISKILDIEKTFSVVIGNIVYAINNLSLEQSIDRPIDIFGDKNTQGISLREDNDYLKTMLPRCEYLFHNILNSDSNNNSKMNYNKVNKGKEEKDNRNNENIEKLKKALEVIKIIRVDSFHGVDGIKGDQKFPRSKYNLAVNYNEEIQKTISEPFNRKVEEVQQDFYRNSCVNIDFLKEIMYGSNYTDRGSDSLECSYFNFAILKQNKNMGFSITSIRECLLDLYELNFESMQNLRPRANSFCDFLIYDYYCKNESERANLVDCLRSAASEEEKKNIYFQTAERVKEKFRNAFNRISRFDASYIKNSREKNLSGGSSLPKYSFIEGFTKRSKKINDNDEKNADLFCNMLYYLAQFLDGKEINIFLTSIHNIFQNIDSFLKVMKEKGMECKFQKDFKMFSHAGHVAKKIEIVISLAKMKKTLDFYNTQALKDAVTILGVSKKHQYLDMNSYLDFYMFDNRSGATGKNAGKDHNLRNFLVSNVIRSRKFNYLSRYSNLAEVKKLAQNPSLVQFVLSRIEPSLICRYYESSQGISSEGITIDEQIKKLTGIIVDMNIDSFENINNGEIGMRYSKATPQSIERRNQMRVCVGLYLNVLYQIEKNLMNVNARYVLAFAFAERDALMLNFTLEECKKNKKRSSGGFSFIEMTQFFIDKKLFKVATEAIKKNVLKYNGNPESLNHIPGEYICKNMEGYHENTVRNFRNMVAHLTAVARVPLYISEVTQIDSYYALYHYCMQMNILQGIEQSGKILDNIKLKNALENARVHRTYSKDAVKYLCLPFAYNISRYKALTIKDLFDWTEYSCKKDE

SEQ ID NO: 2903 - protein, 922 aa, Artificial
  Synthetic
MAKKNKMKPRELREAQKKARQLKAAEINNNAAPAIAAMPAAEVIAPAAEKKKSSVKAAGMKSILVSKNKMYITSFGKGNSAVLEYEVDNNDYNKTQLSSKDNSNIELGNVNEVNITFSSRRGFESGVEINTSNPTHRSGESSSVRGDMLGLKSELEKRFFGKTFDDNIHIQLIYNILDIEKILAVYVTNIVYALNNMLGVKGSESHDDFIGYLSTNNIYDVFIDPDNSSLSDDKKANVRKSLSKFNALLKTKRLGYFGLEEPKTKDNRVSEAYKKRVYHMLAIVGQIRQCVFHDKSGAKRFDLYSFINNIDPEYRDTLDYLVEERLKSINKDFIEDNKVNISLLIDMMKGYEADDIIRLYYDFIVLKSQKNLGFSIKKLREKMLDEYGFRFKDKQYDSVRSKMYKLMDFLLFCNYYRNDVVADEALVRKLRFSMTDDEKEGIYADEAAKLWGKFRNDFENIADHMNGDVIKELGKADMDFDEKILDSEKKNASDLLYFSKMIYMLTYFLDGKEINDLLTTLISKFDNIKEFLKIMKSSAVDVECELTAGYKLFNDSQRITNELFIVKNIASMRKPAASAKLTMFRDALTILGIDDKITDDRISEILKLKEKGKGIHGLRNFITNNVIESSRFVYLIKYANAQKIREVAKNEKVVMFVLGGIPDTQIERYYKSCVEVSDMNSSLEAKRSELARMIKNIRFDDFKNVKQQANGRENVAKERAKAVIGLYLTVMYLLVKNLVNVNARYVIAIHCLERDFGLYKEIIPELASKNLKNDYRILSQTLCELCDNGDESPNLFLKKNKRLRKCVEVDINNADSSMIRKYRNCIAHLTVVRELNKYINDIYVVNSYFSICHYVMQRCITKRENDTKQEDKIKYEDDLLKNHGYTKDFVKALNSPFGYNIPRFKNLSIKQLFDRNEYLTEK

SEQ ID NO: 2904 - protein, 922 aa, Artificial
  Synthetic
MAKKNKMKPRELREAQKKARQLKAAEINNNAAPAIAAMPAAEVIAPAAEKKKSSVKAAGMKSILVSENKMYITSFGKGNSAVLEYEVDKVDDNDYNKTQLSSKDNSNIELGNVNEVNITFSSRRGFESGVEINTSNPTHRSGESSSVRGDMLGLKSELEKRFFGKTFDDNIHIQLIYNILDIEKILAVYVTNIVYALNNMLGVKGSESYDDFMGYLSAQNTYYIFTHPDKSNLSDKVKGNIKKSLSKFNDLLKTKRLGYFGLEEPKTKDKRVSEAYKKRVYHMLAIVGQIRQSVFHDKSNELDEYLYSFIDIIDSEYRDTLDYLVDERFDSINKGFVQGNKVNISLLIDMMKGYEADDIIRLYYDFIVLKSQKNLGFSIKKLREKMLDEYGFRFKDKQYDSVRSKMYKLMDFLLFCNYYRNDIAAGEALVRKLRFSMTDDEKEGLYADEAAKLWGKFRNDFENIADHMNGDVIKELGKADMDFDEKILDSEKKNASDLLYFSKMIYMLTYFLDGKEINDLLTTLISKFDNIKEFLKIMKSSAVDVECELTAGYKLFNDSQRITNELFIVKNIASMRKPAASAKLTMFRDALTILGIDDKITDDRISEILKLKEKGKGIHGLRNFITNNVIESSRFVYLIKYANAQKIREVAKNEKVVMFVLGGIPDTQIERYYKSCVEFPDMNSSLEVKRSELARMIKNISFDDFKNVKQQAKGRENVAKERAKAVIGLYLTVMYLLVKNLVNVNARYVIAIHCLERDFGLYKEIIPELASKNLKNDYRILSQTLCELCDKSPNLFLKKNERLRKCVEVDINNADSSMTRKYRNCIAHLTVVRELKEYIGDIRTVDSYFSIYHYVMQRCITKRENDTKQEEKIKYEDDLLKNHGYTKDFVKALNSPFGYNIPRFKNLSIEQLFDRNEYLTEK

SEQ ID NO: 2905 - protein, 925 aa, Artificial; identical to SEQ ID NO: 2865
  Synthetic

SEQ ID NO: 2906 - protein, 922 aa, Artificial
  Synthetic
MAKKNKMKPRELREAQKKARQLKAAEINNNAAPAIAAMPAAQVIAPAAEKKKSSVKAAGMKSILVSENKMYITSFGKGNSAVLEYEVDKVDNNNYNKTQLSSKDNSNIELGDVNEVNITFSSKHGFESGVEINTSNPTHRSGESSPVRWDMLGLKSELEKRFFGKTFDDNIHIQLIYNILDIEKILAVYVTNIVYALNNMLGIKGSESYDDFMGYLSARNTYEVFTHPDKSNLSDKVKGNIKKSLSKFNDLLKTKRLGYFGLEEPKTKDTRVSQAYKKRVYHMLAIVGQIRQSVFHDKSSKLDEDLYSFIDIIDSEYRETLDYLVDERFDSINKGFIQGNKVNISLLIDMMKGYEADDIIRLYYDFIVLKSQKNLGFSIKKLREKMLDEYGFRFKDKQYDSVRSKMYKLMDFLLFCNYYRNDVVAGEALVRKLRFSMTDDEKEGIYADEASKLWGKFRNDFENIADHMNGDVIKELGKADMDFDEKILDSEKKNASDLLYFSKMIYMLTYFLDGKEINDLLTTLISKFDNIKEFLKIMKSSAVDVECELTAGYKLFNDSQRITNELFIVKNIASMRKPASSAKLTMFRDALTILGIDDNITDDRISEILKLKEKGKGIHGLRNFITNNVIESSRFVYLIKYANAQKIRKVAKNEKVVMFVLGGIPDTQIERYYKSCVEFPDMNSSLEVKRSELARMIKNISFDDFKNVKQQAKGRENVAKERAKAVIGLYLTVMYLLVKNLVNVNARYVIAIHCLERDFGLYKEIIPELASKNLKNDYRILSQTLCELCDKSPNLFLKKNRRLRKCVEVDINNADSSMTRKYRNCIAHLTVVRELKEYIGDIRTVDSYFSIYHYVMQRCITKRENDTKQEEKIKYEDDLLKNHGYTKDFVKALNSPFGYNIPRFKNLSIEQLFDRNEYLTEK

SEQ ID NO: 2907 - protein, 922 aa, Artificial; identical to SEQ ID NO: 2885
  Synthetic

SEQ ID NO: 2908 - protein, 919 aa, Artificial
  Synthetic
MAKKNKMKPRELREAQKKARQLKAAEINNNAAPAIAAMPAAQVIAPAAEKKKSSVKAAGMKSILVSENKMYITSFGKGNSAVLEYEVDNNDYNKTQLSSKDNSNIELGDVNEVNITFSSKHGFESGVEINTSNPTHRSGESSPVRWDMLGLKSELEKRFFGKTFDDNIHIQLIYNILDIEKILAVYVTNIVYALNNMLGIKGSESYDDFMGYLSARNTYEVFTHPDKSNLSDKVKGNIKKSLSKFNDLLKTKRLGYFGLEEPKTKDTRVSQAYKKRVYHMLAIVGQIRQSVFHDKSSKLDEDLYSFIDIIDSEYRETLDYLVDERFDSINKGFIQGNKVNISLLIDMMKGYEADDIIRLYYDFIVLKSQKNLGFSIKKLREKMLDEYGFRFKDKQYDSVRSKMYKLMDFLLFCNYYRNDVVAGEALVRKLRFSMTDDEKEGIYADEASKLWGKFRNDFENIADHMNGDVIKELGKADMDFDEKILDSEKKNASDLLYFSKMIYMLTYFLDGKEINDLLTTLISKFDNIKEFLKIMKSSAVDVECELTAGYKLFNDSQRITNELFIVKNIASMRKPAASAKLTMFRDALTILGIDDNITDDRISEILKLKEKGKGIHGLRNFITNNVIESSRFVYLIKYANAQKIREVAKNEKVVMFVLGGIPDTQIERYYKSCVEFPDMNSSLEAKRSELARMIKNISFDDFKNVKQQAKGRENVAKERAKAVIGLYLTVMYLLVKNLVNVNARYVIAIHCLERDFGLYKEIIPELASKNLKNDYRILSQTLCELCDKSPNLFLKKNERLRKCVEVDINNADSSMTRKYRNCIAHLTVVRELKEYIGDIRTVDSYFSIYHYVMQRCITKRENDTKQEDKIKYEDDLLKNHGYTKDFVKALNSPFGYNIPRFKNLSIEQLFDRNEYLTEK

SEQ ID NO: 2909 - protein, 954 aa, Artificial
  Synthetic
MGKKIHARDLRERRKTDRTEKFADQNKKREAERAVQKKDAAVSVKSVSSVSSKKDNVTKSMAKAAGVKSVFAVGNTVYMTSFGRGNDAVLEQKIVDTSHEPLNIDDPAYQLNVVTMNGYSVTGHRGETVSAVTDNPLRRFNGGKKDEPEQSVPTDMLCLKPTLEKKFFGKEFDDNIHIQLIYNILDIEKILAVYSTNAIYALNNMSADENIESSDFFMKRTTDETFDDFEKKKESTNSREKADFDAFEKFIGNYRLAYFADAFYVNKKNPKGKARNVLREDKELYSVLTLIGKLRHWCVHSEEGRAEFWLYKLDELKDDFKNVLDVVYNRPVEEINNRFIENNKVNIQILGSVYKNTDIAELVRSYYEFLITKKYKNMGFSIKKLRESMLEGKGYADKEYDSVRNKLYQMTDFILYTGYINEDSDRADDLVNTLRSSLKEDDKTTVYCKEADYLWKKYRESIREVADALDGDNIKRLSKSNIEIQEDKLRKCFISYADSVSEFTKLIYLLTRFLSGKEINDLVTTLINKFDNIRSFLEIMDELGLDRTFTAEYSFFEGSTKYLAELVELNSFVKSCSFDINAKRTMYRDALDILGIKSGKTEEDIEKMIDNILQIDANGDKKLKKNNGLRNFIASNVIDSNRFKYLVRYGNPKKIRETAKCKPAVRFVLNEIPDAQIERYYEACCPKNTALCSANKRREKLADMIAEIEFENFSDAGNYQKANVTSRTSEAEIKRKNQAIIRLYLTVMYIMLKNLVNVNARYVIAFHCVERDTKLYAESGLEVGNIEKNKTNLTMAVMGVKIENGIIKTEFDKSLAENAANRYLRNARWYKLILDNLKKSERAVVNEFRNTVCHLNAIRNININIDGIKEVENYFALYHYLIQKHLENRFADKKVERDTGDFISKLEEHKTYCKDFVKAYCTPFGYNLVRYKNLTIDGLFDKNYPGKDDSDKQK

SEQ ID NO: 2910 - protein, 924 aa, Artificial
  Synthetic
MAKKNKMKPRELREAQKKARQFKAAEINNNAAPAIAAMPAAEVIAPVAEKKKSSVKAAGMKSILVSENKMYITSFGKGNSAVLEYEVDNNDYNKTQLSSKDNSNIELCGVNEVNITFSSKHGFESGVEINTSNPTHRSGESSPVRWDMLGLKSELEKRFFGKTFDDNIHIQLIYNILDIEKILAVYVTNIVYALNNMLGEGDESNYDFMGYLSTFNTYKVFTNPNGSTLSDDKKENIRKSLSKFNALLKTKRLGYFGLEEPKTKDTRVLEAYKKRVYHMLAIVGQIRQCVFHDLSEHSEYDLYSFIDNSKKVYRECRETLDYLVDERFDSINKGFIQGNKVNISLLIDMMKGYEADDIIRLYYDFIVLKSQKNLGFSIKKLREKILDEYGFRFKDKQYDSVRSKMYKLMDFLLFCNYYRNDIAAGESLVRKLRFSMTDDEKEGIYADEAAKLWGKFRNDFENIADHMNGDVIKELGKADMDFDEKILDSEKKNASDLLYFSKMIYMLTYFLDGKEINDLLTTLISKFDNIKEFLKIMKSSAIDVECELTAGYKLFNDSQRITNELFIVKNIASMRKPAASAKLTMFRDALTILGIDDKITDDRISEILKLKEKGKGIHGLRNFITNNVIESSRFVYLIKYANAQKIREVAKNEKVVMFVLGGIPDTQIERYYKSCVEFPDMNSSLEAKRSELARMIKNIRFDDFKNVKQQAKGRENVAKERAKAVIGLYLTVMYLLVKNLVNVNARYVIAIHCLERDFGLYKEIIPELASKNLKNDYRILSQTLCELCDNGDESPNLFLKKNKRLRKCVEVDINNADSSMTRKYRNCIAHLTVVRELKEYIGDIRTVDSYFSIYHYVMQRCITKREDDTKQEEKIKYEDDLLKNHGYTKDFVKALNSPFGYNIPRFKNLSIEQLFDRNEYLTEK

SEQ ID NO: 2911 - protein, 918 aa, Artificial; identical to SEQ ID NO: 2830
  Synthetic

SEQ ID NO: 2912 - protein, 975 aa, Artificial
  Synthetic
MMGKHLNAKQRELEKKLKNQQKGMMYNKSTDAVSVPTLQAAPKKAAEASTLITPGTLKTKAKAMGLKSTLVFDDKIVVTSFLNSKTEENEKCAHIEKITDCNGQTIVERPRMFNTSINAQQVDLSKDNDETNYPNPAFEDCGRDYINIKSALEKRVFGKTYNKDNLHVQIAYNIFDIKKIIGTYINNITYIFYNLGREEYNAKKDIIGNQDSDYINKLLNNTSAYFTYFDGVFKQITDRDSNKDREVKNSYNALVLKVLYYLRQFCMHGNTYTKRNEESFLSDTALYNVKDFFAKADPQINELIDAVYADGIKTINNDFMAHAKNNMYIICEVYKNEVEDSLMKEYYDFVVRKEGNNLGFNTRQLREILIDKYVGNLRDKKYDTFRNKLYTVLGFILVKEIKRNPKIQDSFIAKLRANQSGDEGKLNIYNEFAPKIWSVVSSKFNSAITCFDEESLSKFKGYKDIDESLISKYGITVSNTDTLVKILYFLCKFLDGKEINELCCAMINKFDNINDLIKTAAQCGEDIEFVKEYKLFINSKDISDQIRVVKSISKMKPELSNIGEVLLLDAIDILGYKINKYKCDADGNRLVDSNNKPVYSEEYCTFKKDFFETCELDEFGRVKYDKKGKPVINHRRRNFIINNVLSSKWFFYVAKYNRPSECQKFMKSKKLIALALKDVPETQIARYYHSVTGGREQTDSEAMRTTLISRLHEFSIKDVLSSVGSMTASENKRQIENSRKEQMKAIVKLYLTVVYLIAKSLVKVNTRFSIAFSAYERDVSLLADENESIALADNDDDKWKTGNYIFALTKHFLDNDEPYFDKYNNALQQIKGITDPNERRLAYRANDKVIKHTHFNLHTNKYVKDNYEKISKMNKIVTEYRNNVQHLAVVNNITKYLGDISEVTSYYSLYCYILQRLLLDNNNNDKFAAIKEKLIKFGTYNKDFMWLINVPFAYNLPRYKNLSNEEIFYDVIQNK

SEQ ID NO: 2913 - protein, 922 aa, Artificial; identical to SEQ ID NO: 2849
  Synthetic

SEQ ID NO: 2914 - protein, 918 aa, Artificial; identical to SEQ ID NO: 2897
  Synthetic

SEQ ID NO: 2915 - protein, 919 aa, Artificial
  Synthetic
MAKKNKMKPRELREAQKKARQFKAAEINNNAVPAIAAMPAAEAAAPAAEKKKSSVKAAGMKSILVSENKMYITSFGKGNSAVLEYEVDNNDYNKTQLSSEDSSNIELCGVNEVNITFSSKHGFESGVEINTSNPTHRSGESSPVRGDMLGLKSELEKRFFGKTFDDNIHIQLIYNILDIEKILAVYVTNIVYALNNMLGVKGSESHDDFIGYLSTNNIYDVFIDPDNSSLSDDKKANVRKSLSKFNALLKTKRLGYFGLEEPKTKDTRASEAYKKRVYHMLAIVGQIRQSVFHDKSNELDEYLYSFIDIIDSEYRDTLDYLVDERFDSINKGFVQGNKVNISLLIDMMKGYEADDIIRLYYDFIVLKSQKNLGFSIKKLREKMLDEYGFRFKDKQYDSVRSKMYKLMDFLLFCNYYRNDIAAGEALVRKLRFSMTDDEKEGLYADEAAKLWGKFRNDFENIADHMNGDVIKELGKADMDFDEKILDSEKKNASDLLYFSKMIYMLTYFLDGKEINDLLTTLISKFDNIKEFLKIMKSSAVNVECELTAGYKLFNDSQRITNELFIVKNIASMRKPAASAKLTMFRDALTILGIDDKITDDRISEILKLKEKGKGIHGLRNFITNNVIESSRFVYLIKYANAQKIREVAKNEKVVMFVLGGIPDTQIERYYKSCVEFPDMNSSLEAKRSELARMIKNISFDDFKNVKQQAKGRENVAKERAKAVIGLYLTVMYLLVKNLVNVNARYVIAIHCLERDFGLYKEIIPELASKNLKNDYRILSQTLCELCDKSPNLFLKKNKRLRKCVEVDINNADSSMTRKYRNCIAHLTVVREQKEYIGDIRTVDSYFSIYHYVMQRCITKREDDTKQEEKIKYEDDLLKNHGYTKDFVKALNSPFGYNIPRFKNLSIEQLFDRNEYLTEK

SEQ ID NO: 2916 - protein, 922 aa, Artificial; identical to SEQ ID NO: 2840
  Synthetic

SEQ ID NO: 2917 - protein, 922 aa, Artificial
  Synthetic
MAKKNKMKPRELREAQKKARQLKAAEINNNAAPAIAAMPAAEVIAPAAEKKKSSVKAAGMKSILVSENKMYITSFGKGNSAVLEYEVDNNDYNKTQLSSKYNSNIELGDVNEVNITFSSKHGFGSGMKINTSNPTHRSGESSPVRWDMLGLKSELEKRFFGKTFDDNIHIQLIYNILDIEKILAVYVTNIVYALNNMLGVKGSESHDDFIGYLSTNNIYDVFIDPDNSSLSDDKKANVRKSLSKFNVLLKTKRLGYFGLEEPKTKDNRVSEAYKKRVYHMLAIVGQIRQCVFHDKSGAKRFDLYSFINNIDPEYRDTLDYLVEERLKSINKDFIQGNKVNISLLIDMMKGYEADDIIRLYYDFIVLKSQKNLGFSIKKLREKMLEEYGFRFKDKQYDSVRSKMYKLMDFLLFCNYYRNDVVAGEALVRKLRFSMTDDEKEGIYADEAAKLWGKFRNDFENIADHMNGDVIKELGKADMDFDEKILDSEKKNASDLLYFSKMIYMLTYFLDGKEINDLLTTLISKFDNIKEFLKIMKSSAVDVECELTAGYKLFNDSQRITNELFIVKNIASMRKPAASAKLTMFRDALTILGIDDNITDDRISEILKLKEKGKGIHGLRNFITNNVIESSRFVYLIKYANAQKIREVAKNEKVVMFVLGGIPDTQIERYYKSCVEFPDMNSSLEAKRSELARMIKNISFDDFKNVKQQAKGRENVAKERAKAVIGLYLTVMYLLVKNLVNVNARYVIAIHCLERDFGLYKEIIPELASKNLKNDYRILSQTLCELCDDRDESPNLFLKKNKRLRKCVEVDINNADSSMTRKYRNCIAHLTVVRELKEYIGDIRTVDSYFSIYHYVMQRCITKREDDTKQEDKIKYEDDLLKNHGYTKDFVKALNSPFGYNIPRFKNLSIEQLFDRNEYLTEK

SEQ ID NO: 2918 - protein, 975 aa, Artificial
  Synthetic
MMGKHLNAKQRELEKKLKNQQKGMMYNKSTDAVSVPTLQAAPKKAAEASTLITPGTLKTKAKAMGLKSTLVFDDKIVVTSFLNSKTEENEKCAHIEKITDCNGQTIVERPRMFNTSINAQQVDLSKDNDETNYPNPAFEDCGRDYINIKSALEKRVFGKTYNKDNLHVQIAYNIFDIKKIIGTYINNITYIFYNLGREEYNAKKDIIGNQDSDYINKLLNNTSAYFTYFDGVFKQITDRDSNKDREVKNSYNALVLKVLYYLRQFCMHGNTYTKRNEESFLSDTALYNVKDFFAKADPQINELIDAVYADGIKTINNDFMAHAKNNMYIICEVYKNEVEDSLMKEYYDFVVRKEGNNLGFNTRQLREILIDKYVGNLRDKKYDTFRNKLYTVLGFILVKEIKRNPKIQDSFIAKLRANQSGDEGKLNIYNEFAPKIWSVVSSKFNSAIKCFDEESLSKFKGYKDIDESLISKYGITVSNTDTLVKILYFLCKFLDGKEINELCCAMINKFDNINDLIKTAAQCGEDIEFVKEYKLFINSKDLSDQIRVVKSISKMKPELSNIGEVLLLDAIDILGYKINKYKCDADGNRLVDSNNKPVYSEEYCTFKKDFFETCELDEFGRVKYDKKGKPVINHRRRNFIINNVLSSKWFFYVAKYNRPSECQKFMKSKKLIALALKDVPETQIARYYHSVTGGREQTDSEAMRTTLISRLHEFSIKDVLSSVGSMTASENKRQIENSRKEQMKAIVKLYLTVVYLIAKSLVKVNTRFSIAFSAYERDVSLLADENESIAMADNDDDKWKTGNYIFALTKHFLDNDEPYFDKYNNALQQIKGITDPNERRLAYRANDKVIKHTHFNLHTNKYVKDNYEKISKMNKIVTEYRNNVQHLAVVNNITKYLGDISEVTSYYSLYCYILQRLLLDNNNNDKFAEIKEKLIKFGTYNKDFMWLINVPFAYNLPRYKNLSNEEIFYDVIQNK

SEQ ID NO: 2919 - protein, 984 aa, Artificial
  Synthetic
MKKKNIRATREALKAQKIKKSQENEALKKQKLAEEAAQKRREELEKKNLAQWEETSAEGRRSRVKAVGVKSVFVVGDDLYLATFGNGNETVLEKKIAPDGKITTFPEEETFTAKLKFAQTEPTEATSIGISNGRIVLPEISVDNPLHTTMQKNTIKRSAGEDMLQLKNVLENRYFDRSFNDDLHIRLIYNILDIEKILAEYTTNAVFAIDNVSGCSDDFLSNFSTRNQWDEFQNPEQHREHFGNKDNVICSVKKQQDLFFNFFKNNRIGYFGKAFFHAESERKIVKKTAKEVYHILTLIGSLRQWITHSTEGGISRLWLYQLEDALSSEYQETMNNCYNSTIYGLQKDFEKTNAPNLNFLAEILGKNASELAEPYFRFIITKEYKNLGFSIKTLREMLLDQPDLQEIRENHNVYDSIRSKLYKMMDFVLVYAYSNERKSKADALASNLRSAITEDAKKRIYQNEADQLWTSYQELFKRIRGFKGAQVKEYSSQNIPIPIQKQIQNILKPAEQVTCFTKLMYLLTMFLDGKEINDLLTTLINKFDNISSLLKTMEQLELQTTFKEDYTFFQQSSCLCEEITQLKSFARMGNPISNLKEVMMVDAIQILGTEKSEQELQSMACFFFRDKNGKKLNAGEHGMRNFIGNNVISNTRFQYLIRYGNPQKLHTLSQNETVVRFVLSRIAKNQRVQGMNGKNQIDRYYETCGGTNSWSVSEEEKINFLCKILTNMSYDQFQDVKQSDKIITAEEKRKKERYKAIISLYLTVLYQLIKNLVNINARYIIAFHCLERDAILYSLKFNTSINLKKRYTALTEMILGYETDEKARRKDTRTIYEKAEAAKNRHLKNVKWNCKTRENLENADKNAIVAFRNIVAHLWIIRDADRFITEMGAMKRYFDCYHYLLQRELEYILEKSNQGSKYTKKSLEKVQQYHSYCKDFLHMLCLPFAYCIPRYKNLSIAELFDRHELEAEPKEEASPANNSQFITT

SEQ ID NO: 2920 - protein, 956 aa, Artificial; identical to SEQ ID NO: 2890
  Synthetic

SEQ ID NO: 2921 - protein, 922 aa, Artificial
  Synthetic
MAKKNKMKPRELREAQKKARQLKAAEINNNAAPAIAAMPAAEVIAPAAEKKKSSVKAAGMKSILVSENKMYITSFGKGNSAVLEYEVDNNDYNKTQLSSKDNSNIELGNVNEVNITFSSRRGFESGVEINTSNPTHRSGESSSVRGDMLGLKSELEKRFFGKTFDDNIHIQLIYNILDIEKILAVYVTNIVYALNNMLGVKGSESYDDFMGYLSAQNTYYIFTHPDKSNLSDKVKGNIKKSLSKFNDLLKTKRLGYFGLEEPKTKDTRVSQAYKKRVYHMLAIVGQIRQCVFHDKSGAKRFDIYSFINNIDPEYRETLDYLVDERFDSINKGFIQGNKVNISLLIDMMKDYEADDIIRLYYDFIVLKSQKNLGFSIKKLREKMLDEYGFRFKDKQYDSVRSKMYKLMDFLLFCNYYRNDVVAGETLVRKLRFSMTDDEKEGIYADEAAKLWGKFRNDFENIADHMNGDVIKELGKADMDFDEKILDSEKKNASDLLYFSKMIYMLTYFLDGKEINDLLTTLISKFDNIKEFLKIMKSSAVDVECELTEGYKLFNDSQRITNELFIVKNIASMRKPAASAKLTMFRDALTILGIDDKITDDRISEILKLKEKGKGIHGLRNFITNNVIESSRFVYLIKYANAQKIREVAKNEKVVMFVLGGIPDTQIERYYKSCVEFPDMNSSLEAKRSELARMIKNISFDDFKNVKQQAKGRENVAKERAKAVIGLYLTVMYLLVKNLVNVNARYVIAIHCLERDFGLYKEIIPELASKNLKNDYRILSQTLCELCDDRDKSPNLFLKKNKRLRKCVEVDINNADSSMTRKYRNCIAHLTVVRELKEYIGDIRTVDSYFSIYHYVMQRCITKRENDTKQEDKIKYEDDLLKNHGYTKDFVKALNSPFGYNIPRFKNLSIEQLFDRNEYLTEK

SEQ ID NO: 2922 - protein, 920 aa, Artificial
  Synthetic
MAKKNKMKPRELREAQKKARQLKVAEINNNAAPAIAAMPAVEVIAPAAEKKKSSVKAAGMKSILVSENKMYITSFGKGNSAVLEYEVDNNDYNKTQLSSKDNSNIELGNVNEVNITFSSRRGFESGVEINTSNPTHRSGESSSVRGDMLGLKSELEKRFFGKTFDDNIHIQLIYNILDIEKILAVYVTNIVYALNNMLGIKGSESYDDFMGYLSARNTYEVFTNPNGSTLSDDKKENIRKSLSKFNALLKTKRLGYFGLEEPKTKDTRVSQAYKKRVYHMLAIVGQIRQSVFHDKSSKLDEDLYSFIDIIDSEYRETLDYLVDERFDSINKGFIQGNKVNISLLIDMMKDDYEADDIIRLYYDFIVLKSQKNLGFSIKKLREKMLDEYGFRFKDKQYDSVRSKMYKLMDFLLFCNYYRNDVVAGEALVRKLRFSMTDDEKEGTYADEAEKLWGKFRNDFENIADHMNGDAIKELGKADMDFDEKILDSEKKNASDLLYFSKMIYMLTYFLDGKEINDLLTTLISKFDNIKEFLKIMKSSAVDVECELTAGYKLFNDSQRITNELFIVKNIASMRKPAASAKLTMFRDALTILGIDDNITDDRISEILKLKEKGKGIHGLRNFITNNVIESSRFVYLIKYANAQKIREVAKNEKVVMFVLGGIPDTQIERYYKSCVEFPDMNSSLEAKRSELARMIKNISFDDFKNVKQQAKGRENVAKERAKAVIGLYLTVMYLLVKNLVNVNARYVIAIHCLERDFGLYKEIIPELASKNLKNDYRILSQTLCELCDKSPNLFLKKNERLRKCVEVDINNADSSMTRKYRNCIAHLTVVRELKEYIGDIRTVDSYFSIYHYVMQRCITKRENDTKQEDKIKYEDDLLKNHGYTKDFVKALNSPFGYNIPRFKNLSIEQLFDRNEYLTEK

SEQ ID NO: 2923 - protein, 923 aa, Artificial
  Synthetic
MAKKNKMKPRELREAQKKARQLKAVEINNNAVPEIAAMPAAEVIAPVAEKKKSSVKAAGMKSILVSENKMYITSFGKGNSAVLEYEVDNNDYNKTQLSSKNSSNIELRGVNEVNITFSSKHGFESGVEINTSNPTHRSGESSPVRWDMLGLKSELEKRFFGKTFDDNIHIQLIYNILDIEKILAVYVTNIVYALNNMLGIKDSESYDDFMGYLSARNTYKVFTHPDKSNLSDKVKGNIKKSFSTFNDLLKTKRLGYFGLEEPKTKDTRVSQAYKKRVYHMLAIVGQIRQCVFHDKSSKLHEDLYSFINNIDPEYRDTLDYLVEERLKSINKDFIEGNKVNISLLIDMMKDDYEADDIIRLYYDFIVLKSQKNLGFSIKKLREKMLDEYGFRFKDKQYDSVRSKMYKLMDFLLFCNYYRNDVAAGEALVRKLRFSMTDDEKEGIYADEAAKLWGKFRNDFENIADHMNGDVIKELGKADMDFDEKILDSEKKNASDLLYFSKMIYMLTYFLDGKEINDLLTTLISKFDNIKEFLKIMKSSAVDVECELTAGYKLFNDSQRITNELFIVKNIASMRKPAASAKLTMFRDALTILGIDDKITDDRISEILKLKEKGKGIHGLRNFITNNVIESSRFVYLIKYANAQKIREVAKNEKVVMFVLGGIPDTQIERYYKSCVEFPDMNSSLEAKRSELARMIKNISFDDFKNVKQQAKGRENVAKERAKAVIGLYLTVMYLLVKNLVNVNARYVIAIHCLERDFGLYKEIIPELASKNLKNDYRILSQTLCELCDDRDESPNLFLKKNRRLRKCVEVDINNADSSMTRKYRNCIAHITVVRELKEYIGDIRTVDSYFSIYHYVMQRCITKREDDTKQEEKIKYEDDLLKNHGYTKDFVKALNSPFGYNIPRFKNLSIEQLFDRNEYLTEK

SEQ ID NO: 2924 - protein, 923 aa, Artificial
  Synthetic
MFMAKKNKMKPRERREAQKKARQLKAAEINNNAVPAIAAMHAAEVIAPAAEKKKSSVKAAGMKSILVSENKMYITSFGKGNSAVLEYEVDNNDYNQTQLSSKDNSNIELCGVTKVNITFSSKHGFESGVEINTSNPTHRSGESSPVRGDMLGLKSELEKRFFGKTFDDNIHIQLIYNILDIEKILAVYVTNIVYALNNMLGEGDESNYDFMGYLSTFNTYKVFTNPNGSTLSDDKKENIRKSLSKFNALLKTKRLGYFGLEEPKTKDTRASEAYKKRVYHMLAIVGQIRQCVFHDKSGAKRFDLYSFINNIYPEYRDTLDYLVEERLKSINKDFIQGNKVNISLLIDMMKGYEADDIIRLYYDFIVLKSQKNLGFSIKKLREKMLDEYGFRFKDKQYDSVRSKMYKLMDFLLFCNYYRNDVVAGEALVRKLRFSMTDDEKEGIYADEAAKLWGKFRNDFENIADHMNGDVIKELGKADMDFDEKILDSEKKNASDLLYFSKMIYMLTYFLDGKEINDLLTTLISKFDNIKEFLKIMKSSAVDVECELTAGYKLFNDSQRITNELFIVKNIASMRKPAASAKLTMFRDALTILGIDDKITDDRISEILKLKEKGKGIHGLRNFITNNVIESSRFVYLIKYANAQKIREVAKNEKVVMFVLGGIPDTQIERYYKSCVEFPDMNSSLEAKRSELARMIKNISFDDFKNVKQQAKGRENVAKERAKAVIGLYLTVMYLLVKNLVNVNARYVIAIHCLERDFGLYKEIIPELASKNLKNDYRILSQTLCELCDDRDESPNLFLKKNKRLRKCVEVDINNADSSMTRKYRNCIAHLTVVRELKKYIGDIRTVDSYFSIYHYVMQRCITKREDDTKQEEKIKYEDDLLKNHGYTKDFVKALNSPFGYNIPRFKNLSIEQLFDRNEYLTEK

SEQ ID NO: 2925 - protein, 956 aa, Artificial; identical to SEQ ID NO: 2890
  Synthetic

SEQ ID NO: 2926 - protein, 956 aa, Artificial; identical to SEQ ID NO: 2890
  Synthetic

SEQ ID NO: 2927 - protein, 975 aa, Artificial; identical to SEQ ID NO: 2918
  Synthetic

SEQ ID NO: 2928 - protein, 984 aa, Artificial; identical to SEQ ID NO: 2919
  Synthetic

SEQ ID NO: 2929 - protein, 984 aa, Artificial; identical to SEQ ID NO: 2919
  Synthetic

SEQ ID NO: 2930 - protein, 922 aa, Artificial; identical to SEQ ID NO: 2840
  Synthetic

SEQ ID NO: 2931 - protein, 984 aa, Artificial; identical to SEQ ID NO: 2919
  Synthetic

SEQ ID NO: 2932 - protein, 975 aa, Artificial; identical to SEQ ID NO: 2918
  Synthetic

SEQ ID NO: 2933 - protein, 922 aa, Artificial
  Synthetic
MAKKNKMKPRELREAQKKARQLKAAEINNNAVPAIAAMPAAEVIAPAAEKKKSSVKAAGMKSILVSENKMYITSFGKGNSAVLEYEVDNNDYNKTQLSSKDNSNIELGNVNEVNITFSSRRGFESGVEINTSNPTHRSGESSPVRGDMLGLKSELEKRFFGKTFDDNIHIQLIYNILDIEKILAVYVTNIVYALNNMLGEGDDESHDDFMGYLSAKNTYDVFTDPDESDLSKNIKGNIKKSLSKFNDLLKTKRLGYFGLEEPKTKDTNALEAYKKRVYHMLAIVGQIRQSVFHDKSSKLDEDLYSFIDIIDSEYRDTLDYLVEERLKSINKDFIQGNKVNISLLIDMMKGYEADDIIRLYYDFIVLKSQKNLGFSIKKLREKMLDEYGFRFKDKQYDSVRSKMYKLMDFLLFCNYYRNDIAAGEALVRKLRFSMTDDEKEGLYADEAAKLWGKFRNDFENIADHMNGDVIKELGKADMDFDEKILDSEKKNASDLLYFSKMIYMLTYFLDGKEINDLLTTLISKFDNIKEFLKIMKSSAVDVECELTAGYKLFNDSQRITNELFIVKNIASMRKPASSAKLTMFRDALTILGIDDNITDDRISEILKLKEKGKGIHGLRNFITNNVIESSRFVYLIKYANAQKIREVAKNEKVVMFVLGGIPDTQIERYYKSCVEFPDMNSSMGAKRRELAKMIKSISFEDFKDVKQQAKGRENVAKERAKAVIGLYLTVMYLLVKNLVNVNARYVIAIHCLERDFGLYKEIIPELASKNLKNDYRILSQTLCELCDNGDESPNLFLKKNKRLRKCVEVDINNADSNMTRKYRNCIAHLTVVRELNKYIKDIRTVDSYFSIYHYVMQRCITKRENDTKQEEKINYEDDLLKNHGYTKDFVKALNSPFGYNIPRFKNLSIEQLFDRNEYLTEK

SEQ ID NO: 2934 - protein, 922 aa, Artificial
  Synthetic
MAKKNKMKPRELREAQKKARQLKAAEINNNAVPAIAAMPAAEAAAPAAEKKKSSVKAAGMKSILVSENKMYITSFGKGNSAVLEYEVDKVDDNDYNKTQLSSKGSSNIELHGVNEVNITFSSKHGFESGVEINTSNPTHRSGESSPVRGDMLGLKSELEKRFFGKTFDDNIHIQLIYNILDIEKILAVYVTNIVYALNNMLGVKGSESYDDFMGYLSAQNTYYIFTHPDKSNLSDKVKGNIKKSLSKFNDLLKTKRLGYFGLEEPKTKDKRVSEAYKKRVYHMLAIVGQIRQSVFHDKSNELDEYLYSFIDIIDSEYRDTLDYLVDERFDSINKGFVQGNKVNISLLIDMMKGYEADDIIRLYYDFIVLKSQKNLGFSIKKLREKMLDEYGFRFKDKQYDSVRSKMYKLMDFLLFCNYYRNDVVAGEALVRKLRFSMTDDEKEGIYADEAEKLWGKFRNDFENIADHMNGDVIKELGKADMDFDEKILDSEKKNASDLLYFSKMIYMLTYFLDGKEINDLLTTLISKFDNIKEFLKIMKSSAVDVECELTAGYKLFNDSQRITNELFIVKNIASMRKPAASAKLTMFRDALTILGIDDNITDDRISEILKLKEKGKGIHGLRNFITNNVIESSRFVYLIKYANAQKIREVAKNEKVVMFVLGGIPDTQIERYYKSCVEFPDMNSSLEAKRSELARMIKNISFDDFKNVKQQAKGRENVAKERAKAVIGLYLTVMYLLVKNLVNVNARYVIAIHCLERDFGLYKEIIPELASKNLKNDYRILSQTLCELCDKSPNLFLKKNERLRKCVEVDINNADSSMTRKYRNCIAHLTVVRELKEYIGDIRTVDSYFSIYHYVMQRCITKRENDTKQEDKIKYEDDLLKNHGYTKDFVKALNSPFGYNIPRFKNLSIEQLFDRNEYLTEK

SEQ ID NO: 2935 - protein, 919 aa, Artificial; identical to SEQ ID NO: 2876
  Synthetic

SEQ ID NO: 2936 - protein, 957 aa, Artificial
  Synthetic
MILILGEGTIRMAKKKNARQRREEEKNRIKAIIEKIKNKVVEKEETEEIVENNETKNVESIVVEPKKKSLAKASGVKSVFINNDEIIMTSFGRGNDAVIEKIIKDNNIDNENKDKPVYDVVAIENEGNIIKVQSERFKAIESANTEIPPERNGMDLIKRKDKLEEVYFGHTFNDNIHIQLIYNILDIEKILSVYINNIVYALGNLERKDTDEEKDLIGYSSARAKYEDFIENEKLEDRKKLLEEFIENGDRLGYFGNVFFKNDKELKSKKEIYNILGLLGSLRQFCFHYNEAVFENEEGKINQEYKSNSWLYNLGQLFDEFKDTLNGFYNEKIDSINKDFIKTNQINLHIICSELGMNMDKEQVVGDYYDFIISKKHKNMGFSIKKIREYMFDIYEAFDIKDKEFDSVRSILYKIIDFIIYYSFIHYKNDIAENIVSRLRVSLSEEDKDKVYEEIARDTWNEYKDQINKLKELLTKRIGEFSDAKNKNVYYKEFESIKFDEIGKKKLGENADYFCKLMYLLTLFLDGKEINDLLTTLINKFDNIRSFIEIMEEKQIECNFDEKFSFFDESKNVCDTLREVNSFARMQRPLDNKSVQREMYRDAIKILLKDTWVEEKNIDRILDEYIPNKENKSIKKDFRNFIIKNIIKSNRFIYLIKYSNPTDVRKLASNKDVVKFVLNTIPEAQIDRYYNSCGLPLEEDNNVQIEKLSDIITNIDYIEFLDVQQSYKNEDKSKKQAVVTLYLTILYILTKNLVNVNSRYVIALHCLERDSTLYGIKLKKEKNKPSKYHKLTQYFIDNRYFDRKKKDRKNGEYVSKKISGYIEKNMKNYIECEQIETTEQYKETGVDMFINYRNSIAHLNTVRKASKYIKDIKYFGTYFELYHYIMQRYLKDNIELKGENNALEGYFDNLCKYGTYVKDFVKTLNVPFAYNYPRYKNLSIDELFDKNNTRKTKKSSL

SEQ ID NO: 2937 - protein, 922 aa, Artificial
  Synthetic
MAKKNKMKPRELREAQKKARQLKAAEINNNAAPAIAAMPAAEAAAPAAEKKKSSVKAAGMKSILVSENKMYITSFGKGNSAVLEYEVDNNDYNQTQLSSKGSSNIELHGVNEVNITFSSKHGFESGVEINTSNPTHRSGESSPVRWDMLGLKSELEKRFFGKTFDDNIHIQLIYNILDIEKILAVYVTNIVYALNNMLGVKGSESHDDFIGYLSTNNTYDVFIDPDNSSLSDDKKANVRKSLSKFNVLLKTKRLGYFGLEEPKTKDTRVSQAYKKRVYHMLAIVGQIRQCVFHDKSGAKRFDLYSFINNIDPEYRETLDYLVDERFDSINKGFIEGNKINISLLIDMMKGYEADDIIRLYYDFIVLKSQKNLGFSIKKLREKMLDEYGFRFKDKQYDPVRSKMYKLMDFLLFCNHYRNDVAAGEALVRKLRFSMTDDEKEGIYADEAAKLWGKFRNDFENIADHMNGDVIKELGKADMDFDEKILDSEKKNASDLLYFSKMIYMLTYFLDGKEINDLLTTLISKFDNIKEFLKIMKSSAVDVECELTAGYKLFNDSQRITNELFIVKNIASMRKPAASAKLTMFRDALTILGIDDNITDDRISEILKLKEKGKGIHGLRNFITNNVIESSRFVYLIKYANAQKIREVAKNEKVVMFVLGGIPDTHIERYYKSCVEFPDMNSSLEAKRSELARMIKNISFDDFKNVKQQAKGRENVAKERAKAVIGLYLTVMYLLVKNLVNVNARYVIAIHCLERDFGLYKEIIPELASKNLKNDYRILSQTLCELCDDRDESPNLFLKKNKRLRKCVEVDINNADSSMTRKYRNCIAHLTVVRELKEYIGDIRTVDSYFSIYHYVMQRCITKRENDTKQEEKIKYEDDLLKNHGYTKDFVKALNSPFGYNIPRFKNLSIEQLFDRNEYLTEK

SEQ ID NO: 2938 - protein, 975 aa, Artificial
  Synthetic
MGKKIHARDLREQRKTDRTVKFADQNKKREAERAVQKKDAAVSVKSVSSVSSKKDNATKSMAKAAGVKSVFAVGNTVYMTSFGRGNDAVLEQKIVDTSHEPLNIDDPAYQLNVVTMNGYSVTGHRGETVSAVTDNPLRRFNGGKKGEPEQSVPTDMLCLKPTLEKKFFGKEFNDNIHIQLIYNILDIEKILAVYSTNAIYALNNMSADENIENSDFFMKRTTDETFDDFEKKKESTNSREKADFDAFEKFIANYRLAYFADAFYVNKKNPKGKAKNVLREDKELYSVLTLIGKLRHWCVHSEDGRAEFWLYKLDELKDDFKNVLDVVYNRPVEEINNRFIENNKVNIQILGSVHEDTDIAELTRSYYEFLITKKYKNMGFSIKKLREIILEGTEYNDNKYDTVRNKLYQIVDFILYRGYINENSERAEVLVNALRSTLNEDDKTKLYSSEAAFLKKKYMKIIRKAADSLDVKKLKDLKKKAFTIPDNELRKCFISYADSVSEFTKLIYLLTRFLSGKEINDLVTTLINKFDNIRSFLEIMDELGLERTFTDEYRFFEGSTKYLAELVELNSFVKSCSFDMSAKRTMYRDALDILGIESDKTEEDIEKMIDNILQVDANGKKLPNKNHGLRNFIASNVIDSNRFEYLVRYGNPKKIRETAKCEPAVRFVLNEIPDAQIERYYKAYYPDEKSLCLANMQRDKLAGVIADIKFDDFSDAGSYQKANATSTRRTSEAEIKRKNQAIIRLYLTVMYIMLKNLVNVNARYVIAFHCLERDAKLYSESVLKVGNTNEESRLQTGNTNEEKNKVKLTNLTNLTMAVMGVKLENGTIKTEFDKSLAENAANRYLRNARWYKLILDNLKKSERAVVTEFRNTVCHLNAIRNININIKEVKEVENYFALYHYLIQKHLEKRFADKKVERDTGDFISKLEEHKTYCKDFVKAYCTPFGYNLVRYKNLTIDGLFDKNYPGKDDSDQQK

SEQ ID NO: 2939 - protein, 900 aa, Artificial; identical to SEQ ID NO: 2863
  Synthetic

SEQ ID NO: 2940 - protein, 919 aa, Artificial
  Synthetic
MAKKNKMKPRELREAQKKARQLKAAEINNNAVPAIAAMPAAEAAAPAAEKKKSSVKAAGMKSILVSENKMYITSFGKGNSAVLEYEVDNNDYNKTQLSSKDNSNIELCDVDEVNITFSSKHGFESGVKINTSNPTHRSGESSSVRGDMLGLKSELEKRFFGKTFDDNIHIQLIYNILDIEKILAVYVTNIVYALNNMLGLENESNNDFMGYLSAKNTYDVFTDPDESDLSKNIKGNIKKSLSKFNDLLKTKRLGYFGLEEPKTKDKRVSEAYKKRVYHMLAIVGQIRQSVFHDKSNELDEYLYSFIDIIDSEYRETLDYLIDERFDSINKGFIQGNKVNISLLIDMMKDDYEADDIIRLYYDFIVLKSQKNLGFSIKKLREKMLDEYGFRFKDKQYDSVRSKMYKLMDFLLFCNYYRNDVIAGEALVRKLRFSMTDDEKEGIYADEAAKLWGKFRNDFENIADHMNGDVIKELGKADMDFDEKILDSEKKNASDLLYFSKMIYVLTYFLDGKEINDLLTTLISKFDNIKEFLKIMKSSAVNVECELTAGYKLFNDSQRITNELFIVKNIASMRKPAASAKLTMFRDALTILGIDDKITDDRISEILKLKEKGKGIHGLRNFITNNVIESSRFVYLIKYANAQKIREVAKNEKVVMFVLGGIPDTQIERYYKSCVEFPDMNSSLEVKRSELARMIKNIRFDDFKNVKQQAKGRENVAKERAKAVIGLYLTVMYLLVKNLVNVNARYVIAIHCLERDFGLYKEIIPELASKNLKNDYRILSQTLCELCDKSPNLFLKKNRRLRKCVEVDINNADSSMTRKYRNCIAHLTVVRELKEYIGDIRTVDSYFSIYHYVMQRCITKRENDTKQEEKIKYEDDLLKNHGYTKDFVKALNSPFGYNIPRFKNLSIEQLFDRNEYLTEK

SEQ ID NO: 2941 - protein, 919 aa, Artificial; identical to SEQ ID NO: 2844
  Synthetic

SEQ ID NO: 2942 - protein, 954 aa, Artificial
  Synthetic
MGKKIHARDLREQRKTDRTVKFADQNKKREAQRAVQKKDAAVSVKSVSSVSSKKDNVTKSMAKAAGVKSVFAVGNTVYMTSFGRGNDAVLEQKIVDTSHEPLNIDDPAYQLNVVTMNGYSVTGHRGETVSAVTDNPLRRFNGGKKDEPEQSVPTDMLCLKPTLEKKFFGKEFNDNIHIQLIYNILDIEKILAVYSTNAIYALNNMSADENIENSDFFMKRTTDETFDDFEKKKESTNSREKADFDAFEKFIGNYRLAYFADAFYVNKKNPKGKAKNVLREDKELYSVLTLIGKLRHWCVHSEEGRAEFWLYKLNELKDDFKNVLDVVYNRPVEEINNRFIENNKVNIQILGSVYKNTDIAELVRSYYEFLITKKYKNMGFSIKKLRESMLEGKGYADKEYDSVRNKLYQMTDFILYTGYINEDSDRADDLVNTLRSSLKEDDKTTVYCKEADYLWKKYRESIREVADALDVDNIKNLSGSNIEIRDNELRKCFISYADSVSEFTKLIYLLTRFLSGKEINDLVTTLINKFDNIRSFLEILDELGLDRTFTAEYSFFEGSTKYLAELVELNSFVKSCSFDINAKRTMYRDALDILGIKSGKTEEDIEKMIDNILQIDANGDKKLKKNNGLRNFIASNVIDSNRFKYLVRYGNPKKIRETAKCKPAVRFVLNEIPDAQIERYYEACCPKNTALCSANKRREKLADMIAEIKFENFSDAGNYQKANVTSRTSEAEIKRKNQAIIRLYLTVMYIMLKNLVNVNARYVIAFHCVERDTKLYAESGLEVGNIEKNKTNLTMAVMGVKLENGIIKTEFDKSLAENAANRYLRNARWYKLILDNLKKSERAVVNEFRNTVCHLNAIRNININIDGIKEVENYFALYHYLIQKHLENRFADKKVERDTGDFISKLEEHKTYCKDFVKAYCTPFGYNLVRYKNLTIDGLFDKNYPGKDDSDKQK

SEQ ID NO: 2943 - protein, 925 aa, Artificial
  Synthetic
MAKKNKMKPRELREAQKKARQLKAAEINNNAAPAIAAMPAEEVIAPAAEKKKSSVKAAGMKSILVSKNKMYITSFGKGNSAVLEYEVDKVDNDNYNKTQLSSEDSSNIELCGVTKVNITFSSKHGLESGVEISTSNPTHRSGESSPVRWDMLGLKSELEKRFFGKTFDDNIHIQFIYNILDIEKILAVYVTNIVYALNNMLGVKGSESYDDFMGYLSARNTYEVFTHPDKSNLSDKVKGNIKKSFSTFNDLLKTKRLGYFGLEEPKTKDNRVSEAYKKRVYHMLAIVGQIRQSVFHDKSSKLHEDLYSFIDIIDPEYRETLDYLVDERFDSINKGFIQGNKVNISLLIDMMKGYEADDIIRLYYDFIVLKSQKNLGFSIKKLREKMLDEYGFRFKDKQYDSVRSKMYKLMDFLLFCNYYRNDVVAGEALVRKLRFSMTDDEKEGIYADEAAKLWGKFRNDFENIADHMNGDVIKELGKADMDFDEKILDSEKKNASDLLYFSKMIYMLTYFLDGKEINDLLTTLISKFDNIKEFLKIMKSSAVDVECELTAGYKLFNDSQRITNELFIVKNIASMRKPAASAKLTMFRDALTILGIDDKITDDRISEILKLKEKGKGIHGLRNFITNNVIESSRFVYLIKYANAQKIREVAKNEKVVMFVLGGIPDTQIERYYKSCVEFPDMNSSLEAKRSELARMIKNISFDDFKNVKQQAKGRENVAKERAKAVIGLYLTVMYLLVKNLVNVNARYVIAIHCLERDFGLYKEIIPELASKNLKNDYRILSQTLCELCDDRDESPNLFLKKNKRLRKCVEVDINNADSIMTRKYRNCIAHLTVVRELKEYIGDIRTVDSYFSIYHYVMQRCITKREDDTKQEEKIKYEDDLLKNHGYTKDFVKALNSPFGYNIPRFKNLSIEQLFDRNEYLTEK

SEQ ID NO: 2944 - protein, 937 aa, Artificial
  Synthetic
MAKKKRITAKERKQNHRESLMKKADSNAEKEKAKKPVVENKPDTAISKDNTPKPNKEIKKSKAKLAGVKWVIKANDDVAYISSFGKGNNSVLEKRIMGDVSSNVNKDSHMYVNPKYTKKNYEIKNGFSSGSSLVTYPNKPDKNSGMDALCLKPYFEKDFFGHIFTDNMHIQAIYNIFDIEKILAKHITNIIYTVNSFDRNYNQSGNDTIGFDINYRVPYSEYGGGKDSNGKPNKISAWKKRENFIKFYNEAKPHLGYYENIFYEHGEPISEEKFYNYLNILNFIRNNTFHYKDNDIELYGENYSEEYVFINCLNEFVKNKFKNVNKNFISNEKNNLYIILKAYGEDTENVEVVKKYSKELYKLSVLKTNKNLGVNVKKLRESAIEYGYCPLPYDKEKEVAKLSSVKHKLYKTYDFVITHYLNSNDKLLLEIVETLRLSKNDDEKENVYKKYAEKLFKADDVINPIKAISKLFAEKGNKLFKEKIIIKKEYIEDVSIDKNIYDFTKVIFFMTCFLDGKEINDLLTNIISKLQVIEDHNNVIKFISHNKDAVYKDYSDKYAIFRNAGKIATELEAIKSIARMENKIENAPQEPLLNDALLALGVSKTDLENTYNKYFDSKEKTDKQSQKVSTFLMNNVINNNRFKYVIKYINPADINGLAKNRYLVKFVLSKIPEEQIDSYYKLFSNEEEPSCEEKIKLLTKKISKLNFQTLFENNKIPNVEKERKKAIITLYFTIVYILVKNLVNINGLYTLALYFVERDRYFYKKICGKALRRKVGDKYDYLLLPEIFSGSKYREETKNLKLPKEKDRDIMKKYLPNDKDREGYNDFFTAYRNNIVHLNIIAKLSELTKNIDKDINSYFDIYHYCTQRVMFDYCKMNNNVVLAKMKDLAHIKSDCDEFSSKHTYPFSSAVLRFMNLPFAYNVPRFKNLSYKKFFDKQ

SEQ ID NO: 2945 - protein, 922 aa, Artificial
  Synthetic
MAKKNKMKPRELREAQKKARQLKAAEINNNAAPAIAAMPAAEVIAPAAEKKKSSVKAAGMKSIFVSENKMYITSFGKGNSAVLEYEVDKVDNNVYNQTQLSSEDSSNIELCGVTKVNITFSSKHGLESGVEISTSNPTHRSGESSPVRWDMLGLKSELEKRFFGKTFDDNIHIQFIYNILDIEKILAVYVTNSVYALNNMLGVKGSESHDDFIGYLSTNNIYDVFIDPDNSSLSDDKKANVRKSLSKFNALLKTKRLGYFGLEEPKTKDTRVSEAYKKRVYHMLAIVGQIRQCVFHDKSSKLDEDLYSFIDIIDPEYRETLDYLVDERFDSINKGFIQGNKVNISLLIDMMKGYEADDIIRLYYDFIVLKSQKNLGFSIKKLREKMLDEYGFRFKDKQYDPVRSKMYKLMDFLLFCNYYRNDVVAGEALVRKLRFSMTDDEKEGIYADEAEKLWGKFRNDFENIADHMNGDVIKELGKADMDFDEKILDSEKKNASDLLYFSKMIYMLTYFLDGKEINDLLTTLISKFDNIKEFLKIMKSSAVNVECELTAGYKLFNDSQRITNELFIVKNIASMRKPAASAKLTMFRDALTILGIDDKITDDRISEILKLKEKGKGIHGLRNFITNNVIESSRFVYLIKYANAQKIRKVAENEKVVMFVLGGIPDTQIERYYKSCVEFPDMNSSLEAKRSELARMIKNISFDDFKNVKQQAKGRENVAKERAKAVIGLYLTVMYLLVKNLVNVNARYVIAIHCLERDFGLYKEIIPELASKNLKNDYRILSQTLCELCDKSPNLFLKKNERLRKCVEVDINNADSSMTRKYRNCIAHLTVVRELKEYIGDIRTVDSYFSIYHYVMQRCITKRENDTKQEDKIKYEDDLLKNHGYTKDFVKALNSPFGYNIPRFKNLSIEQLFDRNEYLTEK

SEQ ID NO: 2946 - protein, 922 aa, Artificial
  Synthetic
MAKKNKMKPRELREAQKKARQLKAAEINNNATPTIAAMPAAEVIAPAAEKKKSSVKAAGMKSILVSKNKMYITSFGKGNSAVLEYEVDNNDYNQTQLSSKNSSNIELRGVNEVNITFSSKHGFESGVEINTSNPTHRSGESSSVRGDMLGLKSELEKRFFGKTFDDNIHIQLIYNILDIEKILAVYVTNIVYALNNMLGIKDSESYDDFIGYLSARNTYKVFTHPDKSNLSDKVKGNIKKSFSTFNDLLKTKRLGYFGLEEPKTKDTRVSQAYKKRVYHMLAIVGQIRQSVFHDKSSKLDEDLYSFIDIIDPEYRETLDYLVDERFDSINKGFIQGNKVNISLLIDMMKGYEADDIIRLYYDFIVLKSQKNLGFSIKKLREKMLDEYGFRFKDKQYDSVRSKMYKLMDFLLFCNYYRNDVVAGEALVRKLRFSMTDDEKEGIYADEAAKLWGKFRNDFENIADHMNGEAIKELGKADMDFDEKILDSEKKNASDLLYFSKMIYMLTYFLDGKEINDLLTTLISKFDNIKEFLKIMKSSAVDVECELTAGYKLFNDSQRITNELFIVKNIASMRKPAASAKLTMFRDALTILGIDDNITDDRISEILKLKEKGKGIHGLRNFITNNVIESSRFVYLIKYANAQKIREVAKNEKVVMFVLGGIPDTQIERYYKSCVEFPDMNSSLEAKRSELARMIKNIGFDDFKNVKQQAKGRENVAKERAKAVIGLYLTVMYLLVKNLVNVNARYVIAIHCLERDFGLYKEIIPELASKNLKNDYRILSQTLCELCDDRDESPNLFLKKNKRLRKCVEVDINNADSSMTRKYRNCIAHLTVVRELKEYIGDIRTVDSYFSIYHYVMQRCITKREDDTKQEDKIKYEDDLLKNHGYTKDFVKALNSPFGYNIPRFKNLSIEQLFDRNEYLTEK

SEQ ID NO: 2947 - protein, 925 aa, Artificial
  Synthetic
MAKKNKMKPRELREAQKKARQLKAAEINNNAAPAIAAMPAAQVIAPAAEKKKSSVKAAGMKSILVSENKMYITSFGKGNSAVLEYEVDKVDNNNYNKTQLSSKDNSNIELGDVNEVNITFSSKHGFESGVEINTSNPTHRSGESSPVRWDMLGLKSELEKRFFGKTFDDNIHIQLIYNILDIEKILAVYVTNIVYALNNMLGIKGSESYDDFMGYLSARNTYEVFTHPDKSNLSDKVKGNIKKSLSKFNDLLKTKRLGYFGLEEPKTKDTRVSQAYKKRVYHMLAIVGQIRQSVFHDKSSKLDEDLYSFIDIIDSEYRETLDYLVDERFDSINKGFIQGNKVNISLLIDMMKGYEADDIIRLYYDFIVLKSQKNLGFSIKKLREKMLDEYGFRFKDKQYDSVRSKMYKLMDFLLFCNYYRNDVVAGEALVRKLRFSMTDDEKEGIYADEASKLWGKFRNDFENIADHMNGDVIKELGKADMDFDEKILDSEKKNASDLLYFSKMIYMLTYFLDGKEINDLLTTLISKFDNIKEFLKIMKSSAVDVECELTAGYKLFNDSQRITNELFIVKNIASMRKPAASAKLTMFRDALTILGIDDKITDDRISEILKLKEKGKGIHGLRNFITNNVIESSRFVYLIKYANAQKIREVAENEKVVMFVLGGIPDTQIERYYKSCVEFPDMNSSLEVKRSELARMIKNISFDDFKNVKQQAKGRENVAKERAKAVIGLYLTVMYLLVKNLVNVNARYVIAIHCLERDFGLYKEIIPELASKNLKNDYRILSQTLCELCDDRDESPNLFLKKNKRPRKCVEVDINNADSSMTRKYRNCIAHLTVVRELKEYIGDIRTVDSYFSIYHYVMQRCITKREDDKKQEEKIKYEDDLLKNHGYTKDFVKALNSPFGYNIPRFKNLSIEQLFDRNEYLTEK

SEQ ID NO: 2948 - protein, 922 aa, Artificial; identical to SEQ ID NO: 2840
  Synthetic

SEQ ID NO: 2949 - protein, 925 aa, Artificial; identical to SEQ ID NO: 2833
  Synthetic

SEQ ID NO: 2950 - protein, 928 aa, Artificial
  Synthetic
MAKKNKMKPRELREAQKKARQLKAAEINNNAAPAIAAMPAAQVIAPAAEKKKSSVKAAGMKSILVSENKMYITSFGKGNSAVLEYEVDKVDNNVYNQTQLSSKGSSNIKLCGVNEVNITFSSKHGFESGVEINTSNPTHRSGESSPVRGDMLGLKSELEKRFFGKTFDDNIHIQLIYNILDIEKILAVYVTNIVYALNNMLGVKDSESYDDFMGYLSARNTYEVFTHPDKSNLSDKVKGNIKKSLSKFNDLLKTKRLGYFGLEEPKTKDTRVSQAYKKRVYHMLAIVGQIRQCVFHDLSEHSEYDLYSFIDNSKKVYRECRETLDYLVDERFDSINKGFIQGNKVNISLLIDMMKGYEADDIIRLYYDFIVLKSQKNLGFSIKKLREKMLDEYGYRFKDKQYDSVRSKMYKLMDFLLFCNYYRNDVVAGEALVRKLRFSMTDDEKEGIYADEAEKLWGKFRNDFENIADHMNGDVIKELGKADMDFDEKIIDSEKKNASDLLYFSKMIYMLTYFLDGKEINDLLTTLISKFDNIKEFLKIMKSSAVNVECELTAGYKLFNDSQRITNELFIVKNIASMRKPAASAKLTMFRDALTILGIDDNITDDRISEILKLKEKGKGIHGLRNFITNNVIESSRFVYLIKYANAQKIREVAENEKVVMFVLGGIPDTQIERYYKSCVEFHDMNSSLEAKRSELARMIKNISFDDFKNVKQQAKGRENVAKERAKAVIGLYLTVMYLLVKNLVNVNARYVIAIHCLERDFGLYKEIIPELASKNLKNDYRILSQTLCELCDDRDESPNLFLKKNKRLRKCVEVDINNADSSMTRKYRNCIAHLTVVRELKEYIGDIRTVDSYFSIYHYVMQRCITKREDDTKQEDKIKYEDDLLKNHGYTKDFVKALNSPFGYNIPRFKNLSIEQLFDRNEYLTEK

SEQ ID NO: 2951 - protein, 910 aa, Artificial
  Synthetic
MQQNSTDNKNKIKKSAAKAVGVKSLARLSDGSTVFSSFGKGAAAELESLITGGEIRKLSDKAILEITDDTQNKNAYNVKSYRIPNLTARTDKLSDKSGMDDLGFKRELELEVFGQSFDDSIHIQIAHAVFDIQKSLAAVIPNVLYTLNNLDRSYSTDDTAGKKDIIGNTLNYQHSYDNFDKEKLGEFTEYYNAAKDRFSYFPDILCVLEKVNGKDRYQPKSEKDAFNVLSSVNMLRNSLFHFAQKSNDGKARIAVFKNQFDSDFSHITSTVNKIYSAKIAGVNENFLNNEGNNLYIILNATNWDIKKIVPQLYRFSVLKSDKNMGFNMRRLREFAVESKSIDLSRLNDKFLTNNRKKLYKVIDFIIYYHLNKVRKDTFKDDFVAALRASQSEEEKEKLYAQYSERLFADEGLKSAIKKAVDMISDTKSSIFKKKTPLDKALIENIKVNSDASDFCKLIYVFTRFLDGKEINILLNSLIKKFQDIHSFNTTVKKLSENNLIINADYVDDYSLFEQSGTVAKELMLIKSISKMDFGLDNINLSFMYDDALRTLGVSDENLPEVKREYFGKTKNLSAYIRNNVLENRRFKYVIKYIHPSDVQKIACNKAIAGFVLNRMPDTQIKRYYDSLINKGATDMKAQAKALLDCITGISFDAIKDDKHLHKSKEKSPQRSADRERKKAMLTLYYTIVYIFVKQMLHINSLYTIGFFYLERDQRFIYSRAKKENKNSSKNSYLNDFRSVTAYFIPSEIMKRIEKNENKGFLEDFEALWNSCGKTSRLRKEDVLLYARYISPDHALKNYKMILNSYRNKIAHINVIMSAGKYTGGIKRMDSYFAVFQHLVQCDILSNPNNANCFKSESLKPLLLDMRFDGTDEKLYSKRLTRALNIPFGYNVPRYKNLTFEKIYLKSSINE

SEQ ID NO: 2952 - protein, 922 aa, Artificial; identical to SEQ ID NO: 2879
  Synthetic

SEQ ID NO: 2953 - protein, 923 aa, Artificial; identical to SEQ ID NO: 2924
  Synthetic

SEQ ID NO: 2954 - protein, 922 aa, Artificial; identical to SEQ ID NO: 2840
  Synthetic

SEQ ID NO: 2955 - protein, 922 aa, Artificial
  Synthetic
MAKKNKMKPRELREAQKKARQLKAAEINNNAAPAIAAMPAAEVIAPAAEKKKSSVKAAGMKSILVSENKMYITSFGKGNSAVLEYEVDNNDYNKTQLSSKDNSNIELGNVNEVNITFSSRRGFESGVEINTSNPTHRSGESSSVRGDMLGLKSELEKRFFGKTFDDNIHIQLIYNILDIEKILAVYVTNIVYALNNMLGVKGSESYDDFMGYLSAQNTYYIFTHPDKSNLSDKVKGNIKKSLSKFNDLLKTKRLGYFGLEEPKTKDTRVSQAYKKRVYHMLAIVGQIRQCVFHDKSGAKRFDIYSFINNIDPEYRETLDYLVDERFDSINKGFIQGNKVNISLLIDMMKDYEADDIIRLYYDFIVLKSQKNLGFSIKKLREKMLDEYGFRFKDKQYDSVRSKMYKLMDFLLFCNYYRNDVVAGETLVRKLRFSMTDDEKEGIYADEAAKLWGKFRNDFENIADHMNGDVIKELGKADMDFDEKILDSEKKNASDLLYFSKMIYMLTYFLDGKEINDLLTTLISKFDNIKEFLKIMKSSAVDVECELTEGYKLFNDSQRITNELFIVKNIASMRKPAASAKLTMFRDALTILGIDDKITDDRISEILKLKEKGKGIHGLRNFITNNVIESSRFVYLIKYANAQKIREVAKNEKVVMFVLGGIPDTQIERYYKSCVEFPDMNSSLEAKRSELARMIKNIRFDDFKNVKQQAKGRENVAKERAKAVIGLYLTVMYLLVKNLVNVNARYVIAIHCLERDFGLYKEIIPELASKNLKNDYRILSQTLCELCDDRDESPNLFLKKNKRLRKCVEVDINNADSSMTRKYRNCIAHLTVVRELKEYIGDIRTVDSYFSIYHYVMQRCITKREDDTKQEEKIKYEDVLLKNHGYTKDFVKALNSPFGYNIPRFKNLSIEQLFDRNEYLTEK

SEQ ID NO: 2956 - protein, 926 aa, Artificial
  Synthetic
MAKKNKMKPRELREAQKKARQLKAAEINNNAAPAIAAMPAAEVIAPAAEKKKSSVKAAGMKSILVSENKMYITSFGKGNSAVLEYEVDKVDNDDYNKTQLSSKGSSNIELHGVNEVNITFSSKHGFESGVEISTSNPTHRSGESSPVRWDMLGLKSELEKRFFGKTFDDNIHIQFIYNILDIEKILAVYVTNIVYALNNMLGVKDSESYDDFMGYLSARNTYKVFTHPDKSNLSDKVKGNIKKSFSTFNDLLKTKRLGYFGLEEPKTKDTRVSQAYKKRVYHMLAIVGQIRQCVFHDKSSKLHEDLYSFINNIDPEYRDTLDYLVEERLKSINKDFIEGNKVNISLLIDMMKDDYEADDIIRLYYDFIVLKSQKNLGFSIKKLREKMLDEYGFRFKDKQYDSVRSKMYKLMDFLLFCNYYRNDVVAGEALVRKLRFSMTDDEKEGIYADEAAKLWGKFRNDFENIADHMNGDVIKELGKADMDFDEKILDSEKKNASDLLYFSKMIYMLTYFLDGKEINDLLTTLISKFDNIKEFLKIMKSSAVDVECKLTAGYKLFNDSQRITNELFIVKNIASMRKPAASAKLTMFRDALTILGIDDKITDDRISEILKLKEKGKGIHGLRNFITNNVIESSRFVYLIKYANAQKIREVAKNEKVVMFVLGGIPDTQIERYYKSCVEFPDMNSSLEAKRSELARMIKNISFDDFKNVKQQAKGRENVAKERAKAVIGLYLTVMYLLVKNLVNVNARYVIAIHCLERDFGLYKEIIPELASKNLKNDYRILSQTLCELCDDRDESPNLFLKKNKRLRKCVEVDINNADSSMTRKYRNCIAHLTVVRELKEYIGDIRTVDSYFSIYHYVMQRCITKRENDTKQEDKIKYEDDLLKNHGYTKDFVKALNSPFGYNIPRFKNLSIEQLFDRNEYLTEK

SEQ ID NO: 2957 - protein, 954 aa, Artificial
  Synthetic
MGKKIHARDLREQRKTDRTEKFADQNKKREAERAVQKKDAAVSVKSVSSVSSKKDNVTKSMAKAAGVKSVFAVGNTVYMTSFGRGNDAVLEQKIVDTSHEPLNIDDPAYQLNVVTMNGYSVTGHRGETVSAVTDNPLRRFNGGKKDEPEQSVPTDMLCLKPTLEKKFFGKEFNDNIHIQLIYNILDIEKILAVYSTNAIYALNNMSADENIENSDFFMKRTTDETFDDFEKKKESTNSREKADFDAFEKFIGNYRLAYFADAFYVNKKNPKGKARNVLREDKELYSVLTLIGKLRHWCVHSEEGRAEFWLYKLDELKDDFKNVLDVVYNRPVEEINNRFIENNKVNIQILGSVYKNTDIAELVRSYYEFLITKKYKNMGFSIKKLRESMLEGKGYADKEYDSVRNKLYQMTDFILYTGYINEDSDRADDLVNTLRSSLKEDDKTTVYCKEADYLWKKYRESIREVADALDVDNIKNLSGSNIEIRDNELRKCFISYADSVSEFTKLIYLLTRFLSGKEINDLVTTLINKFDNIRSFLEILDELGLDRTFTAEYSFFEGSTKYLAELVELNSFVKSCSFDINAKRTMYRDALDILGIKSGKTEEDIEKMIDNILQIDANGDKKLKKNNGLRNFIASNVIDSNRFKYLVRYGNPKKIRETAKCKPAVRFVLNEIPDAQIERYYEACCPKNTALCSANKRREKLADMIAEIKFENFSDAGNYQKANVTSRTSEAEIKRKNQAIIRLYLTVMYIMLKNLVNVNARYVIAFHCVERDTKLYAESGLEVGNIEKNKTNLTMAVIGVKLENGIIKTEFDKSLAENAANRYLRNARWYKLILDNLKKSERAVVNEFRNTVCHLNAIRNININIKEIKEVENYFALYHYLIQKHLENRFADKKVERDTGDFISKLEEHKTYCKDFVKAYCTPFGYNLVRYKNLTIDGLFDKNYPGKDDSDKQK

SEQ ID NO: 2958 - protein, 1025 aa, Artificial; identical to SEQ ID NO: 2829
  Synthetic

SEQ ID NO: 2959 - protein, 922 aa, Artificial
  Synthetic
MAKKNKMKPRELREAQKKARQLKAAEINNNAVPAIAAMPAAEVIAPAAEKKKSSVKAAGMKSILVSENKMYITSFGKGNSAVLEYEVDNNDYNKTQLSSKDNSNIELGNVNEVNITFSSRRGFESGVEINTSNPTHRSGESSPVRGDMLGLKSELEKRFFGKTFDDNIHIQLIYNILDIEKILAVYVTNIVYALNNMLGEDDDESHDDFMGYLSAKNTYDVFTDPDESDLSKNIKGNIKKSLSKFNDLLKTKRLGYFGLEEPKTKDTNALEAYKKRVYHMLAIVGQIRQSVFHDKSSKLDEDLYSFIDIIDSEYRETLDYLVDERFDSINKGFIQGNKVNISLLIDMMKGYEADDIIRLYYDFIVLKSQKNLGFSIKKLREKMLEEYGFRFKDKQYDSVRSKMYKLMDFLLFCNYYRNDVAAGEALVRKLRFSMTDDEKEGIYADEAEKLWGKFRNDFENIADHMNGDVIKELGKADMDFDEKILDSEKKNASDLLYFSKMIYMLTYFLDGKEINDLLTTLISKFDNIKEFLKIMKSSAVDVECELTAGYKLFNDSQRITNELFIVKNIASMRKPAASAKLTMFRDALTILGIDDKITDDRISEILKLKEKGKGIHGLRNFITNNVIESSRFVYLIKYANAQKIRKVAENEKVVMFVLGGIPDTQIERYYKSCVEFPDMNSSLEAKCSELARMIKNISFDDFKNVKQQAKGRENVAKERAKAVIGLYLTVMYLLVKNLVNVNARYVIAIHCLERDFGLYKEIIPELASKNLKNDYRILSQTLCELCDDRDESPNLFLKKNRRLRKCVEVDINNADSSMTRKYRNCIAHLTVVRELKEYIGDIRTVDSYFSIYHYVMQRCITKREDDTKQEDKIKYEDDLLKNHGYTKDFVKALNSPFGYNIPRFKNLSIEQLFDRNEYLTEK

SEQ ID NO: 2960 - protein, 922 aa, Artificial; identical to SEQ ID NO: 2904
  Synthetic

SEQ ID NO: 2961 - protein, 925 aa, Artificial; identical to SEQ ID NO: 2833
  Synthetic

SEQ ID NO: 2962 - protein, 924 aa, Artificial
  Synthetic
MAKKNKMKPRELREAQKKARQLKAAEIKNNAVPAIAAMPAAEAAAPAVEKKKSSVKAAGMKSILVSENKMYITSFGKGNSAVLEYEVDKVDNNNYNKTQLSSKDNSNIELGDVNEVNITFSSKRGNESGVEINTSNPTHRSGESSPVRWDMLGLKSELEKRFFGKTFDDNIHIQLIYNILDIEKILAVYVTNIVYALNNMLGEGDESNYDFMGYLSTFNTYKVFTNPNGSTLSDDKKENIRKSLSKFNALLKTKRLGYFGLEEPKTKDTRASEAYKKRVYHMLAIVGQIRQCVFHDKSGAKRFDLYSFINNIDPEYRETLDYLVDERFDSINKGFIQGNKVNISLLIDMMKGYEADDIIRLYYDFIVLKSQKNLGFSIKKLREKMLDEYGFRFKDKQYDSVRSKMYKLMDFLLFCNYYRNDVIAGEALVRKLRFSMTDDEKEGIYADEAAKLWGKFRNDFENIADHMNGDVIKELGKADMDFDEKILDSEKKNASDLLYFSKMIYMLTYFLDGKEINDLLTTLISKFDNIKEFLKIMKSSAVNVECELTAGYKLFNDSQRITNELFIVKNIASMRKPAASAKLTMFRDALTILGIDDKITDDRISEILKLKEKGKGIHGLRNFITNNVIESSRFVYLIKYANAQKIREVAENEKVVMFVLGGIPDTQIERYYKSCVEFPDMNSSLEVKRSELARMIKNISFDDFKNVKQQAKGRENVAKERAKAVIGLYLTVMYLLVKNLVNVNARYVIAIHCLERDFGLYKEIIPELASKNLKNDYRILSQTLCELCDDRDESPNLFLKKNRRLRKCVEVDINNADSSMTRKYRNCIAHLTVVRELKEYIGDIRTVDSYFSIYHYVMQRCITKREDDTKQEEKIKYEDDLLKNHGYTKDFVKALNSPFGYNIPRFKNLSIEQLFDRNEYLTEK

SEQ ID NO: 2963 - protein, 923 aa, Artificial
  Synthetic
MAKKNKMKPRELREAQKKARQLKAVEINNNAVPEIAAMPAAEVIAPVAEKKKSSVKAAGMKSILVSENKMYITSFGKGNSAVLEYEVDNNDYNKTQLSSKNSSNIELRGVNEVNITFSSKHGFESGVEINTSNPTHRSGESSPVRWDMLGLKSELEKRFFGKTFDDNIHIQLIYNILDIEKILAVYVTNIVYALNNMLGIKGSESYDDFMGYLSARNTYEVFTHPDKSSLSDDKKANVRKSLSKFNVLLKTKRLGYFGLEEPKTKDTRVSQAYKKRVYHMLAIVGQIRQSVFHDKSSKLHEDLYSFIDIIDSEYRETLDYLVDERFDSINKGFIQGNKVNISLLIDMMKDDYEADDIIRLYYDFIVLKSQKNLGFSIKKLREKMLDEYGFRFKDKQYDSVRSKMYKLMDFLLFCNYYRNDVIAGEALVRKLRFSMTDDEKEGIYADEAAKLWGKFRNDFENIADHMNGDVIKELGKADMDFDEKILDSEKKNASDLLYFSKMIYMLTYFLDGKEINDLLTTLISKFDNIKEFLKIMKSSAVNVECELTAGYKLFNDSQRITNELFIVKNIASMRKPAASAKLTMFRDALTILGIDDNITDDRISEILKLKEKGKGIHGLRNFITNNVIESSRFVYLIKYANAQKIREVAKNEKVVMFVLGGIPDTQIERYYKSCVEFPDMNSSLEVKRSELARMIKNIRFDDFKNVKQQAKGRENVAKERAKAVIGLYLTVMYLLVKNLVNVNARYVIAIHCLERDFGLYKEIIPELASKNLKNDYRILSQTLCELCDNRDESPNLFLKKNKRLRKCVEVDINNADSSMTRKYRNCIAHLTVVRELKEYIGDIRTVDSYFSIYHYVMQRCITKREDDTKQEDKIKYEDDLLKNHGYTKDFVKALNSPFGYNIPRFKNLSIEQLFDRNEYLTEK

SEQ ID NO: 2964 - protein, 945 aa, Artificial
  Synthetic
MAKKKRMTAKERKQNHRESLMKKADSNAEKEKAKKPVVENKPDTAISKDNKPKPNKEIKKSKAKLAGVKWIIKANDDVTYISSFGKGNNSVLEKRIIGDVSGDVNKDSHMYVNPKYTKKNYEIKNGFSSGSSLVTYPNKPDKNSGMDALCLKPYFEIDFFGHIFTDNMHIQAIYNIFDIEKILAKHITNIIYTVNSFDRNYNQSGNDTIGFDLNYRVPYLEYGGGKDSNGKPNKISAWKKRENFINFYNEAKPHLGYYENIFYDHGEPISEEKFYNYLNILNFIRNNTFHYKDNDIELYSENYSEEYVFINCLNEFVKNKFKNVNKNFISNEKNNLYIILKAYGEDTENVEVVKKYSKELYKLSVLKTNKNLGVNVKKLRESAIEYGYCPLPYDKEKEVAKLSSVKHKLYKTYDFVITHYLNSNDKLLLEIVETLRLSKNDDEKENVYKKYAEKLFKADDVINPIKAISKLFAEKGNKLFKEKIIIKKEYIEDVSIDKNIYDFTKVIFFMTCFLDGKEINDLLTNIISKLQVIEDHNNVIKFIFHNKDAVYKDYSDKYAIFRNAGKIATELEAIKSIARMENKIENAPKEPLLKDALLALGVSSNDFDEKYEKYFKTDVDADKDHQKVSTFLMNNVINNSRFKYVVKYINPADINGLAKNRYLVKFVLSKIPEEQIDSYYKLFSNEEEPSCEEKIKLLTKKISKLNFQTLFENNKIPNVEKERKKAIITLYFTIVYILVKNLVNINGLYTLALYFVERDGFFYKQICEKKLIETLKKKDKKQLYNDDDYLLLPEIFSGSKYREETKNLKLPKEKDRDIMKKYLPNDKDREEYNKFFKQYRNNIVHLKIIAKLSELTKNIDKDINSYFDIYHYCTQRVMFDYCKKNNNVVLAKMKDLAHIKSDCDEFSSKHTYPYSSAVLRFMNLPFAYNVPRFKNLSYKKFFDKQ

SEQ ID NO: 2965 - protein, 900 aa, Artificial; identical to SEQ ID NO: 2863
  Synthetic

SEQ ID NO: 2966 - protein, 910 aa, Artificial
  Synthetic
MEKTRKTSENFCEFPNRKNRLKKSKSTKAAGLKSTFVVNDKLLVTSFGKRNEAVFEKSVENEIISLNNPENFSMERAGKKFSVISKRNEGNPGLPDNPLMSIKEAGEDVIGCKDILEKEYFGKHFSDNIHIQLIYNILDIKKILAVHINNIIYEFDNLMRNDTHSDFIGNLSTRNTYENYINPSPTLSEHVRKSIEKSREYFINLSKNPRLKYFGEIFYKPVNFKDKRNKKTVVDEKKLYYILAMLGDIRQFCFHANTNKNVSLYNLEKTLKYEAKNILDIIYSKKINELNRSFLKTNAKNIEILFAVLKPEESEKTTIIKDFYNFIIRKQNKNMGFSLKKLREQMIDENCEIIKDKRYDSVRSKFYRLLDFIIFEYYKNAPEKADYSVLYLRSCNSDEKKDLFYLKEANKLWNDIKNKCEALREKMKQSEIGKAASDTLISETMQKSIDEIKISSDSDYFGKLIYLLTHFIDGKEINDLLTTLINKFENIASLYSVMKGLKLECDFSENYKFFEKSESISADLRVINSFARMTHKESDAKKIMYLEAAELLGFEATPKEIDEYVEKYLLNDQFKKGQHDFRNFIASNVISSSRFKYLIRYANPKKIRKIAKNEKVVRFVLERIGKLNTNQLEKYYKSCFGSECNDKEKIISSLTDIILKMDFKEFSKVKQNDRKSSPEEKSFKAKKQAAISLYLTVLYHFVKNIINVNSRYTIAFHCLERDMQLYGMKLKVPKNSTEKASKYRDLTEKLINEKKENIEKWFNSLENSSWNQRKRKWRLERSCEYLSVNLKNSHNTLIVRYRNNIEHLDVISNIDKYIGDIKEFKSYFELYHYIVQRKLIDECRATDPVKMAKLHENIEKFAEPVLSYNTYCKDFVKALNIPFGYNLARFKNLSINELFDMNEKNENENQ

SEQ ID NO: 2967 - protein, 924 aa, Artificial
  Synthetic
MAKKNKMKPRELREAQKKARQLKAAEINNNAVPAIAAMPAAEVIAPAAEKKKSSVKAAGMKSILVSENKMYITSFGKGNSAVLEYEVDNNDYNKTQLSSKDNSNIELGNVNEVNITFSSKHGFESGVEINTSNPTHRSGESSPVRWDMLGLKSELEKRFFGKTFDDNIHIQLIYNILDIEKILAVYVTNIVYALNNMLGEGDESNYDFMGYLSTFNTYKVFTNPNGSTLSDDKKENIRKSLSKFNALLKTKRLGYFGLEEPKTKDTRVLEAYKKRVYHMLAIVGQIRQCVFHDLSEHSEYDLYSFIDNSKKVYRECRETLDYLVDERFDSINKGFIQGNKVNISLLIDMMKGYEADDIIRLYYDFIVLKSQKNLGFSIKKLREKILDEYGFRFKDKQYDSVRSKMYKLMDFLLFCNYYRNDIAAGESLVRKLRFSMTDDEKEGIYADEAAKLWGKFRNDFENIADHMNGDVIKELGKADMDFDEKILDSEKKNASDLLYFSKMIYMLTYFLDGKEINDLLTTLISKFDNIKEFLKIMKSSAVDVECELTAGYKLFNDSQRITNELFIVKNIASMRKPAASAKLTMFRDALTILGIDDKITDDRISEILKLKEKGKGIHGLRNFITNNVIESSRFVYLIKYANAQKIREVAKNEKVVMFVLGGIPDTQIERYYKSCVEFPDMNSSLEAKRSELARMIKNIRFDDFKNVKQQAKGRENVAKERAKAVIGLYLTVMYLLVKNLVNVNARYVIAIHCLERDFGLYKEIIPELASKNLKNDYRILSQTLCELCDNGDESPNLFLKKNKRLRKCVEVDINNADSNMTRKYRNCIAHLTVVRELKEYIGDIRTVDSYFSIYHYVMQRCITKREDDTKQEEKIKYEDDLLKNHGYTKDFVKALNSPFGYNIPRFKNLSIEQLFDRNEYLTEK

SEQ ID NO: 2968 - protein, 919 aa, Artificial
  Synthetic
MAKKNKMKPRELREAQKKARQLKAAEINNNAAPAIAAMPAAEVIAPAAEKKKSSVKAAGMKSILVSKNKMYITSFGKGNSAVLEYEVDNNNYNKTQLSSKDNSNIELGDVDEVNITFSSKHGFGSGVEINTSNPTHRSGESSPVRWDMLGLKSELEKRFFGKTFDDNIHIQLIYNILDIEKILAVYVTNIVYALNNMLGIKDSESYDDFMGYLSARNTYEVFTHPDKSNLSDKVKGNIKKSFSTFNDLLKTKRLGYFGLEEPKTKDTRVSQAYKKRVYHMLAIVGQIRQSVFHDKSSKLDEDLYSFIDIIDSEYRETLDYLVDERFDSINKGFIQGNKVNISLLIDMMKGFEADDIIRLYYDFIVLKSQKNLGFSIKKLREKMLDEYGFRFKDKQYDSVRSKMYKLMDFLLFCNYYRNDVVAGEALVRKLRFSMTDDEKEGIYADEAEKLWGKFRNDFENIADHMNGDVIKELGKADMDFDEKILDSEKKNASDLLYFSQMIYMLTYFLDGKEINDLLTTLISKFDNIKEFLKIMKSSAVDVECELTAGYKLFNDSQRITNELFIVKNIASMRKPAASAKLTMFRDALTILGIDDNITDDRISEILKLKEKGKGIHGLRNFITNNVIESSRFVYLIKYANAQKIREVAKNEKVVMFVLGGIPDTQIERYYKSCVEFPDMNSSLEAKRSELARMIKNIRFDDFKNVKQQAKGRENVAKERAKAVIGLYLTVMYLLVKNLVNVNARYVIAIHCLERDFGLYKEIIPELASKNLKNDYRILSQTLCELCDKSPNLFLKKNERLRKCVEVDINNADSSMTRKYRNCIAHLTVVRELKEYIGDIRTVDSYFSIYHYVMQRCITKRENDTKQEDKIKYEDDLLKNHGYTKDFVKALNSPFGYNIPRFKNLSIEQLFDRNEYLTEK

SEQ ID NO: 2969 - protein, 954 aa, Artificial; identical to SEQ ID NO: 2846
  Synthetic

SEQ ID NO: 2970 - protein, 937 aa, Artificial
  Synthetic
MAKKKRITAKERKQNHRESLMKKADSNAEKEKAKKPVVENKPDTAISKDNTPKPNKEIKKSKAKLAGVKWVIKANDDVAYISSFGKGNNSVLEKRIMGDVSSNVNKDSHMYVNPKYTKKNYEIKNGFSSGSSLVTYPNKPDKNSGMDALCLKPYFEKDFFGHIFTDNMHIQAIYNIFDIEKILAKHITNIIYTVNSFDRNYNQSGNDTIGFDINYRVPYSEYGGGKDSNGEPKNQSKWKKRKNFIKFYNKSKPHLGYYENIFYDHGEPISEEKFYNYLNILNFIRNNTFHYKDDDIELYSENYSEEFVFINCLNKFVKNKFKNVNKNFISNEKNNLYIILNAYGKDTENVEVVKKYSKELYKLSVLKTNKNLGVNVKKLRESAIEYGYCPLPYDKEKEVAKLSSVKHKLYKTYDFVITHYLNSNDKILLEIVEVLRLSKNDDEKENVYKKYAEKLFKADDVINPIKAISKLFAEKGNKLFKEKIIIKKEYIEDVSIDKNIYDFTKVIFFMTCFLDGKEINDLLTNIISKLQVIEDHNNVIKFISHNKDAVYKDYSDKYAIFRNAGKIATELEAIKSIARMENKIENAPQEPLLNDALLALGVSKTDLENTYNKYFDSKEKTDKQSQKVSTFLMNNVINNNRFKYVIKYINPADINGLAKNRYLVKFVLSKIPEEQIDSYYKLFSNEEEPSCEEKIKLLTKKISKLNFQTLFENNKIPNVEKERKKAIITLYFTIVYILVKNLVNINGLYTLALYFVERDRYFYKKICGKALRRKVGDKYDYLLLPEIFSGSKYREETKNLKLPKEKDRDIMKKYLPNDKDREGYNDFFTAYRNNIVHLNIIAKLSELTKNIDKDINSYFDIYHYCTQRVMFDYCKMNNNVVLAKMKDLAHIKSDCDEFSSKHTYPFSSAVLRFMNLPFAYNVPRFKNLSYKKFFDKQ

SEQ ID NO: 2971 - protein, 921 aa, Artificial
  Synthetic
MAKKNKMKPRERREAQKKARQLKAAEINNNAVPAIAAMPAAEAAAPAAEKKKSSVKAAGMKSILVSENKMYITSFGKGNSAVLEYEVDNNDYNKTQLSSKDNNNIELGNVNEVNITFSSKHGFESGVEINTSNPTHRSGESSPVRWDMLGLKSELEKRFFGKTFDDNIHIQLIYNILDIEKILAVYVTNIVYALNNMLGEGDESNYDFMGYLSTFNTYKVFTNPNGSTLSDDKKENIRKSLSKFNALLKTKRLGYFGLEEPKTKDNRVSEAYKKRVYHMLAIVGQIRQCVFHDKSGAKRFDLYSFINNIYPEYRDTLDYLVDERFDSINKGFIQGNKVNISLLIDMMKGYEPDDIIRLYYDFIVLKSQKNLGFSIKKLREKMLDEYGFRFKDKQYDSVRSKMYKLMDFLLFCNYYRNDIAAGESLVRKLRFSMTDDEKEGIYADEAAKLWGKFRNDFENIADHMNGDVIKELGKADMDFDEKILDSEKKNASDLLYFSKMIYMLTYFLDGKEINDLLTTLISKFDNIKEFLKIMKSSAVDVECELTVGYKLFNDSQRITNELFIVKNIASMRKPAASAKLTMFRDALTILGIDDKITDDRISEILKLKEKGKGIHGLRNFITNNVIESSRFVYLIKYANAQKIRKVAENEKVVMFVLGGIPDAQIERYYKSCVEFPDMNSSLEVKRSELARMIKNISFDDFKNVKQQAKGRENVAKERAKAVIGLYLTVMYLLVKNLVNVNARYVIAIHCLERDFGLYKEIIPELASKNLKNDYRILSQTLCELCDNGDESPNLFLKKNKRLRKCVEVDINNADSNMTRKYRNCIAHLTVVRELNKYIKDIRTVDSYFSIYHYVMQRCITKREDDKKQEEKIKYEDDLLKNHGYTKDFVKALNSPFGYNIPRFKNLSIEQLFDRNEYLTEK

SEQ ID NO: 2972 - protein, 922 aa, Artificial; identical to SEQ ID NO: 2849
  Synthetic

SEQ ID NO: 2973 - protein, 924 aa, Artificial; identical to SEQ ID NO: 2910
  Synthetic

SEQ ID NO: 2974 - protein, 919 aa, Artificial; identical to SEQ ID NO: 2844
  Synthetic

SEQ ID NO: 2975 - protein, 919 aa, Artificial
  Synthetic
MAKKNKMKPRELREAQKKARQLKAAEINNNAIPAIAAMPAAEAAAPAAEKKKSSVKAAGMKSILVSENKMYITSFGKGNSAVLEYEVDNNDYNKTQLSSEDSSNIELGDVDEVNITFSSKHGFGSGVKINTSNPTHRSGESSPVRWDMLGLKSELEKRFFGKTFDDNIHIQLIYNILDIEKMLAVYVTNIVYALNNMLGIKDSESYDDFMGYLSARNTYEVFTHPDKSNLSDKVKGNIKKSSSTFNDLLKTKRLGYFGLEEPKTKDTRVSQAYKKRVYHMLAIVGQIRQSVFHDKSSKLDEDLYSFIDIIDPEYRETLDYLVDERFDSINKGFIQGNKVNISLLIDMMKGYEADDIIRLYYDFIVLKSQKNLGFSIKKLREKMLEEYGFRFKDKQYDSVRSKMYKLMDFLLFCNYYRNDIAAGESLVRKLRFSMTDDEKEGIYADEAAKLWGKFRNDFENIADHMNGDVIKELGKADMDFDEKILDSEKKNASDLLYFSKMIYMLTYFLDGKEINDLLTTLISKFDNIKEFLKIMKSSAVDVECELTAGYKLFNDSQRITNELFIVKNIASMRKPAASAKLTMFRDALTILGIDDKITDDRISEILKLKEKGKGIHGLRNFITNNVIESSRFVYLIKYANAQKIREVAKNEKVVMFVLGGIPDTQIERYYKSCVEFPDMNSSLEAKRSELARMIKNIRFDDFKNVKQQAKGRENVAKERAKAVIGLYLTVMYLLVKNLVNVNARYVIAIHCLERDFGLYKEIIPELASKNLKNDYRILSQTLCELCDKSPNLFLKKNERLRKCVEVDINNADSSMTRKYRNCIAHLTVVRELKEYIGDIRTVDSYFSIYHYVMQRCITKRENDTKQEDKIKYEDDLLKNHGYTKDFVKALNSPFGYNIPRFKNLSIEQLFDRNEYLTEK

SEQ ID NO: 2976 - protein, 952 aa, Artificial
  Synthetic
MGKKIHARDLREQRKTDRTEKFADQNKKREAERAVQKKDAAVSVKSVSSVSSKKDNVTKSMAKAAGVKSVFAVGNTVYMTSFGRGNDAVLEQKIVDTSHEPLNIDDPAYQLNVVTMNGYSVTGHRGETVSAVTDNPLRRFNGGKKDEPEQSVPTDMLCLKPTLEKKFFGKEFDDNIHIQLIYNILDIEKILAVYSTNAIYALNNMSADENIENSDFFMKRTTDETFDDFEKKKESTNSREKADFDAFEKFIGNYRLAYFADAFYVNKKNPKGKARNVLREDKELYSVLTLIGKLRHWCVHSEEGRAEFWLYKLDELKDDFKNVLDVVYNRPVEEINNRFIENNKVNIQILGSVYKNTDIAELVRSYYEFLITKKYKNMGFSIKKLRESMLEGKGYADKEYDSVRNKLYQMTDFILYTGYINEDSDRADDLVNTLRSSLKEDDKTTVYCKEADYLWKKYRESIREVADALDGDNIKRLSKSNIEIQEDKLRKCFISYADSVSEFTKLIYLLTRFLSGKEINDLVTTLINKFDNIRSFLEIMDELGLDRTFTAEYSFFEGSTKYLAELVELNSFVKSCSFDINAKRTMYRDALDILGIKSGKTEEDIEKMIDNILQIDANGDKKLKKNNGLRNFIASNVIDSNRFKYLVRYGNPKKIRETAKCKPAVRFVLNEIPDAQIERYYEACCPKNTALCSANKRREKLADMIAEIKFENFSDAGNYQKANVTSKTHEAEIKRKNQAIIRLYLTVMYIMLKNLVNVNARYVIAFHCVERDTKLYAESGLEVGNIEKNKTNLTMAVMGVKLENGIIKTEFDKSLAENAANRYLRNARWYKLILDNLKKSERAVVNEFRNTVCHLNAIRNININIDGIKEVENYFALYHYLIQKHLENRFADNGGSTGDYIGKLEEHKTYCKDFVKAYCTPFGYNLVRYKNLTIDGLFDKNYPGKDDSDEQK

SEQ ID NO: 2977 - protein, 919 aa, Artificial
  Synthetic
MAKKNKMKPRELREAQKKARQLKAAEINNNAVPAIAAMPAAQVIAPAAEKKKSSVKAAGMKSILVSKNKMYITSFGKGNSAVLEYEVDNNDYNKTQLSSKDNSNIELRGVTKVNITFSSKHGLESGVEINTSNPTHRSGESSPVRWDMLGLKSELEKRFFGKTFDDNIHIQLIYNILDIEKILAVYVTNIVYALNNMLGVKGSESHDDFIGYLSTNNTYDVFIDPDNSSLSDDKKANVRKSLSKFNALLKTKRLGYFGLEEPKTKDNRVSEAYKKRVYHMLAIVGQIRQCVFHDKSGAKRFDLYSFINNIDPEYRETLDYLVDERFDSINKDFIQGNKVNISLLIDMMKGYEADDIIRLYYDFIVLKSQKNLGFSIKKLREKMLDEYGFRFKDKQYDSVRSKMYKLMDFLLFCNYYRNDVVAGEALVRKLRFSMTDDEKEGIYADEAAKLWGKFRNDFENIADHMNGDVIKELGKADMDFDEKILDSEKKNASDILYFSKMIYMLTYFLDGKEINDLLTTLISKFDNIKEFLKIMKSSAVDVECELTAGYKLFNDSQRITNELFIVKNIASMRKPAASAKLTMFRDALTILGIDDNITDDRISEILKLKEKGKGIHGLRNFITNNVIESSRFVYLIKYANAQKIREVAKNEKVVMFVLGGIPDTQIERYYKSCVEFPDMNSSLEVKRSELARMIKNISFDDFKNVKQQAKGRENVAKERAKAVIGLYLTVMYLLVKNLVNVNARYVIAIHCLERDFGLYKEIIPELASKNLKNDYRILSQTLCDDRDESPNLFLKKNKRLRKCVEVDINNADSSMTRKYRNCIAHLTVVRELKEYIGDIRTVDTYFSIYHYVMQRCITKREDDTKQEEKIKYEDDLLKNHGYTKDFVKALNSPFGYNIPRFKNLSIEQLFDRNEYLTEK

SEQ ID NO: 2978 - protein, 922 aa, Artificial; identical to SEQ ID NO: 2840
  Synthetic

SEQ ID NO: 2979 - protein, 984 aa, Artificial
  Synthetic
MKKKNIRATREALKAQKIKKSQENEALKKQKLAEEAAQKRREELEKKNLAQWEETSAEGRRSRVKAVGVKSVFVVGDDLYLATFGNGNETVLEKKITPDGKITTFPEEETFTAKLKFAKTELTEATSIGISNGRIVLPEISVDNPLHTTMQKNTIKKSAGEDMLQLKDVLENRYFDRSFNNDLHIRLIYNILDIEKILAEYTTNAVFAIDNVSGCSDDFLSNFSTRNQWDEFQNPEQHREHFGNKDNVICSVKKQQDLFFNFFKNNRIGYFGKAFFHAESERKIVKKTAKEVYHILTLIGSLRQWITHSTEGGISRLWLYQLEDALSSEYQETMNNCYNSTIYGLQKDFEKTNAPNLNFLAEILGENASELAEPYFRFIITKEYKNLGFSIKTLREMLLDQPDLQEIRENHNVYDSIRSKLYKMMDFVLVYAYSNERKSKADALASNLRSAITEDAKKRVYQNEADQLWTSYQELFKRIRGFKGAQVKEYSSQNMPIPIQKQIQNILKPAEQVTCFTKLMYLLTMFLDGKEINDLLTTLINKFDNISSLLKTMEQLELQTTFKEDYTFFQQSSCLCEEITQLKSFARMGNPISNLKEVMMVDAIQILGTEKSEQELQSMACFFFRDKNGKKLNAGEHGMRNFIGNNVISNTRFQYLIRYGNPQKLHTLSQNETVVRFVLSRIAKNQRVQGMNGKNQIDRYYETCGGTNSWSVSEEEKINFLCKILTNMSYDQFQDVKQSDKIITAEEKRKKERYKAIISLYLTVLYQLIKNLVNINARYIIAFHCLERDAILYSLKFNTSINLKKRYTALTEMILGYETDEKARRKDTRTIYEKAEAAKNRHLKNVKWNCKTRENLENADKNAIVAFRNIVAHLWIIRDADRFITEMGAMKRYFDCYHYLLQRELEYILEKSNQGSKYTKKSLEKVQQYHSYCKDFLHMLCLPFAYCIPRYKNLSIAELFDRHELEAEPKEEASPANNSQFITT

SEQ ID NO: 2980 - protein, 922 aa, Artificial
  Synthetic
MAKKNKMKPRELREAQKKARQLKAAEINNNAAPAIAAMPAAEAAAPAAEKKKSSVKAAGMKSILVSENKMYITSFGKGNSAVLEYEVDNNDYNKTQLSSKDNSNIELGDVDEVNITFSSKHGFGSGVEINTSNPTHRSGESSPVRWDMLGLKSELEKRFFGKTFDDNIHIQLIYNILDIEKILAVYVTNIVYALNNMLGEGGDESHDDIMGYLSAKNTYDVFTDPDESDLSKNIKGNIKKSLSKFNDLLKTKRLGYFGLEEPKTKDKRASEAYKKRVYHMLAIVGQIRQSVFHDKSNELDEYLYSFIDIIDSEYRDTLDYLVDERFDSINKGFIQGNKVNISLLIDMMKGYEADDIIRLYYDFIVLKSQKNLGFSIKKLREKMLDEYGFRFKDKQYDSVRSKMYKLMDFLLFCNYYRNDVIAGEALVRKLRFSMTDDEKEGIYADEAAKLWGKFRNDFENIADHMNGDVIKELGKADMDFDEKILDSEKKNASDLLYFSKMIYMLTYFLDGKEINDLLTTLISKFDNIKEFLKIMKSSAVDVECELTAGYKLFNDSQRITNELFIVKNIASMRKPAASAKLTMFRDALTILGIDDNITDDRISEILKLKEKGKGIHGLRNFITNNVIESSRFVYLIKYANAQKIREVAKNEKVVMFVLGGIPDTQIERYYKSCVEFPDMNSSMGAKRRELAKMIKSISFEDFKDVKQQAKGRENVAKERAKAVIGLYLTVMYLLVKNLVNVNARYVIAIHCLERDFGLYKEIIPELASKNLKNDYRILSQTLCELCDNGDESPNLFLKKNKRLRKCVEVDINNADSNMTRKYRNCIAHLTVVRELNKYIKDIRTVDSYFSIYHYVMQRCITKRENDTKQEEKINYEDDLLKNHGYTKDFVKALNSPFGYNIPRFKNLSIEQLFDRNEYLTEK

SEQ ID NO: 2981 - protein, 922 aa, Artificial; identical to SEQ ID NO: 2946
  Synthetic

SEQ ID NO: 2982 - protein, 954 aa, Artificial; identical to SEQ ID NO: 2888
  Synthetic

SEQ ID NO: 2983 - protein, 925 aa, Artificial; identical to SEQ ID NO: 2947
  Synthetic

SEQ ID NO: 2984 - protein, 919 aa, Artificial; identical to SEQ ID NO: 2975
  Synthetic

SEQ ID NO: 2985 - protein, 954 aa, Artificial; identical to SEQ ID NO: 2858
  Synthetic

SEQ ID NO: 2986 - protein, 961 aa, Artificial
  Synthetic
MAKKKTAKQIREEQKAAKMQKIQAFVKAKEAKKETEKTASAVKIPVKKNRKKSLAKASGSKAVLIVGNDIIMTSYGERCLANLEHKITPELNTESLTVNNALNDVNAKDGKNISFTGRISGLSVSSDNPLHFHQTEERKAPKPGTDLLCLKDKLEQWYFDKTFDDNIHIQLIYQIQDIEKILASHVNNIVFALDNILHATESETGDFLGMGYMRATNTFEEYRDSAISNVKKSYETFETYIKKKELLYFGEAFYHGNTCRKPEDIYHILAMVSSLRQFCFHSTFDDKSKSIKGSWLYQLDEQLSDEFKETLGMLWAEATEKLDRDFLKTNTVNLHILCEIFDKEKQEDIINAYYEFLMKKSFKNLGFSVKKLRECMLEEAELNEFKEDKYNSVRSKLYKLFDFILVHHYKNDSSPESTALKNLLRTCLTDEEKEKVYVQTAKELTALYSYHFKEASVSVNARNIKEYQEKAQVYHISIADKISSTGIGLFSQLIYMLTLLLDGKEINDLLTTLINKFDNIIGFLDILDKMHLDTEFKKEYQFFNQENCEYTAKELRTINSLARMQKPSANAKKVMFRDALRILGMDNRSDEEIDKELDRTMPVGADGKFIKGKQGFRNFIASNVIESSRFRYLVRYNNPHKTRTLVQNRNVVKFVLEGIPDTQIKRYFDVCKDKDTPDTSSKSAQIDVLAGILTNIDYKIFEDVPQSAKINKDDASRNRADALKKQRYQAIVTLYLTVLYLVTKNLVYVNSRYVMAFHCLERDALLYGVAFPPVEKKWGKDYSQLTASLLKDETYTTYGHLKNQKGHRKWHVLVSRNLENSDKKAVHWFRNISAHISVIRNINEYIGEVQEFHSYFELYHYLVQKMIAKNNWYDAKSQPKTAEYLENLEKYHTYSKDFVKAYCIPFGYVVPRYKNLTINELFDRNNPLPEPKKDKEKKDKKNKKNKKKRNEEVDEINENSK

SEQ ID NO: 2987 - protein, 925 aa, Artificial
  Synthetic
MAKKNKMKPRELREAQKKARQLKAAEINNNAAPAIAAMPAAQVIAPAAEKKKSSVKAAGMKSILVSENKMYITSFGKGNSAVLEYEVDKVDNNNYNKTQLSSKDNSNIELGDVNEVNITFSSKHGFGSGVEINTSNPTHRSGESSPVRWDMLGLKSELEKRFFGKTFDDNIHIQLIYNILDIEKILAVYVTNIVYALNNMLGEGDDESHDDFMGYLSAQNTYYIFTHPDKSNLSDKVKGNIKKSLSKFNDLLKTKRLGYFGLEEPKTKDKRVSEAYKKRVYHMLAIVGQIRQSVFHDKSNELDEYLYSFIDIIDSEYRDTLDYLVDERFDSINKGFVQGNKVNISLLIDMMKGYEADDIIRLYYDFIVLKSQKNLGFSIKKLREKMLDEYGFRFKDKQYDSVRSKMYKLMDFLLFCNYYRNDVVAGEVLVRKLRFSMTDDEKEWIYADEAEKLWGKFRNDFENIADHMNGDVIKELGKADMDFDEKILDSEKKNASDLLYFSKMIYMLTYFLDGKEINDLLTTLISKFDNIKEFLKIMKSSAVDVECELTAGYKLFNDSQRITNELFIVKNIASMRKPAASAKLTMFRDALTILGIDDKITDDRISEILKLKEKGKGIHGLRNFITNNVIESSRFVYLIKYANAQKIREVAENEKVVMFVLGGIPDTQIERYYKSCVEFPDMNSSLEVKRSELARMIKNISFDDFKNVKQQAKGRENVAKERAKAVIGLYLTVMYLLVKNLVNVNARYVIAIHCLERDFGLYKEIIPELASKNLKNDYRILSQTLCELCDDRDESPNLFLKKNKRLRKCVEVDINNADSSMTRKYRNCIAHLTVVRELKEYIGDIRTVDSYFSIYHYVMQRCITKREDDKKQEEKIKYEDDLLKNHGYTKDFVKALNSPFGYNIPRFKNLSIEQLFDRNEYLTEK

SEQ ID NO: 2988 - protein, 922 aa, Artificial; identical to SEQ ID NO: 2980
  Synthetic

SEQ ID NO: 2989 - protein, 954 aa, Artificial
  Synthetic
MGKKIHARDLREQRKTDRTEKFADQNKKREAERAVQKKDAAVSVKSVSSVSSKKDNATKSMAKAAGVKSVFAVGNTVYMTSFGRGNDAVLEQKIVDTSHEPLNIDDPAYQLNVVTMNGYSVTGHRGETVSAVTDNPLRRFNGGKKDEPEQSVPTDMLCLKPTLEKKFFGKEFDDNIHIQLIYNILDIEKILAVYSTNAIYALNNMSADENIENSDFFMKRTTDETFDDFEKKKESTNSREKADFDAFEKFIANYRLAYFADAFYVNKKNPKGKARNVLREDKELYSVLTLIGKLRHWCVHSEEGRAEFWLYKLDELKDDFKNVLDVVYNRPVEEINNRFIENNKVNIQILGSVYKNTDIAELVRSYYEFLITKKYKNMGFSIKKLRESMLEGKGYADKEYDSVRNKLYQMTDFILYTGYINEDSDRADDLVNTLRSSLKEDDKTTVYCKEADYLWKKYCESIREVAEALDGDNIKRLSKSNIEIRDNELRKCFISYADSVSEFTKLIYLLTRFLSGKEINDLVTTLINKFDNIRSFLEIMDELGLDRTFTAEYSFFEDSTKYLAELVELNSFVKSCSFDINAKRTMYRDALDILGIKSGKTEEDIEKMIDNILQIDANGDKKLKKNNGLRNFIASNVIDSNRFKYLVRYGNPKKIRETAKCKPAVRFVLNEIPDAQIERYYEACCPKNTALCSANKRREKLADMIAEIKFENFSDAGNYQKANVTSKTHEAEIKRKNQAIIRLYLTVMYIMLKNLVNVNARYVIAFHCVERDTKLYAESGLEVGNIEKNKTNLTMAVMGVKLENGIIKTEFDKSLAENAANRYLRNARWYKLILDNLKKSERAVVTDFRNTVCHLNAIRNININIDGIKEVENYFALYHYLIQKHLENRFADKKVERDTGDFISKLEEHKTYCKDFVKAYCTPFGYNLVRYKNLTIDGLFDKNYPGKDDSDEQK

SEQ ID NO: 2990 - protein, 919 aa, Artificial
  Synthetic
MAKKNKMKPRELREAQKKARQLKAAEINNNAAPAIAAMPAAEVIAPAAEKKKSSVKAAGMKSILVSENKMYITSFGKGNSAVLEYEVDNNDYNKTQLSSKDNSNIELCDVNEVNITFSSKHGFESGVEINTSNPTHRSGESSPVRWDMLGLKSELEKRFFGKTFDDNIHIQLIYNILDIEKILAVYITNIVYALNNMLGVKGSESHDDFIGYLSTNNIYDVFIDPDNSSLSDDKKANVRKSLSKFNALLKTKRLGYFGLEEPKTKDNRVSEAYKKRVYHMLAIVGQIRQSVFHDKSSKLHEDLYSFIDIIDSEYRETLDYLVDERFDSINKGFIQGNKVNISLLIDMMKGYEADDIIRLYYDFIVIKSQKNLGFSIKKLREKMLDEYGFRFKDKQYDSVRSKMYKLMDFLLFCNYYRNDVVAGEALVRKLRFSMTDDEKEGIYADEAEKLWGKFRNDFENIADHMNGDVIKELGKADMDFDEKILDSEKKNASDLLYFSKMIYMLTYFLDGKEINDLLTTLISKFDNIKEFLKIMKSSAVDVECELTAGYKLFNDSQRITNELFIVKNIASMRKPASSAKLTMFRDALTILGIDDNITDDRISEILKLKEKGKGIHGLRNFITNNVIESSRFVYLIKYANAQKIRKVAKNEKVVMFVLGGIPDTQIERYYKSCVEFPDMNSSLEVKRSELARMIKNISFDDFKNVKQQAKGRENVAKERAKAVIGLYLTVMYLLVKNLVNVNARYVIAIHCLERDFGLYKEIIPELASKNLKNDYRILSQTLCELCDKSPNLFLKKNRRLRKCVEVDINNADSSMTRKYRNCIAHLTVVRELKEYIGDIRTVDSYFSIYHYVMQRCITKRENDTKQEEKIKYEDDLLKNHGYTKDFVKALNSPFGYNIPRFKNLSIEQLFDRNEYLTEK

SEQ ID NO: 2991 - protein, 922 aa, Artificial; identical to SEQ ID NO: 2959
  Synthetic

SEQ ID NO: 2992 - protein, 922 aa, Artificial
  Synthetic
MAKKNKMKPRELREAQKKARQLKAAEINNNAAPAIAAMPAAEVIAPAAEKKKSSVKAAGMKSILVSENKMYITSFGKGNSAVLEYEVDNNDYNKTQLSSKDNSNIELGDVDEVNITFSSKHGFGSGVEINTSNPTHRSGESSPVRWDMLGLKSELEKRFFGKTFDDNIHIQFIYNILDIEKILAVYVTNIVYALNNMLGIKDSESYDDFIGYLSARNTYKVFTHPDKSNLSDKAKGNIKKSFSTFNDLLKTKRLGYFGLEEPKTKDTRVLEAYKKRVYYMLAIVGQIRQCVFHDLSEHSEYDLYSFIDNSKKVYRECRETLDYLVDERFDSINKGFIQGNKVNISLLIDMMKGYEADDIIRLYYDFIVLKSQKNLGFSIKKLREKMLDEYGFRFKDKQYDSVRSKMYKLMDFLLFCNYYRNDVVAGEALVRKLRFSMTDDEKEGIYADEAAKLWVKFRNDFENIADHMNGDVIKELGKADMDFDEKILDSEKKNASDLLYFSKMIYMLTYFLDGKEINDLLTTLISKFDNIKEFLKIMKSSAVDVECELTAGYKLFNDSQRITNELFIVKNIASMRKPAASAKLTMFRDALTILGIDDKITDDRISEVLKLKEKGKGIHGLRNFITNNVIESSRFVYLIKYANAQKIREVAKNEKVVMFVLGGIPDTQIERYYKSCVEFPDMNSSLEVKRSELARMIKNISFDDFKNVKQQAKGRENVAKERAKAVIGLYLTVMYLLVKNLVNVNARYVIAIHCLERDFGLYKEIIPELASKNLKNDYRILSQTLCELCDKSPNLFLKKNERLRKCVEVDINNADSSMTRKYRNCIAHLTVVRELKEYIGDIRTVDSYFSIYHYVMQRCITKRENDTKQEDKIKYEDDLLKNHGYTKDFVKALNSPFGYNIPRFKNLSIEQLFDRNEYLTEK

SEQ ID NO: 2993 - protein, 922 aa, Artificial; identical to SEQ ID NO: 2906
  Synthetic

SEQ ID NO: 2994 - protein, 922 aa, Artificial; identical to SEQ ID NO: 2906
  Synthetic

SEQ ID NO: 2995 - protein, 946 aa, Artificial; identical to SEQ ID NO: 2799
  Synthetic

SEQ ID NO: 2996 - protein, 952 aa, Artificial
  Synthetic
MGKKIHARDLREQRKTDRTEKFADQNKKREAERAVQKKDAAVSVKSVSSVSSKKDNVTKSMAKAAGVKSVFAVGNTVYMTSFGRGNDAVLEQKIVDTSHEQLNIDDPAYQLNVVTMNGYSVTGHRGETVSAVTDNPLRRFNGGKKDEPEQSVPTDMLCLKPTLEKKFFGKEFNDNIHIQLIYNILDIEKILAVYSTNAIYALNNMSADENIENSDFFMKRTTDETFDDFEKKKESTNSREKADFDAFEKFIGNYRLAYFADAFYVNKKNPKGKAKNVLREDKELYSVLTLIGKLRHWCVHSEEGRAEFWLYKLNELKDDFKNVLDVVYNRPVEEINNRFIENNKVNIQILGSVYKNTDIAELVRSYYEFLITKKYKNMGFSIKKLRESMLEGKGYADKEYDSVRNKLYQMTDFILYTGYINEDSDRADDLVNTLRSSLKEDDKTTVYCKEADYLWKKYRESIREVADALDGDNIKRLSKSNIEIQEDKLRKCFISYADSVSEFTKLIYLLTRFLSGKEINDLVTTLINKFDNIRSFLEIMDELGLDRTFTAEYSFFEGSTKYLAELVELNSFVKSCSFDINAKRTMYRDALDILGIKSGKTEEDIEKMIDNILQIDANGDKKLKKNNGLRNFIASNVIDSNRFKYLVRYGNPKKIRETAKCKPAVRFVLNEIPDAQIERYYEACCPENTALCSANKKREKLADMIAEIEFENFSDAGNYQKANVTSKTHEAEIKRKNQSIIRLYLTVMYIMLKNLVNVNARYVIAFHCVERDTKLYAESGLEVGNIEKNKTNLTMAVMGVKLENGIIKTEFDKSLAENAANRYLRNARWYKLILDNLKKSERAVVNEFRNTVCHLNAIRNINIKEIKEVENYFALYHYLIQKHLENRFADKKVERDTGDFISKLEEHKTYCKDFVKAYCTPFGYNLVRYKNLTIDGLFDKNYPGKDDSDKQK

SEQ ID NO: 2997 - protein, 954 aa, Artificial; identical to SEQ ID NO: 2989
  Synthetic

SEQ ID NO: 2998 - protein, 939 aa, Artificial; identical to SEQ ID NO: 2818
  Synthetic

SEQ ID NO: 2999 - protein, 923 aa, Artificial; identical to SEQ ID NO: 2862
  Synthetic

SEQ ID NO: 3000 - protein, 919 aa, Artificial; identical to SEQ ID NO: 2844
  Synthetic

SEQ ID NO: 3001 - protein, 1057 aa, Artificial
  Synthetic
MEENKVRFTNTSNVKRPKSLLKQMGHKSTFLLDDTLIVTSVAKGKNEDQKGKEQAASKSKVAPQSHIELLSTIDGEVLGGRKELLATTVSRQEVTISGKIYNLNTKTPESTTVTMANPAVLLQKNSSTTQVARKTDYLGIKSALEKEFFNDFSNSGFNDNVRVQIAYNILDIRKILATTINNIVSMFYNLDRTTGDIADETKKSTNTDIIGMIKTYLKYDQAKNSNDPSIKKTFNKAEELLINTKAYHTYFDRLFTTPTRQAFKAGKLKDTNDKKSNLPCEFSKLSEKDQEEFKNEAITHNYDVLRLLGLGRQLVVHEKYKSDEHNKDNSIESLFNIDKIIRNSNDTMDLLKRLDNIYLESAEQIDNSFKKSSATNCLILEELYKRIGKAKTQAELYKDYYRYAILKEDQCLGISFNRIKEAVLEKLKEEQRYKNFEYRNDNKRFYTLCNFVLWHYMVDLRDRNETRAGHQQTDRNEIEELKSKLRACCDNNGDGGENQKYAIYKEFVNFHWTDLRTSINTLYDLCVKYKYTAKNYRIDSKIQIDNQLSSSANNVKTFVKYIYFLSEFLDGKEVNVFFNELVEKFSNIAEIVTTVNDNINNSSKKSPNISFLPQYSLFQEAGTVADQLRNARNIKHATLRARINDKVADKDSKMSPSKQTISDALYMLIDENDTIENYKQLIWDEKESGTWVKKATGNNKVRNFIINNIIMSKWFMYISKYSDPRNCSKIMHNKEAVVFAMSSIPDAQIEKYYKRVTAKSVQYGNKTAEEMRSIVIDALMNFSLKPVLTGVANNDYSNENRERDIGIIQLYLTVAYIVTKSLVNVNKRFLLAFSCLERDVPLILNGKSFKDANILVLSEKFIAEDQEIEQKYKLAKKNRITPNMSKEDVKNVFKELNAEYKSKHYAESLTRPRDPDSKKDKSCAYLVNNLNEAKKIENVLMDFKNKVDHLNVVKSAPEYMSNIKNIDSFYGIFCFALQNILADKMIKWSVNEKNSKEDVEIINSYGQELKKKLDSRHTFDRDAMWIINMPFAYNFPRYKNLSSEYLFYDKEYEKTKK

SEQ ID NO: 3002 - protein, 919 aa, Artificial
  Synthetic
MAKKNKMKPRELREAQKKARQLKAAEINNNAVPAIAAMPAAEVIAPAAEKKKSSVKAAGMKSILVSENKMYITSFGKGNSAVLEYEVDNNDYNKTQLSSKGSSNIELHGVNEINITFSSKHGFESGVEINTSNPTHRSGESSPVRWDMLGLKSELEKRFFGKTFDDNIHIQLIYNILDIEKILAVYVTNIVYALNNMLGIKDSESYDDFMGYLSAKNTYEVFTHPDKSNLSDKVKGNIKKSFSTFNDLLKTKRLGYFGLEEPKTKDTRVSQAYKKRVYHMLAIVGQIRQSVFHDKSSKLDEDLYSFIDIIDSEYRETLDYLVDERFDSINKGFIQGNKVNISLLIDMMKGYEADDIIRLYYDFIVLKSQKNLGFSIKKLREKMLDEYGFRFKDKQYDSVRSKMYKLMDFLLFCNYYRNDVAAGEALVRKLRFSMTDDEKEGIYADEAAKLWGKFRNDFENIADHMNGDVIKELGKADMDFDEKILDSEKKNASDLLYFSKMIYMLTYFLDGKEINDLLTTLISKFDNIKEFLKIMKSSAVDVECELTAGYKLFNDSQRITNELFIVKNIASMRKPAASAKLTMFRDALTILGIDDNITDDRISEILKLKEKGKGIHGLRNFITNNVIESSRFVYLIKYANAQKIREVAKNEKVVMFVLGGIPDTQIERYYKSCVEFPDMNSSLGVKRSELARMIKNISFDDFKNVKQQSKGRENVAKERAKAVIGLYLTVMYLLVKNLVNVNARYVIAIHCLERDFGLYKEIIPELASKNLKNDYRILSQTLCELCDKSPNLFLKKNERLRKCVEVDINNADSSMTRKYRNCIAHLTVVRELKEYIGDICTVDSYFSIYHYVMQRCITKRENDTKQEEKIKYEDDLLKNHGYTKDFVKALNSPFGYNIPRFKNLSIEQLFDRNEYLTEK

SEQ ID NO: 3003 - protein, 951 aa, Artificial
  Synthetic
MKGTVVKNGKFLEIKGENGKIYQLKPFHLPEGKTIQWLNAGDRVTFRTKDKGRIAEKSVDKIKTYKLPVTPRTHEEIFGDKSAQRPKTKAKAIGLKSLLYYDDKIIATSFGKGNKANVEKIVSDKIENIYDPANYSIFINDKLKSFVLQDKKGENSVSINLFNATISNEADHKGEITINAGQVGRDQIGLKDALEEKIFGKTYNDNIHVQIAYNILDVEKILTEYINDIVYAMNNAADISPDRDLVGYLGHLFNYQKYWSNPKSANNKPNFDKFVNSPRLINYGEAFYTVGRDGPRRKSEREIFYMLSFVGYARQFIAHEYGKHISIYNPAKAADKEVADFLDRLFADKIDEVNSDFLKLNAKNIAIICDIFPNENRNTLIKEFYQFSVLKAHKNMGFSIKTLRETLLALEQAQQLRSYIMQHQDFRRQVNTQLDFMIYKRYKDSSRAKSFADALRATARKEDKPALYIAEASKLYAETAKFITTGILAALDSKQAQKLENFPAIPPEAIKDVCIGSQAYDFVKLIYLFTLLLDGKEINNLLTGLISKFDNINSLCRIYTEITGLVNLEDRYVKFEKDYSIFKDCGRVVAQLQMLNSFARMQKRPDSQTNAKAKKAKDPFAKTDFGDAVMVLGVSPQDKKAAIDKLTPGMKNYISNNVLNSSRFRYLVRYADVKNVSILAKSKVLTEFVLADIPDNQIERYTESCGGNSSLSVKEKRQFLAQKIAELSIDNMYVEMDKKATEQQMLQRENNKNILGLYLTVLYLVCKNLVNVNARYLMAFHCLARDSYLLGKPYKKDNVYDYAVLTADYIRHSKNAHMAQFLATDTEKSNNRLIHQFRNSAAHLGAVRKAHLYIGDIKQIDSYYALYHYIMQRQVLAQADSSDEECSKIVLKYDKLLKNHKTYCKDFVKELCVGFGYNVPRFKSLTIEDKFDKNKPDANQKNKAKNEAEHC

SEQ ID NO: 3004 - protein, 919 aa, Artificial; identical to SEQ ID NO: 2876
  Synthetic

SEQ ID NO: 3005 - protein, 918 aa, Artificial; identical to SEQ ID NO: 2830
  Synthetic

SEQ ID NO: 3006 - protein, 918 aa, Artificial; identical to SEQ ID NO: 2830
  Synthetic

SEQ ID NO: 3007 - protein, 926 aa, Artificial; identical to SEQ ID NO: 2850
  Synthetic

SEQ ID NO: 3008 - protein, 918 aa, Artificial
  Synthetic
MAKKNKMKPRELREAQKKARQLKAAEINNNAVPAIAAMPAAEAAAPAAEKKKSSVKAAGMKSILVSENKMYITSFGKGNSAVLEYEVDNNDYNKTQLSSKDNSNIELCDVGKVNITFSSRRGFESGVEINTSNPTHRSGESSSVRGDMLGLKSELEKRFFGKNFDDNIHIQLIYNILDIEKILAVYVTNIVYALNNMLGEGDESNYDFMGYLSTFNTYKVFTNPNGSTLSDDKKENIRKSLSKFNALLKTKRLGYFGLEEPKTKDTRASGAYKKRVYHMLAIVGQIRQCVFHDKSGAKRFDLYSFINNIDPEYRETLDYLVDERFDSINKGFIQGNKVNISLLIDMMKGYEADDIIRLYYDFIVLKSQKNLGFSIKKLREKMLDEYGFRFKDKQYDSVRSKMYKLMDFLLFCNYYRNDIAAGESLVRKLRFSMTDDEKEGIYADEAAKLWGKFRNDFENIADHMNGDVIKELGKADMDFDEKILDSEKKNASDLLYFSKMIYMLTYFLDGKEINDLLTTLISKFDNIKEFLKIMKSSAVDVECELTAGYKLFNDSQRITNELFIVKNIASMRKPAASAKLTMFRDALTILGIDDKITDDRISEILKLKEKGKGIHGLRNFITNNVIESSRFVYLIKYANAQKIREVAKNEKVVMFVLGGIPDTQIERYYKSCVEFPDMNSSLGVKRSELARMIKNISFDDFKNVKQQSKGRENVAKERAKAVIGLYLTVMYLLVKNLVNVNARYVIAIHCLERDFGLYKEIIPELASKNLKNDYRILSQTLCELCDKSPNLFLKKNERLRKCVEVDINNADSSMTRKYRNCIAHLTVVRELKEYIGDICTVDSYFSIYHYVMQRCITKRENDTKQEEKIKYEDDLLKNHGYTKDFVKALNSPFGYNIPRFKNLSIEQLFDRNEYLTEK

SEQ ID NO: 3009 - protein, 919 aa, Artificial
  Synthetic
MAKKNKMKPRELREAQKKARQLKAAEIKNDAVPAIAAMPAAEAAAPAVEKKKSSVKAAGMKSILVSENKMYITSFGKGNSAVLEYEVDNNDYNKTQLSSEDNSNIELCDVDEVNITFSSKHGFESGVEINTSNPTHRSGESSPVRGDMLGLKSELEKRFFGKTFDDNIHIQLIYNILDIEKILAVYVTNIVYALNNMLGEGGDESHDDFMGYLSAKNTYDVFTDPDESDLSKNIKGNIKKSLSKFNALLKTKRLGYFGLEEPKTKDNRVSEAYKKRVYHMLAIVGQIRQSVFHDKSSKLHEDLYSFIDIIDSEYRETLDYLVDERFDSINKGFIQGNKVNISLLIDMMKGYEADDIIRLYYDFIVIKSQKNLGFSIKKLREKMLDEYGFRFKDKQYDSVRSKMYKLMDFLLFCNYYRNDVVAGEALVRKLRFSMTDDEKEGIYADEAEKLWGKFRNDFENIADHMNGDVIKELGKADMDFDEKILDSEKKNASDLLYFSKMIYMLTYFLDGKEINDLLTTLISKFDNIKEFLKIMKSSAVDVECELTAGYKLFNDSQRITNELFIVKNIASMRKPASSAKLTMFRDALTILGIDDNITDDRISEILKLKEKGKGIHGLRNFITNNVIESSRFVYLIKYANAQKIRKVAKNEKVVMFVLGGIPDTQIERYYKSCVEFPDMNSSLEVKRSELARMIKNISFDDFKNVKQQAKGRENVAKERAKAVIGLYLTVMYLLVKNLVNVNARYVIAIHCLERDFGLYKEIIPELASKNLKNDYRILSQTLCELCDKSPNLFLKKNRRLRKCVEVDINNADSSMTRKYRNCIAHLTVVRELKEYIGDIRTVDSYFSIYHYVMQRCITKRENDTKQEEKIKYEDDLLKNHGYTKDFVKALNSPFGYNIPRFKNLSIEQLFDRNEYLTEK

SEQ ID NO: 3010 - protein, 918 aa, Artificial; identical to SEQ ID NO: 2830
  Synthetic

SEQ ID NO: 3011 - protein, 954 aa, Artificial; identical to SEQ ID NO: 2846
  Synthetic

SEQ ID NO: 3012 - protein, 918 aa, Artificial
  Synthetic
MAKKNKMKPRELREAQKKARQLKAAEINNNAVPAIAAMPAAEAAAPAAEKKKSSVKAAGMKSILVSENKMYITSFGKGNSAVLEYEVDNNDYNKTQLSSKDNSNIELCDVGKVNITFSSRRGFESGVEINTSNPTHRSGESSSVRGDMLGLKSELEKRFFGKNFDDNIHIQLIYNILDIEKILAVYVTNIVYALNNMLGEGDESNYDFMGYLSTFNTYKVFTNPNGSTLSDDKKENIRKSLSKFNALLKTKRLGYFGLEEPKTKDTRASEAYKKRVYHMLAIVGQIRQCVFHDKSGAKRFDLYSFINNIDPEYRETLDYLVDERFDSINKGFIQGNKVNISLLIDMMKGYEADDIIRLYYDFIVLKSQKNLGFSIKKLREKMLDEYGFRFKDKQYDSVRSKMYKLMDFLLFCNYYRNDIAAGESLVRKLRFSMTDDEKEGIYADEAAKLWGKFRNDFENIADHMNGDVIKELGKADMDFDEKILDSEKKNASDLLYFSKMIYMLTYFLDGKEINDLLTTLISKFDNIKEFLKIMKSSAVDVECELTAGYKLFNDSQRITNELFIVKNIASMRKPASSAKLTMFRDALTILGIDDNITDDRISEILKLKEKGKGIHGLRNFITNNVIESSRFVYLIKYANAQKIRKVAKNEKVVMFVLGGIPDTQIERYYKSCVEFPDMNSSLEVKRSELARMIKNISFDDFKNVKQQAKGRENVAKERAKAVIGLYLTVMYLLVKNLVNVNARYVIAIHCLERDFGLYKEIIPELASKNLKNDYRILSQTLCELCDKSPNLFLKKNRRLRKCVEVDINNADSSMTRKYRNCIAHLTVVRELKEYIGDICTVDSYFSIYHYVMQRCITKRENDTKQEEKIKYEDDLLKNHGYTKDFVKALNSPFGYNIPRFKNLSIEQLFDRNEYLTEK

SEQ ID NO: 3013 - protein, 918 aa, Artificial; identical to SEQ ID NO: 2830
  Synthetic

SEQ ID NO: 3014 - protein, 923 aa, Artificial; identical to SEQ ID NO: 2839
  Synthetic

SEQ ID NO: 3015 - protein, 921 aa, Artificial
  Synthetic
MAKKNKMKPRELREAQKKARQLKAAEINNNAVPAIAAMPAAEAAAPAAEKKKSSVKAAGMKSILVSENKMYITSFGKGNSAVLEYEVDNNDYNKTQLSSKDNSNIELGDVNEVNITFSSKHGFGSGMKINTSNPTHRSGESSPVRWDMLGLKSELEKRFFGKTFDDNIHIQLIYNILDIEKILAVYVTNIVYALNNMLGEGDDSNYDFMGYLSTFNTYKVFTNPNGSTLSDDKKKNIRKSLRKFNDLLKTKRLGYFGLEEPKTKDNRVSEAYKKRVYHMLAIVGQIRQCVFHDKSGAKRFDLYSFINNIYPEYRDTLDYLVDERFDSINKGFIQGNKVNISLLIDMMKGYEPDDIIRLYYDFIVLKSQKNLGFSIKKLREKMLDEYGFRFKDKQYDSVRSKMYKLMDFLLFCNYYRNDIAAGESLVRKLRFSMTDDEKEGIYADEAAKLWGKFRNDFENIADHMNGDVIKELGKADMDFDEKILDSEKKNASDLLYFSKMIYMLTYFLDGKEINDLLTTLISKFDNIKEFLKIMKSSAVDVECELTVGYKLFNDSQRITNELFIVKNIASMRKPAASAKLTMFRDALTILGIDDKITDDRISEILKLKEKGKGIHGLRNFITNNVIESSRFVYLIKYANAQKIRKVAENEKVVMFVLGGIPDAQIERYYKSCVEFPDMNSSLEVKRSELARMIKNISFDDFKNVKQQAKGRENVAKERAKAVIGLYLTVMYLLVKNLVNVNARYVIAIHCLERDFGLYKEIIPELASKNLKNDYRILSQTLCELCDNGDESPNLFLKKNKRLRKCVEVDINNADSNMTRKYRNCIAHLTVVRELNKYIKDIRTVDSYFSIYHYVMQRCITKREDDKKQEEKIKYEDDLLKNHGYTKDFVKALNSPFGYNIPRFKNLSIEQLFDRNEYLTEK

SEQ ID NO: 3016 - protein, 922 aa, Artificial; identical to SEQ ID NO: 2840
  Synthetic

SEQ ID NO: 3017 - protein, 918 aa, Artificial; identical to SEQ ID NO: 2830
  Synthetic

SEQ ID NO: 3018 - protein, 922 aa, Artificial; identical to SEQ ID NO: 2904
  Synthetic

SEQ ID NO: 3019 - protein, 918 aa, Artificial; identical to SEQ ID NO: 3008
  Synthetic

SEQ ID NO: 3020 - protein, 919 aa, Artificial
  Synthetic
MAKKNKMKPRELREAQKKARQLKAAEINNNAVPAIAAMPAAEAAAPAAEKKKSSVKAAGMKSILVSENKMYITSFGKGNSAVLEYEVDNNDYNKTQLSSKDNSNIELCDVNEVNITFSSKHGFESGVEINTSNPTHRSGESSPVRWDMLGLKSELEKRFFGKTFDDNIHIQLIYNILDIEKILAVYITNIVYALNNMLGVKGSESHDDFIGYLSTNNIYDVFIDPDNSSLSDDKKANVRKSLSKFNALLKTKRLGYFGLEEPKTKDTRASEAYKKRVYHMLAIVGQIRQCVFHDKSGAKRFDLYSFINNIDPEYRETLDYLVDERFDSINKGFIQGNKVNISLLIDMMKGYEADDIIRLYYDFIVLKSQKNLGFSIKKLREKMLDEYGFRFKDKQYDSVRSKMYKLMDFLLFCNYYRNDIAAGESLVRKLRFSMTDDEKEGIYADEAAKLWGKFRNDFENIADHMNGDVIKELGKADMDFDEKILDSEKKNASDLLYFSKMIYMLTYFLDGKEINDLLTTLISKFDNIKEFLKIMKSSAVDVECELTAGYKLFNDSQRITNELFIVKNIASMRKPAASAKLTMFRDALTILGIDDKITDDRISEILKLKEKGKGIHGLRNFITNNVIESSRFVYLIKYANAQKIREVAKNEKVVMFVLGGIPDTQIERYYKSCVEFPDMNSSLGVKRSELARMIKNISFDDFKNVKQQSKGRENVAKERAKAVIGLYLTVMYLLVKNLVNVNARYVIAIHCLERDFGLYKEIIPELASKNLKNDYRILSQTLCELCDKSPNLFLKKNERLRKCVEVDINNADSSMTRKYRNCIAHLTVVRELKEYIGDICTVDSYFSIYHYVMQRCITKRENDTKQEEKIKYEDDLLKNHGYTKDFVKALNSPFGYNIPRFKNLSIEQLFDRNEYLTEK

SEQ ID NO: 3021 - protein, 1141 aa, Artificial; identical to SEQ ID NO: 2802
  Synthetic

SEQ ID NO: 3022 - protein, 954 aa, Artificial
  Synthetic
MGKKIHARDLREQRKTDRTEKFADQNKKREAERAVQKKDATVSVKSVSSVSSKKDNATKSMAKAAGVKSVFAVGNTVYMTSFGRGNDAVLEQKIVDTSHEPLNIDDPAYQLNVVTMNGYSVTGHRGETVSAVTDNPLRRFNGGKKDEPEQSVPTDMLCLKPTLEKKFFGKEFNDNIHIQLIYNILDIEKILAVYSTNAIYALNNMSADENIENSDFFMKRTTDETFDDFEKKKESTNSREKADFDAFEKFIGNYRLAYFADAFYVNKKNPKGKARNVLREDKELYSVLTLIGKLRHWCVHSEEGRAEFWLYKLDELKDDFKNVLDVVYNRPVEEINNRFIENNKVNIQILGSVYKNTDIAELVRSYYEFLITKKYKNMGFSIKKLRESMLEGKGYADKEYDSVRNKLYQMTDFILYTGYINEDSDRADDLVNTLRSSLKEDDKTTVYCKEADYLWKKYRESIREVADALDGDNIKRLSKSNIEIQEDKLRKCFISYADSVSEFTKLIYLLTRFLSGKEINDLVTTLINKFDNIRSFLEIMDELGLDRTFTAEYSFFEGSTKYLAELVELNSFVKSCSFDINAKRTMYRDALDILGIKSGKTEEDIEKMIDNILQIDANGDKKLKKNNGLRNFIASNVIDSNRFKYLVRYGNPKKIRETAKCKPAVRFVLNEIPDAQIERYYEACCPENTALCSANKKREKLADMIAEIEFENFSDAGNYQKANVTSKTHEAEIKRKNQSIIRLYLTVMYIMLKNLVNVNARYVIAFHCVERDTKLYAESGLEVGNIEKNKTNLTMAVMGVKLENGIIKTEFDKSFAENAANRYLRNARWYKLILDNLKKSERAVVNEFRNTVCHLNAIRNININIDGIKEVENYFALYHYLIQKHLENRFADKKVERDTGDFISKLEEHKTYCKDFVKAYCTPFGYNLVRYKNLTIDGLFDKNYPGKDDSDKQK

SEQ ID NO: 3023 - protein, 918 aa, Artificial; identical to SEQ ID NO: 2830
  Synthetic

SEQ ID NO: 3024 - protein, 918 aa, Artificial; identical to SEQ ID NO: 2830
  Synthetic

SEQ ID NO: 3025 - protein, 925 aa, Artificial; identical to SEQ ID NO: 2833
  Synthetic

SEQ ID NO: 3026 - protein, 981 aa, Artificial; identical to SEQ ID NO: 2835
  Synthetic

SEQ ID NO: 3027 - protein, 919 aa, Artificial; identical to SEQ ID NO: 2894
  Synthetic

SEQ ID NO: 3028 - protein, 960 aa, Artificial; identical to SEQ ID NO: 2800
  Synthetic

SEQ ID NO: 3029 - protein, 960 aa, Artificial; identical to SEQ ID NO: 2800
  Synthetic

SEQ ID NO: 3030 - protein, 960 aa, Artificial; identical to SEQ ID NO: 2800
  Synthetic

SEQ ID NO: 3031 - protein, 919 aa, Artificial; identical to SEQ ID NO: 2968
  Synthetic

SEQ ID NO: 3032 - protein, 922 aa, Artificial; identical to SEQ ID NO: 2840
  Synthetic

SEQ ID NO: 3033 - protein, 1039 aa, Artificial
  Synthetic
MEEIGKGIESLRELKGAKKENLDKSLAKQMGIKSTLITQAGVAISSFIETTTSSGKKIPNIEILSSEDGAITHKTNFRALKGADVSSKTIKVYSASQKTQFANPSQQLGADYIGVKQALENKFFGKTFIKDNVHVQIAYNVLDLKKHLIEFINQVIYIFYNINRVTNDYESYDDLIGTLYTFSNYTDYLTFCNNNNKDVTTLKNLLKGVSFYDAYFPNLFKLPKEKDGKISQEEIEKCDAYNFDILRLLSLMRQSCEHENMSYQNNKVNADVFLYDLQAVLNGYNQELLDYLDDLYTKVPAQFNADFEKNSKNNLYILSQIYPSLSFEELVKKYYNFISVKEQKNLGVNLRLTREIIIDRFLSELRDKKYDTNRSKLYTVLDFVISEILTGSKLIDTTVQKLRVNTTEDGRIHVYLDFATQLWGGNKDLIKFALSCYEEERQNKFKSIPNKPISVRNQSYALGKQNVSYFSKLMLLLTKFLDGKEINVLLNSLISRLDNIADLIDCARECGVNVEFKKEYETFNDSRKIAKEIRLIKNVAKMKPEATSIKNCMIIDAVNFLGVKEPILHWCECTTEEQKSKNKEFLNRIHPPKENNKKVDHKLRNFIINNVVKSRYFIYLARYTKHVNCRAVMQQYSFVKFVLNEIPDAQIVRYHKSVKGYQEDNIIKARNVLSKMLANFTVDELFDKVENWDDKQNKSTYENSQKQKSRALIRLYLTVAYLGIKNLVNVNTIFSMAFSCLERDYCLKQIKPKTFLELTESFLSQDEILVNKYNQLRDSIRDSQLSKQEKKVEYKKQLVPILKEMHYDLHSYYCVKSNCTEAKKIIRKIANGVVSLSKSYRDCVAHLNVIIQVGNYLGTMQKITSYYDIFVYCLQKYLIDNQMGFVGDYNDDLSSVIISYDKAIKQSGFYNKNMLWLLNVPFAYNLARYKNLSIADLFYGKPTKQTIKDVNNKQISTTQQVESSNINVAYNVGDTVVMDRVETTLRGGLRGYIKNTNVKIAISPKTLKGTDINKYQNASILVTIVGWDQNAQVYNAKIK

SEQ ID NO: 3034 - protein, 918 aa, Artificial
  Synthetic
MAKKNKMKPRERREAQKKARQLKAAEINNNAVPAIAAMPAAEAAAPAAEKKKSSVKAAGMKSILVSENKMYITSFGKGNSAVLEYEVDNNDYNKTQLSSKDNSNIELCDVGKVNITFSSRRGFESGVEINTSNPTHRSGESSSVRGDMLGLKSELEKRFFGKNFDDNIHIQLIYNILDIEKILAVYVTNIVYALNNMLGEGDESNYDFMGYLSTFNTYKVFTNPNGSTLSDDKKENIRKSLSKFNALLKTKRLGYFGLEEPKTKDTRASEAYKKRVYHMLAIVGQIRQCVFHDKSGAKRFDLYSFINNIDPEYRETLDYLVDERFDSINKGFIQGNKVNISLLIDMMKGYEADDIIRLYYDFIVLKSQKNLGFSIKKLREKMLEEYGYRFKDKQYDSVRSKMYKLMDFLLFCNYYRNDVVAGEALVRKLRFSMTDDEKEGIYADEASKLWGKFRNDFENIADHMNGDVIKELGKADMDFDEKILDSEKKNASDLLYFSKMIYMLTYFLDGKEINDLLTTLISKFDNIKEFLKIMKSSAVDVECELTAGYKLFNDSQRITNELFIVKNIASMRKPASSAKLTMFRDALTILGIDDNITDDRISEILKLKEKGKGIHGLRNFITNNVIESSRFVYLIKYANAQKIRKVAKNEKVVMFVLGGIPDTQIERYYKSCVEFPDMNSSLEVKRSELARMIKNISFDDFKNVKQQAKGRENVAKERAKAVIGLYLTVMYLLVKNLVNVNARYVIAIHCLERDFGLYKEIIPELASKNLKNDYRILSQTLCELCDESPNLFLKKNERLRKCVEVDINNADSSMTRKYRNCIAHLTVVRELKEYIGDIRTVDSYFSIYHYVMQRCITKREDDKKQEEKIKFEDDLLKNHGYTKDFVKALNSPFGYNIPRFKNLSIEQLFDRNEYLTEK

SEQ ID NO: 3035 - protein, 975 aa, Artificial
  Synthetic
MMGKHLNAKQRELEKKLKNQQKGMMYNKSTDAVSVPTLQAAPKKAAEASTLITPGTLKTKAKAMGLKSTLVFDDKIVVTSFLNSKTEENEKCAHIEKITDCNGQTIVERPRMFNTSINAQQVDLSKDNDETNYPNPAFEDCGRDYINIKSALEKRVFGKTYNKDNLHVQIAYNIFDIKKIIGTYINNITYIFYNLGREEYNAKKDIIGNQDSDYINKLLNNTSAYFTYFDGVFKQITDRDSNKDREVKNSYNALVLKVLYYLRQFCMHGNTYTKRNEESFLSDTALYNVKDFFAKADPQINELIDAVYADGIKTINNDFMAHAKNNMYIICEVYKNEVEDSLMKEYYDFVVRKEGNNLGFNTRQLREILIDKYVGNLRDKKYDTFRNKLYTVLGFILVKEIKRNPKIQDSFIAKLRANQSGDEGKLNIYNEFAPKIWSVVSSKFNSAIKCFDEESLSKFKGYKDIDESLISKYGITVSNTDTLVKILYFLCKFLDGKEINELCCAMINKFDNINDLIKTAAQCGEDIEFVKEYKLFINSKDLSDQIRVVKSISKMKPELSNIGEVLLLDAIDILGYKINKYKCDADGNRLVDSNNKPVYSEEYCTFKKDFFETCELDEFGRVKYDKKGKPVINHRRRNFIINNVLSSKWFFYVAKYNRPSECQKFMKSKKLIALALKDVPETQIARYYHSVTGGREQTDSEAMRTTLISRLHEFSIKDVLSSVGSMTASENKRQIENSRKEQMKAIVKLYLTVVYLIAKSLVKVNTRFSIAFSAYERDVSLLADENESIALADNDDDKWKTGNYIFALTKHFLDNDEPYFDKYNNALQQIKGITDPNERRLAYRANDKVIKHTHFNLHTNKYVKDNYEKISKMNKIVTEYRNNVQHLAVVNNITKYLGDISEVTSYYSLYCYILQRLLLDNNNNDKFAEIKEKLIKFGTYNKDFMWLINVPFAYNLPRYKNLSNEEIFYDVIQNK

SEQ ID NO: 3036 - protein, 954 aa, Artificial; identical to SEQ ID NO: 2846
  Synthetic

SEQ ID NO: 3037 - protein, 960 aa, Artificial; identical to SEQ ID NO: 2800
  Synthetic

SEQ ID NO: 3038 - protein, 921 aa, Artificial
  Synthetic
MAKKNKMKPRELREAQKKARQLKAAEINNNAVPAIAAMPAAEAAAPAAEKKKSSVKAAGMKSILVSENKMYITSFGKGNSAVLEYEVDNNDYNKTQLSSKDNSNIELCDVGKVNITFSSRRGFESGVEINTSNPTHRSGESSSVRGDMLGLKSELEKRFFGKNFDDNIHIQLIYNILDIEKILAVYVTNIVYALNNMLGEGDESNYDFMGYLSTFNTYKVFTNPNGSTLSDDKKENIRKSLSKFNALLKTKRLGYFGLEEPKTKDTRASEAYKKRVYHMLAIVGQIRQCVFHDKSGAKRFDLYSFINNIDPEYRETLDYLVDERFDSINKGFIQGNKVNISLLIDMMKGYEADDIIRLYYDFIVLKSQKNLGFSIKKLREKMLDEYGFRFKDKQYDSVRSKMYKLMDFLLFCNYYRNDIAAGESLVRKLRFSMTDDEKEGIYADEAAKLWGKFRNDFENIADHMNGDVIKELGKADMDFDEKILDSEKKNASDLLYFSKMIYMLTYFLDGKEINDLLTTLISKFDNIKEFLKIMKSSAVDVECELTAGYKLFNDSQRITNELFIVKNIASMRKPAASAKLTMFRDALTILGIDDKITDDRISEILKLKEKGKGIHGLRNFVTNNVIESSRFVYLIKYANAQKIREVAKNEKVVMFVLGGIPDTQIERYYKSCVEFPDMNSSLEAKRSELARMIKNIRFDDFKNVKQQAKGRENVAKERAKAVIGLYLTVMYLLVKNLVNVNARYVIAIHCLERDFGLYKEIIPELASKNLKNDYRILSQTLCELCDNPDESPNLFLKKNRRLRKCVEVDINNADSSMTRKYRNCIAHLTVVRELKEYIGDICTVDSYFSIYHYVMQRCITKRENDTKQEEKIKYEDDLLKNHGYTKDFVKALNSPFGYNIPRFKNLSIEQLFDRNEYLTEK

SEQ ID NO: 3039 - protein, 918 aa, Artificial; identical to SEQ ID NO: 2830
  Synthetic

SEQ ID NO: 3040 - protein, 918 aa, Artificial; identical to SEQ ID NO: 2830
  Synthetic

SEQ ID NO: 3041 - protein, 922 aa, Artificial
  Synthetic
MAKKNKMKPRELREAQKKARQLKAAEINNNAAPAIAAMPAAQVIAPAAEKKKSSVKAAGMKSILVSENKMYITSFGKGNSAVLEYEVDKVDNNNYNKTQLSSKDNSNIELGDVNEVNITFSSKHGFESGVEINTSNPTHRSGESSPVRWDMLGLKSELEKRFFGKTFDDNIHIQLIYNILDIEKILAVYVTNIVYALNNMLGVKGSESHDDFIGYLSTNNTYDVFIDPDNSSLSDDKKANVRKSLSKFNVLLKTKRLGYFGLEEPKTKDNRVSEAYKKRVYHMLAIVGQIRQCVFHDKSGAKRFDLYSFINNIDPEYRDTLDYLVEERLKSINKDFIQGNKVNISLLIDMMKGYEADDIIRLYYDFIVLKSQKNLGFSIKKLREKMLEEYGFRFKDKQYDSVRSKMYKLMDFLLFCNYYRNDIAAGEALVRKLRFSMTDDEKEGLYADEAAKLWGKFRNDFENIADHMNGDVIKELGKADMDFDEKILDSEKKNASDLLYFSKMIYMLTYFLDGKEINDLLTTLISKFDNIKEFLKIMKSSAVNVECELTAGYKLFNDSQRITNELFIVKNIASMRKPAASAKLTMFRDALTILGIDDKITDDRISEILKLKEKGKGIHGLRNFITNNVIESSRFVYLIKYANAQKIRKVAENEKVVMFVLGGIPDTQIERYYKSCVEFPDMNSSLEVKRSELARMIKNISFDDFKNVKQQAKGRENVAKERAKAVIGLYLTVMYLLVKNLVNVNARYVIAIHCLERDFGLYKEIIPELASKNLKNDYRILSQTLCELCDKSPNLFLKKNERLRKCVEVDINNADSSMTRKYRNCIAHLTVVRELKEYIGDIRTVDSYFSIYHYVMQRCITKREDDKKQEEKIKFEDDLLKNHGYTKDFVKALNSPFGYNIPRFKNLSIEQLFDRNEYLTEK

SEQ ID NO: 3042 - protein, 1023 aa, Artificial
  Synthetic
MAKKITAKQKREEKERLNKQKWAKQDTPVVPKSKTEEKPVAASDDKLLKTTQVKKVQTKSKAKAMGLKTVLSFDDKIAIASFVNDKKTKLPHIERITDKSGTTIHENARMFDSSVDEQNVNIEKRMTIEEKQNDGTFKKDEKDVKATICNPYFKTCGKDYIGIKDVAEKYFFGKTFPNENLRVQIAYNVFDIQKILGTYVNNIIYSFYNLRRDGKSDVDIIGSLYAFADFDNQLKDKPAFREAKDLLKNTEAYFSYFGDVFKKSKKGKKDENNEDYEKNLRHNFNVLRVLSFLRQICTHAYVKCTSGAKNNGDSTKVVAESLDALFNITEYFDKTAPELSKTINEIYKEGVDRINNDFVTNGKNNLYILSKVYPDMQRNELVKKYYQFVVCKEGNNVGINTRKLKESIISQNPWITTPQDNNKANDYKSCQHKLYTIMCFILVAELDAHESIRDNMVAELRANMDGDDGRDAIYEKYAKDIYHIVKDKLLAMQKVFDEELVPVKVEEENDPQRFTHGKLGKKEIESFCLSDKNTSDIAKVVYFLCNFLDGKEINELCCAMMNKFDGIGDLIDTAKQCGEEVKFIEKFACLSNCRKITDDIRVAKSISKMKNKVKIDNDIIYLDAIELLGRKIEKYQKDESGKILLGTDGKRLYTKEYKYFNDMFFNAGNHKVRKFINNNVMKSKWFFYVVRYNKPAECQIIMRNKTLVKFTLDDLPDEQIQRYYSSVFGDNNMPTVDVMREWLLKKINQFSVRGFLDDIDEESKQNKSSETEQKKSLIRLYLTIAYLITKSMVKINTRFSIACATYERDYALLCQSQQKGGPWDGGAQALAVTRKFLNHDREIFDRYCAREAEIARLPSEERKPLRKANDKLLKQTHYTNHSYTYIVNNLNSFTDIDYCAKDVGLPAPNDKNDNASILGEMRNDIAHLNVVHDMVKYIEELKDISSYYAFYCYVLQRRLVGNDPNCQNKFKAKYAKELNYYGTYNKNLMWMLNLPFAYNLPRYKNLSSEFLFYDMEYNKKDDE

SEQ ID NO: 3043 - protein, 920 aa, Artificial; identical to SEQ ID NO: 2922
  Synthetic

SEQ ID NO: 3044 - protein, 939 aa, Artificial
  Synthetic
MAKKKTAKQLREEQKALKMQKIQASVKAKEEKKVSEQVPAIRKVSGKKNKKKTYAKAYGSKTVLVVGNDVIMTSYGERCFANLEHRITPELNAESLSSDNALNNIDAKNGINISFTGRVSGMTASSDNPMHVCKTEERKAPKPGIDLLCLKDKLEQWYFGRTFDDNIHIQLIYQIQDIEKILASHVNNIVFALDNILHETESETGDFLGMGYMRTTNSLENYKDFCQHSSKKQVQDSYETFKSYIQRKELLYFGETFYHGNTRRNPEDIYHILALVSSLRQFCFHSTFDDNIKSIQGNWLYCLDDQLSDEFKETLGMLWGEATEKLDRDFLKTNTVNLHILCEIFDKEKPEDIINAYYEFLMKKNFKNLGFSIKKLRECMLEETELNEFKEDKYNSVRSKLYKLFDFILVHHYKNDASPESTDLQNQLRACLTDEEKEKVYTQTARELTALYSYHFKEASVSANARNIKEYQEKAQVYHISIADKISSTGIGLFSQLIYMLTLLLDGKEINDLLTTLINKFDNIIGFLDILKNMNLDIEFKKEYQFFNQENCEYTAKELRIINSLARMQKPSANAKKVMFRDALRILGMDNRSDEEIDKEIERTMPVGADGKFIKGKQSFRNFIASNVIESSRFRYLVRYNNPHKTRTLVQNRNVVKFVLEGIPDTQIKRYFDVCKDKDTPDTSSKSAQIDVLTGILTNIDYKIFEDVPQSAKINKDDASRNRVEALKKQRYQAIITLYLTVLYLVTKNLVYVNSRYVMAFHCLERDAFFYGIDSKKMKEDYRKLTRKLLTDETYTTYGHLKNQKGHRKWYVLVSKNLENSDKKAVHYFRNIAAHISVIRNVNDYIKNVQEFHSYFELYHYLVQKMIAENHRYDAKNVKTAEYLENLEKYHTYSKDFVKAYCIPFGYVVPRYKNLTINELFDRNNPLPEPKEDKEKKEV

SEQ ID NO: 3045 - protein, 954 aa, Artificial; identical to SEQ ID NO: 2858
  Synthetic

SEQ ID NO: 3046 - protein, 922 aa, Artificial; identical to SEQ ID NO: 2840
  Synthetic

SEQ ID NO: 3047 - protein, 939 aa, Artificial; identical to SEQ ID NO: 2861
  Synthetic

SEQ ID NO: 3048 - protein, 921 aa, Artificial; identical to SEQ ID NO: 2836
  Synthetic

SEQ ID NO: 3049 - protein, 922 aa, Artificial; identical to SEQ ID NO: 2934
  Synthetic

SEQ ID NO: 3050 - protein, 975 aa, Artificial
  Synthetic
MMGKHLNAKQRELEKKLKNQQKGMMYNKSTDAVSVPTLQAAPKKAAEASTLITPGTLKTKAKAMGLKSTLVFDDKIVVTSFLNSKTEENEKCAHIEKITDCNGQTIVERPRMFNTSINAQQVDLSKDNDETNYPNPAFEDCGRDYINIKSALEKRVFGKTYNKDNLHVQIAYNIFDIKKIIGTYINNITYIFYNLGREEYNAKKDIIGNQDSDYINKLLNNTSAYFTYFDGVFKQITDRDSNKDREVKNSYNALVLKVLYYLRQFCMHGNTYTKRNEESFLSDTALYNVKDFFAKADPQINELIDAVYADGIKTINNDFMAHAKNNMYIICEVYKNEVEDSLMKEYYDFVVRKEGNNLGFNTRQLREILIDKYVGNLRDKKYDTFRNKLYTVLGFILVKEIKRNPKIQDSFIAKLRANQSGDEGKLKIYNEFAPKIWSVVSSKFNSAITCFDEESLSKFKGYKDIDESLISRYGITVSNTDTLVKILYFLCKFLDGKEINELCCAMINKFDNINDLIKTAAQCGEDIEFVKEYKLFINSKDISDQIRVVKSISKMKPELSNIGEVLLLDAIDILGYKINKYKCDADGNRLVDSNNKPVYSEEYCTFKKDFFETCELDEFGRVKYDKKGKPVINHRRRNFIINNVLSSKWFFYVAKYNRPSECQKFMKSKKLIALALKDVPETQIARYYHSVTGGREQTDSEAMRTTLISRLHEFSIKDVLSSVGSMTASENKRQIENSRKEQMKAIVKLYLTVVYLIAKSLVKVNTRFSIAFSAYERDVSLLADENESIALADNDDDKWKTGNYIFALTKHFLDNDEPYFDKYNNALQQIKGITDPNERRLAYRANDKVIKHTHFNLHTNKYVKDNYEKISKMNKIVTEYRNNVQHLAVVNNITKYLGDISEVTSYYSLYCYILQRLLLDNNNNDKFAEIKEKLIKFGTYNKDFMWLINVPFAYNLPRYKNLSNEEIFYDVIQNK

SEQ ID NO: 3051 - protein, 921 aa, Artificial; identical to SEQ ID NO: 2836
  Synthetic

SEQ ID NO: 3052 - protein, 919 aa, Artificial; identical to SEQ ID NO: 2825
  Synthetic

SEQ ID NO: 3053 - protein, 924 aa, Artificial; identical to SEQ ID NO: 2967
  Synthetic

SEQ ID NO: 3054 - protein, 984 aa, Artificial; identical to SEQ ID NO: 2827
  Synthetic

SEQ ID NO: 3055 - protein, 930 aa, Artificial
  Synthetic
MQKKKKQKKPVVENKPDTAISKDNTPKPNKEIKKSKAKLAGVKWVIKANDDVAYISSFGKGNNSVLEKRIIGDVSSDVNKDSHMYVNPKYTKKNYEIKNGFSSGSSLTTHPNKPDKNSGMDALCLKIYFEKEIFKDKFNDNMHIQTIYNIFDIEKTLAKHITNIIYAVNSLDRSYIQSGNDTIGFGLNYRIPYAKYGRGKDSNGKPNNSNLKKRESFIKFYNNAKDRFGYFESVFYQNGKPISREKLYIYLNILNFVRNSTFHYNNTSTYLYRKEYKYTDKDNCSVKEFEFVSYLNEFVKNKFKNVNKNFISNEKNNLYIILNAYGEDIEDVEVVKKYSKELYKLSVLKTNKNLGVNVKKLRESAIEYGYCPLPYDKEKEVAKLSSIKHKLYKTYDFVITHYLNSNDKLLLEIVEALRLSKNDDEKENVYKIYAEKIFKAEYVINPIKTISNLFAEKGDKLFNEKVSISEEYVEDIRIDKNIHNFTKVIFFLTCFLDGKEINDLLTNIISKLQVIEDHNNVIKAIANNNDAVYKDYSDKYAVFKNSGKIATKLEAIKSIARMENKINKAFKEPLLKDAMLALGVSPNDLDEKYEKYFKTDVDADKDHQKVSTFLMNNVINNSRFKYVVKYINPADINRLAKNKHLVKFVLDQIPHKQIDSYYNSVCTVEEPSYKGKIQLLTKKITGLNFYSLFENCKIPNVEKEKKKAVITLYFTIIYILVKNLVNINGLYTLALYFVERDGFFYKKICEKKDKKKTNKDVDYLLLPEIFSGSKYREETKNLKLPKEKDREIMKKYLPNDEDRKEYNKFFKQYRNNIVHLNIIANLSKLTSTIDKEINSYFEIFHYCAQRVMFDYCKNNNKVVLAKMKDLAHIKSDCDEFSSKYTYPYSSAVLRFMNLPFAYNVPRFKNLSYQKFFDKQRLEALEKNLNI

SEQ ID NO: 3056 - protein, 922 aa, Artificial; identical to SEQ ID NO: 2840
  Synthetic

SEQ ID NO: 3057 - protein, 922 aa, Artificial; identical to SEQ ID NO: 2815
  Synthetic

SEQ ID NO: 3058 - protein, 923 aa, Artificial
  Synthetic
MAKKNKMKPRELREAQKKARQLKVAEINNNAVPAIAAMPAAQVIAPAAEKKKSSVKAAGMKSILVSENKMYITSFGKGNSAVLEYEVDNNDYNKTQLSSEGNSNIELGDVNEVNITFSSKRGFESGVEINTSNPTHRSGESSPVRGDMLGLKSELEKRFFGKTFDDNIHIQLIYNILDIEKILAVYVTNIVYALNNMLGEGDDESHDDFMGYLSAKNTYDVFTDPDESDLSKNIKGNIKKSFSTFNDLLKTKRLGYFGLEEPKTKDTRVSQAYKKRVYHMLAIVGQIRQSVFHDKSSKLDEDLYSFIDIIDSEYRDTLDYLVDERFDSINKGFIQGNKVNISLLIDMMKDDYEADDIIRLYYDFIVLKSQKNLGFSIKKLREKMLEEYGFRFKDKQYDSVRSKMYKIMDFLLFCNYYRNDVVAGEALVRKLRFSMTDDEKEGIYADEAAKLWGKFRNDFENIADHMNGDVIKELGKADMDFDEKILDSEKKNASDLLYFSKMIYMLTYFLDGKEINDLLTTLISKFDNIKEFLKIMKSSAVDVECELTAGYKLFNDSQRITNELFIVKNIASMRKPAASAKLTMFRDALTILGIDDNITDDRISEILKLKEKGKGIHGLRNFITNNVIESSRFVYLIKYANAQKIREVAKNEKVVMFVLGGIPDTQIERYYKSCVEVPDMNSSLEAKRSELARMIKNIRFDDFKNVKQQAKGRENVAKERAKAVIGLYLTVMYLLVKNLVNVNARYVIAIHCLERDFGLYKEIIPELASKNLKNDYRILSQTLCELCDDRDKSPNLFLKKNKRLRKCVEVDINNADSSMTRKYRNCIAHLTVVRELKEYIGDIRTVDSYFSIYHYVMQRCITKRENYTKQEEKIKYEDDLLKNHGYTKDFVKALNSPFGYNIPRFKNLSIEQLFDRNEYLTEK

SEQ ID NO: 3059 - protein, 975 aa, Artificial; identical to SEQ ID NO: 3050
  Synthetic

SEQ ID NO: 3060 - protein, 925 aa, Artificial
  Synthetic
MAKKNKMKPRELREAQKKARQLKAAEINNNAAPAIAAMPAAEAAAPAAEKKKSSVKAAGMKSILVSENKMYITSFGKGNSAVLEYEVDKVDNNNYNKTQLSSESSSNIKLCGVTKVNITFSSKHGFGSGVEINTSNPTHRSGESSPVRWDMLGLKSELEKRFFGKTFDDNIHIQLIYNILDIEKILAVYVTNIVYALNNMLGVKGSESYDDFMGYLSAQNTYYIFTHPDKSNLSDKVKGNIKKSLSKFNDLLKTKRLGYFGLEEPKTKDKRVSEAYKKRVYHMLAIVGQIRQSVFHDKSNELDEYLYSFIDIIDSEYRDTLDYLVDERFDSINKGFVQGNKVNISLLIDMMKGYEADDIIRLYYDFIVLKSQKNLGFSIKKLREKMLDEYGFRFKDKQYDSVRSKMYKLMDFLLFCNYYRNDVVAGEALVRKLRFSMTDDEKEGIYADEAAKLWGKFRNDFENIADHMNGDVIKELGKADMDFDEKILDSEKKNASDLLYFSKMIYMLTYFLDGKEINDLLTTLISKFDNIKEFLKIMESSAVDVECELTAGYKLFNDSQRITNELFIVKNIASMRKPAASAKLMMFRDALTILGIDDKITDDRISEILKLKEKGKGIHGLRNFITNNVIESSRFVYLIKYANAQKIREVAKNEKVVMFVLGGIPDTQIERYYKSCVEVPDMNSSLEAKRSELARMIKNIRFDDFKNVKQQAKGRENVAKERAKAVIGLYLTVMYLLVKNLVNVNARYVIAIHCLERDFGLYKEIIPELASKNLKNDYRILSQTLCELCDDRDESPNLFLKKNKRLRKCVEVDINNADSSMTRKYRNCIAHLTVVRELKEYIGDIRTVDSYFSIYHYVMQRCITKREDDKKQEEKIKYEDDLLKNHGYTKDFVKALNSPFGYNIPRFKNLSIEQLFDRNEYLTEK

SEQ ID NO: 3061 - protein, 925 aa, Artificial
  Synthetic
MAKKNKMKPRELREAQKKARQLKAAEINNNAAPAIAAMPAVEVIAPAAEKKKSSVKAAGMKSILVSENKMYITSFGKGNSAVLEYEVDKMDNNNYNKTQLSSESSSNIKLCGVTKVNITFSSKHGFESGVEINTSNPTHRSGESSPVRWDMLGLKSELEKRFFGKTFDDNIHIQLIYNILDIEKILAVYVTNIVYALNNMLGVKGSESHDDFIGYLSTNNTYDVFIDPDNSSLSDDKKANVRKSLSKFNALLKTKRLGYFGLEEPKTKDNRVSEAYKKRVYHMLAIVGQIRQCVFHDKSGAKRFDLYSFINNIYPEYRETLDYLVDERFDSINKGFIQGNKVNISLLIDMMKGYEADDIIRLYYDFIVLKSQKNLGFSIKKLREKMLDEYGFRFKDKQYDSVRSKMYKLMDFLLFCNYYRNDVAAGEALVRKLRFSMTDDEKEGIYAGEAAKLWGKFRNDFENIADHMNGDVIKELGKADMDFDEKILDSEKKNASDLLYFSKMIYMLTYFLDGKEINDLLTTLISKFDNIKEFLKIMKSSAVDVECELTAGYKLFNDSQRITNELFIVKNIASMRKPAASAKLTMFRDALTILGIDDNITDDRISEILKLKEKGKGIHGLRNFITNNVIESSRFVYLIKYANAQKIREVAKNEKVVMFVLGGIPDTQIERYYKSCVEVPDMNSSLEAKRSELARMIKNIRFDDFKNVKQQAKGRENVAKERAKAVIGLYLTVMYLLVKNLVNVNARYVIAIHCLERDFGLYKEIIPELASKNLKNDYRILSQTLCELCDDRDKSPNLFLKKNKRLRKCVEVDINNADSSMTRKYRNCIAHLTVVRELKEYIGDIRTVDSYFSIYHYVMQRCITKRENDTKQEDKIKYEDDLLKNHGYTKDFVKALNSPFGYNIPRFKNLSIEQLFDRNEYLTEK

SEQ ID NO: 3062 - protein, 928 aa, Artificial
  Synthetic
MAKKNKMKPRELREAQKKARQLKAAEINNNAAPAIAAMPAAEAAAPAAEKKKSSVKAAGMKSILVSENKMYITSFGKGNSAVLEYEVDKVDNNDYNQTQLSSKGSSNIELHGVNEVNITFSSKHGFESGVEINTSNPTHRSGESSPVRWDMLGLKSELEKRFFGKTFDDNIHIQLIYNILDIEKILAVYVTNIVYALNNMLGIKDSESYDDFMGYLSAKNTYDVFTDPDESDLSKNIKGNIKKSFSTFNDLLKTKRLGYFGLEEPKTKDTRVSEAYKKRVYHMLAIVGQIRQCVFHDLSEHSEYDLYSFIDNSKKVYRECRETLNYLVDERFDSINKGFIQGNKVNISLLIDMMKGYEADDIIRLYYDFIVLKSQKNLGFSIKKLREKMLDEYGFRFKDKQYDSVRSKMYKLMDFLLFCNYYRNDVVAGEALVRKLRFSMTDDEKEGIYADEAAKLWGKFRNDFENIADHMNGDVIKELGKADMDFDEKILDSEKKNASDLLYFSKMIYMLTYFLDGKEINDLLTTLISKFDNIKEFLKIMKSSAVDVECELTAGYKLFNDSQRITNELFVVKNIASMRKPAASAKLTMFRDALTILGIDDKITDDRISEILKLKEKGKGIHGLRNFITNNVIESSRFVYLIKYANAQKIREVAKNEKVVMFVLGGIPDTQIERYYKSCVEFPDMNSSLEAKRSELARMIKNISFDDFKNVKQQAKGRENVAKERAKAVIGLYLTVMYLLVKNLVNVNARYVIAIHCLERDFGLYKEIIPELASKNLKNDYRILSQTLCELCDDRDESPNLFLKKNERLRKCVEVDINNADSSMTRKYRNCIAHLTVVRELKEYIGDIRTVDSYFSIYHYVMQRCITKREDDTKQEEKIKYEDDLLKNHGYTKDFVKALNSPFGYNIPRFKNLSIEQLFDRNEYLTEK

SEQ ID NO: 3063 - protein, 946 aa, Artificial; identical to SEQ ID NO: 2799
  Synthetic

SEQ ID NO: 3064 - protein, 1141 aa, Artificial; identical to SEQ ID NO: 2802
  Synthetic

SEQ ID NO: 3065 - protein, 926 aa, Artificial
  Synthetic
MAKKNKMKPRELREAQKKARQLKAAEINNNAAPAIAAMPAAQVIAPAAEKKKSSVKAAGMKSILVSENKMYITSFGKGNSAVLEYEVDKVDNNNYNKTQLSSKDNSNIELGDVNEVNITFSSKHGFESGVEINTSNPTHRSGESSPVRWDMLGLKSELEKRFFGKTFDDNIHIQLIYNILDIEKILAVYVTNIVYALNNMLGIKGSESYDDFMGYLSARNTYEVFTHPDKSNLSDKVKGNIKKSFSTFNDLLKTKRLGYFGLEEPKTKDTRVSEAYKKRVYHMLAIVGQIRQCVFHDLSEHSEYDLYSFIDNSKKVYRECRETLNYLVDERFDSINKGFIQGNKVNISLLIDMMKDDYEADDIIHLYYDFIVLKSQKNLGFSIKKLREKMLDEYGFRFKDKQYDSVRSKMYKLMDFLLFCNYYRNDVVAGEALVRKLRFSMTDDEKEGIYADEAEKLWGKFRNDFENIADHMNGDVIKELGKADMDFDEKILDSEKKNASDLLYFSKMIYMLTYFLDGKEINDLLTTLISKFDNIKEFLKIMKSSAVDVECELTAGYRLFNDSQRITNELFIVKNIASMRKPAASAKLTMFRDALTILGIDDKITDDRISEILKLKEKGKGIHGLRNFITNNVIESSRFVYLIKYANAQKIREVAKNEKVVMFVLGGIPDTQIERYYKSCVEFPDMNSSLEAKRSELARMIKNISFDDFKNVKQQAKGRENVAKERAKAVIGLYLTVMYLLVKNLVNVNARYVIAIHCLERDFGLYKEIIPELASKNLKNDYRILSQTLCELCDESPNLFLKKNERLRKCVEVDINNADSSMTRKYRNCIAHLTVVRELKEYIGDIRTVDSYFSIYHYVMQRCITKREDDKKQEEKIKFEDDLLKNHGYTKDFVKALNSPFGYNIPRFKNLSIEQLFDRNEYLTEK

SEQ ID NO: 3066 - protein, 925 aa, Artificial
  Synthetic
MAKKNKMKPRELREAQKKARQLKAAEINNNAAPAIAAMPAAQVIAPAAEKKKSSVKAAGMKSILVSENKMYITSFGKGNSAVLEYEVDKVDNNNYNKTQLSSKDNSNIELGDVNEVNITFSSKHGFESGVEINTSNPTHRSGESSPVRWDMLGLKSELEKRFFGKTFDDNIHIQLIYNILDIEKILAVYVTNIVYALNNMLGIKGSESYDDFMGYLSARNTYEVFTHPDKSNLSDKVKGNIKKSLSKFNDLLKTKRLGYFGLEEPKTKDTRVSQAYKKRVYHMLAIVGQIRQSVFHDKSSKLDEDLYSFIDIIDSEYRETLDYLVDERFDSINKGFIQGNKVNISLLIDMMKGYEADDIIRLYYDFIVLKSQKNLGFSIKKLREKMLDEYGFRFKDKQYDSVRSKMYKLMDFLLFCNYYRNDVVAGEALVRKLRFSMTDDEKEGIYADEASKLWGKFRNDFENIADHMNGDVIKELGKADMDFDEKILDSEKKNASDLLYFSKMIYMLTYFLDGKEINDLLTTLISKFDNIKEFLKIMKSSAVDVECELTAGYKLFNDSQRITNELFIVKNIASMRKPAASAKLTMFRDALTILGIDDKITDDRISEILKLKEKGKGIHGLRNFITNNVIESSRFVYLIKYANAQKIREVAKNEKVVMFVLGGIPDTQIERYYKSCVEFPDMNSSLEAKCSELARMIKNISFDDFKNVKQQAKGRENVAKERAKAVIGLYLTVMYLLVKNLVNVNARYVIAIHCLERDFGLYKEIIPELASKNLKNDYRILSQTLCELCDDRDESPNLFLKKNKRLRKCVEVDINNADSSMTRKYRNCIAHLTVVRELKEYIGDIRTVDSYFSIYHYVMQRCITKREDDKKQEEKIKYEDDLLKNHGYTKDFVKALNSPFGYNIPRFKNLSIEQLFDRNEYLTEK

SEQ ID NO: 3067 - protein, 919 aa, Artificial
  Synthetic
MAKKNKMKPRELREAQKKARQLKAAEINNNATPTIAAMPAAEVIAPAAEKKKSSVKAAGMKSILVSKNKMYITSFGKGNSAVLEYEVDNNDYNQTQLSSKNSSNIELRGVNEVNITFSSKHGFESGVEINTSNPTHRSGESSSVRGDMLGLKSELEKRFFGKTFDDNIHIQLIYNILDIEKILAVYVTNIVYALNNMLGIKDSESYDDFIGYLSARNTYKVFTHPDKSNLSDKVKGNIKKSFSTFNDLLKTKRLGYFGLEEPKTKDTRVSQAYKKRVYHMLAIVGQIRQSVFHDKSSKLDEDLYSFIDIIDPEYRETLDYLVDERFDSINKGFIQGNKVNISLLIDMMKGYEADDIIRLYYDFIVLKSQKNLGFSIKKLREKMLDEYGFRFKDKQYDSVRSKMYKLMDFLLFCNYYRNDVVAGEALVRKLRFSMTDDEKEGIYADEAAKLWGKFRNDFENIADHMNGEAIKELGKADMDFDEKILDSEKKNASDLLYFSKMIYMLTYFLDGKEINDLLTTLISKFDNIKEFLKIMKSSAVDVECELTAGYKLFNDSQRITNELFIVKNIASMRKPAASAKLTMFRDALTILGIDDNITDDRISEILKLKEKGKGIHGLRNFITNNVIESSRFVYLIKYANAQKIREVAKNEKVVMFVLGGIPDTQIERYYKSCVEFPDMNSSLEAKRSELARMIKNISFDDFKNVKQQAKGRENVAKERAKAVIGLYLTVMYLLVKNLVNVNARYVIAIHCLERDFGLYKEIIPELASKNLKNDYRILSQTLCELCDKSPNLFLKKNERLRKCVEVDINNADSSMTRKYRNCIAHLTVVRELKEYIGDIRTVDSYFSIYHYVMQRCITKREDDTKQEDKIKYEDDLLKNHGYTKDFVKALNSPFGYNIPRFKNLSIEQLFDRNEYLTEK

SEQ ID NO: 3068 - protein, 925 aa, Artificial
  Synthetic
MAKKNKMKPRELREAQKKARQLKAAEINNNAAPAIAAMPAAEAAAPAAEKKKSSVKAAGMKSILVSENKMYITSFGKGNSAVLEYEVDKVDNNDYNQTQLSSKGSSNIELHGVNEVNITFSSKHGFESGVEINTSNPTHRSGESSPVRWDMLGLKSELEKRFFGKTFDDNIHIQLIYNILDIEKILAVYVTNIVYALNNMLGIKDSESYDDFMGYLSAKNTYDVFTDPDESDLSKNIKGNIKKSFSTFNDLLKTKRLGYFGLEEPKTKDTRVSEAYKKRVYHMLAIVGQIRQCVFHDLSEHSEYDLYSFIDNSKKVYRECRETLNYLVDERFDSINKGFIQGNKVNISLLIDMMKGYEADDIIRLYYDFIVLKSQKNLGFSIKKLREKMLDEYGFRFKDKQYDPVRSKMYKLMDFLLFCNYYRNDVVAGEALVRKLRFSMTDDEKEGIYADEAEKLWGKFRNDFENIADHMNGDVIKELGKADMDFDEKIIDSEKKNASDLLYFSKMIYMLTYFLDGKEINDLLTTLISKFDNIKEFLKIMKSSAVNVECELTAGYKLFNDSQRITNELFIVKNIASMRKPAASAKLTMFRDALTILGIDDKITDDRISEILKLKEKGKGIHGLRNFITNNVIESSRFVYLIKYANAQKIRKVAENEKVVMFVLGGIPDTQIERYYKSCVEFPDMNSSLEAKRSELARMIKNISFDDFKKVKQQAKGRENVAKERAKAVIGLYLTVMYLLVKNLVNVNARYVIAIHCLERDFGLYKEIIPELASKNLKNDYRILSQKLCELCDKSPNLFLKKNERLRKCVEVDINNADSIMTRKYRNCIAHLTVVRELKEYIGDIRTVDSYFSIYHYVMQRCITKRENDTKQEDKIKYEDDLLKNHGYTKDFVKALNSPFGYNIPRFKNLSIEQLFDRNEYLTEK

SEQ ID NO: 3069 - protein, 900 aa, Artificial; identical to SEQ ID NO: 2863
  Synthetic

SEQ ID NO: 3070 - protein, 922 aa, Artificial
  Synthetic
MAKKNKMKPRELREAQKKARQLKAAEINNNAAPAIAAMPAAEAAAPAAEKKKSSVKAAGMKSILVSENKMYITSFGKGNSAVLEYEVDNNDYNQTQLSSKGSSNIELHGVNEVNITFSSKHGFESGVEINTSNPTHRSGESSPVRWDMLGLKSELEKRFFGKTFDDNIHIQLIYNILDIEKILAVYVTNIVYALNNMLGVKGSESHDDFIGYLSTNNTYDVFIDPDNSSLSDDKKANVRKSLSKFNVLLKTKRLGYFGLEEPKTKDTRVSQAYKKRVYHMLAIVGQIRQCVFHDKSGAKRFDLYSFINNIDPEYRETLDYLVDERFDSINKGFIEGNKINISLLIDMMKGYEADDIIRLYYDFIVLKSQKNLGFSIKKLREKMLDEYGFRFKDKQYDPVRSKMYKLMDFLLFCNHYRNDVAAGEALVRKLRFSMTDDEKEGIYADEAAKLWGKFRNDFENIADHMNGDVIKELGKADMDFDEKILDSEKKNASDLLYFSKMIYMLTYFLDGKEINDLLTTLISKFDNIKEFLKIMKSSAVDVECELTAGYKLFNDSQRITNELFIVKNIASMRKPAASAKLTMFRDALTILGIDDKITDDRISEILKLKEKGKGIHGLRNFVTNNVIESSRFVYLIKYANAQKIREVAKNEKVVMFVLGGIPDTQIERYYKSCVEFPDMNSSLEAKRSELARMIKNIRFDDFKNVKQQAKGRENVAKERAKAVIGLYLTVMYLLVKNLVNVNARYVIAIHCLERDFGLYKEIIPELASKNLKNDYRILSQTLCELCDDRDESPNLFLKKNKRLRKCVEVDINNADSSMTRKYRNCIAHLTVVRELKEYIGDIRTVDSYFSIYHYVMQRCITKRENDTKQEEKIKYEDDLLKNHGYTKDFVKALNSPFGYNIPRFKNLSIEQLFDRNEYLTEK

SEQ ID NO: 3071 - protein, 927 aa, Artificial
  Synthetic
MAKKNKMKPRELREAQKKARQLKAAEINNNAAPTIAAMPAAEVIAPAAEKKKSSVKAAGMKSILVSENKMYITSFGKGNSAVLEYEVDKVDNNDYNQTQLSSKDSSNIELHGVNEVNITFSSKHGLESGVEISTSNPTHRSGESSPVRWDMLGLKSELEKRFFGKTFDDNIHIQLIYNILDIEKILAVYVTNIVYALNNMLGEGDDSNYDFMGYLSTFNTYKVFTNPNGSTLSDDKKKNIRKSLSKFNALLKTKRLGYFGLEEPKTKDTNALEAYKKRVYYMLAIVGQIRQCVFHDLTDHSEYDLYSFIYNSKKVYKECRETLDYLVEERLKSINKGFIEGNKINISLLIDMMKGYEADDIIRLYYDFIVLKSQKNLGFSIKKLREKMLDEYGFRFKDKQYDSVRSKMYKLMDFLLFCNYYRNDVVAGEALVRKLRFSMTDDEKEGIYADEAAKLWGKFRNDFENIADHMNGDVIKELGKADMDFDEKILDSEKKNASDLLYFSKMIYMLTYFLDGKEINDLLTTLISKFDNIKEFLKIMKSSAVDVECELTAGYKLFNDSQRITNELFIVKNIASMRKPAASAKLTMFRDALTILGIDDKITDDRISEILKLKEKGKGIHGLRNFITNNVIESSRFVYLIKYANAQKIREVAKNEKVVMFVLGGIPDTQIERYYKSCVEFPDMNSSLEAKRSELARMIKNIRFDDFKNVKQQAKGRENVAKERAKAVIGLYLTVMYLLVKNLVNVNARYVIAIHCLERDFGLYKEIIPELASKNLKNDYRILSQTLCELCDDRDESPNLFLKKNKRLRKCVEVDINNADSIMTRKYRNCIAHLTVVRELKEYIGDIRTVDSYFSIYHYVMQRCITKREDDTKQEEKIKYEDDLLKNHGYTKDFVKALNSPFGYNIPRFKNLSIEQLFDRNEYLTEK

SEQ ID NO: 3072 - protein, 954 aa, Artificial; identical to SEQ ID NO: 2858
  Synthetic

SEQ ID NO: 3073 - protein, 922 aa, Artificial; identical to SEQ ID NO: 2906
  Synthetic

SEQ ID NO: 3074 - protein, 922 aa, Artificial
  Synthetic
MAKKNKMKPRELREAQKKARQLKAAEINNNAAPAIAAMPAAEVIAPAAEKKKSSVKAAGMKSILVSENKMYITSFGKGNSAVLEYEVDNNDYNQTQLSSKDNSNIELGDVNEVNITFSSKRGFESGVEINTSNPTHRSGESSPVRGDMLGLKSELEKRFFGKTFDDNIHIQLIYNILDIEKILAVYVTNIVYALNNMLGIKKSESYDDFMGYLSARNTYEVFTHPDKSNLSDKAKGNIKKSFSTFNDLLKTKRLGYFGLEEPKTKDTRVSQAYKKRVYHMLAIVGQIRQSVFHDKSSKLDEDLYSFIDIIDSEYRETLDYLVDERFDSINKGFIQGNKVNISLLIDMMKGYEPDDIIRLYYDFIVLKSQKNLGFSIKKLREKMLDEYGFRFKDKQYDSVRSKMYKLMDFLLFCNYYRNDVVAGEALVRKLRFSMTDDEKEGIYADEAAKLWGKFRNDFENIADHMNGDVIKELGKADMDFDEKILDSEKKNASDLLYFSKMIYMLTYFLDGKEINDLLTTLISKFDNIKEFLKIMKSSAVDVECELTAGYKLFNDSQRITNELFIVKNIASMRKPAASAKLTMFRDALTILGIDDKITDDRISEILKLKEKGKGIHGLRNFITNNVIESSRFVYLIKYANAQKIREVAKNEKVVMFVLGGIPDTQIERYYKSCVEFPDMNSSLEVKRSELARMIKNISFDDFKNVKQQAKGRENVAKERAKAVIGLYLTVMYLLVKNLVNVNARYVIAIHCLERDFGLYKEIIPELASKNLKNDYRILSQTLCELCDERDKSPNLFLKKNERLRKCVEVDINNADSIMTRKYRNCIAHLTVVRELKEYIGDIRTVDSYFSIYHYVMQRCITKREDDTKQEEKIKYEDDLLKNHGYTKDFVKALNSPFGYNIPRFKNLSIEQLFDRNEYLTEK

SEQ ID NO: 3075 - protein, 922 aa, Artificial; identical to SEQ ID NO: 2980
  Synthetic

SEQ ID NO: 3076 - protein, 925 aa, Artificial; identical to SEQ ID NO: 2987
  Synthetic

SEQ ID NO: 3077 - protein, 928 aa, Artificial
  Synthetic
MAKKNKMKPRELREAQKKARQLKAAEINNNAAPAIAAMPAAEVIAPAAEKKKSSVKAAGMKSILVSKNKMYITSFGKGNSAVLEYEVDKVDNNDYNQTQLSSEDSSNIELRGVTKVNITFSSKHGLESGVEINTSNPTHRSGESSPVRWDMLGLKSELEKRFFGKTFDDNIHIQLIYNILDIEKILAVYVTNIVYALNNMLGVKGSESHDDFIGYLSTNNTYDVFIDPDNSSLSDDKKANVRKSLSKFNALLKTKRLGYFGLEEPKTKDNRVSEAYKKRVYHMLAIVGQIRQCVFHDLSEHLEYDLYSFIDNSKKVYRECRETLDYLVDERFDSINKGFIQGNKVNISLLIDMMKGYEADDIIRLYYDFIVLKSQKNLGFSIKKLREKMLDEYGFRFKDKQYDSVRSKMYKLMDFLLFCNYYRNDVVAGEALVRKLRFSMTDDEKEGIYADEAAKLWGKFRNDFENIADHMNGDVIKELGKADMDFDEKILDSEKKNASDLLYFSKMIYMLTYFLDGKEINDLLTTLISKFDNIKEFLKIMKSSAVDVECELTAGYKLFNDSQRITNELFIVKNIASMRKPAASAKLTMFRDALTILGIDDNITDDRISEILKLKEKGKGIHGLRNFITNNVIESSRFVYLIKYANAQKIREVAKNEKVVMFVLGGIPDTQIERYYKSCVEVTDMNSSLEAKRSELARMIKNIRFDDFKNVKQQAKGRENVAKERAKAVIGLYLTVMYLLVKNLVNVNARYVIAIHCLERDFGLYKEIIPELASKNLKNDYRILSQTLCELCDDRDKSPNLFLKKNKRLRKCVEVDINNADSSMTRKYRNCIAHLTVVRELKEYIGDIRTVDSYFSIYHYVMQRCITKRENDTKQEDKIKYEDDLLKNHGYTKDFVKALNSPFGYNIPRFKNLSIEQLFDRNEYLTEK

SEQ ID NO: 3078 - protein, 925 aa, Artificial
  Synthetic
MAKKNKMKPRELREAQKKARQLKAAEINNNAAPAIAAMPAAEVIAPAAEKKKSSVKAAGMKSILVSENKMYITSFGKGNSAVLEYEVDKVDNNNYNKTQLSSKDNSNIELGDVNEVNITFSSKRGNEGGVEINTSNPTHRSGESSPVRWDMLGLKSELEKRFFGKTFDDNIHIQLIYNILDIEKILAVYVTNIVYALNNMLGIKKSESYDDFMGYLSARNTYEVFTHPDKSNLSDKAKGNIKKSFSTFNDLLKTKRLGYFGLEEPKTKDTRVSQAYKKRVYHMLAIVGQIRQSVFHDKSSKLDEDLYSFIDIIDSEYRETLDYLVDERFDSINKGFIQGNKVNISLLIDMMKGYETDDIIRLYYDFIVLKSQKNLGFSIKKLREKMLDEYGFRFKDKQYDSVRSKMYKLMDFLLFCNYYRNDVVAGEALVRKLRFSMTDDEKEGTYADEAEKLWGKFRNDFENIAGHMNGDAIKELGKADMDFDEKILDSEKKNASDLLYFSKMIYMLTYFLDGKEINDLLTTLISKFDNIKEFLKIMKSSAVDVECELTAGYKLFNDSQRITNELFIVKNIASMRKPAASAKLTMFRDALTILGIDDNITDDRISEILKLKEKGKGIHGLRNFITNNVIESSRFVYLIKYANAQKIREVAKNEKVVMFVLGGIPDTQIERYYKSCVEFPDMNSSLEAKRSELARMIKNISFDDFKNVKQQAKGRENVAKERAKAVIGLYLTVMYLLVKNLVNVNARYVIAIHCLERDFGLYKEIIPELASKNLKNDYRILSQTLCELCDDRDESPNLFLKKNKRLRKCVEVDINNADSSMTRKYRNCIAHLTVVRELKEYIGDIRTVDSYFSIYHYVMQRCITKREDDTKQEDKIKYEDDLLKNHGYTKDFVKALNSPFGYNIPRFKNLSIEQLFDRNEYLTEK

SEQ ID NO: 3079 - protein, 926 aa, Artificial
  Synthetic
MAKKNKMKPRELREAQKKARQLKVAEINNNAVPAIAAMPAAEAAAPAAEKKKSSVKAAGMKSILVSKNKMYITSFGKGNSAVLEYEVDKVDNDNYNKTQLSSKDNSNIELGDVDEVNITFSSKHGFESGVEINTSNPTHRSGESSPVRWDMLGLKSELEKRFFGKTFDDNIHIQLIYNILDIEKILAVYVTNIVYALNNMLGIKKSESYDDFMGYLSARNTYEVFTHPDKSNLSDKVKGNIKKSLSKFNVLLKTKRLGYFGLEEPKTKDTNALEAYKKRVYHMLAIVGQIRQSVFHDKSSKLHEDLYSFIDIIDSEYRETLDYLVDERFDSINKGFIQGNKVNISLLIDMMKDDYEADDIIRLYYDFIVLKSQKNLGFSIKKLREKMLDEYGFRFKDKQYDSVRSKMYKLMDFLLFCNYYRNDVVAGEALVRKLRFSMTDDEKEGIYADEAEKLWGKFRNDFENIADHMNGDVIKELGKADMDFDEKILDSEKKNASDLLYFSKMIYMLTYFLDGKEINDLLTTLISKFDNIKEFLKIMKSSAVNVECELTAGYKLFNDSQRITNELFIVKNIASMRKPAASAKLTMFRDALTILGIDDKITDDRISEILKLKEKGKGIHGLRNFITNNVIESSRFVYLIKYANAQKIREVAKNEKVVMFVLGGIPDTQIERYYKSCVEFPDMNSSLEAKRSELARMIKNISFDDFKNVKQQAKGRENVAKERAKAVIGLYLTVMYLLVKNLVNVNARYVIAIHCLERDFGLYKEIIPELASKNLKNDYRILSQTLCELCDDRDESPNLFLKKNRRLRKCVEVDINNADSSMTRKYRNCIAHLTVVRELKEYIGDIRTVDSYFSIYHYVMQRCITKREDDTKQEDKIKYEDDLLKNHGYTKDFVKALNSPFGYNIPRFKNLSIEQLFDRNEYLTEK

SEQ ID NO: 3080 - protein, 922 aa, Artificial; identical to SEQ ID NO: 2840
  Synthetic

SEQ ID NO: 3081 - protein, 922 aa, Artificial
  Synthetic
MAKKNKMKPRELREAQKKARQLKAAEIKNDAVPAIAAMPAAEAAAPAVEKKKSSVKAAGMKSILVSENKMYITSFGKGNSAVLEYEVDNNDYNKTQLSSEDNSNIELCDVDEVNITFSSKHGFESGVEINTSNPTHRSGESSPVRGDMLGLKSELEKRFFGKTFDDNIHIQLIYNILDIEKILAVYVTNIVYALNNMLGEGGDESHDDFMGYLSAKNTYDVFTDPDESDLSKNIKGNIKKSLSKFNDLLKTKRLGYFGLEEPKTKDKRVSEAYKKRVYHMLAIVGQIRQSVFHDKSNELDEYLYSFIDIIDSEYRDTLDYLVDERFDSINKGFVQGNKVNISLLIDMMKGYEADDIIRLYYDFIVLKSQKNLGFSIKKLREKMLDEYGFRFKDKQYDSVRSKMYKLMDFLLFCNYYRNDIAAGEALVRKLRFSMTDDEKEGIYADEAEKLWGKFRNDFENIADHMNGDVIKELGKADMDFDEKILDSEKKNASDLLYFSKMIYMLTYFLDGKEINDLLTTLISKFDNIKEFLKIMKSSAVDVECELTAGYKLFNDSQRITNELFIVKNIASMRKPAASAKLTMFRDALTILGIDDKITDDRISEILKLKEKGKGIHGLRNFITNNVIESSRFVYLIKYANAQKIREVAENEKVVMFVLGGIPDTQIERYYKSCVEFPDMNSSLEAKRSELARMIKNISFDDFKNVKQQAKGRENVAKERAKAVIGLYLTVMYLLVKNLVNVNARYVIAIHCLERDFGLYKEIIPELASKNLKNDYRILSQTLCELCDDRDESPNLFLKKNRRLRKCVEVDINNADSSMTRKYRNCIAHLTVVRELKEYIGDIRTVDSYFSIYHYVMQRCITKREDDTKQEDKIKYEDDLLKNHGYTKDFVKALNSPFGYNIPRFKNLSIEQLFDRNEYLTEK

SEQ ID NO: 3082 - protein, 922 aa, Artificial
  Synthetic
MAKKNKMKPRELREAQKKARQLKVAEINNNAAPAIAAMPAAEVIAPVAGKKKSSVKAAGMKSILVSENKMYITSFGKGNSAVLEYEVDKVDNDNYNKTQLSSEDSSNIELCGVTKVNITFSSKHGLESGVEINTSNPTHRSGESSPVRWDMLGLKSELEKRFFGKTFYDNIHIQLIYNILDIEKILAVYLTNIVYALNNMLGVKGSESYDDFMGYLSARNTYEVFTHPDKSNLSDKVKGNIKKSLSKFNDLLKTKRLGYFGLEEPKTKDTRVSQAYKKRVYHMLAIVGQIRQSVFHDKSSKLDEDLYSFIDIIDPEYRETLDYLVDERFDSINKGFIQGNKVNISLLIDMMKGYEADDIIRLYYDFIVLKSQKNLGFSIKKLREKMLDEYGFRFKDKQYDSVRSKMYKLMDFLLFCNYYRNDVVAGEALVRKLRFSMTDDEKEGIYADEAEKLWGKFRNDFENIADHMNGDVIKELGKADMDFDEKILDSEKKNASDLLYFSKMIYMLTYFLDGKEINDLLTTLISKFDNIKEFLKIMKSSAVDVECELTAGYKLFNDSQRITNELFIVKNIASMRKPAASAKLTMFRDALTILGIDDKITDDRISEILKLKEKGKGIHGLRNFITNNVIESSRFVYLIKYANAQKIREVAKNEKVVMFVLGGIPDTQIERYYKSCVEFPDMNSSLEAKRSELARMIKNISFDDFKNVKQQAKGRENVAKERAKAVIGLYLTVMYLLVKNLVNVNARYVIAIHCLERDFGLYKEIIPELASKNLKNDYRILSQKLCELCDKSPNLFLKKNERLRKCVEVDINNADSIMTRKYRNCIAHLTVVRELKEYIGDIRAVDSYFSIYHYVMQRCITKREDDTKQEEKIKYEDDLLKNHGYTKDFVKALNSPFGYNIPRFKNLSIEQLFDRNEYLTEK

SEQ ID NO: 3083 - protein, 921 aa, Artificial; identical to SEQ ID NO: 2881
  Synthetic

SEQ ID NO: 3084 - protein, 924 aa, Artificial
  Synthetic
MAKKNKMKPRELREAQKKARQFKAAEINNNAAPAIAAMPAAEVIAPVAEKKKSSVKAAGMKSILVSENKMYITSFGKGNSAVLEYEVDNNDYNKTQLSSKDNSNIELCGVNEVNITFSSKHGFESGVEINTSNPTHRSGESSPVRWDMLGLKSELEKRFFGKTFDDNIHIQLIYNILDIEKILAVYVTNIVYALNNMLGEGDESNYDFMGYLSTFNTYKVFTNPNGSTLSDDKKENIRKSLSKFNALLKTKRLGYFGLEEPKTKDTRVLEAYKKRVYHMLAIVGQIRQCVFHDLSEHSEYDLYSFIDNSKKVYRECRETLDYLVDERFDSINKGFIQGNKVNISLLIDMMKGYEADDIIRLYYDFIVLKSQKNLGFSIKKLREKILDEYGFRFKDKQYDSVRSKMYKLMDFLLFCNYYRNDIAAGESLVRKLRFSMTDDEKEGIYADEAAKLWGKFRNDFENIADHMNGDVIKELGKADMDFDEKILDSEKKNASDLLYFSKMIYMLTYFLDGKEINDLLTTLISKFDNIKEFLKIMKSSAVDVECELTAGYKLFNDSQRITNELFIVKNIASMRKPAASAKLTMFRDALTILGIDDNITDDRISEILKLKEKGKGIHGLRNFITNNVIESSRFVYLIKYANAQKIREVAKNEKVVMFVLGGIPDTQIERYYKSCVEFPDMNSSLEVKRSELARMIKNIRFDDFKNVKQQAKGRENVAKERAKAVIGLYLTVMYLLVKNLVNVNARYVIAIHCLERDFGLYKEIIPELASKNLKNDYRILSQTLCELCDNRDESPNLFLKKNKRLRKCVEVDINNADSSMTRKYRNCIAHLTVVRELKEYIGDIRTVDSYFSIYHYVMQRCITKREDDTKQEDKIKYEDDLLKNHGYTKDFVKALNSPFGYNIPRFKNLSIEQLFDRNEYLTEK

SEQ ID NO: 3085 - protein, 925 aa, Artificial
  Synthetic
MAKKNKMKPRELREAQKKARQLKAAEINNNAAPAIAAMPAAQVIAPAAEKKKSSVKAAGMKSILVSENKMYITSFGKGNSAVLEYEVDKVDNNNYNKTQLSSKDNSNIELGDVNEVNITFSSKHGFESGVEINTSNPTHRSGESSSVRGDMLGLKSELEKRFFGKTFDDNIHIQLIYNILDIEKILAVYVTNIVYALNNMLGVKGSESYDDFMGYLSAQNTYYIFTHPDKSNLSDKVKGNIKKSLSKFNDLLKTKRLGYFGLEEPKTKDKRVSEAYKKRVYHMLAIVGQIRQSVFHDKSNELDEYLYSFIDIIDSEYRDTLDYLVDERFDSINKGFVQGNKVNISLLIDMMKGYEADDIIRLYYDFIVLKSQKNLGFSIKKLREKMLDEYGFRFKDKQYDSVRSKMYKLMDFLLFCNYYRNDIAAGEALVRKLRFSMTDDEKEGLYADEAAKLWGKFRNDFENIADHMNGDVIKELGKADMDFDEKILDSEKKNASDLLYFSKMIYMLTYFLDGKEINDLLTTLISKFDNIKEFLKIMKSSAVNVECELTAGYKLFNDSQRITNELFIVKNIASMRKPVASAKLTMFRDALTILGIDDNITDDRISEILKLKEKGKGIHGLRNFITNNVIESSRFVYLIKYANAQKIREVAKNEKVVMFVLGGIPDTQIERYYKSCVEFPDMNSSLEAKRSELARMIKNIRFDDFKNVKQQAKGRENVAKERAKAVIGLYLTVMYLLVKNLVNVNARYVIAIHCLERDFGLYKEIIPELASKNLKNDYRILSQTLCELCDNRDESPNLFLKKNKRLRKCVEVDINNADSSMTRKYRNCIAHLTVVRELKEYIGDIRTVDSYFSIYHYVMQRCITKREDDTKQEDKIKYEDDLLKNHGYTKDFVKALNSPFGYNIPRFKNLSIEQLFDRNEYLTEK

SEQ ID NO: 3086 - protein, 922 aa, Artificial; identical to SEQ ID NO: 2885
  Synthetic

SEQ ID NO: 3087 - protein, 918 aa, Artificial; identical to SEQ ID NO: 3034
  Synthetic

SEQ ID NO: 3088 - protein, 925 aa, Artificial; identical to SEQ ID NO: 3068
  Synthetic

SEQ ID NO: 3089 - protein, 954 aa, Artificial
  Synthetic
MGKKIHARDLREQRKTDRTEKFADQNKKREAERAVQKKDAAVSVKSVSSVSSKKDNVTKSMAKAAGVKSVFAVGNTVYMTSFGRGNDAVLEQKIVDTSHEPLNIDDPAYQLNVVTMNGYSVTGHRGETVSAVTDNPLRRFNGGKKDEPEQSVPTDMLCLKPTLEKKFFGKEFNDNIHIQLIYNILDIEKILAVYSTNAIYALNNMSADENIENSDFFMKRTTDETFDDFEKKKESTNSREKADFDAFEKFIGNYRLAYFADAFYVNKKNPKGKAKNVLREDKELYSVLTLIGKLRHWCVHSEEGRAEFWLYKLNELKDDFKNVLDVVYNRPVEEINNRFIENNKVNIQILGSVYKNTDIAELVRSYYEFLITKKYKNMGFSIKKLRESMLEGKGYADKEYDSVRNKLYQMTDFILYTGYINEDSDRADDLVNTLRSSLKEDDKTTVYCKEADYLWKKYCESIREVAEALDGDNIKRLSKSNIEIRDNELRKCFISYADSVSEFTKLIYLLTRFLSGKEINDLVTTLINKFDNIRSFLEILDELGLDRTFTAEYSFFEGSTKYLAELVELNSFVKSCSFDINAKRTMYRDALDILGIKSGKTEEDIEKMIDNILQIDANGDKKLKKNNGLRNFIASNVIDSNRFKYLVRYGNPKKIRETAKCKPAVRFVLNEIPDAQIERYYEACCPKNTALCSANKRREKLADMIAEIKFENFSDAGNYQKANVTSKTHEAEIKRKNQAIIRLYLTVMYIMLKNLVNVNARYVIAFHCVERDTKLYAESGLEVGNIEKNKTNLTMAVMGVKLENGIIKTEFDKSLAENAANRYLRNARWYKLILDNLKKSERAVVNEFRNTVCHLNAIRNININIDGIKEVENYFALYHYLIQKHLENRFADKKVERDTGDFISKLEEHKTYCKDFVKAYCTPFGYNLVRYKNLTIDGLFDKNYPGKDDSDKQK

SEQ ID NO: 3090 - protein, 918 aa, Artificial
  Synthetic
MAKKNKMKPRELREAQKKARQLKAAEINNNAVPAIAAMPAAEAAAPAAEKKKSSVKAAGMKSILVSENKMYITSFGKGNSAVLEYEVDNNDYNKTQLSSKDNSNIELGDVNEVNITFSSKRGNESGVEINTSNPTHRSGESSPVRWDMLGLKSELEKRFFGKTFDDNIHIQLIYNILDIEKILAVYVTNIVYALNNMLGEGDESNYDFMGYLSTFNTYKVFTNPNGSTLSDDKKENIRKSLSKFNALLKTKRLGYFGLEEPKTKDTRASEAYKKRVYHMLAIVGQIRQCVFHDKSGAKRFDLYSFINNIDPEYRETLDYLVDERFDSINKGFIQGNKVNISLLIDMMKGYEADDIIRLYYDFIVLKSQKNLGFSIKKLREKMLDEYGFRFKDKQYDSVRSKMYKLMDFLLFCNYYRNDIAAGESLVRKLRFSMTDDEKEGIYADEAAKLWGKFRNDFENIADHMNGDVIKELGKADMDFDEKILDSEKKNASDLLYFSKMIYMLTYFLDGKEINDLLTTLISKFDNIKEFLKIMKSSAVDVECELTAGYKLFNDSQRITNELFIVKNIASMRKPAASAKLTMFRDALTILGIDDKITDDRISEILKLKEKGKGIHGLRNFITNNVIESSRFVYLIKYANAQKIREVAKNEKVVMFVLGGIPDTQIERYYKSCVEFPDMNSSLGVKRSELARMIKNISFDDFKNVKQQAKGRENVAKERAKAVIGLYLTVMYLLVKNLVNVNARYVIAIHCLERDFGLYKEIIPELASKNLKNDYRILSQTLCELCDKSPNLFLKKNERLRKCVEVDINNADSSMTRKYRNCIAHLTVVRELKEYIGDIRTVDSYFSIYHYVMQRCITKREDDIKQEEKIKYEDDLLKNHGYTKDFVKALNSPFGYNIPRFKNLSIEQLFDRNEYLTEK

SEQ ID NO: 3091 - protein, 922 aa, Artificial
  Synthetic
MAKKNKMKPRELREAQKKARQLKAAEINNNAAPAIAAMPAAEVIAPVAEKKKSSVKAAGMKSILVSENKMYITSFGKGNSAVLEYEVDNNDYNQTQLSFKGSSNIELRGVNEVNITFSSKHGFESGVEINTSNPTHRSGESSPVRWDMLGLKSELEKRFFGKTFDDNIHIQLIYNILDIEKILAVYVTNIVYALNNMLGVKGSESHDDFIGYLSTNNIYDVFIDPDNSSLSDDKKANVRKSLSKFNALLKTKRLGYFGLEEPKTKDTRASEAYKKRVYHMLAIVGQIRQCVFHDKSGAKRFDLYSFINNIDPEYRETLDYLVDERFDSINKGFIQGNKVNISLLIDMMKGYEADDIIRLYYDFIVLKSQKNLGFSIKKLREKMLDEYGYRFKDKQYDSVRSKMYKLMDFLLFCNYYRNDVVAGEALVRKLRFSMTDDEKEGIYADEAAKLWGKFRNDFENIADHMNGDVIKELGKADMDFDEKILDSEKKNASDILYFSKMIYMLTYFLDGKEINDLLTTLISKFDNIKEFLKIMKSSAVDVECELTAGYKLFNDSQRITNELFIVKNIASMRKPAASAKLTMFRDALTILGIDDNITDDRISEILKLKEKGKGIHGLRNFITNNVIESSRFVYLIKYANAQKIREVAKNEKVVMFVLGGIPDTQIERYYKSCVEFPDMNSSLEAKRSELARMIKNISFDDFKNVKQQAKGRENVAKERAKAVIGLYLTVMYLLVKNLVNVNARYVIAIHCLERDFGLYKEIIPELASKNLKNDYRILSQTLCELCDDRDESPNLFLKKNRRLRKCVEVDINNADSSMTRKYRNCIAHLTVVRELKEYIGDIRTVDSYFSIYHYVMQRCITKREDDTKQEDKIKYEDDLLKNHGYTKDFVKALNSPFGYNIPRFKNLSIEQLFDRNEYLTEK

SEQ ID NO: 3092 - protein, 918 aa, Artificial; identical to SEQ ID NO: 3034
  Synthetic

SEQ ID NO: 3093 - protein, 922 aa, Artificial; identical to SEQ ID NO: 3070
  Synthetic

SEQ ID NO: 3094 - protein, 922 aa, Artificial
  Synthetic
MAKKNKMKPRELREAQKKARQLKAAEINNNAAPAIAAMPAAEVIAPAAEKKKSSVKAAGMKSILVSENKMYITSFGKGNSAVLEYEVNNNDYNKTQLSSEGSSNIELRGVNEVNITFSSKHGFGSGVEINTSNPTHRSGESSPVRWDMLGLKSELEKRFFGKTFDDNIHIQLIYNILDIEKILAVYVTNIVYALNNMLGIKKSESYDDFMGYLSARNTYEVFTHPDKSNLSDKAKGNIKKSFSTFNDLLKTKRLGYFGLEEPKTKDTRVSQAYKKRVYHMLAIVGQIRQSVFHDKSSKLDEDLYSFIDIIDSEYRETLDYLVDERFDSINKGFIQGNKVNISLLIDMMKGYETDDIIRLYYDFIVLKSQKNLGFSIKKLREKMLDEYGFRFKDKQYDSVRSKMYKLMDFLLFCNYYRNDVVAGEALVRKLRFSMTDDEKEGTYADEAEKLWGKFRNDFENIADHMNGDVIKELGKADMDFDEKILDSEKKNASDLLYFSKMIYMLTYFLDGKEINDLLTTLISKFDNIKEFLKIMKSSAVDVECELTAGYKLFNDSQRITNELFIVKNIASMRKPAASAKLTMFRDALTILGIDDNITDDRISEILKLKEKGKGIHGLRNFITNNVIESSRFVYLIKYANAQKIREVAKNEKVVMFVLGGIPDTQIERYYKSCVEFPDMNSSLEAKRSELARMIKNISFDDFKNVKQQAKGRENVAKERAKAVIGLYLTVMYLLVKNLVNVNARYVIAIHCLERDFGLYKEIVPELASKNLKNDYRILSQTLCELCDDRDESPNLFLKKNKRLRKCVEVDINNADSSMTRKYRNCIAHLTVVREQKEYIGDIRTVDSYFSIYHYVMQRCITKSEDDTKQEEKIKYEDDLLKNHGYTKDFVKALNSPFGYNIPRFKNLSIEQLFDRNEYFTEK

SEQ ID NO: 3095 - protein, 1023 aa, Artificial
  Synthetic
MAKKITAKQKREEKERLNKQKWAKNDSVIIVPETKEEIKTGEIQDNNRKRSRQKSQAKAMGLKAVLSFDNKIAIASFVSSKNAKSSHIERITDKEGTTISVNSKMFESSVNKRDINIEKRITIEEPQQDGTIKKEEKGVKSTTCNPYFKVGGKDYIGIKEIAEEHFFGRAFPNENLRVQIAYNIFDVQKILGTFVNNIIYSFYNLSRDEVQSDNDVIGMLYSISDYDRQKETETFLQAKSLLKQTEAYYAYFDDVFKKNKKPDKNKEGDNSKQYQENLRHNFNILRVLSFLRQICMHAEVHVSDDEGCARTQNYTDSLEALFNISKAFGKKMPELKTLIDNIYSKGINAINDEFVKNGKNNLYILSKVYPNEKREVLLREYYNFVVCKEGSNIGISTRKLKETMIAQNMPSLKEENTYRNKLYTVMNFILVRELKNCATIREQMIKELRANMDEEEGRDRIYSKYAKEIYLYVKDKLKLMLNVFKEEAEGIIIPGKEDPVKFSHGKLDKKEIESFCLTTKNTEDITKVIYFLCKFLDGKEINELCCAMMNKLDGISDLIETAKQCGEDVEFVDQFKCLSKCATMSNQIRIVKNISRMKKEMTIDNDTIFLDALELLGRKIEKYQKDKNGDYVKDEKGKKVYTKDYNNFQDMFFEGKNHRVRNFVSNNVIKSKWFSYVVRYNKPAECQALMRNSKLVKFALDELPDSQIEKYYISVFGEKSSSSNEEMRRELLKKLCDFSVRGFLDEIVLLSEDEMKQKDKFSEKEKKKSLIRLYLTIVYLITKSMVKINTRFSIACATYERDYILLCQSEKAERAWEKGATAFALTRKFLNHDKPTFEQYYTREREISAMPQEKRKELRKENDQLLKKTHYSKHAYCYIVDNVNNLTGAVANDNGRGLPCLSEKNDNANLFVEMRNKIVHLNVVHDMVKYINEIKNITSYYAFFCYVLQRMIIGNNSNEQNKFKAKYSKTLQEFGTYSKDLMWVLNLPFAYNLPRYKNLSNEQLFYDEEERMEKIVGRKNDSR

SEQ ID NO: 3096 - protein, 925 aa, Artificial
  Synthetic
MAKKNKMKPRELREAQKKARQLKAAEINNNAVPAIAAMPAAEVIAPAAEKKKSSVKAAGMKSILVSENKMYITSFGKGNSAVLEYEVDKVDNNNYNKTQLSSESSSNIELCGVTKVNITFSSKHGFGSGVEINTSNPTHRSGESSPVRWDMLGLKSELEKRFFGKTFDDNIHIQLIYNILDIEKILAVYVTNIVYALNNMLGVKGSESYDDFMGYLSAQNTYYIFTHPDKSNLSDKVKGNIKKSLSKFNDLLKTKRLGYFGLEEPKTKDTRVSQAYKKRVYHMLAIVGQIRQCVFHDKSGAKRFDIYSFINNIDPEYRETLDYLVDERFDSINKGFIQGNKVNISLLIDMMKGYEADDIIRLYYDFIVLKSQKNLGFSIKKLREKMLDEYGFRFKDKQYDSVRSKMYKLMDFLLFCNYYRNDVVAGEALVRKLRFSMTDDEKEGIYADEAEKLWGKFRNDFEYIADHMNGDVIKELGKADMDFDEKILDSEKKNASDLLYFSKMIYMLTYFLDGKEINDLLTTLISKFDNIKEFLKIMKSSAVNVECELTAGYKLFNDSQRITNELFIVKNIASMRKPAASAKLTMFRDALTILGIDDNITDDRISEILKLKEKGKGIHGLRNFITNNVIESSRFVYLIKYANAQKIREVAENEKVVMFVLGGIPDTQIERYYKSCVEVPDMNSSLEAKRSELARMIKNISFDDFKNVKQQAKGRENVAKERAKAVIGLYLTVMYLLVKNLVNVNARYVIAIHCLERDFGLYKEIIPELASKNLKNDYRILSQTLCELCDNGDESPNLFLKKNKRLRKCVEVDINNADSSMTRKYRNCIAHLTVVRELKEYIGDIRTVDSYFSIYHYVMQRCITKRENDTKQEEKIKYEDDLLKNHGYTRDFVKALNSPFGYNIPRFKNLSIEQLFDRNEYLTEK

SEQ ID NO: 3097 - protein, 939 aa, Artificial
  Synthetic
MAKKKRITAKERKQNHRESLMKKADSNAEKEKAKKPVVENKPDTAISKDNTPKPNKEIKKSKAKLAGVKWVIKANDDVAYISSFGKGNNSVLEKRIMGDVSSNVNKDSHMYVNPKYTKKNYEIKNGFSSGSSLVTYPNKPDKNSGMDALCLKPYFEKDFFGHIFTDNMHIQAIYNIFDIEKILAKHITNIIYTVNSFDRNYNQSGNDTIGFDINYRVPYSEYGGGKDSNGKPNKISAWKKRENFIKFYNEAKPHLGYYENIFYEHGEPISEEKFYNYLNILNFIRNNTFHYKDNDIELYGENYSEEYVFINCLNEFVKNKFKNVNKNFISNEKNNLYIILKAYGEDTENVEVVKKYSKELYKLSVLKTNKNLGVNVKKLRESAIEYGYCPLPYDKEKEVAKLSSVKHKLYKTYDFVITHYLNSNDKLLLEIVETLRLSKNDDEKENVYKKYAEKLFKADDVINPIKAISKLFAEKGNKLFKEKIIIKKEYIEDVSIDKNIYDFTKVIFFMTCFLDGKEINDLLTNIISKLQIIEDHNNVIKFIAENDDAVYKDYSDKYAIFRNAGKIATELEAIKSIARMENKIENVPQKPLLKDALLSLGVSDDTKVLENTYNKYFDSKEKADKQSQKVSTFLMNNVINNNRFKYVIKYINPADINGLAKNRYLVKFVLSKIPEEQIDSYYKLFSNEEEPSCEEKIKLLTKKISKLNFQTLFENNKIPNVEKERKKAIITLYFTIVYILVKNLVNINGLYTLALYFVERDGYFYKDICGKKDKKKSYNDVDYLLLSEIFSGSKYREETKNLKLPKEKDRDIMKKYLPNDKDREKYNKFFTAYRNNIVHLNIIAKLSELTSNIDKDINSYFDIYHYCTQRVMFDYCKKNNNVVLAKMKDLAHIKSDCDEFSSKHTYPFSSAVLRFMNLPFAYNVPRFKNLSYKKFFDKQ

SEQ ID NO: 3098 - protein, 1011 aa, Artificial
  Synthetic
MVVTYLKWIIILREGTMKMAKKKNAKQRREEEKNRLKAKIEKFKIKYAEQETVDKITEEIAQSDKIMRTESILVQHTKKSLAKASGVKSVFIKDDEVIMTSFGRGNDAVVEKIIKDNNVDEKNTKPAYEIVDIEKNGDLIKVQSRRCKNIESANTELPPEKIGMDLIRCKDKLEEIYFGRTFNDNIHIQLIYNILDIEKILSVYINNAVYALGNLERKENDKEKDLVGYLSARAGYNKVINKAINDEKIKDRIEDLKEFIENGNRLGYFGDIFFKKEEVSKNGKKPKKVEVLKSEKEIFDILALLGSLRQFCFHYDEAVFENEDGVIDKEYNDNSWLYNLEKLEPEFKDTLDYFYNRKINDINKGFIKTNQINLHIICDELGLNWDKEQVVGDYYDFLIAKKYKNIGFSIKKIREHMFDIYEAFDIKDKRFDSVRSIMYKIIDFVIYYSFIHYKQDEVDEIVNYLRSTLSEEQKKEKYIKLAGNIWAEYKTQFNKLKDILLANIKEFSDAKEDDVYYEEFKNFKFNEVGKEKLGENAEYFCKLMYLLTLFLDGKEINDLLTTLINKFDNIRSFVELMKEENIECIFDKKFAFFDESKNVCSTLREINSFARMQKPLNNVSVKREMYKDAIKILLKDTRAEEQNIDRILNEYIPSKEDKGIKKDFRNFIIKNIIKSNRFMYLVKYSNPTDVRNLASNRNVVKFVLNAIPDTQIDRYYKSCIQHYSNEVDKETQIQELTDIITGIDYLDFLDVRQSYRNEDKSKKQAVVTLYLTILYILTKNLVNVNSRYVIALHCLERDSKLYGYTKLSKKNNKKLEKIKPPKYHELTKYFIDNRYFDRKKKNKKYGEYTSKKISTYIETNMKNFIGCEQFRTPERYRDTQIDMFVKYRNSIAHLNAVRKASKYINDIRGFDTYFELYHYIMQRDLKDILEKIAEGAAKETEEGQKQDELLKTYFDNLDKYGTYVKDFVKALNIPFAYNYPRYKNLSIDELFDKNNTRKTIKIQDKKLEERT

SEQ ID NO: 3099 - protein, 922 aa, Artificial
  Synthetic
MAKKNKMKPRELREAQKKARQLKAVEINNNAVPEIAAMPAAEVIAPVAEKKKSSVKAAGMKSILVSENKMYITSFGKGNSAVLEYEVDNNDYNKTQLSSKNSSNIELRGVNEVNITFSSKHGFESGVEINTSNPTHRSGESSPVRGDMLGLKSELEKRFFGKTFDDNIHIQLIYNILDIEKILAVYVTNIVYALNNMLGVKGSESYDDFMGYLSAQNTYYIFTHPDKSNLSDKVKGNIKKSLSKFNDLLKTKRLGYFGLEEPKTKDKRVSEAYKKRVYHMLAIVGQIRQSVFHDKSNELDEYLYSFIDIIDSEYRDTLDYLVDERFDSINKGFVQGNKVNISLLIDMMKGYEADDIIRLYYDFIVLKSQKNLGFSIKKLREKMLDEYGFRFKDKQYDSVRSKMYKLMDFLLFCNYYRNDVVAGEALVRKLRFSMTDDEKEGIYADEAEKLWGKFRNDFENIADHMNGDVIKELGKADMDFDEKILDSEKKNASDLLYFSKMIYMLTYFLDGKEINDLLTTLISKFDNIKEFLKIMKSSAVDVECELTAGYKLFNDSQRITNELFIVKNIASMRKPAASAKLTMFRDALTILGIDDKITDDRISEILKLKEKGKGIHGLRNFITNNVIESSRFVYLIKYANAQKIREVAENEKVVMFVLGGIPDTQIERYYKSCVEFPDMNSPLEAKRSELARMIKNIRFDDFKNVKQQAKGRENVAKERAKAVIGLYLTVMYLLVKNLVNVNARYVIAIHCLERDFGLYKEIIPELASKNLKNDYRILSQTLCELCDDRDESPNLFLKKNKRLRKCVEVDINNADSSMTRKYRNCIAHLTVVRELKEYIGDIRTVDSYFSIYHYVMQRCITKREDDKKQEEKIKYEDDLLKNHGYTKDFVKALNSPFGYNIPRFKNLSIEQLFDRNEYLTEK

SEQ ID NO: 3100 - protein, 925 aa, Artificial; identical to SEQ ID NO: 3085
  Synthetic

SEQ ID NO: 3101 - protein, 924 aa, Artificial
  Synthetic
MAKKNKMKPRELREAQKKARQLKAAEIKNNAVPAIAAMPAAEAAAPAVEKKKSSVKAAGMKSILVSENKMYITSFGKGNSAVLEYEVDKVDNNNYNKTQLSSKDNSNIELGDVNEVNITFSSKRGNESGVEINTSNPTHRSGESSPVRWDMLGLKSELEKRFFGKTFDDNIHIQLIYNILDIEKILAVYVTNIVYALNNMLGLENESNNDFMGYLSAKNTYDVFTDPDESDLSKNIKGNIKKSLSKFNDLLKTKRLGYFGLEEPKTKDKRVSEAYKKRVYHMLAIVGQIRQSVFHDKSNELDEYLYSFIDIIDSEYRETLDYLIDERFDSINKGFIQGNKVNISLLIDMMKGYEADDIIRLYYDFIVLKSQKNLGFSIKKLREKMLDEYGFRFKDKQYDSVRSKMYKLMDFLLFCNYYRNDVAAGEALVRKLRFSMTDDEKEGIYADEAEKLWGKFRNDFENIADHMNGDVIKELGKADMDFDEKILDSEKKNASDLLYFSKMIYMLTYFLDGKEINDLLTTLISKFDNIKEFLKIMKSSAVDVECELTAGYKLFNDSQRITNELFIVKNIASMRKPAASAKLTMFRDALTILGIDDNITDDRISEILKLKEKGKGIHGLRNFITNNVIESSRFVYLIKYANAQKIREVAKNEKVVMFVLGGIPDTQIERYYKSCVEFPDMNSSLEVKRSELARMIKNIRFDDFKNVKQQAKGRENVAKERAKAVIGLYLTVMYLLVKNLVNVNARYVIAIHCLERDFGLYKEIIPELASKNLKNDYRILSQTLCELCDNRDESPNLFLKKNKRLRKCVEVDINNADSSMTRKYRNCIAHLTVVRELKEYIGDIRTVDSYFSIYHYVMQRCITKREDDTKQEDKIKYEDDLLKNHGYTKDFVKALNSPFGYNIPRFKNLSIEQLFDRNEYLTEK

SEQ ID NO: 3102 - protein, 922 aa, Artificial
  Synthetic
MAKKNKMKPRELREAQKKARQLKAAEINNNAVPAIAAMPAAEAAAPAAEKKKSSVKAAGMKSILVSENKMYITSFGKGNSAVLEYEVDNNDYNKTQLSSKDNSNIELCDVDEVNITFSSKHGFESGVKINTSNPTHRSGESSSVRGDMLGLKSELEKRFFGKTFDDNIHIQLIYNILDIEKILAVYVTNIVYALNNMLGLENESNNDFMGYLSAKNTYDVFTDPDESDLSKNIKGNIKKSLSKFNDLLKTKRLGYFGLEEPKTKDKRVSEAYKKRVYHMLAIVGQIRQSVFHDKSNELDEYLYSFIDIIDSEYRETLDYLIDERFDSINKGFIQGNKVNISLLIDMMKDDYEADDIIRLYYDFIVLKSQKNLGFSIKKLREKMLDEYGFRFKDKQYDSVRSKMYKLMDFLLFCNYYRNDVIAGEALVRKLRFSMTDDEKEGIYADEAAKLWGKFRNDFENIADHMNGDVIKELGKADMDFDEKILDSEKKNASDLLYFSKMIYMLTYFLDGKEINDLLTTLISKFDNIKEFLKIMKSSAVNVECELTAGYKLFNDSQRITNELFIVKNIASMRKPAASAKLTMFRDALTILGIDDKITDDRISEILKLKEKGKGIHGLRNFITNNVIESSRFVYLIKYANAQKIREVAENEKVVMFVLGGIPDTQIERYYKSCVEFPDMNSSLEVKRSELARMIKNIRFDDFKNVKQQAKGRENVAKERAKAVIGLYLTVMYLLVKNLVNVNARYVIAIHCLERDFGLYKEIIPELASKNLKNDYRILSQTLCELCDNGDESPNLFLKKNRRLRKCVEVDINNADSSMTRKYRNCIAHLTVVRELKEYIGDIRTVDSYFSIYHYVMQRCITKREDDTKQEDKIKYEDDLLKNHGYTKDFVKALNSPFGYNIPRFKNLSIEQLFDRNEYLTEK

SEQ ID NO: 3103 - protein, 925 aa, Artificial; identical to SEQ ID NO: 2833
  Synthetic

SEQ ID NO: 3104 - protein, 925 aa, Artificial; identical to SEQ ID NO: 2865
  Synthetic

SEQ ID NO: 3105 - protein, 922 aa, Artificial; identical to SEQ ID NO: 2840
  Synthetic

SEQ ID NO: 3106 - protein, 925 aa, Artificial; identical to SEQ ID NO: 3096
  Synthetic

SEQ ID NO: 3107 - protein, 952 aa, Artificial
  Synthetic
MGKKIHARDLREQRKTDRTEKFADQNKKREAERAVQKKDAAVSVKSVSSVSSKKDNATKSMAKAAGVKSVFAVGNTVYMTSFGRGNDAVLEQKIVDTSHEPLNIDDPAYQLNVVTMNGYSVTGHRGETVSAVTDNPLRRFNGGKKDEPEQSVPTDMLCLKPTLEKKFFGKEFNDNIHIQLIYNILDIEKILAVYSTNAIYALNNMSADENIENSDFFMKRTTDETFDDFEKKKESTNSREKADFDAFEKFIGNYRLAYFADAFYVNKKNPKGKARNVLREDKELYSVLTLIGKLRHWCVHSEEGRAEFWLYKLDELKDDFKNVLDVVYNRPVEEINNRFIENNKVNIQILGSVYKNTDIAELVRSYYEFLITKKYKNMGFSIKKLRESMLEGKGYADKEYDSVRNKLYQMTDFILYTGYINEDSDRADDLVNTLRSSLKEDDKTTVYCKEADYLWKKYRESIREVADALDGDNIKKLSKSNIEIQEDKLRKCFISYADSVSEFTKLIYLLTRFLSGKEINDLVTTLINKFDNIRSFLEIMDELGLDRTFTAEYSFFEGSTKYLAELVELNSFVKSCSFDINAKRTMYRDALDILGIKSGKTEEDIEKMIDNILQIDANGDKKLKKNNGLRNFIASNVIDSNRFKYLVRYGNPKKIRETAKCKPAVRFVLNEIPDAQIERYYEACCPENTALCSANKKREKLADMIAEIEFENFSDAGNYQKANVTSKTHEAEIKRKNQSIIRLYLTVMYIMLKNLVNVNARYVIAFHCVERDTKLYAESGLEVGNIEKNKTNLTMAVMGVKLENGIIKTEFDKSLAENAANRYLRNARWYKLILDNLKMSERAVVNEFRNTVCHLNAIRNININIKEIKEVENYFALYHYLIQKHLENRFADNGGSTGDYIGKLEEHKTYCKDFVKAYCTPFGYNLVRYKNLTIDGLFDKNYTGKDDSDKQK

SEQ ID NO: 3108 - protein, 954 aa, Artificial; identical to SEQ ID NO: 2846
  Synthetic

SEQ ID NO: 3109 - protein, 925 aa, Artificial; identical to SEQ ID NO: 2865
  Synthetic

SEQ ID NO: 3110 - protein, 925 aa, Artificial; identical to SEQ ID NO: 2833
  Synthetic

SEQ ID NO: 3111 - protein, 939 aa, Artificial; identical to SEQ ID NO: 2861
  Synthetic

SEQ ID NO: 3112 - protein, 977 aa, Artificial
  Synthetic
MLLSEELYKWGKAGSTMAKKKKTARQLREEMQQQRKQAIQKQQEQRQEKAAAARETAAPEQPAAAPVPKRQRKSLAKAAGLKSNFILDPQRRTTVMTAFGQGSTAILEKQIVDRAISDLQPVQQFQVEPASAAKYRLKNSRVRFPNVTADDPLYRRKDGGFVPGMDALRRKNVLEQRFFGKSFADNIHIQMIYSILDIHKILAAASGHIVHLLNIVNGSKDRDFIGMLAAHVLYNELNEEAKRSIADFCKSPRLIYYSAAFYETLDNGKSERRSNEDIFNILALMTCLRNFSSHHSIAIKVKDYSAAGLYNLRRLGPDMKKMLDTFYTEAFIQLNQSFQDHNTTNLTCLFDILNISDSARQKQLAEEFYRYVVFKEQKNLGFSVRKLREEMLLLPDAAVIADKRYDTCRSKLYNLMDFLILRVYRTGRADRCDKLPEALRAALTDEEKAVVYHKEALSLWNEMRTLILDGLLPQMTPENLSRLSGQKRKGELSLDDAMLKECLYEPGPVPEDAAPEEANAEYFCRMIYLATLFMDGKEINTLLTTLISKFENIAAFLQTMEQLNIEAELGPEYAMFTRSRAVAEQLRVINSFALMKKPQVNAKQQLYRAAVTLLGTEDPDGVTDEMLCIDPVTGKMLPPNQRHHGDTGLRNFIANNVVESRRFQYLIRYSDPAQLHQLASNKKLVRFVLSSIPDTQINRYYETCGQTRLAGRAAKVEFLTDMIAAIRFDQFRDVNQKERGANTQKERYKAMLGLYQTVLYLAVKNLVNINARYVMAFHCVERDMFLYDGELTDPKGESVSAFLAVNGKKGVQPQYLLLTQLFIRRDYLKRSACEQIQHNMENISDRLLREYRNAVAHLNVIAHLADYSADMREITSYYGLYHYLMQRHLFKRHAWQIRQPERPTEEEQKLIEQEQKQLAWEKALFDKTLQYHSYNKDLVKALNAPFGYNLARYKNLSIEPLFSKEAAPAAEIKATHA

SEQ ID NO: 3113 - protein, 925 aa, Artificial; identical to SEQ ID NO: 2865
  Synthetic

SEQ ID NO: 3114 - protein, 921 aa, Artificial
  Synthetic
MAKKNKMKPRELREAQKKARQLKAAEINNNAAPAIAAMPAAEVIAPATEKKKSSVKAAGMKSILVSENKMYITSFGKGNSAVLEYEVDNNDYNKTQLSSKGSSNIELHGVNEVNITFSSKHGFESGVEINTSNPTHRSGESSPVRWDMLGLKSELEKRFFGKTFDDNIHIQLIYNILDIEKILAVYVTNIVYALNNMLGEGDESNYDFMGYLSTFNTYKVFTNPNGSTLSDDKKENIRKSLSKFNALLKTKRLGYFGLEEPKTKDTRASEAYKKRVYHMLAIVGQIRQCVFHDKSGAKRFDLYSFINNIYPEYRDTLDYLVEERLKSINKDFIQGNKVNISLLIDMMKGYEADDIIRIYYDFIVLKSQKNLGFSIKKLREKMLDEYGFRFKDKQYDSVRSKMYKLMDYLLFCNYYRNDVVAGEALVRKLRFSMTDDEKEGIYADEAAKLWGKFRNDFENIADHMNGDVIKELGKADMDFDEKILDSEKKNASDLLYFSKMIYMLTYFLDGKEINDLLTTLISKFDNIKEFLKIMKSSAVDVECELTAGYKLFNDSQRITNELFIVKNIASMRKPAASAKLTMFRDALTILGIDDKITDDRIREILKLKEKGKGIHGLRNFITNNVIESSRFVYLIKYANAQKIREVAKNEKVVMFVLGGIPDTQIERYYKSCVEFPDMNSSLEAKRSELARMIKNISFDDFKNVKQQAKGRENVAKERAKAVIGLYLTVMYLLVKNLVNVNARYVIAIHCLERDFGLYKEIIPELASKNLKNDYRILSQTLCELCDDRDESPNLFLKKNKRLRKCVEVDINNADSSMTRKYRNCIAHLTVVRELKKYIGDIRTVDSYFSIYHYVMQRCITKREDDTKQEEKIKYEDDLLKNHGYTKDFVKALNSPFGYNIPRFKNLSIEQLFDRNEYLTEK

SEQ ID NO: 3115 - protein, 922 aa, Artificial; identical to SEQ ID NO: 2980
  Synthetic

SEQ ID NO: 3116 - protein, 919 aa, Artificial
  Synthetic
MAKKNKMKPRELREAQKKARQLKAAEINNNAAPAIAAMSAAEVIAPAAEKKKSSVKAAGMKSILVSENKMYITSFGKGNSAVLEYEVDNNDYNKTQLSSKDNSNIELGDVNEVNITFSSKHGFGSGVEINTSNPTHRSGESSPVRWDMLGLKSELEKRFFGKTFDDNIHIQLIYNILDIEKILAVYVTNIVYALNNMLGVKGSESYDDFMGYLSAKNTYEVFTHPDKSNLSDKVKGNIKKSFSTFNDLLKTKRLGYFGLEEPKTKDTRVSQAYKKRVYHMLAIVGQIRQSVFHDKSSKLHEDLYSFIDIIDSEYRETLDYLVEERLKSINKDFIEGNKVNISLLIDMMKGYEADDIIRLYYDFIVLKSQKNLGFSIKKLREKMLDEYGFRFKDKQYDPVRSKMYKLMDFLLFCNYYRNDVVTGEALVRKLRFSMTDDEKEGIYADEASKLWGKFRNDFENIADHMNGDVIKELGKADMDFDEKILDSEKKNASDLLYFSKMIYMLTYFLDGKEINDLLTTLISKFDNIKEFLKIMKSSAVDVECELTAGYKLFNDSQRITNELFIVKNIASMRKPASSAKLTMFRDALTILGIDDNITDDRISEILKLKEKGKGIHGLRNFITNNVIESSRFVYLIKYANAQKIRKVAKNEKVVMFVLGGIPDTQIERYYKSCVEFPDMNSSLEVKRSELARMIKNISFDDFKNVKQQAKGRENVAKERAKAVIGLYLTVMYLLVKNLVNVNARYVIAIHCLERDFGLYKEIIPELASKNLKNDYMILSQTLCELCDKSPNLFLKKNERLRKCVEVDINNADSSMTRKYRNCIAHLTVVRELKEYIGDIRTVDSYFSIYHYVMQRCITKREDDTKQEEKIKYEDDLLKNHGYTKDFVKALNSSFGYNIPRFKNLSIEQLFDRNEYLTEK

SEQ ID NO: 3117 - protein, 924 aa, Artificial; identical to SEQ ID NO: 3101
  Synthetic

SEQ ID NO: 3118 - protein, 939 aa, Artificial; identical to SEQ ID NO: 2861
  Synthetic

SEQ ID NO: 3119 - protein, 924 aa, Artificial; identical to SEQ ID NO: 2843
  Synthetic

SEQ ID NO: 3120 - protein, 921 aa, Artificial; identical to SEQ ID NO: 2836
  Synthetic

SEQ ID NO: 3121 - protein, 922 aa, Artificial
  Synthetic
MAKKNKMKPRELREAQKKARQLKAAEINNNAAPAIAAMPAAEVIAPAAEKKKSSVKAAGMKSILVSKNKMYITSFGKGNSAVLEYEVDNNDYNQTQLSSKNSSNIELHGVNEVNITFSSKHGFGSGMKINTSNPTHRSGESSPVRWDMLGLKSELEKRFFGKTFDDNIHIQLIYNILDIEKILAVYVTNIVYALNNMLGEGDDESHDDFMGYLSAKNTYDVFTDPDESDLSKNIKGNIKKSLSKFNDLLKTKRLGYFGLEEPKTKDTNALEAYKKRVYHMLAIVGQIRQSVFHDKSSKLDEDLYSFIDIIDSEYRETLDYLVDERFDSINKGFIQGNKVNISLLIDMMKGYEADDIIRLYYDFIVLKSQKNLGFSIKKLREKMLEEYGYRFKDKQYDSVRSKMYKLMDFLLFCNYYRNDVVAGEALVRKLRFSMTDDEKEGIYADEAAKLWGKFRNDFENIADHMNGDVIKELGKADMDFDEKILDSEKKNASDLLYFSKMIYMLTYFLDGKEINDLLTTLISKFDNIKEFLKIMKSSAVDVECELTAGYKLFNDSQRITNELFIVKNIASMRKPAASAKLTMFRDALTILGIDDNITDDRISEILKLKEKGKGIHGLRNFITNNVIESSRFVYLIKYANAQKIREVAKNEKVVMFVLGGIPDTQIERYYKSCVEFPDMNSSLEAKRSELARMIKNISFDDFKNVKQQAKGRENVAKERAKAVIGLYLTVMYLLVKNLVNVNARYVIAIHCLERDFGLYKEIIPELASKNLKNDYRILSQTLCELCDDRDESPNLFLKKNKRLRKCVEVDINNADSSMTRKYRNCIAHLTVVRELKEYIGDIRTVDSYFSIYHYVMQRCITKREDDIKQEEKIKYEDDLLKNHGYTKDFVKALNSPFGYNIPRFKNLSIEQLFDRNEYLTEK

SEQ ID NO: 3122 - protein, 919 aa, Artificial; identical to SEQ ID NO: 2825
  Synthetic

SEQ ID NO: 3123 - protein, 922 aa, Artificial
  Synthetic
MAKKNKMKPRELREAQKKARQLKAAEINNNAAPAIAAMPAAEVIAPAAEKKKSSVKAAGMKSILVSKNKMYITSFGKGNSAVLEYEVDNNDYNQTQLSSKNSSNIELHGVNEVNITFSSKHGFGSGMKINTSNPTHRSGESSPVRWDMLGLKSELEKRFFGKTFDDNIHIQLIYNILDIEKILAVYVTNIVYALNNMLGEGDDESHDDFMGYLSAKNTYDVFTDPDESDLSKNIKGNIKKSLSKFNDLLKTKRLGYFGLEEPKTKDTNALEAYKKRVYHMLAIVGQIRQSVFHDKSSKLDEDLYSFIDIIDSEYRETLDYLVDERFDSINKGFIQGNKVNISLLIDMMKGYEADDIIRLYYDFIVLKSQKNLGFSIKKLREKMLEEYGYRFKDKQYDSVRSKMYKLMDFLLFCNYYRNDVAAGEALVRKLRFSMTDDEKEGIYADEAAKLWGKFRNDFENIADHMNGDVIKELGKADMDFDEKILDSEKKNASDLLYFSKMIYMLTYFLDGKEINDLLTTLISKFDNIKEFLKIMKSSAVDVECELTAGYKLFNDSQRITNELFIVKNIASMRKPAASAKLTMFRDALTILGIDDNITDDRISEILKLKEKGKGIHGLRNFITNNVIESSRFVYLIKYANAQKIREVAKNEKVVMFVLGGIPDTQIERYYKSCVEFPDMNSSLEAKRSELARMIKNISFDDFKNVKQQAKGRENVAKERAKAVIGLYLTVMYLLVKNLVNVNARYVIAIHCLERDFGLYKEIIPELASKNLKNDYRILSQTLCELCDDRDESPNLFLKKNKRLRKCVEVDINNADSSMTRKYRNCIAHLTVVRELKEYIGDIRTVDSYFSIYHYVMQRCITKREDDIKQEEKIKYEDDLLKNHGYTKDFVKALNSPFGYNIPRFKNLSIEQLFDRNEYLTEK

SEQ ID NO: 3124 - protein, 924 aa, Artificial; identical to SEQ ID NO: 2843
  Synthetic

SEQ ID NO: 3125 - protein, 925 aa, Artificial
  Synthetic
MAKKNKMKPRELREAQKKARQLKAAEINNNAAPAIAAMPAAEVIAPAAEKKKSSVKAAGMKSILVSENKMYITSFGKGNSAVLEYEVDKVDNNNYNKTQLSSKDNSNIELGDVNEVNITFSSKRGNESGVEINTSNPTHRSGESSPVRWDMLGLKSELEKRFFGKTFDDNIHIQLIYNILDIEKILAVYVTNIVYALNNMLGIKKSESYDDFMGYLSARNTYEVFTHPDKSNLSDKAKGNIKKSFSTFNDLLKTKRLGYFGLEEPKTKDTRVSQAYKKRVYHMLAIVGQIRQSVFHDKSSKLDEDLYSFIDIIDSEYRETLDYLVDERFDSINKGFIQGNKVNISLLIDMMKGYEADDIIRLYYDFIVLKSQKNLGFSIKKLREKMLEEYGYRFKDKQYDSVRSKMYKLMDFLLFCNYYRNDVIAGEALVRKLRFSMTDDEKEGIYADEAAKLWGKFRNDFENIADHMNGDAIKELGKADMDFDEKILDSEKKYASDLLYFSKMIYMLTYFLDGKEINDLLTTLISKFDNIKEFLKIMKSSAVDVECELTAGYKLFNDSQRITNELFIVKNIASMRKPAASAKLTMFRDALTILGIDDNITDDRISEILKLKEKGKGIHGLRNFITNNVIESSRFVYLIKYANAQKIREVAKNEKVVMFVLGGIPDTQIERYYKSCVEFPDMNSSLEAKRSELARMIKNISFDDFKNVKQQAKGRENVAKERAKAVIGLYLTVMYLLVKNLVNVNARYVIAIHCLERDFGLYKEIIPELASKNLKNDYRILSQTLCELCDERDKSPNLFLKKNERLRKCVEVDINNADSIMTRKYRNCIAHLTVVRELKEYIGDIRTVDSYFSIYHYVMQRCITKREDDTKQEEKIKYEDDLLKNHGYTKDFVKALNSPFGYNIPRFKNLSIEQLFDRNEYLTEK

SEQ ID NO: 3126 - protein, 922 aa, Artificial; identical to SEQ ID NO: 2933
  Synthetic

SEQ ID NO: 3127 - protein, 921 aa, Artificial
  Synthetic
MAKKNKMKPRELREAQKKARQLKAAEINNNAVPAIAAMPAAEAAAPAAEKKKSSVKAAGMKSILVSENKMYITSFGKGNSAVLEYEVDNNDYNKTQLSSKDNSNIELCDVDEVNITFSSKHGFESGVKINTSNPTHRSGESSSVRGDMLGLKSELEKRFFGKTFDDNIHIQLIYNILDIEKILAVYVTNIVYALNNMLGLENESNNDFMGYLSAKNTYDVFTDPDESDLSKNIKGNIKKSLSKFNDLLKTKRLGYFGLEEPKTKDKRVSEAYKKRVYHMLAIVGQIRQSVFHDKSNELDEYLYSFIDIIDSEYRETLDYLIDERFDSINKGFIQGNKVNISLLIDMMKGYEADDIIRLYYDFIVLKSQKNLGFSIKKLREKMLDEYGFRFKDKQYDSVRSKMYKLMDFLLFCNYHRKDVVAGEALVRKLRFSMTDEEKEGIYADEAAKLWGKFRNDFENIADHMNGDVIKELGKADMDFDEKILDSEKKNASDLLYFSKMIYMLTYFLDGKEINDLLTTLISKFDNIKEFLKIMKSSAVNVECELTTGYKLFNDSQRITNELFIVKNIASMRKPAASAKLTMFRDALTILGIEDNITDDRISEILKLKEKGKGIHGLRNFITNNVIESSRFVYLIKYANAQKIREVAENEKVVMFVLGGIPDTQIERYYKSCVEFPDMNSSMGAKRRELAKMIKSISFENFKDVKQQAKGRENVAKERAKAVIGLYLTVMYLLVKNLVNVNARYVIAIHCLERDFGLYKEIIPELASKNLKNDYRILSQTLCELCDNGDESPNLFLKKNKRLRKCVEVDINNADSNMTRKYRNCIAHLTVVRELKEYIGDIYAVDSYFSIYHYVMQRCITKRENDTEQAEKIKYEDDLFKNHGYTRDFVKALNSPFGYNIPRFKNLSIKQMFDRNEYLTEK

SEQ ID NO: 3128 - protein, 919 aa, Artificial; identical to SEQ ID NO: 3116
  Synthetic

SEQ ID NO: 3129 - protein, 919 aa, Artificial
  Synthetic
MAKKNKMKPRELREAQKKARQLKAAEINNNAAPAIAAMPAAEVIAPAAEKKKSSVKAAGMKSILVSENKMYITSFGKGNSAVLEYEVDNNDYNQTQLSSKDNSNIELGDVNEVNITFSSKRGFESGVEINTSNPTHRSGESSPVRGDMLGLKSELEKRFFGKTFDDNIHIQLIYNILDIEKILAVYVTNIVYALNNMLGIKKSESYDDFMGYLSARNTYEVFTHPDKSNLSDKAKGNIKKSFSTFNDLLKTKRLGYFGLEEPKTKDTRVSQAYKKRVYHMLAIVGQIRQSVFHDKSSKLDEDLYSFIDIIDSEYRETLDYLVDERFDSINKGFIQGNKVNISLLIDMMKGYEPDDIIRLYYDFIVLKSQKNLGFSIKKLREKMLDEYGFRFKDKQYDSVRSKMYKLMDFLLFCNYYRNDVAAGEALVRKLRFSMTDDEKEGIYADEAAKLWGKFRNDFENIADHMNGDVIKELGKADMDFDEKILDSEKKNASDLLYFSKMIYMLTYFLDGKEINDLLTTLISKFDNIKEFLKIMKSSAIDVECELTAGYKLFNDSQRITNELFIVKNIASMRKPAASAKLTMFRDALTILGIDDNITDDRISEILKLKEKGKGIHGLRNFITNNVIESSRFVYLIKYANAQKIREVAKNEKVVMFVLGGIPDTQIERYYKSCVEFPDMNSSLEAKRSELARMIKNISFDDFKNVKQQAKGRENVAKERAKAVIGLYLTVMYLLVKNLVNVNARYVIAIHCLERDFGLYKEIIPELASKNLKNDYRILSQTLCELCDKSPNLFLKKNERLRKCVEVDINNADSIMTRKYRNCIAHLTVVRELKEYIGDIRTVDSYFSIYHYVMQRCITKREDDTKQEDKIKYEDDLLKNHGYTKDFVKALNSPFGYNIPRFKNLSIEQLFDRNEYLTEK

SEQ ID NO: 3130 - protein, 919 aa, Artificial; identical to SEQ ID NO: 2899
  Synthetic

SEQ ID NO: 3131 - protein, 954 aa, Artificial
  Synthetic
MGKKIHARDLREQRKTDRTVKFADQNKKREAERAVQKKDAAVSVKSVPSVSSKKDNVTKSMAKAAGVKSVFAVGNTVYMTSFGRGNDAVLEQKIVDTSHEPLNIDDPAYQLNVVTMNGYSVIGHRGETVSAVTDNPLRRFNGGKKDEPEQSVPTDMLCLKPTLEKKFFGKEFDDNIHIQLIYNILDIEKILAVYSTNAIYALNNMSADENIENSDFFMKRTTDETFDDFEKKKESTNSREKADFDAFEKFIGNYRLAYFADAFYVNKKNPKGKAKNVLREDKELYSVLTLIGKLRHWCVHSEEGRAEFWLYKLDELKDDFKNVLDVVYNRPVEEINNRFIENNKVNIQILGSVYKNTDIAELVRSYYEFLITKKYKNMGFSIKKLRESMLEGKGYADKEYDSVRNKLYQMTDFILYTGYINEDSDRADDLVNTLRSSLKEDDKTTVYCKEADYLWKKYRESIREVADALDVDNIKNLSGSNIEIRDNELRKCFISYADSVSEFTKLIYLLTRFLSGKEINDLVTTLINKFDNIRSFLEIMDELGLDRTFTAEYSFFEDSTKYLAELVELNSFVKSCSFDINAKRTMYRDALDILGIKSGKTEEDIEKMIDNILQIDANGDKKLKKNNGLRNFIASNVIDSNRFKYLVRYGNPKKIRETAKCKPAVRFVLNEIPDAQIERYYEACCPENTALCSANKKREKLADMIAEIEFENFSDAGNYQKANVTSKTHEAEIKRKNQSIIRLYLTVMYIMLKNLVNVNARYVIAFHCVERDTKLYAESGLEVGNIEKNKTNLTMAVMGVKLENGIIKTEFDKSLAENAANRYLRNARWYKLILDNLKKSERAVVNEFRNTVCHLNAIRNININIKEIKEVENYFALYHYLIQKHLENRFADKKVERDTGDFISKLEEHKTYCKDFVKAYCTPFGYNLVRYKNLTIDGLFDKNYPGKDDSDEQK

SEQ ID NO: 3132 - protein, 954 aa, Artificial; identical to SEQ ID NO: 3131
  Synthetic

SEQ ID NO: 3133 - protein, 924 aa, Artificial; identical to SEQ ID NO: 2910
  Synthetic

SEQ ID NO: 3134 - protein, 1001 aa, Artificial
  Synthetic
MGKKIHARDLREQRKNDRTAKFAVQNKKCEAQRAVQKKDAAVSAKSVSSVSSKKDNATKSMAKAAGVKSVFAVGNTVYMTSFGRGNDAVLEQKIVDTSHEPLNIDDPAYQLNVVTMNGYSVTGHRGETVSAVTDNPLRRFNGGKKDEPEQSVPTDMLCLKPTLEKKFFGKEFNDNIHIQLIYNILDIEKILAVYSTNAVYALNNTIADENDENWDLFANFSTDNTYYELRNAAAYKESADDESTDDEKRREAEKKKREAKKAEKILADYEKFRKNNRLAYFADAFYVDKNKSKSKSKDKAEGIQRGKKEIYSILALIAKLRHWCVHSEDGRAEFWLYKLDELKDDFKNVLDVVYNRPVEEINNRFIENNKVNIQILDSVYENTDIAELTRSYYEFLITKKYKNMGFSIKKLRESMLEGKGYADKEYDSVRNKLYQMTDFILYTGYINEDSDRADDLVNTLRSSLKEDDKTTVYCKEADYLWKKYRESIREVADALDGDNIKKLSKSNIEIQEDKLRKCFISYADSVSEFTKLIYLLTRFLSGKEINDLVTTLINKFDNIRSFLEIMDELGLDRTFTAEYSFFEGSTKYLAELVELNSFVKSCSFDMSAKRTMYRDALDILGIESDKTEEDIEKMIDNILQVDANGKKLPNKNHGLRNFIASNVIDSNRFEYLVRYGNPKKIRETAKCEPAVRFVLNEIPDAQIERYYKAYYPDEKSLCLANMQRDKLADMIAEIKFENFSDAGSYQEANATSTRITSEAEIKRKNQAIIRLYLTVMYIMLKNLVNVNARYVIAFHCLERDAKLYSESVLKVGNTNEESRLQTGNTNEEKNKVKLTNLTNLTMAVMGVKLENGTIKTEFDKSLAENAANRYLRNARWYKLILDNLKKSERAVVTEFRNTVCHLNAIRNININIKEVKEVENYFALYHYLIQKHLEKRFADKKVERDTGDFISKLEEHKTYCKDFVKAYCTPFGYNLVRYKNLTIDGLFDKNYPGKDDSDEQK

SEQ ID NO: 3135 - protein, 927 aa, Artificial; identical to SEQ ID NO: 3071
  Synthetic

SEQ ID NO: 3136 - protein, 919 aa, Artificial; identical to SEQ ID NO: 2825
  Synthetic

SEQ ID NO: 3137 - protein, 919 aa, Artificial; identical to SEQ ID NO: 2825
  Synthetic

SEQ ID NO: 3138 - protein, 922 aa, Artificial; identical to SEQ ID NO: 2840
  Synthetic

SEQ ID NO: 3139 - protein, 952 aa, Artificial; identical to SEQ ID NO: 2976
  Synthetic

SEQ ID NO: 3140 - protein, 925 aa, Artificial
  Synthetic
MAKKNKMKPRELREAQKKARQLKAAEINNNAVPAIAAMPAAEVIAPVAGKKKSSVKAAGMKSILVSENKMYITSFGKGNSAVLEYEVDKVDDNDYNKTQLSSKGSSNIELHGVNEVNITFSSKHGFESGVEINTSNPTHRSGESSPVRGDMLGLKSELEKRFFGKTFDDNIHIQLIYNILDIEKILAVYVTNIVYALNNMLGIKDSESYDDFMGYLSAKNTYEVFTHPDKSNLSDKAKGNIKKSFSTFNDLLKTKRLGYFGLEEPKTKDTRVSQAYKKRVYHMLAIVGQIRQCVFHDLSEHSEYDLYSFIDNSKKVYRECRETLDYLVDERFDSINKGFIQGNKVNISLLIDMMKGYEADDIIRLYYDFIVLKSQKNLGFSIKKLREKMLDEYGFRFKDKQYDSVRSKMYKLMDFLLFCNYYRNDVVAGEALVRKLRFSMTDDEKEGTYADEAEKLWGKFRNDFENIADHMNGDAIKELGKADMDFDEKILDSEKKNASDLLYFSKMIYMLTYFLDGKEINDLLTTLISKFDNIKEFLKIMKSSAVDVECELTAGYKLFNDSQRITNELFIVKNIASMRKPAASAKLTMFRDALTILGIDDNITDDRISEILKLKEKGKGIHGLRNFITNNVIESSRFVYLIKYANAQKIREVAKNEKVVMFVLGGIPDTQIERYYKSCVEFPDMNSSLEAKRSELARMIKNISFDDFKNVKQQAKGRENVAKERAKAVIGLYLTVMYLLVKNLVNVNARYVIAIHCLERDFGLYKEIIPELASKNLKNDYRILSQTLCELCDKSPNLFLKKNERLRKCVEVDINNADSSMTRKYRNCIAHLTVVRELKEYIGDIRTVDSYFSIYHYVMQRCITKRENDTKQEDKIKYEDDLLKNHGYTKDFVKALNSPFGYNIPRFKNLSIEQLFDRNEYLTEK

SEQ ID NO: 3141 - protein, 919 aa, Artificial
  Synthetic
MAKKNKMKPRELREAQKKARQFKAAEINNNAAPAIAAMPAAEVIAPVAEKKKSSVKAAGMKSILVSENKMYITSFGKGNSAVLEYEVDNNDYNKTQLSSKDNSNIELCGVNEVNITFSSKHGFESGVEINTSNPTHRSGESSPVRWDMLGLKSELEKRFFGKTFDDNIHIQLIYNILDIEKILAVYVTNIVYALNNMLGVKGSESHDDFIGYLSTNNIYDVFIDPDNSSLSDDKKANVRKSLSKFNVLLKTKRLGYFGLEEPKTKDTRVSQAYKKRVYHMLAIVGQIRQCVFHDKSGAKRFDLYSFINNIDPEYRETLDYLVDERFDSINKGFIQGNKVNISLLIDMMKGYEADDIIRLYYDFIVLKSQKNLGFSIKKLREKMLEEYGYRFKDKQYDSVRSKMYKLMDFLLFCNYYRNDVVAGEALVRKLRFSMTDDEKEGIYADEAEKLWGKFRNDFENIADHMNGDVIKELGKADMDFDEKILDSEKKNASDLLYFSKMIYMLTYFLDGKEINDLLTTLISKFDNIKEFLKIMKSSAVDVECELTAGYRLFNDSQRITNELFIVKNIASMRKPAASAKLTMFRDALTILGIDDKITDDRISEILKLKEKGKGIHGLRNFITNNVIESSRFVYLIKYANAQKIREVAKNEKVVMFVLGGIPDTQIERYYKSCVEFPDMNSSLEAKRSELARMIKNISFDDFKNVKQQAKGRENVAKERAKAVIGLYLTVMYLLVKNLVNVNARYVIAIHCLERDFGLYKEIIPELASKNLKNDYRILSQTLCELCDESPNLFLKKNERLRKCVEVDINNADSSMTRKYRNCIAHLTVVRELKEYIGDIRTVDSYFSIYHYVMQRCITKREDDTKQEEKIKYEDDLLKNHGYTKDFVKALNSPFGYNIPRFKNLSIEQLFDRNEYLTEK

SEQ ID NO: 3142 - protein, 919 aa, Artificial; identical to SEQ ID NO: 2825
  Synthetic

SEQ ID NO: 3143 - protein, 921 aa, Artificial
  Synthetic
MAKKNKMKPRELREAQKKARQLKAAEINNNAAPAIAAMPAAEAAAPAAEKKKSSVKAAGMKSILVSENKMYITSFGKGNSAVLEYEVDNNDYNKTQLSSKGSSNIELHGVNEVNITFSSKHGFESGVKINTSNPTHRSGESSSVRGDMLGLKSELEKRFFGKTFDDNIHIQLIYNILDIEKILAVYVTNIVYALNNMLGLENESNNDFMGYLSAKNTYDVFTDPDESDLSKNIKGNIKKSLSKFNDLLKTKRLGYFGLEEPKTKDKRVSEAYKKRVYHMLAIVGQIRQSVFHDKSNELDEYLYSFIDIIDSEYRETLDYLIDERFDSINKGFIQGNKVNISLLIDMMKGYEADDIIRLYYDFIVLKSQKNLGFSIKKLREKMLDEYGFRFKDKQYDSVRSKMYKLMDFLLFCNYYRNDVVAGEALVRKLRFSMTDDEKEGIYADEAEKLWGKFRNDFENIADHMNGDVIKELGKADMDFDEKILDSEKKNASDLLYFSKMIYMLTYFLDGKEINDLLTTLISKFDNIKEFLKIMKSSAVDVECELTAGYKLFNDSQRITNELFIVKNIASMRKPAASAKLTMFRDALTILGIDDKITDDRISEILKLKEKGKGIHGLRNFITNNVIESSRFVYLIKYANAQKIRKVAENEKVVMFVLGGIPDTQIERYYKSCVEFPDMNSSLEAKRSELARMIKNIRFDDFKNVKQQAKGRENVAKERAKAVIGLYLTVMYLLVKNLVNVNARYVIAIHCLERDFGLYKEIIPELASKNLKNDYRILSQTLCELCDDRDESPNLFLKKNKRLRKCVEVDINNADSSMTRKYRNCIAHLTVVRELKEYIGDIRTVDSYFSIYHYVMQRCITKREDDKKQEEKIKYEDDLLKNHGYTKDFVKALNSPFGYNIPRFKNLSIEQLFDRNEYLTEK

SEQ ID NO: 3144 - protein, 922 aa, Artificial; identical to SEQ ID NO: 2817
  Synthetic

SEQ ID NO: 3145 - protein, 924 aa, Artificial; identical to SEQ ID NO: 2910
  Synthetic

SEQ ID NO: 3146 - protein, 1024 aa, Artificial
  Synthetic
MAKKITAKQRREERERQNKQKWAKKQDDATAVFECEADIKPADSKDEDCANTSIKREKKKTQAKAMGLKTVLGFDNKIAIASFTSSKDSKSSHIERITDPNGKTIREDVRMFDSNVDECSINLEKRMTVEERQKDGTIKKDEKDVKSTICNPYSNECGKDYIGIKSVAEELFFGRTFPNDNLRVQIAYNIFDIQKIFGTYINNIIYSFYNLSRDEFQSDNDVIGTLYMLKDFDGQKETDTFRQAKALLERTEAYYSYFDNVFKKIDKKKKRNDDYEGERNEILRYNFNVLRVLSFLRQICAHAKVKVSSDNDREKGGVFVDSLDALFNISRFFDAVAPELNEVINSVYSKGIDDINDNFVKNGKNNFYILSKIYPEVAREDLLKEYYYFVVSKEGNNIGISTKKLKEAIIAQDMSYIKSKDYDTYRNKLYTVLCFILVKELNERTTIREQMVADLRANMNGDIGREDIYSKYAKIIYAQVKPRFDAMKNVFEEEAKGVIVPDKEDTVKFSNGALDKSEIERFCITSANTDSVAKIIYFLCKFLDGKEINELCCAMMNKLDGINDLIETAEQCGAKIEFVDNFNVLSKCETISDQIRIVKSISKMKKEIDVDNETIFFDAFELLGKRIEKYKKDDSGNVLRNDDGKVLRTKEYNNIRKMLCKKDRRLNFITNSIIKSKWFSYIVRYNQPSECQAIMKNKTLVKFALDELPDLQIQRYFVALYGDEDLPSYGEMRKILLKKLHDFSIRDFDEEIGSLFDEMKRKDKFCESDRKKCLFRLYLTIAYLITKSMVKINTRFSIACATYERDYALLCASNKQERAWSSGATALALTRKFLNQDKLIFEKHYAREGEISKLPKEERKAMRKVNDQLLKQTHFSKHSYCYIVDNVNRLTGGECRTDKRVLPVLNEKNDNAGILPDFRKTIAHLNVVHKMVDYVGEIKGITSYYAFFCYVLQRMPVGNKNEKNALKEKYSETAKSFGTYSKDFMWLINLPFAYNLPRYKNLSNEQLFYDEEERNETEGQIDRL

SEQ ID NO: 3147 - protein, 1024 aa, Artificial; identical to SEQ ID NO: 3146
  Synthetic

SEQ ID NO: 3148 - protein, 954 aa, Artificial
  Synthetic
MGKKIHARDLREQRKTDRTEKFADQNKKREAERAVQKKDAAVSVKSVSSVSSKKDNVTKSMAKAAGVKSVFAVGNTVYMTSFGRGNDAVLEQKIVDTSHEPLNIDDPAYQLNVVTMNGYSVTGHRGETVSAVTDNPLRRFNGGKKDEPEQSVPTDMLCLKPTLEKKFFGKEFNDNIHIQLIYNILDIEKILAVYSTNAIYALNNMSADENIENSDFFMKRTTDETFDDFEKKKESTNSREKADFDAFEKFIGNYRLAYFADAFYVNKKNPKGKARNVLREDKELYSVLTLIGKLRHWCVHSEEGRAEFWLYKLDELKDDFKNVLDVVYNRPVEEINNRFIENNKVNIQILGSVYKNTDIAELVRSYYEFLITKKYKNMGFSIKKLRESMLEGKGYADKEYDSVRNKLYQMTDFILYTGYINEDSDRADDLVNTLRSSLKEDDKTTVYCKEADYLWKKYRESIREVADALDGDNIKRLSKSNIEIQEDKLRKCFISYADSVSEFTKLIYLLTRFLSGKEINDLVTTLINKFDNIRSFLEIMDELGLDRTFTAEYSFFEGSTKYLAELVELNSFVKSCSFDINAKRTMYRDALDILGIKSGKTEEDIEKMIDNILQIDANGDKKLKKNNGLRNFIASNVIDSNRFKYLVRYGNPKKIRETAKCKPAVRFVLNEIPDAQIERYYEACCPKNTALCSANKRREKLADMIAEIEFENFSDAGNYQKANVTSRTSEAEIKRKNQAIIRLYLTVMYIMLKNLVNVNARYVIAFHCVERDTKLYAESGLEVGNIEKNKTNLTMAVMGVKLENGIIKTEFDKSLAENAANRYLRNARWYKLILDNLKKSERAVVNEFRNTVCHLNAIRNININIKEIKEVENYFALYHYLIQKHLENRFADKKVERDTGDFISKLEEHKTYCKDFVKAYCTPFGYNLVRYKNLTIDGLFDKNYPRKDDSDKQK

SEQ ID NO: 3149 - protein, 922 aa, Artificial; identical to SEQ ID NO: 3102
  Synthetic

SEQ ID NO: 3150 - protein, 925 aa, Artificial; identical to SEQ ID NO: 3140
  Synthetic

SEQ ID NO: 3151 - protein, 922 aa, Artificial; identical to SEQ ID NO: 2840
  Synthetic

SEQ ID NO: 3152 - protein, 925 aa, Artificial
  Synthetic
MAKKNKMKPRELREAQKKARQLKAAEINNNAAPAIAAMPAAQVIAPAAEKKKSSVKAAGMKSILVSENKMYITSFGKGNSAVLEYEVDKVDNNNYNKTQLSSKDNSNIELGDVNEVNITFSSKHGFESGVEINTSNPTHRSGESSPVRWDMLGLKSELEKRFFGKTFDDNIHIQLIYNILDIEKILAVYVTNIVYALNNMLGIKGSESYDDFMGYLSARNTYEVFTHPDKSNLSDKVKGNIKKSLSKFNDLLKTKRLGYFGLEEPKTKDTRVSQAYKKRVYHMLAIVGQIRQSVFHDKSSKLDEDLYSFIDIIDSEYRETLDYLVDERFDSINKGFIQGNKVNISLLIDMMKGYEADDIIRLYYDFIVLKSQKNLGFSIKKLREKMLDEYGFRFKDKQYDSVRSKMYKLMDFLLFCNYYRNDVVAGEALVRKLRFSMTDDEKEWIYADEAEKLWGKFRNDFENIADHMNGDVIKELGKADMDFDEKILDSEKKNASDLLYFSKMIYMLTYFLDGKEINDLLTTLISKFDNIKEFLKIMKSSAVDVECELTASYKLFNDSQRITNELFIVKNIASMRKPAASAKLTMFRDALTILGIDDKITDDRISEILKLKEKGKGIHGLRNFITNNVIESSRFVYLIKYANAQKIREVAENEKVVMFVLGGIPDTQIERYYKSCVEFPDMNSSLEVKRSELARMIKNISFDDFKNVKQQAKGRENVAKERAKAVIGLYLTVMYLLVKNLVNVNARYVIAIHCLERDFGLYKEIIPELASKNLKNDYRILSQTLCELCDDRDESPNLFLKKNKRLRKCVEVDINNADSSMTRKYRNCIAHLTVVRELKEYIGDIRTVDSYFSIYHYVMQRCITKREDDKKQEEKIKYEDDLLKNHGYTKDFVKALNSPFGYNIPRFKNLSIEQLFDRNEYLTEK

SEQ ID NO: 3153 - protein, 1024 aa, Artificial; identical to SEQ ID NO: 3146
  Synthetic

SEQ ID NO: 3154 - protein, 922 aa, Artificial; identical to SEQ ID NO: 2946
  Synthetic

SEQ ID NO: 3155 - protein, 922 aa, Artificial
  Synthetic
MAKKNKMKPRELREAQKKARQLKAAEINNNAAPAIAAMPAAEVIAPAAEKKKSSVKAAGMKSILVSENKMYITSFGKGNSAVLEYEVDNNDYNKTQLSSKDNSNIELGDVDEVNITFSSKHGFGSGVEINTSNPTHRSGESSPVRWDMLGLKSELEKRFFGKTFDDNIHIQLIYNILDIEKILAVYVTNIVYALNNMLGVKGSESHDDFIGYLSTNNTYDVFIDPDNSSLSDDKKANVRKSLSKFNVLLKTKRLGYFGLEEPKTKDTRASEAYKKRVYHMLAIVGQIRQCVFHDKSGAKRFDLYSFINNIDPEYRDTLDYLVDERFDSINKGFIQGNKVNISLLIDMMKGYEADDIIRLYYDFIVLKSQKNLGFSIKKLREKMLEEYGYRFKDKQYDSVRSKMYKLMDFLLFCNYYRNDVVAGEALVRKLRFSMTDDEKEGIYADEAAKLWGKFRNDFENIADHMNGDVIKELGKADMDFDEKILDSEKKNASDLLYFSKMIYMLTYFLDGKEINDLLTTLISKFDNIKEFLKIMKSSAVNVECELTAGYKLFNDSQRITNELFIVKNIASMRKPAASAKLTMFRDALTILGIDDKITDDRISEILKLKEKGKGIHGLRNFITNNVIESSRFVYLIKYANAQKIREVAKNEKVVMFVLGGIPDTQIERYYKSCVEFPDMNSSLEVKRSELARMIKNISFDDFKNVKQQAKGRENVAKERAKAVIGLYLTVMYLLVKNLVNVNARYVIAIHCLERDFGLYKEIIPELASKNLKNDYRILSQTLCELCDNRDESPNLFLKKNKRLRKCVEVDINNADSSMTRKYRNCIAHLTVVRELKEYIGDIRTVDSYFSIYHYVMQRCITKREDDKKQEEKIKFEDDLLKNHGYTKDFVKALNSPFGYNIPRFKNLSIEQLFDRNEYLTEK

SEQ ID NO: 3156 - protein, 922 aa, Artificial
  Synthetic
MAKKNKMKPRELREAQKKARQLKAAEINNNAAPAIAAMPAAEVIAPAAEKKKSSVKAAGMKSILVSKNKMYITSFGKGNSAVLEYEVDNNDYNKTQLSSKDNSNIELGDVNEVNITFSSKHGFGSGMKINTSNPTHRSGESSPVRWDMLGLKSELEKRFFGKTFDDNIHIQLIYNILDIEKILAVYVTNIVYALNNMLGVKGSESHDDFIGYLSTNNIYDVFIDPDNSSLSDDKKANVRKSLSKFNVLLKTKRLGYFGLEEPKTKDNRVSEAYKKRVYHMLAIVGQIRQCVFHDKSGAKRFDLYSFINNIDPEYRDTLDYLVEERLKSINKDFIQGNKVNISLLIDMMKGYEADDIIRLYYDFIVLKSQKNLGFSIKKLREKMLDEYGFRFKDKQYDSVRSKMYKLMDFLLFCNYYRNDVVAGEALVRKLRFSMTDDEKEGIYADEAAKLWGKFRNDFENIADHMNGDVIKELGKADMDFDEKILDSEKKNASDLLYFSKMIYMLTYFLDGKEINDLLTTLISKFDNIKEFLKIMKSSAVDVECELTAGYKLFNDSQRITNELFIVKNIASMRKPAASAKLTMFRDALTILGIDDNITDDRISEILKLKEKGKGIHGLRNFITNNVIESSRFVYLIKYANAQKIREVAKNEKVVMFVLGGIPDTQIERYYKSCVEFPDMNSSLEAKRSELARMIKNISFDDFKNVKQQAKGRENVAKERAKAVIGLYLTVMYLLVKNLVNVNARYVIAIHCLERDFGLYKEIIPELASRNLKNDYRILSQTLCELCDNGDESPNLFLKKNKRLRKCVEVDINNADSSMTRKYRNCIAHLTVVRELKEYIGDIRTVDSYFSIYHYVMQRCITKRENDTKQEDKIKYEDDLLKNHGYTKDFVKALNSPFGYNIPRFKNLSIEQLFDRNEYLTEK

SEQ ID NO: 3157 - protein, 928 aa, Artificial
  Synthetic
MAKKNKMKPRELREAQKKARQLKAAEINNNAVPAIAAMPAAEVIAPAAEKKKSSVKAAGMKSILVSENKMYITSFGKGNSAVLEYEVDKVDNNNYNKTQLSSKDNSNIELCGVNEVNITFSSKRGFESGVEINTSNPTHRSGESSPVRGDMLGLKSELEKRFFGKTFDDNIHIQLIYNILDIEKILAVYVTNIVYALNNMLGIKDSESYDDFMGYLSAKNTYEVFTHPDKSNLSDKAKGNIKKSFSTFNDLLKTKRLGYFGLEEPKTKDTRVSQAYKKRVYHMLAIVGQIRQCVFHDLSEHSEYDLYSFIDNSKKVYRECRETLDYLVDERFDSINKGFIQGNKVNISLLIDMMKGYEADDIIRLYYDFIVLKSQKNLGFSIKKLREKMLDEYGFRFKDKQYDSVRSKMYKLMDFLLFCNYYRNDVVAGEALVRKLRFSMTDDEKEGIYADEAAKLWGKFRNDFENIADHMNGDVIKELGKADMDFDEKILDSEKKNASDLLYFSKMIYMLTYFLDGKEINDLLTTLISKFDNIKEFLKIMKSSAVDVECELTVGYKLFNDSQRITNELFIVKNIASMRKPAASAKLTMFRDALAILGIDDNITDDRISEILKLKEKGKGIHGLRNFITNNVIESSRFVYLIKYANAQKIREVAKNEKVVMFVLGGIPDTQIERYYKSCVEFPDMNSSLEAKRSELARMIKNISFDDFKNVKQQAKGRENVAKERAKAVIGLYLTVMYLLVKNLVNVNARYVIAIHCLERDFGLYKEIIPELASKNLKNDYRILSQTLCELCDDRDKSPNLFLKKNKRLRKCVEVDINNADSIMTRKYRNCIAHLTVVRELKEYIGDIRTVDSYFSIYHYVMQRCITKRENDTKQEDKIKYEDDLLKNHGYTKDFVKALNSPFGYNIPRFKNLSIEQLFDRNEYLTEK

SEQ ID NO: 3158 - protein, 922 aa, Artificial; identical to SEQ ID NO: 2946
  Synthetic

SEQ ID NO: 3159 - protein, 918 aa, Artificial
  Synthetic
MAKKNKMKPRELREAQKKARQLKAAEINNNAVPAIAAMPAAEAAAPAAEKKKSSVKAAGMKSILVSENKMYITSFGKGNSAVLEYEVDNNDYNKTQLSSKDNSNIELCDVGKVNITFSSRRGFESGVEINTSNPTHRSGESSSVRGDMLGLKSELEKRFFGKNFDDNIHIQLIYNILDIEKILAVYVTNIVYALNNMLGEGDESNYDFMGYLSTFNTYKVFTNPNGSTLSDDKKENIRKSLSKFNALLKTKRLGYFGLEEPKTKDTRASEAYKKRVYHMLAIVGQIRQCVFHDKSGAKRFDLYSFINNIDPEYRETLDYLVDERFDSINKGFIQGNKVNISLLIDMMKGYEADDIIRLYYDFIVLKSQKNLGFSIKKLREKMLDEYGFRFKDKQYDSVRSKMYKLMDFLLFCNYYRNDIAAGESLVRKLRFSMTDDEKEGIYADEAAKLWGKFRNDFENIADHMNGDVIKELGKADMDFDEKILDSEKKNASDLLYFSKMIYMLTYFLDGKEINDLLTTLISKFDNIKEFLKIMKSSAVDVECELTAGYKLFNDSQRITNELFIVKNIASMRKPAASAKLTMFRDALTILGIDDKITDDRISEILKLKEKGKGIHGLRNFITNNVIESSRFVYLIKYANAQKIREVAKNEKVVMFVLGGIPDTQIERYYKSCVEFPDMNSSLGVKRSELARMIKNISFDDFKNVKQQSKGRENVAKERAKAVIGLYLTVMYLLVKNLVNVNARYVIAIHCLERDFGLYKEIIPELASKNLKNDYRILSQTLCELCDKSPNLFLKKNERLRKCVEVDINNADSSMTRKYRNCIAHLTVVRELKEYIGDIRTVDSYFSIYHYVMQRCITKREDDTKQEEKIKYEDDLLKNHGYTKDFVKALNSPFGYNIPRFKNLSIEQLFDRNEYLTEK

SEQ ID NO: 3160 - protein, 921 aa, Artificial
  Synthetic
MAKKNKMKPRELREAQKKARQLKAAEINNNAAPAIAAMPAAEVIAPAAEKKKSSVKAAGMKSILVSKNKMYITSFGKGNSAVLEYEVDKVDNNDYNKTQLSSKDNSNIELGNVNEVNITFSSRRGFESGVEINTSNPTHRSGESSPVRGDMLGLKSELEKRFFGKTFDDNIHIQLIYNILDIEKILAVYVTNIVYALNNMLGIKGSESDDFMGYLSARNTYEVFTHPDKSNLSDKVKGNIKKSLSKFNDLLKTKRLGYFGLEEPKTKDTRVSQAYKKRVYHMLAIVGQIRQCVFHDKSGAKRFDLYSFINNIDPEYRDTLDYLVEERLKSINKDFIEGNKVNISLLIDMMKGYEADDIIRLYYDFIVLKSQKNLGFSIKKLREKMLDEYGFRFKDKQYDSVRSKMYKLMDFLLFCNYYRNDVVAGEALVRKLRFSMTDDEKEGIYADEAEKLWGKFRNDFENIADHMNGDVIKELGKADMDFDEKILDSEKKNASDLLYFSKMIYMLTYFLDGKEINDLLTTLISKFDNIKEFLKIMKSSAVNVECELTAGYKLFNDSQRITNELFIVKNIASMRKPAASAKLTMFRDALTILGIDDKITDDRISEILKLKEKGKGIHGLRNFITNNVIESSRFVYLIKYANAQKIREVAKNEKVVMFVLGGIPDTQIERYYKSCVEFPDMNSSLEAKRSELARMIKNISFDDFKNVKQQAKGRENVAKERAKAVIGLYLTVMYLLVKNLVNVNARYVIAIHCLERDFGLYKEIIPELASKNLKNDYRILSQTLCELCDKSPNLFLKKNKRLRKCVEVDINNADSSMTRKYRNCIAHLTVVRELKEYIGDIRTVDSYFSIYHYVMQRCITKRENDTKQEDKIKYEDDLLKNHGYTKDFVKALNSPFGYNIPRFKNLSIEQLFDRNEYLTEK

SEQ ID NO: 3161 - protein, 922 aa, Artificial; identical to SEQ ID NO: 2838
  Synthetic

SEQ ID NO: 3162 - protein, 923 aa, Artificial; identical to SEQ ID NO: 2862
  Synthetic

SEQ ID NO: 3163 - protein, 922 aa, Artificial
  Synthetic
MAKKNKMKPRELREAQKKARQLKAAEINNNAAPAIAAMPAAEVIAPAAEKKKSSVKAAGMKSILVSENKMYITSFGKGNSAVLEYEVDNNDYNKTQLSSKDNSNIELGDVDEVNITFSSKHGFGSGVEINTSNPTHRSGESSPVRWDMLGLKSELEKRFFGKTFDDNIHIQFIYNILDIEKILAVYVTNIVYALNNMLGIKDSESYDDFIGYLSARNTYKVFTHPDKSNLSDKAKGNIKKSFSTFNDLLKTKRLGYFGLEEPKTKDTRVLEAYKKRVYYMLAIVGQIRQCVFHDLSEHSEYDLYSFIDNSKKVYRECRETLDYLVDERFDSINKGFIQGNKVNISLLIDMMKGYEADDIIRLYYDFIVLKSQKNLGFSIKKLREKMLDEYGFRFKDKQYDSVRSKMYKLMDFLLFCNYYRNDVVAGEALVRKLRFSMTDDEKEGIYADEAAKLWVKFRNDFENIADHMNGDVIKELGKADMDFDEKILDSEKKNASDLLYFSKMIYMLTYFLDGKEINDLLTTLISKFDNIKEFLKIMKSSAVDVECELTAGYKLFNDSQRITNELFIVKNIASMRKPAASAKLTMFRDALTILGIDDNITDDRISEILKLKEKGKGIHGLRNFITNNVIESSRFVYLIKYANAQKIREVAENEKVVMFVLGGIPDTQIERYYKSCVEFPDMNSSLEVKRSELARMIKNISFDDFKNVKQQAKGRENVAKERAKAVIGLYLTVMYLLVKNLVNVNARYVIAIHCLERDFGLYKEIIPELASKNLKNDYRILSQTLCELCDKSPNLFLKKNERLRKCVEVDINNADSSMTRKYRNCIAHLTVVRELKEYIGDIRTVDSYFSIYHYVMQRCITKREDDTKQEEKIKYEDDLLKNHGYTKDFVKALNSPFGYNIPRFKNLSIEQLFDRNEYLTEK

SEQ ID NO: 3164 - protein, 919 aa, Artificial; identical to SEQ ID NO: 2893
  Synthetic

SEQ ID NO: 3165 - protein, 922 aa, Artificial
  Synthetic
MAKKNKMKPRELREAQKKARQLKAAEINNNAAPAIAAMPAAQVIAPAAEKKKSSVKAAGMKSILVSENKMYITSFGKGNSAVLEYEVNNNDYNKTQLSSEGSSNIELRGVNEVNITFSSKHGFESGVEINTSNPTHRSGESSPVRGDMLGLKSELEKRFFGKTFDDNIHIQLIYNILDIEKILAVYVTNIVYALNNMLGEGDDESHDDFMGYLSAKNTYDVFTDPDESDLSKNIKGNIKKSLSKFNDLLKTKRLGYFGLEEPKTKDNRVSEAYKKRVYHMLAIVGQIRQCVFHDKSGAKRFDLYSFINNIDPEYRDTLDYLVDERFDSINKGFIQGNKVNISLLIDMMKGYEADDIIRLYYDFIVLKSQKNLGFSIKKLREKMLEEYGYRFKDKQYDSVRSKMYKLMDFLLFCNYYRNDVVAGEALVRKLRFSMTDDEKEGIYADEAAKLWGKFRNDFENIADHMNGDVIKELGKADMDFDEKILDSEKKNASDLLYFSKMIYMLTYFLDGKEINDLLTTLISKFDNIKEFLKIMKSSAVDVECELTAGYKLFNDSQRITNELFIVKNIASMRKPAASAKLTMFRDALTILGIDDKITDDRISEILKLKEKGKGIHGLRNFITNNVIESSRFVYLIKYANAQKIREVAENEKVVMFVLGGIPDTQIERYYKSCVEFPDMNSSLEAKRSELARMIKNISFDDFKNVKQQAKGRENVAKERAKAVIGLYLTVMYLLVKNLVNVNARYVIAIHCLERDFGLYKEIIPELASKNLKNDYRILSQTLCELCDDRNESPNLFLKKNKRLRKCVEVDINNADSSMTRKYRNCIAHLTVVRELKEYIGDIRTVDSYFSIYHYVMQRCITKREDDTKQEEKIKYEDDLLKNHGYTKDFVKALNSPFGYNIPRFKNLSIEQLFDRNEYLTEK

SEQ ID NO: 3166 - protein, 922 aa, Artificial; identical to SEQ ID NO: 2840
  Synthetic

SEQ ID NO: 3167 - protein, 954 aa, Artificial
  Synthetic
MGKKIHARDLREQRKTDRTEKFADQNKKREAERAVQKKDAAVSVKSVSSVSSKKDNVTKSMAKAAGVKSVFAVGNTVYMTSFGRGNDAVLEQKIVDTSHEPLNIDDPAYQLNVVTMNGYSVTGHRGETVSAVTDNPLRRFNGGKKDEPEQSVPTDMLCLKPTLEKKFFGKEFNDNIHIQLIYNILDIEKILAVYSTNAIYALNNMSADENIENSDFFMKRTTDETFDDFEKKKESTNSREKADFDAFEKFIGNYRLAYFADAFYVNKKNPKGKARNVLREDKELYSVLTLIGKLRHWCVHSEEGRAEFWLYKLDELKDDFKNVLDVVYNRPVEEINNRFIENNKVNIQILGSVYKNTDIAELVRSYYEFLITKKYKNMGFSIKKLRESMLEGKGYADKEYDSVRNKLYQMTDFILYTGYINEDSDRADDLVNTLRSSLKEDDKTTVYCKEADYLWKKYRESIREVADALDGDNIKRLSKSNIEIQEDKLRKCFISYADSVSEFTKLIYLLTRFLSGKEINDLVTTLINKFDNIRSFLEIMDELGLDRTFTAEYSFFEGSTKYLAELVELNSFVKSCSFDINAKRTMYRDALDILGIKSGKTEEDIEKMIDNILQIDANGDKKLKKNNGLRNFIASNVIDSNRFKYLVRYGNPKKIRETAKCKPAVRFVLNEIPDAQIERYYEACCPKNTALCSANKRREKLADMIAEIEFENFSDAGNYQKANVTSRTSEAEIKRKNQAIIRLYLTVMYIMLKNLVNVNARYVIAFHCVERDTKLYAESGLEVGNIEKNKTNLTMAVMGVKLENGIIKTEFDKSLAENAANRYLRNARWYKLILDNLKKSERAVVNEFRNTVCHLNAIRNININIDGIKEVENYFALYHYLIQKHLENRFADKKVERDTGDFISKLEEHKTYCKDFVKAYCTPFGYNLVRYKNLTIDGLFDKNYPGKDDSDEQK

SEQ ID NO: 3168 - protein, 922 aa, Artificial
  Synthetic
MAKKNKMKPRELREAQKKARQLKAAEIKNNAVPAIAAMPAAEAAAPAVEKKKSSVKAAGMKSILVSENKMYITSFGKGNSAVLEYEVDKVDNNNYNKTQLSSKDNSNIELGDVNEVNITFSSKRGNESGVEINTSNPTHRSGESSPVRWDMLGLKSELEKRFFGKTFDDNIHIQLIYNILDIEKILAVYVTNIVYALNNMLGVKGSESHDDFIGYLSTNNIYDVFIDPDNSSLSDDKKANVRKSLSKFNVLLKTKRLGYFGLEEPKTKDNRVSEAYKKRVYHMLAIVGQIRQCVFHDKSGAKRFDLYSFINNIDPEYRDTLDYLVDERFDSINKGFIQGNKVNISLLIDMMKGYEADDIIRLYYDFIVLKSQKNLGFSIKKLREKMLDEYGFRFKDKQYDSVRSKMYKLMDFLLFCNYYRNDVAAGEALVRKLRFSMTDGEKEGIYADEAEKLWGKFRNDFENIADHMNGDVIKELGKADMDFDEKILDSEKKNASDLLYFSKMIYMLTYFLDGKEINDLLTTLISKFDNIKEFLKIMKSSAVDVECELTAGYKLFNDSQRITNELFIVKNIASMRKPAASAKLTMFRDALTILGIDDNITDDRISEILKLKEKGKGIHGLRNFITNNVIESSRFVYLIKYANAQKIREVAKNEKVVMFVLGGIPDTQIERYYKSCVEFPDMNSSLEVKRSELARMIKNISFDDFKNVKQQAKGRENVAKERAKAVIGLYLTVMYLLVKNLVNVNARYVIAIHCLERDFGLYKEIIPELASKNLKNDYRILSQTLCELCDKSPNLFLKKNERLRKCVEVDINNADSSMTRKYRNCIAHLTVVRELKEYIGDIRTVDSYFSIYHYVMQRCITKREDDKKQEEKIKYEDDLLKNHGYTKDFVKALNSPFGYNIPRFKNLSIEQLFDRNEYLTEK

SEQ ID NO: 3169 - protein, 920 aa, Artificial
  Synthetic
MAKKNKMKPRELREAQKKARQLKVAEINNNAAPAIAAMPAVEVIAPAAEKKKSSVKAAGMKSILVSENKMYITSFGKGNSAVLEYEVDNNDYNKTQLSSKDNSNIELGNVNEVNITFSSRRGFESGVEINTSNPTHRSGESSSVRGDMLGLKSELEKRFFGKTFDDNIHIQLIYNILDIEKILAVYVTNIVYALNNMLGIKGSESYDDFMGYLSARNTYEVFTNPNGSTLSDDKKENIRKSLSKFNALLKTKRLGYFGLEEPKTKDTRVSQAYKKRVYHMLAIVGQIRQSVFHDKSSKLDEDLYSFIDIIDSEYRETLDYLVDERFDSINKGFVQGNKVNISLLIDMMKDDYEADDIIRLYYDFIVLKSQKNLGFSIKKLREKMLDEYGFRFKDKQYDSVRSKMYKLMDFLLFCNYYRNDVVAGEALVRKLRFSMTDDEKEGIYADEAAKLWGKFRNDFENIADHMNGDVIKELGKADMDFDEKILDSEKKNASDLLYFSKMIYMLTYFLDGKEINDLLTTLISKFDNIKEFLKIMKSSAVDVECELTAGYKLFNDSQRITNELFIVKNIASMRKPAASAKLTMFRDALTILGIDDNITDDRISEILKLKEKGKGIHGLRNFITNNVIESSRFVYLIKYANAQKIREVAKNEKVVMFVLGGIPDTQIERYYKSCVEFPDMNSSLEVKRSELARMIKNICFDDFKNVKQQAKGRENVAKERAKAVIGLYLTVMYLLVKNLVNVNARYVIAIHCLERDFGLYKEIVSELASKNLKNDYRILSQTLCELCDKSPNLFLKKNERLRKCVEVDINNADSSMTRKYRNCIAHLTVVRELKEYIGDIRAVDSYFSIYHYVMQRCITKRGNDTKQEDKIKYEDDLLKNHGYTKDFVKALNSPFGYNIPRFKNLSIEQLFDRNEYLTEK

SEQ ID NO: 3170 - protein, 922 aa, Artificial
  Synthetic
MAKKNKMKPRELREAQKKARQLKAAEINNNAAPAIAAMPAAEVIAPAAEKKKSSVKAAGMKSILVSENKMYITSFGKGNSAVLEYEVDKVDNNNYNKTQLSSKDNSNIELGDVNEVNITFSSKRGNESGVEINTSNPTHRSGESSPVRWDMLGLKSELEKRFFGKTFDDNIHIQLIYNILDIEKILAVYVTNIVYALNNMLGIKKSESYDDFMGYLSARNTYEVFTHPDKSNLSDKAKGNIKKSFSTFNDLLKTKRLGYFGLEEPKTKDTRVSQAYKKRVYHMLAIVGQIRQSVFHDKSSKLDEDLYSFIDIIDSEYRETLDYLVDERFDSINKGFIQGNKVNISLLIDMMKGYETDDIIRLYYDFIVLKSQKNLGFSIKKLREKMLDEYGFRFKDKQYDSVRSKMYKLMDFLLFCNYYRNDVVAGEALVRKLRFSMTDDEKEGTYADEAEKLWGKFRNDFENIADHMNGDAIKELGKADMDFDEKILDSEKKNASDLLYFSKMIYMLTYFLDGKEINDLLTTLISKFDNIKEFLKIMKSSAVDVECELTAGYKLFNDSQRITNELFIVKNIASMRKPAASAKLTMFRDALTILGIDDNITDDRISEILKLKEKGKGIHGLRNFITNNVIESSRFVYLIKYANAQKIREVAKNEKVVMFVLGGIPDTQIERYYKSCVEFPDMNSSLEAKRSELARMIKNISFDDFKNVKQQAKGRENVAKERAKAVIGLYLTVMYLLVKNLVNVNARYVIAIHCLERDFGLYKEIIPELASKNLKNDYRILSQTLCELCDKSPNLFLKKNERLRKCVEVDINNADSSMTRKYRNCIAHLTVVRELKEYIGDIRTVDSYFSIYHYVMQRCITKRENDTKQEDKIKYEDDLLKNHGYTKDFVKALNSPFGYNIPRFKNLSIEQLFDRNEYLTEK

SEQ ID NO: 3171 - protein, 939 aa, Artificial; identical to SEQ ID NO: 2818
  Synthetic

SEQ ID NO: 3172 - protein, 922 aa, Artificial; identical to SEQ ID NO: 2849
  Synthetic

SEQ ID NO: 3173 - protein, 921 aa, Artificial
  Synthetic
MAKKNKMKPRELREAQKKARQLKAAEINNNAAPAIAAMPAAEVIAPAAEKKKSSVKAAGMKSILVSENKMYITSFGKGNSAVLEYEVDNNDYNKTQLSSKDNSNIELCDVGKVNITFSSRRGFESGVEINTSNPTHRSGESSSVRGDMLGLKSELEKRFFGKNFDDNIHIQLIYNILDIEKILAVYVTNIVYALNNMLGEGDESNYDFMGYLSTFNTYKVFTNPNGSTLSDDKKENIRKSLSKFNALLKTKRLGYFGLEEPKTKDTRASEAYKKRVYHMLAIVGQIRQCVFHDKSGAKRFDLYSFINNIDPEYRETLDYLVDERFDSINKGFIQGNKVNISLLIDMMKGYEADDIIRLYYDFIVLKSQKNLGFSIKKLREKMLDEYGYRFKDKQYDSVRSKMYKLMDFLLFCNYYRNDVVAGEALVRKLRFSMTDDEKEGIYADEAAKLWGKFRNDFENIADHMNGDVIKELGKADMDFDEKILDSEKKNASDLLYFSKMIYMLTYFLDGKEINDLLTTLISKFDNIKEFLKIMKSSAVDVECELTAGYKLFNDSQRITNELFIVKNIASMRKPAASAKLTMFRDALTILGIDDNITDDRISEILKLKEKGKGIHGLRNFITNNVIESSRFVYLIKYANAQKIREVAKNEKVVMFVLGGIPDTQIERYYKSCVEFPDMNSSLEAKRSELARMIKNISFDDFKNVKQQAKGRENVAKERAKAVIGLYLTLMYLLVKNLVNVNARYVIAIHCLERDFGLYKEIIPELASKNLKNDYRILSQTLCELCDDRDESPNLFLKKNKRLRKCVEVDINNADSSMTRKYRNCIAHLTVVRELKEYIGDIRTVDSYFSIYHYVMQRCITKREDDKKQEEKIKFEDDLLKNHGYTKDFVKALNSPFGYNIPRFKNLSIEQLFDRNEYLTEK

SEQ ID NO: 3174 - protein, 932 aa, Artificial
  Synthetic
MAKKNKMKPRELREAQKKARQLKAAEINNNAIPAIAAMPAAEVIAPAAEKKKSSVKAAGMKSILVSKNKMYITSFGKGNSAVLEYEVDKVDNDNYNKTQLSSKDNSNIELGDVDEVNITFSSKHGFGSGVEINTSNPTHRSGESSPVRWDMLGLKSELEKRFFGKTFDDNIHIQLIYNILDIEKILAVYVTNIVYALNNMLGIKDSESYDDFMGYLSARNTYEVFTHPDKSNLSDKVKGNINKVKCNIKKSFSTFNDLLKTKRLGYFGLEEPKTKDTRVSQAYKKRVYHMLAIVGQIRQCVFHDKSSKLDEDLYSFIDIIDSEYRETLDYLVDERFDSINKGFIQGNKVNISLLIDMMKGYEADDIIRLYYDFIVLKSQKNLGFSIKKLREKMLDEYGFRFKDKQYDSVRSKMYKLMDFLLFCNYYRNDVVAGEALVRKLRFSMTDDEKEGIYADEAAKLWGKFRNDFENIADHMNGDVIKELGKADMDFDEKILDSEKKNASDLLYFSKMIYMLTYFLDGKEINDLLTTLISKFDNIKEFLKIMKSSAVDVECELTAGYKLFNDSQRITNELFIVKNIASMRKPAASAKLTMFRDALTILGIDDNITDDRISEILKLKEKGKGIHGLRNFITNNVIESSRFVYLIKYANAQKIREVAKNEKVVMFVLGGIPDTQIERYYKSCVEFPDMNSSLEAKRSELARMIKNISFDDFKNVKQQAKGRENVAKERAKAVIGLYLTVMYLLVKNLVNVNARYVIAIHCLERDFGLYKEIIPELASKNLKNDYRILSQTLCELCDDRDESPNLFLKKNKRLRKCVEVDINNADSSMTRKYRNCIAHLTVVRELKEYIGDIRTVDSYFSIYHYVMQRCITKRENDTKQEEKIKYEDDLLKNHGYTKDFVKALNSPFGYNIPRFKNLSIEQLFDRNEYLTEK

SEQ ID NO: 3175 - protein, 921 aa, Artificial; identical to SEQ ID NO: 3173
  Synthetic

SEQ ID NO: 3176 - protein, 921 aa, Artificial; identical to SEQ ID NO: 3173
  Synthetic

SEQ ID NO: 3177 - protein, 922 aa, Artificial; identical to SEQ ID NO: 3165
  Synthetic

SEQ ID NO: 3178 - protein, 919 aa, Artificial
  Synthetic
MAKKNKMKPRELREAQKKARQLKAAEINNNAAPAIAAMPAAEVIAPAAEKKKSSVKAAGMKSILVSKNKMYITSFGKGNSAVLEYEVDNDNYNKTQLSSKDNSNIELGDVDEVNITFSSKHGFGSGVEINTSNPTHRSGESSPVRWDMLGLKSELEKRFFGKTFDDNIHIQLIYNILDIEKILAVYVTNIVYALNNMLGIKDSESYDDFMGYLSARNTYEVFTHPDKSNLSDKVKGNIKKSFSTFNDLLKTKRLGYFGLEEPKTKDTRVSQAYKKRVYHMLAIVGQIRQSVFHDKSSKLDEDLYSFIDIIDSEYRETLDYLVDERFDSINKGFIQGNKVNISLLIDMMKGFEADDIIRLYYDFIVLKSQKNLGFSIKKLREKMLDEYGFRFKDKQYDSVRSKMYKLMDFLLFCNYYRNDVVAGEALVRKLRFSMTDDEKEGIYADEAEKLWGKFRNDFENIADHMNGDVIKELGKADMDFDEKILDSEKKNASDLLYFSQMIYMLTYFLDGKEINDLLTTLISKFDNIKEFLKIMKSSAVDVECELTAGYKLFNDSQRITNELFIVKNIASMRKPAASAKLTMFRDALTILGIDDNITDDRISEILKLKEKGKGIHGLRNFITNNVIESSRFVYLIKYANAQKIREVAKNEKVVMFVLGGIPDTQIERYYKSCVEFPDMNSSLEAKRSELARMIKNIRFDDFKNVKQQAKGRENVAKERAKAVIGLYLTVMYLLVKNLVNVNARYVIAIHCLERDFGLYKEIIPELASKNLKNDYRILSQTLCELCDKSPNLFLKKNERLRKCVEVDINNADSSMTRKYRNCIAHLTVVRELKEYIGDIRTVDSYFSIYHYVMQRCITKRENDTKQEDKIKYEDDLLKNHGYTKDFVKALNSPFGYNIPRFKNLSIEQLFDRNEYLTEK

SEQ ID NO: 3179 - protein, 927 aa, Artificial; identical to SEQ ID NO: 3071
  Synthetic

SEQ ID NO: 3180 - protein, 925 aa, Artificial
  Synthetic
MAKKNKMKPRELREAQKKARQLKAAEINNNAAPAIAAMPAAEVIAPAAEKKKSSVKAAGMKSILVSKNKMYITSFGKGNSAVLEYEVDKVDNDNYNKTQLSSEDSSNIELCGVTKVNITFSSKHGLESGVEINTSNPTHRSGESSPVRWDMLGLKSELEKRFFGKTFDDNIHIQLIYNILDIEKILAVYVTNIVYALNNMLGVKGSESYDDFMGYLSAQNTYYIFTHPDKSNLSDKVKGNIKKSLSKFNDLLKTKRLGYFGLEEPKTKDTRVSQAYKKRVYHMLAIVGQIRQSVFHDKSSKLDEDLYSFINNIDPEYRETLDYLVDERFDSINKGFIQGNKVNISLLIDMMKGYEADDIIRLYYDFIVLKSQKNLGFSIKKLREKMLDEYGYRFKDKQYDSVRSKMYKLMDFLLFCNYYRNDVVAGEALVRKLRFSMTDDEKEGIYADEAAKLWGKFRNDFENIADHMNGDVIKELGKADMDFDEKILDSEKKNASDLLYFSKMIYMLTYFLDGKEINDLLTTLISKFDNIKEFLKIMKSSAVDVECELTVGYKLFNDSQRITNELFIVKNIASMRKPAASAKLTMLRDALTILGIDDKITDDRISEILKLKEKGKGIHGLRNFITNNVIESSRFVYLIKYANAQKIREVAENEKVVMFVLGGIPDTQIERYYKSCVEFPDMNSSLEAKRSELARMIKNIRFDDFKNVKQQANGRENVAKERAKAVIGLYLTVMYLLVKNLVNVNARYVIAIHCLERDFGLYKEIIPELASKNLKNDYRILSQTLCELCDDRDESPNLFLKKNKRLRKCVEVDINNADSSMTRKYRNCIAHLTVVRELKEYIGDIRTVDSYFSIYHYVMQRCITKREDDTKQEEKIKYEDDLLKNHGYTKDFVKALNSPFGYNIPRFKNLSIEQLFDRNEYLTEK

SEQ ID NO: 3181 - protein, 921 aa, Artificial
  Synthetic
MAKKNKMKPRELREAQKKARQLKAAEINNNAAPAIAAMPAAEVIAPAAEKKKSSVKAAGMKSILVSENKMYITSFGKGNSAVLEYEVDNNDYNKTQLSSKDNSNIELCDVGKVNITFSSRRGFESGVEINTSNPTHRSGESSSVRGDMLGLKSELEKRFFGKNFDDNIHIQLIYNILDIEKILAVYVTNIVYALNNMLGEGDESNYDFMGYLSTFNTYKVFTNPNGSTLSDDKKENIRKSLSKFNALLKTKRLGYFGLEEPKTKDTRASEAYKKRVYHMLAIVGQIRQCVFHDKSGAKRFDLYSFINNIDPEYRETLDYLVDERFDSINKGFIQGNKVNISLLIDMMKGYEADDIIRLYYDFIVLKSQKNLGFSIKKLREKMLDEYGYRFKDKQYDSVRSKMYKLMDFLLFCNYYRNDVVAGEALVRKLRFSMTDDEKEGIYADEAAKLWGKFRNDFENIADHMNGDVIKELGKADMDFDEKILDSEKKNASDLLYFSKMIYMLTYFLDGKEINDLLTTLISKFDNIKEFLKIMKSSAVDVECELTAGYKLFNDSQRITNELFIVKNIASMRKPAASAKLTMFRDALTILGIDDNITDDRISEILKLKEKGKGIHGLRNFITNNVIESSRFVYLIKYANAQKIREVAKNEKVVMFVLGGIPDTQIERYYKSCVEFPDMNSSLEAKRSELARMIKNISFDDFKNVKQQAKGRENVAKERAKAVIGLYLTVMYLLVKNLVNVNARYVIAIHCLERDFGLYKEIIPELASKNLKNDYRILSQTLCELCDDRDESPNLFLKKNKRLRKCVEVDINNADSSMTRKYRNCIAHLTVVRELKEYIGDIRTVDSYFSIYHYVMQRCITKREDDKKQEEKIKFEDDLLKNHGYTKDFVKALNSPFGYNIPRFKNLSIEQLFDRNEYLTEK

SEQ ID NO: 3182 - protein, 937 aa, Artificial
  Synthetic
MAKKKRITAKERKQNHRESLMKKADSNAEKEKAKKPVVENKPDTAIPKDNTPKPNKEIKKSKAKLAGVKWVIKANDDVAYISSFGKGNNSVLEKRIMGDVSSNVNKDSHMYVNPKYTKKNYEIKNGFSSGSSLVTYPNKPDKNSGMDALCLKPYFEKDFFGHIFTDNMHIQAIYNIFDIEKILAKHITNIIYTVNSFDRNYNQSGNDTIGFDINYRVPYSEYGGGKDSKGNPKNKSQWKKRDNFIKFYNESKPHLGYYENIFYDHGEPISEEKFYNYLNILNFIRNNTFHYKDDDIELYSENYSEEYVFINCLNKFVKNKFKNVNKNFISNEKNNLYIILNAYGKDTENVEVVKKYSKELYKLSVLKTNKNLGVNVKKLRESAIEYGYCPLPYDKEKEVAKLSSVKHKLYKTYDFVITHYLNSNDKLLLEIIETLRLSKNDDEKENVYKKYAEKLFKADDVINPIKAISKLFAEKGNKLFKEKVIIKKEYVEDISIDKNIYDFTKIIFFMTCFLDGKEINDLLTNIISKLQVIEDHNNVIKFISHNKDAVYKDYSDKYAIFRNAGKIATELEAIKSIARMKNKIENAPQEPLLNDALLSLGVSKKDLENTYKKYFDSKEKADKQSQKVSTFLMNNVINNNRFKYVIKYINPADINGLAKNRYLVKFVLSKIPEEQIDSYYKLFSNEEEPSCEEKIKLLTKKISKFNFQTLFENNKIPNVEKERKKAIITLYFTIIYILVKNLVNINGLYTLALYFVERDGYFYKKICGKKDKKKSYEDVDYLLLPEIFSGSKYREETKNLKLPKEKDRDIMKKYLPNEKDREKYNKFFTAYRNNIVHLNIIAKLSKLTKNIDKDINSYFDIYHYCTQRVMFNYCKEKNDVVLAKMKDLAHIKSDCDEFSSKHTYPFSSAVLRFMNLPFAYNVPRFKNLSYKKFFDKQ

SEQ ID NO: 3183 - protein, 920 aa, Artificial; identical to SEQ ID NO: 3169
  Synthetic

SEQ ID NO: 3184 - protein, 922 aa, Artificial
  Synthetic
MAKKNKMKPRELREAQKKARQLKAAEINNNAVPAIAAMPAAEAIAPAAEKKKSSVKAAGMKSILVSENKMYITSFGKGNSAVLEYEVDNNDYNQTQLSSKGSSNIELHGVNEVNITFSSKHGFESGVEINTSNPTHRSGESSPVRWDMLGLKSELEKRFFCKTFDDNIHIQLIYNILDIEKILAVYVTNIVYALNNMLGVKGSESHDDFIGYLSTNNIYDVFIDPDNSSLSDDKKANVRKSLSKFNDLLKTKRLGYFGLEEPKTKDTRVSQAYKKRVYHMLAIVGQIRQCVFHDKSGAKRFDIYSFINNIDPEYRETLDYLVDERFDSINKGFIQGNKVNISLLIDMMKGYEADDIIRLYYDFIVLKSQKNLGFSIKKLREKMLDEYGFRFKDKQYDSVRSKMYKLMDFLLFCNYYRNDVVAGEALVRKLRFSMTDDEKEGIYADEAEKLWGKFRNDFEYIADHMNGDVIKELGKADMDFDEKILDSEKKNASDLLYFSKMIYMLTYFLDGKEINDLLTTLISKFDNIKEFLKIMKSSAVNVECELTAGYKLFNDSQRITNELFIVKNIASMRKPAASAKLTMFRDALTILGIDDNITDDRISEILKLKEKGKGIHGLRNFITNNVIESSRFVYLIKYANAQKIREVAENEKVVMFVLGGIPDTQIERYYKSCVEVPDMNSSLEAKRSELARMIKNISFDDFKNVKQQAKGRENVAKERAKAVIGLYLTVMYLLVKNLVNVNARYVIAIHCLERDFGLYKEIIPELASKNLKNDYRILSQTLCEHCDDRDESPNLFLKKNKRLRKCVEVDINNADSSMTRKYRNCIAHLTVVRELKEYIGDIRTVDSYFSIYHYVMQRCITKREDDKKQEEKIKYEDDLLKNHGYTKDFVKALNSPFGYNIPRFKNLSIEQLFDRNEYLTEK

SEQ ID NO: 3185 - protein, 922 aa, Artificial; identical to SEQ ID NO: 2840
  Synthetic

SEQ ID NO: 3186 - protein, 922 aa, Artificial
  Synthetic
MAKKNKMKPRELREAQKKARQLKAAEINNNAAPAIAAMPAAEVIAPVAEKKKSSVKAAGMKSILVSENKMYITSFGKGNSAVLEYEVDNNDYNKTQLSSKDNSNIELGDVNEVNITFSSKHGFGSGVEINTSNPTHRSGESSPVRGDMLGLKSELEKRFFGKTFDDNIHIQLIYNILDIEKILAVYVTNIVYALNNMLGIKDSESYDDFMGYLSARNTYEVFTHPDKSNLSDKVKGNIKKSLSKFNDLLKTKRLGYFGLEEPKTKDTRASEAYKKRVYHMLAIVGQIRQCVFHDKSGAKRFDLYSFINNIDPEYRDTLDYLVEERLKSINKDFIEGNKVNISLLIDMMKGYEADDIIRLYYDFIVLKSQKNLGFSIKKLREKMLEEYGFRFKDKQYDSVRSKMYKLMDFLLFCNYYRNDVAAGEALVRKLRFSMTDDEKEGIYADEAAKLWGKFRNDFENIADHMNGDVIKELGKADMDFDEKILDSEKKNASDLLYFSKMIYMLTYFLDGKEINDLLTTLISKFDNIKEFLKIMKSSAVDVECELTAGYKLFNDSQRITNELFIVKNIASMRKPAASAKLTMFRDALTILGIDDNITDDRISEILKLKEKGKGIHGLRNFITNNVIESSRFVYLIKYANAQKIREVAKNEKVVMFVLGGIPDTQIERYYKSCVEFPDMNSSLEVKRSELARMIKNISFDDFKNVKQQAKGRENVAKERAKAVIGLYLTVMYLLVKNLVNVNARYVIAIHCLERDFGLYKEIIPELASKNLKNDYRILSQTLCELCDNGDESPNLFLKKNKRLRKCVEVDINNADSSMTRKYRNCIAHLTVVRELKEYIGDIRTVDSYFSIYHYVMQRCITKRGDDTKQEEKIKYEDDLLKNHGYTKDFVKALNSPFGYNIPRFKNLSIEQLFDRNEYLTEK

SEQ ID NO: 3187 - protein, 922 aa, Artificial; identical to SEQ ID NO: 2840
  Synthetic

SEQ ID NO: 3188 - protein, 919 aa, Artificial; identical to SEQ ID NO: 2825
  Synthetic

SEQ ID NO: 3189 - protein, 923 aa, Artificial; identical to SEQ ID NO: 2862
  Synthetic

SEQ ID NO: 3190 - protein, 922 aa, Artificial; identical to SEQ ID NO: 2840
  Synthetic

SEQ ID NO: 3191 - protein, 922 aa, Artificial; identical to SEQ ID NO: 3186
  Synthetic

SEQ ID NO: 3192 - protein, 922 aa, Artificial; identical to SEQ ID NO: 3170
  Synthetic

SEQ ID NO: 3193 - protein, 946 aa, Artificial; identical to SEQ ID NO: 2799
  Synthetic

SEQ ID NO: 3194 - protein, 925 aa, Artificial; identical to SEQ ID NO: 3066
  Synthetic

SEQ ID NO: 3195 - protein, 922 aa, Artificial; identical to SEQ ID NO: 2840
  Synthetic

SEQ ID NO: 3196 - protein, 956 aa, Artificial; identical to SEQ ID NO: 2890
  Synthetic

SEQ ID NO: 3197 - protein, 922 aa, Artificial; identical to SEQ ID NO: 2840
  Synthetic

SEQ ID NO: 3198 - protein, 922 aa, Artificial; identical to SEQ ID NO: 2849
  Synthetic

SEQ ID NO: 3199 - protein, 922 aa, Artificial; identical to SEQ ID NO: 2815
  Synthetic

SEQ ID NO: 3200 - protein, 922 aa, Artificial; identical to SEQ ID NO: 2815
  Synthetic

SEQ ID NO: 3201 - protein, 922 aa, Artificial; identical to SEQ ID NO: 2840
  Synthetic

SEQ ID NO: 3202 - protein, 922 aa, Artificial
  Synthetic
MAKKNKMKPRELREAQKKARQLKAAEINNNAAPAIAAMPAAEVIAPVAGKKKSSVKAAGMKSILVSENKMYITSFGKGNSAVLEYEVDKVDNNDYNQTQLSSKGSSNIELCGVNEVNITFSSKHGFESGVEINTSNPTHRSGESSPVRWDMLGLKSELEKRFFGKTFDDNIHIQLIYNILDIEKILAVYVTNIVYALNNMLGVKGSESHDDFIGYLSTNNIYDVFIDPDNSSLSDDKKANVRKSLSKFNVLLKTKRLGYFGLEEPKTKDTRVSQAYKKRVYHMLAIVGQIRQCVFHDKSGAKRFDLYSFINNIDHEYRETLDYLVDERFDSINKGFIQGNKVNISLLIDMMKGYEADDIIRLYYDFIVLKSQKNLGFSIKKLREKMLEEYGFRFKDKQYDSVRSKMYKLMDFLLFCNYYRNDIAAGEALVRKLRFSMTDDEKEGIYADEAAKLWGKFRNDFENIADHMNGDVIKELGKADMDFDEKILDSEKKNASDLLYFSKMIYMLTYFLDGKEINDLLTTLISKFDNIKEFLKIMKSSAVDVECELTAGYKLFNDSQRITNELFIVKNIASMRKPAASAKLTMFRDALTILGIDDKITDDRISEILKLKEKGKGIHGLRNFITNNVIESSRFVYLIKYANAQKIREVAKNEKVVMFVLGGIPDTQIERYYKSCVEFPDMNSSLEAKRSELARMIKNISFDDFKNVKQQAKGRENVAKERAKAVIGLYLTVMYLLVKNLVNVNARYVIAIHCLERDFGLYKEIIPELASKNLKNDYRILSQTLCELCDKSPNLFLKKNERLRKCVEVDINNADSSMTRKYRNCIAHLTVVRELKEYIGDIRTVDSYFSIYHYVMQRCITKRENDTKQEDKIKYEDDLLKNHGYTKDFVKALNSPFGYNIPRFKNLSIEQLFDRNEYLTEK

SEQ ID NO: 3203 - protein, 922 aa, Artificial; identical to SEQ ID NO: 2840
  Synthetic

SEQ ID NO: 3204 - protein, 922 aa, Artificial; identical to SEQ ID NO: 3163
  Synthetic

SEQ ID NO: 3205 - protein, 922 aa, Artificial; identical to SEQ ID NO: 3163
  Synthetic

SEQ ID NO: 3206 - protein, 954 aa, Artificial
  Synthetic
MGKKIHARDLREQRKTDRTVKFADQNKKREAERAVQKKDAAVSVKSVSSVSSKKDNVTKSMAKAAGVKSVFAVGNTVYMTSFGRGNDAVLEQKIVDTSHEPLNIDDPAYQLNVVTMNGYSVTGHRGETVSAVTDNPLRRFNGGKKGEQGQSVPTDMLCLKPTLEKKFFGKEFNDNIHIQLIYNILDIEKILAVYSTNAIYALNNMSADENIENSDFFMKRTTDETFDDFEKKKESTNSREKADFDAFEKFIGNYRLAYFADAFYVNKKNPKGKARNVLREDKELYSVLTLIGKLRHWCVHSEEGRAEFWLYKLDELKDDFKNVLDVVYNRPVEEINNRFIENNKVNIQILGSVYKNTDIAELVRSYYEFLITKKYKNMGFSIKKLRESMLEGKGYADKEYDSVRNKLYQMTDFILYTGYINEDSDRADDLVNALRSSLKEDDKTTVYCKEADYLWKKYRESIREVAEALDGDNIKRLSKSNIEIQEDKLRKCFISYADSVSEFTKLIYLLTRFLSGKEINDLVTTLINKFDNIRSFLEIMDELGLDRTFTAEYSFFEGSTKYLAELVELNSFVKSCSFDINAKRTMYRDALDILGIKSGKTEEDIEKMIDNILQIDANGDKKLKKNNGLRNFIASNVIDSNRFKYLVRYGNPKKIRETAKCEPAVRFVLNEIPDAQIERYYEACCPKNTALCSANKRREKLADMIAEIEFENFSDAGNYQKANVTSKTHEAEIKRKNQAIIRLYLTVMYIMLKNLVNVNARYVIAFHCVERDTKLYAESGLEVGNIEKNKTNLTMAVMGVKLENGIIKTEFDKSLAENAANRYLRNARWYKLILDNLKKSERAVVNEFRNTVCHLNAIRNININIDGIKEVENYFALYHYLIQKHLEKRFADKKVERDTGDFISKLEEHKTYCKDFVKAYCTPFGYNLVRYKNLTIDGLFDKNYPGKDDSDKQK

SEQ ID NO: 3207 - protein, 918 aa, Artificial; identical to SEQ ID NO: 2830
  Synthetic

SEQ ID NO: 3208 - protein, 925 aa, Artificial
  Synthetic
MAKKNKMKPRELREAQKKARQLKAAEINNNAAPAIAAMPAVEVIAPAAEKKKSSVKAAGMKSILVSENKMYITSFGKGNSAVLEYEVDKMDNNNYNKTQLSSESSSNIKLCGVTKVNITFSSKHGFGSGVEINTSNPTHRSGESSPVRWDMLGLKSELEKRFFGKTFDDNIHIQLIYNILDIEKILAVYVTNIVYALNNMLGVKGSESYDDFMGYLSAQNTYYIFTHPDKSNLSDKVKGNIKKSLSKFNDLLKTKRLGYFGLEEPKTKDTRVSQAYKKRVYHMLAIVGQIRQCVFHDKSGAKRFDIYSFINNIDPEYRETLDYLVDERFDSINKGFIQGNKVNISLLIDMMKGYEADDIIRLYYDFIVLKSQKNLGFSIKKLREKMLDEYGFRFKDKQYDSVRSKMYKLMDFLLFCNYYRNDVVAGEALVRKLRFSMTDDEKEGIYADEAEKLWGKFRNDFEYIADHMNGDVIKELGKADMDFDEKILDSEKKNASDLLYFSKMIYMLTYFLDGKEINDLLTTLISKFDNIKEFLKIMKSSAVDVECELTAGYKLFNDSQRITNELFIVKNIASMRKPAASAKLTMFRDALTILGIDDNITDDRISEILKLKEKGKGIHGLRNFITNNVIESSRFVYLIKYANAQKIREVAENEKVVMFVLGGIPDTQIERYYKSCVEVPDMNSSLEAKRSELARMIKNISFDDFKNVKQQAKGRENVAKERAKAVIGLYLTVMYLLVKNLVNVNARYVIAIHCLERDFGLYKEIIPELASKNLKNDYRILSQTLCELCDNGDESPNLFLKKNKRLRKCVEVDINNADSSMTRKYRNCIAHLTVVRELKEYIGDIRTVDSYFSIYHYVMQRCITKRENDTKQEEKIKYEDDLLKNHGYTRDFVKALNSPFGYNIPRFKNLSIEQLFDRNEYLTEK

SEQ ID NO: 3209 - protein, 923 aa, Artificial; identical to SEQ ID NO: 2862
  Synthetic

SEQ ID NO: 3210 - protein, 922 aa, Artificial
  Synthetic
MAKKNKMKPRELREAQKKARQLKAAEINNNAAPAIAAMPAAEAAAPAAEKKKSSVKAAGMKSILVSENKMYITSFGKGNSAVLEYEVDNNDYNKTQLSSKGSSNIELHGVNEVNITFSSKHGFESGVEINTSNPTHRSGESSPVRGDMLGLKSELEKRFFGKTFDDNIHIQLIYNILDIEKILAVYVTNIVYALNNMLGEGDDESHDDFMGYLSTFNTYKVFTNPNGSTLSDDKKENIRKSLSKFNALLKTKRLGYFGLEEPKTKDTRVSQAYKKRVYHMLAIVGQIRQSVFHDKSSKLHEDLYSFIDIIDSEYRETLDYLVEERLKSINKDFIEGNKVNISLLIDMMKGYEADDIIRLYYDFIVLKSQKNLGFSIKKLREKMLDEYGYRFKDKQYDSVRSKMYKLMDFLLFCNYYRNDVVAGEALVRKLRFSMTDDEKEGIYADEAAKLWGKFRNDFENIADHMNGDVIKELGKADMDFDEKILDSEKKNASDLLYFSKMIYMLTYFLDGKEINDLLTTLISKFDNIKEFLKIMKSSAVDVECELTAGYKLFNDSQRITNELFIVKNIASMRKPAASAKLTMFRDALTILGIDDNITDDRISEILKLKEKGKGIHGLRNFITNNVIESSRFVYLIKYANAQKIREVAKNEKVVMFVLGGIPDTQIERYYKSCVEFPDMNSSLEAKRSELARMIKNISFDDFKNVKQQAKGRENVAKERAKAVIGLYLTVMYLLVKNLVNVNARYVIAIHCLERDFGLYKEIIPELASKNLKNDYRILSQTLCELCDDRDESPNLFLKKNKRLRKCVEVDINNADSSMTRKYRNCIAHLTVVRELKEYIGDIRTVDSYFSIYHYVMQRCITKREDDKKQEEKIKFEDDLLKNHGYTKDFVKALNSPFGYNIPRFKNLSIEQLFDRNEYLTEK

SEQ ID NO: 3211 - protein, 922 aa, Artificial; identical to SEQ ID NO: 3210
  Synthetic

SEQ ID NO: 3212 - protein, 922 aa, Artificial; identical to SEQ ID NO: 3163
  Synthetic

SEQ ID NO: 3213 - protein, 919 aa, Artificial
  Synthetic
MAKKNKMKPRELREAQKKARQLKAAEINNNAVPAIAAMPAAEAAAPAAEKKKSSVKAAGMKSILVSENKMYITSFGKGNSAVLEYEVDNNDYNKTQLSSKDNSNIELCDVNEVNITFSSKHGFESGVEINTSNPTHRSGESSPVRWDMLGLKSELEKRFFGKTFDDNIHIQLIYNILDIEKILAVYITNIVYALNNMLGVKGSESHDDFIGYLSTNNIYDVFIDPDNSSLSDDKKANVRKSLSKFNALLKTKRLGYFGLEEPKTKDNRVSEAYKKRVYHMLAIVGQIRQSVFHDKSSKLHEDLYSFIDIIDSEYRETLDYLVDERFDSINKGFIQGNKVNISLLIDMMKGYEADDIIRLYYDFIVIKSQKNLGFSIKKLREKMLDEYGFRFKDKQYDSVRSKMYKLMDFLLFCNYYRNDVVAGEALVRKLRFSMTDDEKEGIYADEAEKLWGKFRNDFENIADHMNGDVIKELGKADMDFDEKILDSEKKNASDLLYFSKMIYMLTYFLDGKEINDLLTTLISKFDNIKEFLKIMKSSAVNVECELTAGYKLFNDSQRITNELFIVKNIASMRKPAASAKLTMFRDALTILGIDDKITDDRISEILKLKEKGKGIHGLRNFITNNVIESSRFVYLIKYANAQKIREVAKNEKVVMFVLGGIPDTQIERYYKSCVEFPDMNSSLEAKRSELARMIKNISFDDFKNVKQQAKGRENVAKERAKAVIGLYLTVMYLLVKNLVNVNARYVIAIHCLERDFGLYKEIIPELASKNLKNDYRILSQTLCELCDKSPNLFLKKNKRLRKCVEVDINNADSSMTRKYRNCIAHLTVVRELKEYIGDIRTVDSYFSIYHYVMQRCITKRENDTKQEEKIKYEDDLLKNHGYTKDFVKALNSPFGYNIPRFKNLSIEQLFDRNEYLTEK

SEQ ID NO: 3214 - protein, 923 aa, Artificial; identical to SEQ ID NO: 2923
  Synthetic

SEQ ID NO: 3215 - protein, 922 aa, Artificial; identical to SEQ ID NO: 2840
  Synthetic

SEQ ID NO: 3216 - protein, 923 aa, Artificial; identical to SEQ ID NO: 2923
  Synthetic

SEQ ID NO: 3217 - protein, 922 aa, Artificial; identical to SEQ ID NO: 2817
  Synthetic

SEQ ID NO: 3218 - protein, 919 aa, Artificial; identical to SEQ ID NO: 2844
  Synthetic

SEQ ID NO: 3219 - protein, 922 aa, Artificial; identical to SEQ ID NO: 2817
  Synthetic

SEQ ID NO: 3220 - protein, 922 aa, Artificial; identical to SEQ ID NO: 3163
  Synthetic

SEQ ID NO: 3221 - protein, 929 aa, Artificial
  Synthetic
MAKKNKMKPRELREAQKKARQLKAAEINNNAAPAIAAMPAAQVIAPAAEKKKSSVKAAGMKSILVSENKMYITSFGKGNSAVLEYEVDKVDNNNYNKTQLSSKDNSNIELGDVNEVNITFSSKHGFESGVEINTSNPTHRSGESSPVRWDMLGLKSELEKRFFGKTFDDNIHIQLIYNILDIEKILAVYVTNIVYALNNMLGIKGSESYDDFMGYLSARNTYEVFTHPDKSNLSDKVKGNIKKSFSTFNDLLKTKRLGYFGLEEPKTKDTRVSEAYKKRVYHMLAIVGQIRQCVFHDLSEHSEYDLYSFIDNSKKVYRECRETLNYLVDERFDSINKGFIQGNKVNISLLIDMMKDDYEADDIIHLYYDFIVLKSQKNLGFSIKKLREKMLDEYGFRFKDKQYDSVRSKMYKLMDFLLFCNYYRNDVVAGEALVRKLRFSMTDDEKEGIYADEAEKLWGKFRNDFENIADHMNGDVIKELGKADMDFDEKILDSEKKNASDLLYFSKMIYMLTYFLDGKEINDLLTTLISKFDNIKEFLKIMKSSAVDVECELTAGYKLFNDSQRITNELFIVKNIASMRKPAASAKLTMFRDALTILGIDDKITDDRISEILKLKEKGKGIHGLRNFITNNVIESSRFVYLIKYANAQKIREVAKNEKVVMFVLGGIPDTQIERYYKSCVEFPDMNSSLKVKRSELARMIKNIRFDDFKNVKQQAKGRENVAKERAKAVIGLYLTVMYLLVKNLVNVNARYVIAIHCLERDFGLYKEIIPELASKNLKNDYRILSQTLCELCDDRDESPNLFLKKNKRLRKCVEVDINNADSSMTRKYRNCIAHLTVVRELKEYIGDIRTVDSYFSIYHYVMQRCITKREDDKKQEEKIKYEDDLLKNHGYTKDFVKALNSPFGYNIPRFKNLSIEQLFDRNEYLTEK

SEQ ID NO: 3222 - protein, 924 aa, Artificial
  Synthetic
MAKKNKMKPRELREAQKKARQLKAAEINNNAAPAIAAMPAAEVIAPAAEKKKSSVKAAGMKSILVSENKMYITSFGKGNSAVLEYEVDNNDYNKTQLSSKDNSNIELGDVNEVNITFSSKHGFGSGMKINTSNPTHRSGESSPVRWDMLGLKSELEKRFFGKTFDDNIHIQLIYNILDIEKILAVYVTNIVYALNNMLGEGDESNYDFMGYLSTFNTYKVFTNPNGSTLSDDKKENIRKSLSKFNALLKTKRLGYFGLEEPKTKDTRVLEAYKKRVYHMLAIVGQIRQCVFHDLSEHSEYDLYSFIDNSKKVYRECRETLDYLVDERFDSINKGFIQGNKVNISLLIDMMKGYEADDIIRLYYDFIVLKSQKNLGFSIKKLREKILDEYGFRFKDKQYDSVRSKMYKLMDFLLFCNYYRNDIAAGESLVRKLRFSMTDDEKEGIYADEAAKLWGKFRNDFENIADHMNGDVIKELGKADMDFDEKILDSEKKNASDLLYFSKMIYMLTYFLDGKEINDLLTTLISKFDNIKEFLKIMKSSAVDVECELTAGYKLFNDSQRITNELFIVKNIASMRKPAASPNVTMFRDAVTIIRIDDKSTDDRISEILKLKEKGKGIHGLRNFITNNVIESSRFVYLIKYANAQKIREVAKNEKVVMFVLGGIPDTQIERYYKSCVEFPDMNSSLEAKRSELARMIKNIRFDDFKNVKQQAKGRENVAKERAKAVIGLYLTVMYLLVKNLVNVNARYVIAIHCLERDFGLYKEIIPELASKNLKNDYRILSQTLCELCDNGDESPNLFLKKNKRLRKCVEVDINNADSNMTRKYRNCIAHLTVVRELKEYIGDIRTVDSYFSIYHYVMQRCITKREDDTKQEEIIKYEDDLLKNHGYTKDFVKALNSPFGYNIPRFKNLSIEQLFERNEYLTEK

SEQ ID NO: 3223 - protein, 922 aa, Artificial; identical to SEQ ID NO: 2840
  Synthetic

SEQ ID NO: 3224 - protein, 922 aa, Artificial; identical to SEQ ID NO: 2840
  Synthetic

SEQ ID NO: 3225 - protein, 925 aa, Artificial
  Synthetic
MAKKNKMKPRELREAQKKARQLKAAEINNNAVPAIAAMPAAEVIAPAAEKKKSSVKAAGMKSILVSENKMYITSFGKGNSAVLEYEVDKVDNNNYNKTQLSSKDNSNIELGDVNEVNITFSSKRGNESGVEINTSNPTHRSGESSPVRWDMLGLKSELEKRFFGKTFDDNIHIQLIYNILDIEKILAVYVTNIVYALNNMLGIKKSESYDDFMGYLSARNTYEVFTHPDKSNLSDKAKGNIKKSFSTFNDLLKTKRLGYFGLEEPKTKDTRVSQAYKKRVYHMLAIVGQIRQSVFHDKSSKLDEDLYSFIDIIDSEYRETLDYLVDERFDSINKGFIQGNKVNISLLIDMMKGYEADDIIRLYYDFIVLKSQKNLGFSIKKLREKMLDEYGFRFKDKQYDSVRSKMYKLMDFLLFCNYYRNDVVAGEALVRKLRFSMTDDEKEGIYADEAAKLWGKFRNDFENIADHMNGDVIKELGKADMDFDEKILDSEKKNASDLLYFSKMIYMLTYFLDGKEINDLLTTLISKFDNIKEFLKIMKSSAVDVECELTAGYKLFNDSQRITNELFIVKNIASMRKPAASAKLTMFRDALTILGIDDKITDDRISEILKLKEKGKGIHGLRNFITNNVIESSRFVYLIKYANAQKIREVAKNEKVVMFVLGGIPDTQIERYYKSCVEFPDMNSSLEVKRSELARMIKNISFDDFKNVKQQAKGRENVAKERAKAVIGLYLTVMYLLVKNLVNVNARYVIAIHCLERDFGLYKEIIPELASKNLKNDYRILSQTLCELCDERDKSPNLFLKKNERLRKCVEVDINNADSIMTRKYRNCIAHLTVVRELKEYIGDIRTVDSYFSIYHYVMQRCITKRENDTKQEYKIKYEDDLLKNHGYTKDFVKALNSPFGYNIPRFKNLSIEQLFDRNEYLTEK

SEQ ID NO: 3226 - protein, 954 aa, Artificial; identical to SEQ ID NO: 3167
  Synthetic

SEQ ID NO: 3227 - protein, 922 aa, Artificial
  Synthetic
MAKKNKMKPRELREAQKKARQLKAVEINNNAVPEIAAMPAAEVIAPVAEKKKSSVKAAGMKSILVSENKMYITSFGKGNSAVLEYEVDNNDYNKTQLSSKDNSNIELCDVDEVNITFSSKHGFESGVKINTSNPTHRSGESSSVRGDMLGLKSELEKRFFGKTFDDNIHIQLIYNILDIEKILAVYVTNIVYALNNMLGVKDSESYDDFMGYLSAKNTYDVFTDPDESDLSKNIKGNIKKSLSKFNALLKTKRLGYFGLEEPKTKDTRASEAYKKRVYHMLAIVGQIRQCVFHDKSGAKRFDLYSFINNIDPEYRETLDYLVDERFDSINKGFIQGNKVNISLLIDMMKGYEADDIIRLYYDFIVLKSQKNLGFSIKKLREKMLDEYGFRFKDKQYDSVRSKMYKLMDFLLFCNYYRNDIAAGESLVRKLRFSMTDDEKEGIYADEAAKLWGKFRNDFENIADHMNGDVIKELGKADMDFDEKILDSEKKNASDLLYFSKMIYMLTYFLDGKEINDLLTTLISKFDNIKEFLKIMKSSAVDVECELTAGYKLFNDSQRITNELFIVKNIASMRKPAASAKLTMFRDALTILGIDDKITDDRISEILKLKEKGKGIHGLRNFITNNVIESSRFVYLIKYANAQKIREVAKNEKVVMFVLGGIPDTQIERYYKSCVEFPDMNSSLKVKRSELARMIKNIRFDDFKNVKQQAKGRENVAKERAKAVIGLYLTVMYLLVKNLVNVNARYVIAIHCLERDFGLYKEIIPELASKNLKNDYRILSQTLCELCDDRDESPNLFLKKNRRLRKCVEVDINNADSSMTRKYRNCIAHLTVVRELKEYIGDIRTVDSYFSIYHYVMQRCITKREDDTKQEEKIKYEDDLLKNHGYTKDFVKALNSPFGYNIPRFKNLSIEQLFDRNEYLTEK

SEQ ID NO: 3228 - protein, 925 aa, Artificial
  Synthetic
MAKKNKMKPRELREAQKKARQLKAAEINNNAAPAIAAMPAAEVIAPAAEKKKSSVKAAGMKSILVSENKMYITSFGKGNSAVLEYEVDKVDDNDYNKTQLSSKDNSNIELGNVNEVNITFSSRRGFESGVEINTSNPTHRSGESSSVRGDMLGLKSELEKRFFGKTFDDNIHIQLIYNILDIEKILAVYVTNIVYALNNMLGVKGSESYDDFMGYLSAQNTYYIFTHPDKSNLSDKVKGNIKKSLSKFNDLLKTKRLGYFGLEEPKTKDKRVSEAYKKRVYHMLAIVGQIRQSVFHDKSNELDEYLYSFIDIIDSEYRDTLDYLVDERFDSINKGFVQGNKVNISLLIDMMKGYEADDIIRLYYDFIVLKSQKNLGFSIKKLREKMLDEYGFRFKDKQYDSVRSKMYKLMDFLLFCNYYRNDIAAGEALVRKLRFSMTDDEKEGLYADEAAKLWGKFRNDFENIADHMNGDVIKELGKADMDFDEKILDSEKKNASDLLYFSKMIYMLTYFLDGKEINDLLTTLISKFDNIKEFLKIMKSSAVNVECELTAGYKLFNDSQRITNELFIVKNIASMRKPAASAKLTMFRDALTILGIDDNITDDRISEILKLKEKGKGIHGLRNFITNNVIESSRFVYLIKYANAQKIREVAKNEKVVMFVLGGIPDTQIERYYKSCVEFPDMNSSLEVKRSELARMIKNIRFDDFKNVKQQAKGRENVAKERAKAVIGLYLTVMYLLVKNLVNVNARYVIAIHCLERDFGLYKEIIPELASKNLKNDYRILSQTLCELCDNRDESPNLFLKKNKRLRKCVEVDINNADSSMTRKYRNCIAHLTVVRELKEYIGDIRTVDSYFSIYHYVMQRCITKREDDTKQEDKIKYEDDLLKNHGYTKDFVKALNSPFGYNIPRFKNLSIEQLFDRNEYLTEK

SEQ ID NO: 3229 - protein, 922 aa, Artificial
  Synthetic
MAKKNKMKPRELREAQKKARQLKAAEINNNAVPAIAAMPAAEAAAPAAEKKKSSVKAAGMKSILVSENKMYITSFGKGNSAVLEYEVDNNDYNKTQLSSKDNSNIELCDVDEVNITFSSKHGFESGVKINTSNPTHRSGESSSVRGDMLGLKSELEKRFFGKTFDDNIHIQLIYNILDIEKILAVYVTNIVYALNNMLGLENESNNDFMGYLSAKNTYDVFTDPDESDLSKNIKGNIKKSLSKFNDLLKTKRLGYFGLEEPKTKDKRVSEAYKKRVYHMLAIVGQIRQSVFHDKSNELDEYLYSFIDIIDSEYRETLDYLIDERFDSINKGFIQGNKVNISLLIDMMKDDYEADDIIRLYYDFIVLKSQKNLGFSIKKLREKMLDEYGFRFKDKQYDSVRSKMYKLMDFLLFCNYYRNDVVAGESLVRKLRFSMTDDEKEGIYADEAAKLWGKFRNDFENIADHMNGDVIKELGKADMGFDEKILDSEKKNASDLLYFSKMIYMLTYFLDGKEINDLLTTLISKFDNIKEFLKIMKSSAVNVECELTAGYKLFNDSQRITNELFIVKNIASMRKPAASAKLTMFRDALTILGIDDKITDDRISEILKLKEKGKGIHGLRNFITNNVIESSRFVYLIKYANAQKIREVAKNEKVVMFVLGGIPDTQIERYYKSCVEFPDMNSSLKAKRSELARMIKNISFEDFKDVKQQAKGRENVAKERAKAVIGLYLTVMYLLVKNLVNVNARYVIAIHCLERDFGLYKEIIPELASKNLKNDYRILSQMLCELCDDRDKSPNLFLKKNKRLRKCVEVDINNADSSMTRKYRNCIAHLTVVRELKEYIGDIYAVDSYFSIYHYVMQRCITKRENDTKQEEKIKYEDNLLKNHGYTKDFVKALNSPFGYNIPRFKNLSIEQLFDRNEYLTEK

SEQ ID NO: 3230 - protein, 1057 aa, Artificial; identical to SEQ ID NO: 3001
  Synthetic

SEQ ID NO: 3231 - protein, 922 aa, Artificial
  Synthetic
MAKKNKMKPRELREAQKKARQLKAAEINNNAVPATAAMPAAEVIAPAAEKKKSSVKAAGMKSILVSENKMYITSFGKGNSAVLEYEVDNNDYNKTQLSSKDNSNIELGDVNEVNITFSSKHGFESGVKINTSNPTHRSDESSPVRGDMLGLKSELEKRFFGKTFDDNIHIQLIYNILDIEKILAVYVTNIVYALNNMLGIKDSESHDDFIGYLSTNNIYDVFIDPDNSSLSDDKKANVRKSLSKFNALLKTKRLGYFGLEEPKTKDTRVSQAYKKRVYHMLAIVGQIRQCVFHDKSGAKRFDLYSFINNIDPEYRETLDYLVDERFDSINKGFIQGNKVNISLLIDMMKGYEADDIIRLYYDFIVLKSQKNLGFSIKKLREKMLDEYGFRFKDKQYDSVRSKMYKLMDFLLFCNYYRNDVVAGEALVRKLRFSMTDDEKEGIYADEAAKLWGKFRNDFENIADHMNGDAIKELGKADMDFDEKILDSEKKNASDLLYFSKMIYMLTYFLDGKEINDLLTTLISKFDNIKEFLKIMKSSAVDVECELTAGYKLFNDSQRIANELFIVKNIASMRKPAASAKLTMFRDALTILGIDDNITDDRISEILKLKEKGKGIHGLRNFITNNVIESSRFVYLIKYANAQKIREVAKNEKVVMFVLGGIPDTQIERYYKSCVEFPDMNSSLEAKRSELARMIKNISFDDFKNVKQQAKGRENVAKERAKAVIGLYLTVMYLLVKNLVNVNARYVIAIHCLERDFGLYKEIIPELASKNLKNDYRILSQTLCELCDDRDESPNLFLKKNKRLRKCVEVDINNADSSMTRKYRNCIAHLTVVRELKEYIGDIRTVDSYFSIYHYVMQRCITKRENDTKQEEKIKYEDDLLKNHGYTKDFVKALNSPFGYNIPRFKNLSIEQLFDRNEYLAEK

SEQ ID NO: 3232 - protein, 918 aa, Artificial; identical to SEQ ID NO: 2830
  Synthetic

SEQ ID NO: 3233 - protein, 907 aa, Artificial
  Synthetic
VRLRKKARQLKAAEINNNAVPAIAAMPAAEVIAPAAEKKKSSVKAAGMKSILVSENKMYITSFGKGNSAVLEYEVDNNDYNQTQLSSDGSSNIELRGVNEVNITFSSKHGFESGVEINTSNPTHRSGESSPVRGDMLGLKSELEKRFFGKTFDDNIHIQLIYNILDIEKILAVYVTNIVYALNNMLGVKDSESYDDFMGYLSARNTYEVFTHPDKSNLSDKVKGNIKKSLSKFNDLLKTKRLGYFGLEEPKTKDTRVSQAYKKRVYHMLAIVGQIRQSVFHDKSSKLDEDLYSFIDIIDSEYRETLDYLVDERFDSINKGFIQGNKVNISLLIDMMKGYEADDIIRLYYDFIVLKSQKNLGFSIKKLREKMLDEYGFRFKDKQYDSVRSKMYKLMDFLLFCNYYRNDVVAGEALVRKLRFSMTDDEKEGIYADEASKLWGKFRNDFENIADHMNGDVIKELGKADMDFDEKILDSEKKNASDLLYFSKMIYMLTYFLDGKEINDLLTTLISKFDNIKEFLKIMKSSAVDVECELTAGYKLFNDSQRITNELFIVKNIASMRKPASSAKLTMFRDALTILGIDDNITDDRISEILKLKEKGKGIHGLRNFITNNVIESSRFVYLIKYANAQKIRKVAKNEKVVMFVLGGIPDTQIERYYKSCVEFPDMNSSLEVKRSELARMIKNISFDDFKNVKQQAKGRENVAKERAKAVIGLYLTVMYLLVKNLVNVNARYVIAIHCLERDFGLYKEIIPELASKNLKNDYRILSQTLCELCDKSPNLFLKKNERLRKCVEVDINNADSSMTRKYRNCIAHLTVVRELKEYIGDIRTVDSYFSIYHYVMQRCITKRENDTKQEEKIKYEDDLLKNHGYTKDFVKALNSPFGYNIPRFKNLSIEQLFDRNEYLTEK

SEQ ID NO: 3234 - protein, 925 aa, Artificial
  Synthetic
MAKKNKMKPRELREAQKKARQLKAAEINNNAVPAIAAMPAAEVIAPAAEKKKSSVKAAGMKSILVSKNKMYITSFGKGNSAVLEYEVDKVDNDNYNKTQLSSKDNSNIELGDVDEVNITFSSKHGFGSGVEINTSNPTHRSGESSPVRWDMLGLKSELEKRFFGKTFDDNIHIQLIYNILDIEKILAVYVTNIVYALNNMLGEGGDESHDDFMGYLSAKNTYDVFTNPNGSTLSDDKKKNIRKSLRKFNDLLKTKRLGYFGLEEPKTKDTRVLEAYKKRVYYMLAIVGQIRQCVFHDLSEHSEYDLYSFIDNSKKVYRECRETLDYLVDERFDSINKDFIEGNKVNISLLIDMMKGYEADDIIRLYYDFIVLKSQKNLGFSIKKLREKMLDEYGFRFKDKQYDSVRSKMYKLMDFLLFCNYYRNDVVAGEALVRKLRFSMTDDEKEGIYADEAAKLWGKFRNDFENIADHMNGDVIKELGKTDMDFDEKILDSEKKNASDLLYFSKMIYMLTYFLDGKEINDLLTTLISKFDNIKEFLKIMKSSAVDVECELTAGYKLFNDSQRITNELFIVKNIASMRKPAASAKLTMFRDALTILGIDDKITDDRISEILKLKEKGKGIHGLRNFITNNVIESSRFVYLIKYANAQKIREVAKNEKVVMFVLGGIPDTQIERYYKSCVEFPDMNSSLEVKRSELARMIKNISFDDFKNVKQQAKGRENVAKERAKAVIGLYLTVMYLLVKNLVNVNARYVIAIHCLERDFGLYKEIIPELASKNLKNDYRILSQTLCELCDKSPNLFLKKNERLRKCVEVDINNADSNMTRKYRNCIAHLTVVRELKEYIGDIRTVDSYFSIYHYVMQRCITKREDDTKQEDKIKYEDDLLKNHGYTKDFVKALNSPFGYNIPRFKNLSIEQLFDRNEYLTEK

SEQ ID NO: 3235 - protein, 923 aa, Artificial
  Synthetic
MAKKNKIKPRELREAQKKARQLKAAEINNNAVPTIAAMPAAEVIAPAAEKKKSSVKAAGMKSILVSENKMYITSFGKGNSAVLEYEVDNNDYNKTQLSSKNSSNIELRGVNEVNITFSSKHGFESGVEINTSNPTHRSGESSPVRWDMLGLKSELEKRFFGKTFDDNIHIQLIYNILDIEKILAVYVTNIVYALNNMLGIKGSESYDDFMGYLSARNTYEVFTHPDKSSLSDDKKANVRKSLSKFNVLLKTKRLGYFGLEEPKTKDTRVSQAYKKRVYHMLAIVGQIRQSVFHDKSSKLHEDLYSFIDIIDSEYRETLDYLVDERFDSINKGFIQGNKVNISLLIDMMKDDYEADDIIRLYYDFIVLKSQKNLGFSIKKLREKMLDEYGFRFKDKQYDSVRSKMYKLMDFLLFCNYYRNDVIAGEALVRKLRFSMTDDEKEGIYADEAAKLWGKFRNDFENIADHMNGDVIKELGKADMDFDEKILDSEKKNASDLLYFSKMIYMLTYFLDGKEINDLLTTLISKFDNIKEFLKIMKSSAVDVECELTAGYKLFNDSQRITNELFIVKNIASMRKPAASAKLTMFRDALTILGIDDNITDDRISEILKLKEKGKGIHGLRNFITNNVIESSRFVYLIKYANAQKIREVAKNEKVVMFVLGGIPDTQIERYYKSCVEFPDMNSSLEAKRSELARMIKNISFDDFKNVKQQAKGRENVAKERAKAVIGLYLTVMYLLVKNLVNVNARYVIAIHCLERDFGLYKEIIPELASKNLKNDYRILSQTLCELCDNGDESPNLFLKKNKRLRKCVEVDINNADSSMTRKYRNCIAHLTVVRELKEYIGDIRTVDSYFSIYHYVMQRCITKRENDTKQEDKIKYEDDLLKNHGYTKDFVKALNSPFGYNIPRFKNLSIEQLFDRNEYLTEK

SEQ ID NO: 3236 - protein, 925 aa, Artificial; identical to SEQ ID NO: 3061
  Synthetic

SEQ ID NO: 3237 - protein, 920 aa, Artificial
  Synthetic
MAKKNKMKPRELREAQKKARQLKAAEINNNAVPAIAAMPAAQVIAPAAEKKKSSVKAAGMKSILVSENKMYITSFGKGNSAVLEYEVDNNDYNKTQLSSKDSSNIELRGVNEVNITFSSKHGFGSGVEINTSNPTHRSGESSPVRWDMLGLKSELEKRFFGKTFDDNIHIQLIYNILDIEKILAVYVTNIVYALNNMLGIKKSESHDDFMGYLSAKNTYDVFTNPNGSTLSDDKKKNIRKSLRKFNDLLKTKRLGYFGLEEPKTKDTRVSQAYKKRVYHMLAIVGQIRQSVFHDKSSKLHEDLYSFIDIIDSEYRETLDYLVDERFDSINKGFIQGNKVNISLLIDMMKDDYEADDIIRLYYDFIVLKSQKNLGFSIKKLREKMLDEYGFRFKDKQYDSVRSKMYKLMDFLLFCNYYRNDVIAGEALVRKLRFSMTDDEKEGIYADEAAKLWGKFRNDFENIADHMNGDVIKELGKADMDFDEKILDSEKKNASDLLYFSKMIYMLTYFLDGKEINDLLTTLISKFDNIKEFLKIMKSSAVDVECELTAGYKLFNDSQRITNELFIVKNIASMRKPAASAKLTMFRDALTILGIDDNITDDRISEILKLKEKGKGIHGLRNFITNNVIESSRFVYLIKYANAQKIREVAKNEKVVMFVLGGIPDTQIERYYKSCVEFPDMNSSLEAKRSELARMIKNISFDDFKNVKQQAKGRENVAKERAKAVIGLYLTVMYLLVKNLVNVNARYVIAIHCLERDFGLYKEIIPELASKNLKNDYRILSQTLCELCDKSPNLFLKKNRRLRKCVEVDINNADSSMTRKYRNCIAHLTVVRELKEYIGDIRTVDSYFSIYHYVMQRCITKRENDTKQEEKIKYEDDLLKNHGYTKDFVKALNSPFGYNIPRFKNLSIEQLFDRNEYLTEK

SEQ ID NO: 3238 - protein, 1011 aa, Artificial; identical to SEQ ID NO: 3098
  Synthetic

SEQ ID NO: 3239 - protein, 939 aa, Artificial; identical to SEQ ID NO: 2818
  Synthetic

SEQ ID NO: 3240 - protein, 996 aa, Artificial
  Synthetic
  misc_feature (88)..(110): Xaa can be any naturally occurring amino acid
  misc_feature (497)..(524): Xaa can be any naturally occurring amino acid
  misc_feature (733)..(759): Xaa can be any naturally occurring amino acid
MAKKNKMKPRELREAQKKARQLKAAEINNNAAPAIAAMPAAEVIAPAAEKKKSSVKAAGMKSILVSENKMYITSFGKGNSAVLEYEVXXXXXXXXXXXXXXXXXXXXXXXKVDNNVYNQTQLSSKGSSNIKLCGVNEVNITFSSKHGFESGVEINTSNPTHRSGESSPVRGDMLGLKSELEKRFFGKTFDDNIHIQLIYNILDIEKILAVYVTNIVYALNNMLGEGDDESHDDFMGYLSAQNTYYIFTHPDKSNLSDKVKGNIKKSLSKFNDLLKTKRLGYFGLEEPKTKDKRVSEAYKKRVYHMLAIVGQIRQSVFHDKSNELDEYLYSFIDIIDSEYRDTLDYLVDERFDSINKGFVQGNKVNISLLIDMMKGYEADDIIRLYYDFIVLKSQKNLGFSIKKLREKMLDEYGFRFKDKQYDSVRSKMYKLMDFLLFCNYYRNDVAAGEVLVRKLRFSMTDDEKEWIYADEAEKLWGKFRNDFENIADHMNGDVIKXXXXXXXXXXXXXXXXXXXXXXXXXXXXGKADMDFDEKILDSEKKNASDLLYFSKMIYMLTYFLDGKEINDLLTTLISKFDNIKEFLKIMKSSAVDVECELTAGYKLFNDSQRITNELFIVKNIASMRKPAASAKLTMFRDALTILGIDDKITDDRISEILKLKEKGKGIHGLRNFITNNVIESSRFVYLIKYANAQKIREVAENEKVVMFVLGGIPDTQIERYYKSCVEFPDMNSXXXXXXXXXXXXXXXXXXXXXXXXXXXKRSELARMIKNISFDDFKNVKQQAKGRENVAKERAKAVIGLYLTVMYLLVKNLVNVNARYVIAIHCLERDFGLYKEIIPELASKNLKNDYRILSQTLCELCDDRDESPNLFLKKNRRLRKCVEVDINNADSSMTRKYRNCIAHLTVVRELKEYIGDIRTVDSYFSIYHYVMQRCITKREDDTKQEEKIKYEDDLLKNHGYTKDFVKALNSPFGYNIPRFKNLSIEQLFDRNEYLTEK

SEQ ID NO: 3241 - protein, 939 aa, Artificial; identical to SEQ ID NO: 2818
  Synthetic

SEQ ID NO: 3242 - protein, 923 aa, Artificial
  Synthetic
MAKKNKMKPRELREAQKKARQLKAVEINNNAVPEIAAMPAAEVIAPVAEKKKSSVKAAGMKSILVSENKMYITSFGKGNSAVLEYEVDNNDYNKTQLSSKNSSNIELRGVNEVNITFSSKHGFESGVEINTSNPTHRSGESSPVRWDMLGLKSELEKRFFGKTFDDNIHIQLIYNILDIEKILAVYVTNIVYALNNMLGIKGSESYDDFMGYLSARNTYEVFTHPDKSSLSDDKKANVRKSLSKFNVLLKTKRLGYFGLEEPKTKDTRVSQAYKKRVYHMLAIVGQIRQSVFHDKSSKLHEDLYSFIDIIDSEYRETLDYLVDERFDSINKGFIQGNKVNISLLIDMMKDDYEADDIIRLYYDFIVLKSQKNLGFSIKKLREKMLDEYGFRFKDKQYDSVRSKMYKLMDFLLFCNYYRNDVIAGEALVRKLRFSMTDDEKEGIYADEAAKLWGKFRNDFENIADHMNGDVIKELGKADMDFDEKILDSEKKNASDLLYFSKMIYMLTYFLDGKEINDLLTTLISKFDNIKEFLKIMKSSAVNVECELTAGYKLFNDSQRITNELFIVKNIASMRKPAASAKLTMFRDALTILGIDDNITDDRISEILKLKEKGKGIHGLRNFITNNVIESSRFVYLIKYANAQKIRKVAENEKVVMFVLGGIPDTQIERYYKSCVEFPDMNSSLEAKRSELARMIKNIRFDDFKNVKQQAKGRENVAKERAKAVIGLYLTVMYLLVKNLVNVNARYVIAIHCLERDFGLYKEIIPELASKNLKNDYRILSQTLCELCDDRDESPNLFLKKNKRLRKCVEVDINNADSSMTRKYRNCIAHLTVVRELKEYIGDIRTVDSYFSIYHYVMQRCITKREDDKKQEEKIKYEDDLLKNHGYTKDFVKALNSPFGYNIPRFKNLSIEQLFDRNEYLTEK

SEQ ID NO: 3243 - protein, 918 aa, Artificial; identical to SEQ ID NO: 2830
  Synthetic

SEQ ID NO: 3244 - protein, 918 aa, Artificial; identical to SEQ ID NO: 2822
  Synthetic

SEQ ID NO: 3245 - protein, 922 aa, Artificial
  Synthetic
MAKKNKMKPRELREAQKKARQLKAAEINNNAAPAIAAMPAAEVIAPAAEKKKSSVKAAGMKSILVSKNKMYITSFGKGNSAVLEYEVDKVDDNDYNKTQLSSKDNSNIELGDVNEVNITFSSKHGFGSGVEINTSNPTHRSGESSPVRWDMLGLKSELEKRFFGKTFDDNIHIQLIYNILDIEKILAVYVTNIVYALNNMLGVKGSESHDDFIGYLSTNNIYDVFIDPDNSSLSDDKKANVRKSLSKFNALLKTKRLGYFGLEEPKTKDTRASEAYKKRVYHMLAIVGQIRQCVFHDKSGAKRFDLYSFINNIDPEYRETLDYLVDERFDSINKDFIEGNKVNISLLIDMMKGYEADDIIRLYYDFIVLKSQKNLGFSIKKLREKMLDEYGFRFKDKQYDSVRSKMYKLMDFLLFCNYYRNDVVAGEALVRKLRFSMTDDEKEGIYADEAEKLWGKFRNDFENIADHMNGDVIKELGKADMDFDEKILDSEKKNASDLLYFSKMIYMLTYFLDGKEINDLLTTLISKFDNIKEFLKIMKSSAVDVECELTAGYKLFNDSQRITNELFIVKNIASMRKPAASAKLTMFRDALTILGIDDKITDDRISEILKLKEKGKGIHGLRNFITNNVIESSRFVYLIKYANAQKIREVAKNEKVVMFVLGGIPDTQIERYYKSCVEFPDMNSSLEAKRSELARMIKNISFDDFKNVKQQAKGRENVAKERAKAVIGLYLTVMYLLVKNLVNVNARYVIAIHCLERDFGLYKEIIPELASKNLKNDYRILSQTLCELCDKSPNLFLKKNERLRKCVEVDINNADSSMTRKYRNCIAHLTVVRELKEYIGDIRTVDSYFSIYHYVMQRCITKRENDTKQEDKIKYEDDLLKNHGYTKDFVKALNSPFGYNIPRFKNLSIEQLFDRNEYLTEK

SEQ ID NO: 3246 - protein, 1011 aa, Artificial; identical to SEQ ID NO: 3098
  Synthetic

SEQ ID NO: 3247 - protein, 922 aa, Artificial; identical to SEQ ID NO: 2937
  Synthetic

SEQ ID NO: 3248 - protein, 923 aa, Artificial
  Synthetic
MAKKNKMKPRELREAQKKARQLKAAEINNNAVPAIAAMPAAEVIAPAAEKKKSSVKAAGMKSILVSENKMYITSFGKGNSAVLEYEVDKVDDNDYNKTQLSSKDNSNIELGNVNEVNITFSSRRGFESGVEINTSNPTHRSGESSSVRGDMLGLKSELEKRFFGKTFDDNIHIQLIYNILDIEKILAVYVTNIVYALNNMLGVKGSESYDDFMGYLSAQNTYYIFTHPDKSNLSDKVKGNIKKSLSKFNDLLKTKRLGYFGLEEPKTKDKRVSEAYKKRVYHMLAIVGQIRQSVFHDKSNELDEYLYSFIDIIDSEYRDTLDYLVDERFDSINKGFIQGNKVNISLLIDMMKDDYEADDIIRLYYDFIVLKSQKNLGFSIKKLREKMLEEYGFRFKDKQYDSVRSKMYKIMDFLLFCNYYRNDVVAGEALVRKLRFSMTDDEKEGIYADEAAKLWGKFRNDFENIADHMNGDVIKELGKADMDFDEKILDSEKKNASDLLYFSKMIYMLTYFLDGKEINDLLTTLISKFDNIKEFLKIMKSSAVDVECELTAGYKLFNDSQRITNELFIVKNIASMRKPAASAKLTMFRDALAILGIDDKITDDRISEILKLKEKGKGIHGLRNFITNNVIESSRFVYLIKYANAQKIREVAKNEKVVMFVLGGIPDTQIERYYKSCVEVPDMNSSLEAKRSELARMIKNIRFDDFKNVKQQAKGRENVAKERAKAVIGLYLTVMYLLVKNLVNVNARYVIAIHCLERDFGLYKEIIPELASKNLKNDYRILSQTLCELCDKSPNLFLKKNERLRKCVEVDINNADSSMTRKYRNCIAHLTVVRELKEYIGDIRTVDSYFSIYHYVMQRCITKRENDTKQEDKIKYEDDLLKNHGYTKDFVKALNSPFGYNIPRFKNLSIEQLFDRNEYLTEK

SEQ ID NO: 3249 - protein, 922 aa, Artificial
  Synthetic
MAKKNKMKPRELREAQKKARQLKAAEINNNAAPAIAAMPAAEVIAPVAEKKKSSVKAAGMKSILVSENKMYITSFGKGNSAVLEYEVDNNDYNKTQLSSKDNSNIELGDVNEVNITFSSKHGFGSGVEINTSNPTHRSGESSPVRGDMLGLKSELEKRFFGKTFDDNIHIQLIYNILDIEKILAVYVTNIVYALNNMLGIKDSESYDDFMGYLSARNTYEVFTHPDKSNLSDKVKGNIKKSLSKFNDLLKTKRLGYFGLEEPKTKDTRASEAYKKRVYHMLAIVGQIRQCVFHDKSGAKRFDLYSFINNIDPEYRDTLDYLVEERLKSINKDFIEGNKVNISLLIDMMKGYEADDIIRLYYDFIVLKSQKNLGFSIKKLREKMLEEYGFRFKDKQYDSVRSKMYKLMDFLLFCNYYRNDVAAGEALVRKLRFSMTDDEKEGIYADEAAKLWGKFRNDFENIADHMNGDVIKELGKADMDFDEKILDSEKKNASDLLYFSKMIYMLTYFLDGKEINDLLTTLISKFDNIKEFLKIMKSSAVDVECELTAGYKLFNDSQRITNELFIVKNIASMRKPAASAKLTMFRDALTILGIDDNITDDRISEILKLKEKGKGIHGLRNFITNNVIESSRFVYLIKYANAQKIREVAKDEKVVMFVLGGIPDTQIERYYKSCVEFPDMNSSLEAKRSELARMIKNISFDDFKNVKQQAKGRENVAKERAKAVIGLYLTVMYLLVKNLVNVNARYVIAIHCLERDFGLYKEIIPELASKNLKNDYRILSQTLCELCDDRNESSNLFLKKNKRLRKCVEVDINNADSSMTRKYRNCIAHLTVVRELKEYIGDIRTVDSYFSIYHYVMQRCITKRGDDTKQEEKIKYEDDLLKNHGYTKDFVKALNSPFGYNIPRFKNLSIEQLFDRNEYLTEK

SEQ ID NO: 3250 - protein, 917 aa, Artificial
  Synthetic
MAKKNKMKPRELREAQKKARQLKAAEINNNAAPAIAAMPAAEVIAPAAEKKKSSVKAAGMKSILVSKNKMYITSFGKGNSAVLEYEVDKVDNNDYNQTQLSSEDSSNIELRGVTKVNITFSSKHGLESGVEINTSNPTHRSGESSPVRWDMLGLKSELEKRFFGKTFDDNIHIQLIYNILDIEKILAVYVTNIVYALNNMLGVKGSESHDDFIGYLSTNNTYDVFIDPDNSSLSDDKKANVRKSLSKFNALLKTKRLGYFGLKEPKTKDNRVSEAYKKRVYHMLAIVGQIRQCVFHDLSEHLEYDLYSFIDNSKKVYRECRETLDYLVDERFDSINKGFIQGNKVNISLLIDMMKGYEADDIIRLYYDFIVLKSQKNLGFSIKKLREKMLHVYGFRFKDKQYDSVRSKMYKLMDFLLFCNYYRNDVVAGEALVRKLRFSMTDDEKEGIYADEAAKLWGKFRNDFENIADHMNGDVIKELGKADMDFDEKILDSEKKNASDLLYFSKMIYMLTYFLDGKEINDLLTTLISKFDNIKEFLKIMKSSAVDVECELTAGYKLFNDSQRITNELFIVKNIASMRKPAASAKLTMFRDALTILGIDDNITDDRISEILKLKEKGKGIHGLRNFITNNVIESSRFVYLIKYANAQKIREVAKNEKVVMFVLGGIPDTQIERYYKSCVEVTDMNSSLEAKRSELARMIKNIRFDDFKNVKQQAKGRENVAKERAKAVIGLYLTVMYLLVKNLVNVNARYVIAIHCLERDFGLYKEIIPELASKNLKNDYRILSQTLCELCDDRDKSPNLFLKKNKRLRKCVEVDINNADSSMTRKYRNCIAHLTVVRELKEYIGDIRTVDSYFSIYHYVMQRCITKRENDTKQEDHGYTKDFVKALNSPFGYNIPRFKNLSIEQLFDRNEYLTEK

SEQ ID NO: 3251 - protein, 925 aa, Artificial; identical to SEQ ID NO: 3061
  Synthetic

SEQ ID NO: 3252 - protein, 921 aa, Artificial
  Synthetic
MAKKNKMKPRELREAQKKARQLKAAEINNNAAPAIAAMPVAEAAAPAAEKKKSSVKAAGMKSILVSENKMYITSFGKGNSAVLEYEVDNNDYNKTQLSSKDNSNIELGDVNEVNITFSSKHGFESGVEINTSNPTHRSGESSPVRGDMLGLKSELEKRFFGKTFDDNIHIQLIYNILDIEKILAVYVTNIVYALNNMLGEGDESNYDFMGYLSTFNTYKVFTNPNGSTLSDDKKENIRKSLSKFNALLKTKRLGYFGLEEPKTKDTRVLEAYKKRVYYMLAIVGQIRQCVFHDLSEHSEYDLYSFIDNSKKVYRECRETLDYLVDERFDSINKGFIQGNKVNISLLIDMMKGYEPDDIIRLYYDFIVLKSQKNLGFSIKKLREKMLDEYGFRFKDKQYDSVRSKMYKLMDFLLFCNYYRNDVAAGEALVRKLRFSMTDDEKEGIYADEAAKLWGKFRNDFENIADHMNGDVIKELGKADMNFDEKILDSEKKNASDLLYFSKMIYMLTYFLDGKEINDLLTTLISKFDNIKEFLKIMKSSAVDVECELTAGYKLFNDSQRITNELFIVKNIASMRKPAASAKLTMFRDALTILGIDDKITDDRISEILKLKEKGKGIHGLRNFITNNVIESSRFVYLIKYANAQKIREVAKNEKVVMFVLGGIPDTQIERYYKSCVEFPDMNSSLEAKRSELARMIKNISFDDFKNVKQQAKGRENVAKERAKAVIGLYLTVMYLLVKNLVNVNARYVIAIHCLERDFGLYKEIIPELASKNLKNDYRILSQTLCELCDKSPNLFLKKNERLRKCVEVDINNADSSMTRKYRNRIAHLTVVRELKEYIGDIRTVDSYFSIYHYVMQRCITKREDDTKQGEKIKYEDDLLKNHGYTKDFVKALNSPFGYNIPRFKNLSIEQLFDRNEYLTEK

SEQ ID NO: 3253 - protein, 927 aa, Artificial; identical to SEQ ID NO: 3071
  Synthetic

SEQ ID NO: 3254 - protein, 957 aa, Artificial; identical to SEQ ID NO: 2816
  Synthetic

SEQ ID NO: 3255 - protein, 939 aa, Artificial; identical to SEQ ID NO: 2861
  Synthetic

SEQ ID NO: 3256 - protein, 939 aa, Artificial; identical to SEQ ID NO: 2861
  Synthetic

SEQ ID NO: 3257 - protein, 922 aa, Artificial
  Synthetic
MAKKNKMKPRELREAQKKARQFKAAEINNNAVPAIAAMPAAEAAAPAAEKKKSSVKAAGMKSILVSENKMYITSFGKGNSAVLEYEVDNNDYNKTQLSSEDSSNIELCGVNEVNITFSSKHGFESGVEINTSNPTHRSGESSPVRGDMLGLKSELEKRFFGKTFDDNIHIQLIYNILDIEKILAVYVTNIVYALNNMLGVKGSESHDDFIGYLSTNNIYDVFIDPDNSSLSDDKKANVRKSLSKFNALLKTKRLGYFGLEEPKTKDTRASEAYKKRVYHMLAIVGQIRQCVFHDKSGAKRFDLYSFINNIDPEYRDTLDYLVDERFDSINKGFIQGNKVNISLLIDMMKGYEADDIIRLYYDFIVLKSQKNLGFSIKKLREKMLEEYGYRFKDKQYDSVRSKMYKLMDFLLFCNYYRNDVVAGEALVRKLRFSMTDDEKEGIYADEAAKLWGKFRNDFENIADHMNGDVIKELGKADMDFDEKILDSEKKNASDLLYFSKMIYMLTYFLDGKEINDLLTTLISKFDNIKEFLKIMKSSAVNVECELTAGYKLFNDSQRITNELFIVKNIASMRKPAASAKLTMFRDALTILGIDDKITDDRISEILKLKEKGKGIHGLRNFITNNVIESSRFVYLIKYANAQKIREVAKNEKVVMFVLGGIPDTQIERYYKSCVEFPDMNSSLEVKRSELARMIKNIRFDDFKNVKQQAKGRENVAKERAKAVIGLYLTVMYLLVKNLVNVNARYVIAIHCLERDFGLYKEIIPELASKNLKNDYRILSQTLCELCDDRDESPNLFLKKNKRLRKCVEVDINNADSSMTRKYRNCIAHLTVVRELKKYIGDIRTVDSYFSIYHYVMQRCITKREDDTKQEEKIKYEDDLLKNHGYTKDFVKALNSPFGYNIPRFKNLSIEQLFDRNEYLTEK

SEQ ID NO: 3258 - protein, 923 aa, Artificial; identical to SEQ ID NO: 2862
  Synthetic

SEQ ID NO: 3259 - protein, 958 aa, Artificial
  Synthetic
MGKKIHARDLREQRKTDRTVKFADQNKKREAERAVQKKDAAVSAKSVSSVSSKKDNVTKSMAKAAGVKSVFAVGNTVYMTSFGRGNDAVLEQKIVDTSHEPLNIDDPAYQLNVVTMNGYSVTGHRGETVSAVTDNPLRRFNGGKKDEPEQSVPTDMLCLKPTLEKKFFGKEFNDNIHIQLIYNILDIEKILAVYSTNAIYALNNMSADENIENSDFFMKRTTDETFDDFEKKKESTNSREKADFDAFEKFIGNYRLAYFADAFYVDKNKSKSKPKDKAKGIQRGEKEIYSILALIAKLRHWCVHSEEGRAEFWLYKLDELKSDFKNVLDVVYNRPVEKINNRFIENNKVNIQILGSVYKNTDIAELVRSYYEFLITKKYKNMGFSIKKLRESMLEGKGYADKEYDSVRNKLYQMTDFILYTGYINEDSDRADDLVNTLRSSLKEDDKTTVYCKEADYLWKKYRESIREVAASLDVKNINELKNNAFTIPDNELRKCFISYADSVSEFTKLIYLLTRFLSGKEINDLVTTLINKFDNIRSFLEVMDELGLERTFTDEYSFFEGSTKYLAELVELNSFVKSCSFDINAKRTMYRDALDILGIESGKTEEDIEKMIDNIVQFDANGKKLPNKNHGLRNFIASNVIDSNRFEYLVRYGNPKKIRETAKCKPAVRFVLNEIPDAQIERYYKACYPDEKSLCFANMQRDKLAGVIANIKFDDFSDAGSYQKANATSTKITSEAEIKRKNQAIIRLYLTVMYIMLKNLVNVNARYVIAFHCVERDTKLYAESGLEVGNIEKNKTNLTMAVMGVKLENGIIKTEFDKSLAENAANRYFRNARWYKLILDNLKKSERAVVNEFRNTVCHLNAIRNININIKEIKEVENYFALYHYLIQKHLEKRFADNGGSTGDFISKLEEHKTYCKDFVKAYCTPFGYNLVRYKNLTIDGLFDKNYPGKDDSDKQK

SEQ ID NO: 3260 - protein, 925 aa, Artificial; identical to SEQ ID NO: 3234
  Synthetic

SEQ ID NO: 3261 - protein, 924 aa, Artificial
  Synthetic
MAKKNKMKPRELREAQKKARQLKAAEINNNAAPAIAAMPAAEVIAPAAEKKKSSVKAAGMKSILVSENKMYITSFGKGNSAVLEYEVDNNDYNKTQLSSKDNSNIELGDVNEVNITFSSKHGFGSGMKINTSNPTHRSGESSPVRWDMLGLKSELEKRFFGKTFDDNIHIQLIYNILDIEKILAVYVTNIVYALNNMLGEGDESNYDFMGYLSTFNTYKVFTNPNGSTLSDDKKENIRKSLSKFNALLKTKRLGYFGLEEPKTKDTRVLEAYKKRVYHMLAIVGQIRQCVFHDLSEHSEYDLYSFIDNSKKVYRECRETLDYLVDERFDSINKGFIQGNKVNISLLIDMMKGYEADDIIRLYYDFIVLKSQKNLGFSIKKLREKILDEYGFRFKDKQYDSVRSKMYKLMDFLLFCNYYRNDIAAGESLVRKLRFSMTDDEKEGIYADEAAKLWGKFRNDFENIADHMNGDVIKELGKADMDFDEKILDSEKKNASDLLYFSKMIYMLTYFLDGKEINDLLTTLISKFDNIKEFLKIMKSSAVDVECELTAGYKLFNDSQRITNELFIVKNIASMRKPAASAKLTMFRDALTILGIDDKITDDRISEILKLKEKGKGIHGLRNFITNNVIESSRFVYLIKYANAQKIREVAKNEKVVMFVLGGIPDTQIERYYKSCVEFPDMNSSLEAKRSELARMIKNIRFDDFKNVKQQAKGRENVAKERAKAVIGLYLTVMYLLVKNLVNVNARYVIAIHCLERDFGLYKEIIPELASKNLKNDYRILSQTLCELCDNGDESPNLFLKKNKRLRKCVEVDINNADSNMTRKYRNCIAHLTVVRELKEYIGDIRTVDSYFSIYHYVMQRCITKREDDTKQEEIIKYEDDLLKNHGYTKDFVKALNSPFGYNIPRFKNLSIEQLFDRNEYLTEK

SEQ ID NO: 3262 - protein, 960 aa, Artificial
  Synthetic
MAKKLNAKEKRLLSQQAQKDKYKKMEEERQAAEQARLAEEARQKAETERKKKEALEKEAREKLEKELLEKNPSLKKVKKSKAKAAGLKSTFAIGNELLMTSFGKGNEAVPEHYIFENGMISMQNPPAFDVENRGTSFSIAGKNAMNAIADDPRRTSKKVIGEDLIGAKSALEKRYFGKTFEDNIHIQLIYNILDIEKILSKHINNIVFSINNIRGIADPERDDLIGYMSLRDSYEYFMDEKNEKRKVLRESYRKLFKSSRLSYFGSAFYVEKQSTQKKKSGQKNFELRNEKDCYYMLALLGELRQVLAHSSTQKQGKEQTEARSSVYNLRTVGNNDMRKILNSLYAERVDALNENFMNYAKKDLTILFGIMDASSYEKKAEIARDFYDFTVRKSYKNIGFSIKKIRERMMDCFFANVKEITPDSPDFQSVRQKFYKILDFLLFTYYKDNKEETKKIIAALRASLTELEKELFYQKQANILWNKMQMVVTEQIYPRTKGSAIQNLIADPEISADMLKGVMITPESVDYFSKMIYLLTLFIDGKEINDLLTTMINKFENIASFVSVLKDRGLPCNFRNDYSVFNNALKISAELREINSFARMEKATPGAKKQMFLDAAIILGSNESAEELSEYFDEMLDKQKGKRTPGGKKDMGFRNFLIKNVIESDRFHYLIRYGHPLHIRKLAENKNVIAFVLKQIPEPQIDRYCKICALPAESNFAQKILRLTDLIAEMNFRQFENVRQTEKNEQKQILQGILSLYLTVLYLLTKNLVYVNSRYFLAFHCLERDTELLGSQAGHKNAEKQLIASYSALTQQFLDEGKLNRHAREYLTVNIQNSDDWTIAQYRNNAAHLNAIRNAHLYIREMKSVRSYFELYHYLTQRALLDKYENVPYHPQVNEKTLKYFELLKENGWYCKDFVKALNVPFGYNLPRYKNLSIDALFDKDRPQEEDENHLYTCQNIKKS

SEQ ID NO: 3263 - protein, 919 aa, Artificial
  Synthetic
MAKKNKMKPRELREAQKKARQLKAAEINNNAVPAIAAMPAAEVIAPAAEKKKSSVKAAGMKSILVSENKMYITSFGKGNSAVLEYEVDNNDYNQTQLSSDGSSNIELRGVNEVNITFSSKHGFESGVEINTSNPTHRSGESSPVRWDMLGLKSELEKRFFGKTFDDNIHIQLIYNILDIEKILAVYVTNIVYALNNMLGEGDDESHDDFMGYLSAKNTYDVFTDPDESDLSKNIKGNIKKSLSKFNDLLKTKRLGYFGLEEPKTKDTNALEAYKKRVYHMLAIVGQIRQSVFHDKSSKLDEDLYSFIDIIDSEYRETLDYLVDERFDSINKGFIQGNKVNISLLIDMMKGYEADDIIRLYYDFIVLKSQKNLGFSIKKLREKMLEEYGYRFKDKQYDSVRSKMYKLMDFLLFCNYYRNDVVAGEALVRKLRFSMTDDEKEGIYADEAAKLWGKFRNDFENIADHMNGDVIKELGKADMDFDEKILDSEKKNASDLLYFSKMIYMLTYFLDGKEINDLLTTLISKFDNIKEFLKIMKSSAVDVECELTAGYKLFNDSQRITNELFIVKNIASMRKPAASAKLTMFRDALTILGIDDKITDDRISEILKLKEKGKGIHGLRNFITNNVIESSRFVYLIKYANAQKIREVAENEKVVMFVLGGIPDTQIERYYKSCVEFPDMNSPLEAKRSELARMIKNIRFDDFKNVKQQAKGRENVAKERAKAVIGLYLTVMYLLVKNLVNVNARYVIAIHCLERDFGLYKEIIPELASKNLKNDYRILSQTLCELCDKSPNLFLKKNERLRKCVEVDINNADSSMTRKYRNCIAHLTVVRELKEYIGDIRTVDSYFSIYHYVMQRCITKREDDIKQEEKIKYEDDLLKNHGYTKDFVKALNSPFGYNIPRFKNLSIEQLFDRNEYLTEK

SEQ ID NO: 3264 - protein, 926 aa, Artificial; identical to SEQ ID NO: 2886
  Synthetic

SEQ ID NO: 3265 - protein, 946 aa, Artificial; identical to SEQ ID NO: 2799
  Synthetic

SEQ ID NO: 3266 - protein, 919 aa, Artificial; identical to SEQ ID NO: 2893
  Synthetic

SEQ ID NO: 3267 - protein, 939 aa, Artificial
  Synthetic
MAKKKRITAKERKQNHRESLMKKADSNAEKEKAKKPVVENKPDTAISKDNTPKPNKEIKKSKAKLAGVKWVIKANDDVAYISSFGKGNNSVLEKRIMGDVSSNVNKDSHMYVNPKYTKKNYEIKNGFSSGSSLVTYPNKPDKNSGMDALCLKPYFEKDFFGHIFTDNMHIQAIYNIFDIEKILAKHITNIIYTVNSFDRNYNQSGNDTIGFDINYRVPYSEYGGGKDSNGEPKNQSKWKKRKNFIKFYNKSKPHLGYYENIFYDHGEPISEEKFYNYLNILNFIRNNTFHYKDNDIELYGENYSEEYVFINCLNEFVKNKFKNVNKNFISNEKNNLYIILKAYGEDTENVEVVKKYSKELYKLSVLKTNKNLGVNVKKLRESAIEYGYCPLPYDKEKEVAKLSSVKHKLYKTYDFVITHYLNSNDKLLLEIVETLRLSKNDDEKENVYKKYAEKLFKADDVINPIKAISKLFAEKGNKLFKEKIIIKKEYIEDVSIDKNIYDFTKVIFFMTCFLDGKEINDLLTNIISKLQIIEDHNNVIKFIAENDDAVYKDYSDKYAIFRNAGKIATELEAIKSIARMENKIENVPQKPLLKDALLSLGVSDDTKVLENTYNKYFDSKEKADKQSQKVSTFLMNNVINNNRFKYVIKYINPADINGLAKNRYLVKFVLSKIPEEQIDSYYKLFSNEEEPSCEEKIKLLTKKISKLNFQTLFENNKIPNVEKERKKAIITLYFTIVYILVKNLVNINGLYTLALYFVERDGYFYKDICGKKDKKKSYNDVDYLLLSEIFSGSKYREETKNLKLPKEKDRDIMKKYLPNDKDREKYNKFFTAYRNNIVHLNIIAKLSELTSNIDKDINSYFDIYHYCTQRVMFDYCKKNNNVVLAKMKDLAHIKSDCDEFSSKHTYPFSSAVLRFMNLPFAYNVPRFKNLSYKKFFDKQ

SEQ ID NO: 3268 - protein, 919 aa, Artificial; identical to SEQ ID NO: 2876
  Synthetic

SEQ ID NO: 3269 - protein, 919 aa, Artificial; identical to SEQ ID NO: 2876
  Synthetic

SEQ ID NO: 3270 - protein, 926 aa, Artificial; identical to SEQ ID NO: 3079
  Synthetic

SEQ ID NO: 3271 - protein, 922 aa, Artificial; identical to SEQ ID NO: 2904
  Synthetic

SEQ ID NO: 3272 - protein, 960 aa, Artificial; identical to SEQ ID NO: 2800
  Synthetic

SEQ ID NO: 3273 - protein, 939 aa, Artificial; identical to SEQ ID NO: 3097
  Synthetic

SEQ ID NO: 3274 - protein, 946 aa, Artificial; identical to SEQ ID NO: 2799
  Synthetic

SEQ ID NO: 3275 - protein, 922 aa, Artificial; identical to SEQ ID NO: 2840
  Synthetic

SEQ ID NO: 3276 - protein, 927 aa, Artificial; identical to SEQ ID NO: 3071
  Synthetic

SEQ ID NO: 3277 - protein, 922 aa, Artificial
  Synthetic
MAKKNKMKPRELREAQKKARQLKAAEINNNAVPAIAAMPAVEVIAPAAEKKKSSVKAAGMKSILVSENKMYITSFGKGNSAVLEYEVDNNDYNKTQLSSKDNSNIELGNVNEVNITFSSRRGFESGVEINTSNPTHRSGESSSVRGDMLGLKSELEKRFFGKTFDDNIHIQLIYNILDIEKILAVYVTNIVYALNNMLGVKGSESYDDFMGYLSAQNTYYIFTHPDKSNLSDKVKGNIKKSLSKFNDLLKTKRLGYFGLEEPKTKDKRVSEAYKKRVYHMLAIVGQIRQSVFHDKSNELDEYLYSFIDIIDSEYRDTLDYLVDERFDSINKGFIQGNKVNISLLIDMMKGYEADDIIRLYYDFIVLKSQKNLGFSIKKLREKMLDEYGFRFKDKQYDSVRSKMYKLMDFLLFCNYYRNDVVAGEALVRKLRFSMTDDEKEGIYADEAAKLWGKFRNDFENIADHMNGDVIKELGKADMDFDEKILDSEKKNASDLLYFSKMIYMLTYFLDGKEINDLLTTLISKFDNIKEFLKIMKSSAVDVECELTAGYKLFNDSQRITNELFIVKNIASMRKPAASAKLTMFRDALTILGIDDNITDDRISEILKLKEKGKGIHGLRNFITNNVIESSRFVYLIKYANAQKIREVAENEKVVMFVLGGIPDTQIERYYKSCVEVPDMNSSLEAKRSELARMIKNISFDDFKNVKQQAKGRENVAKERAKAVIGLYLTVMYLLVKNLVNVNARYVIAIHCLERDFGLYKEIIPELASKNLKNDYRILSQTLCELCDNGDESPNLFLKKNKRLRKCVEVDINNADSSMTRKYRNCIAHLTVVRELKEYIGDIRTVDSYFSIYHYVMQRCITKRENDTKQEEKIKYEDDLLKNHGYTRDFVKALNSPFGYNIPRFKNLSIKQLFDRNEYLTEK

SEQ ID NO: 3278 - protein, 939 aa, Artificial; identical to SEQ ID NO: 3097
  Synthetic

SEQ ID NO: 3279 - protein, 923 aa, Artificial; identical to SEQ ID NO: 2862
  Synthetic

SEQ ID NO: 3280 - protein, 1023 aa, Artificial; identical to SEQ ID NO: 3042
  Synthetic

SEQ ID NO: 3281 - protein, 919 aa, Artificial
  Synthetic
MAKKNKMKPRERREAQKKARQLKAAEINNNAVPAIAAMPAAEVIAPAAEKKKSSVKAAGMKSILVSENKMYITSFGKGNSAVLEYEVDNNDYNKTQLSSKDNSNIELGDVNEVNITFSSRRGFESGVEINTSNPTHRSGESSSVRGDMLGLKSELEKRFFGKNFDDNIHIQLIYNILDIEKILAVYVTNIVYALNNMLGVKGSESYDDFMGYLSAKNTYEVFTHPDKSNLSDKVKGNIKKSFSTFNDLLKTKRLGYFGLEEPKTKDTRVSQAYKKRVYHMLAIVGQIRQSVFHDKSSKLHEDLYSFIDIIDSEYRETLDYLVEERLKSINKDFIEGNKVNISLLIDMMKGYEADDIIRLYYDFIVLKSQKNLGFSIKKLREKMLDEYGFRFKDKQYDPVRSKMYKLMDFLLFCNYYRNDVVTGEALVRKLRFSMTDDEKEGIYADEASKLWGKFRNDFENIADHMNGDVIKELGKADMDFDEKILDSEKKNASDLLYFSKMIYMLTYFLDGKEINDLLTTLISKFDNIKEFLKIMKSSAVDVECELTAGYKLFNDSQRITNELFIVKNIASMRKPASSAKLTMFRDALTILGIDDNITDDRISEILKLKEKGKGIHGLRNFITNNVIESSRFVYLIKYANAQKIRKVAKNEKVVMFVLGGIPDTQIERYYKSCVEFPDMNSSLEVKRSELARMIKNISFDDFKNVKQQAKGRENVAKERAKAVIGLYLTVMYLLVKNLVNVNARYVIAIHCLERDFGLYKEIIPELASKNLKNDYRILSQTLCELCDKSPNLFLKKNERLRKCVEVDINNADSSMTRKYRNCIAHLTVVRELKEYIGDIRTVDSYFSIYHYVMQRCITKRENDTKQEEKIKYEDDLLKNHGYTKDFVKALNSPFGYNIPRFKNLSIEQLFDRNEYLTEK

SEQ ID NO: 3282 - protein, 956 aa, Artificial
  Synthetic
MGKKIHARDLREQRKTDRTEKFADQNKKREAERAVPKKDAAVSVKSVSSVSSKKDNVTKSMAKAAGVKSVFAVGNTVYMTSFGRGNDAVLEQKIVDTSHEPLNIDDPAYQLNVVTMNGYSVTGHRGETVSAVTDNPLRRFNGRKKDEPEQSVPTDMLCLKPTLEKKFFGKEFDDNIHIQLIYNILDIEKILAVYSTNAIYALNNMSADENIENSDFFMKRTTDETFDDFEKKKESTNSREKADFDAFEKFIGNYRLAYFADAFYVNKKNPKGKAKNVLREDKELYSVLTLIGKLRHWCVHSEEGRAEFWLYKLDELKDDFKNVLDVVYNRPVEEINNRFIENNKVNIQILGSVYKNTDIAELVRSYYEFLITKKYKNMGFSIKKLRESMLEGKGYADKEYDSVRNKLYQMTDFILYTGYINEDSDRADDLVNTLRSSLKEDDKTTVYCKEADYLWKKYRESIREVADALDVDNIKNLSGSNIEIRDNELRKCFISYADSVSEFTKLIYLLTRFLSGKEINDLVTTLINKFDNIRSFLEIMDELGLDRTFTAEYSFFEGSTKYLAELVELNSFVKSCSFDINAKRTMYRDALDILGIESDKTEEDIEKMIDNILQIDANGDKKLKKNNGLRNFIASNVIDSNRFKYLVRYGNPKKIRETAKCEPAVRFVLNEIPDAQIERYYEACCPKNTALCSANKRREKLADMIAEIKFENFSDAGSYQKANATSTRITSEAEIKRKNQAIIRLYLTVMYIMLKNLVNVNARYVIAFHCVERDTKLYAESGLEVGNIEKNKTNLTMAVMGVKLENGIIKTEFDKSLAENAANRYLRNARWYKLILDNLKKSERAVVNEFRNTVCHLNAIRNININIDGIKEVENYFALYHYLIQKHLENRFADKKVERDTGDFISKLEEHKTYCKDFVKAYCTPFGYNLVRYKNLTIDGLFDKNYPGKDDSDEQK

SEQ ID NO: 3283 - protein, 984 aa, Artificial; identical to SEQ ID NO: 2827
  Synthetic

SEQ ID NO: 3284 - protein, 923 aa, Artificial; identical to SEQ ID NO: 3248
  Synthetic

SEQ ID NO: 3285 - protein, 922 aa, Artificial; identical to SEQ ID NO: 2945
  Synthetic

SEQ ID NO: 3286 - protein, 999 aa, Artificial
  Synthetic
MKKKRLNAQAKKETKNALNKQKGQQYLKPKASEALQLNAVKEIKNDEISKQDKKSTAKKMGLKSTLVTCDKVVVTSFVNKKGTNGSNIEKVTSHKGEKIAEGLYTERMFKTDVTEDEICISKQEHNSTFINPAKKDIGRDYLGVKEILENKYFSGPKSDNVHVQIGYNIMDIRKIITAYVNNIVSLFYNLNRSAKEDQRDIIGTLGEFYNLDSQENKALEDLKTKEKLDQIKEIFNKGAIKYYFKDIFKIVPSLSKDDKENPEKLAKYEEEKRKVEDYNFNVLRVLTMMRNLCYHSKNRAGTGGDIGLLNLERVVGATNNSNTQDNKELLELIQNVCVSSISKINENFVSNSGNNVYVLSQLYPGEDVLKQYYSYVVEKENRNIGVNLTKIREVIFDVYLTELKDKEYDTYRNKIYTILGFILYKELTSSSILDKMIEELRFGEKNEVLRDSVYETYAKKIYIDLKLKEKYENAIKELKKEKENKFESKKEIALKDIKEYAINANGISCFVQSMLFLTKFLDGKETNELICALINKFDNIADILEVAKQIGLEVEFASDYISLNDSRKISKDLRLIKNIAHLKDKKTKTKNDEKANDQEDKIPFVMLLDAYNMLNVKADSQIVYGSKEANELYNLIYKTQKKGTDKNSTQKYNYQFKNFIENNVIKSKWFLYIAKYVDPANCATFMANEAILNFVVKELPPKQILRYYQTITGSEVEVSEDQMRKSIIYNLKRFSVKDSLTAISDMSEEEYKPKTKDITSSIEKQKAIVSLYLTVAFLIVKSMVKVNTRFSIAFNCLERDLVLKGHNFKNYDKLTTTYLKADKEIIDDTAAEIEKIYLDFKNATDATAKEQARKLLNKTLKARDKKMHFSYKKYKEISSNLENAIKNKINFTAFRNAIEHLNVIKAMPNYFKEVKNVQSYYALFCYILQRLLIEEGAIDNQVLADKIVAEGGYSKRVQNLMWQLNLPFAYNLPRYKNLSMESLFYSKDNMSNLDKKDNV

SEQ ID NO: 3287 - protein, 933 aa, Artificial
  Synthetic
MERQKRKMKSKSKMAGVKSVFVIGDELLMTSFGDGDDAVLEKDIDENGVVNDCRNPAAYDAVYGTDSIRVKKTNNNIRAKVNNPLAKSNIRSEESALFRTRVNEYKREQKDKYETLFFGKTFDDNIHIQLISKILDIEKTFSVVIGNIVYAINNLSLEQSIDRPIDIFGDKNTQGISLREDNDYLKTMLPRCEYLFHNILNSDSDNNSKMNYNKVNKGKEEKDNRNNENIEKLKKALEVIKIIRVDSFHGVDGIKGDQKFPRSKYNLAVNYNEEIQKTISEPFNRKVEEVQQDFYRNSCVNIDFLKEIMYGSNYTDRGSDSLECSYFNFAILKQNKNMGFSITSIRECLLDLYELNFESMQNLRPRANSFCDFLIYDYYCKNESERANLVDCLRSAASEEEKKNIYFQTAERVKEKFRNAFNRISRFDASYIKNSREKNLSGGSSLPKYSFIEGFTKRSKKINDNDEKNADLFCNMLYYLAQFLDGKEINIFLTSIHNIFQNIDSFLKVMKEKGMECKFQKDFNMFSHAGYVAKKIEIVISLAKMKKTLDFYNAQALKDAVTILGVSKKHQYLDMNSYLDFYMFDNRSGATGKNAGKDHNLRNFLVSNVIRSRKFNYLSRYSNLAEVKKLAQNPSLVQFVLSRIEPSLICRYYESSQGISSEGITIDEQIKKLTGIIVDMNIDSFENINNGEIGMRYSKATPQSIERRNQMRVCVGLYLNVLYQIEKNLMNVNARYVLAFAFAERDALMLNFTLEECKKNKKRSSGGFSFIEMTQFFIDKKLFKVATEAIKKNVLKYNGNPESLNHIPGEYICKNMEGYHENTVRNFRNMVAHLTAVARVPLYISEVTQIDSYYALYHYCMQMNILQGIEQSGKILDNIKLKNALENARVHRTYSKDAVKYLCLPFAYNISRYKALTIKDLFDWTEYSCKKDE

SEQ ID NO: 3288 - protein, 984 aa, Artificial; identical to SEQ ID NO: 2919
  Synthetic

SEQ ID NO: 3289 - protein, 922 aa, Artificial; identical to SEQ ID NO: 2840
  Synthetic

SEQ ID NO: 3290 - protein, 921 aa, Artificial; identical to SEQ ID NO: 3143
  Synthetic

SEQ ID NO: 3291 - protein, 923 aa, Artificial; identical to SEQ ID NO: 2862
  Synthetic

SEQ ID NO: 3292 - protein, 923 aa, Artificial; identical to SEQ ID NO: 2862
  Synthetic

SEQ ID NO: 3293 - protein, 925 aa, Artificial
  Synthetic
MAKKNKMKPRELREAQKKARQLKAAEINNNAAPAIAAMPAEEVIAPAAEKKKSSVKAAGMKSILVSKNKMYITSFGKGNSAVLEYEVDKVDNDNYNKTQLSSEDSSNIELCGVTKVNITFSSKRGNESGVEINTSNPTHRSGESSPVRWDMLGLKSELEKRFFGKTFDDNIHIQLIYNILDIEKILAVYVTNIVYALNNMLGIKDSESYDDFMGYLSARNTYEVFTHPDKSNLSDKVKGNIKKSFSTFNDLLKTKRLGYFGLEEPKTKDTRVSQAYKKRVYHMLAIVGQIRQSVFHDKSSKLHEDLYSFIDIIDSEYRETLDYLVDERFDSINKGFIQGNKVNISLLIDMMKGYEADDIIRLYYDFIVLKSQKNLGFSIKKLREKMLDEYGFRFKDKQYDSVRSKMYKLMDFLLFCNYYRNDIAVGEALVRKLRFSMTDDEKEGIYADEAAKLWGKFRNDFENIAGHMNGDVIKELGKADMDFDEKILDSEKKNASDLLYFSKMIYMLTYFLDGKEINDLLTTLISKFDNIKEFLKIMKSSAVDVECELTAGYKLFNDSQRITNELFIVKNIASMRKPAASAKLTMFRDALTILGIDDNITDDRISEILKLKEKGKGIHGLRNFITNNVIESSRFVYLIKYANAQKIREVAKNEKVVMFVLGCIPDTQIERYYKSCVEFPDMNSSLEAKRSELARMIKNISFDDFKNVKQQAKGRENVAKERAKAVIGLYLTVMYLLVKNLVNVNARYVIAIHCLERDFGLYKEIIPELASKNLKNDYRILSQTLCELCDDRDKSPNLFLKKNKRLRKCVEVDINNADSVMTRKYRNCIAHLTVVRELKEYIGDIRTVDSYFSIYHYVMQRCITKREDDTKQEEKIKYEDDLLKNHGYTKDFVKALNSPFGYNIPRFKNLSIEQLFDRNEYLTEK

SEQ ID NO: 3294 - protein, 919 aa, Artificial; identical to SEQ ID NO: 2876
  Synthetic

SEQ ID NO: 3295 - protein, 926 aa, Artificial
  Synthetic
MAKKNKMKPRELREAQKKARQLKAAEINNNAAPAIAAMPAAEAAAPAAEKKKSSVKAAGMKSILVSENKMYITSFGKGNSAVLEYEVDKVDNNVYNQTQLSSKGSSNIKLCGVNEVNITFSSKHGFESGVEINTSNPTHRSGESSPVRGDMLGLKSELEKRFFGKTFDDNIHIQLIYNILDIEKILAVYVTNIVYALNNMLGIKGSESYDDFMGYLSARNTYEVFTHPDKSSLSDDKKANVRKSLSKFNVLLKTKRLGYFGLEEPKTKDTRVSQAYKKRVYHMLAIVGQIRQSVFHDKSSKLHEDLYSFIDIIDSEYRETLDYLVDERFDSINKGFIQGNKVNISLLIDMMKDDYEADDIIRLYYDFIVLKSQKNLGFSIKKLREKMLDEYGFRFKDKQYDSVRSKMYKLMDFLLFCNYYRNDVIAGEALVRKLRFSMTDDEKEGIYADEAAKLWGKFRNDFENIADHMNGDVIKELGKADMDFDEKILDSEKKNASDLLYFSKMIYMLTYFLDGKEINDLLTTLISKFDNIKEFLKIMKSSAVDVECELTAGYKLFNDSQRITNELFIVKNIASMRKPAASAMLTMFRDALTILGIDDKITDDRISEILKLKEKGKGIHGLRNFITNNVIESSRFVYLIKYANAQKIREVAKNEKVVMFVLGGIPDTQIERYYKSCVEVPDMNSSLEAKRSELARMIKSISFDDFKNVKQQAKGRENVAKEMAKAVIGLYLTVMYLLVKNLVNVNARYVIAIHCLERDFGLYKEIISELASKNLKNDYRILSQTLCELCDNCDESPNLFLKKNKRLRKCVEVDINNADSSMTRKYRNCIAHLTVVRELKEYIGDIRTVDSYFSIYHYVMQRCITKREDDKKQEEKIKYEDDLLKNHGYTKDFVKALNSPFGYNIPRFKNLSIEQLFDRNEYLTEK

SEQ ID NO: 3296 - protein, 1023 aa, Artificial; identical to SEQ ID NO: 3042
  Synthetic

SEQ ID NO: 3297 - protein, 946 aa, Artificial; identical to SEQ ID NO: 2799
  Synthetic

SEQ ID NO: 3298 - protein, 922 aa, Artificial; identical to SEQ ID NO: 2906
  Synthetic

SEQ ID NO: 3299 - protein, 922 aa, Artificial
  Synthetic
MAKKNKMKPRELREAQKKARQLKAAEINNNAAPAIAAMPAAQVIAPAAEKKKSSVKAAGMKSILVSENKMYITSFGKGNSAVLEYEVDKVDNNNYNKTQLSSKDNSNIELRDVNEVNITFSSKHGFESGVEINTSNPTHRSGESSPVRWDMLGLKSELEKRFFGKTFDDNIHIQLIYNILDIEKILAVYVTNIVYALNNMLGEGDDESHDDFMGYLSAKNTYDVFTDPDESDLSKNIKGNIKKSLSKFNDLLKTKRLGYFGLEEPKTKDTNALEAYKKRVYHMLAIVGQIRQSVFHDKSSKLDEDLYSFIDIIDSEYRETLDYLVDERFDSINKGFIQGNKVNISLLIDMMKGYEADDIIRLYYDFIVLKSQKNLGFSIKKLREKMLEEYGYRFKDKQYDSVRSKMYKLMDFLLFCNYYRNDVAAGEALVRKLRFSMTDDEKEGIYADEAEKLWGKFRNDFENIADHMNGDVIKELGKADMDFDEKILDSEKKNASDLLYFSKMIYMLTYFLDGKEINDLLTTLISKFDNIKEFLKIMKSSAVDVECELTAGYKLFNDSQRITNELFIVKNIASMRKPAASAKLTMFRDALTILGIDDKITDDRISEILKLKEKGKGIHGLRNFITNNVIESSRFVYLIKYANAQKIRKVAKNEKVVMFVLGGIPDTQIERYYKSCVEFPDMNSSLEVKRSELARMIKNISFDDFKNVKQQAKGRENVAKERAKAVIGLYLTVMYLLVKNLVNVNARYVIAIHCLERDFGLYKEIIPELASKNLKNDYRILSQTLCELCDKSPNLFLKKNRRLRKCVEVDINNADSSMTRKYRNCIAHLTVVRELKEYIGDIRTVDSYFSIYHYVMQRCITKRENDTKQEEKIKYEDDLLKNHGYTKDFVKALNSPFGYNIPRFKNLSIEQLFDRNEYLTEK

SEQ ID NO: 3300 - protein, 919 aa, Artificial; identical to SEQ ID NO: 2990
  Synthetic

SEQ ID NO: 3301 - protein, 922 aa, Artificial; identical to SEQ ID NO: 3299
  Synthetic

SEQ ID NO: 3302 - protein, 926 aa, Artificial
  Synthetic
MLLCAIIQASTKRDRKGGVRMEREVKKPPKKSLAKAAGLKSTFVISPQEKELAMTAFGRGNDALLQKRIVDGVVRDVAGEKQQFQVQRQDESRFRLQNSRLADRTVTADDPLHRAETPRRQPLGAGMDQLRRKAILEQKYFGRTFDDNIHIQLIYNILDIHKMLAVPANHIVHTLNLLGGYGETDFVGMLPAGLPYDKLRVVKKKNGDTVDIKADIAAYAKRPQLAYLGAAFYDATPGKSKRDAARGRVKREQDVYTILSLMSLLRQFCAHDSVRIWGQNTTAALYHLQALPQDMKDLLDDGWRRALGGVNDHFLDTNKVNLLTLFEYYGAETKQARVALMQDFYRFVVLKEQKNMGFSLRRLREELLKLPDAAYLTGQEYDSVRQKLYMLLDFLLCRLYAQERAGRCEELVSALRCALSDEEKDAVYQAEAAALWQALGDTLRRELLPLLKGKKLQDKDKKKPDEVGLSRDVLDGVLFRPAQQGNRANADYFCRLMHLSTWFMDGKEINTLLTTLISKFENIDSLRNVLESMGLACSFVPAYAMFDHSRYIAGQLRVVNNIARMRKPAIGAKREMYRAAVVLLGVDSPEAAAAITDDLLQIDPETGKVRPRGDSARDTGLRNFIANNVVESRRFTYLLRYMTPEQARVLAQNEKLIAFVLSTVPDTQLERYCRTCGREDITGRPAQIRYLTAQIMGVRYESFTDVEQRGRGDNPRKERYKALIGLYLTVLYLAVKNMVNCNARYVIAFYCRDRDTALYQKEVCWYDLEEDKKSGKQRQVEDYTALTRYFVSQGYLNRHACGYLRSNMNGISNGLLVAYRNAVDHLNVIPPLGSLCRDIGRVDSYFALYHYAVQQYLNGRYYRKTPREQELFAAMAQHRTWCSDLVKALNTPFGYNLARYKNLSIDGLFDREGDHVVREDGEKPAE

SEQ ID NO: 3303 - protein, 926 aa, Artificial; identical to SEQ ID NO: 2956
  Synthetic

SEQ ID NO: 3304 - protein, 922 aa, Artificial; identical to SEQ ID NO: 3299
  Synthetic

SEQ ID NO: 3305 - protein, 923 aa, Artificial; identical to SEQ ID NO: 2862
  Synthetic

SEQ ID NO: 3306 - protein, 923 aa, Artificial; identical to SEQ ID NO: 2862
  Synthetic

SEQ ID NO: 3307 - protein, 923 aa, Artificial; identical to SEQ ID NO: 2862
  Synthetic

SEQ ID NO: 3308 - protein, 922 aa, Artificial
  Synthetic
MAKKNKMKPRELREAQKKARQLKAAEINNNAAPAIAAMPAAEVIAPAAEKKKSSVKAAGMKSILVSENKMYITSFGKGNSAVLEYEVDNNDYNQTQLSSKDNSNIELGDVNEVNITFSSKHGFESGVEINTSNPTHRSGESSPVRGDMLGLKSELEKRFFGKTFDDNIHIQLIYNILDIEKILAVYVTNIVYALNNMLGVKGSESHDDFIGYLSTNNTYDVFIDPDNSSLSDDKKANVRKSLSKFNVLLKTKRLGYFGLEEPKTKDTRVSQAYKKRVYHMLAIVGQIRQCVFHDKSGAKRFDLYSFINNIDPEYRDTLDYLVEERLKSINKDFIQGNKVNISLLIDMMKGYEADDIIRLYYDFIVLKSQKNLGFSIKKLREKMLEEYGFRFKDKQYDSVRSKMYKLMDFLLFCNYYRNDVVAGEALVRKLRFSMTDDEKEGIYADEAAKLWGKFRNDFENIADHMNGDVIKELGKADMDFDEKILDSEKKNASDLLYFSKMIYMLTYFLDGKEINDLLTTLISKFDNIKEFLKIMKSSAVDVECELTAGYKLFNDSQRITNELFIVKNIASMRKPAASAKLTMFRDALTILGIDDNITDDRISEILKLKEKGKGIHGLRNFITNNVIESSRFVYLIKYANAQKIREVAKNEKVVMFVLGGIPDTQIERYYKSCVEFPDMNSSLEAKRSELARMIKNISFDDFKNVKQQAKGRENVAKERAKAVIGLYLTVMYLLVKNLVNVNARYVIAIHCLERDFGLYKEIIPELASKNLKNDYRILSQTLCELCDDRDESPNLFLKKNKRLRKCVEVDINNADSSMTRKYRNCIAHLTVVRELKEYIGDIRTVDSYFSIYHYVMQRCITKRENDTKQEEKIKYEDDLLKNHGYTKDFVKALNSPFGYNIPRFKNLSIEQLFDRNEYLTEK

SEQ ID NO: 3309 - protein, 926 aa, Artificial; identical to SEQ ID NO: 2956
  Synthetic

SEQ ID NO: 3310 - protein, 947 aa, Artificial
  Synthetic
MAKKKRMTAKERKQNHRDSLMKKADSNAEKEKAKKPVVENKPDTAISKDNKPKPNKEIKKSKAKLAGVKWIIKANDDVAYISSFGKGNNSVLEKRIMGDVSSNVNKDSHMYVNPKYTKKNYEIKNGFSSGSSLVTYPNKPDKNSGMDALCLKPYFEKDFFGHIFTDNMHIQAIYNIFDIEKILAKHITNIIYTVNSLDRSYNQSGNDTIGFDLNYCIPYSEYGGGKDSNGKPNKISAWKKRENFIKFYNEAKPHLGYYENIFYDHGEPISEEKFYNYLNILNFIRNNTFHYKDNDIELYSENYSEEYVFINCLNEFVKNKFKNVNKNFISNEKNNLYIILNAYGEDTENVEVVKKYSKELYKLSVLKTNKNLGVNVKKLRESAIENGYCPLPYDKENDVAKLSSVKHKLYKTYDFVITHYLNSNDKPLLEIVEALRLSKNDDEKEIVYKKYAEKLFKADDVINPIKAISKLFVEKGNKLFREKVRINKEYIEDVSIDKNIYDFTKVIFFMTCFLDGKEINDLLTNIISKLQIIEDHNNVIKFIAENDDAVYKDYSDKYAIFRNAGKIATELEAIKSIARMENKIENAPNEPLLKDALLSLGVSDDTKVLENTYKKYFDSKEKADKQSQKVSTFLMNNVINNNRFKYVIKYINPADINGLAKNRYLVKFVLSKIPEEQIDSYYKLFSNEEEHSCEEKIKLLTKKISKLNFQTLFENNKIPNVEKERKKAIITLYFTIVYILVKNLVNINGLYTLALYFVERDGFFYKQICEKKLIETLKKKDKKQLYKDDDYLLLPEIFSGSKYREETKNLKLPKEKDRDIMKKYLPNDKDREDYNDFFTAYRNNIVHLNIIAKLSKLTKNIDKDINSYFDIYHYCTQRVMFDYCKKNNNVVLAKMKDLAHIKSDCDEFSSKHTYPYSSAVLRFMNLPFAYNVPRFKNLSYKKFFDKQ

SEQ ID NO: 3311 - protein, 926 aa, Artificial; identical to SEQ ID NO: 2956
  Synthetic

SEQ ID NO: 3312 - protein, 923 aa, Artificial; identical to SEQ ID NO: 2862
  Synthetic

SEQ ID NO: 3313 - protein, 925 aa, Artificial; identical to SEQ ID NO: 2943
  Synthetic

SEQ ID NO: 3314 - protein, 954 aa, Artificial
  Synthetic
MGKKIHARDLREQRKTDRTEKFADQNKKREAERAVPKKDAAVSVKSVSSVSSKKDNVTKSMAKAAGVKSVFAVENTVYMTSFGRGNDAVLEQKIVDTSHEQLNIDDPAYQLNVVTMNGYSVTGHRGETVSAVTDNPLRRFNGGKKDEPEQSVPTDMLCLKPTLEKKFFGKEFNDNIHIQLIYNILDIEKILAVYSTNAIYALNNMSADENIENSDFFMKRTTDETFDDFEKKKESTNSREKADFDAFEKFIGNYRLAYFADAFYVNKKNPKGKAKNVLREDKELYSVLTLIGKLRHWCVHSEDGRAEFWLYKLDELKDDFKNVLDVVYNRPVEEINNRFIENNKVNIQILGSVYKNTDIAELVRSYYEFLITKKYKNMGFSIKKLRESMLEGKGYADKEYDSVRNKLYQMTDFILYTGYINEDSDRADDLVNTLRSSLKEDDKTTVYCKEADYLWKKYRESIREVADALDGDNIKRLSKSNIEIQEDKLRKCFISYADSVSEFTKLIYLLTRFLSGKEINDLVTTLINKFDNIRSFLEIMDELGLDRTFTAEYSFFEGSTKYLAELVELNSFVKSCSFDINAKRTMYRDALDILGIKSGKTEEDIEKMIDNILQIDANGDKKLKKNNGLRNFIASNVIDSNRFKYLVRYGNPKKIRETAKCKPAVRFVLNEIPDAQIERYYEACCPKNTALCSANKRREKLADMIAEIKFENFSDAGNYQKANVTSRTSEAEIKRKNQAIIRLYLTVMYIMLKNLVNVNARYVIAFHCVERDTKLYAESGLEVGNIEKNKTNLTMAVMGVKLENGIIKTEFDKSLAENAANRYLRNARWYKLILDNLKKSERAVVNEFRNTVCHLNAIRNININIDGIKEVENYFALYHYLIQKHLENRFADKKVERDTGDFISKLEEHKTYCKDFVKAYCTPFGYNLVRYKNLTIDGLFDKNFPGKDDSDEQK

SEQ ID NO: 3315 - protein, 924 aa, Artificial
  Synthetic
MAKKNKMKPRELREAQKKARQFKAAEINNNAAPAIAAMPAAEVIAPVAEKKKSSVKAAGMKSILVIENKMYITSFGKGNSAVLEYEVDNNDYNKTQLSSKDNSNIELCGVNEVNITFSSKHGFESGVEINTSNPTHRSGESSPVRWDMLGLKSELEKRFFGKTFDDNIHIQLIYNILDIEKILAVYVTNIVYALNNMLGEGDESNYDFMGYLSTFNTYKVFTNPNGSTLSDDKKENIRKSLSKFNALLKTKRLGYFGLEEPKTKDTRVLEAYKKRVYHMLAIVGQIRQCVFHDLSEHSEYDLYSFIDNSKKVYRECRETLDYLVDERFDSINKGFIQGNKVNISLLIDMMKGYEADDIIRLYYDFIVLKSQKNLGFSIKKLREKILDEYGFRFKDKQYDSVRSKMYKLMDFLLFCNYYRNDIAAGESLVRKLRFSMTDDEKEGIYADEAAKLWGKFRNDFENIADHMNGDVIKELGKADMDFDEKILDSEKKNASDLLYFSKMIYMLTYFLDGKEINDLLTTLISKFDNIKEFLKIMKSSAIDGECELTAGYKLFNDSQRITNELFIVKNIASMRKPAASAKLTMFRDALTILGIDDKITDDRISEILKLKEKGKGIHGLRNFITNNVIESSRFVYLIKYANAQKIREVAKNEKVVMFVLGGIPDTQIERYYKSCVEFPDMNSSLEAKRSELARMIKNIRFDDFKNVKQQAKGRENVAKERAKAVIGLYLTVMYLLVKNLVNVNARYVIAIHCLERDFGLYKEIIPELASKNLKNDYRILSQTLCELCDNGDESPNLFLKKNKRLRKCVEVDINNADSSMTRKYRNCIAHLTVVRELKEYIGDIRTVDSYFSIYHYVMQRCITKREDDTKQEEKIKYEDDLLKNHGYTKDFVKALNSPFGYNIPRFKNLSIEQLFDRNEYLTEK

SEQ ID NO: 3316 - protein, 922 aa, Artificial
  Synthetic
MAKKNKMKPRELREAQKKARQLKAAEINNNAAPAIAAMPAAEVIAPAAEKKKSSVKAAGMKSILVSENKMYITSFGKGNSAVLEYEVDNNDYNQTQLSSKDNSNIELGDVDEVNITFSSKHGFESGVEINTSNPTHRSGESSPVRGDMLGLKSELEKRFFGKTFDDNIHIQLIYNILDIEKILAVYVTNIVYALNNMLGVKGSESHDDFIGYLSTNNIYDVFIDPDNSSLSDDKKANVRKSLSKFNALLKTKRLGYFGLEEPKTKDTRASEAYKKRVYHMLAIVGQIRQCVFHDKSGAKRFDLYSFINNIDPEYRDTLDYLVEERLKSINKDFIEGNKVNISLLIDMMKGYEADDIIRLYYDFIVLKSQKNLGFSIKKLREKMLDEYGFRFKDKQYDSVCSKMYKLMDFLLFCNYYRKDVGAGEALVRKLRFSMTDDEKEGIYADEAAKLWGKFRNDFENIADHMNGDVIKELGKADMDFDEKILDSEKKNASDLLYFSKMIYMLTYFLDGKEINDLLTTLISKFDNIKEFLKIMKSSAVDVECELTAGYKLFNDSQRITNELFIVKNIASMRKPAASAKLTMFRDALAILGIDDKITDDRISEILKLKEKGKGIHGLRNFITNNVIESSRFVYLIKYANAQKIREVAKNEKVVMFVLGGIPDTQIERYYKSCVEVPDMNSSLEAKRSELARMIKNIRFDDFKNVKQQAKGRENVAKERAKAVIGLYLTVMYLLVKNLVNVNARYVIAIHCLERDFGLYKEIIPELASKNLKNDYRILSQTLCELCDERDKSPNLFLKKNERLRKCVEVDINNADSIMTRKYRNCIAHLTVVRELKEYIGDIRTVDSYFSIYHYVMQRCITKREDDTKQEEKIKYEDDLLKNHGYTKDFVKALNSPFGYNIPRFKNLSIEQLFDRNEYLTEK

SEQ ID NO: 3317 - protein, 922 aa, Artificial
  Synthetic
MAKKNKMKPRELREAQKKARQLKAAEINNNAAPAIAAMPAEEVIAPAAEKKKSSVKAAGMKSILVSKNKMYITSFGKGNSAVLEYEVDKVDNDNYNKTQLSSEDSSNIELCGVTKVNITFSSKHGLESGVEISTSNPTHRSGESSPVRWDMLGLKSELEKRFFGKTFDDNIHIQFIYNILDIEKILAVYVTNIVYALNNMLGVKGSESYDDFMGYLSARNTYEVFTHPDKSNLSDKVKGNIKKSFSTFNDLLKTKRLGYFGLEEPKTKDNRVSEAYKKRVYHMLAIVGQIRQSVFHDKSSKLHEDLYSFIDIIDPEYRETLDYLVDERFDSINKGFIQGNKVNISLLIDMMKGYEADDIIRLYYDFIVLKSQKNLGFSIKKLREKMLDEYGFRFKDKQYDSVRSKMYKLMDFLLFCNYYRNDVVAGEALVRKLRFSMTDDEKEGIYADEAAKLWGKFRNDFENIADHMNGDVIKELGKADMDFDEKILDSEKKNASDLLYFSKMIYMLTYFLDGKEINDLLTTLISKFDNIKEFLKIMKSSAVDVECELTAGYKLFNDSQRITNELFIVKNIASMRKPAASAKLTMFRDALTILGIDDKITDDRISEILKLKEKGKGIHGLRNFITNNVIESSRFVYLIKYANAQKIREVAKNEKVVMFVLGGIPDTQIERYYKSCVEFPDMNSSLEAKRSELARMIKNISFDDFKNVKQQAKGRENVAKERAKAVIGLYLTVMYLLVKNLVNVNARYVIAIHCLERDFGLYKEIIPELASKNLKNDYRILSQTLCELCDKSPNLFLKKNERLRKCVEVDINNADSSMTRKYRNCIAHLTVVRELKEYIGDIRTVDSYFSIYHYVMQRCITKRENDTKQEDKIKYEDDLLKNHGYTKDFVKALNSPFGYNIPRFKNLSIEQLFDRNEYLTEK

SEQ ID NO: 3318 - protein, 925 aa, Artificial; identical to SEQ ID NO: 3066
  Synthetic

SEQ ID NO: 3319 - protein, 921 aa, Artificial; identical to SEQ ID NO: 3252
  Synthetic

SEQ ID NO: 3320 - protein, 922 aa, Artificial; identical to SEQ ID NO: 3317
  Synthetic

SEQ ID NO: 3321 - protein, 922 aa, Artificial; identical to SEQ ID NO: 2840
  Synthetic

SEQ ID NO: 3322 - protein, 1141 aa, Artificial; identical to SEQ ID NO: 2802
  Synthetic

SEQ ID NO: 3323 - protein, 922 aa, Artificial
  Synthetic
MAKKNKMKPRELREAQKKARQLKAAEINNNAAPAIAAMPVAEVIAPAAEKKKSSVKAAGMKSIFVSENKMYITSFGKGNSAVLEYEVDKVDNNVYNQTQLSSEDSSNIELCGVTKVNITFSSKHGLESGVEISTSNPTHRSGESSPVRWDMLGLKSELEKRFFGKTFDDNIHIQFIYNILDIEKILAVYVTNSVYALNNMLGVKGSESHDDFIGYLSTNNIYDVFIDPDNSSLSDDKKANVRKSLSKFNALLKTKRLGYFGLEEPKTKDTRVSEAYKKRVYHMLAIVGQIRQCVFHDKSSKLDEDLYSFIDIIDPEYRETLDYLVDERFDSINKGFIQGNKVNISLLIDMMKGYEADDIIRLYYDFIVLKSQKNLGFSIKKLREKMLDEYGFRFKDKQYDPVRSKMYKLMDFLLFCNYYRNDVVAGEALVRKLRFSMTDDEKEGIYADEAEKLWGKFRNDFENIADHMNGDVIKELGKADMDFDEKILDSEKKNASDLLYFSKMIYMLTYFLDGKEINDLLTTLISKFDNIKEFLKIMKSSAVNVECELTAGYKLFNDSQRITNELFIVKNIASMRKPAASAKLTMFRDALTILGIDDKITDDRISEILKLKEKGKGIHGLRNFITNNVIESSRFVYLIKYANAQKIRKVAENEKVVMFVLGGIPDTQIERYYKSCVEFPDMNSSLEAKRSELARMIKNISFDDFKNVKQQAKGRENVAKERAKAVIGLYLTVMYLLVKNLVNVNARYVIAIHCLERDFGLYKEIIPELASKNLKNDYRILSQTLCELCDKSPNLFLKKNERLRKCVEVDINNADSSMTRKYRNCIAHLTVVRELKEYIGDIRTVDSYFSIYHYVMQRCITKRENDTKQEDKIKYEDDLLKNHGYTKDFVKALNSPFGYNIPRFKNLSIEQLFDRNEYLTEK

SEQ ID NO: 3324 - protein, 918 aa, Artificial; identical to SEQ ID NO: 2830
  Synthetic

SEQ ID NO: 3325 - protein, 922 aa, Artificial; identical to SEQ ID NO: 3186
  Synthetic

SEQ ID NO: 3326 - protein, 922 aa, Artificial; identical to SEQ ID NO: 2840
  Synthetic

SEQ ID NO: 3327 - protein, 922 aa, Artificial
  Synthetic
MAKKNKMKPRELREAQKKARQFKAAEINNNAVPAIAAMPAAEAAAPAAEKKKSSVKAAGMKSILVSENKMYITSFGKGNSAVLEYEVDNNDYNKTQLSSEDSSNIELCGVNEVNITFSSKHGFESGVEINTSNPTHRSGESSPVRGDMLGLKSELEKRFFGKTFDDNIHIQLIYNILDIEKILAVYVTNIVYALNNMLGVKGSESHDDFIGYLSTNNIYDVFIDPDNSSLSDDKKANVRKSLSKFNALLKTKRLGYFGLEEPKTKDTRASEAYKKRVYHMLAIVGQIRQCVFHDKSGAKRFDLYSFINNIDPEYRDTLDYLVDERFDSINKGFIQGNKVNISLLIDMMKGYEADDIIRLYYDFIVLKSQKNLGFSIKKLREKMLEEYGYRFKDKQYDSVRSKMYKLMDFLLFCNYYRNDVVAGEALVRKLRFSMTDDEKEGIYADEAAKLWGKFRNDFENIADHMNGDVIKELGKADMDFDEKILDSEKKNASDLLYFSKMIYMLTYFLDGKEINDLLTTLISKFDNIKEFLKIMKSSAVDVECELTAGYKLFNDSQRITNELFVVKNIASMRKPAASAKLTMFRDALTILGIDDKITDDRISEILKLKEKGKGIHGLRNFITNNVIESSRFVYLIKYANAQKIREVAKNEKVVMFVLGGIPDTQIERYYKSCVEFPDMNSSLEAKRSELARMIKNISFDDFKNVKQQAKGRENVAKERAKAVIGLYLTVMYLLVKNLVNVNARYVIAIHCLERDFGLYKEIIPELASKNLKNDYRILSQTLCELCDDRDESPNLFLKKNERLRKCVEVDINNADSSMTRKYRNCIAHLTVVRELKEYIGDIRTVDSYFSIYHYVMQRCITKREDDTKQEEKIKYEDDLLKNHGYTKDFVKALNSPFGYNIPRFKNLSIEQLFDRNEYLTEK

SEQ ID NO: 3328 - protein, 925 aa, Artificial; identical to SEQ ID NO: 3061
  Synthetic

SEQ ID NO: 3329 - protein, 922 aa, Artificial; identical to SEQ ID NO: 2840
  Synthetic

SEQ ID NO: 3330 - protein, 922 aa, Artificial; identical to SEQ ID NO: 2945
  Synthetic

SEQ ID NO: 3331 - protein, 919 aa, Artificial
  Synthetic
MAKKNKMKPRELREAQKKARQLKAAEINNNAAPAIAAMPAAEVIAPAAEKKKSSVKAAGMKSILVSKNKMYITSFGKGNSAVLEYEVDNNDYNQTQLSSKNSSNIELHGVNEVNITFSSKHGFESGVEINTSNPTHRSGESSPVRGDMLGLKSELEKRFFGKTFDDNIHIQLIYNILDIEKILAVYVTNIVYALNNMLGEGDDESHDDFMGYLSTNNTYDVFIDPDNSSLSDDKKANVRKSLSKFNVLLKTKRLGYFGLEEPKTKDNRVSEAYKKRVYHMLAIVGQIRQCVFHDKSGAKRFDLYSFINNIDPEYRDTLDYLVEERLKSINKDFIQGNKVNISLLIDMMKGYEADDIIRLYYDFIVLKSQKNLGFSIKKLREKMLEEYGFRFKDKQYDSVRSKMYKLMDFLLFCNYYRNDIAAGEALVRKLRFSMTDDEKEGLYADEAAKLWGKFRNDFENIADHMNGDVIKELGKADMDFDEKILDSEKKNASDLLYFSKMIYMLTYFLDGKEINDLLTTLISKFDNIKEFLKIMKSSAVNVECELTAGYKLFNDSQRITNELFIVKNIASMRKPAASAKLTMFRDALTILGIDDKITDDRISEILKLKEKGKGIHGLRNFITNNVIESSRFVYLIKYANAQKIRKVAENEKVVMFVLGGIPDTQIERYYKSCVEFPDMNSSLEVKRSELARMIKNISFDDFKNVKQQAKGRENVAKERAKAVIGLYLTVMYLLVKNLVNVNARYVIAIHCLERDFGLYKEIIPELASKNLKNDYRILSQTLCELCDKSPNLFLKKNERLRKCVEVDINNADSSMTRKYRNCIAHLTVVRELKEYIGDIRTVDSYFSIYHYVMQRCITKREDDKKQEEKIKFEDDLLKNHGYTKDFVKALNSPFGYNIPRFKNLSIEQLFDRNEYLTEK

SEQ ID NO: 3332 - protein, 928 aa, Artificial; identical to SEQ ID NO: 3062
  Synthetic

SEQ ID NO: 3333 - protein, 922 aa, Artificial; identical to SEQ ID NO: 3327
  Synthetic

SEQ ID NO: 3334 - protein, 922 aa, Artificial
  Synthetic
MAKKNKMKPRELREAQKKARQLKAAEINNNAAPAIAAMPAAEVIAPVAEKKKSSVKAAGMKSILVSENKMYITSFGKGNSAVLEYEVDNNDYNKTQLSSKDNSNIELGDVNEVNITFSSKHGFGSGVEINTSNPTHRSGESSPVRGDMLGLKSELEKRFFGKTFDDNIHIQLIYNILDIEKILAVYVTNIVYALNNMLGVKGSESHDDFIGYLSTNNTYDVFIDPDNSSLSDDKKANVRKSLSKFNVLLKTKRLGYFGLEEPKTKDTRVSQAYKKRVYHMLAIVGQIRQCVFHDKSGAKRFDLYSFINNIDPEYRETLDYLVDERFDSINKGFIEGNKINISLLIDMMKGYEADDIIRLYYDFIVLKSQKNLGFSIKKLREKMLDEYGFRFKDKQYDPVRSKMYKLMDFLLFCNHYRNDVAAGEALVRKLRFSMTDDEKEGIYADEAAKLWGKFRNDFENIADHMNGDVIKELGKADMDFDEKILDSEKKNASDLLYFSKMIYMLTYFLDGKEINDLLTTLISKFDNIKEFLKIMKSSAVDVECELTAGYKLFNDSQRITNELFIVKNIASMRKPAASAKLTMFRDALTILGIDDNITDDRISEILKLKEKGKGIHGLRNFITNNVIESSRFVYLIKYANAQKIREVAKNEKVVMFVLGGIPDTQIERYYKSCVEFPDMNSSLEAKRSELARMIKNISFDDFKNVKQQAKGRENVAKERAKAVIGLYLTVMYLLVKNLVNVNARYVIAIHCLERDFGLYKEIIPELASKNLKNDYRILSQTLCELCDDRDESPNLFLKKNKRLRKCVEVDINNADSSMTRKYRNCIAHLTVVRELKEYIGDIRTVDSYFSIYHYVMQRCITKRENDTKQEEKIKYEDDLLKNHGYTKDFVKALNSPFGYNIPRFKNLSIEQLFDRNEYLTEK

SEQ ID NO: 3335 - protein, 922 aa, Artificial; identical to SEQ ID NO: 2906
  Synthetic

SEQ ID NO: 3336 - protein, 919 aa, Artificial; identical to SEQ ID NO: 2825
  Synthetic

SEQ ID NO: 3337 - protein, 922 aa, Artificial; identical to SEQ ID NO: 2945
  Synthetic

SEQ ID NO: 3338 - protein, 954 aa, Artificial
  Synthetic
MGKKIHARDLREQRKTDRTEKFADQNKKREAERAVQKKDAAVSVKSVSSVSSKKDNVTKSMAKAAGVKSVFAVGNTVYMTSFGRGNDAVLEQKIVDTSHEPLNIDDPAYQLNVVTMNGYSVTGHRGETVSAVTDNPLRRFNGGKKDEPEQSVPTDMLCLKPTLEKKFFGKEFNDNIHIQLIYNILDIEKILAVYSTNAIYALNNMSADENIENSDFFMKRTTDETFDDFEKKKESTNSREKADFDAFEKFIGNYRLAYFADAFYVNKKNPKGKAKNVLREDKELYSVLTLIGKLRHWCVHSEEGRAEFWLYKLNELKDDFKNVLDVVYNRPVEEINNRFIENNKVNIQILGSVYKNTDIAELVRSYYEFLITKKYKNMGFSIKKLRESMLEGKGYADKEYDSVRNKLYQMTDFILYTGYINEDSDRADDLVNTLRSSLKEDDKTTVYCKEADYLWKKYRESIREVADALDGDNIKRLSKSNIEIQEDKLRKCFISYADSVSEFTKLIYLLTRFLSGKEINDLVTTLINKFDNIRSFLEIMDELGLDRTFTAEYSFFEGSTKYLAELVELNSFVKSCSFDINAKRTMYRDALDILGIKSGKTEEDIEKMIDNILQIDANGDKKLKKNNGLRNFIASNVIDSNRFKYLVRYGNPKKIRETAKCKPAVRFVLNEIPDAQIERYYEACCPKNTALCSANKRREKLADMIAEIKFENFSDAGNYQKANVTSKTHEAEIKRKNQAIIRLYLTVMYIMLKNLVNVNARYVIAFHCVERDTKLYAESGLEVGNIEKNKTNLTMAVMGVKLENGIIKTEFDKSLAENAANRYLRNARWYKLILDNLKKSERAVVNEFRNTVCHLNAIRNININIDGIKEVENYFALYHYLIQKHLENRFADKKVERDTGDFISKLEEHKTYCKDFVKAYCTPFGYNLVRYKNLTIDGLFDKNYPGKDDSDKQK

SEQ ID NO: 3339 - protein, 923 aa, Artificial
  Synthetic
MAKKNKMKPRELREAQKKARQLKAAEINNNAVPAIAAMPAAEAAAPAVEKKKSSVKAAGMKSILVSENKMYITSFGNGNSAVLEYEVDNNDYNKTQLSSEDNSNIELCDVDEVNITFSSKHGFESGVEINTSNPTHRSGESSPVRGDMLGLKSELEKRFFGKTFDDNIHIQLIYNILDIEKILAVYVTNIVYALNNMLGIKKSESYDDFMGYLSARNTYEVFTHPDKSNLSDKVKGNIKKSLSKFNVLLKTKRLGYFGLEEPKTKDKRVSEAYKKRVYHMLAIVGQIRQSVFHDKSSKLDEDLYSFIDIIDSEYRETLDYLVDERFDSINKGFIQGNKVNISLLIDMMKDDYEADDIIRLYYDFIVLKSQKNLGFSIKKLREKMLDEYGFRFKDKQYDSVRSKMYMLMDFLLFCNYYRNDVVAGEALVRKLRFSMTDDEKEGIYADEASKLWGKFRNDFENIADHMNGDVIKELGKADMDFDEKILDSEKKNASDLLYFSKMIYMLTYFLDGKEINDLLTTLISKFDNIKEFLKIMKSSAVDVECELTAGYKLFNDSQRITNELFIVKNIASMRKPASSAKLTMFRDALTILGIDDNITDDRISEILKLKEKGKGIHGLRNFITNNVIESSRFVYLIKYANAQKIRKVAKNEKVVMFVLGGIPDTQIERYYKSCVEFPDMNSSLEVKRSELARMIKNISFDDFKNVKQQAKGRENVAKERAKAVIGLYLTVMYLLVKNLVNVNARYVIAIHCLERDFGLYKEIIPELASKNLKNDYRILSQTLCELCDDRDESPNLFLKKNKRLRKCVEVDINNADSSMTRKYRNCIAHLTVVRELKEYIGDIRTVDSYFSIYHYVMQRCITKREDDKKQEEKIKYEDDLLKNHGYTKDFVKALNSPFGYNIPRFKNLSIEQLFDRNEYLTEK

SEQ ID NO: 3340 - protein, 918 aa, Artificial; identical to SEQ ID NO: 2830
  Synthetic

SEQ ID NO: 3341 - protein, 922 aa, Artificial
  Synthetic
MAKKNKMKPRELREAQKKARQLKAAEINNNAVPAIAAMPAAEVIAPAAEKKKSSVKAAGMKSILVSENKMYITSFGKGNSAVLEYEVDKVDNNNYNKTQLSSKDNSNIELGDVNEVNITFSSKRGNESGVEINTSNPTHRSGESSPVRWDMLGLKSELEKRFFGKTFDDNIHIQLIYNILDIEKILAVYVTNIVYALNNMLGIKKSESYDDFMGYLSARNTYEVFTHPDKSNLSDKAKGNIKKSFSTFNDLLKTKRLGYFGLEEPKTKDTRVSQAYKKRVYHMLAIVGQIRQSVFHDKSSKLDEDLYSFIDIIDSEYRETLDYLVDERFDSINKGFIQGNKVNISLLIDMMKGYEADDIIRLYYDFIVLKSQKNLGFSIKKLREKMLDEYGFRFKDKQYDSVRSKMYKLMDFLLFCNYYRNDIAAGEALVRKLRFSMTDDEKEGIYADEAEKLWGKFRNDFENIADHMNGDVIKELGKADMDFDEKILDSEKKNASDLLYFSKMIYMLTYFLDGKEINDLLTTLISKFDNIKEFLKIMKSSAVDVECELTAGYKLFNDSQRITNELFIVKNIASMRKPAASAKLTMFRDALTILGIDDNITDDRISEILKLKEKGKGIHGLRNFITNNVIESSRFVYLIKYANAQKIREVAKNEKVVMFVLGGIPDTQIERYYKSCVEFPDMNSSLEAKRSELARMIKNISFDEFKNVKQQAKGRENVAKERAKAVIGLYLTVMYLLVKNLVNVNARYVIAIHCLERDFGLYKEIIPELASKNLKNDYRILSQTLCELCDKSPNLFLKKNERLRKCVEVDINNADSSMTRKYRNCIAHLTVVRELKEYIGDIRTVDSYFSIYHYVMQRCITKRENDTKQEDKIKYEDDLLKNHGYTKDFVKALNSPFGYNIPRFKNLSIEQLFDRNEYLTEK

SEQ ID NO: 3342 - protein, 904 aa, Artificial
  Synthetic
MNNQPRKSTSKRLGVQTIVNKNNNIFVFSNNQPKTKSVQLADEHQQLIEQNNDLDDFKTNLGYGNIKFGLSNNTLEAFYPNQYTIHKKSSLINQWLVQKYCPTQCPDSNLILQLIHNNEDFKKIIALYLDMVFSMKVFKSDRNEDYISKIFNNMNAQKIIGKVKPVIDSIKKRPYLFGFDPRDSASDQQIAYHLKNISMLRNYIAHDSDDNLKLDSDVYASLTEQLDQFIEQENKKFTEQNGHNLALISQFYPSWSDEQVVKNYHDYHFNMLDKNLGVNLRQIALLIREKNNISQVLDDDRRAKFNVVLKFYLYTWLKENQAQLDDYIQQLRQAQLDDKDAIYQKIAQDIPADNINRLIKLCKQIDFQTKPTRFKHIPVKTINEQWDYRVLMIYSLTKFLTIKETNELISTLLNKIEAISNLLEIDRALKLQAVDAIQPNQWFFASLPMPKKPAKNTKQPKLKHQSRPKPTNGIRGLAELQAQIQPSITHSVSSDNQSIQHQPVTTSLKSIDYERIARQLTIVNRIRSYHQPKHAEYHRQELIDAISLFYGVDQDKIADDTFEEKIKIRVNGSTQSVPRSLKNILRNNVIKTKFFNYLVRYVEPKKVANLLHGNYGLALFLVQQLTPSQLESLMNEYIKLEDENQLVGQAPREELTEVQKQRLEQYEHQLAMIFSEKNLLNVLRESQDDGRKISFIKPYLTCIYLLIKNLNRINAYYSIAFSMYERDYKLLKLSQGQTIKDAYFNCELTESLLANNKPHKIVFDDIESLKKCNSNQQSEETDYQRIHSTEKQTNLKNLFKAYRNQILHYNVVDHLLSPDFRFPDEFEYRNYFRIYQWLMQCSLLDMEQAGEVNTFTNLLAKYRADLDKYQRYSKKFVYQINLLFAYNYARYKDLSDERIFNRKY

SEQ ID NO: 3343 - protein, 919 aa, Artificial; identical to SEQ ID NO: 2876
  Synthetic

SEQ ID NO: 3344 - protein, 919 aa, Artificial; identical to SEQ ID NO: 2844
  Synthetic

SEQ ID NO: 3345 - protein, 922 aa, Artificial; identical to SEQ ID NO: 3210
  Synthetic

SEQ ID NO: 3346 - protein, 923 aa, Artificial; identical to SEQ ID NO: 3058
  Synthetic

SEQ ID NO: 3347 - protein, 919 aa, Artificial; identical to SEQ ID NO: 2877
  Synthetic

SEQ ID NO: 3348 - protein, 921 aa, Artificial; identical to SEQ ID NO: 3181
  Synthetic

SEQ ID NO: 3349 - protein, 921 aa, Artificial; identical to SEQ ID NO: 3127
  Synthetic

SEQ ID NO: 3350 - protein, 919 aa, Artificial
  Synthetic
MAKKNKMKPRELREAQKKARQFKAAEINNNAAPAIAAMPAAEVIAPAAEKKKSSVKAAGMKSILVSKNKMYITSFGKGNSAVLEYEVDNNDYNQTQLSSKNSSNIELHGVNEVNITFSSKHGFESGVEINTSNPTHRSGESSPVRGDMLGLKSELEKRFFGKTFDDNIHIQLIYNILDIEKILAVYVTNIVYALNNMLGEGDDESHDDFMGYLSAKNTYDVFTDPDESDLSKNIKGNIKKSLSKFNDLLKTKRLGYFGLEEPKTKDTNALEAYKKRVYHMLAIVGQIRQSVFHDKSSKLDEDLYSFIDIIDSEYRETLDYLVDERFDSINKGFIQGNKVNISLLIDMMKGYEADDIIRLYYDFIVLKSQKNLGFSIKKLREKMLEEYGYRFKDKQYDSVRSKMYKLMDFLLFCNYYRNDVVAGEALVRKLRFSMTDDEKEGIYADEAAKLWGKFRNDFENIADHMNGDVIKELGKADMDFDEKILDSEKKNASDLLYFSKMIYMLTYFLDGKEINDLLTTLISKFDNIKEFLKIMKSSAVDVECELTAGYKLFNDSQRITNELFIVKNIASMRKPAASAKLTMFRDALTILGIDDKITDDRISEILKLKEKGKGIHGLRNFITNNVIESSRFVYLIKYANAQKIREVAENEKVVMFVLGGIPDTQIERYYKSCVEFPDMNSPLEAKRSELARMIKNIRFDDFKNVKQQAKGRENVAKERAKAVIGLYLTVMYLLVKNLVNVNARYVIAIHCLERDFGLYKEIIPELASKNLKNDYRILSQTLCELCDKSPNLFLKKNERLRKCVEVDINNADSSMTRKYRNCIAHLTVVRELKEYIGDIRTVDSYFSIYHYVMQRCITKREDDIKQEEKIKYEDDLLKNHGYTKDFVKALNSPFGYNIPRFKNLSIEQLFDRNEYLTEK

SEQ ID NO: 3351 - protein, 956 aa, Artificial; identical to SEQ ID NO: 3282
  Synthetic

SEQ ID NO: 3352 - protein, 922 aa, Artificial
  Synthetic
MAKKNKMKPRELREAQKKARQLKAAEINNNAVPAIAAMPAAEAAAPAAEKKKSSVKAAGMKSILVSENKMYITSFGKGNSAVLEYEVDNNDYNKTQLSSKDNSNIELCDVDEVNITFSSKHGFESGVEINTSNPTHRSGESSPVRGDMLGLKSELEKRFFGKTFDDNIHIQLIYNILDIEKILAVYVTNIVYALNNMLGEGDDESHDDFMGYLSAKNTYDVFTDPDESDLSKNIKGNIKKSLSKFNDLLKTKRLGYFGLEEPKTKDTNALEAYKKRVYHMLAIVGQIRQSVFHDKSSKLDEDLYSFIDIIDSEYRETLDYLVDERFDSINKGFIQGNKVNISLLIDMMKGYEADDIIRLYYDFIVLKSQKNLGFSIKKLREKMLEEYGYRFKDKQYDSVRSKMYKLMDFLLFCNYYRNDVAAGEALVRKLRFSMTDDEKEGIYADEAEKLWGKFRNDFENIADHMNGDVIKELGKADMDFDEKILDSEKKNASDLLYFSKMIYMLTYFLDGKEINDLLTTLISKFDNIKEFLKIMKSSAVDVECELTAGYKLFNDSQRITNELFIVKNIASMRKPAASAKLTMFRDALTILGIDDKITDDRISEILKLKEKGKGIHGLRNFITNNVIESSRFVYLIKYANAQKIRKVAENEKVVMFVLGGIPDTQIERYYKSCVEFPDMNSSLEAKRSELARMIKNISFDDFKNVKQQAKGRENVAKERAKAVIGLYLTVMYLLVKNLVNVNARYVIAIHCLERDFGLYKEIIPELASKNLKNDYRILSQTLCELCDDRDKSPNLFLKKNKRLRKCVEVDINNADSSMTRKYRNCIAHLTVVRELKEYIGDIRTVDSYFSIYHYVMQRCITKRENDTKQEDKIKYEDDLLKNHGYTKDFVKALNSPFGYNIPRFKNLSIKQLFDRNEYLTEK

SEQ ID NO: 3353 - protein, 954 aa, Artificial; identical to SEQ ID NO: 3314
  Synthetic

SEQ ID NO: 3354 - protein, 922 aa, Artificial
  Synthetic
MAKKNKMKPRELREAQKKARQLKAAEINNNAAPAIAAMPAAEVIAPAAEKKKSSVKAAGMKSILVSENKMYITSFGKGNSAVLEYEVDNNDYNKTQLSSESSSNIELCGVTKVNITFSSKHGFGSGVEINTSNPTHRSGESSPVRWDMLGLKSELEKRFFGKTFDDNIHIQLIYNILDIEKILAVYVTNIVYALNNMLGVKGSESYDDFMGYLSAQNTYYIFTHPDKSNLSDKVKGNIKKSLSKFNDLLKTKRLGYFGLEEPKTKDTRVSQAYKKRVYHMLAIVGQIRQCVFHDKSGAKRFDIYSFINNIDPEYRETLDYLVDERFDSINKGFIQGNKVNISLLIDMMKGYEADDIIRLYYDFIVLKSQKNLGFSIKKLREKMLDEYGFRFKDKQYDSVRSKMYKLMDFLLFCNYYRNDVVAGEALVRKLRFSMTDDEKEGIYADEAEKLWGKFRNDFEYIADHMNGDVIKELGKADMDFDEKILDSEKKNASDLLYFSKMIYMLTYFLDGKEINDLLTTLISKFDNIKEFLKIMKSSAVDVECELTAGYKLFNDSQRITNELFIVKNIASMRKPAASAKLTMFRDALTILGIDDNITDDRISEILKLKEKGKGIHGLRNFITNNVIESSRFVYLIKYANAQKIREVAENEKVVMFVLGGIPDTQIERYYKSCVEVPDMNSSLEAKRSELARMIKNISFDDFKNVKQQAKGRENVAKERAKAVIGLYLTVMYLLVKNLVNVNARYVIAIHCLERDFGLYKEIIPELASKNLKNDYRILSQTLCELCDDRDESPNLFLKKNKRLRKCVEVDINNADSSMTRKYRNCIAHLTVVRELKEYIGDIRTVDSYFSIYHYVMQRCITKREDDKKQEEKIKYEDDLLKNHGYTKDFVKALNSPFGYNIPRFKNLSIEQLFDRNEYLTEK

SEQ ID NO: 3355 - protein, 919 aa, Artificial; identical to SEQ ID NO: 3116
  Synthetic

SEQ ID NO: 3356 - protein, 922 aa, Artificial
  Synthetic
MAKKNKMKPRELREAQKKARQLKAAEINNNAAPAIAAMPAEEVIAPAAEKKKSSVKAAGMKSILVSKNKMYITSFGKGNSAVLEYEVDKVDNDNYNKTQLSSEDSSNIELCGVTKVNITFSSKHGLESGVEINTSNPTHRSGESSPVRWDMLGLKSELEKRFFGKTFDDNIHIQLIYNILDIEKILAVYVTNIVYALNNMLGVKGSESHDDFIGYLSTNNIYDVFIDPDNSSLSDDKKANVRKSLSKFNVLLKTKRLGYFGLEEPKTKDTRVSQAYKKRVYHMLAIVGQIRQCVFHDKSGAKRFDLYSFINNIDHEYRETLDYLVDERFDSINKGFIQGNKVNISLLIDMMKGYEADDIIRLYYDFIVLKSQKNLGFSIKKLREKMLEEYGFRFKDKQYDSVRSKMYKLMDFLLFCNYYRNDIAAGEALVRKLRFSMTDDEKEGIYADEAAKLWGKFRNDFENIADHMNGDVIKELGKADMDFDEKILDSEKKNASDLLYFSKMIYMLTYFLDGKEINDLLTTLISKFDNIKEFLKIMKSSAVDVECELTAGYKLFNDSQRITNELFIVKNIASMRKPAASAKLTMFRDALTILGIDDNITDDRISEILKLKEKGKGIHGLRNFITNNVIESSRFVYLIKYANAQKIREVAKNEKVVMFVLGGIPDTQIERYYKSCVEFPDMNSSLEAKRSELARMIKNISFDDFKNVKQQAKGRENVAKERAKAVIGLYLTVMYLLVKNLVNVNARYVIAIHCLERDFGLYKEIIPELASKNLKNDYRTLSQTLCGLCDKSPNLFLKKNERLRKCVEVDINNADSSMTRKYRNCIAHLTVVRELKEYIGDIRTVDSYFSIYHYVMQRCITKRENDTKQEDKIKYEDDLLKNHGYTKDFVKALNSPFGYNIPRFKNLSIEQLFDRNEYLTEK

SEQ ID NO: 3357 - protein, 924 aa, Artificial; identical to SEQ ID NO: 2910
  Synthetic

SEQ ID NO: 3358 - protein, 919 aa, Artificial
  Synthetic
MAKKNKMKPRELREAQKKARQLKAAEINNNAAPAIAAMPAAEVIAPAAEKKKSSVKAAGMKSILVSKNKMYITSFGKGNSAVLEYEVDNNDYNQTQLSSKNSSNIELHGVNEVNITFSSKHGFESGVEINTSNPTHRSGESSPVRLDMLGLKSELEKRFFGKTFDDNIHIQLIYNILDIEKILAVYVTNIVYALNNMLGIKDSESYDDFMGYLSARNTYEVFTHPDKSNLSDKVKGNIKKSLSKFNDLLKTKRLGYFGLEEPKTKDKRVSEAYKKRVYHMLAIVGQIRQSVFHDKSNELDEYLYSFIDIIDSEYRDTLDYLVDERFDSINKGFVQGNKVNISLLIDMMKGYEADDIIRLYYDFIVLKSQKNLGFSIKKLREKMLDEYGFRFKDKQYDSVRSKMYKLMDFLLFCNYYRNDVVAGEALVRKLRFSMTDDEKEGIYADEAEKLWGKFRNDFENIADHMNGDVIKELGKADMDFDEKILDSEKKNASDLLYFSKMIYMLTYFLDGKEINDLLTTLISKFDNIKEFLKIMKSSAVNVECELTAGYRLFNDSQRITNELFIVKNIASMRKPAASAKLTMFRDALTILGIDDKITDDRISEILKLKEKGKGIHGLRNFITNNVIESSRFVYLIKYANAQKIREVAKNEKVVMFVLGGIPDTQIERYYKSCVEFPDMNSSLEAKRSELARMIKNISFDDFKNVKQQAKGRENVAKERAKAVIGLYLTVMYLLVKNLVNVNARYVIAIHCLERDFGLYKEIIPELASKNLKNDYRILSQTLCELCDESPNLFLKKNERLRKCVEVDINNADSSMTRKYRNCIAHLTVVRELKEYIGDIRTVDSYFSIYHYVMQRCITKREDDKKQEEKIKFEDDLLKNHGYTKDFVKALNSPFGYNIPRFKNLSIEQLFDRNEYLTEK

SEQ ID NO: 3359 - protein, 928 aa, Artificial
  Synthetic
MAKKNKMKPRELREAQKKARQLKVAEINNNAVPAIAAMPAAQVIAPAAEKKKSSVKAAGMKSILVSENKMYITSFGKGNSAVLEYEVDKVDDNDYNKTQLSSKGSSNIELHGVNEVNITFSSKHGFESGVEINTSNPTHRSGESSPVRGDMLGLKSELEKRFFGKTFDDNIHIQLIYNILDIEKILAVYVTNIVYALNNMLGIKDSESYDDFMGYLSAKNTYEVFTHPDKSNLSDKAKGNIKKSFSTFNDLLKTKRLGYFGLEEPKTKDTRVSQAYKKRVYHMLAIVGQIRQCVFHDLSEHSEYDLYSFIDNSKKVYRECRETLDYLVDERFDSINKGFIQGNKVNISLLIDMMKGYEADDIIRLYYDFIVLKSQKNLGFSIKKLREKMLDEYGFRFKDKQYDSVRSKMYKLMDFLLFCNYYRNDVVAGEALVRKLRFSMTDDEKEGIYADEAAKLWGKFRNDFENIADHMNGDVIKELGKADMDFDEKILDSEKKNASDLLYFSKMIYMLTYFLDGKEINDLLTTLISKFDNIKEFLKIMKSSAVDVECELTAGYKLFNDSQRITNELFIVKNIASMRKPAASARLTMFRDALTILGIDDKITDDRISEILKLKEKGKGIHGLRNFITNNVIESSRFVYLIKYANAQKIREVAKNEKVVMFVLGGIPDTQIERYYKSCVEFPDMNSSLEAKRSELARMIKNISFDDFKNVKQQAKGRENVAKERAKAVIGLYLTVMYLLVKNLVNVNARYVIAIHCLERDFGLYKEIIPELASKNLKNDYRILSQTLCELCDERDKSPNLFLKKNERLRKCVEVDINNADSIMTRKYRNCIAHLTVVRELKEYIGDIRTVDSYFSIYHYVMQRCITKREDDTKQEDKIKYEDDLLKNHGYTKDFVKALNSPFGYNIPRFKNLSIEQLFDRNEYLTEK

SEQ ID NO: 3360 - protein, 925 aa, Artificial
  Synthetic
MAKKNKMKPRELREAQKKARQLKAAEINNNAAPAIAAMPAAEVIAPAAEKKKSSVKAAGMKSILVSENKMYITSFGKGNSAVLEYEVDKVDNNDYNQTQLSSKGSSNIELGNVNEVNITFSSRRGFESGVEINTSNPTHRSGESSSVRGDMLGLKSELEKRFFGKTFDDNIHIQLIYNILDIEKILAVYVTNIVYALNNMLGVKGSESYDDFMGYLSAQNTYYIFTHPDKSNLSDKVKGNIKKSLSKFNDLLKTKRLGYFGLEEPKTKDKRVSEAYKKRVYHMLAIVGQIRQSVFHDKSNELDEYLYSFIDIIDSEYRDTLDYLVDERFDSINKGFIQGNKVNISLLIDMMKGYEADDIICLYYDFIVLKSQKNLGFSIKKLREKMLDEYGFRFKDKQYDSVRSKMYKLMDFLLFCNYYRNDVVAGEALVRKLRFSMTDDEKEGIYADEAAKLWGKFRNDFENIADHMNGDVIKELGKADMDFDEKILDSEKKNASDLLYFSKMIYMLTYFLDGKEINDLLTTLISKFDNIKEFLKIMKSSAIDVECELTAGYKLFNDSQRITNELFIVKNIASMRKPAASAKLTMFRDALTILGIDDNITDDRISEILKLKEKGKGIHGLRNFITNNVIESSRFVYLIKYANAQKIREVAKNEKVVMFVLGGIPDTQIERYYKSCVEFPDMNSSLEAKRSELARMIKNIRFDDFKNVKQQAKGRENVAKERAKAVIGLYLTVMYLLVKNLVNVNTRYVIAIHCLERDFGLYKEIIPELASKNLKNDYRILSQTLCELCDDRDESPNLFLKKNKRLRKCVEVDINNADSSMTRKYRNCIAHLTVVRELKEYIGDIRTVDSYFSIYHYVMQRCITKRENDTKQKDKIKYEDDLLKNHGYTKDFVKALNSPFGYNIPRFKNLSIEQLFDRNEYLTEK

SEQ ID NO: 3361 - protein, 937 aa, Artificial; identical to SEQ ID NO: 2970
  Synthetic

SEQ ID NO: 3362 - protein, 920 aa, Artificial; identical to SEQ ID NO: 2922
  Synthetic

SEQ ID NO: 3363 - protein, 926 aa, Artificial; identical to SEQ ID NO: 3065
  Synthetic

SEQ ID NO: 3364 - protein, 919 aa, Artificial; identical to SEQ ID NO: 3009
  Synthetic

SEQ ID NO: 3365 - protein, 937 aa, Artificial; identical to SEQ ID NO: 2970
  Synthetic

SEQ ID NO: 3366 - protein, 921 aa, Artificial
  Synthetic
MAKKNKMKPRELREAQKKARQLKAAEINNNAAPAIAAMPAAQVIAPAAEKKKSSVKAAGMKSILVSENKMYITSFGKGNSAVLEYEVDKVDNNNYNKTQLSSKDNSNIELCDVGKVNITFSSRRGFESGVEINTSNPTHRSGESSSVRGDMLGLKSELEKRFFGKNFDDNIHIQLIYNILDIEKILAVYVTNIVYALNNMLGEGDESNYDFMGYLSTFNTYKVFTNPNGSTLSDDKKENIRKSLSKFNALLKTKRLGYFGLEEPKTKDTRASEAYKKRVYHMLAIVGQIRQCVFHDKSGAKRFDLYSFINNIDPEYRETLDYLVDERFDSINKGFIQGNKVNISLLIDMMKGYEADDIIRLYYDFIVLKSQKNLGFSIKKLREKMLEEYGYRFKDKQYDSVRSKMYKLMDFLLFCNYYRNDVVAGEALVRKLRFSMTDDEKEGIYADEASKLWGKFRNDFENIADHMNGDVIKELGKADMDFDEKILDSEKKNASDLLYFSKMIYMLTYFLDGKEINDLLTTLISKFDNIKEFLKIMKSSAVDVECELTAGYKLFNDSQRITNELFIVKNIASMRKPASSAKLTMFRDALTILGIDDNITDDRISEILKLKEKGKGIHGLRNFITNNVIESSRFVYLIKYANAQKIRKVAKNEKVVMFVLGGIPDTQIERYYKSCVEFPDMNSSLEVKRSELARMIKNISFDDFKNVKQQAKGRENVAKERAKAVIGLYLTVMYLLVKNLVNVNARYVIAIHCLERDFGLYKEIIPELASKNLKNDYRILSQTLCELCDESPNLFLKKNERLRKCVEVDINNADSSMTRKYRNCIAHLTVVRELKEYIGDIRTVDSYFSIYHYVMQRCITKREDDKKQEEKIKFEDDLLKNHGYTKDFVKALNSPFGYNIPRFKNLSIEQLFDRNEYLTEK

SEQ ID NO: 3367 - protein, 921 aa, Artificial
  Synthetic
MAKKNKMKPRELREAQKKARQFKAAEINNNAAPAIAAMPAAEVIAPVAEKKKSSVKAAGMKSILVSENKMYITSFGKGNSAVLEYEVDNNDYNKTQLSSKDNSNIELCGVNEVNITFSSKHGFESGVEINTSNPTHRSGESSPVRWDMLGLKSELEKRFFGKTFDDNIHIQLIYNILDIEKILAVYVTNIVYALNNMLGEGDESNYDFMGYLSTFNTYKVFTNPNGSTLSDDKKENIRKSLSKFNALLKTKRLGYFGLEEPKTKDTRVLEAYKKRVYHMLAIVGQIRQCVFHDLSEHSEYDLYSFIDNSKKVYRECRETLDYLVDERFDSINKGFVQGNKVNISLLIDMMKGYEADDIIRLYYDFIVLKSQKNLGFSIKKLREKMLDEYGFRFKDKQYDSVRSKMYKLMDFLLFCNYYRNDIAAGEALVRKLRFSMTDDEKEGIYADEAAKLWGKFRNDFENIADHMNGDVIKELGKADMDFDEKILDSEKKNASDLLYFSKMIYMLTYFLDGKEINDLLTTLISKFDNIKEFLKIMKSSAVDVECELTAGYKLFNDSQRITNELFIVKNIASMRKPAASAKLTMFRDALTILGIDDKITDDRISEILKLKEKGKGIHGLRNFITNNVIESSRFVYLIKYANAQKIREVAKNEKVVMFVLGGIPDTQIERYYKSCVEFPDMNSSLGVKRSELARMIKNISFDDFKNVKQQSKGRENVAKERAKAVIGLYLTVMYLLVKNLVNVNARYVIAIHCLERDFGLYKEIIPELASKNLKNDYRILSQTLCELCDKSPNLFLKKNERLRKCVEVDINNADSSMTRKYRNCIAHLTVVRELKEYIGDICTVDSYFSIYHYVMQRCITKRENDTKQEEKIKYEDDLLKNHGYTKDFVKALNSPFGYNIPRFKNLSIEQLFDRNEYLTEK

SEQ ID NO: 3368 - protein, 919 aa, Artificial; identical to SEQ ID NO: 3009
  Synthetic

SEQ ID NO: 3369 - protein, 1051 aa, Artificial
  Synthetic
MRFLVLKDNDKLKKGTLHDKKEIASSNYYRFLLKQKIITEDEKEIEKYLSELNAISNKYSSIENKKFSYEIAVNSSKDNIELNTSDIVAALLRKLNLDFSLNTVDKKIILTINDIKKSDYKEIKLIDNDDYKLSIFIRFKEKTLKGKAKRLGLKSIFVKDNELLLTSFNKGDDVIIEKIIVDNDITKVKNIANPENYSIKEVSNKKLILANAKLKAEIDNPSYSRNNSGAVARQDYLQRKAKIENDFFGKIFNDNIHIQLAYNIMDIKKIFGLYVNEGVFTMENLSRDFERVEDFVGTLRYENSYYDLKDEKKKKVFEEYFDQVDDYLKYFSNAFSKDSFDKDKKGENKKRENRKIETYNILRTLSMFRQFSVHSYTDLYNLNQNNNKDLIKIINDRYDTVYSNLLDNTVKTSKNNIELIFDILKLNKNDDNLKKEILNDYFNFVINKSLSHMGFKFKTLKELLLKKLGINVLDDNKKDTYMVINFIIYKIISDKEDIVNKYVSELLASEKTTDKDSIYDRFADEIKPLFKNIITEDWVNYSKGKDKSDFYIDESLLNKPSSSNNIFYKAVYFLTVFLDKKEINMLLTSLINKVNNIKGFIKVLNNNSELLPEYNMFGNVEELDEISSSLNVVMTIARMQKNFNKKFKNDKNDSANKISLEMLYDAYCLFGYEGNKETFSKDTEQDRNQIKGKRIAKFQNKIGSAIANSNQFRYIIKYASPKECYKVMKNTSVIQFVLNEIPQTQIDKYLDGKYDGASKEDKIKFLSEELSSLNIYYMRQSYDINNDTEANQMKLPKLYMTVIYQIIKQMVRINAYYNIAFSCLERDRALYNIPYDYLEFSDLILVEAFSKGDKEFDLSNKTSKDNKDKINHISIDAPTNKYKRKVDGVIIDAEGPKLGSCKYSWIKDNIETFKSIFYKQDIKDVCTEIEKCNIVYRKTVRNNIAHLNVISNLGDMINEFCTSKKKMRSYFELYQYAIQKNFLLLFENNKYKMTEFLEECKNEIYSTKTYSKKLLHILNMPFAYNMARYKNLTIEDIFYDRFDNKIKKETE

SEQ ID NO: 3370 - protein, 919 aa, Artificial; identical to SEQ ID NO: 3263
  Synthetic

SEQ ID NO: 3371 - protein, 926 aa, Artificial; identical to SEQ ID NO: 3079
  Synthetic

SEQ ID NO: 3372 - protein, 1141 aa, Artificial; identical to SEQ ID NO: 2802
  Synthetic

SEQ ID NO: 3373 - protein, 925 aa, Artificial
  Synthetic
MAKKNKMKPRELREAQKKARQLKAAEIKNNAVPAIAAMPAAEAAAPAVEKKKSSVKAAGMKSILVSENKMYITSFGKGNSAVLEYEVDKVDNNNYNKTQLSSKDNSNIELGDVNEVNITFSSKRGNESGVEINTSNPTHRSGESSPVRWDMLGLKSELEKRFFGKTFDDNIHIQLIYNILDIEKILAVYVTNIVYALNNMLGEGGDESHDDFMGYLSAKNTYDVFTDPDESDLSKNIKGNIKKSLSKFNDLLKTKRLGYFGLEEPKTKDKRASEAYKKRVYHMLAIVGQIRQSVFHDKSSKLHEDLYSFIDIIDSEYRETLDYLVDERFDSINKGFIQGNKVNISLLIDMMKGYEADDIIRLYYDFIVLKSQKNLGFSIKKLREKMLEEYGFRFKDKQYDSVRSKMYKLMDFLLFCNYYRNDVVAGEALVRKLRFSMTDDEKEGIYADEAAKLWGKFRNDFENIADHMNGDVIKELGKADMDFDEKILDSEKKNASDLLYFSKMIYMLTYFLDGKEINDLLTTLISKFDNIKEFLKIMKSSAVDVECKLTAGYKLFNDSQRITNELFIVKNIASMRKPAASAKLTMFRDALTILGIDDKITDDRISEILKLKEKGKGIHGLRNFITNNVIESSRFVYLIKYANAQKIREVAKNEKVVMFVLGGIPDTQIERYYKSCVEFPDMNSSLEAKRSELARMIKNISFDDFKNVKQQAKGRENVAKERAKAVIGLYLTVMYLLVKNLVNVNARYVIAIHCLERDFGLYKEIIPELASKNLKNDYRILSQTLCELCDDRDESPNLFLKKNKRLRKCVEVDINNADSSMTRKYRNCIAHLTVVRELKEYIGDIRTVDSYFSIYHYVMQRCITKREDDTKQEEKIKYEDDLLKNHGYTKDFVKALNSPFGYNIPRFKNLSIEQLFDRNEYLTEK

SEQ ID NO: 3374 - protein, 922 aa, Artificial
  Synthetic
MAKKNKMKPRELREAQKKARQLKAAEIKNNAVPAIAAMPAVEVIAPAAEKKKSSVKAAGMKSILVSENKMYITSFGKGNSAVLEYEVDNNDYNKTQLSSKDNSNIELGNVNEVNITFSSRRGFESGVEINTSNPTHRSGESSSVRGDMLGLKSKLEKRFFGKTFDDNIHIQLIYNILDIEKILAVYVTNIVYALNNMLGIKDSESYDDFMGYLSARNTYEVFTHPDKSNLSDKVKGNIKKSFSTFNDLLKTKRLGYFGLEEPKTKDTRVSQAYKKRVYHMLAIVGQIRQSVFHDKSSKLHEDLYSFIDIIDSEYRETLDYLVDERFDSINKGFIQGNKVNISLLIDMMKGYEADDIIRLYYDFIVLKSQKNLGFSIKKLREKMLDEYGFRFKDKQYDSVRSKMYKLMDFLLFCNYYRNDVAAGEALVRKLRFSMTDDEKEGIYADEAAKLWGKFRNDFENIADHMNGDVIKELGKADMDFDEKILDSEKKNASDLLYFSKMIYMLTYFLDGKEINDLLTTLISKFDNIKEFLKIMKSSAVDVECELTAGYKLFNDSQRITNELFIVKNIASMRKPAASAKLTMFRDALTILGIDDKITDDRISEILKLKEKGKGIHGLRNFITNNVIESSRFVYLIKYANAQKIREVAKNEKVVMFVLGGIPDTQIERYYKSCVEFPDMNSSLEAKRSELARMIKNISFDDFKNVKQQAKGRENVAKERAKAVIGFYLTVMYLLVKNLVNVNARYVIAIHCLERDFGLYKEIIPELASKNLKNDYRILSQTLCELCDDRDESPNLFLKKNKRLRKCVEVDINNADSSMTRKYRNCIAHLTVVRELKEYIGDIRTVDSYFSIYHYVMQRCITKREDDTKQEDKIKYEDDLLKNHGYTKDFVKALNSPFGYNIPRFKNLSIEQLFDRNEYLTEK

SEQ ID NO: 3375 - protein, 922 aa, Artificial
  Synthetic
MAKKNKMKPRELREAQKKARQLKAAEINNNAVPAIAAMPAAEVIAPAAEKKKSSVKAAGMKSILVSENKMYITSFGKGNSAVLEYEVDKVDNNNYNKTQLSSESSSNIELCGVTKVNITFSSKHGFGSGVEINTSNPTHRSGESSPVRWDMLGLKSELEKRFFGKTFDDNIHIQLIYNILDIEKILAVYVTNIVYALNNMLGVKGSESYDDFMGYLSAQNTYYIFTHPDKSNLSDKVKGNIKKSLSKFNDLLKTKRLGYFGLEEPKTKDTRVSQAYKKRVYHMLAIVGQIRQCVFHDKSGAKRFDLYSFINNIDPEYRDTLDYLVDERFDSINKGFIQGNKVNISLLIDMMKGYEVDDIIRLYYDFIVLKSQKNLGFSIKKLREKMLDEYGFRFKDKQYDSVRSKMYKLMDFLLFCNYYRNDVAAGEALVRKLRFSMTDDEKEGIYADEAEKLWGKFRNDFENIADHMNGDAIKELGKADMDFDEKILDSEKKNASDLLYFSKMIYMLTYFLDGKEINDLLTTLISKFDNIKEFLKIMKSYAVDVECELTAGYKLFNDSQRITNELFIVKNIASMRKPAASAKLTMFRDALTILGIDDNITDDRISEILKLKEKGKGIHGLRNFITNNVIESSRFVYLIKYANAQKIREVAKNEKVVMFVLGGIPDTQIERYYKSCVEFPDMNSSLEAKRSELARMIKNIRFDDFKNVKQQAKGRENVAKERAKAVIGLYLTVMYLLVKNLVNVNARYVIAIHCLERDFGLYKEIIPELASKNLKNDYRILSQKLCELCDKSPNLFLKKNERLRKCVEVDINNADSIMTRKYRNCIAHLTVVRELKEYIGDIRTVDSYFSIYHYVMQRCITKRENDTKQEDKIKYEDDLLKNHGYTKDFVKALNSPFGYNIPRFKNLSIEQLFDRNEYLTEK

SEQ ID NO: 3376 - protein, 954 aa, Artificial; identical to SEQ ID NO: 2989
  Synthetic

SEQ ID NO: 3377 - protein, 919 aa, Artificial; identical to SEQ ID NO: 2990
  Synthetic

SEQ ID NO: 3378 - protein, 922 aa, Artificial; identical to SEQ ID NO: 2980
  Synthetic

SEQ ID NO: 3379 - protein, 922 aa, Artificial; identical to SEQ ID NO: 3121
  Synthetic

SEQ ID NO: 3380 - protein, 922 aa, Artificial; identical to SEQ ID NO: 2980
  Synthetic

SEQ ID NO: 3381 - protein, 919 aa, Artificial
  Synthetic
MAKKNKMKPRELREAQKKARQLKAAEINNNAVPAIAAMPAAEAAAPAAEKKKSSVKAAGMKSILVSENKMYITSFGKGNSAVLEYEVDNNDYNKTQLSSKDNSNIELCDVNEVNITFSSKHGFESGVEINTSNPTHRSGESSPVRWDMLGLKSELEKRFFGKTFDDNIHIQLIYNILDIEKILAVYITNIVYALNNMLGVKGSESHDDFIGYLSTNNIYDVFIDPDNSSLSDDKKANVRKSLSKFNALLKTKRLGYFGLEEPKTKDNRVSEAYKKRVYHMLAIVGQIRQSVFHDKSSKLHEDLYSFIDIIDSEYRETLDYLVDERFDSINKGFIQGNKVNISLLIDMMKGYEADDIIRLYYDFIVIKSQKNLGFSIKKLREKMLDEYGFRFKDKQYDSVRSKMYKLMDFLLFCNYYRNDVVAGEALVRKLRFSMTDDEKEGIYADEAEKLWGKFRNDFENIADHMNGDVIKELGKADMDFDEKILDSEKKNASDLLYFSKMIYMLTYFLDGKEINDLLTTLISKFDNIKEFLKIMKSSAVNVECELTAGYKLFNDSQRITNELFIVKNIASMRKPAASAKLTMFRDALTILGIDDKITDDRISEILKLKEKGKGIHGLRNFITNNVIESSRFVYLIKYANAQKIREVAKNEKVVMFVLGGIPDTQIERYYKSCVEFPDMNSSLEAKRGELARMIKNISFDDFKNVKQQAKGRENVAKERAKAVIGLYLTVMYLLVKNLVNVNARYVIAIHCLERDFGLYKEIIPELASKNLKNDYRILSQTLCELCDKSPNLFLKKNKRLRKCVEVDINNADSSMTRKYRNCIAHLTVVRELKEYIGDIRTVDSYFSIYHYVMQRCITKRENDTKQEEKIKYEDDLLKNHGYTKDFVKALNSPFGYNIPRFKNLSIEQLFDRNEYLTEK

SEQ ID NO: 3382 - protein, 920 aa, Artificial; identical to SEQ ID NO: 2922
  Synthetic

SEQ ID NO: 3383 - protein, 919 aa, Artificial; identical to SEQ ID NO: 3381
  Synthetic

SEQ ID NO: 3384 - protein, 922 aa, Artificial; identical to SEQ ID NO: 3156
  Synthetic

SEQ ID NO: 3385 - protein, 922 aa, Artificial; identical to SEQ ID NO: 3121
  Synthetic

SEQ ID NO: 3386 - protein, 925 aa, Artificial
  Synthetic
MAKKNKMKPRELREAQKKARQLKAAEINNNAAPAIAAMPAAQVIAPAAEKKKSSVKAAGMKSILVSENKMYITSFGKGNSAVLEYEVDKVDNNNYNKTQLSSKDNSNIELGDVNEVNITFSSKHGFESGVEINTSNPTHRSGESSPVRWDMLGLKSELEKRFFGKTFDDNIHIQLIYNILDIEKILAVYVTNIVYALNNMLGIKGSESYDDFMGYLSARNTYEVFTHPDKSNLSDKVKGNIKKSLSKFNDLLKTKRLGYFGLEEPKTKDTRVSQAYKKRVYHMLAIVGQIRQSVFHDKSSKLDEDLYSFIDIIDSEYRETLDYLVDERFDSINKGFIQGNKVNISLLIDMMKGYEADDIIRLYYDFIVLKSQKNLGFSIKKLREKMLDEYGFRFKDKQYDSVRSKMYKLMDFLLFCNYYRNDVVAGEALVRKLRFSMTDDEKEGIYADEASKLWGKFRNDFENIADHMNGDVIKELGKADMDFDEKILDSEKKNASDLLYFSKMIYMLTYFLDGKEINDLLTTLISKFDNIKEFLKIMKSSAVDVECELTAGYKLFNDSQRITNELFIVKNIASMRKPASSAKLTMFRDALTILGIDDNITDDRISEILKLKEKGKGIHGLRNFITNNVIESSRFVYLIKYANAQKIREVAKNEKVVMFVLGGIPDTQIERYYKSCVEFPDMNSSLEAKRSELARMIKNIRFDDFKNVKQQAKGRENVAKERAKAVIGLYLTVMYLLVKNLVNVNARYVIAIHCLERDFGLYKEIIPELASKNLKNDYRILSQTLCELCDDRDESPNLFLKKNKRLRKCVEVDINNADSSMTRKYRNCIAHLTVVRELKEYIGDIRTVDSYFSIYHYVMQRCITKREDDTKQEEKIKYEDDLLKNHGYTKDFVKALNSPFGYNIPRFKNLSIEQLFDRNEYLTEK

SEQ ID NO: 3387 - protein, 919 aa, Artificial; identical to SEQ ID NO: 2825
  Synthetic

SEQ ID NO: 3388 - protein, 919 aa, Artificial; identical to SEQ ID NO: 3358
  Synthetic

SEQ ID NO: 3389 - protein, 1141 aa, Artificial; identical to SEQ ID NO: 2802
  Synthetic

SEQ ID NO: 3390 - protein, 919 aa, Artificial; identical to SEQ ID NO: 2825
  Synthetic

SEQ ID NO: 3391 - protein, 921 aa, Artificial; identical to SEQ ID NO: 3252
  Synthetic

SEQ ID NO: 3392 - protein, 954 aa, Artificial; identical to SEQ ID NO: 3148
  Synthetic

SEQ ID NO: 3393 - protein, 922 aa, Artificial; identical to SEQ ID NO: 2840
  Synthetic

SEQ ID NO: 3394 - protein, 926 aa, Artificial
  Synthetic
MAKKNKMKPRELREAQKKARQLKAAEINNNAAPAIAAMPAAQVIAPAAEKKKSSVKAAGMKSILVSENKMYITSFGKGNSAVLEYEVDKVDNNNYNKTQLSSKDNSNIELGDVNEVNITFSSKHGFESGVEINTSNPTHRSGESSPVRWDMLGLKSELEKRFFGKTFDDNIHIQLIYNILDIEKILAVYVTNIVYALNNMLGIKGSESYDDFMGYLSARNTYEVFTHPDKSNLSDKVKGNIKKSFSTFNDLLKTKRLGYFGLEEPKTKDTRVSEAYKKRVYHMLAIVGQIRQCVFHELSEHSEYDLYSFIDNSKKVYRECRETLNYLVDERFDSINKGFIQGNKVNISLLIDMMKDDYEADDIIHLYYDFIVLKSQKNLGFSIKKLREKMLDEYGFRFKDKQYDSVRSKMYKLMDFLLFCNYYRNDVVAGEALVRKLRFSMTDDEKEGIYADEAEKLWGKFRNDFENIADHMNGDVIKELGKADMDFDEKILDSEKKNASDLLYFSKMIYMLTYFLDGKEINDLLTTLISKFDNIKEFLKIMKSSAVDVECELTAGYRLFNDSQRITNELFIVKNIASMRKPAASAKLTMFRDALTILGIDDKITDDRISEILKLKEKGKGIHGLRNFITNNVIESSRFVYLIKYANAQKIREVAKNEKVVMFVLGGIPDTQIERYYKSCVEFPDMNSSLEAKRSELARMIKNISFDDFKNVKQQAKGRENVAKERAKAVIGLYLTVMYLLVKNLVNVNARYVIAIHCLERDFGLYKEIIPELASKNLKNDYRILSQTLCELCDESPNLFLKKNERLRKCVEVDINNADSSMTRKYRNCIAHLTVVRELKEYIGDIRTVDSYFSIYHYVMQRCITKREDDKKQEEKIKFEDDLLKNHGYTKDFVKALNSPFGYNIPRFKNLSIEQLFDRNEYLTEK

SEQ ID NO: 3395 - protein, 926 aa, Artificial; identical to SEQ ID NO: 2875
  Synthetic

SEQ ID NO: 3396 - protein, 922 aa, Artificial
  Synthetic
MAKKNKMKPRELREAQKKARQLKAAEINNNAAPAIAAMPAAEVIAPAAEKKKSSVKAAGMKSILVSENKMYITSFGKGNSAVLEYEVDNNDYNKTQLSSKDNSNIELRGVNEVNITFSSKHGFESGVEINTSNPTHRSGESSPVRWDMLGLKSELEKRFFGKTFDDNIHIQLIYNILDIEKILAVYVTNIVYALNNMLGVKGSESHDDFIGYLSTNNTYDVFIDPDNSSLSDDKKANVRKSLSKFNALLKTKRLGYFGLEEPKTKDNRVSEAYKKRVYHMLAIVGQIRQCVFHDLSEHSEYDLYSFIDNSKKVYRECRETLDYLVDERFDSINKGFIQGNKVNISLLIDMMKGYEADDIIRLYYDFIVLKSQKNFGFSIKKLREKMLEEYGYRFKDKQYDSVRSKMYKLMDFLLFCNYYRNDVVAGEALVRKLRFSMTDDEKEGIYADEAAKLWGKFRNDFENIADHMNGDVIKELGKADMDFDEKILDSEKKNASDLLYFSKMIYMLTYFLDGKEINDLLTTLISKFDNIKEFLKIMKSSAVDVECELTAGYKLFNDSQRITNELFIVKNIASMRKPAASAKLTMFRDALAILGIDDNITDDRISEILKLKEKGKGIHGLRNFITNNVIESSRFVYLIKYANAQKIREVAKNEKVVMFVLGGIPDTQIERYYKSCVEFPDMNSSLEVKRSELARMIKNISFDDFKNVKQQAKGRENVAKERAKAVIGLYLTVMYLLVKNLVNVNARYVIAIHCLERDFGLYKEIIPELASKNLKNDYRILSQKLCELCDKSPNLFLKKNERLRKCVEVDINNADSNMTRKYRNCIAHLTVVRELKEYIGDIRTVDSYFSIYHYVMQRCITKRENDTKQEDKIKYEDDLLKNHGYTKDFVKALNSPFGYNIPRFKNLSIEQLFDRNEYLTEK

SEQ ID NO: 3397 - protein, 919 aa, Artificial
  Synthetic
MAKKNKMKPRELREAQKKARQLKAAEINNNAAPAIAAMSAAEVIAPAAEKKKSSVKAAGMKSILVSENKMYITSFGKGNSAVLEYEVDNNDYNKTQLSSKDNSNIELGDVNEVNITFSSKHGFGSGVEINTSNPTHRSGESSPVRWDMLGLKSELEKRFFGKTFDDNIHIQLIYNILDIEKILAVYVTNIVYALNNMLGVKGSESYDDFMGYLSAKNTYEVFTHPDKSNLSDKVKGNIKKSFSTFNDLLKTKRLGYFGLEEPKTKDTRVSQAYKKRVYHMLAIVGQIRQSVFHDKSSKLHEDLYSFIDIIDSEYRETLDYLVEERLKSINKDFIEGNKVNISLLIDMMKGYEADDIIRLYYDFIVLKSQKNLGFSIKKLREKMLDEYGFRFKDKQYDPVRSKMYKLMDFLLFCNYYRNDVVTGEALVRKLRFSMTDDEKEGIYADEAPKLWGKFRNDFENIADHMNGDVIKELGKADMDFDEKILDSEKKNASDLLYFSKMIYMLTYFLDGKEINDLLTTLISKFDNIKEFLKIMKSSAVDVECELTAGYKLFNDSQRITNELFIVKNIASMRKPASSAKLTMFRDALTILGIDDNITDDRISEILKLKEKGKGIHGLRNFITNNVIESSRFVYLIKYANAQKIRKVAKNEKVVMFVLGGIPDTQIERYYKSCVEFPDMNSSLEVKRSELARMIKNISFDDFKNVKQQAKGRENVAKERAKAVIGLYLTVMYLLVKNLVNVNARYVIAIHCLERDFGLYKEIIPELASKNLKNDYMILSQTLCELCDKSPNLFLKKNERLRKCVEVDINNADSSMTRKYRNCIAHLTVVRELKEYIGDIRTVDSYFSIYHYVMQRCITKREDDTKQEEKIKYEDDLLKNHGYTKDFVKALNSSFGYNIPRFKNLSIEQLFDRNEYLTEK

SEQ ID NO: 3398 - protein, 933 aa, Artificial; identical to SEQ ID NO: 2902
  Synthetic

SEQ ID NO: 3399 - protein, 923 aa, Artificial; identical to SEQ ID NO: 2862
  Synthetic

SEQ ID NO: 3400 - protein, 919 aa, Artificial; identical to SEQ ID NO: 2968
  Synthetic

SEQ ID NO: 3401 - protein, 922 aa, Artificial; identical to SEQ ID NO: 2840
  Synthetic

SEQ ID NO: 3402 - protein, 1063 aa, Artificial
  Synthetic
LGRKNSRKNKNKNRNANFSKKYVKGVKKDSKKENNDAEKNVAAENVAAENAAAENAPSEKDKKEKKVKKSTAKAIGVKSVFKLEGENEVITTFGKGNQAKINSIIKSHVIEPYEGNTKVNVEYLSEDKKYEVYGNLGVEKRTYLPVNEGETRKDLIGLKKQLEEVVFLKYADENHQEGQHFNDNIRIQIAYSIFDIIKVLVPISAQLIYTVNGLDRHNDKEDAIGYYLNYSVTYENFGAVKENSSEKAKFKILEKRNKYEKFVSKAKENFIYFKDVFYEEKPVQLNKGQKTNKKSQVEYQLKSDEEIYYILNCLNFLRNNIAHFKISNQNDGNAIFRDCYYDKSAPKNLFNKGMYQVIDSAYGKAVDKVNKSSVKYEDKNLYLLAKALGFAESKYSERHKELAQLIFKTSILKSNSNRGYSIKKIRELLFEKNILTISDDEKTVNTYRAKLYKILDLVLTYYLSSSEYENMIEEFIDQLRGNQYEEEKQESYANFTEKIGEIDEIRIALKRVVSLFEGKEYANKNVIKLKEEWIDECKINKNVSDFTKLIYFISRFLSGKEINILLTQCISKLQNIDAFNKTVEELVEKGILEMHHYKRDYSLFERSGEIAKELEIVKSISKMDRSFDHYPLEKLYKDFLLTLGVKESNKNDSENNIEDENSLEYCYEKYFSKDSKTKLSAFIRNSVINSQRFLYVVKYVKPKDVNAIMKNPSVVYYVLQQMTEAQIERYCKTIGIDIAFELKKKRKDLLKMLIDIDFSKIRGNRSLQNKKNRGELNRNDTIEREKKKALLGLYYTVAYIFLKNMVNVNGRYILAFYCLERDKILYKEAFAKQLSTIEKSKKWSTREFYDTLTRLFTGKLNLDCQSVPLLSEKASEKLDRYIFEEPKGKSEGEKDGGDWSGYSNINDRIYVFYRNTVEHLNLIGNIGRYLEFYENVAMDCYSYDVAIGSKTKEDIKMSRVYFSFYHHMMQKMFFEEYKASKNRLINKSNNRSHIKSEKKINKDFDKMYVLAYEKLCKISKIDSDGEYLKGYKYSKALLRSVNIPFGYNLARYKNLSYVKYYSY

SEQ ID NO: 3403 - protein, 919 aa, Artificial; identical to SEQ ID NO: 3002
  Synthetic

SEQ ID NO: 3404 - protein, 922 aa, Artificial; identical to SEQ ID NO: 3229
  Synthetic

SEQ ID NO: 3405 - protein, 919 aa, Artificial; identical to SEQ ID NO: 2968
  Synthetic

SEQ ID NO: 3406 - protein, 925 aa, Artificial; identical to SEQ ID NO: 2833
  Synthetic

SEQ ID NO: 3407 - protein, 921 aa, Artificial; identical to SEQ ID NO: 3252
  Synthetic

SEQ ID NO: 3408 - protein, 923 aa, Artificial
  Synthetic
MAKKNKMKPRELREAQKKARQLKAAEINNNAAPAIAAMPAAEVIAPAAEKKKSSVKAAGMKSILVSENKMYITSFGKGNSAVLEYEVDNNDYNKTQLSSKDNSNIELGNVNEVNITFSSRRGFESGVEINTSNPTHRSGESSSVRGDMLGLKSELEKRFFGKTFDDNIHIQLIYNILDIEKILAVYVTNIVYALNNMLGIKDSESYDDFMGYLSARNTYKVFTHPDKSNLSDKVKGNIKKSFSTFNDLLKTKRLGYFGLEEPKTKDTRVSQAYKKRVYHMLAIVGQIRQCVFHDKSSKLHEDLYSFINNIDPEYRDTLDYLVEERLKSINKDFIEGNKVNISLLIDMMKDDYEADDIIRLYYDFIVLKSQKNLGFSIKKLREKMLDEYGFRFKDKQYDSVRSKMYKLMDFLLFCNYYRNDVAAGEALVRKLRFSMTDDEKEGIYADEAAKLWGKFRNDFENIADHMNGDVIKELGKADMDFDEKILDSEKKNASDLLYFSKMIYMLTYFLDGKEINDLLTTLISKFDNIKEFLKIMKSSAVDVECELTAGYKLFNDSQRITNELFIVKNIASMRKPAASAKLTMFRDALTILGIDDKITDDRISEILKLKEKGKGIHGLRNFITNNVIESSRFVYLIKYANAQKIREVAKNEKVVMFVLGGIPDTQIERYYKSCVEFPDMNSSLEAKRSELARMIKNISFDDFKNVKQQAKGRENVAKERAKAVIGLYLTVMYLLVKNLVNVNARYVIAIHCLERDFGLYKEIIPELASKNLKNDYRILSQTLCELCDDRDESPNLFLKKNRRLRKCVEVDINNADSSMTRKYRNCIAHITVVRELKEYIGDIRTVDSYFSIYHYVMQRCITKRENDTKQEEKIKYEVDLLKNHGYTKDFVKALNSPFGYNIPRFKNLSIEQLFDRNEYLTEK

SEQ ID NO: 3409 - protein, 919 aa, Artificial
  Synthetic
MAKKNKMKPRELREAQKKARQLKAVEINNNAVPEIAAMPAAEVIAPVAEKKKSSVKAAGMKSILVSENKMYITSFGKGNSAVLEYEVDNNDYNKTQLSSKNSSNIELRGVNEVNITFSSKHGFESGVEINTSNPTHRSGESSPVRWDMLGLKSELEKRFFGKTFDDNIHIQLIYNILDIEKILAVYVTNIVYALNNMLGEGDDESHDDFMGYLSTFNTYKVFTNPNGSTLSDDKKENIRKSLSKFNALLKTKRLGYFGLEEPKTKDTRASEAYKKRVYHMLAIVGQIRQCVFHDKSGAKRFDLYSFINNIDPEYRDTLDYLVDERFDSINKGFIQGNKVNISLLIDMMKGYEADDIIRLYYDFIVLKSQKNLGFSIKKLREKMLEEYGYRFKDKQYDSVRSKMYKLMDFLLFCNYYRNDVVAGEALVRKLRFSMTDDEKEGIYADEAAKLWGKFRNDFENIADHMNGDVIKELGKADMDFDEKILDSEKKNASDLLYFSKMIYMLTYFLDGKEINDLLTTLISKFDNIKEFLKIMKSSAVNVECELTAGYKLFNDSQRITNELFIVKNIASMRKPAASAKLTMFRDALTILGIDDKITDDRISEILKLKEKGKGIHGLRNFITNNVIESSRFVYLIKYANAQKIREVAKNEKVVMFVLGGIPDTQIERYYKSCVEFPDMNSSLEAKRSELARMIKNISFDDFKNVKQQAKGRENVAKERAKAVIGLYLTVMYLLVKNLVNVNARYVIAIHCLERDFGLYKEIIPELASKNLKNDYRILSQTLCELCDKSPNLFLKKNERLRKCVEVDINNADSSMTRKYRNCIAHLTVVRELKEYIGDIRTVDSYFSIYHYVMQRCITKRENDTKQEDKIKYEDDLLKNHGYTKDFVKALNSPFGYNIPRFKNLSIEQLFDRNEYLTEK

SEQ ID NO: 3410 - protein, 922 aa, Artificial
  Synthetic
MAKKNKMKPRELREAQKKARQLKAAEINNNAVPAIAAMPAAEVIAPAAEKKKSSVKAAGMKSILVSENKMYITSFGKGNSAVLEYEVDNNDYNKTQLSSKDNSNIELGNVNEVNITFSSRRGFESGVEINTSNPTHRSGESSPVRGDMLGLKSELEKRFFGKTFDDNIHIQLIYNILDIEKILAVYVTNIVYALNNMLGEDDDESHDDFMGYLSAKNTYDVFTDPDESDLSKNIKGNIKKSLSKFNDLLKTKRLGYFGLEEPKTKDTNALEAYKKRVYHMLAIVGQIRQSVFHDKSSKLDEDLYSFIDIIDSEYRETLDYLVDERFDSINKGFIQGNKVNISLLIDMMKGYEADDIIRLYYDFIVLKSQKNLGFSIKKLREKMLEEYGFRFKDKQYDSVRSKMYKLMDFLLFCNYYRNDVAAGEALVRKLRFSMTDDEKEGIYADEAEKLWGKFRNDFENIADHMNGDVIKELGKADMDFDEKILDSEKKNASDLLYFSKMIYMLTYFLDGKEINDLLTTLISKFDNIKEFLKIMKSSAVDVECELTAGYKLFNDSQRITNELFIVKNIASMRKPAASAKLTMFRDALTILGIDDKITDDRISEILKLKEKGKGIHGLRNFITNNVIESSRFVYLIKYANAQKIRKVAENEKVVMFVLGGIPDTQIERYYKSCVEFPDMNSSLEAKYSELARMIKNISFDDFKNVKQQAKGRENVAKERAKAVIGLYLTVMYLLVKNLVNVNARYVIAIHCLERDFGLYKEIIPELASKNLKNDYRILSQTLCELCDDRDESPNLFLKKNRRLRKCVEVDINNADSSMTRKYRNCIAHLTVVRELKEYIGDIRTVDSYFSIYHYVMQRCITKREDDTKQEDKIKYEDDLLKNHGYTKDFVKALNSPFGYNIPRFKNLSIEQLFDRNEYLTEK

SEQ ID NO: 3411 - protein, 927 aa, Artificial; identical to SEQ ID NO: 3071
  Synthetic

SEQ ID NO: 3412 - protein, 919 aa, Artificial
  Synthetic
MAKKNKMKPRELREAQKKARQFKAAEINNNAVPAIAAMPAAEAAAPAAEKKKSSVKAAGMKSILVSENKMYITSFGKGNSAVLEYEVDNNDYNKTQLSSEDSSNIELCGVNEVNITFSSKHGFESGVEINTSNPTHRSGESSPVRGDMLGLKSELEKRFFGKTFDDNIHIQLIYNILDIEKILAVYVTNIVYALNNMLGVKGSESHDDFIGYLSTNNIYDVFIDPDNSSLSDDKKANVRKSLSKFNALLKTKRLGYFGLEEPKTKDTRASEAYKKRVYHMLAIVGQIRQCVFHDKSGAKRFDLYSFINNIDPEYRDTLDYLVDERFDSINKGFIQGNKVNISLLIDMMKGYEADDIIRLYYDFIVLKSQKNLGFSIKKLREKMLEEYGYRFKDKQYDSVRSKMYKLMDFLLFCNYYRNDVVAGEALVRKLRFSMTDDEKEGIYADEAAKLWGKFRNDFENIADHMNGDVIKELGKADMDFDEKILDSEKKNASDLLYFSKMIYMLTYFLDGKEINDLLTTLISKFDNIKEFLKIMKSSAVDVECELTAGYKLFNDSQRITNELFIVKNIASMRKPAASAKLTMFRDALTILGIDDKITDDRISEILKLKEKGKGIHGLRNFITNNVIESSRFVYLIKYANAQKIREVAKNEKVVMFVLGGIPDTQIERYYKSCVEFPDMNSSLGVKRSELARMIKNISFDDFKNVKQQAKGRENVAKERAKAVIGLYLTVMYLLVKNLVNVNARYVIAIHCLERDFGLYKEIIPELASKNLKNDYRILSQTLCELCDKSPNLFLKKNERLRKCVEVDINNADSSMTRKYRNCIAHLTVVRELKEYIGDIRTVDSYFSIYHYVMQRCITKREDDIKQEEKIKYEDDLLKNHGYTKDFVKALNSPFGYNIPRFKNLSIEQLFDRNEYLTEK

SEQ ID NO: 3413 - protein, 956 aa, Artificial
  Synthetic
MAKKKRITAKERKQNHRESLMKKADSNAEKEKAKKPVVENKPDTAISKDNTPKPNKEIKKSKAKLAGVKWVIKANDDVAYISSFGKGNNSVLEKRIIGDVSSDVNKDSHMYVNPKYTKKNYEIKNGFSSGSSLTTHPNKPDKNSGMDALCLKIYFEKEIFKDKFNDNMHIQTIYNIFDIEKTLAKHITNIIYAVNSLDRSYIQSGNDTIGFGLNYRIPYAKYGRGKDSNGKPNNSNLKKRESFIKFYNNAKDRFGYFESVFYQNGKPISREKLYIYLNILNFVRNSTFHYNNTSTYLYRKEYKYTDKDNCSVKEFEFVSYLNEFVKNKFKNVNKNFISNEKNNLYIILNAYGEDIEDVEVVKKYSKELYKLSVLKTNKNLGVNVKKLRESAIEYGYCPLPYDKEKKVAKLSSIKHKLYKTYDFVITHYLNSNDKLLLEIVEALRLSKNDDEKENVYKIYAEKIFKAEYVINPIKTISNLFAEKGDKLFNEKVSISEEYVEDIRIDKNIHNFTKVIFFLTCFLDGKEINDLLTNIISKLQVIEDHNNVIKAIANNNDAVYKDYSDKYAVFKNSGKIATKLEAIKSIARMENKINKAFKEPLLKDAMLALGVSPNDLDEKYEKYFKTDVDADKDHQKVSTFLMNNVINNSRFKYVVKYINPADINRLAKNKHLVKFVLDQIPHKQIDSYYNSVCTVEEPSYKGKIQLLTKKITGLNFYSLFENCKIPNVEKEKKKAVITLYFTIIYILVKNLVNINGLYTLALYFVERDGFFYKKICEKKDKKKTNKDVDYLLLPEIFSGSKYREETKNLKLPKEKDREIMKKYLPNDEDRKEYNKFFKQYRNNIVHLNIIANLSKLTSTIDKEINSYFEIFHYCAQRVMFDYCKNNNKVVLAKMKDLAHIKSDCDEFSSKYTYPYSSAVLRFMNLPFAYNVPRFKNLSYQKFFDKQRLEALEKNLNI

SEQ ID NO: 3414 - protein, 919 aa, Artificial; identical to SEQ ID NO: 2847
  Synthetic

SEQ ID NO: 3415 - protein, 925 aa, Artificial
  Synthetic
MAKKNKMKPRELREAQKKARQLKAAEINNNAAPAIAAMPATEVIAPAAEKKKSSVKAAGMKSILVSENKMYITSFGKGNSAVLEYEVDKVDNDNYNKTQLSSEDSSNIELCGVTKVNITFSSKHGFESGVEINTSNPTHRSGESSPVRWDMLGLKSELEKRFFGKTFDDNIHIQLIYNILDIEKILAVYVTNIVYALNNMLGIKDSESHDDFIGYLSTNNIYDVFIDPDNSSLSDDKKANVRKSLSKFNALLKTKRLGYFGLEEPKTKDTRVSQAYKKRVYHMLAIVGQIRQCVFHDKSGAKRFDLYSFINNIDPEYRETLDYLVDERFDSINKGFIQGNKVNISLLIDMMKGYEADDIIRLYYDFIVLKSQKNLGFSIKKLREKMLDEYGFRFKDKQYDSVRSKMYKLMDFLLFCNYYRNDVVAGEALVRKLRFSMTDDEKEGIYADEAAKLWGKFRNDFENIADHMNGDAIKELGKADMDFDEKILDSEKKNASDLLYFSKMIYMLTYFLDGKEINDLLTTLISKFDNIKEFLKIMKSSAVDVECELTAGYKLFNDSQRIANELFIVKNIASMRKPAASAKLTMFRDALTILGIDDNITDDRISEILKLKEKGKGIHGLRNFITNNVIESSRFVYLIKYANAQKIREVAKNEKVVMFVLGGIPDTQIERYYKSCVEFPDMNSSLEAKRSELARMIKNISFDDFKNVKQQAKGRENVAKERAKAVIGLYLTVMYLLVKNLVNVNARYVIAIHCLERDFGLYKEIIPELASKNLKNDYRILSQTLCELCDDRDESPNLFLKKNKRLRKCVEVDINNADSSMTRKYRNCIAHLTVVRELKEYIGDIRTVDSYFSIYHYVMQRCITKRENDTKQEDKIKYEDDLLKNHGYTKDFVKALNSPFGYNIPRFKNLSIEQLFDRNEYLTEK

SEQ ID NO: 3416 - protein, 921 aa, Artificial; identical to SEQ ID NO: 3252
  Synthetic

SEQ ID NO: 3417 - protein, 919 aa, Artificial; identical to SEQ ID NO: 2893
  Synthetic

SEQ ID NO: 3418 - protein, 919 aa, Artificial; identical to SEQ ID NO: 3116
  Synthetic

SEQ ID NO: 3419 - protein, 981 aa, Artificial
  Synthetic
MGKKIHARDLREQRKNDRTTKFAEQNKKREAQMAVQKKDAAVSAKSVSSVSSKKGNVTKSMAKAAGVKSVFAVGKNTVYMTSFGRGNDAVLEQKIVDTSHEPLNIDDPAYQLNVVTMNGYSVTGHRGETVSAITDNPLRRFNGGKKDKPEQSVPADMLCLKPTLEKKFFGKEFDDNIHIQLIYNILDIEKILAVYSTNAVYALNNTIADENNENWDLFANFSTDNTYGELINAATYKESTDDVSTDDEKRREAEKKKREAKIAEKILADYEKFRKNNRLAYFADAFYIEKNKSKSKSQNKAEGIKRGKKEIYSILALIAKLRHWCVHSEDGRAEFWLYKLDELEDDFKNVLDVVYNRPVEEINDDFVERNKVNIQILHSKCENSDIAELTRSYYEFLITKKYKNMGFSIKKLREIILEGTEYNDNKYDTVRNKLYQMVDFILYRGYINENSERAEALVNALRSTLNEDDKTKLYSSEAAFLKRKYMKIIREVTDSLDVKKLKELKKNAFTIPDNELRKCFISYADSVSEFTKLIYLLTRFLSGKEINDLVTTLINKFDNIRSFLEIMDELGLERTFTDEYSFFEGSTKYLAELIELNSFVKSCSFDMSAKRPMYRDALDILGIESDKSEDDIKRMIDNILQVDANGKKLPNKNHGLRNFIASNVVESNRFEYLVRYGNPKKIRETAKCKPAVRFVLNEIPDAQIERYYKAYYLDEKSLCLANMQRDKLAGVIADIKFDDFSDAGSYQKANATSTKITSEAEIKRKNQAIIRLYLTVMYIMLKNLVNVNARYVIAFHCLERDTKLYAESGLEVGNIEKNKTNLTMAVMGVKLENGIIKTEFDKSLAENAANRYLRNARWYKLILDNLKMSERAVVNEFRNTVCHLNAIRNININIDGIKEVENYFALYHYLIQKHLENRFADNGGSTGDYIGKLEEHKTYCKDFVKAYCTPFGYNLVRYKNLTIDGLFDKNYPGKDDSDKQK

SEQ ID NO: 3420 - protein, 922 aa, Artificial; identical to SEQ ID NO: 3121
  Synthetic

SEQ ID NO: 3421 - protein, 922 aa, Artificial; identical to SEQ ID NO: 2896
  Synthetic

SEQ ID NO: 3422 - protein, 918 aa, Artificial; identical to SEQ ID NO: 2830
  Synthetic

SEQ ID NO: 3423 - protein, 919 aa, Artificial; identical to SEQ ID NO: 2968
  Synthetic

SEQ ID NO: 3424 - protein, 919 aa, Artificial
  Synthetic
MAKKNKMKPRELREAQKKARQLKAAEINNNAVPAIAAMPAVEVIAPAAEKKKSSVKAAGMKSILVSENKMYITSFGKGNSAVLEYEVDNNDYNKTQLSSKDNSNIELGNVNEVNITFSSRRGFESGVEINTSNPTHRSGESSSVRGDMLGLKSELEKRFFGKTFDDNIHIQLIYNVLDIEKILAVYVTNIVYALNNMLGIKDSESYDDFMGYLSAKNTYEVFTHPDKSDLSDKVKGNIKKSFSTFNDLLKTKRLGYFGLEEPKTKDTRVSQAYKKRVYHMLAIVGQIRQSVFHDKSSKLDEDLYSFIDIIDPEYRETLDYLVDERFDSINKGFIQGNKVNISLLIDMMKGYEADDIIRLYYDFIVLKSQKNLGFSIKKLREKMLDEYGFRFKDKQYDSVRSKMYKLMDFLLFCNYYRNDVVAGEALVRKLRFSMTDDEKEGIYADEAAKLWGKFRNDFENIADHMNGDVIKELGKTDMDFDEKILDSEKKNASDLLYFSKMIYMLTYFLDGKEINDLLTTLISKFDNIKEFLKIMKSSAVDVECELTAGYKLFNDSQRITNELFIVKNIASMRKPAASAKLTMFRDALTILGIDDKITDDRISEILKLKEKGKGIHGLRNFITNNVIESSRFVYLIKYANAQKIREVAKNEKVVMFVLGGIPDTQIERYYKSCVEFPDMNSSLEAKRSELARMIKNIRFDDFKNVKQQAKGRENVAKERAKAVIGLYLTVMYLLVKNLVNVNARYVIAIHCLERDFGLYKEIIPELASKNLKNDYRTLSQTLCGLCDKSPNLFLKKNKRLRKCVEVDINNADSIMTRKYRNCIAHLTVVRELKEYIGDIRTVDSYFSIYHYVMQRCITKREDDTKQEEKIKYEDDLLKNHGYTKDFVKALNSPFGYNIPRFKNLSIEQLFDRNEYLTEK

SEQ ID NO: 3425 - protein, 952 aa, Artificial; identical to SEQ ID NO: 3107
  Synthetic

SEQ ID NO: 3426 - protein, 925 aa, Artificial; identical to SEQ ID NO: 3085
  Synthetic

SEQ ID NO: 3427 - protein, 923 aa, Artificial; identical to SEQ ID NO: 3242
  Synthetic

SEQ ID NO: 3428 - protein, 922 aa, Artificial
  Synthetic
MAKKNKMKPRELREAQKKARQLKAVEINNNAVPEIAAMPAAEVIAPVAEKKKSSVKAAGMKSILVSENKMYITSFGKGNSAVLEYEVDNNDYNKTQLSSKNSSNIELRGVNEVNITFSSKHGFESGVEINTSNPTHRSGESSPVRWDMLGLKSELEKRFFGKTFDDNIHIQLIYNILDIEKILAVYVTNIVYALNNMLGIKGSESYDDFMGYLSARNTYEVFTHPDKSSLSDDKKANVRKSLSKFNVLLKTKRLGYFGLEEPKTKDTRVSQAYKKRVYHMLAIVGQIRQSVFHDKSSKLDEDLYSFIDIIDSEYRETLDYLVDERFDSINKGFIQGNKVNISLLIDMMKGYEADDIIRLYYDFIVLKSQKNLGFSIKKLREKMLEEYGYRFKDKQYDSVRSKMYKLMDFLLFCNYYRNDVVAGEALVRKLRFSMTDDEKEGIYADEAEKLWGKFRNDFENIADHMNGDVIKELGKADMDFDEKILDSEKKNASDLLYFSKMIYMLTYFLDGKEINDLLTTLISKFDNIKEFLKIMKSSAVDVECELTAGYKLFNDSQRITNELFIVKNIASMRKPAASAKLTMFRDALTILGIDDKITDDRISEILKLKEKGKGIHGLRNFITNNVIESSRFVYLIKYANAQKIREVAENEKVVMFVLGGIPDTQIERYYKSCVEFPDMNSSLEAKRSELARMIKNISFDNFKNVKQQAKGRENVAKERAKAVIGLYLTVMYLLVKNLVNVNARYVIAIHCLERDFGLYKEIIPELASKNLKNDYRILSQTLCELCDDRDESPNLFLKKNKRLRKCVEVDINNADSSMTRKYRNCIAHLTVVRELNKYIKDIRTVDSYFSIYHYVMQRCITKRENDTKQEDKIKYEDDLLKNHGYTKDFVKALNSPFGYNIPRFKNLSIEQLFDRNEYLTEK

SEQ ID NO: 3429 - protein, 919 aa, Artificial; identical to SEQ ID NO: 3424
  Synthetic

SEQ ID NO: 3430 - protein, 922 aa, Artificial; identical to SEQ ID NO: 3121
  Synthetic

SEQ ID NO: 3431 - protein, 922 aa, Artificial; identical to SEQ ID NO: 2840
  Synthetic

SEQ ID NO: 3432 - protein, 919 aa, Artificial
  Synthetic
MAKKNKMKPRELREAQKKARQLKAAEINNNATPTIAAMPAAEVIAPAAEKKKSSVKAAGMKSILVSKNKMYITSFGKGNSAVLEYEVDNNDYNQTQLSSKNSSNIELRGVNEVNITFSSKHGFESGVEINTSNPTHRSGESSSVRGDMLGLKSELEKRFFGKTFDDNIHIQLIYNILDIEKILAVYVTNIVYALNNMLGIKDSESYDDFIGYLSARNTYKVFTHPDKSNLSDKVKGNIKKSFSTFNDLLKTKRLGYFGLEEPKTKDTRVSQAYKKRVYHMLAIVGQIRQSVFHDKSSKLDEDLYSFIDIIDPEYRETLDYLVDERFDSINKGFIQGNKVNISLLIDMMKGYEADDIIRLYYDFIVLKSQKNLGFSIKKLREKMLDEYGFRFKDKQYDSVRSKMYKLMDFLLFCNYYRNDVVAGEALVRKLRFSMTDDEKEGIYADEAAKLWGKFRNDFENIADHMNGEAIKELGKADMDFDEKILDSEKKNASDLLYFSKMIYMLTYFLDGKEINDLLTTLISKFDNIKEFLKIMKSSAVDVECELTAGYKLFNDSQRITNELFIVKNIASMRKPAASAKLTMFRDALTILGIDDNITDDRISEILKLKEKGKGIHGLRNFITNNVIESSRFVYLIKYANAQKIREVAKNEKVVMFVLGGIPDTQIERYYKSCVEFPDMNSSLEAKRSELARMIKNIGFDDFKNVKQQAKGRENVAKERAKAVIGLYLTVMYLLVKNLVNVNARYVIAIHCLERDFGLYKEIIPELASKNLKNDYRILSQTLCELCDKSPNLFLKKNERLRKCVEVDINNADSSMTRKYRNCIAHLTVVRELKEYIGDIRTVDSYFSIYHYVMQRCITKREDDIKQEEKIKYEDDLLKNHGYTKDFVKALNSPFGYNIPRFKNLSIEQLFDRNEYLTEK

SEQ ID NO: 3433 - protein, 922 aa, Artificial; identical to SEQ ID NO: 2906
  Synthetic

SEQ ID NO: 3434 - protein, 952 aa, Artificial; identical to SEQ ID NO: 2976
  Synthetic

SEQ ID NO: 3435 - protein, 918 aa, Artificial; identical to SEQ ID NO: 2830
  Synthetic

SEQ ID NO: 3436 - protein, 925 aa, Artificial; identical to SEQ ID NO: 2833
  Synthetic

SEQ ID NO: 3437 - protein, 1001 aa, Artificial; identical to SEQ ID NO: 3134
  Synthetic

SEQ ID NO: 3438 - protein, 923 aa, Artificial
  Synthetic
MAKKNKMKPRELREAQKKARQLKAAEINNNAVPAIAAMPAAEVIAPAAEKKKSSVKAAGMKSILVSENKMYITSFGKGNSAVLEYEVDKVDDNDYNKTQLSSKDNSNIELGNVNEVNITFSSRRGFESGVEINTSNPTHRSGESSSVRGDMLGLKSELEKRFFGKTFDDNIHIQLIYNILDIEKILAVYVTNIVYALNNMLGVKGSESYDDFMGYLSAQNTYYIFTHPDKSNLSDKVKGNIKKSLSKFNDLLKTKRLGYFGLEEPKTKDKRVSEAYKKRVYHMLAIVGQIRQSVFHDKSNELDEYLYSFIDIIDSEYRDTLDYLVDERFDSINKGFIQGNKVNISLLIDMMKDDYEADDIIRLYYDFIVLKSQKNLGFSIKKLREKMLEEYGFRFKDKQYDSVRSKMYKIMDFLLFCNYYRNDVVAGEALVRKLRFSMTDDEKEGIYADEAAKLWGKFRNDFENIADHMNGDVIKELGKADMDFDEKILDSEKKNASDLLYFSKMIYMLTYFLDGKEINDLLTTLISKFDNIKEFLKIMKSSAVDVECELTAGYKLFNDSQRITNELFIVKNIASMRKPAASAKLTMFRDALTILGIDDKITDDRISEILKLKEKGKGIHGLRNFITNNVIESSRFVYLIKYANAQKIREVAKNEKVVMFVLGGIPDTQIERYYKSCVEFPDMNSSLEVKRSELARMIKNISFDDFKNVKQQAKGRENVAKERAKAVIGLYLTVMYLLVKNLVNVNARYVIAIHCLERDFGLYKEIIPELASKNLKNDYRILSQTLCELCDKSPNLFLKKNERLRKCVEVDINNADSSMTRKYRNCIAHLTVVRELKEYIGDIRTVDSYFSIYHYVMQRCITKRENDTKQEDKIKYEDDLLKNHGYTKDFVKALNSPFGYNIPRFKNLSIEQLFDRNEYLTEK

SEQ ID NO: 3439 - protein, 925 aa, Artificial
  Synthetic
MAKKNKMKPRELREAQKKARQLKAAEINNNAVPAIAAMPAAEVIAPVAGKKKSSVKAAGMKSILVSENKMYITSFGKGNSAVLEYEVDKMDNNNYNKTQLSSESSSNIKLCGVTKVNITFSSKHGFESGVEINTSNPTHRSGESSPVRWDMLGLKSELEKRFFGKTFDDNIHIQLIYNILDIEKILAVYVTNIVYALNNMLGVKGSESHDDFIGYLSTNNTYDVFIDPDNSSLSDDKKANVRKSLSKFNALLKTKRLGYFGLEEPKTKDNRVSEAYKKRVYHMLAIVGQIRQCVFHDKSGAKRFDLYSFINNIYPEYRETLDYLVDERFDSINKGFIQGNKVNISLLIDMMKGYEADDIIRLYYDFIVLKSQKNLGFSIKKLREKMLDEYGFRFKDKQYDSVRSKMYKLMDFLLFCNYYRNDVAAGEALVRKLRFSMTDDEKEGIYAGEAAKLWGKFRNDFENIADHMNGDVIKELGKADMDFDEKILDSEKKNASDLLYFSKMIYMLTYFLDGKEINDLLTTLISKFDNIKEFLKIMKSSAVDVECELTAGYKLFNDSQRITNELFIVKNIASMRKPAASAKLTMFRDALTILGIDDNITDDRISEILKLKEKGKGIHGLRNFITNNVIESSRFVYLIKYANAQKIREVAKNEKVVMFVLGGIPDTQIERYYKSCVEVPDMNSSLEAKRSELARMIKNIRFDDFKNVKQQAKGRENVAKERAKAVIGLYLTVMYLLVKNLVNVNARYVIAIHCLERDFGLYKEIIPELASKNLKNDYRILSQTLCELCDDRDKSPNLFLKKNKRLRKCVEVDINNADSSMTRKYRNCIAHLTVVRELKEYIGDIRTVDSYFSIYHYVMQRCITKRENDTKQEDKIKYEDDLLKNHGYTKDFVKALNSPFGYNIPRFKNLSIEQLFDRNEYLTEK

SEQ ID NO: 3440 - protein, 923 aa, Artificial; identical to SEQ ID NO: 3242
  Synthetic

SEQ ID NO: 3441 - protein, 922 aa, Artificial; identical to SEQ ID NO: 2817
  Synthetic

SEQ ID NO: 3442 - protein, 952 aa, Artificial; identical to SEQ ID NO: 2996
  Synthetic

SEQ ID NO: 3443 - protein, 923 aa, Artificial
  Synthetic
MAKKNKMKPRELREAQKKARQLKAAEINNNAAPAIAAMPAAEVIAPAAEKKKSSVKAAGMKSILVSENKMYITSFGKGNSAVLEYEVDNNDYNKTQLSSKDNSNIELGNVNEVNITFSSRRGFESGVEINTSNPTHRSGESSSVRGDMLGLKSELEKRFFGKTFDDNIHIQLIYNILDIEKILAVYVTNIVYALNNMLGIKDSESYDDFMGYLSAKNTYEVFTHPDKSDLSDKVKGNIKKSFSTFNDLLKTKRLGYFGLEEPKTKDTRASEAYKKRVYHMLAIVGQIRQCVFHDKSGAKRFDLYSFINNIYPEYRDTLDYLVDERFDSINKGFIQGNKVNISLLIDMMKDDYEADDIIRLYYDFIVLKSQKNLGFSIKKLREKMLDEYGFRFKDKQYDSVRSKMYKLMDFLLFCNYYRNDVVAGEALVRKLRFSMTDDEKEGIYADEAEKLWVKFRNDFENIADHMNGDVIKELGKADMDFDEKILDSEKKNASDLLYFSKMIYMLTYFLDGKEINDILTTLISKFDNIKEFLKIMKSSAVDVECELTAGYKLFNDSQRITNELFIVKNIASMRKPAASAKLTMFRDALTILGIDDNITDDRISEILKLKEKGKGIHGLRNFITNNVIESSRFVYLIKYANAQKIREVAKNEKVVMFVLGGIPDTQIERYYKSCVEFPDMNSSLEAKRSELARMIKNIRFDDFKNVKQQAKGRENVAKERAKAVIGLYLTVMYLLVKNLVNVNARYVIAIHCLERDFGLYKEIIPELASKNLKNDYRILSQTLCELCDDRDESPNLFLKKNKRLRKCVEVDINNADSSMTRKYRNCIAHLTVVRELKEYIGDIRTVDSYFSIYHYVMQRCITKREDDTKQEEKIKYEDVLLKNHGYTKDFVKALNSPFGYNIPRFKNLSIEQLFDRNEYLTEK

SEQ ID NO: 3444 - protein, 918 aa, Artificial; identical to SEQ ID NO: 2830
  Synthetic

SEQ ID NO: 3445 - protein, 954 aa, Artificial; identical to SEQ ID NO: 2846
  Synthetic

SEQ ID NO: 3446 - protein, 919 aa, Artificial
  Synthetic
MAKKNKMKPRELREAQKKARQLKAAEINNNAAPAIAAMPAAEAAAPAAEKKKSSVKAAGMKSILVSENKMYITSFGKGNSAVLEYEVDNNDYNKTQLSSKGSSNIELHGVNEVNITFSSKHGFESGVEINTSNPTHRSGESSPVRWDMLGLKSELEKRFFGKTFDDNIHIQFIYNILDIEKILAVYVTNIVYALNNMLGVKGSESHDDFIGYLSTNNTYDVFIDPDNSSLSDDKKANVRKSLSKFNVLLKTKRLGYFGLEEPKTKDTRASEAYKKRVYHMLAIVGQIRQCVFHDKSGAKRFDLYSFINNIYPEYRDTLDYLVEERLKSINKDFIQGNKVNISLLIDMMKGYEADDIIRLYYDFIVLKSQKNLGFSIKKLREKMLDEYGFRFKDKQYDSVRSKMYKLMDFLLFCNYYRKDVGAGEALVRKLRFSMTDEEKEGIYADEAAKLWGKFRNDFENIADHMNGDVIKELGKADMDFDEKILDSEKKNASDLLYFSKMIYMLTYFLDGKEINDLLTTLISKFDNIKEFLKIMKSSAVDVECELTAGYKLFNDSQRITNELFIVKNIASMRKPASSAKLTMFRDALTILGIDDNITDDRISEILKLKEKGKGIHGLRNFITNNVIESSRFVYLIKYANAQKIRKVAKNEKVVMFVLGGIPDTQIERYYKSCVEFPDMNSSLEVKRSELARMIKNISFDDFKNVKQQAKGRENVAKERAKAVIGLYLTVMYLLVKNLVNVNARYVIAIHCLERDFGLYKEIIPELASKNLKNDYRILSQTLCELCDKSPNLFLKKNRRLRKCVEVDINNADSSMTRKYRNCIAHLTVVRELKEYIGDIRTVDSYFSIYHYVMQRCITKRENDTKQEEKIKYEDDLLKNHGYTKDFVKALNSPFGYNIPRFKNLSIEQLFDRNEYLTEK

SEQ ID NO: 3447 - protein, 918 aa, Artificial; identical to SEQ ID NO: 3090
  Synthetic

SEQ ID NO: 3448 - protein, 928 aa, Artificial; identical to SEQ ID NO: 2950
  Synthetic

SEQ ID NO: 3449 - protein, 918 aa, Artificial; identical to SEQ ID NO: 2830
  Synthetic

SEQ ID NO: 3450 - protein, 928 aa, Artificial
  Synthetic
MAKKNKMKPRELREAQKKARQLKAAEINNNAVPAIAAMPAAEVIAPVAGKKKSSVKAAGMKSILVSENKMYITSFGKGNSAVLEYEVDKVDDNDYNKTQLSSKGSSNIELHGVNEVNITFSSKHGFESGVEINTSNPTHRSGESSPVRGDMLGLKSELEKRFFGKTFDDNIHIQLIYNILDIEKILAVYVTNIVYALNNMLGIKDSESYDDFMGYLSAKNTYEVFTHPDKSNLSDKAKGNIKKSFSTFNDLLKTKRLGYFGLEEPKTKDTRVSQAYKKRVYHMLAIVGQIRQCVFHDLSEHSEYDLYSFIDNSKKVYRECRETLDYLVDERFDSINKGFIQGNKVNISLLIDMMKGYEADDIIRLYYDFIVLKSQKNLGFSIKKLREKMLDEYGFRFKDKQYDSVRSKMYKLMDFLLFCNYYRNDVVAGEALVRKLRFSMTDDEKEGIYADEAAKLWGKFRNDFENIADHMNGDVIKELGKADMDFDEKILDSEKKNASDLLYFSKMIYMLTYFLDGKEINDLLTTLISKFDNIKEFLKIMKSSAVDVECELTAGYKLFNDSQRITNELFIVKNIASMRKPAASARLTMFRDALTILGIDDKITDDRISEILKLKEKGKGIHGLRNFITNNVIESSRFVYLIKYANAQKIREVAKNEKVVMFVLGGIPDTQIERYYKSCVEFPDMNSSLEAKRSELARMIKNISFDDFKNVKQQAKGRENVAKERAKAVIGLYLTVMYLLVKNLVNVNARYVIAIHCLERDFGLYKEIIPELASKNLKNDYRILSQTLCELCDERDKSPNLFLKKNERLRKCVEVDINNADSIMTRKYRNCIAHLTVVRELKEYIGDIRTVDSYFSIYHYVMQRCITKREDDTKQEDKIKYEDDLLKNHGYTKDFVKALNSPFGYNIPRFKNLSIEQLFDRNEYLTEK

SEQ ID NO: 3451 - protein, 919 aa, Artificial
  Synthetic
MAKKNKMKPRELREAQKKARQFKAAEINNNAVPAIAAMPAAEAAAPAAEKKKSSVKAAGMKSILVSENKMYITSFGKGNSAVLEYEVDNNDYNKTQLSSEDSSNIELCGVNEVNITFSSKHGFESGVEINTSNPTHRSGESSPERGDMLGLKSELEKRFFGKTFDDNIHIQLIYNILDIEKILAVYVTNIVYALNNMLGVKGSESHDDFIGYLSTNNIYDVFIDPDNSSLSDDKKANVRKSLSKFNALLKTKRLGYFGLEEPKTKDTRASEAYKKRVYHMLAIVGQIRQCVFHDKSGAKRFDLYSFINNIDPEYRDTLDYLVDERFDSINKGFIQGNKVNISLLIDMMKGYEADDIIRLYYDFIVLKSQKNLGFSIKKLREKMLEEYGYRFKDKQYDSVRSKMYKLMDFLLFCNYYRNDVVAGEALVRKLRFSMTDDEKEGIYADEAAKLWGKFRNDFENIADHMNGDVIKELGKADMDFDEKILDSEKKNASDLLYFSKMIYMLTYFLDGKEINDLLTTLISKFDNIKEFLKIMKSSAVDVECELTAGYKLFNDSQRITNELFIVKNIASMRKPAASAKLTMFRDALTILGIDDNITDDRISEILKLKEKGKGIHGLRNFITNNVIESSRFVYLIKYANAQKIRKVAKNEKVVMFVLGGIPDTQIERYYKSCVEFPDMNSSLEVKRSELARMIKNISFDDFKNVKQQAKGRENVAKERAKAVIGLYLTVMYLLVKNLVNVNARYVIAIHCLERDFGLYKEIIPELASKNLKNDYRILSQTLCELCDKSPNLFLKKNRRLRKCVEVDINNADSSMTRKYRNCIAHLTVVRELKEYIGDIRTVDSYFSIYHYVMQRCITKRENDTKQEEKIKYEDDLLKNHGYTKDFVKALNSPFGYNIPRFKNLSIEQLFDRNEYLTEK

SEQ ID NO: 3452 - protein, 919 aa, Artificial; identical to SEQ ID NO: 2968
  Synthetic

SEQ ID NO: 3453 - protein, 918 aa, Artificial; identical to SEQ ID NO: 3090
  Synthetic

SEQ ID NO: 3454 - protein, 922 aa, Artificial; identical to SEQ ID NO: 2840
  Synthetic

SEQ ID NO: 3455 - protein, 922 aa, Artificial; identical to SEQ ID NO: 2937
  Synthetic

SEQ ID NO: 3456 - protein, 952 aa, Artificial; identical to SEQ ID NO: 2976
  Synthetic

SEQ ID NO: 3457 - protein, 922 aa, Artificial; identical to SEQ ID NO: 2955
  Synthetic

SEQ ID NO: 3458 - protein, 926 aa, Artificial
  Synthetic
MAKKNKMKPREMREAQKKARQLKAAEINNNAAPAIAAMPAAEVIAPAAEKKKSSVKAAGMKSILVSENKMYITSFGKGNSAVLEYEVDKVDNNNYNKTQLSSEGSSNIELHGVNEVNITFSSKHGFESGVEINTSNPTHRSGESSPVRWDMLGLKSELEKRFFGKTFDDNIHIQLIYNILDIEKILAVYVTNIVYALNNMLGIKDSESYDDFMGYLSARNTYEVFTHPDKSNLSDKVKGNIKKSFSTFNDLLKTKRLGYFGLEEPKTKDTRVSQAYKKRVYHMLAIVGQIRQSVFHDKSSKLDEDLYSFIDIIDSEYRETLDYLVEERLKSINKDFIEGNKVNISLLIDMMKDDYEADDIIRLYYDFIVLKSQKNLGFSIKKLREKMLDEYGFRFKDKQYDSVRSKMYKLMDFLLFCNYYRNDVVAGETLVRKLRFSMTDDEKEGIYADEAAKLWGKFRNDFENIADHMNGDVIKELGKADMDFDEKILDSEKKNASDLLYFSKMIYMLTYFLDGKEINDLLTTLISKFDNIKEFLKIMKSSAVDVECELTEGYKLFNDSQRITNELFIVKNIASMRKPAASAKLTMFRDALTILGIDDKITDDRISEILKLKEKGKGIHGLRNFITNNVIESSRFVYLIKYANAQKIREVAKNEKVVMFVLGGIPDTQIERYYKSCVEFPDMNSSLEAKRSELARMIKNIRFDDFKNVKQQAKGRENVAKERAKAVIGLYLTVMYLLVKNLVNVNARYVIAIHCLERDFGLYKEIIPELASKNLKNDYRILSQTLCELCDDRDESPNLFLKKNKRLRKCVEVDINNADSIMTRKYRNCIAHLTVVRELKEYIGDIRTVDSYFSIYHYVMQRCITKREDDKKQEEKIKYEDDLLKNHGYTKDFVKALNSPFGYNIPRFKNLSIEQLFDRNEYLTEK

SEQ ID NO: 3459 - protein, 925 aa, Artificial
  Synthetic
MAKKNKMKPRELREAQKKARQLKAAEINNNAAPAIAAMPAAEVIAPAAEKKKSSVKAAGMKSILVSENKMYITSFGKGNSAVLEYEVDKVDNNNYNKTQLSSKDNSNIELGDVNEVNITFSSKRGNESGVEINTSNPTHRSGESSPVRWDMLGLKSELEKRFFGKTFDDNIHIQLIYNILDIEKILAVYVTNIVYALNNMLGIKKSESYDDFMGYLSARNTYEVFTHPDKSNLSDKAKGNIKKSFSTFNDLLKTKRLGYFGLEEPKTKDTRVSQAYKKRVYHMLAIVGQIRQSVFHDKSSKLDEDLYSFIDIIDSEYRETLDYLVDERFDSINKGFIQGNKVNISLLIDMMKGYEADDIIRLYYDFIVLKSQKNLGFSIKKLREKMLEEYGYRFKDKQYDSVRSKMYKLMDFLLFCNYYRNDVIAGEALVRKLRFSMTDDEKEGIYADEAAKLWGKFRNDFENIADHMNGDAIKELGKADMDFDEKILDSEKKYASDLLYFSKMIYMLTYFLDGKEINDLLTTLISKFDNIKEFLKIMKSSAVDVECELTAGYKLFNDSQRITNELFIVKNIASMRKPAASAKLTMFRDALTILGIDDNITDDRISEILKLKEKGKGIHGLRNFITNNVIESSRFVYLIKYANAQKIREVAKNEKVVMFVLGGIPDTQIERYYKSCVEFPDMNSSLEAKRSELARMIKNISFDDFKNVKQQAKGRENVAKERAKAVIGLYLTVMYLLVKNLVNVNARYVIAIHCLERDFGLYKEIIPELASKNLKNDYRILSQTLCELCDERDKSPNLFLKKNERLRKCVEVDINNADSIMTRKYRNCIAHLTVVRELKEYIGDIRTVDSYFSIYHYVMQRCITKREDDTKQEEKIKYEDDLLKNHGYMKDFVKALNSPFGYNIPRFKNLSIEQLFDRNEYLTEK

SEQ ID NO: 3460 - protein, 925 aa, Artificial
  Synthetic
MAKKNKMKPRELREAQKKARQLKAAEINNNAAPTIAAMPAAEVIAPAAEKKKSSVKAAGMKSILVSENKMYITSFGKGNSAVLEYEVDKVDNNNYNKTQLSSKDNSNIELGDVNEVNITFSSKHGLESGVEINTSNPTHRSGESSPVIWDMLGLKSELEKRFFGKTFDDNIHIQLIYNILDIEKILAVYVTNIVYALNNMLGVKGSESHDDFIGYLSTNNIYDVFIDPDNSSLSDDKKANVRKSLSKFNALLKTKRLGYFGLEEPKTKDNRVSEAYKKRVYHMLAIVGQIRQCVFHDKSGAKRFDLYSFINNIDPEYRDTLDYLVEERLKSINKDFIEDNKVNISLLIDMMKGYEADDIIRLYYDFIVLKSQKNLGFSIKKLREKMLEEYGYRFKDKQYDSVRSKMYKLMDFLLFCNYYRNDVIAGEALVRKLRFSMTDDEKEGIYADEAAKLWGKFRNDFENIADHMNGDVIKELGKADMDFDEKILDSEKKNASDLLYFSKMIYMLTYFLDGKEINDLLTTLISKFDNIKEFLKIMKSSAVNVECELTAGYKLFNDSQRITNELFIVKNIASMRKPAASAKLTMFRDALTILGIDDKITDDRISEILKLKEKGKGIHGLRNFITNNVIESSRFVYLIKYANAQKIREVAKNEKVVMFVLGGIPDTQIERYYKSCVEFPDMNSSLEAKRSELARMIKNISFDDFKNVKQQAKGRENVAKERAKAVIGLYLTVMYLLVKNLVNVNARYVIAIHCLERDFGLYKEIIPELASKNLKNDYRILSQTLCELCDDRDESPNLFLKKNKRLRKCVEVDINNADSSMTRKYRNCIAHLTVVRELKEYIGDIRTVDSYFSIYHYVMQRCITKRENDTKQEEKIKYEDDLLKNHGYTKDFVKALNSPFGYNIPRFKNLSIEQLFDRNEYLTEK

SEQ ID NO: 3461 - protein, 954 aa, Artificial
  Synthetic
MGKKIHARDLREQRKTDRTEKFADQNKKREAERAVPKKDAAVSVKSVSSVSSKKDNVTKSMAKAAGVKSVFAVENTVYMTSFGRGNDAVLEQKIVDTSHEQLNIDDPAYQLNVVTMNGYSVTGHRGETVSAVTDNPLRRFNGGKKDEPEQSVPTDMLCLKPTLEKKFFGKEFNDNIHIQLIYNILDIEKILAVYSTNAIYALNNMSADENIENSDFFMKRTTDETFDDFEKKKESTNSREKADFDAFEKFIANYRLAYFADAFYVNKKNPKGKARNVLREDKELYSVLTLIGKLRHWCVHSEEGRAEFWLYKLDELKDDFKNVLDVVYNRPVEEINNRFIENNKVNIQILGSVYKNTDIAELVRSYYEFLITKKYKNMGFSIKKLRESMLEGKGYADKEYDSVRNKLYQMTDFILYTGYINEDSDRADDLVNTLRSSLKEDDKTTVYCKEADYLWKKYRESIREVADALDGDNIKRLSKSNIEIQEDKLRKCFISYADSVSEFTKLIYLLTRFLSGKEINDLVTTLINKFDNIRSFLEIMDELGLDRTFTAEYSFFEDSTKYLAELVELNSFVKSCSFDINAKRTMYRDALDILGIKSGKTEEDIEKMIDNILQIDANGDKKLKKNNGLRNFIASNVIDSNRFKYLVRYGNPKKIRETAKCKPAVRFVLNEIPDAQIERYYEACCPKNTALCSANKRREKLADMIAEIEFENFSDAGNYQKANVTSRTSEAEIKRKNQAIIRLYLTVMYIMLKNLVNVNARYVIAFHCVERDTKLYAESGLEVGNIEKNKTNLTMAVMGVKLENGIIKTEFDKSLAENAANRYLRNARWYKLILDNLKKSERAVVNEFRNTVCHLNAIRNININIKEIKEVENYFALYHYLIQKHLENRFADKKVERDTGDFISKLEEHKTYCKDFVKAYCTPFGYNLVRYKNLTIDGLFDKNYPGKDDSDKQK

SEQ ID NO: 3462 - protein, 922 aa, Artificial
  Synthetic
MAKKNKMKPRELREAQKKARQLKAAEINNNAAPAIAAMPAAEVIAPAAEKKKSSVKAAGMKSILVSENKMYITSFGKGNSAVLEYEVDNNDYNKTQLSSKDNSNIELGDVDEVNITFSSKHGFGSGVEINTSNPTHRSGESSPVRWDMLGLKSELEKRFFGKTFDDNIHIQFIYNILDIEKILAVYVTNIVYALNNMLGIKDSESYDDFIGYLSARNTYKVFTHPDKSNLSDKAKGNIKKSFSTFNDLLKTKRLGYFGLEEPKTKDTRVLEAYKKRVYYMLAIVGQIRQCVFHDLSEHSEYDLYSFIDNSKKVYRECRETLDYLVDERFDSINKGFIQGNKVNISLLIDMMKGYEADDIIRLYYDFIVLKSQKNLGFSIKKLREKMLDEYGFRFKDKQYDSVRSKMYKLMDFLLFCNYYRNDVVAGEALVRKLRFSMTDDEKEGIYADEAAKLWVKFRNDFENIADHMNGDVIKELGKADMDFDEKILDSEKKNASDLLYFSKMIYMLTYFLDGKEINDLLTTLISKFDNIKEFLKIMKSSAVDVECELTAGYKLFNDSQRITNELFIVKNIASMRKPAASAKLTMFRDALTILGIDDKITDDRISEILKLKEKGKGIHGLRNFITNNVIESSRFVYLIKYANAQKIREVAKNEKVVMFVLGGIPDTQIERYYKSCVEFPDMNSSLEVKRSELARMIKNISFDDFKNVKQQAKGRENVAKERAKAVIGLYLTVMYLLVKNLVNVNARYVIAIHCLERDFGLYKEIIPELASKNLKNDYRILSQTLCELCDKSPNLFLKKNERLRKCVEVDINNADSSMTRKYRNCIAHLTVVRELKEYIGDIRTVDSYFSIYHYVMQRCITKRENDTKQEDKIKYEDDLLKNHGYTKDFVKALNSPFGYNIPRFKNLSIEQLFDRNEYLTEK

SEQ ID NO: 3463 - protein, 964 aa, Artificial
  Synthetic
MKTQNHFHTPKQKSFMSAMTKGLRNCKGCVNMKKKMSLREKREAEKQAKKAAYSAASKNTDSKPAEKKAETPKPAEIISDNSRNKTAVKAAGLKSTIISGDKLYMTSFGKGNAAVIEQKIDINDYSFSAMKDTPSLEVDKAESKEISFSSHHPFVKNDKLTTYNPLYGGKDNPEKPVGRDMLGLKDKLEERYFGCTFNDNLHIQIIYNILDIEKILAVHSANITTALDHMVDEDDEKYLNSDYIGYMNTINTYDVFMDPSKNSSLSPKDRKNIDNSRAKFEKLLSTKRLGYFGFDYDANGKDKKKNEEIKKRLYHLTAFAGQLRQWSFHSAGNYPRTWLYKLDSLDKEYLDTLDHYFDKRFNDINDDFVTKNATNLYILKEVFPEANFKDIADLYYDFIVIKSHKNMGFSIKKLREKMLECDGADRIKEQDMDSVRSKLYKLIDFCIFKYYHEFPELSEKNVDILRAAVSDTKKDNLYSDEAARLWSIFKEKFLGFCDKIVVWVTGEHEKDITSVIDKDAYRNRSNVSYFSKLMYAMCFFLDGKEINDLLTTLINKFDNIANQIKTAKELGINTAFVKNYDFFNHSEKYVDELNIVKNIARMKKPSSNAKKAMYHDALTILGIPEDMDEKALDEELDLILEKKTDPVTGKPLKGKNPLRNFIANNVIENSRFIYLIKFCNPENVRKIVNNTKVTEFVLKRIPDAQIERYYKSCTDSEMNPPTEKKITELAGKLKDMNFGNFRNVRQSAKENMEKERFKAVIGLYLTVVYRVVKNLVDVNSRYIMAFHSLERDSQLYNVSVDNDYLALTDTLVKEGDNSRSRYLAGNKRLRDCVKQDIDNAKKWFVSDKYNSITKYRNNVAHLTAVRNCAEFIGDITKIDSYFALYHYLIQRQLAKGLDHERSGFDRNYPQYAPLFKWHTYVKDVVKALNAPFGYNIPRFKNLSIDALFDRNEIKKNDGEKKSDD

SEQ ID NO: 3464 - protein, 922 aa, Artificial; identical to SEQ ID NO: 3163
  Synthetic

SEQ ID NO: 3465 - protein, 919 aa, Artificial; identical to SEQ ID NO: 2968
  Synthetic

SEQ ID NO: 3466 - protein, 918 aa, Artificial; identical to SEQ ID NO: 2830
  Synthetic

SEQ ID NO: 3467 - protein, 929 aa, Artificial
  Synthetic
MAKKNKMKPRELREAQKKARQLKAAEINNNAAPAIAAMPAAEVIAPAAEKKKSSVKAAGMKSILVSENKMYITSFGKGNSAVLEYEVDNNDYNQTQLSSKDNSNIQLGGVNEVNITFSSKHGFESGVEINTSNPTHRSGESSPVRWDMLGLKSELEKRFFGKTFDDNIHIQLIYNILDIEKILAVYVTNIVYALNNMLGIKDSESYDDFMGYLSARNTYEVFTHPDKSNLSDKVKGNINKVKCNIKKSFSTFNDLLKTKRLGYFGLEEPKTKDTRVSQAYKKRVYHMLAIVGQIRQCVFHDKSSKLDEDLYSFIDIIDSEYRETLDYLVDERFDSINKGFIQGNKVNISLLIDMMKGYEADDIIRLYYDFIVLKSQKNLGFSIKKLREKMLDEYGFRFKDKQYDSVRSKMYKLMDFLLFCNYYRNDVVAGEALVRKLRFSMTDDEKEGIYADEAAKLWGKFRNDFENIADHMNGDVIKELGKADMDFDEKILDSEKKNASDLLYFSKMIYMLTYFLDGKEINDLLTTLISKFDNIKEFLKIMKSSAVDVECELTAGYKLFNDSQRITNELFIVKNIASMRKPAASAKLTMFRDALTILGIDDNITDDRISEILKLKEKGKGIHGLRNFITNNVIESSRFVYLIKYANAQKIREVAKNEKVVMFVLGGIPDTQIERYYKSCVEFPDMNSSLEAKRSELARMIKNISFDDFKNVKQQAKGRENVAKERAKAVIGLYLTVMYLLVKNLVNVNARYVIAIHCLERDFGLYKEIIPELASKNLKNDYRILSQTLCELCDDRDESPNLFLKKNKRLRKCVEVDINNADSSMTRKYRNCIAHLTVVRELKEYIGDIRTVDSYFSIYHYVMQRCITKREDDKKQEEKIKYEDDLLKNHGYTKDFVKALNSPFGYNIPRFKNLSIEQLFDRNEYLTEK

SEQ ID NO: 3468 - protein, 922 aa, Artificial; identical to SEQ ID NO: 2945
  Synthetic

SEQ ID NO: 3469 - protein, 926 aa, Artificial
  Synthetic
MLLCAIIQASTKRDRKGGVRMEREVKKPPKKSLAKAAGLKSTFVISPQEKELAMTAFGRGNDALLQKRIVDGVVRDVAGEKQQFQVQRQDESRFRLQNSRLADRTVTADDPLHRAETPRRQPLGAGMDQLRRKAILEQKYFGRTFDDNIHIQLIYNILDIHKMLAVPANHIVHTLNLLGGYGETDFVGMLPAGLPYDKLRVVKKKNGDTVDIKADIAAYAKRPQLAYLGAAFYDVTPGKSKRDAARGRVKREQDVYTILSLMSLLRQFCAHDSVRIWGQNTPAALYHLQALPQDMKDLLDDGWRRALGGVNDHFLDTNKVNLLTLFEYYGAETKQARVALTQDFYRFVVLKEQKNMGFSLRRLREELLKLPDAAYLTGQEYDSVRQKLYMLLDFLLCRLYAQERTGRCEELVSALRCALSDEEKDAVYQAEAAALWQALGDTLRRELLPLLKGKKLQDKDKKKLDELGLSRDVLDGVLFRPAQQGNRANADYFCRLMHLSTWFMDGKEINTLLTTLISKLENIDSLRNVLESMGLACSFVPAYAMFDHSRYIAGQLRVVNNIARMRKPAITAKREMYRAAVVLLGVDSPEAAAAITDDLLQIDPETGKVRPRGDSARDTGLRNFIANNVVESRRFTYLLRYMTPEQARVLAQNEKLIAFVLSTVPDTQLERYCRTCGREDITGRPAQIRYLTAQIMGVRYESFTDVEQRGRGDNPKKERYKALIDLYLTVLYLAVKNMVNCNARYVIAFYCRDRDTALYQKEVCWYDLEEDKKSGKQRQVEDYTALTRYFVSQGYLNRHACGYLRSNMNGISNSLLTAYRNAVDHLNVIPPLGSLCRDIGRVDSYFALYHYAVQRYLNGRYYRKTPREQELFAAMAQHRTWCSDLVKALNTPFGYNLARYKNLSIDGLFDREGDHVVREDGEKPAE

SEQ ID NO: 3470 - protein, 1141 aa, Artificial; identical to SEQ ID NO: 2802
  Synthetic

SEQ ID NO: 3471 - protein, 925 aa, Artificial; identical to SEQ ID NO: 2833
  Synthetic

SEQ ID NO: 3472 - protein, 919 aa, Artificial; identical to SEQ ID NO: 2968
  Synthetic

SEQ ID NO: 3473 - protein, 919 aa, Artificial; identical to SEQ ID NO: 3116
  Synthetic

SEQ ID NO: 3474 - protein, 927 aa, Artificial; identical to SEQ ID NO: 3071
  Synthetic

SEQ ID NO: 3475 - protein, 920 aa, Artificial; identical to SEQ ID NO: 3169
  Synthetic

SEQ ID NO: 3476 - protein, 922 aa, Artificial
  Synthetic
MAKKNKMKPRELREAQKKARQLKAAEINNNAAPAIAAMPAAEVIAPAAEKKKSSVKAAGMKSILVSENKMYITSFGKGNSAVLEYEVDNNDYNQTQLSSDGSSNIELRGVNEVNITFSSKHGFESGVEINTSNPTHRSGESSPVRGDMLGLKSELEKRFFGKTFDDNIHIQLIYNILDIEKILAVYVTNIVYALNNMLGVKGSESYDDFMGYLSAQNTYYIFTHPDKSNLSDKVKGNIKKSLSKFNDLLKTKRLGYFGLEEPKTKDKRVSEAYKKRVYHMLAIVGQIRQSVFHDKSNELDEYLYSFIDIIDSEYRDTLDYLVDERFDSINKGFVQGNKVNISLLIDMMKGYEVDDIIRLYYDFIVLKSQKNLGFSIKKLREKMLDEYGFRFKDKQYDSVRSKMYKLMDFLLFCNYYRNDVVAGESLVRKLRFSMTDDEKEGIYADEAAKLWGKFRNDFENIADHMNGDVIKELGKADMGFDEKILDSEKKNASDLLYFSKMIYMLTYFLDGKEINDLLTTLISKFDNIKEFLKIMKSSAVNVECELTAGYKLFNDSQRITNELFIVKNIASMRKPAASAKLTMFRDALTILGIDDKITDDRISEILKLKEKGKGIHGLRNFITNNVIESSRFVYLIKYANAQKIREVAKNEKVVMFVLGGIPDTQIERYYKSCVEFPDMNSSLKAKRSELARMIKNISFEDFKDVKQQAKGRENVAKERAKAVIGLYLTVMYLLVKNLVNVNARYVIAIHCLERDFGLYKEIIPELASKNLKNDYRILSQMLCELCDDRDKSPNLFLKKNKRLRKCVEVDINNADSSMTRKYRNCIAHLTVVRELKEYIGDIYAVDSYFSIYHYVMQRCITKRENDTKQEEKIKYEDNLLKNHGYTKDFVKALNSPFGYNIPRFKNLSIEQLFDRNEYLTEK

SEQ ID NO: 3477 - protein, 1141 aa, Artificial; identical to SEQ ID NO: 2802
  Synthetic

SEQ ID NO: 3478 - protein, 918 aa, Artificial; identical to SEQ ID NO: 3090
  Synthetic

SEQ ID NO: 3479 - protein, 923 aa, Artificial
  Synthetic
MAKKNKMKPRELREAQKKARQLKAVEINNNAVPEIAAMPAAEVIAPVAEKKKSSVKAAGMKSILVSENKMYITSFGKGNSAVLEYEVDNNDYNKTQLSSKNSSNIELRGVNEVNITFSSKHGFESGVEINTSNPTHRSGESSPVRWDMLGLKSELEKRFFGKTFDDNIHIQLIYNILDIEKILAVYVTNIVYALNNMLGIKGSESYDDFMGYLSARNTYEVFTHPDKSSLSDDKKANVRKSLSKFNVLLKTKRLGYFGLEEPKTKDTRVSQAYKKRVYHMLAIVGQIRQSVFHDKSSKLHEDLYSFIDIIDSEYRETLDYLVDERFDSINKGFIQGNKVNISLLIDMMKDDYEADDIIRLYYDFIVLKSQKNLGFSIKKLREKMLDEYGFRFKDKQYDSVRSKMYKLMDFLLFCNYYRNDVIAGEALVRKLRFSMTDDEKEGIYADEAAKLWGKFRNDFENIADHMNGDVIKELGKADMDFDEKILDSEKKNASDLLYFSKMIYMLTYFLDGKEINDLLTTLISKFDNIKEFLKIMKSSAVDVECELTAGYKLFNDSQRITNELFIVKNIASMRKPAASAKLTMFRDALTILGIDDKITDDRISEILKLKEKGKGIHGLRNFITNNVIESSRFVYLIKYANAQKIREVAKNEKVVMFVLGGIPDTQIERYYKSCVEFPDMNSSLEAKRSELARMIKNIRFDDFKNVKQQAKGRENVAKERAKAVIGLYLTVMYLLVKNLVNVNARYVIAIHCLERDFGLYKEIIPELASKNLKNDYRILSQTLCELCDDRDESPNLFLKKNKRLRKCVEVDINNADSSMTRKYRNCIAHLTVVRELKEYIGDIYAVDSYFSIYHYVMQRCITKRENDTKQEEKIKYEDNLLKNHGYTKDFVKALNSPFGYNIPRFKNLSIEQLFDRNEYLTEK

SEQ ID NO: 3480 - protein, 922 aa, Artificial
  Synthetic
MAKKNKMKPRELREAQKKARQLKAAEINNNAVPAIAAMPAAEVIAPAAEKKKSSVKAAGMKSILVSENKMYITSFGKGNSAVLEYEVDKVDNNNYNKTQLSSKDNSNIELGDVNEVNITFSSKHGFESGVEINTSNPTHRSGESSPVRWDMLGLKSELEKRFFGKTFDDNIHIQLIYNILDIEKILAVYVTNIVYALNNMLGIKGSESYDDFMGYLSARNTYEVFTHPDKSNLSDKVKGNIKKSLSKFNDLLKTKRLGYFGLEEPKTKDTRVSQAYKKRVYHMLAIVGQIRQSVFHDKSSKLDEDLYSFIDIIDSEYRETLDYLVDERFDSINKGFIQGNKVNISLLIDMMKGYEADDIIRLYYDFIVLKSQKNLGFSIKKLREKMLDEYGFRFKDKQYDSVRSKMYKLKDFLLFCNYYRNDVVAGEALVRKLRFSMTDDEKEGIYADEASKLWGKFRNDFENIADHMNGDVIKELGKADMDFDEKILDSEKKNASDLLYFSKMIYMLTYFLDGKEINDLLTTLISKFDNIKEFLKIMKSSAVDVECELTAGYKLFNDSQRITNELFIVKNIASMRKPASSAKLTMFRDALTILGIDDNITDDRISEILKLKEKGKGIHGLRNFITNNVIESSRFVYLIKYANAQKIRKVAKNEKVVMFVLGGIPDTQIERYYKSCVEFPDMNSSLEVKRSELARMIKNISFDDFKNVKQQAKGRENVAKERAKAVIGLYLTVMYLLVKNLVNVNARYVIAIHCLERDFGLYKEIIPELASKNLKNDYRILSQTLCELCDKSPNLFLKKNRRLRKCVEVDINNADSSMTRKYRNCIAHLTVVRELKEYIGDIRTVDSYFSIYHYVMQRCITKRENDTKQEEKIKYEDDLLKNHGYTKDFVKALNSPFGYNIPRFKNLSIEQLFDRNEYLTEK

SEQ ID NO: 3481 - protein, 923 aa, Artificial; identical to SEQ ID NO: 2862
  Synthetic

SEQ ID NO: 3482 - protein, 922 aa, Artificial; identical to SEQ ID NO: 2840
  Synthetic

SEQ ID NO: 3483 - protein, 919 aa, Artificial; identical to SEQ ID NO: 2825
  Synthetic

SEQ ID NO: 3484 - protein, 923 aa, Artificial
  Synthetic
MAKKNKMKPRELREAQKKARQLKAAEINNNAAPAIAAMPAAEVIAPAAEKKKSSVKAAGMKSILVSENKMYITSFGKGNSAVLEYEVDNNDYNKTQLSSKDNSNIELGNVNEVNITFSSRRGFESGVEINTSNPTHRSGESSSVRGDMLGLKSELEKRFFGKTFDDNIHIQLIYNILDIEKILAVYVTNIVYALNNMLGIKDSESYDDFMGYLSAKNTYEVFTHPDKSDLSDKVKGNIKKSFSTFNDLLKTKRLGYFGLEEPKTKDTRASEAYKKRVYHMLAIVGQIRQCVFHDKSGAKRFDLYSFINNIYPEYRDTLGYLVDERFDSINKGFIQGNKVNISLLIDMMKDDYEADDIIRLYYDFIVLKSQKNLGFSIKKLREKMLDEYGFRFKDKQYDSVRSKMYKLMDFLLFCNYYRNDVVAGEALVRKLRFSMTDDEKEGIYADEAEKLWVKFRNDFENIADHMNGDVIKELGKADMDFDEKILDSEKKNASDLLYFSKMIYMLTYFLDGKEINDILTTLISKFDNIKEFLKIMKSSAVDVECELTAGYKLFNDSQRITNELFIVKNIASMRKPAASAKLTMFRDALTILGIDDNITDDRISEILKLKEKGKGIHGLRNFITNNVIESSRFVYLIKYANAQKIREVAKNEKVVMFVLGGIPDTQIERYYKSCVEFPDMNSSLEAKRSELARMIKNIRFDDFKNVKQQAKGRENVAKERAKAVIGLYLTVMYLLVKNLVNVNARYVIAIHCLERDFGLYKEIIPELASKNLKNDYRILSQTLCELCDDRDESPNLFLKKNKRLRKCVEVDINNADSSMTRKYRNCIAHLTVVRELKEYIGDIRTVDSYFSIYHYVMQRCITKREDDTKQEEKIKYEDVLLKNHGYTKDFVKALNSPFGYNIPRFKNLSIEQLFDRNEYLTEK

SEQ ID NO: 3485 - protein, 922 aa, Artificial; identical to SEQ ID NO: 2849
  Synthetic

SEQ ID NO: 3486 - protein, 937 aa, Artificial
  Synthetic
MKTEMKNGEVKTSAKKENCSIAKANGLKSTFKLAENTYYMTSFGKNNTADPEKNIVRMNVENIRNTFSATPISERIVDITGETEKTAQVVLPACSDNQLHAKDTIEEMYFGKTYTDNIHIQIAYNIMDMKKIFGVYSNNIIYSINNLLEEREGSDFLGVFYTENSYQAMNFADAIIKSKLLTNNSKYLNLDMNNVWFNKEVSELSSFRKYVYSRSYANKTSTAKKICICLQEDFHFFDYATVKKAADQFTLLKRIQRSNYFSDMLCDSTGNYQCKNAQILLSILGNLRQESFHENRSTSAWMFNLEKVLTPERKELLTALIDSRTNHINNHFIENSNKNLNAIFRLFPEKSQADLIVEYYDFSVRKAYKNLGFSVKLLREMLLKTQQELSPLNDKAYDSIRSKLYTMFDFVLYKLYVDNEEQIDQFVRKLRASTSKVEKEALYQQESERTWNEIRGQIIDNVIPFIDSIQKQENEDKLTKRIDQSIIDKAVPHFVNSRDLSYFAKVVYVVASFLDSKEINMFFDALINELENIASFNDVLEQLDMPLDYQEKYRFFERSREEAAGLRFIKSIAKMNKTRVAVKNDTKTVKLKQYCDAGAVLGEINTEKIKAAFGLGDKFNTEEARVDHTFRNFIINNVINSNRFNYVMRFMNPKSARRIMQCESLVSFSLKDIPDTQIERYCKSVNIPFDSANPNYAHMKEQLTYKLLQVQFCNFSKVSNSSDQAVEKERLKALVGLYLSVLYRIVKSIVRINTSYTIAFAAYERDCVILNRKMGKNLYGLKTDPMGITNDFMHMPTVAPSNPHNDFINETKLSKRVCALVNKNRTLCTNRTYQVYRNIIMHLNAVSAFPQYLEELKVVHSYFDLYHYTVMMLLHRQNEKEKNMILSTAALEKYDMVRKYQSANKDFIYAINSPLAYNAARYINLSCRTKFEEGFGK

SEQ ID NO: 3487 - protein, 919 aa, Artificial; identical to SEQ ID NO: 2876
  Synthetic

SEQ ID NO: 3488 - protein, 954 aa, Artificial
  Synthetic
MGKKIHARDLREQRKTDRTEKFADQNKKREAERAVQKKDAAVSVKSVSSVSSKKDNVTKSMAKAAGVKSVFAVGNTVYMTSFGRGNDAVLEQKIVDTSHEQLNIDDPAYQLNVVTMNGYSVTGHRGETVSAVTDNPLRRFNGGKKDEPEQSVPTDMLCLKPTLEKKFFGKEFNDNIHIQLIYNILDIEKILAVYSTNAIYALNNMSADENIENSDFFMKRTTDETFDDFEKKKESTNSREKADFDAFEKFIGNYRLAYFADAFYVNKKNPKGKAKNVLREDKELYSVLTLIGKLRHWCVHSEEGRAEFWLYKLNELKDDFKNVLDVVYNRPVEEINNRFIENNKVNIQILGSVYKNTDIAELVRSYYEFLITKKYKNMGFSIKKLRESMLEGKGYADKEYDSVRNKLYQMTDFILYTGYINEDSDRADDLVNTLRSSLKEDDKTTVYCKEADYLWKKYCESIREVAEALDGDNIKRLSKSNIEIRDNELRKCFISYADSVSEFTKLIYLLTRFLSGKEINDLVTTLINKFDNIRSFLEIMDELGLDRTFTAEYSFFEDSTKYLAELVELNSFVKSCSFDINAKRTMYRDALDILGIKSGKTEEDIEKMIDNILQIDANGDKKLKKNNGLRNFIASNVIDSNRFKYLVRYGNPKKIRETAKCKPAVRFVLNEIPDAQIERYYEACCPKNTALCSANKRREKLADMIAEIKFENFSDAGNYQKANVTSKTHEAEIKRKNQAIIRLYLTVMYIMLKNLVNVNARYVIAFHCVERDTKLYAESGLEVGNIEKNKTNLTMAVMGVKLENGIIKTEFDKSLAENAANRYLRNARWYKLILDNLKKSERAVVNEFRNTVCHLNAIRNININIDGIKEVENYFALYHYLIQKHLENRFADKKVERDTGDFISKLEEHKTYCKDFVKAYCTPFGYNLVRYKNLTIDGLFDKNYPGKDDSDKQK

SEQ ID NO: 3489 - protein, 954 aa, Artificial; identical to SEQ ID NO: 3167
  Synthetic

SEQ ID NO: 3490 - protein, 919 aa, Artificial
  Synthetic
MAKKNKMKPRELREAQKKARQLKAAEINNNAVPAIAAMPAAEVIAPAAEKKKSSVKAAGMKSILVSENKMYITSFGKGNSAVLEYEVDNNDYNQTQLSSEGSSNIELHGVNEVNITFSSKHGFESGVEINTSNPTHRSGESSPVRWDMLGLKSELEKRFFGKTFDDNIHIQFIYNILDIEKILAVYVTNIVYALNNMLGVKGSESHDDFIGYLSAKNTYEVFTHPDKSNLSDKVKGNIKKSLSKFNALLKTKRLGYFGLEEPKTKDTRVSEAYKKRVYHMLAIVGQIRQCVFHDKSGAKRFDLYSFINNIDHEYRETLDYLVDERFDSINKGFIQGNKVNISLLIDMMKGYEADDIIRLYYDFIVLKSQKNLGFSIKKLREKMLDEYGFRFKDKQYDSMRSKMYKLMDFLLFCNYYRNDVAAGEALVRKLRFSMTDDEKEGIYADEAAKLWGKFRNDFENIADHMNGDVIKELGKADMDFDEKILDSEKKNASDLLYFSKMIYMLTYFLDGKEINDLLTTLISKFDNIKEFLKIMKSSAVDVECELTAGYKLFNDSQRITNELFIVKNIASMRKPAASAKLTMFRDALAILGIDDNITDDRISEILKLKEKGKGIHGLRNFITNNVIESSRFVYLIKYANAQKIREVAKNEKVVMFVLVGIPDTQIERYYKSCVEVPDMNSSLEAKRSELARMIKNIRFDDFKNVKQQAKGRENVAKERAKAVIGLYLTVMYLLVKNLVNVNARYVIAIHCLERDFGLYKEIIPELASKNLKNDYRILSQTLCELCDKSPNLFLKKNERLRKCVEVDINNADSNMTRKYRNCIAHITVIRELKEYIGDIRTVDSYFSIYHYVMQRCITKRENDTKQEDKIKYEDDLLKNHGYTKDFVKALNSPFGYNIPRFKNLSIEQLFDRNEYLTEK

SEQ ID NO: 3491 - protein, 928 aa, Artificial; identical to SEQ ID NO: 3062
  Synthetic

SEQ ID NO: 3492 - protein, 919 aa, Artificial
  Synthetic
MAKKNKMKPRELREAQKKARQFKAAEINNNAVPAIAAMPAAEAAAPAAEKKKSSVKAAGMKSILVSENKMYITSFGKGNSAVLEYEVDNNDYNKTQLSSEDSSNIELCGVNEVNITFSSKHGFESGVEINTSNPTHRSGESSPVRGDMLGLKSELEKRFFGKTFDDNIHIQLIYNILDIEKILAVYVTNIVYALNNMLGVKGSESHDDFIGYLSTNNIYDVFIDPDNSSLSDDKKANVRKSLSKFNALLKTKRLGYFGLEEPKTKDTRASEAYKKRVYHMLAIVGQIRQCVFHDKSGAKRFDLYSFINNIDPEYRDTLDYLVDERFDSINKGFIQGNKVNISLLIDMMKGYEADDIIRLYYDFIVLKSQKNLGFSIKKLREKMLEEYGYRFKDKQYDSVRSKMYKLMDFLLFCNYYRNDVVAGEALVRKLRFSMTDDEKEGIYADEAAKLWGKFRNDFENIADHMNGDVIKELGKADMDFDEKILDSEKKNASDLLYFSKMIYMLTYFLDGKEINDLLTTLISKFDNIKEFLKIMKSSAVDVECELTAGYKLFNDSQRITNELFIVKNIASMRKPAASAKLTMFRDALTILGIDDNITDDRISEILKLKEKGKGIHGLRNFITNNVIESSRFVYLIKYANAQKIRKVAKNEKVVMFVLGGIPDTQIERYYKSCVEFPDMNSSLEVKRSELARMIKNISFDDFKNVKQQAKGRENVAKERAKAVIGLYLTVMYLLVKNLVNVNARYVIAIHCLERDFGLYKEIIPELASKNLKNDYRILSQTLCELCDKSPNLFLKKNRRLRKCVEVDINNADSSMTRKYRNCIAHLTVVRELKEYIGDIRTVDSYFSIYHYVMQRCITKRENDTKQEEKIKYEDDLLKNHGYTKDFVKALNSPFGYNIPRFKNLSIEQLFDRNEYLTEK

SEQ ID NO: 3493 - protein, 922 aa, Artificial
  Synthetic
MAKKNKMKPRELREAQKKARQLKAAEINNNAVPAIAAMPAAEAAAPAAEKKKSSVKAAGMKSILVSENKMYITSFGKGNSAVLEYEVDNNDYNKTQLSSKDNSNIELCDVGKVNITFSSRRGFESGVEINTSNPTHRSGESSSVRGDMLGLKSELEKRFFGKNFDDNIHIQLIYNILDIEKILAVYVTNIVYALNNMLGEGDESNYDFMGYLSTFNTYKVFTNPNGSTLSDDKKENIRKSLSKFNALLKTKRLGYFGLEEPKTKDTRASEAYKKRVYHMLAIVGQIRQCVFHDKSGAKRFDLYSFINNIDPEYRETLDYLVDERFDSINKGFIQGNKVNISLLIDMMKDDYEADDIIRLYYDFIVLKSQKNLGFSIKKLREKMLDEYGFRFKDKQYDSVRSKMYKLMDFLLFCNYYRNDVIAGEALVRKLRFSMTDDEKEGIYADEAAKLWGKFRNDFENIADHMNGDVIKELGKADMDFDEKILDSEKKNASDLLYFSKMIYMLTYFLDGKEINDLLTTLISKFDNIKEFLKIMKSSAVDVECELTAGYKLFNDSQRITNELFIVKNIASMRKPAASAKLTMFRDALTILGIDDNITDDRISEILKLKEKGKGIHGLRNFITNNVIESSRFVYLIKYANAQKIREVAKNEKVVMFVLGGIPDTQIERYYKSCVEFPDMNSSLEAKRSELARMIKNISFDDFKNVKQQAKGRENVAKERAKAVIGLYLTVMYLLVKNLVNVNARYVIAIHCLERDFGLYKEIIPELASKNLKNDYRILSQTLCELCDNGDESPNLFLKKNKRLRKCVEVDINNADSSMTRKYRNCIAHLTVVRELKEYIGDIRTVDSYFSIYHYVMQRCITKRENDTKQEDKIKYEDDLLKNHGYTKDFVKALNSPFGYNIPRFKNLSIEQLFDRNEYLTEK

SEQ ID NO: 3494 - protein, 922 aa, Artificial
  Synthetic
MAKKNKMKPRELREAQKKARQLKAAEINNNAAPAIAAMPAAEAAAPAAEKKKSSVKAAGMKSILVSENKMYITSFGKGNSAVLEYEVDNNDYNQTQLSSKGSSNIELHGVNEVNITFSSKHGFESGVEINTSNPTHRSGESSPVRWDMLGLKSELEKRFFGKTFDDNIHIQLIYNILDIEKILAVYVTNIVYALNNMLGVKGSESHDDFIGYLSTNNTYDVFIDPDNSSLSDDKKANVRKSLSKFNVLLKTKRLGYFGLEEPKTKDTRVSQAYKKRVYHMLAIVGQIRQCVFHDKSGAKRFDLYSFINNIDPEYRETLDYLVDERFDSINKGFIEGNKINISLLIDMMKGYEADDIIRLYYDFIVLKSQKNLGFSIKKLREKMLDEYGFRFKDKQYDPVRSKMDKLMDFLLFCNHYRNDVAAGEALVRKLRFSMTDDEKEGIYADEAAKLWGKFRNDFENIADHMNGDVIKELGKADMDFDEKILDSEKKNASDLLYFSKMIYMLTYFLDGKEINDLLTTLISKFDNIKEFLKIMKSSAVDVECELTAGYKLFNDSQRITNELFIVKNIASMRKPAASAKLTMFRDALTILGIDDNITDDRISEILKLKEKGKGIHGLRNFITNNVIESSRFVYLIKYANAQKIREVAKNEKVVMFVLGGIPDTQIERYYKSCVEFPDMNSSLEAKRSELARMIKNISFDDFKNVKQQAKGRENVAKERAKAVIGLYLTVMYLLVKNLVNVNARYVIAIHCLERDFGLYKEIIPELASKNLKNDYRILSQTLCELCDDRDESPNLFLKKNKRLRKCVEVDINNADSSMTRKYRNCIAHLTVVRELKEYIGDIRTVDSYFSIYHYVMQRCITKRENDTKQEEKIKYEDDLLKNHGYTKDFVKALNSPFGYNIPRFKNLSIEQLFDRNEYLTEK

SEQ ID NO: 3495 - protein, 922 aa, Artificial
  Synthetic
MAKKNKMKPRELREAQKKARQLKAAEINNNAAPAIAAMPAAEAAAPAAEKKKSSVKAAGMKSILVSENKMYITSFGKGNSAVLEYEVDNNDYNKTQLSSKGSSNIELHGVNEVNITFSSKHGFESGVEINTSNPTHRSGESSPVRGDMLGLKSELEKRFFGKTFDDNIHIQLIYNILDIEKILAVYVTNIVYALNNMLGEGDDESHDDFMGYLSTFNTYKVFTNPNGSTLSDDKKENIRKSLSKFNALLKTKRLGYFGLEEPKTKDTRASEAYKKRVYHMLAIVGQIRQSVFHDKSNELDEYLYSFIDIIDSEYRETLDYLIDERFDSINKGFIQGNKVNISLLIDMMKGYEADDIIRLYYDFIVLKSQKNLGFSIKKLREKMLDEYGFRFKDKQYDSVRSKMYKLMDFLLFCNYYRNDVVAGESLVRKLRFSMTDDEKEGIYADEAEKLWGKFRNDFENIADHMNGDVIKELGKADMDFDEKILDSEKKNASDLLYFSKMIYMLTYFLDGKEINDLLTTLISKFDNIKEFLKIMKSSAVDVECELTAGYKLFNDSQRITNELFVVKNIASMRKPAASAKLTMFRDALTILGIDDKITDDRISEILKLKEKGKGIHGLRNFITNNVIESSRFVYLIKYANAQKIREVAKNEKVVMFVLGGIPDTQIERYYKSCVEFPDMNSSLEAKRSELARMIKNISFDDFKNVKQQAKGRENVAKERAKAVIGLYLTVMYLLVKNLVNVNARYVIAIHCLERDFGLYKEIIPELASKNLKNDYRILSQTLCELCDDRDESPNLFLKKNERLRKCVEVDINNADSSMTRKYRNCIAHLTVVRELKEYIGDIRTVDSYFSIYHYVMQRCITKRENDTKQEEKIKYEDDLLKNHGYTKDFVKALNSPFGYNIPRFKNLSIEQLFDRNEYLTEK

SEQ ID NO: 3496 - protein, 952 aa, Artificial
  Synthetic
MGKKIHARDLREQRKTDRTEKFADQNKKREAQRAVQKKDAAVSVKSVSSVSSKKDNVTKSMAKAAGVKSVFAVGNTVYMTSFGRGNDAVLEQKIVDTSHEQLNIDDPAYQLNVVTMNGYSVTGHRGETVSAVTDNPLRRFNGGKKDEPEQSVPTDMLCLKPTLEKKFFGKEFNDNIHIQLIYNILDIEKILAVYSTNAIYALNNMSADENIENSDFFMKRTTDETFDDFEKKKESTNSREKADFDAFEKFIGNYRLAYFADAFYVNKKNPKGKAKNVLREDKELYSVLTLIGKLRHWCVHSEEGRAEFWLYKLNELKDDFKNVLDVVYNRPVEEINNRFIENNKVNIQILGSVYKNTDIAELVRSYYEFLITKKYKNMGFSIKKLRESMLEGKGYADKEYDSVRNKLYQMTDFILYTGYINEDSDRADDLVNTLRSSLKEDDKTTVYCKEADYLWKKYRESIREVADALDGDNIKRLSKSNIEIQEDKLRKCFISYADSVSEFTKLIYLLTRFLSGKEINDLVTTLINKFDNIRSFLEIMDELGLDRTFTAEYSFFEGSTKYLAELVELNSFVKSCSFDINAKRTMYRDALDILGIKSGKTEEDIEKMIDNILQIDANGDKKLKKNNGLRNFIASNVIDSNRFKYLVRYGNPKKIRETAKCKPAVRFVLNEIPDAQIERYYEACCPENTALCSANKKREKLADMIAEIEFENFSDAGNYQKANVTSKTHEAEIKRKNQSIIRLYLTVMYIMLKNLVNVNARYVIAFHCVERDTKLYAESGLEVGNIEKNKTNLTMAVMGVKLENGIIKTEFDKSLAENAANRYLRNARWYKLILDNLKKSERAVVNEFRNTVCHLNAIRNININIDGIKEVENYFALYHYLIQKHLENRFADNGGSTGDYIGKLEEHKTYCKDFVKAYCTPFGYNLVRYKNLTIDGLFDKNYPGKDDSDEQK

SEQ ID NO: 3497 - protein, 921 aa, Artificial; identical to SEQ ID NO: 3252
  Synthetic

SEQ ID NO: 3498 - protein, 922 aa, Artificial
  Synthetic
MAKKNKMKPRELREAQKKARQLKAAEINNNAAPAIAAMPAAEVIAPVAEKKKSSVKAAGMKSILVSENKMYITSFGKGNSAVLEYEVDNNDYNKTQLSSKDNSNIELGDVNEVNITFSSKHGFGSGVEINTSNPTHRSGESSPVRGDMLGLKSELEKRFFGKTFDDNIHIQLIYNILDIEKILAVYVTNIVYALNNMLGIKDSESYDDFMGYLSARNTYEVFTHPDKSNLSDKVKGNIKKSLSKFNDLLKTKRLGYFGLEEPKTKDTRASEAYKKRVYHMLAIVGQIRQCVFHDKSGAKRFDLYSFINNIDPEYRDTLDYLVEERLKSINKDFIEGNKVNISLLIDMMKGYEADDIIRLYYDFIVLKSQKNLGFSIKKLREKMLEEYGFRFKDKQYDSVRSKMYKLMDFLLFCNYYRNDVAAGEALVRKLRFSMTDDEKEGIYADEAAKLWGKFRNDFENIADHMNGDVIKELGKADMDFDEKILDSEKKNASDLLYFSKMIYMLTYFLDGKEINDLLTTLISKFDNIKEFLKIMKSSAVDVECELTAGYKLFNDSQRITNELFIVKNIASMRKPAASAKLTMFRDALTILGIDDNITDDRISEILKLKEKGKGIHGLRNFITNNVIESSRFVYLIKYANAQKIREVAKNEKVVMFVLGGIPDTQIERYYKSCVEFPDMNSSLEAKRSELARMIKNISFDDFKNVKQQAKGRENVAKERAKAVIGLYLTVMYLLVKNLVNVNARYVIAIHCLERDFGLYKEIIPELASKNLKNDYRILSQTLCELCDDRDESPNLFLKKNKRLRKCVEVDINNADSSMTRKYRNCIAHLTVVRELKEYIGDIRTVDSYFSIYHYVMQRCITKRENDTKQEEKIKYEDDLLKNHGYTKDFVKALNSPFGYNIPRFKNLSIEQLFDRNEYLTEK

SEQ ID NO: 3499 - protein, 924 aa, Artificial; identical to SEQ ID NO: 2910
  Synthetic

SEQ ID NO: 3500 - protein, 923 aa, Artificial; identical to SEQ ID NO: 2862
  Synthetic

SEQ ID NO: 3501 - protein, 921 aa, Artificial; identical to SEQ ID NO: 2887
  Synthetic

SEQ ID NO: 3502 - protein, 922 aa, Artificial; identical to SEQ ID NO: 2840
  Synthetic

SEQ ID NO: 3503 - protein, 922 aa, Artificial
  Synthetic
MAKKNKMKPRELREAQKKARQLKAAEINNNAAPAIAAMPAAEVIAPAAEKKKSSVKAAGMKSILVSKNKMYITSFGKGNSAVLEYEVDKVDNNNYNKTQLSSKDNSNIELHGVNEVNITFSSKHGFESGVEINTSNPTHRSGESSPVRGDMLGLKSELEKRFFGKTFDDNIHIQFIYNILDIEKILAVYVTNIVYALNNMLGVKGSESYDDFMGYLSARNTYEVFTHPDKSNLSDKVKGNIKKSFSTFNDLLKTKRLGYFGLEEPKTKDTRASEAYKKRVYHMLAIVGQIRQCVFHDKSGAKRFDLYSFINNIDPEYRDTLDYLVDERFDSINKGFIQGNKVNISLLIDMMKGYEADDIIRLYYDFIVLKSQKNLGFSIKKLREKMLDEYGFRFKDKQYDSVRSKMYKLMDFLLFCNYYRNDVVAGESLVRKLRFSMTDDEKEGIYADEAAKLWGKFRNDFENIADHMNGDVIKELGKADMDFDEKILDSEKKNASDLLYFSKMIYMLTYFLDGKEINDLLTTLISKFDNIKEFLKIMKSSAVDVECELTAGYKLFNDSQRITNELFIVKNIASMRKPAASAKLTMFRDALTILGIDDKITDDRISEILKLKEKGKGIHGLRNFITNNVIESSRFVYLIKYANAQKIREVAENEKVVMFVLGGIPDTQIERYYKSCVEFPDMNSSLEAKRSELARMIKNIRFDDFKNVKQQAKGRENVAKERAKAVIGLYLTVMYLLVKNLVNVNARYVIAIHCLERDFGLYKEIIPELASKNLKNDYRILSQTLCELCDKSPNLFLKKNERLRKCVEVDINNADSIMTRKYRNCIAHLTVVRELKEYIGDIRAVDSYFSIYHYVMQRCITKRENDTKQEDKIKYEDDLLKNHGYTKDFVKALNSPFGYNIPRFKNLSIEQLFDRNEYLTEK

SEQ ID NO: 3504 - protein, 919 aa, Artificial; identical to SEQ ID NO: 2825
  Synthetic

SEQ ID NO: 3505 - protein, 946 aa, Artificial; identical to SEQ ID NO: 2799
  Synthetic

SEQ ID NO: 3506 - protein, 925 aa, Artificial
  Synthetic
MAKKNKMKPREMREAQKKARQLKAAEINNNAAPAIAAMPAAEVIAPAAEKKKSSVKAAGMKSILVSKNKMYITSFGKGNSAVLEYEVDKVDNNNYNKTQLSSKDNSNIELGDVNEVNITFSSKRGNESGVEINTSNPTHRSGESSPVRWDMLGLKSELEKRFFGKTFDDNIHIQLIYNILDIEKILAVYVTNIVYALNNMLGIKDSESYDDFMGYLSAKNTYEVFTHPDKSNLSDKVKGNIKKSLSKFNDLLKTKRLGYFGLEEPKTKDTRVSQAYKKRVYHMLAIVGQIRQSVFHDKSSKLDEDLYSFIDIIDPEYRETLDYLVDERFDSINKGFIQGNKVNISLLIDMMKGYEADDIIRLYYDFIVLKSQKNLGFSIKKLREKMLDEYGFRFKDKQYDSVRSKMYKLMDFLLFCNYYRNDVAAGEALVRKLRFSMTDDEKEGIYADEAAKLWGKFRNDFENIADHMNGDVIKELGKADMDFDEKILDSEKKNASDLLYFSKMIYMLTYFLDGKEINDLLTTLISKFDNIKEFLKIMKSSAVDVECELTAGYKLFNDSQRITNELFIVKNIASMRKPAASAKLTMFRDALTILGIDDNITDDRISEILKLKEKGKGIHGLRNFITNNVIESSRFVYLIKYANAQKIREVAENEKVVMFVLGGIPDTQIERYYKSCVEVPDMNSSLEAKRSELARMIKNISFYDFKNVKQQAKGRENVAKERAKAVIGLYLTVMYLLVKNLVNVNARYVIAIHCLERDFGLYKEIIPELASKNLKNDYRILSQTLCELCDNGDESPNLFLKKNKRLRKCVEVDINNADSSMTRKYRNCIAHLTVVRELKEYIGDIRTVDSYFSIYHYVMQRCITKRENDTKQEEKIKYEDDLLKNHGYTRDFVKALNSPFGYNIPRFKNLSIEQLFDRNEYLTEK

SEQ ID NO: 3507 - protein, 925 aa, Artificial
  Synthetic
MAKKNKMKPRELREAQKKARQLKAAEINNNAAPAIAAMPAAEVIAPAAEKKKSSVKAAGMKSILVSENKMYITSFGKGNSAVLEYEVDKVDNNNYNKTQLSSKDNSNIELGDVNEVNITFSSKHGFESGVEINTSNPTHRSGESSPVRWDMLGLKSELEKRFFGKTFDDNIHIQLIYNILDIEKILAVYVTNIVYALNNMLGIKKSESHDDFMGYLSAKNTYDVFTNPNGSTLSDDKKKNIRKSLRKFNDLLKTKRLGYFGLEEPKTKDTRVSQAYKKRVYHMLAIVGQIRQSVFHDKSSKLHEDLYSFIDIIDSEYRETLDYLVDERFDSINKGFIQGNKVNISLLIDMMKGYEADDIIRLYYDFIVLKSQKNLGFSIKKLREKMLDEYGFRFKDKQYDSVRSKMYKLMDFLLFCNYYRNDVAAGEALVRKLRFSMTDDEKEGIYADEAAKLWGKFRNDFENIADHMNGDVIKELGKADMDFDEKIIDSEKKNASDLLYFSKMIYMLTYFLDGKEINDLLTTLISKFDNIKEFLKIMKSSAVNVECELTAGYKLFNDSQRITNELFIVKNIASMRKPAASAKLTMFRDALTILGIDDKITDDRISEILKLKEKGKGIHGLRNFITNNVIESSRFVYLIKYANAQKIREVAKNEKVVMFVLGGIPDTQIERYYKSCVEFPDMNSSLEVKRSELARMIKNISFDDFKNVKQQAKGRENVAKERAKAVIGLYLTVMYLLVKNLVNVNARYVIAIHCLERDFGLYKEIIPELASKNLKNDYRILSQTLCELCDNRDESPNLFLKKNKRLRKCVEVDINNADSSMTRKYRNCIAHLTVVRELKEYIGDIRTVDSYFSIYHYVMQRCITKREDDKKQEEKIKFEDDLLKNHGYTKDFVKALNSPFGYNIPRFKNLSIEQLFDRNEYLTEK

SEQ ID NO: 3508 - protein, 919 aa, Artificial
  Synthetic
MAKKNKMKPRELREAQKKARQLKAAEINNNAAPAIAAMPAAEVIAPAAEKKKSSVKAAGMKSILVSENKMYITSFGKGNSAVLEYEVDNNDYNKTQLSSKNSSNIELCGVNEVNITFSSKHGFESGVEINTSNPTHRSGESSPVRWDMLGLKSELEKRFFGKTFDDNIHIQLIYNILDIEKILAVYVTNIVYALNNMLGVKGSESHDDFIGYLSTNNIYDVFIDPDNSSLSDDKKANVRKSLSKFNVLLKTKRLGYFGLEEPKTKDTRASEAYKKRVYHMLAIVGQIRQCVFHDKSGAKRFDLYSFINNIDPEYRDTLDYLVEERLKSINKDFIEGNKVNISLLIDMMKGYEADDIIRLYYDFIVLKSQKNLGFSIKKLREKMLDEYGFRFKDKQYDSVRSKMYKLMDFLLFCNYYRNDVIAGEALVRKLRFSMTDDEKEGIYADEAAKLWGKFRNDFENIADHMNGDVIKELGKADMDFDEKILDSEKKNASDLLYFSKMIYMLTYFLDGKEINDLLTTLISKFDNIKEFLKIMKSSAVDVECELTAGYKLFNDSQRITNELFIVKNIASMRKPAASAKLTMFRDALTILGIDDKITDDRISEILKLKEKGKGIHGLRNFITNNVIESSRFVYLIKYANAQKIREVAKNEKVVMFVLGGIPDTQIERYYKSCVEFPDMNSSLEAKRSELARMIKNIRFDDFKKVKQQAKGRENVAKERAKAVIGLYLTVMYLLVKNLVNVNARYVIAIHCLERDFGLYKEIIPELASKNLKNDYRILSQTLCELCDKSPNLFLKKNERLRKCVEVDINNADSSMTRKYRNCIAHLTVVRELKEYIGDIRTVDSYFSIYHYVMQRCITKRENDTKQEEKIKYEDDLLKNHGYTKDFVKALNSPFGYNIPRFKNLSIEQLFDRNEYLTEK

SEQ ID NO: 3509 - protein, 926 aa, Artificial
  Synthetic
MLLCAIIQASTKRDRKGGVRMEREVKKPPKKSLAKAAGLKSTFVISPQEKELAMTAFGRGNDALLQKRIVDGVVRDVAGEKQQFQVQRQDESRFRLQNSRLADRTVTADDPLHRAEAPHRQPLGAGMDQLRRKAILEQKYFGRTFDDNIHIQLIYNILDIHKMLAVPANHIVHTLNLLGGYGETDFVGMLPAGLPYDKLRVVKKKNGDTVDIKADIAAYAKRPQLAYLGAAFYDVTPGKSKRDAARGRVKREQDVYTILSLMSLLRQFCAHDSVRIWGQNTPAALYGLQALPQDMKDLLDDGWRRALGGVNDHFLDTNKVNLLTLFEYYGAETKQARVALTQDFYRFVVLKEQKNMGFSLRRLREELLKLPDAAYLTGQEYDSVRQKLYMLLDFLLCRLYAQERADRCEELVSALRCALSDEEKGAVYQAEAAALWQALGDTLRRELLPLLKGKKLQDKDKKKPDELGLSRDVLDGVLFRPAQQGNRANADYFCRLMHLSTWFMDGKEINTLLTTLISKLENIDSLRNVLESMGLACSFVPAYAMFDHSRYIAGQLRVVNNIARMRKPAITAKREMYRAAVVLLGVDSPEAAAAITDDLLQIDPETGKVRPRGDSARDTGLRNFIANNVVESRRFTYLLRYMTPEQARVLAQNEKLIAFVLSTVPSAQLERYCRTCGREDITGRPAQIRYLTAQIMGVRYESFTDVEQRGRGDNPKKERYKALIGLYLTVLYLAVKNMVNCNARYVIAFYCRDRDTALYQKEVCWYDLEEDKKSGKQWQVEDYTALTRYFVSQGYLNRHACGYLRSNMNGISNGLLTAYRNAVDHLNVIPPLGSLCRDIGRVDSYFALYHYAVQQYLNGRYYRKTPREQELFAAMAQHRTWCSDLVKALNTPFGYNLARYKNLSIDGLFDREGDHVVREDGEKPAE

SEQ ID NO: 3510 - protein, 923 aa, Artificial; identical to SEQ ID NO: 2862
  Synthetic

SEQ ID NO: 3511 - protein, 939 aa, Artificial; identical to SEQ ID NO: 2861
  Synthetic

SEQ ID NO: 3512 - protein, 922 aa, Artificial; identical to SEQ ID NO: 2840
  Synthetic

SEQ ID NO: 3513 - protein, 954 aa, Artificial; identical to SEQ ID NO: 2846
  Synthetic

SEQ ID NO: 3514 - protein, 919 aa, Artificial; identical to SEQ ID NO: 3424
  Synthetic

SEQ ID NO: 3515 - protein, 958 aa, Artificial; identical to SEQ ID NO: 3259
  Synthetic

SEQ ID NO: 3516 - protein, 954 aa, Artificial
  Synthetic
MGKKIHARDLREQRKTDRTVKFADQNKKREAQRAVQKKDAAVSVKSVSSVSSKKDNATKSMAKAAGVKSVFAVENTVYMTSFGRGNDAVLEQKIVDTSHEQLNIDDPAYQLNVVTMNGYSVTGHRGETVSAVTDNPLRRFNGGKKDEPEQSVPTDMLCLKPTLEKKFFGKEFNDNIHIQLIYNILDIEKILAVYSTNAIYALNNMSADENIENSDFFMKRTTDETFDDFEKKKESTNSREKADFDAFEKFIGNYRLAYFADAFYVNKKNPKGKARNVLREDKELYSVLTLIGKLRHWCVHSEEGRAEFWLYKLDELKDDFKNVLDVVYNRPVEEINNRFIENNKVNIQILGSVYKNTDIAELVRSYYEFLITKKYKNMGFSIKKLRESMLEGKGYADKEYDSVRNKLYQMTDFILYTGYINEDSDRADDLVNTLRSSLKEDDKTTVYCKEADYLWKKYRESIREVADALDVDNIKNLSGSNIEIRDNELRKCFISYADSVSEFTKLIYLLTRFLSGKEINDLVTTLINKFDNIRSFLEIMDELGLDRTFTAEYSFFEGSTKYLAELVELNSFVKSCSFDINAKRTMYRDALDILGIESDKTEEDIEKMIDNILQIDANGDKKLKKNNGLRNFIASNVIDSNRFKYLVRYGNPKKIRETAKCEPAVRFVLNEIPDAQIERYYEACCPKNTALCSANKRREKLADMIAEIEFENFSDAGNYQKANVTSRTSEAEIKRKNQAIIRLYLTVMYIMLKNLVNVNARYVIAFHCVERDTKLYAESGLEVGNIEKNKTNLTMAVMGVKLENGIIKTEFDKSLAENAANRYLRNARWYKLILDNLKKSERAVVNEFRNTVCHLNAIRNININIDGIKEVENYFALYHYLIQKHLENRFADKKVERDTGDFISKLEEHKTYCKDFVKAYCTPFGYNLVRYKNLTIDGLFDKNSPGKDDSDEQK

SEQ ID NO: 3517 - protein, 925 aa, Artificial
  Synthetic
MAKKNKMKPRELREAQKKARQLKAAEINNNAAPTIAAMPAAEVIAPAAEKKKSSVKAAGMKSILVSENKMYITSFGKGNSAVLEYEVDKVDNNDYNQTQLSSKDSSNIELCGVNEVNITFSSKHGFESGVEINTSNPTHRSGESSPVRWDMLGLKSELEKRFFGKTFDDNIHIQLIYNILDIEKILAVYVTNIVYALNNMLGVKGSESHDDFIGYLSTNNIYDVFIDPDNSSLSDDKKANVRKSLSKFNVLLKTKRLGYFGLEEPKTKDTRVSEAYKKRVYHMLAIVGQIRQCVFHDKSGAKRFDLYSFINNIDPEYRETLDYLVDERFDSINKGFIEGNKINISLLIDMMKGYEADDIIRLYYDFIVLKSQKNLGFSIKKLREKMLDEYGFRFKDKQYDSVRSKMYKLMDFLLFCNYFRNDVVAGEALVRKLRFSMTDEEKEGIYADEAAKLWGKFRNDFENIADHMNGDVIKELGKADMDFDEKILDSEKKNASDLLYFSKMIYMLTYFLDGKEINDLLTTLISKFDNIKEFLKIMKSSAVDVECELTAGYKLFNDSQRITNELFIVKNIASMRKPAASAKLTMFRDALTILGIDDNITDDRISEILKLKEKGKGIHGLRNFITNNVIESSRFVYLIKYANAQKIREVAKNEKVVMFVLGGIPDTQIERYYKSCVEVTDMNSSLEAKRSELARMIKNIRFDDFKNVKQQAKGRENVAKERAKAVIGLYLTVMYLLVKNLVNVNARYVIAIHCLERDFGLYKEIIPELASKNLKNDYRILSQTLCELCDDRDKSPNLFLKKNKRLRKCVEVDINNADSSMTRKYRNCIAHLTVVRELKEYIGDIRTVDSYFSIYHYVMQRCITKRENDTKQEDKIKYEDDLLKNHGYTKDFVKALNSPFGYNIPRFKNLSIEQLFDRNEYLTEK

SEQ ID NO: 3518 - protein, 954 aa, Artificial; identical to SEQ ID NO: 3516
  Synthetic

SEQ ID NO: 3519 - protein, 954 aa, Artificial
  Synthetic
MGKKIHARDLREQRKTDRTEKFADQNKKREAERAVQKKDAAVSVKSVSSVSSKKDNVTKSMAKAAGVKSVFAVGNTVYMTSFGRGNDAVLEQKIVDTSHEQLNIDDPAYQLNVVTMNGYSVTGHRGETVSAVTDNPLRRFNGGKKDEPEQSVPTDMLCLKPTLEKKFFGKEFNDNIHIQLIYNILDIEKILAVYSTNAIYALNNMSADENIENSDFFMKRTTDETFDDFEKKKESTNSREKADFDAFEKFIGNYRLAYFADAFYVNKKNPKGKAKNVLREDKELYSVLTLIGKLRHWCVHSEDGRAEFWLYKLDELKDDFKNVLDVVYNRPVEEINNRFIENNKVNIQILGSVYKNTDIAELVRSYYEFLITKKYKNMGFSIKKLRESMLEGKGYADKEYDSVRNKLYQMTDFILYTGYINEDSDRADDLVNTLRSSLKEDDKTTVYCKEADYLWKKYRESIREVADALDVDNIKNLSGSNIEIRDNELRKCFISYADSVSEFTKLIYLLTRFLSGKEINDLVTTLINKFDNIRSFLEIMDELGLDRTFTAEYSFFEGSTKYLAELVELNSFVKSCSFDINAKRTMYRDALDILGIKSGKTEEDIEKMIDNILQIDANGDKKLKKNNGLRNFIASNVIDSNRFKYLVRYGNPKKIRETAKCKPAVRFVLNEIPDAQIERYYEACCPKNTALCSANKRREKLADMIAEIKFENFSDAGNYQKANVTSRTSEAEIKRKNQAIIRLYLTVMYIMLKNLVNVNARYVIAFHCVERDTKLYAESGLEVGNIEKNKTNLTMAVMGVKLENGTIKTEFDKSLAENAANRYLRNARWYKLILDNLKKSERAVVTEFRNTVCHLNAIRNININIKEIKEVENYFALYHYLIQKHLENRFADKKVERDTGDFISKLEEHKTYCKDFVKAYCTPFGYNLVRYKNLTIDGLFDKNYPGKDDSDKQK

SEQ ID NO: 3520 - protein, 919 aa, Artificial; identical to SEQ ID NO: 2899
  Synthetic

SEQ ID NO: 3521 - protein, 922 aa, Artificial; identical to SEQ ID NO: 3163
  Synthetic

SEQ ID NO: 3522 - protein, 925 aa, Artificial
  Synthetic
MAKKNKMKPRELREAQKKARQLKAAEINNNAVPAIAAMPAAEVIAPAAEKKKSSVKAAGMKSILVSENKMYITSFGKGNSAVLEYEVDKVDNNNYNKTQLSSKDNSNIELGDVNEVNITFSSKRGNESGVEINTSNPTHRSGESSPVRWDMLGLKSELEKRFFGKTFDDNIHIQLIYNILDIEKILAVYVTNIVYALNNMLGIKKSESYDDFMGYLSARNTYEVFTHPDKSNLSDKAKGNIKKSFSTFNDLLKTKRLGYFGLEEPKTKDTRVSQAYKKRVYHMLAIVGQIRQSVFHDKSSKLDEDLYSFIDIIDSEYRETLDYLVDERFDSINKGFIQGNKVNISLLIDMMKGYETDDIIRLYYDFIVLKSQKNLGFSIKKLREKMLDEYGFRFKDKQYDSVRSKMYKLMDFLLFCNYYRNDVAAGEALVRKLRFSMTDDEKEGIYADEAEKLWGKFRNDFENIADHMNGDAIKELGKADMDFDEKILDSEKKNASDLLYFSKMIYMLTYFLDGKEINDLLTTLISKFDNIKEFLKIMKSSAVDVECELTAGYKLFNDSQRITNELFIVKNIASMRKPAASAKLTMFRDALTILGIDDKITDDRISEILKLKEKGKGIHGLRNFITNNVIESSRFVYLIKYANAQKIREVAKNEKVVMFVLGGIPDTQIERYYKSCVEFPDMNSSLEAKRSELARMIKNISFDDFKNVKQQAKGRENVAKERAKAVIGLYLTVMYLLVKNLVNVNARYVIAIHCLERDFGLYKEIIPELASKNLKNDYRILSQTLCELCDDRDESPNLFLKKNKRLRKCVEVDINNADSSMTRKYRNCIAHLTVVRELKEYIGDIRTVDSYFSIYHYVMQRCITKREDDKKQEEKIKYEDDLLKNHGYTKDFVKALNSPFGYNIPRFKNLSIEQLFDRNEYLTEK

SEQ ID NO: 3523 - protein, 1023 aa, Artificial; identical to SEQ ID NO: 3042
  Synthetic

SEQ ID NO: 3524 - protein, 922 aa, Artificial; identical to SEQ ID NO: 3498
  Synthetic

SEQ ID NO: 3525 - protein, 918 aa, Artificial
  Synthetic
MAKKNKMKPRELREAQKKARQLKAAEINNNATPTIAAMPAAEVIAPAAEKKKSSVKAAGMKSILVSKNKMYITSFGKGNSAVLEYEVDNNDYNQTQLSSKNSSNIELRGVNEVNITFSSKHGFESGVEINTSNPTHRSGESSSVRGDMLGLKSELEKRFFGKTFDDNIHIQLIYNILDIEKILAVYVTNIVYALNNMLGEGDESNYDFMGYLSTFNTYKVFTNPNGSTLSDDKKENIRKSLSKFNALLKTKRLGYFGLEEPKTKDTRASEAYKKRVYHMLAIVGQIRQCVFHDKSGAKRFDLYSFINNIDPEYRETLDYLVDERFDSINKGFIQGNKVNISLLIDMMKGYEADDIIRLYYDFIVLKSQKNLGFSIKKLREKMLDEYGFRFKDKQYDSVRSKMYKIMDFLLFCNYYRNDVVAGEALVRKLRFSMTDDEKEGIYADEAAKLWGKFRNDFENIADHMNGDVIKELGKADMDFDEKILDSEKKNASDLLYFSKMIYMLTYFLDGKEINDLLTTLISKFDNIKEFLKIMKSSAVNVECELTVGYKLFNDSQRITNELFIVKNIASMRKPAASAKLTMFRDALTILGIDDKITDDRISEILKLKEKGKGIHGLRNFITNNVIESSRFVYLIKYANAQKIREVAKNEKVVMFVLGGIPDTQIERYYKSCVEFPDMNSSLEAKRSELARMIKNISFDDFKNVKQQAKGRENVAKERAKAVIGLYLTVMYLLVKNLVNVNARYVIAIHCLERDFGLYKEIIPELVSKNLKNDYRILSQTLCELCDKSPNLFLKKNERLRKCVEVDINNADSVMTRKYRNCIAHLTVVRELKEYIGDIRTVDSYFSIYHYVMQRCITKREDDTKQEEKIKYEDDLLKNHGYTKDFVKALNSPFGYNIPRFKNLSIEQLFDRNEYLTEK

SEQ ID NO: 3526 - protein, 918 aa, Artificial; identical to SEQ ID NO: 3525
  Synthetic

SEQ ID NO: 3527 - protein, 953 aa, Artificial
  Synthetic
MGKKIHARDLREQRKNDRTAKFADQNKKCEAQRAVQKKDAAVSVKSASSVSSKKDNATKSMAKAAGVKSVFAVGRNTVYMTSFGRGNDAVLEQKIVDTSHEPLNIDDPAYQLNVVTMNGYSVTGHRGETVSAVTDNPLRRFNGGKKDEPEQSVPTDMLCLKPTLEKKFFGKEFNDNIHIQLIYNILDIEKILAVYSTNAIYALNNMSADENIENSDFFMKRTTDETFDDFEKKKESTNSREKADFDAFEKFIGNYRLAYFADAFYVNKKNPKGKARNVLREDKELYSVLTLIGKLRHWCVHSEEGRAEFWLYKLDELKSDFKNVLDSVYNRPVEEINNRFIENNKVNIQILGSIYKNTDIAELVRSYYEFLITKKYKNMGFSIKKLRESMLEGKGYADKEYDSVRNKLYQMTDFILYTGYINEDSDRADDLVNALRSSLKEDDKTTVYCKEADYLWKKYRESIREVAEALDGDNIKRLSKSNIEIQEDKLRKCFISYADSVSEFTKLIYLLTRFLSGKEINDLVTTLINKFDNIRSFLEILDELGLDRTFTAEYSFFEGSTKYLAELVELNSFVKSCSFDINAKRTMYRDALDILGIKSGKTEEDIEKMIDNILQIDANGDKKLKKNNGLRNFIASNVIDSNRFKYLVRYGNPKKIRETAKCKPAVRFVLNEIPDAQIERYYEACCPKNTALCSANKRREKLADMIAEIKFENFSDAGNYQKANVTSKTHEAEIKRKNQAIIRLYLTVMYIMLKNLVNVNARYVIAFHCVERDTKLYAESGLEVGNIEKNKTNLTMAVMGVKLENGIIKTEFDKSLAENAANRYLRNARWYKLILDNLKMSERAVVNEFRNTVCHLNAIRNININIDGIKEVENYFALYHYLIQKHLENRFADNGGSTGDYISKLEEHKTYCKDFVKAYCTPFGYNLVRYKNLTIDGLFDKNYPGKDDSDKQK

SEQ ID NO: 3528 - protein, 920 aa, Artificial; identical to SEQ ID NO: 3169
  Synthetic

SEQ ID NO: 3529 - protein, 922 aa, Artificial; identical to SEQ ID NO: 2840
  Synthetic

SEQ ID NO: 3530 - protein, 919 aa, Artificial; identical to SEQ ID NO: 3009
  Synthetic

SEQ ID NO: 3531 - protein, 923 aa, Artificial; identical to SEQ ID NO: 2862
  Synthetic

SEQ ID NO: 3532 - protein, 922 aa, Artificial; identical to SEQ ID NO: 2906
  Synthetic

SEQ ID NO: 3533 - protein, 922 aa, Artificial; identical to SEQ ID NO: 3317
  Synthetic

SEQ ID NO: 3534 - protein, 922 aa, Artificial; identical to SEQ ID NO: 3317
  Synthetic

SEQ ID NO: 3535 - protein, 922 aa, Artificial; identical to SEQ ID NO: 2955
  Synthetic

SEQ ID NO: 3536 - protein, 922 aa, Artificial; identical to SEQ ID NO: 3374
  Synthetic

SEQ ID NO: 3537 - protein, 984 aa, Artificial
  Synthetic
MKKKNIRATREALKSQKIKKSQENEALKKQKLAEEAAQKRREELEKKNLAQWEETSAEGRKSRVKAVGVKSVFVVGDDLYLATFGNGNKTVLEKKITPDGKITTFPEEETFTAKLKFAQTEPTVATSIGISNGRIVLPEISVDNPLHTTMQKNTIKRSAGEDILQLKDVLENRYFDRSFNDDLHIRLIYNILDIEKILAEYTTNAVFAIDNVSGCSDDFLSNFSTRNQWDEFQNPEQHREHFGNKDNVICSVKKQQDLFFNFFKNNRIGYFGKAFFHAESERKIVKKTEKEVYHILTLIGSLRQWITHSTESGISRLWLYQLEDALSREYQETMNNCYNSTIYGLQKDFEKTNAPNLNFLAEILGKNASELAEPYFRFIITKEYKNLGFSIKTLREMLLDQPDLQEIRENHNVYDSIRSKLYKMMDFVLVYAYSNERKSKADALASNLRSAITEDAKKRIYQNEADQLWTSYQELFKRIRGFKGAQVKEYSSKNMPIPIQKQIQNILKPAEQVTCFTKLMYLLTMFLDGKEINDLLTTLINKFDNISSLLKTMEQLELQTTFKEDYTFFQQSSRLCEEITQLKSFARMGNPISNLKEVMMVDAIQILGTEKSEQELQSMACFFFRDKNGKKLNTGEHGMRNFIGNNVISNTRFQYLIRYGNPQKLHTLSQNETVVRFVLSRIAKNQRVQGMNGKNQIDRYYETCGGTNSWSVSEEEKINFLCKILTNMSYDQFQDVKQSGAEITAEEKRKKERYKAIISLYLTVLYQLIKNLVNINARYIIAFHCLERDAILYSSKFNTSINLKKRYTALTEMILGYETDEKARRKDTRTVYEKAEAAKNRHLKNVKWNCKTRENLENADKNAIVAFRNIVAHLWIIRDADRFITGMGAMKRYFDCYHYLLQRELGYILEKSNQGSEYTKKSLEKVQQYHSYCKDFLHMLCLPFAYCIPRYKNLSIAELFDRHEPEAEPKEEASSANNSQFITT

SEQ ID NO: 3538 - protein, 919 aa, Artificial
  Synthetic
MAKKNKMKPRELREAQKKARQLKAAEINNNAAPAIAAMSAAEVIAPAAEKKKSSVKAAGMKSILVSENKMYITSFGKGNSAVLEYEVDNNDYNKTQLSSKDNSNIELGDVNEVNITFSSKHGFGSGVEINTSNPTHRSGESSPVRWDMLGLKSELEKRFFGKTFDDNIHIQLIYNILDIEKILAVYVTNIVYALNNMLGVKGSESYDDFMGYLSAKNTYEVFTHPDKSNLSDKVKGNIKKSFSTFNDLLKTKRLGYFGLEEPKTKDTRVSQAYKKRVYHMLAIVGQIRQSVFHDKSSKLHEDLYSFIDIIDSEYRETLDYLVEERLKSINKDFIEGNKVNISLLIDMMKGYEADDIIRLYYDFIVLKSQKNLGFSIKKLREKMLDEYGFRFKDKQYDPVRSKMYKLMDFLLFCNYYRNDVVTGEALVRKLRFSMTDDEKEGIYADEASKLWGKFRNDFENIADHMNGDVIKELGKADMDFDEKILDSEKKNASDLLYFSKMIYMLTYFLDGKEINDLLTTLISKFDNIKEFLKIMKSSAVDVECELTAGYKLFNDSQRITNELFIVKNIASMRKPAASAKLTMFRDALTILGIDDNITDDRISEILKLKEKGKGIHGLRNFITNNVIESSRFVYLIKYANAQKIRKVAKNEKVVMFVLGGIPDTQIERYYKSCVEFPDMNSSLEVKRSELARMIKNISFDDFKNVKQQAKGRENVAKERAKAVIGLYLTVMYLLVKNLVNVNARYVIAIHCLERDFGLYKEIIPELASKNLKNDYRILSQTLCELCDKSPNLFLKKNRRLRKCVEVDINNADSSMTRKYRNCIAHLTVVRELKEYIGDIRTVDSYFSIYHYVMQRCITKRENDTKQEEKIKYEDDLLKNHGYTKDFVKALNSPFGYNIPRFKNLSIEQLFDRNEYLTEK

SEQ ID NO: 3539 - protein, 925 aa, Artificial; identical to SEQ ID NO: 3373
  Synthetic

SEQ ID NO: 3540 - protein, 925 aa, Artificial; identical to SEQ ID NO: 2833
  Synthetic

SEQ ID NO: 3541 - protein, 925 aa, Artificial
  Synthetic
MAKKNKMKPRELREAQKKARQLKAAEINNNAAPAIAAMPAAEVIAPAAEKKKSSVKAAGMKSILVSENKMYITSFGKGNSAVLEYEVDKVDDNDYNQTQLSSKDNSNIELGDVNEVNITFSSKHGFESGVEINTSNPTHRSGESSPVRGDMLGLKSELEKRFFGKTFDDNIHIQLIYNILDIEKILAVYVTNIVYALNNMLGVKGSESHDDFIGYLSTNNIYDVFIDPDNSSLSDDKKANVRKSLSKFNALLKTKRLGYFGLEEPKTKDNRVSQAYKKRVYHMLAIVGQIRQCVFHDKSGAKRFDLYSFINNIDPEYRDTLDYLVEERLKSINKDFIEDNKVNISLLIDMMKDYEADDIIRLYYDFIVLKSQKNLGFSIKKLREKMLDEYGYRFKDKQYDSVRSKMYKLMDFLLFCNYYRNDVVAGESLVRKLRFSMTDDEKEGIYADEASKLWGKFRNDFENIADHMNGDVIKELGKADMDFDEKILDSEKKNASDLLYFSKMIYMLTYFLDGKEINDLLTTLISKFDNIKEFLKIMKSSAVNVECELTAGYKLFNDSQRITNELFIVKNIASMRKPAASAKLTMFRDALTILGIDDNITDDRISEILKLKEKGKGIHGLRNFITNNVIESSRFVYLIKYANAQKIREVAKNEKVVMFVLGGIPDTQIERYYKSCVEFPDMNSSLKAKRSELARMIKNISFEDFKDVKQQAKGRENVAKERAKAVIGLYLTVMYLLVKNLVNVNARYVIAIHCLERDFGLYKEIIPELASKNLKNDYRILSQMLCELCDDRDKSPNLFLKKNKRLRKCVEVDINNADSSMTRKYRNCIAHLTVVRELKEYIGDIYAVDSYFSIYHYVMQRCITKRENDTKQEEKIKYEDNLLKNHGYTKDFVKALNSPFGYNIPRFKNLSIEQLFDRNEYLTEK

SEQ ID NO: 3542 - protein, 922 aa, Artificial; identical to SEQ ID NO: 3327
  Synthetic

SEQ ID NO: 3543 - protein, 922 aa, Artificial; identical to SEQ ID NO: 3121
  Synthetic

SEQ ID NO: 3544 - protein, 980 aa, Artificial
  Synthetic
MMGKHLNAKQRKLEKKLKNQQKDMMYTKSTDAVSVPTLKAAPTKAEMSQDTAEASTLITPGTLKTKAKAMGLKSTLVFDDKIVVTSFLNSKTEENEKCAHIEKIADCNGQTIVERPRMFNTSINAKKVDLSKDNDETNYPNPAFEDCGRDYINVKSALEKRVFGKTYNKDNLHVQIAYNIFDIKKIIGAYINNIIYIFYNLGREEYDAKKDIIGTQDSAYISKILNNTSAYFTYFDGVFKQITDRDSNKDREIKNSYNALVLKVLYYLRQFCMHGNTYTKRNEESFLSDTALYNAKEFFAKADPQINELIDAVYADGIKTINSDFMAHAKNNMYIICEVYKNEAEDSLMKEYYDFVVRKEGNNLGFNTRQLREILIDKYVGNLRGKKYNTFRNKLYTVLGFILVKEIKRNPKIQDSFIAKLRANQNGDEGKLNIYNEFAPKIWSVVSSKLNSAITCFDEESLSKFKGYKDIDESLISRYGITVANTDTLVKILYFLCKFLDGKEINELCCAMINKFDNINDLIKTAAQCGEDIEFVKEYKLFINSNDLSDQIRIVKSISKMKPELSKIGEALILDAIDILGYKINKYKYDAAGNRLVDSNNKPVYSEEYCAFKKDFFETCELDEFGRVKYNKKGKPVINHRRRNFIINNVLSSKWFFYVAKYNRPSECQKFMKSKKLIALVLKDVPETQIARYYQSVTGGRTQANSEAMRMTLIKLLHEFSIKNVLSDVGTMTASENKRQIENSRKERMKAIVKLYLTVVYLIAKSLVKVNTRFSIAFSAYERDVSLLADENELIALANNEDDKWKKGNYVFALTKHFWDNDEPYFDKYNNALQQIRSIVDPNERRLAYRANDKVVKHTHFNLHSYKYVKHNYEEISKASKIITAYRNNVQHLNVMNSITKYLGDISEVTSYYSLYCYTLQRLLLDDNNNDKFASIKGNLRKFGIYNKDFMWLLNIPFAYNLPRYKNLSNEEIFYDELQK

SEQ ID NO: 3545 - protein, 922 aa, Artificial; identical to SEQ ID NO: 2946
  Synthetic

SEQ ID NO: 3546 - protein, 928 aa, Artificial; identical to SEQ ID NO: 2950
  Synthetic

SEQ ID NO: 3547 - protein, 924 aa, Artificial; identical to SEQ ID NO: 2910
  Synthetic

SEQ ID NO: 3548 - protein, 1141 aa, Artificial; identical to SEQ ID NO: 2802
  Synthetic

SEQ ID NO: 3549 - protein, 925 aa, Artificial; identical to SEQ ID NO: 2987
  Synthetic

SEQ ID NO: 3550 - protein, 923 aa, Artificial; identical to SEQ ID NO: 3242
  Synthetic

SEQ ID NO: 3551 - protein, 922 aa, Artificial
  Synthetic
MAKKNKMKPRELREAQKKARQLKAAEINNNAAPAIAAMPAAEVIAPAAEKKKSSVKAAGMKSILVSENKMYITSFGKGNSAVLEYEVDNNDYNQTQLSSKDNSNIQLGGVNEVNITFSSKHGFESGVEINTSNPTHRSGESSPVRGDMLGLKSELEKRFFGKTFDDNIHIQLIYNILDIEKILAVYVTNIVYALNNMLGVKGSESHDDFIGYLSTNNIYDVFIDPDNSSLSDDKKANVRKSLSKFNALLKTKRLGYFGLEEPKTKDNRVSQAYKKRVYHMLAIVGQIRQCVFHDKSGAKRFDLYSFINNIDPEYRDTLDYLVEERLKSINKDFIEDNKVNISLLIDMMKGYEADDIIRLYYDFIVLKSQKNLGFSIKKLREKILDEYGFRFKDKQYDSVRSKMYKLMDFLLFCNYYRNDIAAGESLVRKLRFSMTDDEKEGIYADEAAKLWGKFRNDFENIADHMNGDVIKELGKADMDFDEKILDSEKKNASDLLYFSKMIYMLTYFLDGKEINDLLTTLISKFDNIKEFLKIMKSSAIDVECELTAGYKLFNDSQRITNELFIVKNIASMRKPAASAKLTMFRDALTILGIDDKITDDRISEILKLKEKGKGIHGLRNFITNNVIESSRFVYLIKYANAQKIREVAKNEKVVMFVLGGIPDTQIERYYKSCVEFPDMNSSLEAKRSELARMIKNIRFDDFKNVKQQAKGRENVAKERAKAVIGLYLTVMYLLVKNLVNVNARYVIAIHCLERDFGLYKEIIPELASKNLKNDYRILSQTLCELCDNGDESPNLFLKKNKRLRKCVEVDINNADSSMTRKYRNCIAHLTVVRELKEYIGDIRTVDSYFSIYHYVMQRCITKREDDTKQEEKIKYEDDLLKNHGYTKDFVKALNSPFGYNIPRFKNLSIEQLFDRNEYLTEK

SEQ ID NO: 3552 - protein, 925 aa, Artificial; identical to SEQ ID NO: 2833
  Synthetic

SEQ ID NO: 3553 - protein, 919 aa, Artificial
  Synthetic
MAKKNKMKPRELREAQKKARQLKAAEINNNAVPAIAAMPVAEVIAPAAEKKKSSVKAAGMKSILVSENKMYITSFGKGNSAVLEYEVDNNDYNQTQLSSDGSSNIELRGVNEVNITFSSKHGFESGVEINTSNPTHRSGESSPVRWDMLGLKSELEKRFFGKTFDDNIHIQLIYNILDIEKILAVYVTNIVYALNNMLGEGDDESHDDFMGYLSAKNTYDVFTDPDESDLSKNIKGNIKKSLSKFNDLLKTKRLGYFGLEEPKTKDTNALEAYKKRVYHMLAIVGQIRQSVFHDKSSKLDEDLYSFIDIIDSEYRETLDYLVDERFDSINKGFIQGNKVNISLLIDMMKGYEADDIIRLYYDFIVLKSQKNLGFSIKKLREKMLEEYGYRFKDKQYDSVRSKMYKLMDFLLFCNYYRNDVVAGEALVRKLRFSMTDDEKEGIYADEAAKLWGKFRNDFENIADHMNGDVIKELGKADMDFDEKILDSEKKNASDLLYFSKMIYMLTYFLDGKEINDLLTTLISKFDNIKEFLKIMKSSAVDVECELTAGYKLFNDSQRITNELFIVKNIASMRKPAASAKLTMFRDALTILGIDDKITDDRISEILKLKEKGKGIHGLRNFITNNVIESSRFVYLIKYANAQKIREVAENEKVVMFVLGGIPDTQIERYYKSCVEFPDMNSPLEAKRSELARMIKNIRFDDFKNVKQQAKGRENVAKERAKAVIGLYLTVMYLLVKNLVNVNARYVIAIHCLERDFGLYKEIIPELASKNLKNDYRILSQTLCELCDKSPNLFLKKNERLRKCVEVDINNADSSMTRKYRNCIAHLTVVRELKEYIGDIRTVDSYFSIYHYVMQRCITKREDDIKQEEKIKYEDDLLKNHGYTKDFVKALNSPFGYNIPRFKNLSIEQLFDRNEYLTEK

SEQ ID NO: 3554 - protein, 922 aa, Artificial
  Synthetic
MAKKNKMKPRELREAQKKARQLKAAEINNNAVPAIAAMPAAEVIAPAAEKKKSSVKAAGMKSILVSENKMYITSFGKGNSAVLEYEVDKVDNNNYNKTQLSSKDNSNIELGDVNEVNITFSSKRGNESGVEINTSNPTHRSGESSPVRWDMLGLKSELEKRFFGKTFDDNIHIQLIYNILDIEKILAVYVTNIVYALNNMLGIKKSESYDDFMGYLSARNTYEVFTHPDKSNLSDKAKGNIKKSFSTFNDLLKTKRLGYFGLEEPKTKDTRVSQAYKKRVYHMLAIVGQIRQSVFHDKSSKLDEDLYSFIDIIDSEYRETLDYLVDERFDSINKGFIQGNKVNISLLIDMMKGYETDDIIRLYYDFIVLKSQKNLGFSIKKLREKMLDEYGFRFKDKQYDSVRSKMYKLMDFLLFCNYYRNDVVAGEALVRKLRFSMTDDEKEGIYADEAAKLWGKFRNDFENIADHMNGDVIKELGKADMDFDEKILDSEKKNASDLLYFSKMIYMLTYFLDGKEINDLLTTLISKFDNIKEFLKIMKSSAVDVECELTAGYKLFNDSQRITNELFIVKNIASMRKPAASAKLTMFRDALTILGIDDNITDDRISEILKLKEKGKGIHGLRNFITNNVIESSRFVYLIKYANAQKIRKVAENEKVVMFVLGGIPDTQIERYYKSCVEFPDMNSSLEVKRSELARMIKNISFDDFKNVKQQAKGRENVAKERAKAVIGLYLTVMYLLVKNLVNVNARYVIAIHCLERDFGLYKEIIPELASKNLKNDYRILSQTLCELCDKSPNLFLKKNERLRKCVEVDINNADSSMTRKYRNCIAHLTVVRELKEYIGDIRTVDSYFSIYHYVMQRCITKRENDTKQEDKIKYEDDLLKNHGYTKDFVKALNSPFGYNIPRFKNLSIEQLFDRNEYLTEK

SEQ ID NO: 3555 - protein, 925 aa, Artificial
  Synthetic
MAKKNKMKPRELREAQKKARQLKAAEINNNAVPAIAAMPAAEVIAPAAEKKKSSVKAAGMKSILVSENKMYITSFGKGNSAVLEYEVDKVDDNDYNKTQLSSKDNSNIELGNVNEVNITFSSRRGFESGVEINTSNPTHRSGESSSVRGDMLGLKSELEKRFFGKTFDDNIHIQLIYNILDIEKILAVYVTNIVYALNNMLGIKKSESHDDFMGYLSTFNTYKVFTNPNGSTLSDDKKENIRKSLSKFNALLKTKRLGYFGLEEPKTKDTRASEAYKKRVYHMLAIVGQIRQCVFHDLSEHSEYDLYSFIDNSKKVYRECRETLDYLVDERFDSINKGFIQGNKVNISLLIDMMKGYEADDIIRLYYDFIVLKSQKNLGFSIKKLREKMLDEYGFRFKDKQYDSVRSKMYKLMDFLLFCNYYRNDVVAGEALVRKLRFSMTDDEKEGIYADEAAKLWGKFRNDFENIADHMNGDVIKELGKADMDFDEKILDSEKKNASDLLYFSKMIYMLTYFLDGKEINDLLTTLISKFDNIKEFLKIMKSSAVDVECELTAGYKLFNDSQRITNELFIVKNIASMRKPASSAKLTMFRDALTILGIDDNITDDRISEILKLKEKGKGIHGLRNFITNNVIESSRFVYLIKYANAQKIRKVAKNEKVVMFVLGGIPDTQIERYYKSCVEFPDMNSSLEVKRSELARMIKNISFDDFKNVKQQAKGRENVAKERAKAVIGLYLTVMYLLVKNLVNVNARYVIAIHCLERDFGLYKEIIPELASKNLKNDYRILSQTLCELCDKSPNLFLKKNERLRKCVEVDINNADSSMTRKYRNCIAHLTVVRELKEYIGDIRTVDSYFSIYHYVMQRCITKRENDTKQEEKIKYEDDLLKNHGYTKDFVKALNSPFGYNIPRFKNLSIEQLFDRNEYLTEK

SEQ ID NO: 3556 - protein, 922 aa, Artificial; identical to SEQ ID NO: 2840
  Synthetic

SEQ ID NO: 3557 - protein, 922 aa, Artificial; identical to SEQ ID NO: 2840
  Synthetic

SEQ ID NO: 3558 - protein, 922 aa, Artificial; identical to SEQ ID NO: 2945
  Synthetic

SEQ ID NO: 3559 - protein, 915 aa, Artificial
  Synthetic
MAKKNKMKPRELREAQKKARQLKAAEINNNAAPAIAAAPAAEKKKSSVKAAGMKSILVSENKMYITSFGKGNSAVLEYEVDNNDYNQTQLSSKGSSNIELHGVNEVNITFSSKHGFESGVEINTSNPTHRSGESSPVRWDMLGLKSELEKRFFGKTFDDNIHIQLIYNILDIEKILAVYVTNIVYALNNMLGVKGSESHDDFIGYLSTNNTYDVFIDPDNSSLSDDKKANVRKSLSKFNVLLKTKRLGYFGLEEPKTKDTRVSQAYKKRVYHMLAIVGQIRQCVFHDKSGAKRFDLYSFINNIDPEYRETLDYLVDERFDSINKGFIEGNKINISLLIDMMKGYEADDIIRLYYDFIVLKSQKNLGFSIKKLREKMLDEYGFRFKDKQYDPVRSKMYKLMDFLLFCNHYRNDVAAGEALVRKLRFSMTDDEKEGIYADEAAKLWGKFRNDFENIADHMNGDVIKELGKADMDFDEKILDSEKKNASDLLYFSKMIYMLTYFLDGKEINDLLTTLISKFDNIKEFLKIMKSSAVDVECELTAGYKLFNDSQRITNELFIVKNIASMRKPAASAKLTMFRDALTILGIDDNITDDRISEILKLKEKGKGIHGLRNFITNNVIESSRFVYLIKYANAQKIREVAKNEKVVMFVLGGIPDTQIERYYKSCVEFPDMNSSLEAKRSELARMIKNISFDDFKNVKQQAKGRENVAKERAKAVIGLYLTVMYLLVKNLVNVNARYVIAIHCLERDFGLYKEIIPELASKNLKNDYRILSQTLCELCDDRDESPNLFLKKNKRLRKCVEVDINNADSSMTRKYRNCIAHLTVVRELKEYIGDIRTVDSYFSIYHYVMQRCITKRENDTKQEEKIKYEDDLLKNHGYTKDFVKALNSPFGYNIPRFKNLSIEQLFDRNEYLTEK

SEQ ID NO: 3560 - protein, 919 aa, Artificial; identical to SEQ ID NO: 2825
  Synthetic

SEQ ID NO: 3561 - protein, 1141 aa, Artificial; identical to SEQ ID NO: 2802
  Synthetic

SEQ ID NO: 3562 - protein, 919 aa, Artificial; identical to SEQ ID NO: 2870
  Synthetic

SEQ ID NO: 3563 - protein, 922 aa, Artificial; identical to SEQ ID NO: 2840
  Synthetic

SEQ ID NO: 3564 - protein, 919 aa, Artificial; identical to SEQ ID NO: 2968
  Synthetic

SEQ ID NO: 3565 - protein, 926 aa, Artificial; identical to SEQ ID NO: 2875
  Synthetic

SEQ ID NO: 3566 - protein, 925 aa, Artificial
  Synthetic
MAKKNKMKPRELREAQKKARQLKAAEINNNAAPAIAAMPAAEVIAPAAEKKKSSVKAAGMKSILVSENKMYITSFGKGNSAVLEYEVDKVNNNDYNQTQLSSKGSSNIELHGVNEVNITFSSKHGFESGVEINTSNPTHRSGESSPVRWDMLGLKSELEKRFFGKTFDDNIHIQLIYNILDIEKILAVYVTNIVYALNNMLDIKDSESYDDFMGYLSARNTYEVFTHPDKSNLSDKVKGNIKKSFSTFNDLLKTKRLGYFGLEEPKTKDTRVSQAYKKRVYHMLAIVGQIRQSVFHDKSSKLHEDLYSFIDIIDSEYRETLDYLVDERFDSINKGFIQGNKVNISLLIDMMKGYEADDIIRLYYDFIVLKSQKNLGFSIKKLREKMLDEYGFRFKDKQYDSVRSKMYKLMDFLLFCNYYRNDVAAGEALVRKLRFSMTDDEKEGIYADEAAKLWGKFRNDFENIADHMNGDVIKELGKADMDFDEKILDSEKKNASDLLYFSKMIYMLTYFLDGKEINDLLTTLISKFDNIKEFLKIMKSSAVDVECELTAGYKLFNDSQRITNELFIVKNIASMRKPAASAKLTMFRDALTILGIDDNITDDRISEILKLKEKGKGIHGLRNFITNNVIESSRFVYLIKYANAQKIREVAENEKVVMFVLGGIPDTQIERYYKSCVEFPDMNSSMEAKRRELAKMIKSISFEDFKDVKQQAKGRENVAKERAKAVIGLYLTVMYLLVKNLVNVNARYVIAIHCLERDFGLYKEIIPELASKNLKNDYRILSQTLCELCDDRDKSPNLFLKKNKRLRKCVEVDINNADSIMTRKYRNCIAHLTVVRELKEYIGDIRTVDSYFSIYHYVMQRCITKRENDTKQEEKIKYEDDLLKNHGYTKDFVKALNSPFGYNIPRFKNLSIEQLFDRNEYLTEK

SEQ ID NO: 3567 - protein, 924 aa, Artificial
  Synthetic
MAKKNKMKPRELREAQKKARQLKAAEINNNAAPAIAAMPAAEVIAPAAEKKKSSVKAAGMKSILVSENKMYITSFGKGNSAVLEYEVDNNDYNKTQLSSEDSSNIELCGVNKVNITFSSKHGFESGVEINTSNPTHRSGESSPVRWDMLGLKSELEKRFFGKTFDDNIHIQLIYNILDIEKILAVYVTNIVYALNNMLGEGDESNYDFMGYLSTFNTYKVFTNPNGSTLSDDKKENIRKSLSKFNALLKTKRLGYFGLEEPKTKDTNALEAYKKRVYYMLAIVGQIRQCVFHDLSEHSEYDLYSFIDNSKKVYRECRETLDYLVDERFDSINKGFIQGNKVNISLLIDMMKGYEADDIIRLYYDFIVLKSQKNLGFSIKKLREKMLDEYGFRFKDKQYDPVRSKMYKLMDFLLFCNYYRNDVVAGEALVRKLRFSMTDDEKEGIYADEAAKLWGKFRNDFENIADHMNGDVIKELGKADMDFDEKILDSEKKNASDLLYFSKMIYMLTYFLDGKEINDLLTTLISKFDNIKEFLKIMKSSAVNVECELTAGYKLFNDSQRITNELFIVKNIASMRKPAASAKLTMFRDALTILGIDDKITDDRISEILKLKEKGKGIHGLRNFITNNVIESSRFVYLIKYANAQKIREVAKNEKVVMFVLGGIPDTQIERYYKSCVEFPDMNSSLEAKRSELARMIKNISFDDFKNVKQQAKGRENVAKERAKAVIGLYLTVMYLLVENLVNVNARYVIAIHCLERDFGLYKEIISELASKNLKNDYRILSQTLCELCDNCDESPNLFLKKNERLRKCVEVDINNADSNMTRKYRNCIAHLTVVRELNKYIKDIRTVDSYFSIYHYVMQRCITKREDDKKQEEKIKYEDDLLKNHGYTKDFVKALNSPFGYNIPRFKNLSIEQLFDRNEYLTEK

SEQ ID NO: 3568 - protein, 922 aa, Artificial; identical to SEQ ID NO: 2817
  Synthetic

SEQ ID NO: 3569 - protein, 918 aa, Artificial; identical to SEQ ID NO: 3034
  Synthetic

SEQ ID NO: 3570 - protein, 952 aa, Artificial; identical to SEQ ID NO: 2996
  Synthetic

SEQ ID NO: 3571 - protein, 927 aa, Artificial; identical to SEQ ID NO: 3071
  Synthetic

SEQ ID NO: 3572 - protein, 923 aa, Artificial
  Synthetic
MAKKNKMKPRELREAQKKARQLKAVEINNNAVPEIAAMPAAEVIAPVAEKKKSSVKAAGMKSILVSENKMYITSFGKGNSAVLEYEVDNNDYNKTQLSSKNSSNIELRGVNEVNITFSSKHGFESGVEINTSNPTHRSGESSPVRWDMLGLKSELEKRFFGKTFDDNIHIQLIYNILDIEKILAVYVTNIVYALNNMLGIKGSESYDDFMGYLSARNTYEVFTHPDKSSLSDDKKANVRKSLSKFNVLLKTKRLGYFGLEEPKTKDTRVSQAYKKRVYHMLAIVGQIRQSVFHDKSSKLHEDLYSFIDIIDSEYRETLDYLVDERFDSINKGFIQGNKVNISLLIDMMKDDYEADDIIRLYYDFIVLKSQKNLGFSIKKLREKMLDEYGFRFKDKQYDSVRSKMYKLMDFLLFCNYYRNDVIAGEALVRKLRFSMTDDEKEGIYADEAAKLWGKFRNDFENIADHMNGDVIKELGKADMDFDEKILDSEKKNASDLLYFSKMIYMLTYFLDGKEINDLLTTLISKFDNIKEFLKIMKSSAVNVECELTAGYKLFNDSQRITNELFIVKNIASMRKPAASAKLTMFRDALTILGIDDNITDDRISEILKLKEKGKGIHGLRNFITNNVIESSRFVYLIKYANAQKIRKVAENEKVVMFVLGGIPDTQIERYYKSCVEFPDMNSSLEAKRSELARMIKNIRFDDFKNVKQQAKGRENVAKERAKAVIGLYLTVMYLLVKNLVNVNARYVIAIHCLERDFGLYKEIIPELASKNLKNDYRILSQTLCELCDNGDESPNLFLKKNKRLRKCVEVDINNADSSMTRKYRNCIAHLTVVRELKEYIGDIRTVDSYFSIYHYVMQRCITKRENDTKQEEKIKYEDDLLKNHGYTRDFVKALNSPFGYNIPRFKNLSIEQLFDRNEYLTEK

SEQ ID NO: 3573 - protein, 922 aa, Artificial
  Synthetic
MAKKNKMKPRELREAQKKARQLKAAEINNNAAPAIAAMPAAEVIAPAAEKKKSSVKAAGMKSIFVSENKMYITSFGKGNSAVLEYEVDNNDYNQTQLSSKGSSNIELHGVNEVNITFSSKHGFGSGVEINTSNPTHRSGESSPVRWDMLGLKSELEKRFFGKTFDDNIHIQLIYNILDIEKILAVYVTNIVYALNNMLGVKGSESYDDFMGYLSARNTYEVFTHPDKSNLSDKAKGNIKKSFSTFNDLLKTKRLGYFGLEEPKTKDTRVSQAYKKRVYHMLAIVGQIRQSVFHDKSSKLDEDLYSFIDIIDPEYRETLDYLVDERFDSINKGFIQGNKVNISLLIDMMKGYEADDIIRLYYDFIVLKSQKNLGFSIKKLREKMLDEYGFRFKDKQYDSVRSKMYKLMDFLLFCNYYRNDVAAGEALVRKLRFSMTDDEKEGIYADEAAKLWGKFRNDFENIADHMNGDVIKELGKADMDFDEKILDSEKKNASDLLYFSKMIYMLTYFLDGKEINDLLTTLISKFDNIKEFLKIMKSSAVDVECELTAGYKLFNDSQRITNELFIVKNIASMRKPAASAKLTMFRDALTILGIDDNITDDRISEILKLKEKGKGIHGLRNFITNNVIESSRFVYLIKYANAQKIREVAENEKVVMFVLGGIPDTQIERYYKSCVEFPDMNSSLEAKRSELARMIKNIRFDDFKNVKQQAKGRENVAKERAKAVIGLYLTVMYLLVKNLVNVNARYVIAIHCLERDFGLYKEIIPELASKNLKNDYRILSQTLCELCDNGDESPNLFLKKNRRLRKCVEVDINNADSSMTRKYRNCIAHLTVVRELKEYIGDIRTVDSYFSIYHYVMQRCITKREDDTKQEDKIKYEDDLLKNHGYTKDFVKALNSPFGYNIPRFKNLSIEQLFDRNEYLTEK

SEQ ID NO: 3574 - protein, 984 aa, Artificial; identical to SEQ ID NO: 2827
  Synthetic

SEQ ID NO: 3575 - protein, 919 aa, Artificial; identical to SEQ ID NO: 2894
  Synthetic

SEQ ID NO: 3576 - protein, 925 aa, Artificial
  Synthetic
MAKKNKMKPRELREAQKKARQLKAAEINNNAAPAIAAMPAAEVIAPAAEKKKSSVKAAGMKSILVSENKMYITSFGKGNSAVLEYEVDKVDNDDYNKTQLSSKGSSNIELHGVNEVNITFSSKHGFESGVEISTSNPTHRSGESSPVRWDMLGLKSELEKRFFGKTFDDNIHIQFIYNILDIEKILAVYVTNIVYALNNMLGVKDSESYDDFMGYLSARNTYKVFTHPDKSNLSDKVKGNIKKSFSTFNDLLKTKRLGYFGLEEPKTKDTRASEAYKKRVYHMLAIVGQIRQCVFHDKSGAKRFDLYSFINNIYPEYRDTLDYLVEERLKSINKDFIEGNKVNISLLIDMMKGYEADDIIRLYYDFIVLKSQKNLGFSIKKLREKMLDEYGFRFKDKQYDSVRSKMYKLMDFLLFCNYYRNDVVAGEALVRKLRFSMTDDEKEGIYADEAAKLWGKFRNDFENIADHMNGDVIKELGKADMDFDEKILDSEKKNASDLLYFSKMIYMLTYFLDGKEINDLLTTLISKFDNIKEFLKIMKSSAVDVECELTAGYKLFNDSQRITNELFIVKNIASMRKPAASAKLTMFRDALTILGIDDKITDDRISEILKLKEKGKGIHGLRNFITNNVIESSRFVYLIKYANAQKIREVAKNEKVVMFVLGGIPDTQIERYYKSCVEFPDMNSSLEVKRSELARMIKNIRFDDFKNVKQQAKGRENVAKERAKAVIGLYLTVMYLLVKNLVNVNARYVIAIHCLERDFGLYKEIIPELASKNLKNDYRILSQTLCELCDDRDKSPNLFLKKNKRLRKCVEVDINNADSSMTRKYRNCIAHLTVVRELKEYIGDIRTVDSYFSIYHYVMQRCITKRENDTKQEEKIKYEDDLLKNHGYTKDFVKALNSPFGYNIPRFKNLSIEQLFDRNEYLTEK

SEQ ID NO: 3577 - protein, 920 aa, Artificial
  Synthetic
MAKKNKMKPRELREAQKKARQLKAVEINNNAVPEIAAMPAAEVIAPVAEKKKSSVKAAGMKSILVSENKMYITSFGKGNSAVLEYEVDNNDYNKTQLSSKNSSNIELRGVNEVNITFSSKHGFESGVEINTSNPTHRSGESSPVRWDMLGLKSELEKRFFGKTFDDNIHIQLIYNILDIEKILAVYVTNIVYALNNMLGIKGSESYDDFMGYLSARNTYEVFTHPDKSSLSDDKKANVRKSLSKFNVLLKTKRLGYFGLEEPKTKDTRVSQAYKKRVYHMLAIVGQIRQSVFHDKSSKLHEDLYSFIDIIDSEYRETLDYLVDERFDSINKGFIQGNKVNISLLIDMMKDDYEADDIIRLYYDFIVLKSQKNLGFSIKKLREKMLDEYGFRFKDKQYDSVRSKMYKLMDFLLFCNYYRNDVIAGEALVRKLRFSMTDDEKEGIYADEAAKLWGKFRNDFENIADHMNGDVIKELGKADMDFDEKILDSEKKNASDLLYFSKMIYMLTYFLDGKEINDLLTTLISKFDNIKEFLKIMKSSAVDVECELTAGYKLFNDSQRITNELFIVKNIASMRKPAASAKLTMFRDALTILGIDDKITDDRISEILKLKEKGKGIHGLRNFITNNVIESSRFVYLIKYANAQKIREVAENEKVVMFVLGGIPDTQIERYYKSCVEFPDMNSPLEAKRSELARMIKNIRFDDFKNVKQQAKGRENVAKERAKAVIGLYLTVMYLLVKNLVNVNARYVIAIHCLERDFGLYKEIIPELASKNLKNDYRILSQTLCELCDKSPNLFLKKNERLRKCVEVDINNADSSMTRKYRNCIAHLTVVRELKEYIGDIRTVDSYFSIYHYVMQRCITKREDDIKQEEKIKYEDDLLKNHGYTKDFVKALNSPFGYNIPRFKNLSIEQLFDRNEYLTEK

SEQ ID NO: 3578 - protein, 923 aa, Artificial
  Synthetic
MAKKNKMKPRELREAQKKARQLKVAEINNNAAPAIAAMPAAEAAAPAVEKKKSSVKAAGMKSILVSENKMYITSFGKGNSAVLEYEVDNNDYNKTQLSSKDNSNIELGDVDEVNITFSSKHGFGSGVEINTSNPTHRSGESSPVRWDMLGLKSELEKRFFGKTFDDNIHIQLIYNILDIEKILAVYVTNIVYALNNMLGIKGSESYDDFMGYLSAKNTYDVFTDPDESDLSKNIKGNIKKSLSKFNDLLKTKRLGYFGLEEPKTKDKRVSEAYKKRVYHMLAIVGQIRQSVFHDKSSKLDEDLYSFIDIIDSEYRETLDYLVNERFDSINKGFIQGNKVNISLLIDMMKGDYEADDIIRLYYDFIVLKSQKNLGFSIKKLREKMLDEYGFRFKDKQYDSVRSKMYKLMDFLLFCNYYRNDVVAGEALVRKLRFSMTDDEKEGIYADEAAKLWGKFRNDFENIADHMNSDVIKQLGKADMDFDEKILDSEKKNASDLLYFSKMIYMLTYFLDGKEINDLLTTLISKFDNIKEFLKIMKSSAVDVECELTAGYKLFNDSQRITNELFIVKNIASMRKPAASAKLTMFRDALTILGIDDKITDDRISEILKLKEKGKGIHGLRNFITNNVIESSRFVYLIKYANAQKIREVAKNEKVVMFVLGGIPDTQIERYYKSCVEFPDMNSSLEAKRSELARMIKNISFDDFKNVKQQAKGRENVAKERAKAVIGLYLTVMYLLVKNLVNVNARYVIAIHCLERDFGLYKEIIPELASKNLKNDYRILSQTLCELCDNCDESPNLFLKKNKRLRKCVEVDINNADSSMTRKYRNCIAHLTVVRELKEYIGDIRTVDSYFSIYHYVMQRCITKREDDTKQEEKIKYEDDLLKNHGYTKDFVKALNSPFGYNIPRFKNLSIEQLFDRNEYLTEK

SEQ ID NO: 3579 - protein, 919 aa, Artificial
  Synthetic
MAKKNKMKPRELREAQKKARQLKAAEINNNAAPAIAAMPAAQVIAPAAEKKKSSVKAAGMKSILVSENKMYITSFGKGNSAVLEYEVDNNDYNQTQLSSDGSSNIELRGVNEVNITFSSKHGFESGVEINTSNPTHRSGESSPVRGDMLGLKSELEKRFFGKTFDDNIHIQLIYNILDIEKILAVYVTNIVYALNNMLGVKGSESYDDFMGYLSAQNTYYIFTHPDKSNLSDKVKGNIKKSLSKFNDLLKTKRLGYFGLEEPKTKDKRVSEAYKKRVYHMLAIVGQIRQSVFHDKSNELDEYLYSFIDIIDSEYRDTLDYLVDERFDSINKGFVQGNKVNISLLIDMMKGYEADDIIRLYYDFIVLKSQKNLGFSIKKLREKMLDEYGFRFKDKQYDSVRSKMYKLMDFLLFCNYYRNDVVAGEALVRKLRFSMTDDEKEGIYADEAEKLWGKFRNDFENIADHMNGDVIKELGKADMDFDEKILDSEKKNASDLLYFSKMIYMLTYFLDGKEINDLLTTLISKFDNIKEFLKIMKSSAVDVECELTAGYKLFNDSQRITNELFIVKNIASMRKPAASAKLTMFRDALTILGIDDKITDDRISEILKLKEKGKGIHGLRNFITNNVIESSRFVYLIKYANAQKIREVAENEKVVMFVLGGIPDTQIERYYKSCVEFPDMNSPLEAKRSELARMIKNIRFDDFKNVKQQAKGRENVAKERAKAVIGLYLTVMYLLVKNLVNVNARYVIAIHCLERDFGLYKEIIPELASKNLKNDYRILSQTLCELCDKSPNLFLKKNERLRKCVEVDINNADSSMTRKYRNCIAHLTVVRELKEYIGDIRTVDSYFSIYHYVMQRCITKREDDTKQEEKIKYEDDLLKNHGYTKDFVKALNSPFGYNIPRFKNLSIEQLFDRNEYLTEK

SEQ ID NO: 3580 - protein, 921 aa, Artificial; identical to SEQ ID NO: 2836
  Synthetic

SEQ ID NO: 3581 - protein, 929 aa, Artificial; identical to SEQ ID NO: 3467
  Synthetic

SEQ ID NO: 3582 - protein, 952 aa, Artificial
  Synthetic
MGKKIHARDLREQRKTDRTEKFADQNKKREAERAVQKKDAAVSVKSVSSVSSKKDNATKSMAKAAGVKSVFAVGNTVYMTSFGRGNDAVLEQKIVDTSHEPLNIDDPAYQLNVVTMNGYSVTGHRGETVSAVTDNPLRRFNGGKKDEPEQSVPTDMLCLKPTLEKKFFGKEFNDNIHIQLIYNILDIEKILAVYSTNAIYALNNMSADENIENSDFFMKRTTDETFDDFEKKKESTNSREKADFDAFEKFIGNYRLAYFADAFYVNKKNPKGKAKNVLREDKELYSVLTLIGKLRHWCVHSEEGRAEFWLYKLNELKDDFKNVLDVVYNRPVEEINNRFIENNKVNIQILGSVYKNTDIAELVRSYYEFLITKKYKNMGFSIKKLRESMLEGKGYADKEYDSVRNKLYQMTDFILYTGYINEDSDRADDLVNTLRSSLKEDDKTTVYCKEADYLWKKYRESIREVADALDGDNIKRLSKSNIEIQEDKLRKCFISYADSVSEFTKLIYLLTRFLSGKEINDLVTTLINKFDNIRSFLEIMDELGLDRTFTAEYSFFEGSTKYLAELVELNSFVKSCSFDINAKRTMYRDALDILGIKSGKTEEDIEKMIDNILQIDANGDKKLKKNNGLRNFIASNVIDSNRFKYLVRYGNPKKIRETAKCKPAVRFVLNEIPDAQIERYYEACCPENTALCSANKKREKLADMIAEIEFENFSDAGNYQKANVTSKTHEAEIKRKNQSIIRLYLTVMYIMLKNLVNVNARYVIAFHCVERDTKLYAESGLEVGNIEKNKTNLTMAVMGVKLENGIIKTEFDKSLAENAANRYLRNARWYKLILDNLKKSERAVVNEFRNTVCHLNAIRNINIKEIKEVENYFALYHYLIQKHLENRFADKKVERDTGDFISKLEEHKTYCKDFVKAYCTPFGYNLVRYKNLTIDGLFDKNYPGKDDSDKQK

SEQ ID NO: 3583 - protein, 954 aa, Artificial
  Synthetic
MGKKIHARDLREQRKTDRTVKFADQNKKLEAERAVQKKDAAVSVKSVSSVSSKKDNATKSMAKAAGVKSVFAVGNTVYMTSFGRGNDAVLEQKIVDTSHEPLNIDDPAYQLNVVTMNGYSVTGHRGETVSAVTDNPLRRFNGGKKDEPEQSVPTDMLCLKPTLEKKFFGKEFNDNIHIQLIYNILDIEKILAVYSTNAIYALNNMSADENIENSDFFMKRTTDETFDDFEKKKESTNSREKADFDAFEKFIGNYRLAYFADAFYVNKKNPKGKAKNVLREDKELYSVLTLIGKLRHWCVHSEEGRAEFWLYRLDELKSDFKNVLDSVYNRPVEEINNRFIENNKVNIQILGSVYKNTDIAELVRSYYEFLITKKYKNMGFSIKKLRESMLEGKGYADKEYDSVRNKLYQMTDFILYTGYINEDSDRADDLVNTLRSSLKEDDKTTVYCKEADYLWKKYRESIKEVADALDGDNIKRLSKSNIEIQEDKLRKCFISYADSVSEFTKLIYLLTRFLSGKEINDLVTTLINKFDNIRSFLEIMDDLGLDRTFTAEYSFFEGSTKYLAELVELNSFVKSCSFDINAKRTMYRDALDILGIKSGKTEEDIEKMIDNILQIDANGDKKLKKNNGLRNFIASNVIDSNRFKYLVRYGNPKKIRETAKCEPAVRFVLNEIPDAQIERYYEACCPENTALCSANKRREKLADMIAEIEFENFSDAGNYQKANVTSRTSEAEIKRKNQAIIRLYLTVMYIMLKNLVNVNARYVIAFHCVERDTKLYAESGLEVGNIEKNKTNLTMAVMGVKLENGIIKTEFDKSLAENAANRYLRNARWYKLILDNLKKSERAVVNEFRNTVCHLNAIRNININIDGIKEVENYFALYHYLIQKHLENRFADKKVERDTGDFISKLEEHKTYCKDFVKAYCTPFGYNLVRYKNLTIDGLFDKNYPGKDDSDKQK

SEQ ID NO: 3584 - protein, 922 aa, Artificial; identical to SEQ ID NO: 3498
  Synthetic

SEQ ID NO: 3585 - protein, 922 aa, Artificial; identical to SEQ ID NO: 3498
  Synthetic

SEQ ID NO: 3586 - protein, 975 aa, Artificial; identical to SEQ ID NO: 2912
  Synthetic

SEQ ID NO: 3587 - protein, 922 aa, Artificial
  Synthetic
MAKKNKMKPRELREAQKKARQLKAVEINNNAVPEIAAMPAAEVIAPVAEKKKSSVKAAGMKSILVSENKMYITSFGKGNSAVLEYEVDNNDYNKTQLSSKNSSNIELRGVNEVNITFSSKHGFESGVEINTSNPTHRSGESSPVRWDMLGLKSELEKRFFGKTFDDNIHIQLIYNILDIEKILAVYVTNIVYALNNMLGEGDDESHDDFMGYLSTFNTYKVFTNPNGSTLSDDKKENIRKSLSKFNALLKTKRLGYFGLEEPKTKDTRASEAYKKRVYHMLAIVGQIRQCVFHDKSGAKRFDLYSFINNIDPEYRDTLDYLVDERFDSINKGFIQGNKVNISLLIDMMKGYEADDIIRLYYDFIVLKSQKNLGFSIKKLREKMLEEYGYRFKDKQYDSVRSKMYKLMDFLLFCNYYRNDVVAGEALVRKLRFSMTDDEKEGIYADEAAKLWGKFRNDFENIADHMNGDVIKELGKADMDFDEKILDSEKKNASDLLYFSKMIYMLTYFLDGKEINDLLTTLISKFDNIKEFLKIMKSSAVNVECELTAGYKLFNDSQRITNELFIVKNIASMRKPAASAKLTMFRDALTILGIDDKITDDRISEILKLKEKGKGIHGLRNFITNNVIESSRFVYLIKYANAQKIREVAKNEKVVMFVLGGIPDTQIERYYKSCVEFPDMNSSLEVKRSELARMIKNISFDDFKNVKQQAKGRENVAKERAKAVIGLYLTVMYLLVKNLVNVNARYVIAIHCLERDFGLYKEIIPELASKNLKNDYRILSQTLCELCDNRDESPNLFLKKNKRLRKCVEVDINNADSSMTRKYRNCIAHLTVVRELKEYIGDIRTVDSYFSIYHYVMQRCITKREDDKKQEEKIKFEDDLLKNHGYTKDFVKALNSPFGYNIPRFKNLSIEQLFDRNEYLTEK

SEQ ID NO: 3588 - protein, 919 aa, Artificial; identical to SEQ ID NO: 2893
  Synthetic

SEQ ID NO: 3589 - protein, 922 aa, Artificial
  Synthetic
MAKKNKMKPRELREAQKKARQLKAAEINNNAAPAIAAMPAAEVIAPAAEKKKSSVKAAGMKSILVSENKMYITSFGKGNSAVLEYEVDKVDNNNYNKTQLSSKDNSNIELGDVNEVNITFSSKRGNESGVEINTSNPTHRSGESSPVRWDMLGLKSELEKRFFGKTFDDNIHIQLIYNILDIEKILAVYVTNIVYALNNMLGIKKSESYDDFMGYLSARNTYEVFTHPDKSNLSDKAKGNIKKSFSTFNDLLKTKRLGYFGLEEPKTKDTRVSQAYKKRVYHMLAIVGQIRQSVFHDKSSKLDEDLYSFIDIIDSEYRETLDYLVDERFDSINKGFIQGNKVNISLLIDMMKGYETDDIIRLYYDFIVLKSQKNLGFSIKKLREKMLDEYGFRFKDKQYDSVRSKMYKLMDFLLFCNYYRNDVVAGEALVRKLRFSMTDDEKEGTYADEAEKLWGKFRNDFDNIAGHMNGDAIKELGKADMDFDEKILDSEKKNASDLLYFSKMIYMLTYFLDGKEINDLLTTLISKFDNIKEFLKIMKSSAVDVECELTAGYKLFNDSQRITNELFIVKNIASMRKPAASAKLTMFRDALTILGIDDKITDDRISEILKLKEKGKGIHGLRNFITNNVIESSRFVYLIKYANAQKIREVAKNEKVVMFVLGGIPDTQIERYYKSCVEFPDMNSSLEAKRSELARMIKNIRFDDFKNVKQQAKGRENVAKERAKAVIGLYLTVMYLLVKNLVNVNARYVIAIHCLERDFGLYKEIIPELASKNLKNDYRTLSQTLCGLCDKSPNLFLKKNKRLRKCVEVDINNADSIMTRKYRNCIAHLTVVRELKEYIGDIRTVDSYFSIYHYVMQRCITKREDDTKQEEKIKYEDDLLKNHGYTKDFVKALNSPFGYNIPRFKNLSIEQLFDRNEYLTEK

SEQ ID NO: 3590 - protein, 922 aa, Artificial; identical to SEQ ID NO: 3121
  Synthetic

SEQ ID NO: 3591 - protein, 919 aa, Artificial; identical to SEQ ID NO: 2876
  Synthetic

SEQ ID NO: 3592 - protein, 1008 aa, Artificial
  Synthetic
MTGSSFIQILYPEGGTAMKKMTAKERREQEKQKRAEVIRGKQEANRKKAQAAATQDATAPVHHKNAKSLAKAAGLKSTFTLPTGELLMTSFGRGSEALIQKRIMKDVISDVQEGDPAFSVIPMPKQFEIQGRAIDVQKEGSSVPEVLTDDPRASQKPAGADLIGAKPALEKRYFGKTFTDNIHIQLIYRILDIKKVLAIHANNIVYTLDNLSRREGTEGTDFIGIGGLTLKNSYAAYCEPRTFFDEGKEKNIIENIEKSHGEFLEYMKNPRLAYYGEAFYRRLSNNERSKLGMERYERMSDAQRDAFDRKYPIDFCDGELHFREIEKLAPEYVRKSEKEIYYILAMLSELRQCVFHDSAASRSWLYNLEKVLPAEAMQVLDGVYSQKVAALNNFSKTSSKSNFRLLFNALHADTDAQKKQIAEDFYKFSVRKTYKNIGFSIKLLRESMLDTFAPEYKEKSYDSVRGKLYQLVDFLIWNIYDKNEKMADALVAQLRAEVKRDRDEKSPVYDREAARLWTMIREAVAQTAKTLRAVTLSNNTPGSIKIKELALSKYDRDLVENAIDSAVDERGRRLKITDEASYFSKLIYLLTLFLDGKEINDLITTLVNSFDEIDSFCCVLQKAKLDRGFTEGYRFFAHSAEISQELRAINSFARMTTETVQGKPCMFEDAADLLGMDTDLEEVREALEAFYNKEKMSLKWTKDGQEADTGFRNFIISNVLKSSRFRYVVRYGNPKKLREVMQNEAVVKFVLNDLPEEQINRYSENILGLDAAAKEKKVSELARFLRALSLEDFRDVEQSANAARNARKARYQGAMSLYLNVIYQIIKNMVYINSRYTLAFAKYEHDASLLLDNWVYDPYKTVFSDLTEDSLQKGKLNRRAAKYLQTNLEHSDNTLIRQYRNSVAHLNAVRNMNLYIGDLREITSYFGIYHYIMQRDLITRCQKVKMKNPVVVGYFDKVRTYRTCCKDLVKALNITFGYNLPRYKNLSIEGLFDKNRPGDKKESALIAE

SEQ ID NO: 3593 - protein, 918 aa, Artificial
  Synthetic
MAKKNKMKPRELREAQKKARQLKAAEINNNAVPAIAAMPAAEAAAPAAEKKKSSVKAAGMKSILVSENKMYITSFGKGNSAVLEYEVDNNDYNKTQLSSKDNSNIELCDVDEVNITFSSKHGFESGVKINTSNPTHRSGESSSVRGDMLGLKSELEKRFFGKTFDDNIHIQLIYNILDIEKILAVYVTNIVYALNNMLGLENESNNDFMGYLSAKNTYDVFTDPDESDLSKNIKGNIKKSLSKFNDLLKTKRLGYFGLEEPKTKDKRVSEAYKKRVYHMLAIVGQIRQSVFHDKSNELDEYLYSFIDIIDSEYRETLDYLIDERFDSINKGFIQGNKVNISLLIDMMKDDYEADDIIRLYYDFIVLKSQKNLGFSIKKLREKMLDEYGFRFKDKQYDSVRSKMYKLMDFLLFCNYYRNDIAAGEALVRKLRFSMTDDEKEGLYADEAAKLWGKFRNDFENIADHMNGDVIKELGKADMDFDEKILDSEKKNASDLLYFSKMIYMLTYFLDGKEINDLLTTLISKFDNIKEFLKIMKSSAVDVECELTAGYKLFNDSQRITNELFIVKNIASMRKPAASAKLTMFRDALTILGIDDKITDDRISEILKLKEKGKGIHGLRNFITNNVIESSRFVYLIKYANAQKIREVAENEKVVMFVLGGIPDTQIERYYKSCVEFPDMNSPLEAKRSELARMIKNIRFDDFKNVKQQAKGRENVAKERAKAVIGLYLTVMYLLVKNLVNVNARYVIAIHCLERDFGLYKEIIPELASKNLKNDYRILSQTLCELCDKSPNLFLKKNERLRKCVEVDINNADSSMTRKYRNCIAHLTVVRELKEYIGDIRTVDSYFSIYHYVMQRCITKREDDIKQEEIKYEDDLLKNHGYTKDFVKALNSPFGYNIPRFKNLSIEQLFDRNEYLTEK

SEQ ID NO: 3594 - protein, 918 aa, Artificial; identical to SEQ ID NO: 3593
  Synthetic

SEQ ID NO: 3595 - protein, 954 aa, Artificial; identical to SEQ ID NO: 2846
  Synthetic

SEQ ID NO: 3596 - protein, 922 aa, Artificial
  Synthetic
MAKKNKMKPRELREAQKKARQLKAAEINNNAAPAIAAMPAAEVIAPVAEKKKSSVKAAGMKSILVSENKMYITSFGKGNSAVLEYEVDNNDYNKTQLSSKDNSNIELGDVNEVNITFSSKHGFGSGVEINTSNPTHRSGESSPVRGDMLGLKSELEKRFFGKTFDDNIHIQLIYNILDIEKILAVYVTNIVYALNNMLGIKDSESYDDFMGYLSARNTYEVFTHPDKSNLSDKVKGNIKKSLSKFNDLLKTKRLGYFGLEEPKTKDTRASEAYKKRVYHMLAIVGQIRQCVFHDKSGAKRFDLYSFINNIDPEYRDTLDYLVEERLKSINKDFIEGNKVNISLLIDMMKGYEADDIIRLYYDFIVLKSQKNLGFSIKKLREKMLEEYGFRFKDKQYDSVRSKMYKLMDFLLFCNYYRNDVAAGEALVRKLRFSMTDDEKEGIYADEAAKLWGKFRNDFENIADHMNGDVIKELGKADMDFDEKILDSEKKNASDLLYFSKMIYMLTYFLDGKEINDLLTTLISKFDNIKEFLKIMKSSAVDVECELTAGYKLFNDSQRITNELFIVKNIASMRKPAASAKLTMFRDALTILGIDDNITDDRISEILKLKEKGKGIHGLRNFITNNVIESSRFVYLIKYANAQKIREVAKDEKVVMFVLGGIPDTQIERYYKSCVEFPDMNSSLEAKRSELARMIKNISFDDFKNVKQQAKGRENVAKERAKAVIGLYLTVMYLLVKNLVNVNARYVIAIHCLERDFGLYKEIIPELASKNLKNDYRILSQTLCELCDDRNESSNLFLKKNKRLRKCVEVDINNADSSMTRKYRNCIAHLTVVRELKEYIGDIRTVDSYFSIYHYVMQRCITKRGDDTKQEEKIKYEDNLLKNHGYTKDFVKALNSPFGYNIPRFKNLSIEQLFDRNEYLTEK

SEQ ID NO: 3597 - protein, 925 aa, Artificial
  Synthetic
MAKKNKMKPRELREAQKKARQLKAAEINNNAVPAIAAMPAAEVIAPAAEKKKSSVKAAGMKSILVSENKMYITSFGKGNSAVLEYEVDKVDNNNYNKTQLSSESSSNIELCGVTKVNITFSSKHGFGSGVEINTSNPTHRSGESSPVRWDMLGLKSELEKRFFGKTFDDNIHIQLIYNILDIEKILAVYVTNIVYALNNMLGVKGSESHDDFIGYLSTNNIYDVFIDPDNSSLSDDKKANVRKSLSKFNVLLKTKRLGYFGLEEPKTKDTRVSQAYKKRVYHMLAIVGQIRQCVFHDKSGAKRFDLYSFINNIDHEYRETLDYLVDERFDSINKGFIQGNKVNISLLIDMMKGYEADDIIRLYYDFIVLKSQKNLGFSIKKLREKMLDEYGFRFKDKQYDSVRSKMYKLMDFLLFCNYYRNDVVAGEALVRKLRFSMTDDEKEGIYADEAAKLWGKFRNDFENIADHMNGDVIKELGKADMDFDEKILDSEKKNASDLLYFSKMIYMLTYFLDGKEINDLLTTLISKFDNIKEFLKIMKSSAVDVECELTAGYKLFNDSQRITNELFIVKNIASMRKPAASAKLTMFRDALTILGIDDKITDDRISEILKLKEKGKGIHGLRNFITNNVIESSRFVYLIKYANAQKIREVAKNEKVVMFVLGGIPDTQIERYYKSCVEFPDMNSSLEAKRSELARMIKNIRFDDFKNVKQQAKGRENVAKERAKAVIGLYLTVMYLLVKNLVNVNARYVIAIHCLERDFGLYKEIIPELASKNLKNDYRILSQTLCELCDDRDESPNLFLKKNKRLRKCVEVDINNADSIMTRKYRNCIAHLTVVRELKEYIGDIRTVDSYFSIYHYVMQRCITKREDDTKQEEKIKYEDDLLKNHGYTKDFVKALNSPFGYNIPRFKNLSIEQLFDRNEYLTEK

SEQ ID NO: 3598 - protein, 922 aa, Artificial; identical to SEQ ID NO: 2955
  Synthetic

SEQ ID NO: 3599 - protein, 965 aa, Artificial
  Synthetic
MSKNKESYAKGMGLKSALVSGSKVYMTGFEGGSGAKLEKVVENDEIASLSKEETFSAEIFKKNIGCKIENKQFRHPKGYDVIADNPIYKGSPRQDMLGLKETLEKRYFSPSDSIDNVRVQVIHNILDIEKILAEYITNAVYSFDNIAGFGEDIIGMGGFKPIYTYEQFKEPDKYNEKFDDILNNSRLGYYGKAFFETNDLKHNPNKEQRDKNPCILKYDNECYYIIALLSGLRHWNVHSHTEDDLISYRWLYNLDSKLSKEYISTLNYLYDDIADELTESFSKNSAANVNYIAETLNIDPTEFAQQYFRFSIMKEQKNMGFNVSKLREIMLDRKALSDIRDNHREFDSIRSKLYTMMDFVIYRYYIEEAAKTEAENRNLPENEKKISEKDFFVINLRGSFNENQKEKLYIEEAERLWKKLKDTMLKIKEFRGKKVEEYKKAVPRIKRILPKGKNISTFSKLMYMLSMFLDGKEINDLFTTLINKFDNIQCFLKIMPLIGVNAKFTEDYAFFNNSEKIADELRLIKSFARMGEPVANTKRVMMIDAIKILGTDLSDDELKEMADSFFKDSDGNLLKKGKHGMRNFITNNVIKNKRFHYLIRYGDPAHLHEIAKNEAVVRFVLGRIADIQKKQGKNGKNQIDRYYETCVGNGRGKTVSQKLDELTKIIVNMNYDQFEQKKEIIENTRTKTKDMSYDEKQKLRKDNAEREKFKKIISLYLTVIYEIIKHIVNINSRYVIGFHCLERDAQLYSEKYNNKGIAKKISEGKYSSLTKFCLGESDEKKLKALAKKSFEELETTNPKLYKNYINYSDERKAEEAKRQINRERAKTAMNAHLRNTKWNDIMYGQLKDLEDSKSRICSDFRNNAAHLEAARYAHLYINDISEINSYFQLYHYIMQRRIIDKINGKCEGKVKTYFNDVMKNGEYSKNLLKLMCVPFGYCITRFKNLSIEQMFDMNETDNSDKKKEK

SEQ ID NO: 3600 - protein, 919 aa, Artificial; identical to SEQ ID NO: 3116
  Synthetic

SEQ ID NO: 3601 - protein, 919 aa, Artificial
  Synthetic
MAKKNKMKPRELREAQKKARQLKAAEINNNAAPTIAAMPAAEVITPAAEKKKSSVKAAGMKSILVSKNKMYITSFGKGNSAVLEYEVDNNDYNQTQLSSEDSSNIELCGVTKVNITFSSKHGLESGVEINTSNPTHRNGESSPVRWDMLGLKSELEKRFFGKTFDDNIHIQLIYNILDIEKILAVYVTNIVYALNNMLGIKGSESHDDFIGYLSTNNIYDVFIDPDNSSLSDDKKANVRKSLSKFNALLKTKRLGYFGLEEPKTKDNRVSEAYKKRVYHMLAIVGQIRQCVFHDKSGAKKFDLYSFINNIYPEYRDTLDYLVEERLKSINKDFIEGNKVNISLLIDMMKGYEADDIIRLYYDFIVLKSQKNLGFSIKKLREKMLDEYGFRFKDKQYDSVRSKMYKLMDFLLFCNYYRNDVIAGETLVRKLRFSMTDDEKEGIYADEAAKLWGKFRNDFENIAGHMNGDAIKELGKADMDFDEKILDSEKKNASDLLYFSKMIYMLTYFLDGKEINDLLTTLISKFDNIKEFLKIMKSSAVDVECELTAGYKLFNDSQRITNELFIVKNIASMRKPAASAKLTMFRDALTILGIDDNITDDRISEILKLKEKGKGIHGLRNFITNNVIESSRFVYLIKYANAQKIREVAKNEKVVMFVLGGIPDTQIERYYKSCVEFPDMNSSLEAKRSELARMIKNISFEDFKNVKQQAKGRENVAKERAKAVIGLYLTVMYLLVKNLVNVNARYVIAIHCLERDFGLYKGIIPELASKNLKNDYRILSQTLCELCDKSPNLFLKKNERLRKCVEVDINNADSSMTRKYRNCIAHLTVVRELKEYIGDIRTLDSYFSIYHYVMQRCITKREDDTKQEEKIKYEDDLLKNHGYTKDFVKALNSPFGYNIPRFKNLSIEQLFDRNEYLTEK

SEQ ID NO: 3602 - protein, 919 aa, Artificial
  Synthetic
MAKKNKMKPRELREAQKKARQLKAAEINNNAAPAIAAMPAAEVIAPVAEKKKSSVKAAGMKSILVSKNKMYITSFGKGNSAVLEYEVDNNDYNQTQLSSKGSSNIELRGVNEVNITFSSKHGFESGVEINTSNPTHRSGESSPVRGDMLGLKSELEKRFFGKTFDDNIHIQLIYNILDIEKILAVYVTNIVYALNNMLSIKDSESYDDFMGYLSARNTYEVFTHPDKSNLSDKAKGNIKKSFSTFNDLLKTKRLGYFGLEEPKTKDTRVSQAYKKRVYHMLAIVGQIRQSVFHDKSSKLDEDLYSFIDIIDSEYRETLDYLVDERFDSINKGFIQGNKVNISLLIDMMKGYEADDIIRLYYDFIVLKSQKNLGFSIKKLREKMLDEYGFRFKDKQYDSVRSKMYKLMDFLLFCNYYRNDVVAGEALVRKLRFSMTDDEKEGIYADEASKLWGKFRNDFENIADHMNGDVIKELGKADMDFDEKILDSEKKNASDLLYFSKMIYMLTYFLDGKEINDLLTTLISKFDNIKEFLKIMKSSAVDVECELTAGYKLFNDSQRITNELFIVKNIASMRKPASSAKLTMFRDALTILGIDDNITDDRISEILKLKEKGKGIHGLRNFITNNVIESSRFVYLIKYANAQKIRKVAKNEKVVMFVLGGIPDTQIERYYKSCVEFPDMNSSLEVKRSELARMIKNISFDDFKNVKQQAKGRENVAKERAKAVIGLYLTVMYLLVKNLVNVNARYVIAIHCLERDFGLYKEIIPELASKNLKNDYRILSQTLCELCDKSPNLFLKKNERLRKCVEVDINNADSSMTRKYRNCIAHLTVVRELKEYIGDIRTVDSYFSIYHYVMQRCITKRENDTKQEEKIKYEDDLLKNHGYTKDFVKALNSPFGYNIPRFKNLSIEQLFDRNEYLTEK

SEQ ID NO: 3603 - protein, 922 aa, Artificial; identical to SEQ ID NO: 3589
  Synthetic

SEQ ID NO: 3604 - protein, 922 aa, Artificial; identical to SEQ ID NO: 2946
  Synthetic

SEQ ID NO: 3605 - protein, 922 aa, Artificial; identical to SEQ ID NO: 2815
  Synthetic

SEQ ID NO: 3606 - protein, 919 aa, Artificial; identical to SEQ ID NO: 3116
  Synthetic

SEQ ID NO: 3607 - protein, 923 aa, Artificial; identical to SEQ ID NO: 3242
  Synthetic

SEQ ID NO: 3608 - protein, 956 aa, Artificial; identical to SEQ ID NO: 2890
  Synthetic

SEQ ID NO: 3609 - protein, 956 aa, Artificial; identical to SEQ ID NO: 2890
  Synthetic

SEQ ID NO: 3610 - protein, 925 aa, Artificial
  Synthetic
MAKKNKMKPRELREAQKKARQLKAAEINNNAAPAIAAMPAAEVIAPAAEKKKSSVKAAGMKSILVSKNKMYITSFGKGNSAVLEYEVDKVDNNDYNKTQLSSKGSSNIELHGVNEVNITFSSKHGFESGVEINTSNPTHRSGESSPVRWDMLGLKSELEKRFFGKTFDDNIHIQLIYNILDIEKILAVYVTNIVYALNNMLGVKGSESHDDFIGYLSTNNTYDVFIDPDNSSLSDDKKANVRKSLSKFNALLKTKRLGYFGLEEPKTKDNRVSEAYKKRVYHMLAIVGQIRQCVFHDKSGAKRFDLYSFINNIDPEYRETLDYLVDERFDSINKGFIQGNKVNISLLIDMMKGYEPDDIIRLYYDFIVLKSQKNLGFSIKKLREKMLDEYGFRFKDKQYDSVRSKMYKLMDFLLFCNYYRNDVVAGEALVRKLRFSMIDDEKEGIYADEAAKLWGKFRNDFENIADHMNGDVIKELGKADMDFDEKILDSEKKNASDLLYFSKMIYMLTYFLDGKEINDLITTLISKFDNIKEFLKIMKSSAVDVECELTAGYKLFNDSQRITNELFIVKNIASMRKPAASAKLTMFRDVLTILGIDDKITDDRISEILKLKEKGKGIHGLRNFITNNVIESSRFVYLIKYANAQKIREVAKNEKVVMFVLGGIPDTQIERYYKSCVEFPDMNSSLEAKRSELARMIKNISFDDFKNVKQQAKGRENVAKERAKAVIGLYLTVMYLLVKNLVNVNARYVIAIHCLERDFGLYKEIIPELASKNLKNDYRILSQTLCELCDDRDKSPNLFLKKNKRLRKCVEVDINNADSSMTRKYRNCIAHLTVVRELKEYIGDIRTVDSYFSIYHYVMQRCITKRENDTKQEDKIKYEDDLLKNHGYTKDFVKALNSPFGYNIPRFKNLSIEQLFDRNEYLTEK

SEQ ID NO: 3611 - protein, 925 aa, Artificial; identical to SEQ ID NO: 3610
  Synthetic

SEQ ID NO: 3612 - protein, 925 aa, Artificial; identical to SEQ ID NO: 3373
  Synthetic

SEQ ID NO: 3613 - protein, 922 aa, Artificial; identical to SEQ ID NO: 2906
  Synthetic

SEQ ID NO: 3614 - protein, 922 aa, Artificial; identical to SEQ ID NO: 3554
  Synthetic

SEQ ID NO: 3615 - protein, 922 aa, Artificial; identical to SEQ ID NO: 3554
  Synthetic

SEQ ID NO: 3616 - protein, 919 aa, Artificial; identical to SEQ ID NO: 2876
  Synthetic

SEQ ID NO: 3617 - protein, 919 aa, Artificial; identical to SEQ ID NO: 3579
  Synthetic

SEQ ID NO: 3618 - protein, 907 aa, Artificial; identical to SEQ ID NO: 3233
  Synthetic

SEQ ID NO: 3619 - protein, 922 aa, Artificial
  Synthetic
MAKKNKMKPRELREAQKKARQLKAAEINNNAAPAIAAMPAAEAAAPAAEKKKSSVKAAGMKSILVSENKMYITSFGKGNSAVLEYEVDNNDYNKTQLSSKGSSNIELHGVNEVNITFSSKHGFESGVEINTSNPTHRSGESSPVRGDMLGLKSELEKRFFGKTFDDNIHIQLIYNILDIEKILAVYVTNIVYALNNMLGEGDDESHDDFMGYLSTFNTYKVFTNPNGSTLSDDKKENIRKSLSKFNALLKTKRLGYFGLEEPKTKDTRVSQAYKKRVYHMLAIVGQIRQSVFHDKSSKLHEDLYSFIDIIDSEYRETLDYLVEERLKSINKDFIEGNKVNISLLIDMMKGYEADDIIRLYYDFIVLKSQKNLGFSIKKLREKMLDEYGYRFKDKQYDSVRSKMYKLMDFLLFCNYYRNDVVAGEALVRKLRFSMTDDEKEGIYADEAAKLWGKFRNDFENIADHMNGDVIKELGKADMDFDEKILDSEKKNASDLLYFSKMIYMLTYFLDGKEINDLLTTLISKFDNIKEFLKIMKSSAVDVECELTAGYKLFNDSQRITNELFIVKNIASMRKPAASAKLTMFRDALTILGIDDNITDDRISEILKLKEKGKGIHGLRNFITNNVIESSRFVYLIKYANAQKIREVAKNEKVVMFVLGGIPDTQIERYYKSCVEFPDMNSSLEAKCSELARMIKNISFDDFKNVKQQAKGRENVAKERAKAVIGLYLTVMYLLVKNLVNVNARYVIAIHCLERDFGLYKEIIPELASKNLKNDYRILSQTLCELCDDRDESPNLFLKKNKRLRKCVEVDINNADSSMTRKYRNCIAHLTVVRELKEYIGDIRTVDSYFSIYHYVMQRCITKREDDKKQEEKIKFEDDLLKNHGYTKDFVKALNSPFGYNIPRFKNLSIEQLFDRNEYLTEK

SEQ ID NO: 3620 - protein, 922 aa, Artificial
  Synthetic
MAKKNKMKPRELREAQKKARQLKAAEIKNDAVPAIAAMPAAEAAAPAVEKKKSSVKAAGMKSILVSENKMYITSFGKGNSAVLEYEVDNNDYNKTQLSSEDNSNIELCDVDEVNITFSSKHGFESGVEINTSNPTHRSGESSPVRGDMLGLKSELEKRFFGKTFDDNIHIQLIYNILDIEKILAVYVTNIVYALNNMLGEGGDESHDDFMGYLSAKNTYDVFTDPDESDLSKNIKGNIKKSLSKFNDLLKTKRLGYFGLEEPKTKDKRVSEAYKKRVYHMLAIVGQIRQSVFHDKSNELDEYLYSFIDIIDSEYRDTLDYLVDERFDSINKGFVQGNKVNISLLIDMMKGYEADDIIRLYYDFIVLKSQKNLGFSIKKLREKMLDEYGFRFKDKQYDSVRSKMYKLMDFLLFCNYYRNDIAAGEALVRKLRFSMTDDEKEGIYADEAEKLWGKFRNDFENIADHMNGDVIKELGKADMDFDEKILDSEKKNASDLLYFSKMIYMLTYFLDGKEINDLLTTLISKFDNIKEFLKIMKSSAVDVECELTAGYKLFNDSQRITNELFIVKNIASMRKPAASAKLTMFRDALTILGIDDKITDDRISEILKLKEKGKGIHGLRNFITNNVIESSRFVYLIKYANAQKIREVAENEKVVMFVLGGIPDTQIERYYKSCVEFPDMNSSLEAKRSELARMIKNIRFDDFKNVKQQAKGRENVAKERAKAVIGLYLTVMYLLVKNLVNVNARYVIAIHCLERDFGLYKEIIPELASKNLKNDYRILSQTLCELCDNGDESPNLFLKKNKRLRKCVEVDINNADSNMTRKYRNCIAHLTVVRELKEYIGDIRTVDSYFSIYHYVMQRCITKREDDTKQEEKIKYEDDLLKNHGYTKDFVKALNSPFGYNIPRFKNLSIEQLFDRNEYLTEK

SEQ ID NO: 3621 - protein, 922 aa, Artificial; identical to SEQ ID NO: 3163
  Synthetic

SEQ ID NO: 3622 - protein, 925 aa, Artificial; identical to SEQ ID NO: 3068
  Synthetic

SEQ ID NO: 3623 - protein, 922 aa, Artificial; identical to SEQ ID NO: 3102
  Synthetic

SEQ ID NO: 3624 - protein, 924 aa, Artificial
  Synthetic
MAKKNKMKPRELREAQKKARQFKAAEINNNAAPAIAAMPAAEVIAPVAEKKKSSVKAAGMKSILVSENKMYITSFGKGNSAVLEYEVDNNDYNKTQLSSKDNSNIELCGVNEVNITFSSKHGFESGVEINTSNPTHRSGESSPVRWDMLGLKSELEKRFFGKTFDDNIHIQLIYNILDIEKLLAVYVTNIVYALNNMLGEGDESNYDFMGYLSTFNTYKVFTNPNGSTLSDDKKENIRKSLSKFNALLKTKRLGYFGLEEPKTKDTRVLEAYKKRVYHMLAIVGQIRQCVFHDLSEHSEYDLYSFIDNSKKVYRECRETLDYLVDERFDSINKGFIQGNKVNISLLIDMMKGYEADDIIRLYYDFIVLKSQKNLGFSIKKLREKILDEYGFRFKDKQYDSVRSKMYKLMDFLLFCNYYRNDIAAGESLVRKLRFSMTDDEKEGIYADEAAKLWGKFRNDFENIADHMNGDVIKELGKADMDFDEKILDSEKKNASDLLYFSKMIYMLTYFLDGKEINDLLTTLISKFDNIKEFLKIMKSSAIDVECELTAGYKLFNDSQRITNELFIVKNIASMRKPAASAKLTMFRDALTILGIDDKITDDRISEILKLKEKGKGIHGLRNFITNNVIESSRFVYLIKYANAQKIREVAKNEKVVMFVLGGIPDTQIERYYKSCVEFPDMNSSLEAKRSELARMIKNIRFDDFKNVKQQAKGRENVAKERAKAVIGLYLTVMYLLVKNLVNVNARYVIAIHCLERDFGLYKEIIPELASKNLKNDYRILSQTLCELCDNGDESPNLFLKKNKRLRKCVEVDINNADSSMTRKYRNCIAHLTVVRELKEYIGDIRTVDSYFSIYHYVMQRCITKREDDTKQEEKIKYEDDLLKNHGYTKDFVKALNSPFGYNIPRFKNLSIEQLFDRNEYLTEK

SEQ ID NO: 3625 - protein, 918 aa, Artificial
  Synthetic
MAKKNKMKPRELREAQKKARQLKAAEINNNAAPAIAAMPAAEAAAPAAEKKKSSVKAAGMKSILVSENKMYITSFGKGNSAVLEYEVDNNDYNKTQLSSKDNSNIELCDVGKVNITFSSRRGFESGVEINTSNPTHRSGESSSVRGDMLGLKSELEKRFFGKNFDDNIHIQLIYNILDIEKILAVYVTNIVYALNNMLGEGDESNYDFMGYLSTFNTYKVFTNPNGSTLSDDKKENIRKSLSKFNALLKTKRLGYFGLEEPKTKDTRASEAYKKRVYHMLAIVGQIRQCVFHDKSGAKRFDLYSFINNIDPEYRETLDYLVDERFDSINKGFIQGNKVNISLLIDMMKGYEADDIIRLYYDFIVLKSQKNLGFSIKKLREKMLDEYGFRFKDKQYDSVRSKMYKLMDFLLFCNYYRNDIAAGESLVRKLRFSMTDDEKEGIYADEAAKLWGKFRNDFENIADHMNGDVIKELGKADMDFDEKILDSEKKNASDLLYFSKMIYMLTYFLDGKEINDLLTTLISKFDNIKEFLKIMKSSAVDVECELTAGYKLFNDSQRITNELFIVKNIASMRKPAASAKLTMFRDALTILGIDDKITDDRISEILKLKEKGKGIHGLRNFITNNVIESSRFVYLIKYANAQKIREVAKNEKVVMFVLGGIPDTQIERYYKSCVEFPDMNSSLKVKRSELARMIKNIRFDDFKNVKQQAKGRENVAKERAKAVIGLYLTVMYLLVKNLVNVNARYVIAIHCLERDFGLYKEIIPELASKNLKNDYRILSQTLCELCDKSPNLFLKKNERLRKCVEVDINNADSSMTRKYRNCIAHLTVVRELKEYIGDIRTVDSYFSIYHYVMQRCITKREDDIKQEEKIKYEDDLLKNHGYTKDFVKALNSPFGYNIPRFKNLSIEQLFDRNEYLTEK

SEQ ID NO: 3626 - protein, 919 aa, Artificial; identical to SEQ ID NO: 3281
  Synthetic

SEQ ID NO: 3627 - protein, 919 aa, Artificial; identical to SEQ ID NO: 2893
  Synthetic

SEQ ID NO: 3628 - protein, 919 aa, Artificial; identical to SEQ ID NO: 2893
  Synthetic

SEQ ID NO: 3629 - protein, 922 aa, Artificial; identical to SEQ ID NO: 2840
  Synthetic

SEQ ID NO: 3630 - protein, 921 aa, Artificial
  Synthetic
MAKKNKMKPRELREAQKKARQLKAAEIKNNAVPAIAAMPAAEAAAPAVEKKKSSVKAAGMKSILVSENKMYITSFGKGNSAVLEYEVDKVDNNNYNKTQLSSKDNSNIELGDVNEVNITFSSKRGNESGVEINTSNPTHRSGESSPVRWDMLGLKSELEKRFFGKTFDDNIHIQLIYNILDIEKILAVYVTNIVYALNNMLGEGDESNYDFMGYLSTFNTYKVFTNPNGSTLSDDKKENIRKSLSKFNALLKTKRLGYFGLEEPKTKDTRASEAYKKRVYHMLAIVGQIRQCVFHDKSGAKRFDLYSFINNIDPEYRETLDYLVDERFDSINKGFIQGNKVNISLLIDMMKGYEADDIIRLYYDFIVLKSQKNLGFSIKKLREKMLDEYGFRFKDKQYDSVRSKMYKLMDFLLFCNYYRNDIAAGESLVRKLRFSMTDDEKEGIYADEAAKLWGKFRNDFENIADHMNGDVIKELGKADMDFDEKILDSEKKNASDLLYFSKMIYMLTYFLDGKEINDLLTTLISKFDNIKEFLKIMKSSAVDVECELTAGYKLFNDSQRITNELFIVKNIASMRKPAASAKLTMFRDALTILGIDDKITDDRISEILKLKEKGKGIHGLRNFITNNVIESSRFVYLIKYANAQKIREVAKNEKVVMFVLGGIPDTQIERYYKSCVEFPDMNSSLGVKRSELARMIKNISFDDFKNVKQQAKGRENVAKERAKAVIGLYLTVMYLLVKNLVNVNARYVIAIHCLERDFGLYKEIIPELASKNLKNDYRILSQTLCELCDKSPNLFLKKNERLRKCVEVDINNADSSMTRKYRNCIAHLTVVRELKEYIGDIRTVDSYFSIYHYVMQRCITKREDDIKQEEKIKYEDDLLKNHGYTKDFVKALNSPFGYNIPRFKNLSIEQLFDRNEYLTEK

SEQ ID NO: 3631 - protein, 919 aa, Artificial; identical to SEQ ID NO: 3263
  Synthetic

SEQ ID NO: 3632 - protein, 954 aa, Artificial; identical to SEQ ID NO: 3314
  Synthetic

SEQ ID NO: 3633 - protein, 922 aa, Artificial; identical to SEQ ID NO: 2937
  Synthetic

SEQ ID NO: 3634 - protein, 926 aa, Artificial; identical to SEQ ID NO: 3079
  Synthetic

SEQ ID NO: 3635 - protein, 919 aa, Artificial; identical to SEQ ID NO: 3263
  Synthetic

SEQ ID NO: 3636 - protein, 924 aa, Artificial
  Synthetic
MAKKNKMKPRELREAQKKARQFKAAEINNNAAPAIAAMPAAEVIAPVAEKKKSSVKAAGMKSILVSENKMYITSFGKGNSAVLEYEVDNNDYNKTQLSSKDNSNIELCGVNEVNITFSSKHGFESGVEINTSNPTHRSGESSPVRWDMLGLKSELEKRFFGKTFDDNIHIQLIYNILDIEKILAVYVTNIVYALNNMLGEGDESNYDFMGYLSTFNTYKVFTNPNGSTLSDDKKENIRKSLSKFNALLKTKRLGYFGLEEPKTKDTRVLEAYKKRVYHMLAIVGQIRQCVFHDLSEHSEYDLYSFIDNSKKVYRECRETLDYLVDERFDSINKGFIQGNKVNISLLIDMMKGYEADDIIRLYYDFIVLKSQKNLGFSIKKLREKILDEYGFRFKDKQYDSVRSKMYKLMDFLLFCNYYRNDIAAGESLVRKLRFSMTDDEKEGIYADEAAKLWGKFRNDFENIADHMNGDVIKELGKADMDFDEKILDSEKKNASDLLYFSKMIYMLTYFLDGKEINDLLTTLISKFDNIKEFLKIMKSSAIDVECELTAGYKLFNDSQRITNELFIVKNIASMRKPAASAKLTMFRDALTILGIDDKITDDRISEILKLKEKGKGIHGLRNFITNNVIESSRFVYLIKYANAQKIREVAKNEKVVMFVLGGIPDTQIERYYKSCVEFPDMNSSLEANRSELARMIKNIRFDDFKNVKQQAKGRENVAKERAKAVIGLYLTVMYLLVKNLVNVNARYVIAIHCLERDFGLYKEIIPELASKNLKNDYRILSQTLCELCDNGDESPNLFLKKNKRLRKCVEVDINNADSSMTRKYRNCIAHLTVVRELKEYIGDIRTVDSYFSIYHYVMQRCITKREDDTKQEEKIKYEDDLLKNHGYTKDFVKALNSPFGYNIPRFKNLSIEQLFDRNEYLTEK

SEQ ID NO: 3637 - protein, 924 aa, Artificial
  Synthetic
MAKKNKMKPRELREAQKKARQLKAAEINNNAVPAIAAMPAAEAAAPAAEKKKSSVKAAGMKSILVSENKMYITSFGKGNSAVLEYEVDNNDYNKTQLSSKDNSNIELCDVDEVNITFSSKHGFESGVEINTSNPTHRSGESSPVRWDMLGLKSELEKRFFGKTFDDNIHIQLIYNILDIEKILAVYVTNIVYALNNMLGEGDESNYDFMGYLSTFNTYKVFTNPNGSTLSDDKKENIRKSLSKFNALLKTKRLGYFGLEEPKTKDTRVLEAYKKRVYHMLAIVGQIRQCVFHDLSEHSEYDLYSFIDNSKKVYRECRETLDYLVDERFDSINKGFIQGNKVNISLLIDMMKGYEADDIIRLYYDFIVLKSQKNLGFSIKKLREKMLEEYGFRFKDKQYDSVRSKMYKLMDFLLFCNYYRNDVVAGEALVRKLRFSMTDDEKEGIYADEAEKLWGKFRNDFENIADHMNGDVIKELGKADMDFDEKILDSEKKNASDLLYFSKMIYMLTYFLDGKEINDLLTTLISKFDNIKEFLKIMKSSAVDVECELTAGYKLFNDSQRITNELFIVKNIASMRKPAASAKLTMFRDALTILGIDDKITDDRISEILKLKEKGKGIHGLRNFVTNNVIESSRFVYLIKYANAQKIREVAKNEKVVMFVLEGIPDTQIERYYKSCVEVTDMNSSLEAKRSELAKMIKSISFEDFKDVKQQAKGRENVAKERAKAVIGLYLTVMYLLVKNLVNVNARYVIAIHCLERDFGLYKEIIPELASKNLKNDYRILSQTLCELCDDRDKSPNLFLKKNKRLRKCVEVDINNADSSMTRKYRNCIAHLTVVRELKEYIGDIRTVDSYFSIYHYVMQRCITKRENDTKQEDKIKYEDDLLKNHGYTKDFVKALNSPFGYNIPRFKNLSIKQLFDRNEYLTEK

SEQ ID NO: 3638 - protein, 922 aa, Artificial
  Synthetic
MAKKNKMKPRELREAQKKARQFKAAEINNNAAPAIAAMPAAEVIAPVAEKKKSSVKAAGMKSILVSENKMYITSFGKGNSAVLEYEVDNNDYNKTQLSSKDNSNIELGDVDEVNITFSSKHGFGSGVEINTSNPTHRSGESSPVRGDMLGLKSELEKRFFGKTFDDNIHIQLIYNILDIEKILAVYVTNIVYALNNMLGVKGSESHDDFIGYLSTNNIYDVFIDPDNSSLSDDKKANVRKSLSKFNALLKTKRLGYFGLEEPKTKDTRASQAYKKRVYHMLAIVGQIRQCVFHDKSGAKRFDLYSFINNIDPEYRDTLDYLVDERFDSINKGFIQGNKVNISLLIDMMKGYEADDIIRLYYDFIVLKSQKNLGFSIKKLREKMLDEYGFRFKDKQYDSVRSKMYKLMDFLLFCNYYRNDVAAGEALVRKLRFSMTDDEKEGIYADEAEKLWGKFRNDFENIADHMNGDVIKELGKADMDFDEKILDSEKKNASDLLYFSKMIYMLTYFLDGKEINDLLTTLISKFDNIKEFLKIMKSSAVDVECELTAGYKLFNDSQRITNELFIVKNIASMRKPAASAKLTMFRDALTILGIDDKITDDRISEILKLKEKGKGIHGLRNFITNNVIESSRFVYLIKYANAQKIREVAKNEKVVMFVLGGIPDTQIERYYKSCVEFPDMNSSLKVKRSELARMIKNIRFDDFKNVKQQAKGRENVAKERAKAVIGLYLTVMYLLVKNLVNVNARYVIAIHCLERDFGLYKEIIPELASKNLKNDYRILSQTLCELCDDRDESPNLFLKKNRRLRKCVEVDINNADSSMTRKYRNCIAHLTVVRELKEYIGDIRTVDSYFSIYHYVMQRCITKREDDTKQEEKIKYEDDLLKNHGYTKDFVKALNSPFGYNIPRFKNLSIEQLFDRNEYLTEK

SEQ ID NO: 3639 - protein, 919 aa, Artificial; identical to SEQ ID NO: 2990
  Synthetic

SEQ ID NO: 3640 - protein, 922 aa, Artificial; identical to SEQ ID NO: 2840
  Synthetic

SEQ ID NO: 3641 - protein, 919 aa, Artificial; identical to SEQ ID NO: 2893
  Synthetic

SEQ ID NO: 3642 - protein, 919 aa, Artificial; identical to SEQ ID NO: 2876
  Synthetic

SEQ ID NO: 3643 - protein, 937 aa, Artificial
  Synthetic
MAKKKRITAKERKQNHRESLMKKADSNAEKEKAKKPVVENKPDTAISKDNTPKPNKEIKKSKAKLAGVKWVIKANDDVAYISSFGKGNNSVLEKRIMGDVSSNVNKDSHMYVNPKYTKKNYEIKNGFSSGSSLVTYPNKPDKNSGMDALCLKPYFEKDFFGQTFTDNMHIQAIYNIFDIEKILAKHITNIIYTVNSFDRNYNQAGNDTIGFDINYRVPYSEYGGGKDSNGEPKNKFKWEKRDNFSKFYNESKPHLGYYENIFYDHGEPISEEKFYNYLNILNFIRNNTFHYKDNDIELYSENYSEEYVFINCLNKFVKNKFKNVNKNFISNEKNNLYIILNAYGEDTENVEVVKKYSKELYKLSVLKTNKNLGVNVKKLRESAIEYGYCPLPYDKEKEVAKLSSIKHKLYKTYDFVITHYLNNNDKPLLEIVEALRLSKNDDEKEIVYKKYAEKLFKADDVINPIKAISKLFVEKGNKLFKEKVRINKEYIEDVSIDKNIYDFTKVIFFMTCFLDGKEINDLLTNIISKLQVIEDHNNVIKFIAENDDAVYKDYSDKYAIFRNAGKIATELEAIKSIARMENKIENAPQEPLLKDALLALGVSKTDLENTYKKYFDSKEKTDKQSQKVSTFLMNNVINNNRFKYVIKYINPADINGLAKNRYLVKFVLSKIPEEQIDSYYKLFSNEEEPSCEEKIKLLTKKISKLNFQTLFENNKIPNVEKERKKAIITLYFTIVYILVKNLVNINGLYTLALYFVERDGYFYKKICGKALRRKVGDKYDYLLLPEIFSGSKYREETKNLKLPKEKDRDIMKKYLPNDKDREKYNDFFTAYRNNIVHLNIIAKLSELTSNIDKNINSYFDIYHYCTQRVIFDYCKKNNNVVLAKMKDLAHIKSDCDEFSSKHTYPFSSAVLRFMNLPFAYNVPRFKNLSYKKFFDKQ

SEQ ID NO: 3644 - protein, 925 aa, Artificial; identical to SEQ ID NO: 3125
  Synthetic

SEQ ID NO: 3645 - protein, 919 aa, Artificial; identical to SEQ ID NO: 2893
  Synthetic

SEQ ID NO: 3646 - protein, 919 aa, Artificial
  Synthetic
MAKKNKMKPRELREAQKKARQLKAAEINNNAAPAIAAMPAAEVIAPVAEKKKSSVKAAGMKSILVSENKMYITSFGKGNSAVLEYEVDNNNYNKTQLSSKDNSNIELHGVNEVNITFSSKHGFESGVEINTSNPTHRSGESSPVRWDMLGLKSELEKRFFGKTFDDNIHIQLIYNILDIEKILAVYVTNIVYALNNMLGIKDSESYDDFMGYLSARNTYEVFTHPDKSNLSDKAKGNIKKSFSTFNDLLKTKRLGYFGLEEPKTKDTRVSQAYKKRVYHMLAIVGQIRQSVFHDKSSKLDEDLYSFIDIIDSEYRETLDYLVDERFDSINKGFIQGNKVNISLLIDMMKGYEADDIIRLYYDFIVLKSQKNLGFSIKKLREKMLDEYGFRFKDKQYDSVRSKMYKLMDFLLFCNYYRNDVVAGEALVRKLRFSMTDDEKEGVYADEAAKLWGKFRNDFENIADHMNGDVIKELGKADMDFDEKILDSEKKNASDLLYFSKMIYMLTYFLDGKEINDLLTTLISKFDNIKEFLKIMKSSAVDVECELTAGYKLFNDSQRITNELFIVKNIASMRKPAASAKLTMFRDALAILGIDDKITDDRISEILKLKEKGKGIHGLRNFITNNVIESSRFVYLIKYANAQKIREVAKNEKVVMFVLGGIPDTQIERYYKSCVEVPDMNSSLEAKRSELARMIKNIRFDDFKNVKQQAKGRENVAKERAKAVIGLYLTVMYLLVKNLVNVNARYVIAIHCLERDFGLYKEIIPELASKNLKNDYRILSQTLCELCDKSPNLFLKKNERLRKCVEVDINNADSSMTRKYRNCIAHLTVVRELKEYIGDIRTVDSYFSIYHYVMQRCITKREDDTKQEEKIKYEDDLLKNHGYTKDFVKALNSPFGYNIPRFKNLSIEQLFDRNEYLTEK

SEQ ID NO: 3647 - protein, 919 aa, Artificial; identical to SEQ ID NO: 3281
  Synthetic

SEQ ID NO: 3648 - protein, 922 aa, Artificial
  Synthetic
MAKKNKMKPRELREAQKKARQLKAAEINNNAVPAIAAMPAAEVIAPAAEKKKSSVKAAGMKSILVSENKMYITSFGKGNSAVLEYEVDNNDYNQTQLSSDGSSNIELRGVNEVNITFSSKHGFESGVEINTSNPTHRSGESSPVRGDMLGLKSELEKRFFGKTFDDNIHIQLIYNILDIEKILAVYVTNIVYALNNMLGVKGSESYDDFMGYLSAQNTYYIFTHPDKSNLSDKVKGNIKKSLSKFNDLLKTKRLGYFGLEEPKTKDKRVSEAYKKRVYHMLAIVGQIRQSVFHDKSNELDEYLYSFIDIIDSEYRDTLDYLVDERFDSINKGFVQGNKVNISLLIDMMKGYEADDIIRLYYDFIVLKSQKNLGFSIKKLREKMLDEYGFRFKDKQYDSVRSKMYKLMDFLLFCNYYRNDVVAGEALVRKLRFSMTDDEKEGIYADEAEKLWGKFRNDFENIADHMNGDVIKELGKADMDFDEKILDSEKKNASDLLYFSKMIYMLTYFLDGKEINDLLTTLISKFDNIKEFLKIMKSSAVDVECELTAGYKLFNDSQRITNELFIVKNIASMRKPAASAKLTMFRDALTILGIDDKITDDRISEILKLKEKGKGIHGLRNFITNNVIESSRFVYLIKYANAQKIREVAKNEKVVMFVLGGIPDTQIERYYKSCVEFPDMNSSLEAKRSELARMIKNIRFDDFKNVKQQAKGRENVAKERAKAVIGLYLTVMYLLVKNLVNVNARYVIAIHCLERDFGLYKEIIPELASKNLKNDYRILSQTLCELCDDRDESPNLFLKKNKRLRKCVEVDINNADSSMTRKYRNCIAHLTVVRELKEYIGDIRTVDSYFSIYHYVMQRCITKREDDTKQEEKIKYEDDLLKNHGYTKDFVKALNSPFGYNIPRFKNLSIEQLFDRNEYLTEK

SEQ ID NO: 3649 - protein, 919 aa, Artificial
  Synthetic
MAKKNKMKPRELREAQKKARQLKAAEINNNAVPAIAAMPAAEAAAPAAEKKKSSVKAAGMKSILVSENKMYITSFGKGNSAVLEYEVDNNDYNKTQLSSKDNSNIELCDVNEVNITFSSKHGFESGVEINTSNPTHRSGESSPVRWDMLGLKSELEKRFFGKTFDDNIHIQLIYNILDIEKILAVYITNIVYALNNMLGVKGSESHDDFIGYLSTNNIYDVFIDPDNSSLSDDKKANVRKSLSKFNALLKTKRLGYFGLEEPKTKDNRVSEAYKKRVYHMLAIVGQIRQSVFHDKSSKLHEDLYSFIDIIDSEYRETLDYLVDERFDSINKGFIQGNKVNISLLIDMMKGYEADDIIRLYYDFIVIKSQKNLGFSIKKLREKMLDEYGFRFKDKQYDSVRSKMYKLMDFLLFCNYYRNDVVAGEALVRKLRFSMTDDEKEGIYADEAEKLWGKFRNDFENIADHMNGDVIKELGKADMDFDEKILDSEKKNASDLLYFSKMIYMLTYFLDGKEINDLLTTLISKFDNIKEFLKIMKSSAVNVECELTAGYKLFNDSQRITNELFIVKNIASMRKPAASAKLTMFRDALTILGIDDKITDDRISEILKLKEKGKGIHGLRNFITNNVIESSRFVYLIKYANAQKIREVAKNEKVVMFVLGGIPDTQIERYYKSCVEFPDMNSSLEAKRSELARMIKNISFDDFKNVKQQAKGRENVAKERAKAVIGLYLTVMYLLVKNLVNVNARYVIAIHCLERDFGLYKEIIPELASKNLKNDYRILSQTLCELCDKSPNLFLKKNKRLRKCVEVDINNADSSMTRKYRNCIAHLTVVRELKEYIGDIRTVDSYFSIYHYVMQRCITKRENDTKQEDKIKYEDDLLKNHGYTKDFVKALNSPFGYNIPRFKNLSIEQLFDRNEYLTEK

SEQ ID NO: 3650 - protein, 954 aa, Artificial; identical to SEQ ID NO: 3314
  Synthetic

SEQ ID NO: 3651 - protein, 1001 aa, Artificial; identical to SEQ ID NO: 3134
  Synthetic

SEQ ID NO: 3652 - protein, 924 aa, Artificial; identical to SEQ ID NO: 2910
  Synthetic

SEQ ID NO: 3653 - protein, 1039 aa, Artificial; identical to SEQ ID NO: 3033
  Synthetic

SEQ ID NO: 3654 - protein, 919 aa, Artificial; identical to SEQ ID NO: 2825
  Synthetic

SEQ ID NO: 3655 - protein, 954 aa, Artificial; identical to SEQ ID NO: 3131
  Synthetic

SEQ ID NO: 3656 - protein, 956 aa, Artificial; identical to SEQ ID NO: 2890
  Synthetic

SEQ ID NO: 3657 - protein, 920 aa, Artificial
  Synthetic
MAKKNKMKPRELREAQKKARQLKAVEINNNAVPEIAAMPAAEVIAPVAEKKKSSVKAAGMKSILVSENKMYITSFGKGNSAVLEYEVDNNDYNKTQLSSKNSSNIELRGVNEVNITFSSKHGFESGVEINTSNPTHRSGESSPVRWDMLGLKSELEKRFFGKTFDDNIHIQLIYNILDIEKILAVYVTNIVYALNNMLGIKGSESYDDFMGYLSARNTYEVFTHPDKSSLSDDKKANVRKSLSKFNVLLKTKRLGYFGLEEPKTKDTRVSQAYKKRVYHMLAIVGQIRQSVFHDKSSKLHEDLYSFIDIIDSEYRETLDYLVDERFDSINKGFIQGNKVNISLLIDMMKDDYEADDIIRLYYDFIVLKSQKNLGFSIKKLREKMLDEYGFRFKDKQYDSVRSKMYKLMDFLLFCNYYRNDVIAGEALVRKLRFSMTDDEKEGIYADEAAKLWGKFRNDFENIADHMNGDVIKELGKADMDFDEKILDSEKKNASDLLYFSKMIYMLTYFLDGKEINDLLTTLISKFDNIKEFLKIMKSSAVDVECELTAGYKLFNDSQRITNELFIVKNIASMRKPAASAKLTMFRDALTILGIDDKITDDRISEILKLKEKGKGIHGLRNFITNNVIESSRFVYLIKYANAQKIRKVAENEKVVMFVLGGIPDTQIERYYKSCVEFPDMNSSLEVKRSELARMIKNISFDDFKNVKQQAKGRENVAKERAKAVIGLYLTVMYLLVKNLVNVNARYVIAIHCLERDFGLYKEIIPELASKNLKNDYRILSQTLCELCDKSPNLFLKKNERLRKCVEVDINNADSSMTRKYRNCIAHLTVVRELKEYIGDIRTVDSYFSIYHYVMQRCITKREDDKKQEEKIKFEDDLLKNHGYTKDFVKALNSPFGYNIPRFKNLSIEQLFDRNEYLTEK

SEQ ID NO: 3658 - protein, 919 aa, Artificial; identical to SEQ ID NO: 3263
  Synthetic

SEQ ID NO: 3659 - protein, 918 aa, Artificial
  Synthetic
MAKKNKMKPRERREAQKKARQLKAAEINNNAVPAIAAMPAAEAAAPAAEKKKSSVKAAGMKSILVSENKMYITSFGKGNSAVLEYEVDNNDYNKTQLSSKDNSNIELCDVGKVNITFSSRRGFESGVEINTSNPTHRSGESSSVRGDMLGLKSELEKRFFGKNFDDNIHIQLIYNILDIEKILAVYVTNIVYALNNMLGEGDESNYDFMGYLSTFNTYKVFTNPNGSTLSDDKKENIRKSLSKFNALLKTKRLGYFGLEEPKTKDTRASEAYKKRVYHMLAIVGQIRQCVFHDKSGAKRFDLYSFINNIDPEYRETLDYLVDERFDSINKGFIQGNKVNISLLIDMMKGYEADDIIRLYYDFIVLKSQKNLGFSIKKLREKMLEEYGYRFKDKQYDSVRSKMYKLMDFLLFCNYYRNDVVAGEALVRKLRFSMTDDEKEGIYADEASKLWGKFRNDFENIADHMNGDVIKELGKADMDFDEKILDSEKKNASDLLYFSKMIYMLTYFLDGKEINDLLTTLISKFDNIKEFLKIMKSSAVDVECELTAGYKLFNDSQRITNELFIVKNIASMRKPASSAKLTMFRDALTILGIDDNITDDRISEILKLKEKGKGIHGLRNFITNNVIESSRFVYLIKYANAQKIRKVAKNEKVVMFVLGGIPDTQIERYYKSCVEFPDMNSSLEVKRSELARMIKNISFDDFKNVKQQAKGRENVAKERAKAVIGLYLTVMYLLVKNLVNVNARYVIAIHCLERDFGLYKEIIPELASKNLKNDYRILSQTLCELCDKSPNLFLKKNRRLRKCVEVDINNADSSMTRKYRNCIAHLTVVRELKEYIGDIRTVDSYFSIYHYVMQRCITKRENDTKQEEKIKYEDDLLKNHGYTKDFVKALNSPFGYNIPRFKNLSIEQLFDRNEYLTEK

SEQ ID NO: 3660 - protein, 922 aa, Artificial; identical to SEQ ID NO: 2840
  Synthetic

SEQ ID NO: 3661 - protein, 922 aa, Artificial; identical to SEQ ID NO: 2906
  Synthetic

SEQ ID NO: 3662 - protein, 922 aa, Artificial; identical to SEQ ID NO: 2840
  Synthetic

SEQ ID NO: 3663 - protein, 954 aa, Artificial
  Synthetic
MGKKIHARDLREQRKNDRTAKFADQNKKREAERAVQKKDAAVSVKSVSSVSSKKDNVTKSMAKAAGVKSVFAVGNTVYMTSFGRGNDAVLEQKIVDTSHEPLNIDDPAYQLNVVTMNGYSVTGHRGETVSAVTDNPLRRFNGGKKDEPEQSVPTDMLCLKPTLEKKFFGKEFNDNIHIQLIYNILDIEKILAVYSTNAIYALNNMSADENIENSDFFMKRTTDETFDDFEKKKESTNSREKADFDAFEKFIGNYRLAYFADAFYVNKKNPKGKARNVLREDKELYSVLTLIGKLRHWCVHSEEGRAEFWLYKLDELKDDFKNVLDVVYNRPVEEINNRFIENNKVNIQILGSVYKNTDIAELVRSYYEFLITKKYKNMGFSIKKLRESMLEGKGYADKEYDSVRNKLYQMTDFILYTGYINEDSDRADDLVNTLRSSLKEDDKTTVYCKEADYLWKKYRESIREVADALDGDNIKRLSKSNIEIQEDKLRKCFISYADSVSEFTKLIYLLTRFLSGKEINDLVTTLINKFDNIRSFLEIMDELGLDRTFTAEYSFFEGSTKYLAELVELNSFVKSCSFDINAKRTMYRDALDILGIKSGKTEEDIEKMIDNILQIDANGDKKLKKNNGLRNFIASNVIDSNRFKYLVRYGNPKKIRETAKCKPAVRFVLNEIPDAQIERYYEACCPKNTALCSANKRREKLADMIAEIEFENFSDAGNYQKANVTSRTSEAEIKRKNQAIIRLYLTVMYIMLKNLVNVNARYVIAFHCVERDTKLYAESGLEVGNIEKNKTNLTMAVMGVKLENGIIKTEFDKSLAENAANRYLRNARWYKLILDNLKKSERAVVNEFRNTVCHLNAIRNININIDGIKEVENYFALYHYLIQKHLENRFADKKVERDTGDFISKLEEHKTYCKDFVKAYCTPFGYNLVRYKNLTIDGLFDKNYPGKDDSDEQK

SEQ ID NO: 3664 - protein, 919 aa, Artificial; identical to SEQ ID NO: 2876
  Synthetic

SEQ ID NO: 3665 - protein, 925 aa, Artificial; identical to SEQ ID NO: 2833
  Synthetic

SEQ ID NO: 3666 - protein, 919 aa, Artificial; identical to SEQ ID NO: 3553
  Synthetic

SEQ ID NO: 3667 - protein, 922 aa, Artificial; identical to SEQ ID NO: 2906
  Synthetic

SEQ ID NO: 3668 - protein, 922 aa, Artificial; identical to SEQ ID NO: 2937
  Synthetic

SEQ ID NO: 3669 - protein, 919 aa, Artificial
  Synthetic
MAKKNKMKPRELREAQKKARQLKAAEINNNAVPAIAAMPAVEVIAPAAEKKKSSVKAAGMKSILVSENKMYITSFGKGNSAVLEYEVDNNDYNKTQLSSKDNSNIELGNVNEVNITFSSRRGFESGVEINTSNPTHRSGESSSVRGDMLGLKSELEKRFFGKTFDDNIHIQLIYNILDIEKILAVYVTNIVYALNNMLGVKGSESYDDFMGYLSAQNTYYIFTHPDKSNLSDKVKGNIKKSLSKFNDLLKTKRLGYFGLEEPKTKDKRVSEAYKKRVYHMLAIVGQIRQSVFHDKSNELDEYLYSFIDIIDSEYRDTLDYLVDERFDSINKGFIQGNKVNISLLIDMMKGYEADDIIRLYYDFIVLKSQKNLGFSIKKLREKMLDEYGFRFKDKQYDSVRSKMYKLMDFLLFCNYYRNDVVAGEALVRKLRFSMTDDEKEGIYADEAAKLWGKFKNDFENIADHMNGDVIKEFGKADMDFDEKILDSEKKNASDLLYFSKMIYMLTYFLDGKEINDLLTTLISKFDNIKEFLKIMKSSAVDVECELTAGYKLFNDSQRITNELFIVKNIASMRKPAASAKLTMFRDALTILGIDDNITDDRISEILKLKEKGKGIHGLRNFITNNVIESSRFVYLIKYANAQKIREVAKNEKVVMFVLGGIPDTQIERYYKSCVEFPDMNSSLEAKRSELARMIKNIRFDDFKNVKQQAKGRENVAKERAKAVIGLYLTVMYLLVKNLVNVNARYVIAIHCLERDFGLYKEIIPELASKNLKNDYRILSQTLCELCDKSPNLFLKKNERLRKCVEVDINNADSSMTRKYRNCIAHLTVVRELKEYIGDIRTVDSYFSIYHYVMQRCITKRENDTKQEDKIKYEDDLLKNHGYTKDFVKALNSPFGYNIPRFKNLSIEQLFDRNEYLTEK

SEQ ID NO: 3670 - protein, 919 aa, Artificial; identical to SEQ ID NO: 2968
  Synthetic

SEQ ID NO: 3671 - protein, 925 aa, Artificial; identical to SEQ ID NO: 2833
  Synthetic

SEQ ID NO: 3672 - protein, 924 aa, Artificial; identical to SEQ ID NO: 2910
  Synthetic

SEQ ID NO: 3673 - protein, 922 aa, Artificial; identical to SEQ ID NO: 3327
  Synthetic

SEQ ID NO: 3674 - protein, 918 aa, Artificial; identical to SEQ ID NO: 3659
  Synthetic

SEQ ID NO: 3675 - protein, 924 aa, Artificial; identical to SEQ ID NO: 2910
  Synthetic

SEQ ID NO: 3676 - protein, 926 aa, Artificial
  Synthetic
MAKKNKMKPRELREAQKKARQLKAAEINNNAIPAIAAMPAAEVIAPAAEKKKSSVKAAGMKSILVSKNKMYITSFGKGNSAVLEYEVDKVDNDNYNKTQLSSKDNSNIELGDVDEVNITFSSKHGFGSGVEINTSNPTHRSGESSPVRWDMLGLKSELEKRFFGKTFDDNIHIQLIYNILDIEKILAVYVTNIVYALNNMLGIKGSESYDDFMGYLSARNTYEVFTHPDKSSLSDDKKANVRKSLSKFNVLLKTKRLGYFGLEEPKTKDTRVSQAYKKRVYHMLAIVGQIRQSVFHDKSSKLHEDLYSFIDIIDSEYRETLDYLVDERFDSINKGFIQGNKVNISLLIDMMKDDYEADDIIRLYYDFIVLKSQKNLGFSIKKLREKMLDEYGFRFKDKQYDSVRSKMYKLMDFLLFCNYYRNDVIAGEALVRKLRFSMTDDEKEGIYADEAAKLWGKFRNDFENIADHMNGDVIKELGKADMDFDEKILDSEKKNASDLLYFSKMIYMLTYFLDGKEINDLLTTLISKFDNIKEFLKIMKSSAVDVECELTAGYKLFNDSQRITNELFIVKNIASMRKPAASAKLTMFRDALTILGIDDKITDDRISEILKLKEKGKGIHGLRNFITNNVIESSRFVYLIKYANAQKIREVAKNEKVVMFVLGGIPDTQIERYYKSCVEFPDMNSSLEAKRSELARMIKNIRFDDFKNVKQQAKGRENVAKERAKAVIGLYLTVMYLLVKNLVNVNARYVIAIHCLERDFGLYKEIIPELASKNLKNDYRILSQTLCELCDDRDESPNLFLKKNKRLRKCVEVDINNADSSMTRKYRNCIAHLTVVRELKEYIGDIRTVDSYFSIYHYVMQRCITKREDDTKQEEKIKYEDDLLKNHGYTKDFVKALNSPFGYNIPRFKNLSIEQLFDRNEYLTEK

SEQ ID NO: 3677 - protein, 922 aa, Artificial; identical to SEQ ID NO: 2946
  Synthetic

SEQ ID NO: 3678 - protein, 952 aa, Artificial
  Synthetic
MGKKIHARDLREQRKTDRTEKFADQNKKREAQRAVQKKDAAVSVKSVSSVSSKKDNVTKSMAKAAGVKSVFAVGNTVYMTSFGRGNDAVLEQKIVDTSHEPLNIDDPAYQLNVVTMNGYSVTGHRGETVSAVTDNPLRRFNGRKKDEPEQSVPTDMLCLKPTLEKKFFGKEFDDNIHIQLIYNILDIEKILAVYSTNAIYALNNMSADENIENSDFFMKRTTDETFDDFEKKKESTNSREKADFDAFEKFIGNYRLAYFADAFYVNKKNPKGKARNVLREDKELYSVLTLIGKLRHWCVHSEEGRAEFWLYKLNELKDDFKNVLDVVYNRPVEEINNRFIENNKVNIQILGSVYKNTDIAELVRSYYEFLITKKYKNMGFSIKKLRESMLEGKGYADKEYDSVRNKLYQMTDFILYTGYINEDSDRADDLVNTLRSSLKEDDKTTVYCKEADYLWKKYCESIREVAEALDGDNIKRLSKSNIEIRDNELRKCFISYADSVSEFTKLIYLLTRFLSGKEINDLVTTLINKFDNIRSFLEIMDELGLDRTFTAEYSFFEGSTKYLAELVELNSFVKSCSFDINAKRTMYRDALDILGIKSGKTEEDIEKMIDNILQIDANGDKKLEKNNGLRNFIASNVIDSNRFKYLVRYGNPKKIRETAKCKPAVRFVLNEIPDAQIERYYEACCPKNTALCSANKRREKLADMIAEIKFENFSDAGNYQKANVTSKTHEAEIKRKNQAIIRLYLTVMYIMLKNLVNVNARYVIAFHCVERDTKLYAESGLEVGNIEKNKTNLTMAVMGVKLENGIIKTEFDKSLAENAANRYLRNARWYKLILDNLKKSERAVVNEFRNTVCHLNAIRNININIDGIKEVENYFALYHYLIQKHLENRFADNGGSTGDYIGKLEEHKTYCKDFVKAYCTPFGYNLVRYKNLTIDGLFDKNYPGKDDSDEQK

SEQ ID NO: 3679 - protein, 923 aa, Artificial; identical to SEQ ID NO: 2862
  Synthetic

SEQ ID NO: 3680 - protein, 925 aa, Artificial
  Synthetic
MAKKNKMKPRELREAQKKARQLKAAEINNNAAPAIAAMPAAQVIAPAAEKKKSSVKAAGMKSILVSENKMYITSFGKGNSAVLEYEVDKVDNNNYNKTQLSSKDNSNIELGDVNEVNITFSSKHGFESGVEINTSNPTHRSGESSPVRWDMLGLKSELEKRFFGKTFDDNIHIQLIYNILDIEKILAVYVTNIVYALNNMLGIKGSESYDDFMGYLSARNTYEVFTHPDKSNLSDKVKGNIKKSLSKFNDLLKTKRLGYFGLEEPKTKDTRVSQAYKKRVYHMLAIVGQIRQSVFHDKSSKLDEDLYSFIDIIDSEYRETLDYLVDERFDSINKGFIQGNKVNISLLIDMMKGYEADDIIRLYYDFIVLKSQKNLGFSIKKLREKMLDEYGFRFKDKQYDSVRSKMYKLMDFLLFCNYYRNDVVAGEALVRKLRFSMTDDEKEWIYADEAEKLWGKFRNDFENIADHMNGDVIKELGKADMDFDEKILDSEKKNASDLLYFSKMIYMLTYFLDGKEINDLLTTLISKFDNIKEFLKIMKSSAVDVECELTAGYKLFNDSQRITNELFIVKNIASMRKPAASAKLTMFRDALTILGIDDKITDDRISEILKLKEKGKGIHGLRNFITNNVIESSRFVYLIKYANAQKIREVAENEKVVMFVLGGIPDTQIERYYKSCVEFPDMNSSLEVKRSELARMIKNISFDDFKNVKQQAKGRENVAKERAKAVIGLYLTVMYLLVKNLVNVNARYVIAIHCLERDFGLYKEIIPELASKNLKNDYRILSQTLCELCDDRDESPNLFLKKNKRLRKCVEVDINNADSSMTRKYRNCIAHLTVVRELKEYIGDIRTVDSYFSIYHYVMQRCITKREDDKKQEEKIKYEDDLLKNHGYTKDFVKALNSPFGYNIPRFKNLSIEQLFDRNEYLTEK

SEQ ID NO: 3681 - protein, 954 aa, Artificial; identical to SEQ ID NO: 3206
  Synthetic

SEQ ID NO: 3682 - protein, 924 aa, Artificial
  Synthetic
MAKKNKMKPRELREAQKKARQLKAAEINNNAVPAIAAMPAAEVIAPAAEKKKSSVKAAGMKSILVSENKMYITSFGKGNSAVLEYEVDNNDYNKTQLSSKDNSNIELGNVNEVNITFSSKHGFESGVEINTSNPTHRSGESSPVRWDMLGLKSELEKRFFGKTFDDNIHIQLIYNILDIEKILAVYVTNIVYALNNMLGEGDESNYDFMGYLSTFNTYKVFTNPNGSTLSDDKKENIRKSLSKFNALLKTKRLGYFGLEEPKTKDTRVLEAYKKRVYHMLAIVGQIRQCVFHDLSEHSEYDLYSFIDNSKKVYRECRETLDYLVDERFDSINKGFIQGNKVNISLLIDMMKGYEADDIIRLYYDFIVLKSQKNLGFSIKKLREKILDEYGFRFKDKQYDSVRSKMYKLMDFLLFCNYYRNDIAAGESLVRKLRFSMTDDEKEGIYADEAAKLWGKFRNDFENIADHMNGDVIKELGKADMDFDEKILDSEKKNASDLLYFSKMIYMLTYFLDGKEINDLLTTLISKFDNIKEFLKIMKSSAVDVECELTAGYKLFNDSQRITNELFIVKNIASMRKPAASAKLTMFRDALTILGIDDKITDDRISEILKLKEKGKGIHGLRNFITNNVIESSRFVYLIKYANAQKIREVAKNEKVVMFVLGGIPDTQIERYYKSCVEFPDMNSSLEAKRSELARMIKNISFDDFKNVKQQAKGRENVAKERAKAVIGLYLTVMYLLVKNLVNVNARYVIAIHCLERDFGLYKEIIPELASKNLKNDYRILSQTLCELCDDRDESPNLFLKKNRRLRKCVEVDINNADSSMTRKYRNCIAHLTVVRELKEYIGDIRTVDSYFSIYHYVMQRCITKREDDTKQEEKIKYEDDLLKNHGYTKDFVKALNSPFGYNIPRFKNLSIEQLFDRNEYLTEK

SEQ ID NO: 3683 - protein, 925 aa, Artificial; identical to SEQ ID NO: 2987
  Synthetic

SEQ ID NO: 3684 - protein, 954 aa, Artificial; identical to SEQ ID NO: 3206
  Synthetic

SEQ ID NO: 3685 - protein, 928 aa, Artificial; identical to SEQ ID NO: 2950
  Synthetic

SEQ ID NO: 3686 - protein, 922 aa, Artificial; identical to SEQ ID NO: 2946
  Synthetic

SEQ ID NO: 3687 - protein, 922 aa, Artificial
  Synthetic
MAKKNKMKPRELREAQKKARQLKAAEINNNAAPAIAAMPAAEAAAPAAEKKKSSVKAAGMKSILVSENKMYITSFGKGNSAVLEYEVDNNDYNKTQLSSKGSSNIELHGVNEVNITFSSKHGFESGVEINTSNPTHRSGESSPVRGDMLGLKSELEKRFFGKTFDDNIHIQLIYNILDIEKILAVYVTNIVYALNNMLGEGDDESHDDFMGYLSTFNTYKVFTNPNGSTLSDDKKENIRKSLSKFNALLKTKRLGYFGLEEPKTKDTRASEAYKKRVYHMLAIVGQIRQSVFHDKSNELDEYLYSFIDIIDSEYRETLDYLIDERFDSINKGFIQGNKVNISLLIDMMKGYEADDIIRLYYDFIVLKSQKNLGFSIKKLREKMLDEYGFRFKDKQYDSVRSKMYKLMDFLLFCNYYRNDVVAGEALVRKLRFSMTDDEKEGIYADEAEKLWGKFRNDFENIADHMNGDVIKELGKADMDFDEKILDSEKKNASDLLYFSKMIYMLTYFLDGKEINDLLTTLISKFDNIKEFLKIMKSSAVDVECELTAGYKLFNDSQRITNELFIVKNIASMRKPAAPAKLTMFRDALTILGIDDKITDDRISEILKLKEKGKGIHGLRNFITNNVIESSRFVYLIKYANAQKIREVAKNEKVVMFVLGGIPDTQIERYYKSCVEFPDMNSSLEVKRSELARMIKNISFDDFKNVKQQAKGRENVAKERAKAVIGLYLTVMYLLVKNLVNVNARYVIAIHCLERDFGLYKEIIPELASKNLKNDYRILSQTLCELCDNRDESPNLFLKKNKRLRKCVEVDINNADSSMTRKYRNCIAHLTVVRELKEYIGDIRTVDSYFSIYHYVMQRCITKREDDKKQEEKIKFEDDLLKNHGYTKDFVKALNSPFGYNIPRFKNLSIEQLFDRNEYLTEK

SEQ ID NO: 3688 - protein, 925 aa, Artificial; identical to SEQ ID NO: 3152
  Synthetic

SEQ ID NO: 3689 - protein, 919 aa, Artificial; identical to SEQ ID NO: 2975
  Synthetic

SEQ ID NO: 3690 - protein, 922 aa, Artificial
  Synthetic
MAKKNKMKPRELREAQKKARQLKAAEINNNAAPAIAAMPAAEVIAPAAEKKKSSVKAAGMKSILVSENKMYITSFGKGNSAVLEYEVDKVDNNNYNKTQLSSKDNSNIELGDVNEVNITFSSKRGNESGVEINTSNPTHRSGESSPVRWDMLGLKSELEKRFFGKTFDDNIHIQLIYNILDIEKILAVYVTNIVYALNNMLGIKKSESYDDFMGYLSARNTYEVFTHPDKSNLSDKAKGNIKKSFSTFNDLLKTKRLGYFGLEEPKTKDTRVSQAYKKRVYHMLAIVGQIRQSVFHDKSSKLDEDLYSFIDIIDSEYRETLDYLVDERFDSINKGFIQGNKVNISLLIDMMKGYETDDIIRLYYDFIVLKSQKNLGFSIKKLREKMLDEYGFRFKDKQYDSVRSKMYKLMDFLLFCNYYRNDVVAGEALVRKLRFSMTDDEKEGTYADEAEKLWGKFRNDFENIADHMNGDAIKELGKADMDFDEKILDSEKKNASDLLYFSKMIYMLTYFLDGKEINDLLTTLISKFDNIKEFLKIMKSSAVDVECELTAGYKLFNDSQRITNELFIVKNIASMRKPAASAKLTMFRDALTILGIDDNITDDRISEILKLKEKGKGIHGLRNFITNNVIESSRFVYLIKYANAQKIREVAKNEKVVMFVLGGIPDTQIERYYKSCVEFPDMNSSLEAKRSELARMIKNISFDDFKNVKQQAKGRENVAKERAKAVIGLYLTVMYLLVKNLVNVNARYVIAIHCLERDFGLYKEIIPELASKNLKNDYRILSQTLCELCDKSPNLFLKKNERLRKCVEVDIYNADSSMTRKYRNCIAHLTVVRELKEYIGDIRTVDSYFSIYHYVMQRCITKREDDTKQEEKIKYEDDLLKNHGYTKDFVKALNSPFGYNIPRFKNLSIEQLFDRNEYLTEK

SEQ ID NO: 3691 - protein, 922 aa, Artificial; identical to SEQ ID NO: 3375
  Synthetic

SEQ ID NO: 3692 - protein, 919 aa, Artificial; identical to SEQ ID NO: 2825
  Synthetic

SEQ ID NO: 3693 - protein, 923 aa, Artificial; identical to SEQ ID NO: 3235
  Synthetic

SEQ ID NO: 3694 - protein, 922 aa, Artificial; identical to SEQ ID NO: 3102
  Synthetic

SEQ ID NO: 3695 - protein, 919 aa, Artificial; identical to SEQ ID NO: 3579
  Synthetic

SEQ ID NO: 3696 - protein, 924 aa, Artificial; identical to SEQ ID NO: 2910
  Synthetic

SEQ ID NO: 3697 - protein, 924 aa, Artificial; identical to SEQ ID NO: 2910
  Synthetic

SEQ ID NO: 3698 - protein, 919 aa, Artificial; identical to SEQ ID NO: 2990
  Synthetic

SEQ ID NO: 3699 - protein, 919 aa, Artificial; identical to SEQ ID NO: 3538
  Synthetic

SEQ ID NO: 3700 - protein, 921 aa, Artificial
  Synthetic
MAKKNKMKPRELREAQKKARQLKAAEINNNAAPAIAAMPAAEVIAPAAEKKKSSVKAAGMKSILVSKNKMYITSFGKGNSAVLEYEVDKVDNDNYNKTQLSSEDSSNIELCGVTKVNITFSSKHGLESGVEISTSNPTHRSGESSPVRWDMLGLKSELEKRFFGKTFDDNIHIQLIYNILDIEKILAVYVTNIVYALNNMLGEGDESNYDFMGYLSTFNTYKVFTNPNGSTLSDDKKENIRKSLSKFNALLKTKRLGYFGLEEPKTKDTRVSQAYKKRVYHMLAIVGQIRQCVFHDKSGAKRFDLYSFINNIDPEYRDTLDYLVEERLKSINKDFIQGNKVNISLLIDMMKGYEADDIIRLYYDFIVLKSQKNLGFSIKKLREKMLDEYGFRFKDKQYDSVRSKMYKLMDFLLFCNYYRNDVVAGEALVRKLRFSMTDDEKEGIYADEAAKLWGKFRNDFENIADHMNGDVIKELGKADMDFDEKILDSEKKNASDLLYFSKMIYMLTYFLDGKEINDLLTTLISKFDNIKEFLKIMKSSAVDVECELTAGYKLFNDSQRITNELFIVKNIASMRKPAASAKLTMFRDALTILGIDDNITDDRISEILKLKEKGKGIHGLRNFITNNVIESSRFVYLIKYANAQKIREVAKNEKVVMFVLGGIPDTQIERYYKSCVEFPDMNSSLEAKRSELARMIKNISFDDFKNVKQQAKGRENVAKERAKAVIGLYLTVMYLLVKNLVNVNARYVIAIHCLERDFGLYKEIIPELASKNLKNDYRILSQTLCELCDKSPNLFLKKNERLRKCVEVDINNADSSMTRKYRNCIAHLTVVRELKEYIGDIRTVDSYFSIYHYVMQRCITKREDDTKQEEKIKYEDDLLKNHGYTKDFVKALNSPFGYNIPRFKNLSIEQLFDRNEYLTEK

SEQ ID NO: 3701 - protein, 922 aa, Artificial; identical to SEQ ID NO: 2906
  Synthetic

SEQ ID NO: 3702 - protein, 925 aa, Artificial; identical to SEQ ID NO: 3152
  Synthetic

SEQ ID NO: 3703 - protein, 924 aa, Artificial; identical to SEQ ID NO: 2910
  Synthetic

SEQ ID NO: 3704 - protein, 1023 aa, Artificial; identical to SEQ ID NO: 2798
  Synthetic

SEQ ID NO: 3705 - protein, 954 aa, Artificial; identical to SEQ ID NO: 3148
  Synthetic

SEQ ID NO: 3706 - protein, 915 aa, Artificial
  Synthetic
MKPRELREAQKKARQLKAAEINNNAAPAIAAMPAAEVIAPAAEKKKSSVKAAGMKSILVSENKMYITSFGKGNSAVLEYEVDNNDYNKTQLSSKDNSNIELGDVNEVNITFSSKHGFGSGMKINTSNPTHRSGESSPVRWDMLGLKSELEKRFFGKTFDDNIHIQLIYNILDIEKILAVYVTNIVYALNNMLGEGDDSNYDFMGYLSTFNTYKVFTNPNGSTLSDDKKKNIRKSLRKFNDLLKTKRLGYFGLEEPKTKDNRVSEAYKKRVYHMLAIVGQIRQCVFHDKSGAKRFDLYSFINNIYPEYRDTLDYLVDERFDSINKGFIQGNKVNISLLIDMMKGYEPDDIIRLYYDFIVLKSQKNLGFSIKKLREKMLDEYGFRFKDKQYDSVRSKMYKLMDFLLFCNYYRNDIAAGESLVRKLRFSMTDDEKEGIYADEAAKLWGKFRNDFENIADHMNGDVIKELGKADMDFDEKILDSEKKNASDLLYFSKMIYMLTYFLDGKEINDLLTTLISKFDNIKEFLKIMKSSAVDVECELTVGYKLFNDSQRITNELFIVKNIASMRKPAASAKLTMFRDALTILGIDDKITDDRISEILKLKEKGKGIHGLRNFITNNVIESSRFVYLIKYANAQKIRKVAENEKVVMFVLGGIPDAQIERYYKSCVEFPDMNSSLEVKRSELARMIKNISFDDFKNVKQQAKGRENVAKERAKAVIGLYLTVMYLLVKNLVNVNARYVIAIHCLERDFGLYKEIIPELASKNLKNDYRILSQTLCELCDNGDESPNLFLKKNKRLRKCVEVDINNADSNMTRKYRNCIAHLTVVRELNKYIKDIRTVDSYFSIYHYVMQRCITKREDDKKQEEKIKYEDDLLKNHGYTKDFVKALNSPFGYNIPRFKNLSIEQLFDRNEYLTEK

SEQ ID NO: 3707 - protein, 923 aa, Artificial
  Synthetic
MFMAKKNKMKPRERREAQKKARQLKAAEINNNAVPAIAAMHAAEVIAPAAEKKKSSVKAAGMKSILVSENKMYITSFGKGNSAVLEYEVDNNDYNQTQLSSKDNSNIELCGVTKVNITFSSKHGFESGVEINTSNPTHRSGESSPVRGDMLGLKSELEKRFFGKTFDDNIHIQLIYNILDIEKILAVYVTNIVYALNNMLGEGDESNYDFMGYLSTFNTYKVFTNPNGSTLSDDKKENIRKSLSKFNALLKTKRLGYFGLEEPKTKDTRASEAYKKRVYHMLAIVGQIRQCVFHDKSGAKRFDLYSFINNIYPEYRDTLDYLVEERLKSINKDFIQGNKVNISLLIDMMKGYEADDIIRLYYDFIVLKSQKNLGFSIKKLREKMLEEYGYRFKDKQYDSVRSKMYKLMDFLLFCNYYRNDVVAGEALVRKLRFSMTDDEKEGIYADEASKLWGKFRNDFENIADHMNGDVIKELGKADMDFDEKILDSEKKNASDLLYFSKMIYMLTYFLDGKEINDLLTTLISKFDNIKEFLKIMKSSAVDVECELTAGYKLFNDSQRITNELFIVKNIASMRKPAASAKLTMFRDALTILGIDDKITDDRISEILKLKEKGKGIHGLRNFITNNVIESSRFVYLIKYANAQKIREVAKNEKAVMFVLGGIPDTQIERYYKSCVEFPDMNSSLEAKRSELARMIKNIRFDDFKNVKQQAKGRENVAKERAKAVIGLYLTVMYLLVKNLVNVNARYVIAIHCLERDFGLYKEIIPELASKNLKNDYRILSQTLCELCDDRDESPNLFLKKNKRLRKCVEVDINNADSSMTRKYRNCIAHLTVVRELKEYIGDIRTVDSYFSIYHYVMQRCITKREDDTKQEEKIKYEDDLLKNHGYTKDFVKALNSPFGYNIPRFKNLSIEQLFDRNEYLTEK

SEQ ID NO: 3708 - protein, 922 aa, Artificial; identical to SEQ ID NO: 3375
  Synthetic

SEQ ID NO: 3709 - protein, 922 aa, Artificial; identical to SEQ ID NO: 3163
  Synthetic

SEQ ID NO: 3710 - protein, 919 aa, Artificial
  Synthetic
MAKKNKMKPRELREAQKKARQLKAAEINNNAVPAIAAMPAAEAAAPAAEKKKSSVKAAGMKSILVSENKMYITSFGKGNSAVLEYEVDNNDYNKTQLSSKDNSNIELCDVNEVNITFSSKHGFESGVEINTSNPTHRSGESSPVRWDMLGLKSELEKRFFGKTFDDNIHIQLIYNILDIEKILAVYITNIVYALNNMLGVKGSESHDDFIGYLSTNNIYDVFIDPDNSSLSDDKKANVRKSLSKFNALLKTKRLGYFGLEEPKTKDNRVSEAYKKRVYHMLAIVGQIRQSVFHDKSSKLHEDLYSFIDIIDSEYRETLDYLVDERFDSINKGFIQGNKVNISLLIDMMKGYEADDIIRLYYDFIVIKSQKNLGFSIKKLREKMLDEYGFRFKDKQYDSVRSKMYKLMDFLLFCNYYRNDVVAGEALVRKLRFSMTDDEKEGIYADEAEKLWGKFRNDFENIADHMNGDVIKELGKADMDFDEKILDSEKKNASDLLYFSKMIYMLTYFLDGKEINDLLTTLISKFDNIKEFLKIMKSSAVDVECELTAGYKLFNDSQRITNELFIVKNIASMRKPASSAKLTMFRDALTILGIDDNITDDRISEILKLKEKGKGIHGLRNFITNNVIESSRFVYLIKYANAQKIRKVAKNEKVVMFVLGGIPDTQIERYYKSCVEFPDMNSSLEVKRSELARMIKNISFDDFKNVKQQAKGRENVAKERAKAVIGLYLTVMYLLVKNLVNVNARYVIAIHCLERDFGLYKEIIPELASKNLKNDYRILSQTLCELCDKSPNLFLKKNRRLRKCVEVDINNADSSMTRKYRNCIAHLTVVRELKEYIGDIRTVDSYFSIYHYVMQRCITKRENDTKQEEKIKYEDDLLKNHGYTKDFVKALNSPFGYNIPRFKNLSIEQLFDRNEYLTEK

SEQ ID NO: 3711 - protein, 954 aa, Artificial
  Synthetic
MGKKIHARDLREQRKTDRTEKFADQNKKREAERAVPKKDAAVSVKSVSSVSSKKDNVTKSMAKAAGVKSVFAVENTVYMTSFGRGNDAVLEQKIVDTSHEQLNIDDPAYQLNVVTMNGYSVTGHRGETVSAVTDNPLRRFNGGKKDEPEQSVPTDMLCLKPTLEKKFFGKEFNDNIHIQLIYNILDIEKILAVYSTNAIYALNNMSADENIENSDFFMKRTTDETFDDFEKKKESTNSREKADFDAFEKFIGNYRLAYFADAFYVNKKNPKGKARNVLREDKELYSVLTLIGKLRHWCVHSEEGRAEFWLYKLDELKDDFKNVLDVVYNRPVEEINNRFIENNKVNIQILGSVYKNTDIAELVRSYYEFLITKKYKNMGFSIKKLRESMLEGKGYADKEYDSVRNKLYQMTDFILYTGYINEDSDRADDLVNTLRSSLKEDDKTTVYCKEADYLWKKYRESIREVADALDGDNIKRLSKSNIEIQEDKLRKCFISYADSVSEFTKLIYLLTRFLSGKEINDLVTTLINKFDNIRSFLEIMDELGLDRTFTAEYSFFEGSTKYLAELVELNSFVKSCSFDINAKRTMYRDALDILGIESDKTEEDIEKMIDNILQIDANGDKKLKKNNGLRNFIASNVIDSNRFKYLVRYGNPKKIRETAKCKPAVRFVLNEIPDAQIERYYEACCPKNTALCSANKRREKLADMIAEIEFENFSDAGNYQKANVTSKTHEAEIKRKNQAIIRLYLTVMYIMLKNLVNVNARYVIAFHCVERDTKLYAESGLEVGNIEKNKTNLTMAVMGVKLENGIIKTEFDKSLAENAANRYLRNARWYKLILDNLKKSERAVVNEFRNTVCHLNAIRNININIDGIKEVENYFALYHYLIQKHLEKRFADKKVERDTGDFISKLEEHKTYCKDFVKAYCTPFGYNLVRYKNLTIDGLFDKNYPGKDDSDKQK

SEQ ID NO: 3712 - protein, 922 aa, Artificial
  Synthetic
VIFMAKKNKMKPRELREAQKKARQLKAAEINNNAAPAIAAMPAAEVIAPAAEKKKSSVKAAGMKSILVSENKMYITSFGKGNSAVLEYEVDNNDYNKTQLSSKDNSNIELCDVNEVNITFSSKHGFESGVEINTSNPTHRSGESSPVRWDMLGLKSELEKRFFGKTFDDNIHIQLIYNILDIEKILAVYITNIVYALNNMLGVKGSESHDDFIGYLSTNNIYDVFIDPDNSSLSDDKKANVRKSLSKFNALLKTKRLGYFGLEEPKTKDNRVSEAYKKRVYHMLAIVGQIRQSVFHDKSSKLHEDLYSFIDIIDSEYRETLDYLVDERFDSINKGFIQGNKVNISLLIDMMKGYEADDIIRLYYDFIVIKSQKNLGFSIKKLREKMLDEYGFRFKDKQYDSVRSKMYKLMDFLLFCNYYRNDVVAGEALVRKLRFSMTDDEKEGIYADEAEKLWGKFRNDFENIADHMNGDVIKELGKADMDFDEKILDSEKKNASDLLYFSKMIYMLTYFLDGKEINDLLTTLISKFDNIKEFLKIMKSSAVDVECELTAGYKLFNDSQRITNELFIVKNIASMRKPASSAKLTMFRDALTILGIDDNITDDRISEILKLKEKGKGIHGLRNFITNNVIESSRFVYLIKYANAQKIRKVAKNEKVVMFVLGGIPDTQIERYYKSCVEFPDMNSSLEVKRSELARMIKNISFDDFKNVKQQAKGRENVAKERAKAVIGLYLTVMYLLVKNLVNVNARYVIAIHCLERDFGLYKEIIPELASKNLKNDYRILSQTLCELCDKSPNLFLKKNRRLRKCVEVDINNADSSMTRKYRNCIAHLTVVRELKEYIGDIRTVDSYFSIYHYVMQRCITKRENDTKQEEKIKYEDDLLKNHGYTKDFVKALNSPFGYNIPRFKNLSIEQLFDRNEYLTEK

SEQ ID NO: 3713 - protein, 922 aa, Artificial; identical to SEQ ID NO: 2945
  Synthetic

SEQ ID NO: 3714 - protein, 922 aa, Artificial; identical to SEQ ID NO: 3102
  Synthetic

SEQ ID NO: 3715 - protein, 918 aa, Artificial
  Synthetic
MAKKNKMKPRELREAQKKARQLKAAEINNNAAPAIAAMPAAEVIAPAAEKKKSSVKAAGMKSILVSENKMYITSFGKGNSAVLEYEVDNNDYNKTQLSSKDNSNIELCDVGKVNITFSSRRGFESGVEINTSNPTHRSGESSSVRGDMLGLKSELEKRFFGKNFDDNIHIQLIYNILDIEKILAVYVTNIVYALNNMLGEGDESNYDFMGYLSTFNTYKVFTNPNGSTLSDDKKENIRKSLSKFNALLKTKRLGYFGLEEPKTKDTRASEAYKKRVYHMLAIVGQIRQCVFHDKSGAKRFDLYSFINNIDPEYRETLDYLVDERFDSINKGFIQGNKVNISLLIDMMKGYEADDIIRLYYDFIVLKSQKNLGFSIKKLREKMLEEYGYRFKDKQYDSVRSKMYKLMDFLLFCNYYRNDVVAGEALVRKLRFSMTDDEKEGIYADEASKLWGKFRNDFENIADHMNGDVIKELGKADMDFDEKILDSEKKNASDLLYFSKMIYMLTYFLDGKEINDLLTTLISKFDNIKEFLKIMKSSAVDVECELTAGYKLFNDSQRITNELFIVKNIASMRKPASSAKLTMFRDALTILGIDDNITDDRISEILKLKEKGKGIHGLRNFITNNVIESSRFVYLIKYANAQKIRKVAKNEKVVMFVLGGIPDTQIERYYKSCVEFPDMNSSLEVKRSELARMIKNISFDDFKNVKQQAKGRENVAKERAKAVIGLYLTVMYLLVKNLVNVNARYVIAIHCLERDFGLYKEIIPELASKNLKNDYRILSQTLCELCDKSPNLFLKKNRRLRKCVEVDINNADSSMTRKYRNCIAHLTVVRELKEYIGDIRTVDSYFSIYHYVMQRCITKREDDTKQEEKIKYEDDLLKNHGYTKDFVKALNSPFGYNIPRFKNLSIEQLFDRNEYLTEK

SEQ ID NO: 3716 - protein, 922 aa, Artificial
  Synthetic
MAKKNKMKPRELREAQKKARQLKAAEINNNAVPAIAAMPAAQVIAPAAEKKKSSVKAAGMKSILVSENKMYITSFGKGNSAVLEYEVDNNDYNKTQLSSKDNSNIELGNVNEVNITFSSRRGFESGVEINTSNPTHRSGESSSVRGDMLGLKSELEKRFFGKTFDDNIHIQLIYNILDIEKILAVYVTNIVYALNNMLGVKGSESYDDFMGYLSAQNTYYIFTHPDKSNLSDKVKGNIKKSLSKFNDLLKTKRLGYFGLEEPKTKDKRVSEAYKKRVYHMLAIVGQIRQSVFHDKSNELDEYLYSFIDIIDSEYRDTLDYLVDERFDSINKGFVQGNKVNISLLIDMMKGYEADDIIRLYYDFIVLKSQKNLGFSIKKLREKMLDEYGFRFKDKQYDSVRSKMYKLMDFLLFCNYYRNDIAAGEALVRKLRFSMTDDEKEGLYADEAAKLWGKFRNDFENIADHMNGDVIKELGKADMDFDEKILDSEKKNASDLLYFSKMIYMLTYFLDGKEINDLLTTLISKFDNIKEFLKIMKSSAVDVECELTAGYKLFNDSQRITNELFIVKNIASMRKPAASAKLTMFRDALTILGIDDKITDDRISEILKLKEKGKGIHGLRNFITNNVIESSRFVYLIKYANAQKIRKVAENEKVVMFVLGGIPDTQIERYYKSCVEFPDMNSSLEAKRSELARMIKNIRFDDFKNVKQQAKGRENVAKERAKAVIGLYLTVMYLLVKNLVNVNARYVIAIHCLERDFGLYKEIIPELASKNLKNDYRILSQTLCELCDDRDESPNLFLKKNKRLRKCVEVDINNADSSMTRKYRNCIAHLTVVRELKEYIGDIRTVDSYFSIYHYVMQRCITKREDDKKQEEKIKYEDDLLKNHGYTKDFVKALNSPFGYNIPRFKNLSIEQLFDRNEYLTEK

SEQ ID NO: 3717 - protein, 922 aa, Artificial; identical to SEQ ID NO: 3163
  Synthetic

SEQ ID NO: 3718 - protein, 919 aa, Artificial; identical to SEQ ID NO: 3446
  Synthetic

SEQ ID NO: 3719 - protein, 922 aa, Artificial; identical to SEQ ID NO: 3375
  Synthetic

SEQ ID NO: 3720 - protein, 922 aa, Artificial
  Synthetic
MAKKNKMKPRELREAQKKARQLKAAEINNNAAPAIAAMPAAEAAAPAAEKKKSSVKAAGMKSILVSENKMYITSFGKGNSAVLEYEVDKVDNNNYNKTQLSSESSSNIKLCGVTKVNITFSSKHGFGSGVEINTSNPTHRSGESSPVRWDMLGLKSELEKRFFGKTFDDNIHIQLIYNILDIEKILAVYVTNIVYALNNMLGVKGSESYDDFMGYLSAQNTYYIFTHPDKSNLSDKVKGNIKKSLSKFNDLLKTKRLGYFGLEEPKTKDKRVSEAYKKRVYHMLAIVGQIRQSVFHDKSNELDEYLYSFIDIIDSEYRDTLDYLVDERFDSINKGFVQGNKVNISLLIDMMKGYEADDIIRLYYDFIVLKSQKNLGFSIKKLREKMLDEYGFRFKDKQYDSVRSKMYKLMDFLLFCNYYRNDVVAGEALVRKLRFSMTDDEKEGIYADEAAKLWGKFRNDFENIADHMNGDVIKELGKADMDFDEKILDSEKKNASDLLYFSKMIYMLTYFLDGKEINDLLTTLISKFDNIKEFLKIMESSAVDVECELTAGYKLFNDSQRITNELFIVKNIASMRKPAASAKLTMFRDALTILGIDDKITDDRISEILKLKEKGKGIHGLRNFITNNVIESSRFVYLIKYANAQKIREVAKNEKVVMFVLGGIPDTQIERYYKSCVEFPDMNSSLEAKRSELARMIKNISFDDFKNVKQQAKGRENVAKERAKAVIGLYLTVMYLLVKNLVNVNARYVIAIHCLERDFGLYKEIIPELASKNLKNDYRILSQTLCELCDKSPNLFLKKNERLRKCVEVDINNADSSMTRKYRNCIAHLTVVRELKEYIGDIRTVDSYFSIYHYVMQRCITKRENDTKQEDKIKYEDDLLKNHGYTKDFVKALNSPFGYNIPRFKNLSIEQLFDRNEYLTEK

SEQ ID NO: 3721 - protein, 928 aa, Artificial; identical to SEQ ID NO: 2950
  Synthetic

SEQ ID NO: 3722 - protein, 920 aa, Artificial
  Synthetic
MAKKNKMKPRELREAQKKARQLKAAEINNNAAPAIAAMPAAEVIAPAAEKKKSSVKAAGMKSILVSENKMYITSFGKGNSAVLEYEVDNNDYNKTQLSSKDNSNIELGNVNEVNITFSSRRGFESGVEINTSNPTHRSGESSSVRGDMLGLKSELEKRFFGKTFDDNIHIQLIYNILDIEKILAVYVTNIVYALNNMLGIKDSESYDDFMGYLSAKNTYEVFTHPDKSDLSDKVKGNIKKSFSTFNDLLKTKRLGYFGLEEPKTKDTRASEAYKKRVYHMLAIVGQIRQCVFHDKSGAKRFDLYSFINNIYPEYRDTLDYLVDERFDSINKGFIQGNKVNISLLIDMMKDDYEADDIIRLYYDFIVLKSQKNLGFSIKKLREKMLDEYGFRFKDKQYDSVRSKMYKLMDFLLFCNYYRNDVVAGEALVRKLRFSMTDDEKEGIYADEAEKLWVKFRNDFENIADHMNGDVIKELGKADMDFDEKILDSEKKNASDLLYFSKMIYMLTYFLDGKEINDILTTLISKFDNIKEFLKIMKSSAVDVECELTAGYKLFNDSQRITNELFIVKNIASMRKPAASAKLTMFRDALTILGIDDNITDDRISEILKLKEKGKGIHGLRNFITNNVIESSRFVYLIKYANAQKIREVAKNEKVVMFVLGGIPDTQIERYYKSCVEFPDMNSSLEAKRSELARMIKNISFDDFKNVKQQAKGRENVAKERAKAVIGLYLTVMYLLVKNLVNVNARYVIAIHCLERDFGLYKEIIPELASKNLKNDYRILSQTLCELCDKSPNLFLKKNERLRKCVEVDINNADSSMTRKYRNCIAHLTVVRELKEYIGDIRTVDSYFSIYHYVMQRCITKRENDTKQEDKIKYEDDLLKNHGYTKDFVKALNSPFGYNIPRFKNLSIEQLFDRNEYLTEK

SEQ ID NO: 3723 - protein, 922 aa, Artificial
  Synthetic
MAKKNKMKPRELREAQKKARQLKAAEINNNAAPAIAAMPAAEVIAPAAEKKKSSVKAAGMKSILVSKNKMYITSFGKGNSAVLEYEVDKVDNNDYNKTQLSSKDNSNIELGNVNEVNITFSSRRGFESGVEINTSNPTHRSGESSPVRGDMLGLKSELEKRFFGKTFDDNIHIQLIYNILDIEKILAVYVTNIVYALNNMLGIKGSESYDDFMGYLSARNTYEVFTHPDKSNLSDKVKGNIKKSLSKFNDLLKTKRLGYFGLEEPKTKDTRVSQAYKKRVYHMLAIVGQIRQCVFHDKSGAKRFDLYSFINNIDPEYRDTLDYLVEERLKSINKDFIEGNKVNISLLIDMMKGYEADDIIRLYYDFIVLKSQKNLGFSIKKLREKMLDEYGFRFKDKQYDSVRSKMYKLMDFLLFCNYYRNDVVAGEALVRKLRFSMTDDEKEGIYADEAEKLWGKFRNDFENIADHMNGDVIKELGKADMDFDEKILDSEKKNASDLLYFSKMIYMLTYFLDGKEINDLLTTLISKFDNIKEFLKIMKSSAVNVECELTAGYKLFNDSQRITNELFIVKNIASMRKPAASAKLTMFRDALTILGIDDKITDDRISEILKLKEKGKGIHGLRNFITNNVIESSRFVYLIKYANAQKIREVAKNEKVVMFVLGGIPDTQIERYYKSCVEFPDMNSSLEAKRSELARMIKNISFDDFKNVKQQAKGRENVAKERAKAVIGLYLTVMYLLVKNLVNVNARYVIAIHCLERDFGLYKEIIPELASKNLKNDYRILSQTLCELCDKSPNLFLKKNKRLRKCVEVDINNADSSMTRKYRNCIAHLTVVRELKEYIGDIRTVDSYFSIYHYVMQRCITKRENDTKQEDKIKYEDDLLKNHGYTKDFVKALNSPFGYNIPRFKNLSIEQLFDRNEYLTEK

SEQ ID NO: 3724 - protein, 924 aa, Artificial
  Synthetic
MAKKNKMKPRELREAQKKARQFKAAEINNNAAPAIAAMPAAEVIAPVAEKKKSSVKAAGMKSILVIENKMYITSFGKGNSAVLEYEVDNNDYNKTQLSSKDNSNIELCGVNEVNITFSSKHGFESGVEINTSNPTHRSGESSPVRWDMLGLKSELEKRFFGKTFDDNIHIQLIYNILDIEKILAVYVTNIVYALNNMLGEGDESNYDFMGYLSTFNTYKVFTNPNGSTLSDDKKENIRKSLSKFNALLKTKRLGYFGLEEPKTKDTRVLEAYKKRVYHMLAIVGQIRQCVFHDLSEHSEYDLYSFIDNSKKVYRECRETLDYLVDERFDSINKGFIQGNKVNISLLIDMMKGYEADDIIRLYYDFIVLKSQKNLGFSIKKLREKILDEYGFRFKDKQYDSVRSKMYKLMDFLLFCNYYRNDIAAGESLVRKLRFSMTDDEKEGIYADEAAKLWGKFRNDFENIADHMNGDVIKELGKADMDFDEKILDSEKKNASDLLYFSKMIYMLTYFLDGKEINDLLTTLISKFDNIKEFLKIMKSSAIDVECELTAGYKLFNDSQRITNELFIVKNIASMRKPAASAKLTMFRDALTILGIDDKITDDRISEILKLKEKGKGIHGLRNFITNNVIESSRFVYLIKYANAQKIREVAKNEKVVMFVLGGIPDTQIERYYKSCVEFPDMNSSLEAKRSELARMIKNIRFDDFKNVKQQAKGRENVAKERAKAVIGLYLTVMYLLVKNLVNVNARYVIAIHCLERDFGLYKEIIPELASKNLKNDYRILSQTLCELCDNGDESPNLFLKKNKRLRKCVEVDINNADSSMTRKYRNCIAHLTVVRELKEYIGDIRTVDSYFSIYHYVMQRCITKREDDTKQEEKIKYEDDLLKNHGYTKDFVKALNSPFGYNIPRFKNLSIEQLFDRNEYLTEK

SEQ ID NO: 3725 - protein, 919 aa, Artificial
  Synthetic
MAKKNKMKPRELREAQKKARQLKAAEINNNAAPAIAAMPAAEVIAPAAEKKKSSVKAAGMKSILVSENKMYITSFGKGNSAVLEYEVDNNDYNQTQLSSEGSSNIELHGVNEVNITFSSKHGFGSGVEINTSNPTHRSGESSPVRWDMLGLKSELEKRFFGKTFDDNIHIQLIYNILDIEKILAVYVTNIVYALNNMLGVKGSESHDDFIGYLSTNNTYDVFIDPDNSSLSDDKKANVRKSLSKFNALLKTKRLGYFGLEEPKTKDTRVSEAYKKRVYHMLAIVGQIRQCVFHDKSGAKRFDLYSFINNIDHEYRETLDYLVDERFDSINKGFIQGNKVNISLLIDMMKGYEADDIIRLYYDFIVLKSQKNLGFSIKKLREKMLDEYGFRFKDKQYDSMRSKMYKLMDFLLFCNYYRNDVVAGEALVRKLRFSMTDDEKEGIYADEAAKLWGKFRNDFENIADHMNGDVIKELGKADMDFDEKILDSEKKNASDLLYFSKMIYMLTYFLDGKEINDLLTTLISKFDNIKEFLKIMKSSAVDVECELTAGYKLFNDSQRITNELFIVKNIASMRKPAASARLTMFRDALTILGIDDKITDDRISEILKLKEKGKGIHGLRNFITNNVIESSRFVYLIKYANAQKIREVAKNEKVVMFVLGGIPDTQIERYYKSCVEFPDMNSSLEAKRSELARMIKNISFDDFKNVKQQAKGRENVAKERAKAVIGLYLTVMYLLVKNLVNVNARYVIAIHCLERDFGLYKEIIPELASKNLKNDYRILSQMLCELCDKSPNLFLKKNERLRKCVEVDINNADSNMTRKYRNCIAHLTVVRELKEYIGDIRTVDSYFSIYHYVMQRCITKRENDTKQEEKIKYEDDLLKNHGYTKDFVKALNSPFGYNIPRFKNLSIEQLFDRNEYLTEK

SEQ ID NO: 3726 - protein, 929 aa, Artificial
  Synthetic
MAKKNKMKPRELREAQKKARQLKAAEINNNAAPAIAAMPAAEVIAPAAEKKKSSVKAAGMKSILVSENKMYITSFGKGNSAVLEYEVDNNDYNQTQLSSKDNSNIQLGGVNEVNITFSSKHGFESGVEINTSNPTHRSGESSPVRGDMLGLKSELEKRFFGKTFDDNIHIQLIYNILDIEKILAVYVTNIVYALNNMLGIKDSESYDDFMGYLSARNTYEVFTHPDKSNLSDKVKGNINKVKCNIKKSFSTFNDLLKTKRLGYFGLEEPKTKDTRVSQAYKKRVYHMLAIVGQIRQSVFHDKSSKLDEDLYSFIDIIDSEYRETLDYLVDERFDSINKGFIQGNKVNISLLIDMMKGYEADDIIRLYYDFIVLKSQKNLGFSIKKLREKILDEYGFRFKDKQYDSVRSKMYKLMDFLLFCNYYRNDIAAGESLVRKLRFSMTDDEKEGIYADEAAKLWGKFRNDFENIADHMNGDVIKELGKADMDFDEKILDSEKKNASDLLYFSKMIYMLTYFLDGKEINDLLTTLISKFDNIKEFLKIMKSSAVDVECELTAGYKLFNDSQRITNELFIVKNIASMRKPAASAKLTMFRDALTILGIDDKITDDRISEILKLKEKGKGIHGLRNFITNNVIESSRFVYLIKYANAQKIREVAENEKVVMFVLGGIPDTQIERYYKSCVEFPDMNSSLEAKRSELARMIKNISFDDFKNVKQQAKGRENVAKERAKAVIGLYLTVMYLLVKNLVNVNARYVIAIHCLERDFGLYKEIIPELASKNLKNDYRILSQTLCELCDDRDESPNLFLKKNRRLRKCVEVDINNADSSMTRKYRNCIAHLTVVRELKEYIGDIRTVDSYFSIYHYVMQRCITKREDDTKQEEKIKYEDDLLKNHGYTKDFVKALNSPFGYNIPRFKNLSIEQLFDRNEYLTEK

SEQ ID NO: 3727 - protein, 923 aa, Artificial
  Synthetic
MAKKNKMKPRELREAQKKARQLKAVEINNNAVPEIAAMPAAEVIAPVAEKKKSSVKAAGMKSILVSENKMYIISFGKGNSAVLEYEVDNNDYNKTQLSSKNSSNIELRGVNEVNITFSSKHGFESGVEINTSNPTHRSGESSPVRWDMLGLKSELEKRFFGKTFDDNIHIQLIYNILDIEKILAVYVTNIVYALNNMLGIKDSESYDDFMGYLSARNTYKVFTHPDKSNLSDKVKGNIKKSFSTFNDLLKTKRLGYFGLEEPKTKDTRVSQAYKKRVYHMLAIVGQIRQCVFHDKSSKLHEDLYSFINNIDPEYRDTLDYLVEERLKSINKDFIEGNKVNISLLIDMMKDDYEADDIIRLYYDFIVLKSQKNLGFSIKKLREKMLDEYGFRFKDKQYDSVRSKMYKLMDFLLFCNYYRNDVAAGEALVRKLRFSMTDDEKEGIYADEAAKLWGKFRNDFENIADHMNGDVIKELGKADMDFDEKILDSEKKNASDLLYFSKMIYMLTYFLDGKEINDLLTTLISKFDNIKEFLKIMKSSAVDVECELTAGYKLFNDSQRITNELFIVKNIASMRKPAASAKLTMFRDALTILGIDDKITDDRISEILKLKEKGKGIHGLRNFITNNVIESSRFVYLIKYANAQKIREVAKNEKVVMFVLGGIPDTQIERYYKSCVEFPDMNSSLEAKRSELARMIKNISFDDFKNVKQQAKGRENVAKERAKAVIGLYLTVMYLLVKNLVNVNARYVIAIHCLERDFGLYKEIIPELASKNLKNDYRILSQTLCELCDDRDESPNLFLKKNRRLRKCVEVDINNADSSMTRKYRNCIAHITVVRELKEYIGDIRTVDSYFSIYHYVMQRCITKREDDTKQEEKIKYEDDLLKNHGYTKDFVKALNSPFGYNIPRFKNLSIEQLFDRNEYLTEK

SEQ ID NO: 3728 - protein, 919 aa, Artificial; identical to SEQ ID NO: 2894
  Synthetic

SEQ ID NO: 3729 - protein, 926 aa, Artificial; identical to SEQ ID NO: 3302
  Synthetic

SEQ ID NO: 3730 - protein, 919 aa, Artificial
  Synthetic
MAKKNKMKPRELREAQKKARQLKAAEINNNAAPAIAAMPAAEAAAPAAEKKKSSVKAAGMKSILVSENKMYITSFGKGNSAVLEYEVDNNDYNKTQLSSKGSSNIELHGVNEVNITFSSKHGFESGVEINTSNPTHRSGESSPVRGDMLGLKSELEKRFFGKTFDDNIHIQLIYNILDIEKILAVYVTNIVYALNNMLGVKGSESHDDFIGYLSTNNTYDVFIDPDNSSLSDDKKANVRKSLSKFNVLLKTKRLGYFGLEEPKTKDNRVSEAYKKRVYHMLAIVGQIRQCVFHDKSGAKRFDLYSFINNIDPEYRDTLDYLVEERLKSINKDFIQGNKVNISLLIDMMKGYEADDIIRLYYDFIVLKSQKNLGFSIKKLREKMLEEYGFRFKDKQYDSVRSKMYKLMDFLLFCNYYRNDIAAGEALVRKLRFSMTDDEKEGLYADEAAKLWGKFRNDFENIADHMNGDVIKELGKADMDFDEKILDSEKKNASDLLYFSKMIYMLTYFLDGKEINDLLTTLISKFDNIKEFLKIMKSSAVNVECELTAGYKLFNDSQRITNELFIVKNIASMRKPAASAKLTMFRDALTILGIDDNITDDRISEILKLKEKGKGIHGLRNFITNNVIESSRFVYLIKYANAQKIREVAENEKVVMFVLGGIPDTQIERYYKSCVEFPDMNSSLEVKRSELARMIKNISFDDFKNVKQQAKGRENVAKERAKAVIGLYLTVMYLLVKNLVNVNARYVIAIHCLERDFGLYKEIIPELASKNLKNDYRILSQTLCELCDKSPNLFLKKNERLRKCVEVDINNADSSMTRKYRNCIAHLTVVRELKEYIGDIRTVDSYFSIYHYVMQRCITKRENDTKQEEKIKYEDDLLKNHGYTKDFVKALNSPFGYNIPRFKNLSIEQLFDRNEYLTEK

SEQ ID NO: 3731 - protein, 954 aa, Artificial; identical to SEQ ID NO: 3206
  Synthetic

SEQ ID NO: 3732 - protein, 929 aa, Artificial
  Synthetic
MAKKNKMKPRELREAQKKARQLKAAEINNNAAPAIAAMPAAEVIAPAAEKKKSSVKAAGMKSILVSENKMYITSFGKGNSAVLEYEVDNNDYNQTQLSSKDNSNIQLGGVNEVNITFSSKHGFESGVEINTSNPTHRSGESSPVRGDMLGLKSELEKRFFGKTFDDNIHIQLIYNILDIEKILAVYVTNIVYALNNMLGIKDSESYDDFMGYLSARNTYEVFTHPDKSNLSDKVKGNINKVKGNIKKSLSKFNDLLKTKRLGYFGLEEPKTKDKRVSEAYKKRVYHMLAIVGQIRQSVFHDKSNELDEYLYSFIDIIDSEYRDTLDYLVDERFDSINKGFVQGNKVNISLLIDMMKGYEADDIIRLYYDFIVLKSQKNLGFSIKKLREKMLDEYGFRFKDKQYDSVRSKMYKLMDFLLFCNYYRNDVVAGEVLVRKLRFSMTDDEKEGIYADEAAKLWGKFRNDFENIADHMNGDVIKELGKADMDFDEKIIDSEKKNASDLLYFSKMIYMLTYFLDGKEINDLLTTLISKFDNIKEFLKIMKSSAVDVECELTAGYKLFNDSQRITNELFIVKNIASMRKPAASAKLTMFRDALTILGIDDNITDDRISEILKLKEKGKGIHGLRNFITNNVIESSRFVYLIKYANAQKIREVAKNEKVVMFVLGGIPDTQIERYYKSCVEFPDMNSSLEAKRSELARMIKNIRFDDFKNVKQQAKGRENVAKERAKAVIGLYLTVMYLLVKNLVNVNARYVIAIHCLERDFGLYKEIIPELASKNLKNDYRILSQTLCELCDNGDESPNLFLKKNKRLRKCVEVDINNADSNMTRKYRNCIAHLTVVRELKEYIGDIRTVDSYFSIYHYVMQRCITKRENDTKQEEKIKYEDDLLKNHGYTKDFVKALNSPFGYNIPRFKNLSIEQLFDRNEYLTEK

SEQ ID NO: 3733 - protein, 924 aa, Artificial; identical to SEQ ID NO: 3682
  Synthetic

SEQ ID NO: 3734 - protein, 928 aa, Artificial; identical to SEQ ID NO: 2950
  Synthetic

SEQ ID NO: 3735 - protein, 929 aa, Artificial; identical to SEQ ID NO: 3726
  Synthetic

SEQ ID NO: 3736 - protein, 975 aa, Artificial; identical to SEQ ID NO: 3050
  Synthetic

SEQ ID NO: 3737 - protein, 954 aa, Artificial; identical to SEQ ID NO: 2989
  Synthetic

SEQ ID NO: 3738 - protein, 924 aa, Artificial; identical to SEQ ID NO: 3682
  Synthetic

SEQ ID NO: 3739 - protein, 932 aa, Artificial
  Synthetic
MAKKNKMKPRELREAQKKARQLKAAEINNNAVPAIAAMPAAEVIAPAAEKKKSSVKAAGMKSILVSENKMYITSFGKGNSAVLEYEVDNNDYNQTQLSSDGSSNIELRGVNEVNITFSSKHGFESGVEINTSNPTHRSGESSPVRWDMLGLKSELEKRFFGKTFDDNIHIQLIYNILDIEKILAVYVTNIVYALNNMLGEGDDESHDDFMGYLSAKNTYDVFTDPDESDLSKNIKGNIKKSLSKFNDLLKTKRLGYFGLEEPKTKDTNALEAYKKRVYHMLAIVGQIRQSVFHDKSSKLDEDLYSFIDIIDSEYRETLDYLVDERFDSINKGFIQGNKVNISLLIDMMKGYEADDIIRLYYDFIVLKSQKNLGFSIKKLREKMLEEYGYRFKDKQYDSVRSKMYKLMDFLLFCNYYRNDVVAGEALVRKLRFSMTDDEKEGIYADEAAKLWGKFRNDFENIADHMNGDVIKELGKADMDFDEKILDSEKKNASDLLYFSKMIYMLTYFLDGKEINDLLTTLISKFDNIKEFLKIMKSSAVDVECELTAGYKLFNDSQRITNELFIVKNIASMRKPAASAKLTMFRDALTILGIDDKITDDRISEILKLKEKGKGIHGLRNFITNNVIESSRFVYLIKYANAQKIREVAENEKVVMFVLGGIPDTQIERYYKSCVEFPDMNSPLEAKRSELARMIKNIRFDDFKNVKQQAKGRENVAKERAKAVIGLYLTVMYLLVKNLVNVNARYVIAIHCLERDFGLYKEIIPELASKNLKNDYRILSQTLCELCDKSPNLFLKKNERRRKCVEVDINNADSSMTRKYRNCIAHLTVVRELKEYIGDIRTVDSYFSIYHYVMQRCITKREDDIKQEEKIIFPKETVIGALTNYVSSPNEKFQPMNANYGILPELEGKKISDKKLKYGKLSDRALEKLFLIE

SEQ ID NO: 3740 - protein, 929 aa, Artificial
  Synthetic
MAKKNKMKPRELREAQKKARQLKAAEINNNAAPAIAAMPAAQVIAPAAEKKKSSVKAAGMKSILVSENKMYITSFGKGNSAVLEYEVDKVDNNNYNKTQLSSKDNSNIELGDVNEVNITFSSKHGFESGVEINTSNPTHRSGESSPVRWDMLGLKSELEKRFFGKTFDDNIHIQLIYNILDIEKILAVYVTNIVYALNNMLGIKGSESYDDFMGYLSARNTYEVFTHPDKSNLSDKVKGNIKKSFSTFNDLLKTKRLGYFGLEEPKTKDTRVSEAYKKRVYHMLAIVGQIRQCVFHDLSEHSEYDLYSFIDNSKKVYRECRETLNYLVDERFDSINKGFIQGNKVNISLLIDMMKDDYEADDIIHLYYDFIVLKSQKNLGFSIKKLREKMLDEYGFRFKDKQYDSVRSKMYKLMDFLLFCNYYRNDVVAGEALVRKLRFSMTDDEKEGIYADEAEKLWGKFRNDFENIADHMNGDVIKELGKADMDFDEKILDSEKKNASDLLYFSKMIYMLTYFLDGKEINDLLTTLISKFDNIKEFLKIMKSSAVDVECELTAGYRLFNDSQRITNELFIVKNIASMRKPAASAKLTMFRDALTILGIDDKITDDRISEILKLKEKGKGIHGLRNFITNNVIESSRFVYLIKYANAQKIREVAKNEKVVMFVLGGIPDTQIERYYKSCVEFPDMNSSLEAKRSELARMIKNIRFDDFKNVKQQAKGRENVAKERAKAVIGLYLTVMYLLVKNLVNVNARYVIAIHCLERDFGLYKEIIPELASKNLKNDYRILSQTLCELCDDRDESPNLFLKKNKRLRKCVEVDINNADSSMTRKYRNCIAHLTVVRELKEYIGDIRTVDSYFSIYHYVMQRCITKREDDKKQEEKIKYEDDLLKNHGYTKDFVKALNSPFGYNIPRFKNLSIEQLFDRNEYLTEK

SEQ ID NO: 3741 - protein, 926 aa, Artificial
  Synthetic
MAKKNKMKPRELREAQKKARQLKAAEINNNAAPAIAAMPAAQVIAPAAEKKKASVKAAGMKSILVSENKMYITSFGKGNSAVLEYEVDKVDNNNYNKTQLSSKDNSNIELGDVNEVNITFSSKHGFESGVEINTSNPTHRSGESSPVRWDMLGLKSELEKRFFGKTFDDNIHIQLIYNILDIEKILAVYVTNIVYALNNMLGIKGSESYDDFMGYLSARNTYEVFTHPDKSNLSDKVKGNIKKSFSTFNDLLKTKRLGYFGLEEPKTKDTRVSEAYKKRVYHMLAIVGQIRQCVFHDLSEHSEYDLYSFIDNSKKVYRECRETLNYLVDERFDSINKGFIQGNKVNISLLIDMMKDDYEADDIIHLYYDFIVLKSQKNLGFSIKKLREKMLDEYGFRFKDKQYDSVRSKMYKLMDFLLFCNYYRNDVVAGEALVRKLRFSMTDDEKEGIYADEAEKLWGKFRNDFENIADHMNGDVIKELGKADMDFDEKILDSEKKNASDLLYFSKMIYMLTYFLDGKEINDLLTTLISKFDNIKEFLKIMKSSAVDVECELTAGYRLFNDSQRITNELFIVKNIASMRKPAASAKLTMFRDALTILGIDDKITDDRISEILKLKEKGKGIHGLRNFITNNVIESSRFVYLIKYANAQKIREVAKNEKVVMFVLGGIPDTQIERYYKSCVEFPDMNSSLEAKRSELARMIKNISFDDFKNVKQQAKGRENVAKERAKAVIGLYLTVMYLLVKNLVNVNARYVIAIHCLERDFGLYKEIIPELASKNLKNDYRILSQTLCELCDESPNLFLKKNERLRKCVEVDINNADSSMTRKYRNCIAHLTVVRELKEYIGDIRTVDSYFSIYHYVMQRCITKREDDKKQEEKIKFEDDLLKNHGYTKDFVKALNSPFGYNIPRFKNLSIEQLFDRNEYLTEK

SEQ ID NO: 3742 - protein, 941 aa, Artificial
  Synthetic
MEKMEKIRKSENRKSRAKAAGLKSTFVVADKLALTSFGKGNKANLEKIIKNEEVEEINKPPKFDAKVEEKQIHIIGKTIKDGITEKPAGMRNDLIGAKQELEKMFFGKTFDDNIHIQLIYNILDIKKIFSVYANNIVYAVDHLDRTAKDKDVDYLGTLFTGNTYQHLLSVNPGDSKYKLKKDALKRFNTYYESAKSHFIYFGDVFYRKPTYEEASAMKEKGQGKKAQKPLVKTKAEVHQILRFLGTIRQCLVHKTDAKRDIIFNPDSMSNEFKTLIDSYYNGRVKALNDDFIKHNGSSSLPILFHYYGATEENRRAELTEGFYDFIIKRENKNMGFSLKKIREKMLEKQEASFIKEDGYNSVRHKLYILMDFIIYKTYAADIELQESIVATLRSNLTDEDKEATYEIQAKALWNKIGDDIVKKLMPLIDGNKIKGYKDEKIEIKKEWLKDVMISTENASYMTKMVYFMTLFLDGKEINEFLTVLINKFENIQGFFDVLGHNALAEKIEEPKEISKRPLKGFAELAAFTQKSTDVGLTEHLRLFENSVNISDEIRVTKNFARMERTIPDINRAQYADAAKVLGVIGAGEQDIDEYIEDKILGNPKRRTEGDKNLRNFLANNVVESSRFRHIVRYGDVTKVREIMQHKEVIRFVLKKIYENVPTQIDRYIFSLEKDKTFDTPEKKIDFLTEQINQISFEKFFGVQQKTKANSAENVDKEKKKALIGLYLTIAYLLTKNLVNINARYLMAVYNLEKDFSLLGFGDLQKMNNKDKSNLPDYAMITKDFLNKDMLKPKNAKYMHTNLEDYSNFLFNKYRNSIAHLAVLEEASKYISEKGKITSYFELYHYIMQRSLQKEYELAKEHRYDMDDMYQNEEIPRKFNMAKKYHTYCKDLVKILNVPFGYNLGRFKAISIEPLFDRNHMGESLKADLAQSGSNKEKRNDE

SEQ ID NO: 3743 - protein, 942 aa, Artificial
  Synthetic
  misc_feature (327)..(349): Xaa can be any naturally occurring amino acid
MAKKNKMKPRELREAQKKARQLKAAEINNNAVPAIAAMPAAEAAAPAAEKKKSSVKAAGMKSILVSENKMYITSFGKGNSAVLEYEVDNNDYNKTQLSSKDNSNIELCDVDEVNITFSSKHGFESGVKINTSNPTHRSGESSSVRGDMLGLKSELEKRFFGKTFDDNIHIQLIYNILDIEKILAVYVTNIVYALNNMLGLENESNNDFMGYLSAKNTYDVFTDPDESDLSKNIKGNIKKSLSKFNDLLKTKRLGYFGLEEPKTKDKRVSEAYKKRVYHMLAIVGQIRQSVFHDKSNELDEYLYSFIDIIDSEYRETLDYLIDERFDXXXXXXXXXXXXXXXXXXXXXXXNKGFIQGNKVNISLLIDMMKGYEADDIIRLYYDFIVLKSQKNLGFSIKKLREKMLDEYGFRFKDKQYDSVRSKMYKLMDFLLFCNYYRNDVAAGEALVRKLRFSMTDDEKEGIYADEAAKLWGKFRNDFENIADHMNGDVIKELGKADMDFDEKIIDSEKKNASDLLYFSKMIYMLTYFLDGKEINDLLTTLISKFDNIKEFLKIMKSSAVNVECELTAGYKLFNDSQRITNELFIVKNIASMRKPAASAKLTMFRDALTILGIDDKITDDRISEILKLKEKGKGIHGLRNFITNNVIESSRFVYLIKYANAQKIREVAENEKVVMFVLGGIPDTQIERYYKSCVEFPDMNSSLEVKRSELARMIKNIRFDDFKNVKQQAKGRENVAKERAKAVIGLYLTVMYLLVKNLVNVNARYVIAIHCLERDFGLYKEIIPELASKNLKNDYRILSQTLCELCDNGDESPNLFLKKNRRLRKCVEVDINNADSSMTRKYRNCIAHLTVVRELKEYIGDIRTVDSYFSIYHYVMQRCITKREDDTKQEDKIKYEDDLLKNHGYTKDFVKALNSPFGYNIPRFKNLSIEQLFDRNEYLTEK

SEQ ID NO: 3744 - protein, 929 aa, Artificial; identical to SEQ ID NO: 3726
  Synthetic

SEQ ID NO: 3745 - protein, 919 aa, Artificial; identical to SEQ ID NO: 3553
  Synthetic

SEQ ID NO: 3746 - protein, 919 aa, Artificial
  Synthetic
MAKKNKMKPRELREAQKKARQLKAAEINNNAAPAIAAMPAAEVIAPVAEKKKSSVKAAGMKSILVSENKMYITSFGKGNSAVLEYEVDNNDYNKTQLSSKDNSNIELGDVNEVNITFSSKHGFGSGVEINTSNPTHRSGESSSVRGDMLGLKSELEKRFFGKTFDDNIHIQLIYNILDIEKILAVYVTNIVYALNNMLGVKGSESYDDFMGYLSAQNTYYIFTHPDKSNLSDKVKGNIKKSLSKFNDLLKTKRLGYFGLEEPKTKDKRVSEAYKKRVYHMLAIVGQIRQSVFHDKSNELDEYLYSFIDIIDSEYRDTLDYLVDERFDSINKGFVQGNKVNISLLIDMMKGYEADDIIRLYYDFIVLKSQKNLGFSIKKLREKMLDEYGFRFKDKQYDSVRSKMYKLMDFLLFCNYYRNDIAAGEALVRKLRFSMTDDEKEGLYADEAAKLWGKFRNDFENIADHMNGDVIKELGKADMDFDEKILDSEKKNASDLLYFSKMIYMLTYFLDGKEINDLLTTLISKFDNIKEFLKIMKSSAVDVECELTAGYKLFNDSQRITNELFIVKNIASMRKPAASAKLTMFRDALTILGIDDKITDDRISEILKLKEKGKGIHGLRNFITNNVIESSRFVYLIKYANAQKIREVAKNEKVVMFVLGGIPDTQIERYYKSCVEFPDMNSSLEVKRSELARMIKNISFDDFKNVKQQAKGRENVAKERAKAVIGLYLTVMYLLVKNLVNVNARYVIAIHCLERDFGLYKEIIPELASKNLKNDYRILSQTLCELCDKSPNLFLKKNERLRKCVEVDINNADSSMTRKYRNCIAHLTVVRELKEYIGDIRTVDSYFSIYHYVMQRCITKRENDTKQEEKIKYEDDLLKNHGYTKDFVKALNSPFGYNIPRFKNLSIEQLFDRNEYLTEK

SEQ ID NO: 3747 - protein, 928 aa, Artificial
  Synthetic
MAKKNKMKPRELREAQKKARQLKAAEINNNAVPAIAAMPAAEVIAPAAEKKKSSVKAAGMKSILVSENKMYITSFGKGNSAVLEYEVDKVDNNNYNKTQLSSKDNSNIELGDVNEVNITFSSKRGNESGVEINTSNPTHRSGESSPVRWDMLGLKSELEKRFFGKTFDDNIHIQLIYNILDIEKILAVYVTNIVYALNNMLGIKKSESYDDFMGYLSARNTYEVFTHPDKSNLSDKAKGNIKKSFSTFNDLLKTKRLGYFGLEEPKTKDTRVSQAYKKRVYHMLAIVGQIRQCVFHDLSEHSEYDLYSFIDNSKKVYRECRETLDYLVDERFDSINKGFIQGNKVNISLLIDMMKGYEADDIIRLYYDFIVLKSQKNLGFSIKKLREKMLDEYGFRFKDKQYDSVRSKMYKLMDFLLFCNYYRNDVVAGEALVRKLRFSMTDDEKEGIYADEAAKLWGKFRNDFENIADHMNGDVIKELGKADMDFDEKILDSEKKNASDLLYFSKMIYMLTYFLDGKEINDLLTTLISKFDNIKEFLKIMKSSAVDVECELTAGYKLFNDSQRITNELFIVKNIASMRKPAASAKLTMFRDALTILGIDDNITDDRISEILKLKEKGKGIHGLRNFITNNVIESSRFVYLIKYANAQKIREVAKNEKVVMFVLGGIPDTQIERYYKSCVEFPDMNSSLEVKRSELARMIKNIRFDDFKNVKQQAKGRENVAKERAKAVIGLYLTVMYLLVKNLVNVNARYVIAIHCLERDFGLYKEIIPELASKNLKNDYRILSQTLCELCDDRDESPNLFLKKNKRLRKCVEVDINNADSSMTRKYRNCIAHLTVVRELKEYIGDIRTVDSYFSIYHYVMQRCITKREDDTKQEDKIKYEDDLLKNHGYTKDFVKALNSPFGYNIPRFKNLSIEQLFDRNEYLTEK

SEQ ID NO: 3748 - protein, 919 aa, Artificial; identical to SEQ ID NO: 3710
  Synthetic

SEQ ID NO: 3749 - protein, 954 aa, Artificial; identical to SEQ ID NO: 3516
  Synthetic

SEQ ID NO: 3750 - protein, 926 aa, Artificial; identical to SEQ ID NO: 3079
  Synthetic

SEQ ID NO: 3751 - protein, 954 aa, Artificial
  Synthetic
MGKKIHARDLREQRKTDRTEKFADQNKKREAERAVQKKDAAVSVKSVSSVSSKKDNVTKSMAKAAGVKSVFAVGNTVYMTSFGRGNDAVLEQKIVDTSHEPLNIDDPAYQLNVVTMNGYSVTGHRGETVSAVTDNPLRRFNGGKKDEPEQSVPTDMLCLKPTLEKKFFGKEFNDNIHIQLIYNILDIEKILAVYSTNAIYALNNMSADENIENSDFFMKRTTDETFDDFEKKKESTNSREKADFDAFEKFIANYRLAYFADAFYVNKKNPKGKARNVLREDKELYSVLTLIGKLRHWCVHSEEGRAEFWLYKLDELKDDFKNVLDVVYNRPVEEINNRFIENNKVNIQILGSVYKNTDIAELVRSYYEFLITKKYKNMGFSIKKLRESMLEGKGYADKEYDSVRNKLYQMTDFILYTGYINEDSDRADDLVNTLRSSLKEDDKTTVYCKEADYLWKKYRESIREVADALDVDNIKNLSGSNIEIRDNELRKCFISYADSVSEFTKLIYLLTRFLSGKEINDLVTTLINKFDNIRSFLEIMDELGLDRTFTAEYSFFEDSTKYLAELVELNSFVKSCSFDINAKRTMYRDALDILGIKSGKTEEDIEKMIDNILQIDANGDKKLKKNNGLRNFIASNVIDSNRFKYLVRYGNPKKIRETAKCKPAVRFVLNEIPDAQIERYYEACCPKNTALCSANKRREKLADMIAEIKFENFSDAGNYQKANVTSKTHEAEIKRKNQAIIRLYLTVMYIMLKNLVNVNARYVIAFHCVERDTKLYAESGLEVGNIEKNKTNLTMAVMGVKLENGIIKTEFDKSLAENAANRYLRNARWYKLILDNLKKSERAVVNEFRNTVCHLNAIRNININIDGIKEVENYFALYHYLIQKHLENRFADKKVERDTGDFISKLEEHKTYCKDFVKAYCTPFGYNLVRYKNLTIDGLFDKNYPGKDDSDKQK

SEQ ID NO: 3752 - protein, 975 aa, Artificial; identical to SEQ ID NO: 2938
  Synthetic

SEQ ID NO: 3753 - protein, 923 aa, Artificial; identical to SEQ ID NO: 2862
  Synthetic

SEQ ID NO: 3754 - protein, 922 aa, Artificial; identical to SEQ ID NO: 3374
  Synthetic

SEQ ID NO: 3755 - protein, 928 aa, Artificial; identical to SEQ ID NO: 2950
  Synthetic

SEQ ID NO: 3756 - protein, 984 aa, Artificial; identical to SEQ ID NO: 2827
  Synthetic

SEQ ID NO: 3757 - protein, 931 aa, Artificial
  Synthetic
MEGRDMTETKPKREDIAKTPAAKSRSKEAGLKSTFAVNGSVLLTSFGRGNDAVPEKLITEKAVSEINTVKPRFSVEKPATSYSSSFGIKSHISATADNPLAGRAPVGEDAIHAKEVLEQRVFGKTFSDDNIHIQLIYNILDIRKILSTYANNVVFTINSMRRLDEYDREQDYLGYLYTGNSYERLLDIADKYAVDGEDWRNTAAGISNDFEKKQFQTINGFWDLLDMIEPYMCYFSEAFFCETTVKDPDSGRIVPCLEQRSDGDIYNILRILSIVRQTCMHDNASMRTVMFTLGQNSVRDRKNGFDELAELLDYLYDEKIDIVNRDFLRNQKNNIELLSRIYGSSADSPERDRLVQNFYDFRVLSQDKNLGFSIKKLREKLLDSPALSVVRSKKYDTMRSKIYSLIDFMIYRKFSENHVAVDDFVEELRSLLTEDEKESAYSRWAETLINDGFAQEILVKLLPQTDPAVIGKIKGKKLLNDSIAGIKLKKDASFFTKIINVLCMFQDGKEINELVSSLVNKFANIQSFVDVMRSQGIDSGFTADYAMFAESGRISRELHILKGIARMQHSIAGLGDVKIYGSDDKFHGVSRRVYTDAAYILGFGERSEDNDGYVDDYVSSKLLGGADKNLRNFITNNVIKNRRFLYTVRYMNPKRAKKLVQNDALVVLALSGIPETQIDRYYKSCIEKRSFNPDLNEKIAALSEMITTLKIDDFEDVKQNPEKNANYEAKKNQRISKERYKACIGLYLTVLYLICKNLVKINARYSIAIGCLERDTQLHGVDFKGAAYMTRDVFIAKGWINPKKPTVKSIKEQYAFLTPYIFTTYRNMIAHLAAVTNAYKYIPQMDRFKSWFHLYHTVIQHSLIQQYEYDRDYGRKGAPVVSERVLQLLEQCREHSNYSRDLLHILNLPFGYNLPRYLNLSSEKYFDANAI

SEQ ID NO: 3758 - protein, 923 aa, Artificial; identical to SEQ ID NO: 2924
  Synthetic

SEQ ID NO: 3759 - protein, 922 aa, Artificial; identical to SEQ ID NO: 2849
  Synthetic

SEQ ID NO: 3760 - protein, 954 aa, Artificial; identical to SEQ ID NO: 2846
  Synthetic

SEQ ID NO: 3761 - protein, 922 aa, Artificial; identical to SEQ ID NO: 2840
  Synthetic

SEQ ID NO: 3762 - protein, 954 aa, Artificial
  Synthetic
MGKKIHARDLREQRKTDRTEKFADQNKKREAERAVQKKDAAVSVKSVSSVSSKKDNVTKSMAKAAGVKSVFAVGNTVYMTSFGRGNDAVLEQKIVDTSHEPLNIDDPAYQLNVVTMNGYSVTGHRGETVSAVTDNPLRRFNGGKKDEPEQSVPTDMLCLKPTLEKKFFGKEFDDNIHIQLIYNILDIEKILAVYSTNAIYALNNMSADENIENSDFFMKRTTDETFDDFEKKKESTNSREKADFDAFEKFIGNYRLAYFADAFYVNKKNPKGKARNVLREDKELYSVLTLIGKLRHWCVHSEEGRAEFWLYKLDELKDDFKNVLDVVYNRPVEEINNRFIENNKVNIQILGSVYKNTDIAELVRSYYEFLITKKYKNMGFSIKKLRESMLEGKGYADKEYDSVRNKLYQMTDFILYTGYINEDSDRADDLVNTLRSSLKEDDKTTVYCKEADYLWKKYRESIREVADALDGDNIKRLSKSNIEIQEDKLRKCFISYADSVSEFTKLIYLLTRFLSGKEINDLVTTLINKFDNIRSFLEIMDELGLDRTFTAEYSFFEDSTKYLAELVELNSFVKSCSFDINAKRTMYRDALDILGIKSGKTEEDIEKMIDNILQIDANGDKKLKKNNGLRNFIASNVIDSNRFKYLVRYGNPKKIRETAKCKPAVRFVLNEIPDAQIERYYEACCPENTALCSANKKREKLADMIAEIEFENFSDAGNYQKANVTSKTHEAEIKRKNQSIIRLYLTVMYIMLKNLVNVNARYVIAFHCVERDTKLYAESGLEVGNIEKNKTNLTMAVMGVKLENGIIKTEFDKSFAENAANRYLRNARWYKLILDNLKKSERAVVNEFRNTVCHLNAIRNININIDGIKEVENYFALYHYLIQKHLENRFADKKVERDTGDFISKLEEHKTYCKDFVKAYCTPFGYNLVRYKNLTIDGLFDKNYPGKDDSDKQK

SEQ ID NO: 3763 - protein, 925 aa, Artificial
  Synthetic
MAKKNKMKPRELREAQKKARQFKAAEINNNAAPAIAAMPAAEVIAPVAEKKKSSVKAAGMKSILVSENKMYITSFGKGNSAVLEYEVDNNDYNKTQLSSKDNSNIELCGVNEVNITFSSKHGFESGVEINTSNPTHRSGESSPVRWDMLGLKSELEKRFFGKTFDDNIHIQLIYNILDIEKILAVYVTNIVYALNNMLGEGDESNYDFMGYLSTFNTYKVFTNPNGSTLSDDKKENIRKSLSKFNALLKTKRLGYFGLEEPKTKDTRVLEAYKKRVYHMLAIVGQIRQCVFHDLSEHSEYDLYSFIDNSKKVYRECRETLDYLVDERFDSINKGFIQGNKVNISLLIDMMKGYEADDIIRLYYDFIVLKSQKNLGFSIKKLREKILDEYGFRFKDKQYDSVRSKMYKLMDFLLFCNYYRNDIAAGESLVRKLRFSMTDDEKEGIYADEAAKLWGKFRNDFENIADHMNGDVIKELGKADMDFDEKILDSEKKNASNRFILFSTMIYMLTYFLDGKEINDLLTTLISKFDNIKEFLKIMKSSAIDVECELTAGYKLFNDSQRITNELFIVKNIASMRKPAASAKLTMFRDALTILGIDDKITDDRISEILKLKEKGKGIHGLRNFITNNVIESSRFVYLIKYANAQKIREVAKNEKVVMFVLGGIPDTQIERYYKSCVEFPDMNSSLEAKRSELARMIKNIRFDDFKNVKQQAKGRENVAKERAKAVIGLYLTVMYLLVKNLVNVNARYVIAIHCLERDFGLYKEIIPELASKNLKNDYRILSQTLCELCDNGDESPNLFLKKNKRLRKCVEVDINNADSSMTRKYRNCIAHLTVVRELKEYIGDIRTVDSYFSIYHYVMQRCITKREDDTKQEEKIKYEDDLLKNHGYTKDFVKALNSPFGYNIPRFKNLSIEQLFDRNEYLTEK

SEQ ID NO: 3764 - protein, 929 aa, Artificial
  Synthetic
MLLCAIMQASTKKDRKGGVRMEREVKKPPKKSLAKAAGLKSTFVISPQEKELAMTAFGRGNDALLQKRIVDGVVRDVAGEKQQFQVQRQDESRFRLQNSRLADRTVTADDPLHRAEAPHRQPLGAGMDQLRRKAVLEQKYFGRTFDDNIHIQLIYNILDIHKMLAVPANHIVHTLNLLGGYGETDFVGMLPAGLPYDKLRTPDAGDTRRNVKRDVKADIAAYAKRPQLAYLGAAFYDVTPGKSKRDAARSRVKREQDVYTILSLMSLLRQFCAHDSVRIWGQNTPAALYHLQALPQDMKDLLDDGWRRALGGVNNHFLDTNKVNLLTLFEYYGADAKQERVALTQDFYRFVVLKEQKNMGFSLRRLREELLKLPDAAYLTGQKYDSVRQKLYMLLDFLLCRLYAQERADRCEELVSALRCALSNEEKDAVYQVEAAALWQALGDTLRRKLLPLLKGKKLQDKDKKTLDELGLSRDVLDGVLFRPAQQGSRANADYFCRLMHLSTWFMDGKEINTLLTTLISKLENIDSLRNVLESMGLSCSFVPAYAMFDHSRYIAGQLRVVNNIARMRKPAISAKREMYRAAVVLLGVDSPEAAAAITDDLLQIDPETGKVRPRGDSARDTGLRNFIANNVVESRRFTYLLRYMTPEQARVLAQNEKLIAFVLSTVPDTQLERYCRTCGQEDITGRPAQIRYLTTQIMGVRYESFTDVEQRGRGDNPKKERYKALIGLYLTVLYLAVKNMVNCNARYVIAFYCRDRDTALYQKEVCWYDLEEDKKSGKQRQVEDYTALTRYFVSQGYLNRHACGYLRSNMNGIGNGLLTAYRNAVDHLNVIPPLGSLCRDIGRVDSYFALYHYAVQQYLNGRYYRKTPREQELFAAMAQHRTWCSDLVKALNTPFGYNLARYKNLSIDGLFDREGDHVVREDGEKPAE

SEQ ID NO: 3765 - protein, 984 aa, Artificial; identical to SEQ ID NO: 2979
  Synthetic

SEQ ID NO: 3766 - protein, 1015 aa, Artificial
  Synthetic
MKKKNIRATREALKAQKIKKSQENEALKKQKLADEAAQKRREELEKKNLAQWEETSAEGRRSRVKAVGVKSVFVVGDDLYLATFGNGNETVLEKKITPDGKITTFPEEETFTAKLKFAKTELTEATSIGISNGRIVLPEISVDNPLHTTMQKNTIKKSAGEDMLQLKDVLENRYFDRSFNNDLHIRLIYNILDIEKILAEYTTNAVFAIDNVSGCSDDFLSNFSTRNQWDEFQNPEQHREHFGNKDNVICSVKKQQDLFFNFFKNNRIGYFGKAFFHAESERKIVKKTAKEVYHILTLIGSLRQWITHSTEGGISRLWLYQLEDALSSEYQETMNNCYNSTIYGLQKDFEKTNAPNLNFLAEILGKNASELAEPYFRFIITKEYKNLGFSIKTLREMLLDQPDLQEIRENHNVYDSIRSKLYKMMDFVLVYAYSNERKSKADALASNLRSAITEDAKKRVYQNEADQLWTSYQELFKRIRGFKGAQVKEYSSQNMPIPIQKQIQNILKPAEQVTCFTKLMYLLTMFLDGKEINDLLTTLINKFDNISSLLKTMEQLELQTTFKEDYTFFQQSSCLCEEITQLKSFARMGNPISNLKEVMMVDAIQILGTEKSEQELQSMACFFFRDKNGKKLNAGEHGMRNFIGNNVISNTRFQYLIRYGNPQKLHTLSQNETVVRFVLSRIAKNQRVQGMNGKNQIDRYYETCGGTNSWSVSEEEKINFLCKILTNMSYDQFQDVKQSDKIITAEEKRKKERYKAIISLYLTVLYQLIKNLVNINARYIIAFHCLERDAILYSLKFNTSINLKKRYTALTEMILGYETDEKARRKDTRTIYEKAEAAKNRHLKNVKWNCKTRENLENADKNAIVAFRNIVAHLWIIRDADRFITEMGAMKRYFDCYHYLLQRELEYILEKSNQGSKYTKKSLEKVQQYHSYCKDFLHMLCLPFAYCIPRYKNLSIAELFDRHELEDAHVCFLCMERLHADGLLHVGRSHPDVPRPDDLPAFVLQHNDRIPLLDG

SEQ ID NO: 3767 - protein, 924 aa, Artificial; identical to SEQ ID NO: 2910
  Synthetic

SEQ ID NO: 3768 - protein, 922 aa, Artificial; identical to SEQ ID NO: 2840
  Synthetic

SEQ ID NO: 3769 - protein, 923 aa, Artificial
  Synthetic
MAKKNKMKPRELREAQKKARQLKAAEINNNAAPAIAAMPAAEVIAPVAGKKKSSVKAAGMKSILVSENKMYITSFGKGNSAVLEYEVDKVDNNDYNKTQLSSKDSSNIELHGVNEVNITFSSKHGFESGVEINTSNPTHRSGESSPVRWDMLGLKSELEKRFFGKTFDDNIHIQLIYNILDIEKILAVYVTNIVYALNNMLGIKDSESYDDFMGYLSAKNTYEVFTHPDKSNLSDKVKGNIKKSFSTFNDLLKTKRLGYFGLEEPKTKDTRVSQAYKKRVYHMLAIVGQIRQSVFHDKSSKLDEDLYSFIDIIDSEYRDTLDYLVDERFDSINKGFIQGNKVNISLLIDMMKDDYEADDIIRLYYDFIVLKSQKNLGFSIKKLREKMLEEYGFRFKDKQYDSVRSKMYKIMDFLLFCNYYRNDVVAGEALVRKLRFSMTDDEKEGIYADEAAKLWGKFRNDFENIADHMNGDVIKELGKADMDFDEKILDSEKKNASDLLYFSKMIYMLTYFLDGKEINDLLTTLISKFDNIKEFLKIMKSSAVNVECELTVGYKLFNDSQRITNELFIVKNIASMRKPAASAKLTMFRDALTILGIDDKITDDRISEILKLKEKGKGIHGLRNFITNNVIESSRFVYLIKYANAQKIREVAKNEKVVMFVLGGIPDTQIERYYKSCVEFPDMNSSLEAKRSELARMIKNISFDDFKNVKQQAKGRENVAKERAKAVIGLYLTVMYLLVKNLVNVNARYVIAIHCLERDFGLYKEIIPELASKNLKNDYRILSQTLCELCDKSPNLFLKKNERLRKCVEVDINNADSSMTRKYRNCIAHLTVVRELKEYIGDIRTVDSYFSIYHYVMQRCITKRENDTKQEDKIKYEDDLLKNHGYTKDFVKALNSPFGYNIPRFKNLSIEQLFDRNEYLTEK

SEQ ID NO: 3770 - protein, 924 aa, Artificial; identical to SEQ ID NO: 3682
  Synthetic

SEQ ID NO: 3771 - protein, 919 aa, Artificial; identical to SEQ ID NO: 3281
  Synthetic

SEQ ID NO: 3772 - protein, 922 aa, Artificial; identical to SEQ ID NO: 2840
  Synthetic

SEQ ID NO: 3773 - protein, 925 aa, Artificial
  Synthetic
MAKKNKMKPRELREAQKKARQLKAAEINNNAAPAIAAMPAAQVIAPAAEKKKSSVKAAGMKSILVSENKMYITSFGKGNSAVLEYEVDKVDNNNYNKTQLSSKDNSNIELGDVNEVNITFSSKHGFESGVEINTSNPTHRSGESSPVRWDMLGLKSELEKRFFGKTFDDNIHIQLIYNILDIEKILAVYVTNIVYALNNMLGIKGSESYDDFMGYLSARNTYEVFTHPDKSNLSDKVKGNIKKSLSKFNDLLKTKRLGYFGLEEPKTKDTRVSQAYKKRVYHMLAIVGQIRQSVFHDKSSKLDEDLYSFIDIIDSEYRETLDYLVDERFDSINKGFIQGNKVNISLLIDMMKGYEADDIIRLYYDFIVLKSQKNLGFSIKKLREKMLDEYGFRFKDKQYDSVRSKMYKLMDFLLFCNYYRNDVVAGEALVRKLRFSMTDDEKEGIYADEASKLWGKFRNDFENIADHMNGDVIKELGKADMDFDEKILDSEKKNASDLLYFSKMIYMLTYFLDGKEINDLLTTLISKFDNIKEFLKIMKSSAVDVECELTAGYKLFNDSQRITNELFIVKNIASMRKPASSAKLTMFRDALTILGIDDNITDDRISEILKLKEKGKGIHGLRNFITNNVIESSRFVYLIKYANAQKIRKVAKNEKVVMFVLGGIPDTQIERYYKSCVEFPDMNSSLEVKRSELARMIKNISFDDFKNVKQQAKGRENVAKERAKAVIGLYLTVMYLLVKNLVNVNARYVIAIHCLERDFGLYKEIIPELASKNLKNDYRILSQTLCELCDDRDESPNLFLKKNKRLRKCVEVDINNADSSMTRKYRNCIAHLTVVRELKEYIGDIRTVDSYFSIYHYVMQRCITKREDDKKQEEKIKYEDDLLKNHGYTKDFVKALNSPFGYNIPRFKNLSIEQLFDRNEYLTEK

SEQ ID NO: 3774 - protein, 921 aa, Artificial
  Synthetic
VIFMAKKNKMKPRELREAQKKARQLKAAEINNNAAPAIAAMPAAEAAAPAAEKKKSSVKAAGMKSILVSENKMYITSFGKGNSAVLEYEVDNNDYNQTQLSSKGSSNIELHGVNEVNITFSSKHGFESGVEINTSNPTHRSGESSPVRWDMLGLKSELEKRFFGKTFDDNIHIQLIYNILDIEKILAVYVTNIVYALNNMLGVKGSESHDDFIGYLSTNNTYDVFIDPDNSSLSDDKKANVRKSLSKFNVLLKTKRLGYFGLEEPKTKDTRVSQAYKKRVYHMLAIVGQIRQCVFHDKSGAKRFDLYSFINNIDPEYRETLDYLVDERFDSINKGFIEGNKINISLLIDMMKGYEADDIIRLYYDFIVLKSQKNLGFSIKKLREKMLDEYGFRFKDKQYDPVRSKMYKLMDFLLFCNHYRNDVAAGEALVRKLRFSMTDDEKEGIYADEAAKLWGKFRNDFENIADHMNGDVIKELGKADMDFDEKILDSEKKNASDLLYFSKMIYMLTYFLDGKEINDLLTTLISKFDNIKEFLKIMKSSAVDVECELTAGYKLFNDSQRITNELFIVKNIASMRKPAASAKLTMFRDALTILGIDDNITDDRISEILKLKEKGKGIHGLRNFITNNVIESSRFVYLIKYANAQKIREVAKNEKVVMFVLGGIPDTQIERYYKSCVEFPDMNSSLEAKRSELARMIKNISFDDFKNVKQQAKGRENVAKERAKAVIGLYLTVMYLLVKNLVNVNARYVIAIHCLERDFGLYKEIIPELASKNLKNDYRILSQTLCELCDDRDESPNLFLKKNKRLRKCVEVDINNADSSMTRKYRNCIAHLTVVRELKEYIGDIRTVDSYFSIYHYVMQRCITKRENDTKQEEKIKYEDDLLKNHGYTKDFVKALNSPFGYNIPRFKNLSIEQLFDRNEY

SEQ ID NO: 3775 - protein, 926 aa, Artificial
  Synthetic
MLLCAIIQASTKRDRKGGVRMEREVKKPPKKSLAKAAGLKSTFVISPQEKELAMTAFGRGNDALLQKRIVDGVVRDVAGEKQQFQVQRQDESRFRLQNSRLADRTVTADDPLHRAEVPHRQPLGAGMDQLRRKAVLEQKYFGRTFDDNIHIQLIYNILDIHKMLAVPANHIVHTLNLLGGYGETDFVGMLPAGLPYDKLRVVKKKNGDTVDIKADIAAYAKRPQLAYLGAAFYDVTPGKSKKDAARGRVKREQDVYTILSLMSLLRQFCAHDSVRIWGQNTPAALYHLQALPQDMKDLLDDGWRRALGGVNDHFLDTNKVNLLTLFEYYGAETKQARVALTQDFYRFVVLKEQKNMGFSLKRLREELLKLPDAAYLTGQEYDSVRQKLYMLLDFLLCRLYAQERTDRCEELVSALRCALSDEEKDAVYQAEAAALWQALGDTLRRKLLPLLKGKKLQDKDKKKPDELGLSRDVLDGVLFRPAQQGNRANADYFCRLMHLSTWFMDGKEINTLLTTLISKLENIDSLRSVLESMGLACSFVPAYAMFDHSRYIAGQLRVVNNIARMRKPAITAKREMYRAAVVLLGVDSPEAAAAITDDLLQIDPETGKVRPRGDSARDTGLRNFIANNVVESRRFTYLLRYMTPEQARVLAQNEKLIAFVLSTVPDTQLERYCRTCGREDITGRPAQIRYLTAQIMGVRYESFTDVEQRGRGDNPKKERYKALIGLYLTVLYLAVKNMVNCNARYVIAFYCRDRDTALYQKEVCWYDLEEDKKSGKQRQVEDYTALTRYFVSQGYLNRHACGYLRSNMNGISNGLLTAYRNAVDHLNVIPPLGSLCRDIGRVDSYFALYHYAVQQYLNGRYYRKTPREQELVAAMAQHRTWCSDLVKALNTPFGYNLARYKNLSIDGLFDREGDHVVREDGEKPAE

SEQ ID NO: 3776 - protein, 919 aa, Artificial; identical to SEQ ID NO: 3538
  Synthetic

SEQ ID NO: 3777 - protein, 923 aa, Artificial; identical to SEQ ID NO: 3707
  Synthetic

SEQ ID NO: 3778 - protein, 919 aa, Artificial; identical to SEQ ID NO: 2870
  Synthetic

SEQ ID NO: 3779 - protein, 924 aa, Artificial; identical to SEQ ID NO: 2910
  Synthetic

SEQ ID NO: 3780 - protein, 954 aa, Artificial; identical to SEQ ID NO: 3583
  Synthetic

SEQ ID NO: 3781 - protein, 924 aa, Artificial; identical to SEQ ID NO: 2910
  Synthetic

SEQ ID NO: 3782 - protein, 1043 aa, Artificial
  Synthetic
MGVKSVLAHGKDEKGHIKLAITAFGKGNKAELAIQTDEKGSNLAKTYKERNITANKIVSEGIQTSGTIAGEGHATFLNNPAEHVGTDYLKLKETLEMEFFGKSFPGDSVRIQIIHQILDIQKLLGIYITDIIYCINNLRDETHLDHESDIVGLSMSNTNVNLALNQMRPYFGFFGEAFRPVGDDKVKEITLSDEVRKNIEKIIALEEQKRNPSTPRFKQENINLEIENAMGKFKSKDAFETAKKKYNRIVADETNAKTLRILGAMRQITAHFKDQATLFMSDVELPKILKKEFSKADWQTVEDYYAKLVDRINEGFCKNAATNVHFLTELLPEESKKQLTEDYFRFAILKEGKNLGVNMKRLREVMFALFVPELTAPETKKRYDSYRAKIYGLTDFLLFKHIHNTKQLEEWVAVLRETSNEDAKENLYDEFARTAWNTVGDSAKQLIENMQSYFTKKEKEITKTAQPVLSTSSIAHTSKKITQFSSFAKLLAFLCNFWEGKEINELLSAYIHKFENIQEFINLLEKLEGKKPQFTENYALFNEAAGQRAGEIAQNLRILASIGKMKPDLGDAKRQLYKAAIEMLGIDTEEYISDEWLEPNMLLAQPPKEPKKDNEKYRKEPHKYSYEKDMETYRKKLREYEETWRSLIDYEYLMPETNPFRNFVAKQVIESRRFMYLVRYTKPKTVRALMSNRAIVHYVLSRIADIQDHHMTESQIDRYYQNLPQYNEQQHKNVSLETKIDALADYLCKYTFEKNVLKQKNGIVLNTKSATKNVEIEHLKALTGLYLTVAYIAVKNLVKANARYYIAFSIFERDYALFEKKLGKDTLEKYVKPFKYIDKGEEKEGKNNFFALTEYLLDKDNSLRYQWNNDLSDEENKQALRKHLDKKEIRSQRHFSQYWLDIFARQIENAKKTSESGYLLTAARNCALHLNVLTALPEFVGEFRKTGDKMTSYFELYHFLLQKLMLAEAGLNLDEYRERIDTYQTACKDLINITYVSLGYNLPRYKNLTCEPLFDEESATGKERQTRLDEKSKEKKQRKGGQK

SEQ ID NO: 3783 - protein, 959 aa, Artificial
  Synthetic
MNAFKQKDAARNEALAAEKRAAEEAEKRRRLAEKQKTLNPVRERKLSTVKKSTAKAAGLKSTFILGDHELLMTSFGHGNAAIVEKHIVGDEIISVADPANLTVAADQALYYKVDGRVKNASTDNPLYRKQETADGGESAAAASGAGGYREDLIHARSALEMRYFGENFADNIHIQTIYSILDVEKSLTVHVGNISYMLNNFLRRDGDDLADLVGNLKTYKSYEEFCRQEDKSGYKELFFQLCNARQLGYLNLEIVPDKKETQSAKPGPDGKKPKPFRPDPNAVQLTQEEFYYVMIALGTMRQMLAHGDPKQSVYQLEGFGKNEGITKVLNRLYGERIAELNQGFLDRAGKNLALLFEAFGIKDAEQKKRYVQDYYDFTVRKSFKNMGFSIKLLREQMTSKVEDAFVLRDKQYDSVRGKLYPFVDFAIYRYYREHQAEIENLVGSLRASSNEVEKDRIYEAEALRVWPALKTLILGHILKEMDGSKIKETRPDPDVNGKMLEGVLISDEATAFSKFVYLLTLFINGKEINDLLTTLIHQFENVASFTEVLRSQGLRTGFTKDYKLFSQSKKVAEELRVINSFARMSQPSAKTKRVMIEEAFAVLGIKADEEWLKKEIEEMLDPKAKGSKKRGLRNFIINNVVESDRFKYLIRYGNVKKLKGIAKNRKVIAFVLKEIPDAQIVRYYNSATGNDGDYREGMRDLLADRITGFSFEEIENINQNDLKATPEEQEEKRRKQALVRMYLTVLYLALKNLVYVNSRYALAFHCLGRDRVLLNEAHWGHMGNNDELKPEYGYTVFAKGQLEKYPPKARVGRYLAQNFANSDEWAIRTYRNKVMHLDAIRNADLYLEDVREIASWYDLYHYIMQRRIMDQFAWDSTHPSRKVEGRMIISREEMNPKTFEYFEKVEKYGTCCRDFIKALNVPFAYNLPRYKNLSIDGLFDKNRPGEKGKGKDKALELEA

SEQ ID NO: 3784 - protein, 922 aa, Artificial
  Synthetic
MAKKNKMKPRELREAQKKARQLKAAEINNNAAPAIAAMPAAEAAAPAAEKKKSSVKAAGMKSILVSENKMYITSFGKGNSAVLEYEVDNNDYNKTQLSSKDSSNIELHGVNEVNITFSSKHGFESGVEINTSNPTHRSGESSPVRGDMLGLKSELEKRFFGKTFDDNIHIQLIYNILDIEKILAVYVTNIVYALNNMLGVKGSESYDDFMGYLSAQNTYYIFTHPDKSNLSDKVKGNIKKSLSKFNDLLKTKRLGYFGLEEPKTKDKRVSEAYKKRVYHMLAIVGQIRQSVFHDKSSKLDEDLYSFIDIIDSEYRETLDYLVDERFDSINKGFIQGNKVNISLLIDMMKGYEADDIIRLYYDFIVLKSQKNLGFSIKKLREKMLDEYGFRFKDKQYDSVRSKMYKLMDFLLFCNYYRNDVVAGEALVRKLRFSMTDDEKEGIYADEAAKLWGKFRNDFENIADHMNGDVIKELGKADMDFDEKILDSEKKNASDLLYFSKMIYMLTYFLDGKEINDLLTTLISKFDNIKEFLKIMKSSAVDVECELTAGYKLFNDSQRITNELFIVKNIASMRKPAASAKLTMFRDALTILGIDDKITDDRISEILKLKEKGKGIHGLRNFITNNVIESSRFVYLIKYANAQKIREVAKNEKVVMFVLGGIPDTQIERYYKSCVEVPDMNSSLEVKRSELARMIKNISFDDFKNVKQQAKGRENVAKERAKAVIGLYLTVMYLLVKNLVNVNARYVIAIHCLERDFGLYKEIIPELASKNLKNDYRILSQTLCELCDDRDKSSNLFLKKNKRLRKCVEVDINNADSRMTRKYRNCIAHLTVVRELKEYIGDIRTVDSYFSIYHYVMQRCITKREDDTKREEKIKYEDDLLKNHGYTKDFVKALNSPFGYNIPRFKNLSIEQLFDRNEYLTEK

SEQ ID NO: 3785 - protein, 923 aa, Artificial; identical to SEQ ID NO: 2862
  Synthetic

SEQ ID NO: 3786 - protein, 922 aa, Artificial; identical to SEQ ID NO: 2840
  Synthetic

SEQ ID NO: 3787 - protein, 922 aa, Artificial; identical to SEQ ID NO: 2955
  Synthetic

SEQ ID NO: 3788 - protein, 922 aa, Artificial; identical to SEQ ID NO: 3428
  Synthetic

SEQ ID NO: 3789 - protein, 921 aa, Artificial
  Synthetic
MAKKNKMKPRELREAQKKARQLKAAEINNNAVPAIAAMPAAEAAAPAAEKKKSSVKAAGMKSILVSENKMYITSFGKGNSAVLEYEVDNNDYNKTQLSSKDNSNIELCDVGKVNITFSSRRGFESGVEINTSNPTHRSGESSSVRGDMLGLKSELEKRFFGKNFDDNIHIQLIYNILDIEKILAVYVTNIVYALNNMLGEGDESNYDFMGYLSTFNTYKVFTNPNGSTLSDDKKENIRKSLSKFNALLKTKRLGYFGLEEPKTKDTRASEAYKKRVYHMLAIVGQIRQCVFHDKSGAKRFDLYSFINNIDPEYRETLDYLVDERFDSINKGFIQGNKVNISLLIDMMKGYEADDIIRLYYDFIVLKSQKNLGFSIKKLREKMLDEYGFRFKDKQYDSVRSKMYKLMDFLLFCNYYRNDIAAGESLVRKLRFSMTDDEKEGIYADEAAKLWGKFRNDFENIADHMNGDVIKELGKADMDFDEKILDSEKKNASDLLYFSKMIYMLTYFLDGKEINDLLTTLISKFDNIKEFLKIMKSSAVDVECELTAGYKLFNDSQRITNELFIVKNIASMRKPAASAKLTMFRDALTILGIDDKITDDRISEILKLKEKGKGIHGLRNFITNNVIESSRFVYLIKYANAQKIREVAKNEKVVMFVLGGIPDTQIERYYKSCVEFPDMNSSLKVKRSELARMIKNIRFDDFKNVKQQAKGRENVAKERAKAVIGLYLTVMYLLVKNLVNVNARYVIAIHCLERDFGLYKEIIPELASKNLKNDYRILSQTLCELCDDRDESPNLFLKKNRRLRKCVEVDINNADSSMTRKYRNCIAHLTVVRELKEYIGDIRTVDSYFSIYHYVMQRCITKREDDTKQEEKIKYEDDLLKNHGYTKDFVKALNSPFGYNIPRFKNLSIEQLFDRNEYLTEK

SEQ ID NO: 3790 - protein, 925 aa, Artificial; identical to SEQ ID NO: 2833
  Synthetic

SEQ ID NO: 3791 - protein, 956 aa, Artificial; identical to SEQ ID NO: 3282
  Synthetic

SEQ ID NO: 3792 - protein, 927 aa, Artificial; identical to SEQ ID NO: 3071
  Synthetic

SEQ ID NO: 3793 - protein, 922 aa, Artificial
  Synthetic
MAKKNKMKPRELREAQKKARQLKAAEINNNAVPAIAAMPAAEAAAPAAEKKKSSVKAAGMKSILVSENKMYITSFGKGNSAVLEYEVDNNDYNKTQLSSKNSSNIELRGVNEVNITFSSKHGFESGVEINTSNPTHRSGESSPVRGDMLGLKSELEKRFFGKTFDDNIHIQLIYNILDIEKILAVYVTNIVYALNNMLGVKGSESHDDFIGYLSTNNIYDVFIDPDNSSLSDDKKANVRKSLSKFNALLKTKRLGYFGLEEPKTKDNRVSQAYKKRVYHMLAIVGQIRQCVFHDKSGAKRFDLYSFINNIDPEYRDTLDYLVEERLKSINKDFIEDNKVNISLLIDMMKDYEADDIIRLYYDFIVLKSQKNLGFSIKKLREKMLDEYGYRFKDKQYDSVRSKMYKLMDFLLFCNYYRNDVVAGEALVRKLRFSMTDDEKEGIYADEASKLWGKFRNDFENIADHMNGDVIKELGKADMDFDEKILDSEKKNASDLLYFSKMIYMLTYFLDGKEINDLLTTLISKFDNIKEFLKIMKSSAVNVECELTAGYKLFNDSQRITNELFIVKNIASMRKPAASAKLTMFRDALTILGIDDNITDDRISEILKLKEKGKGIHGLRNFITNNVIESSRFVYLIKYANAQKIRKVAENEKVVMFVLGGIPDTQIERYYKSCVEFPDMNSSLEAKRSELARMIKNIRFDDFKNVKQQAKGRENVAKERAKAVIGLYLTVMYLLVKNLVNVNARYVIAIHCLERDFGLYKEIIPELASKNLKNDYRILSQTLCELCDDRDESPNLFLKKNKRLRKCVEVDINNADSSMTRKYRNCIAHLTVVRELKEYIGDIRTVDSYFSIYHYVMQRCITKREDDKKQEEKIKYEDDLLKNHGYTKDFVKALNSPFGYNIPRFKNLSIEQLFDRNEYLTEK

SEQ ID NO: 3794 - protein, 936 aa, Artificial; identical to SEQ ID NO: 2871
  Synthetic

SEQ ID NO: 3795 - protein, 919 aa, Artificial; identical to SEQ ID NO: 3710
  Synthetic

SEQ ID NO: 3796 - protein, 922 aa, Artificial; identical to SEQ ID NO: 2840
  Synthetic

SEQ ID NO: 3797 - protein, 984 aa, Artificial; identical to SEQ ID NO: 2979
  Synthetic

SEQ ID NO: 3798 - protein, 922 aa, Artificial; identical to SEQ ID NO: 3121
  Synthetic

SEQ ID NO: 3799 - protein, 921 aa, Artificial
  Synthetic
MAKKNKMKPRELREAQKKARQLKAAEINNNAVPAIAAMPAAEAAAPAAEKKKSSVKAAGMKSILVSENKMYITSFGKGNSAVLEYEVDNNDYNKTQLSSKDNSNIELCDVDEVNITFSSKHGFESGVKINTSNPTHRSGESSSVRGDMLGLKSELEKRFFGKTFDDNIHIQLIYNILDIEKILAVYVTNIVYALNNMLGLENESNNDFMGYLSAKNTYDVFTDPDESDLSKNIKGNIKKSLSKFNDLLKTKRLGYFGLEEPKTKDKRVSEAYKKRVYHMLAIVGQIRQSVFHDKSNELDEYLYSFIDIIDSEYRETLDYLIDERFDSINKGFIQGNKVNISLLIDMMKGYEADDIIRLYYDFIVLKSQKNLGFSIKKLREKMLDEYGFRFKDKQYDSVRSKMYKLMDFLLFCNYYRNDVAAGEALVRKLRFSMTDDEKEGIYADEAAKLWGKFRNDFENIADHMNGDVIKELGKADMDFDEKIIDSEKKNASDLLYFSKMIYMLTYFLDGKEINDLLTTLISKFDNIKEFLKIMKSSAVNVECELTAGYKLFNDSQRITNELFIVKNIASMRKPAASAKLTMFRDALTILGIDDKITDDRISEILKLKEKGKGIHGLRNFITNNVIESSRFVYLIKYANAQKIREVAENEKVVMFVLGGIPDTQIERYYKSCVEFPDMNSSLEVKRSELARMIKNIRFDDFKNVKQQAKGRENVAKERAKAVIGLYLTVMYLLVKNLVNVNARYVIAIHCLERDFGLYKEIIPELASKNLKNDYRILSQTLCELCDNGDESPNLFLKKNRRLRKCVEVDINNADSSMTRKYRNCIAHLTVVRELKEYIGDIRTVDSYFSIYHYVMQRCITKREDDTKQEDKIKYEDDLLKNHGYTKDFVKALNSPFGYNIPRFKNLSIEQLFDRNEYLTEK

SEQ ID NO: 3800 - protein, 984 aa, Artificial
  Synthetic
MKKKNIRATREALKAQKIKKSQENEALKKQKLAEEAAQKRREELEKKNLAQWEETSAEGRRSRVKAVGVKSVFVVGDDLYLATFGNGNETVLEKKIAPDGKITTFPEEETFTAKLKFAQTEPTEATSIGISNGRIVLPEISVDNPLHTTMQKNTIKRSAGEDMLQLKNVLENRYFDRSFNDDLHIRLIYNILDIEKILAEYTTNAVFAIDNVSGCSDDFLSNFSTRNQWDEFQNPEQHREHFGNKDNVICSVKKQQDLFFNFFKNNRIGYFGKAFFHAESERKIVKKTAKEVYHILTLIGSLRQWITHSTEGDISRLWLYQLEDALSSEYQETMNNCYNSTIYGLQKDFEKTNAPNLNFLAEILGKNASELAEPYFRFIITKEYKNLGFSIKTLREMLLDQPDLQEIRENHNVYDSIRSKLYKMMDFVLVYAYSNERKSKADALASNLRSAITEDAKKRIYQNEADQLWTSYQELFKRIRGFKGAQVKEYSSQNIPIPIQKQIQNILKPAEQVTCFTKLMYLLTMFLDGKEINDLLTTLINKFDNISSLLKTMEQLELQTTFKEDYTFFQQSSCLCEEITQLKSFARMGNPISNLKEVMMVDAIQILGTEKSEQELQSMACFFFRDKNGKKLNAGEHGMRNFIGNNVISNTRFQYLIRYGNPQKLHTLSQNETVVRFVLSRIAKNQRVQGMNGKNQIDRYYETCGGTNSWSVSEEEKINFLCKILTNMSYDQFQDVKQSDKIITAEEKRKKERYKAIISLYLTVLYQLIKNLVNINARYIIAFHCLERDAILYSLKFNTSINLKKRYTALTEMILGYETDEKARRKDTRTIYEKAEAAKNRHLKNVKWNCKTRENLENADKNAIVAFRNIVAHLWIIRDADRFITEMGAMKRYFDCYHYLLQRELEYILEKSNQGSKYTKKSLEKVQQYHSYCKDFLHMLCLPFAYCIPRYKNLSIAELFDRHELEAEPKEEASPANNSQFITT

SEQ ID NO: 3801 - protein, 937 aa, Artificial; identical to SEQ ID NO: 2970
  Synthetic

SEQ ID NO: 3802 - protein, 922 aa, Artificial
  Synthetic
MAKKNKMKPRELREAQKKARQLKAAEINNNAAPAIAAMPAAEVIAPAAEKKKSSVKAAGMKSILVSENKMYITSFGKGNSAVLEYEVDNNDYNKTQLSSKDNSNIELGNVNEVNITFSSRRGFESGVEINTSNPTHRSGESSSVRGDMLGLKSELEKRFFGKTFDDNIHIQLIYNILDIEKILAVYVTNIVYALNNMLGVKGSESYDDFMGYLSAQNTYYIFTHPDKSNLSDKVKGNIKKSLSKFNDLLKTKRLGYFGLEEPKTKDTRVSQAYKKRVYHMLAIVGQIRQCVFHDKSGAKRFDIYSFINNIDPEYRETLDYLVDERFDSINKGFIQGNKVNISLLIDMMKDYEADDIIRLYYDFIVLKSQKNLGFSIKKLREKMLDEYGFRFKDKQYDSVRSKMYKLMDFLLFCNYYRNDVVAGETLVRKLRFSMTDDEKEGIYADEAAKLWGKFRNDFENIADHMNGDVIKELGKADMDFDEKILDSEKKNASDLLYFSKMIYMLTYFLDGKEINDLLTTLISKFDNIKEFLKIMKSSAVDVECELTAGYKLFNDSQRITNELFIVKNIASMRKPAASAKLTMFRDALTILGIDDNITDDRISEILKLKEKGKGIHGLRNFITNNVIESSRFVYLIKYANAQKIREVAENEKVVMFVLGGIPDTQIERYYKSCVEVPDMNSSLEAKRSELARMIKNISFDDFKNVKQQAKGRENVAKERAKAVIGLYLTVMYLLVKNLVNVNARYVIAIHCLERDFGLYKEIIPELASKNLKNDYRILSQTLCELCDDRDESPNLFLKKNKRLRKCVEVDINNADSSMTRKYRNCIAHLTVVRELKEYIGDIRTVDSYFSIYHYVMQRCITKREDDKKQEEKIKYEDDLLKNHGYTKDFVKALNSPFGYNIPRFKNLSIEQLFDRNEYLTEK

SEQ ID NO: 3803 - protein, 919 aa, Artificial
  Synthetic
MAKKNKMKPRELREAQKKARQLKAAEINNNAAPAIAAMPAAEVIAPAAEKKKSSVKAAGMKSILVSENKMYITSFGKGNSAVLEYEVDNNDYNKTQLSSKDNSNIELCDVNEVNITFSSKHGFESGVEINTSNPTHRSGESSPVRWDMLGLKSELEKRFFGKTFDDNIHIQLIYNILDIEKILAVYITNIVYALNNMLGVKGSESHDDFIGYLSTNNIYDVFIDPDNSSLSDDKKANVRKSLSKFNALLKTKRLGYFGLEEPKTKDNRVSEAYKKRVYHMLAIVGQIRQSVFHDKSSKLHEDLYSFIDIIDSEYRETLDYLVDERFDSINKGFIQGNKVNISLLIDMMKGYEADDIIRLYYDFIVIKSQKNLGFSIKKLREKMLDEYGFRFKDKQYDSVRSKMYKLMDFLLFCNYYRNDVVAGEALVRKLRFSMTDDEKEGIYADEAEKLWGKFRNDFENIADHMNGDVIKELGKADMDFDEKILDSEKKNASDLLYFSKMIYMLTYFLDGKEINDLLTTLISKFDNIKEFLKIMKSSAVDVECELTAGYKLFNDSQRITNELFIVKNIASMRKPASSAKLTMFRDALTILGIDDNITDDRVSGILKLKEKGKGIHGLRNFITNNVIESSRFVYLIKYANAQKIRKVAKNEKVVMFVLGGIPDTQIERYYKSCVEFPDMNSSLEVKRSELARMIKNISFDDFKNVKQQAKGRENVAKERAKAVIGLYLTVMYLLVKNLVNVNARYVIAIHCLERDFGLYKEIIPELASKNLKNDYRILSQTLCELCDKSPNLFLKKNRRLRKCVEVDINNADSSMTRKYRNCIAHLTVVRELKEYIGDIRTVDSYFSIYHYVMQRCITKRENDTKQEEKIKYEDDLLKNHGYTKDFVKALNSPFGYNIPRFKNLSIEQLFDRNEYLTEK

SEQ ID NO: 3804 - protein, 922 aa, Artificial; identical to SEQ ID NO: 2838
  Synthetic

SEQ ID NO: 3805 - protein, 919 aa, Artificial; identical to SEQ ID NO: 2894
  Synthetic

SEQ ID NO: 3806 - protein, 984 aa, Artificial; identical to SEQ ID NO: 2979
  Synthetic

SEQ ID NO: 3807 - protein, 929 aa, Artificial; identical to SEQ ID NO: 3732
  Synthetic

SEQ ID NO: 3808 - protein, 954 aa, Artificial
  Synthetic
MGKKIHARDLREQRKTDRTVKFADQNKKREAERAVQKKDAAVSVKSVSSVSSKKDNVTKSMAKAAGVKSVFAVGNTVYMTSFGRGNDAVLEQKIVDTSHEPLNIDDPAYQLNVVTMNGYSVTGHRGETVSAVTDNPLRRFNGGKKGEQGQSVPTDMLCLKPTLEKKFFGKEFNDNIHIQLIYNILNIEKIRAVNSTNAIYALNNMSADENIENSDFFMKRTTDETFDDFEKKKESTNSREKADFDAFEKFIGNYRLAYFADAFYVNKKNPKGKARNVLREDKELYSVLTLIGKLRHWCVHSEEGRAEFWLYKLDELKDDFKNVLDVVYNRPVEEINNRFIENNKVNIQILGSVYKNTDIAELVRSYYEFLITKKYKNMGFSIKKLRESMLEGKGYADKEYDSVRNKLYQMTDFILYTGYINEDSDRADDLVNALRSSLKEDDKTTVYCKEADYLWKKYRESIREVAEALDGDNIKRLSKSNIEIQEDKLRKCFISYADSVSEFTKLIYLLTRFLSGKEINDLVTTLINKFDNIRSFLEIMDELGLDRTFTAEYSFFEGSTKYLAELVELNSFVKSCSFDINAKRTMYRDALDILGIKSGKTEEDIEKMIDNILQIDANGDKKLKKNNGLRNFIASNVIDSNRFKYLVRYGNPKKIRETAKCEPAVRFVLNEIPDAQIERYYEACCPKNTALCSANKRREKLADMIAEIEFENFSDAGNYQKANVTSKTHEAEIKRKNQAIIRLYLTVMYIMLKNLVNVNARYVIAFHCVERDTKLYAESGLEVGNIEKNKTNLTMAVMGVKLENGIIKTEFDKSLAENAANRYLRNARWYKLILDNLKKSERAVVNEFRNTVCHLNAIRNININIDGIKEVENYFALYHYLIQKHLEKRFADKKVERDTGDFISKLEEHKTYCKDFVKAYCTPFGYNLVRYKNLTIDGLFDKNYPGKDDSDKQK

SEQ ID NO: 3809 - protein, 922 aa, Artificial; identical to SEQ ID NO: 2937
  Synthetic

SEQ ID NO: 3810 - protein, 1141 aa, Artificial; identical to SEQ ID NO: 2802
  Synthetic

SEQ ID NO: 3811 - protein, 924 aa, Artificial; identical to SEQ ID NO: 3261
  Synthetic

SEQ ID NO: 3812 - protein, 922 aa, Artificial
  Synthetic
MAKKNKMKPRELREAQKKARQLKAVEINNNAVPEIAAMPAAEVIAPVAEKKKSSVKAAGMKSILVSENKMYITSFGKGNSAVLEYEVDNNDYNKTQLSSKNSSNIELRGVNEVNITFSSKHGFESGVEINTSNPTHRSGESSPVRWDMLGLKSELEKRFFGKTFDDNIHIQLIYNILDIEKILAVYVTNIVYALNNMLGIKGSESYDDFMGYLSARNTYEVFTHPDKSSLSDDKKANVRKSLSKFNVLLKTKRLGYFGLEEPKTKDTRVSQAYKKRVYHMLAIVGQIRQSVFHDKSSKLDEDLYSFIDIIDSEYRETLDYLVDERFDSINKGFIQGNKVNISLLIDMMKGYEADDIIRLYYDFIVLKSQKNLGFSIKKLREKMLEEYGYRFKDKQYDSVRSKMYKLMDFLLFCNYYRNDVVAGEALVRKLRFSMTDDEKEGIYADEAEKLWGKFRNDFENIADHMNGDVIKELGKADMDFDEKILDSEKKNASDLLYFSKMIYMLTYFLDGKEINDLLTTLISKFDNIKEFLKIMKSSAVDVECELTAGYKLFNDSQRITNELFIVKNIASMRKPAASAKLTMFRDALTILGIDDKITDDRISEILKLKEKCKGIHGLRNFITNNVIESSRFVYLIKYANAQKIREVAENEKVVMFVLGGIPDTQIERYYKSCVEFPDMNSSLEAKRSELARMIKNISFDNFKNVKQQAKGRENVAKERAKAVIGLYLTVMYLLVKNLVNVNARYVIAIHCLERDFGLYKEIIPELASKNLKNDYRILSQTLCELCDDRDESPNLFLKKNKRLRKCVEVDINNADSSMTRKYRNCIAHLTVVRELNKYIKDIRTVDSYFSIYHYVMQRCITKRENDTKQEDKIKYEDDLLKNHGYTKDFVKALNSPFGYNIPRFKNLSIEQLFDRNEYLTEK

SEQ ID NO: 3813 - protein, 922 aa, Artificial
  Synthetic
MAKKNKMKPRELREAQKKARQLKAAEINNNAVPAIAAMPAVEVIAPAAEKKKSSVKAAGMKSILVSENKMYITSFGKGNSAVLEYEVDNNDYNKTQLSSKDNSNIELGNVNEVNITFSSRRGFESGVEINTSNPTHRSGESSSVRGDMLGLKSELEKRFFGKTFDDNIHIQLIYNILDIEKILAVYVTNIVYALNNMLGEGGDESHDDFMGYLSAKNTYDVFTNPNGSTLSDDKKENIRKSLRKFNDLLKTKRLGYFGLEEPKTKDTRVSQAYKKRVYHMLAIVGQIRQCVFHDLSEHSEYDLYSFIDNSKKVYRECRETLDYLVDERFDSINKGFIQGNKVNISLLIDMMKGYEADDIIRLYYDFIVLKSQKNLGFSIKKLREKMLDEYGFRFKDKQYDSVRSKMYKLMDFLLFCNYYRNDVVAGEALVRKLRFSMTDDEKEGIYADEAAKLWGKFRNDFENIADHMNGDVIKELGKADMDFDEKILDSEKKNASDLLYFSKMIYMLTYFLDGKEINDLLTTLISKFDNIKEFLKIMKSSAVDVECELTAGYKLFNDSQRITNELFIVKNIASMRKPAASARLTMFRDALTILGIDDKITDDRISEILKLKEKGKGIHGLRNFITNNVIESSRFVYLIKYANAQKIREVAKNEKVVMFVLGGIPDTQIERYYKSCVEFPDMNSSLEAKRSELARMIKNISFDDFKNVKQQAKGRENVAKERAKAVIGLYLTVMYLLVKNLVNVNARYVIAIHCLERDFGLYKEIIPELASKNLKNDYRILSQTLCELCDKSPNLFLKKNERLRKCVEVDINNADSSMTRKYRNCIAHLTVVRELKEYIGDIRTVDSYFSIYHYVMQRCITKRENDTKQEDKIKYEDDLLKNHGYTKDFVKALNSPFGYNIPRFKNLSIEQLFDRNEYLTEK

SEQ ID NO: 3814 - protein, 924 aa, Artificial; identical to SEQ ID NO: 3624
  Synthetic

SEQ ID NO: 3815 - protein, 924 aa, Artificial; identical to SEQ ID NO: 2910
  Synthetic

SEQ ID NO: 3816 - protein, 922 aa, Artificial; identical to SEQ ID NO: 3327
  Synthetic

SEQ ID NO: 3817 - protein, 984 aa, Artificial; identical to SEQ ID NO: 2827
  Synthetic

SEQ ID NO: 3818 - protein, 924 aa, Artificial; identical to SEQ ID NO: 2910
  Synthetic

SEQ ID NO: 3819 - protein, 1141 aa, Artificial; identical to SEQ ID NO: 2802
  Synthetic

SEQ ID NO: 3820 - protein, 922 aa, Artificial; identical to SEQ ID NO: 2840
  Synthetic

SEQ ID NO: 3821 - protein, 926 aa, Artificial; identical to SEQ ID NO: 3775
  Synthetic

SEQ ID NO: 3822 - protein, 928 aa, Artificial; identical to SEQ ID NO: 2950
  Synthetic

SEQ ID NO: 3823 - protein, 929 aa, Artificial; identical to SEQ ID NO: 3732
  Synthetic

SEQ ID NO: 3824 - protein, 907 aa, Artificial
  Synthetic
MGKKIHARDLREQRKTDRTVKFADQNKKLEAERAVQKKDAAVSVKSVSSVSSKKDNATKSMAKAAGVKSVFAVGNTVYMTSFGRGNDAVLEQKIVDTSHEPLNIDDPAYQLNVVTMNGYSVTGHRGETVSAVTDNPLRRFNGGKKDEPEQSVPTDMLCLKPTLEKKFFGKEFNDNIHIQLIYNILDIEKILAVYSTNAIYALNNMSADENIENSDFFMKRTTDETFDDFEKKKESTNSREKADFDAFEKFIGNYRLAYFADAFYVNKKNPKGKAKNVLREDKELYSVLTLIGKLRHWCVHSEEGRAEFWLYRLDELKSDFKNVLDSVYNRPVEEINNRFIENNKVNIQILGSVYKNTDIAELVRSYYEFLITKKYKNMGFSIKKLRESMLEGKGYADKEYDSVRNKLYQMTDFILYTGYINEDSDRADDLVNTLRSSLKEDDKTTVYCKEADYLWKKYRESIKEVADALDGDNIKRLSKSNIEIQEDKLRKCFISYADSVSEFTKLIYLLTRFLSGKEINDLVTTLINKFDNIRSFLEIMDDLGLDRTFTAEYSFFEGSTKYLAELVELNSFVKSCSFDINAKRTMYRDALDILGIKSGKTEEDIEKMIDNILQIDANGDKKLKKNNGLRNFIASNVIDSNRFKYLVRYGNPKKIRETAKCEPAVRFVLNEIPDAQIERYYEACCPENTALCSANKRREKLADMIAEIEFENFSDAGNYQKANVTSRTSEAEIKRKNQAIIRLYLTVMYIMLKNLVNVNARYVIAFHCVERDTKLYAESGLEVGNIEKNKTNLTMAVMGVKLENGIIKTEFDKSLAENAANRYLRNARWYKLILDNLKKSERAVVNEFRNTVCHLNAIRNININIDGIKEVENYFALYHYLIQKHLENRFADKKVERDTGDFISKLE

SEQ ID NO: 3825 - protein, 921 aa, Artificial; identical to SEQ ID NO: 3630
  Synthetic

SEQ ID NO: 3826 - protein, 952 aa, Artificial; identical to SEQ ID NO: 3107
  Synthetic

SEQ ID NO: 3827 - protein, 921 aa, Artificial
  Synthetic
MAKKNKMKPRELREAQKKARQLKAAEINNNAAPAIAAMPAAEAEKKKSSVKAAGMKSILVSENKMYITSFGKGNSAVLEYEVDKVDNNVYNQTQLSSKGSSNIKLCGVNEVNITFSSKHGFESGVEINTSNPTHRSGESSPVRGDMLGLKSELEKRFFGKTFDDNIHIQLIYNILDIEKILAVYVTNIVYALNNMLGIKGSESYDDFMGYLSARNTYEVFTHPDKSSLSDDKKANVRKSLSKFNVLLKTKRLGYFGLEEPKTKDTRVSQAYKKRVYHMLAIVGQIRQSVFHDKSSKLHEDLYSFIDIIDSEYRETLDYLVDERFDSINKGFIQGNKVNISLLIDMMKDDYEADDIIRLYYDFIVLKSQKNLGFSIKKLREKMLDEYGFRFKDKQYDSVRSKMYKLMDFLLFCNYYRNDVIAGEALVRKLRFSMTDDEKEGIYADEAAKLWGKFRNDFENIADHMNGDVIKELGKADMDFDEKILDSEKKNASDLLYFSKMIYMLTYFLDGKEINDLLTTLISKFDNIKEFLKIMKSSAVDVECELTAGYKLFNDSQRITNELFIVKNIASMRKPAASAMLTMFRDALTILGIDDKITDDRISEILKLKEKGKGIHGLRNFITNNVIESSRFVYLIKYANAQKIREVAKNEKVVMFVLGGIPDTQIERYYKSCVEVPDMNSSLEAKRSELARMIKSISFDDFKNVKQQAKGRENVAKEMAKAVIGLYLTVMYLLVKNLVNVNARYVIAIHCLERDFGLYKEIISELASKNLKNDYRILSQTLCELCDNCDESPNLFLKKNKRLRKCVEVDINNADSSMTRKYRNCIAHLTVVRELKEYIGDIRTVDSYFSIYHYVMQRCITKREDDKKQEEKIKYEDDLLKNHGYTKDFVKALNSPFGYNIPRFKNLSIEQLFDRNEYLTEK

SEQ ID NO: 3828 - protein, 922 aa, Artificial; identical to SEQ ID NO: 2817
  Synthetic

SEQ ID NO: 3829 - protein, 922 aa, Artificial; identical to SEQ ID NO: 2840
  Synthetic

SEQ ID NO: 3830 - protein, 922 aa, Artificial
  Synthetic
MAKKNKMKPRELREAQKKARQLKAAEINNNAVPAIAAMPAAEVIAPAAEKKKSSVKAAGMKSILVSENKMYITSFGKGNSAVLEYEVDNNDYNKTQLSSKGSSNIELHGVNEINITFSSKHGFESGVEINTSNPTHRSGESSPVRWDMLGLKSELEKRFFGKTFDDNIHIQLIYNILDIEKILAVYVTNIVYALNNMLGIKDSESYDDFMGYLSAKNTYEVFTHPDKSNLSDKVKGNIKKSFSTFNDLLKTKRLGYFGLEEPKTKDTRVSQAYKKRVYHMLAIVGQIRQSVFHDKSSKLDEDLYSFIDIIDSEYRETLDYLVDERFDSINKGFIQGNKVNISLLIDMMKGYEADDIIRLYYDFIVLKSQKNLGFSIKKLREKMLDEYGFRFKDKQYDSVRSKMYKLMDFLLFCNYYRNDVAAGEALVRKLRFSMTDDEKEGIYADEAAKLWGKFRNDFENIADHMNGDVIKELGKADMDFDEKILDSEKKNASDLLYFSKMIYMLTYFLDGKEINDLLTTLISKFDNIKEFLKIMKSSAVDVECELTAGYKLFNDSQRITNELFIVKNIASMRKPAASAKLTMFRDALTILGIDDNITDDRISEILKLKEKGKGIHGLRNFVTNNVIESSRFVYLIKYANAQKIREVAKNEKVVMFVLGGIPDTQIERYYKSCVEFPDMNSSLKVKRSELARMIKNIRFDDFKNVKQQAKGRENVAKERAKAVIGLYLTVMYLLVKNLVNVNARYVIAIHCLERDFGLYKEIIPELASKNLKNDYRILSQTLCELCDNGDESPNLFLKKNKRLRKCVEVDINNADSSMTRKYRNCIAHLTVVRELNKYINDIYAVNSYFSIYHYVMQRCITKREDDTKQEEKIKYEDDLFKNHGYTKDFVKAINSPFGYNIPRFKNLSIEQLFDRNEYLTEK

SEQ ID NO: 3831 - protein, 922 aa, Artificial; identical to SEQ ID NO: 2840
  Synthetic

SEQ ID NO: 3832 - protein, 922 aa, Artificial; identical to SEQ ID NO: 2906
  Synthetic

SEQ ID NO: 3833 - protein, 928 aa, Artificial; identical to SEQ ID NO: 3747
  Synthetic

SEQ ID NO: 3834 - protein, 918 aa, Artificial; identical to SEQ ID NO: 2830
  Synthetic

SEQ ID NO: 3835 - protein, 954 aa, Artificial; identical to SEQ ID NO: 2846
  Synthetic

SEQ ID NO: 3836 - protein, 952 aa, Artificial; identical to SEQ ID NO: 3107
  Synthetic

SEQ ID NO: 3837 - protein, 954 aa, Artificial; identical to SEQ ID NO: 2909
  Synthetic

SEQ ID NO: 3838 - protein, 924 aa, Artificial; identical to SEQ ID NO: 2910
  Synthetic

SEQ ID NO: 3839 - protein, 954 aa, Artificial; identical to SEQ ID NO: 2846
  Synthetic

SEQ ID NO: 3840 - protein, 954 aa, Artificial; identical to SEQ ID NO: 2846
  Synthetic

SEQ ID NO: 3841 - protein, 922 aa, Artificial; identical to SEQ ID NO: 3123
  Synthetic

SEQ ID NO: 3842 - protein, 924 aa, Artificial
  Synthetic
MAKKNKMKPRELREAQKKARQFKAAEINNNAAPAIAAMPAAEVIAPVAEKKKSSVKAAGMKSILVSENKMYITSFGKGNSAVLEYEVDNNDYNKTQLSSKDNSNIELCGVNEVNITFSSKHGFESGVEINTSNPTHRSGESSPVRWDMLGLKSELEKRFFGKTFDDNIHIQLIYNILDIEKILAVYVTNIVYALNNMLGEGDESNYDFMGYLSTFNTYKVFTNPNGSTLSDDKKENIRKSLSKFNALLKTKRLGYFGLEEPKTKDTRVLEAYKKRVYHMLAIVGQIRQCVFHDLSEHSEYDLYSFIDNSKKVYRECRETLDYLVDERFDSINKGFIQGNKVNISLLIDMMKGYEADDIIRLYYDFIVLKSQKNLGFSIKKLREKMLDEYGFRFKDKQYDSVRSKMYKLMDFLLFCNYYRNDVVAGEALVRKLRFSMTDDEKEGIYADEAAKLWGKFRNDFENIAGHMNGDAIKELGKADMDFDEKILDSEKKNASDLLYFSKMIYMLTYFLDGKEINDLLTTLISKFDNIKEFLKIMKSSAVDVECELTAGYKLFNDSQRITNELFIVKNIASMRKPAASAKLTMFRDALTILGIDDNITDDRISEILKLKEKGKGIHGLRNFITNNVIESSRFVYLIKYANAQKIREVAKNEKVVMFVLGGIPDTQIERYYKSCVEFPDMNSSLEAKRSELARMIKNISFDDFKNVKQQAKGRENVAKERAKAVIGLYLTVMYLLVKNLVNVNARYVIAIHCLERDFGLYKEIIPELASKNLKNDYRILSQTLCELCDNGDESPNLFLKKNKRLRKCVEVDINNADSSMTRKYRNCIAHLTVVRELKEYIGDIRTVDSYFSIYHYVMQRCITKREDDTKQEEKIKYEDDLLKNHGYTKDFVKALNSPFGYNIPRFKNLSIEQLFDRNEYLTEK

SEQ ID NO: 3843 - protein, 921 aa, Artificial; identical to SEQ ID NO: 3015
  Synthetic

SEQ ID NO: 3844 - protein, 925 aa, Artificial; identical to SEQ ID NO: 3228
  Synthetic

SEQ ID NO: 3845 - protein, 1182 aa, Artificial
  Synthetic
MKKKSNIKTMGVKSIHYFNNDVIIENSLSENSEILFKPNYQKIDDLKILNSNTNNQTNNKVGFVNDNEKKGFMLEKDIPSSENEKVEKHINSYVSKVKFNSFIHNKLFGDLDNNFIPQIYSNFEDIRRIILNYIDHIIYSVNNKIIANKSENEVDRLSFDDIGMLPATKTYEEYGQTPEQRENMTDVVLPAFKEVLKDNNIKTGNYGNIKVDYWNIVKYAFKKSRGQEYTIKELSNDSLNYINNNINAIAAYSKKVKDYPVPNEVNLDNKYIIRLDRKNEKEKNAIKELNNHFSNEEIFKEIYRIEKEFQEKKELYNYLRIISLIRQYCVHFITFDSEEDSIKALINPSNNLIKNFKTSFIKNNEKYLLVLYEYQDFYSELLNKKNINKENNIFTEFYNYLIKDEAKNLGISVDKLQKRYVFNTNIEDDTKKAEYLNKMKVLIKFFITLELKYDKDFNNNDSSDVNSKYYYIEKLKTAKYANNEDIIKALSDKYDEFSIDDYKDEYDSLYNQSKDKIYDELYEKLNVKIDTDKLSDYVIDILGKEENNIIKKFTFDNLKVKYPKIEEEVNEYKKWDKIKNKKKKEVFENQLRDLYPDIFKHINEYNEEYEKNFKNKIKLPNISTDSKFFNLIYFVSEFLTTKDANNLFSTILTKLDSISSLLSLLNSYDSNSDIIGNEFIDYKFMLDNKEINIENICNFKDDIKILKSLRIKDNTKTSKANINDVDFNNIFNSFNDAGMSLEDFNRKIELTIESAEDDYVANNYKELVKYNALSSYKKSVNELNNKKYNKKTLFDLKDEDLKERINNYLSTLDLFKNYNGDKNYIKLVEEAVNYKKKEKPLKQYLRNSIYSSKQYQYIKDYANTRLCKYIIANEKILDYVLNDKFDTEGMKKHLYRVYLDYKKEEITKDKIDNKYNDVDINELKKALQEINLKTLSNNILKNIPEDRNLKAIIGLYFEICYIVIKGLYDVNSAYMIQIQEHEKIYKKCFGVSFNTKLLKKLELLKKFEEYEKNRNPESKSLKQIKGIIGDGKFGHEYVREETDDDEKERKALIYRRFRNTVEHSSLLANSDILKDFNEDESFTKNEFKMTSMFQLYHILIQRLLKKDSENNKDEDGNPKPYYPIGSEFEPDEKGYSTKALIIMNLPYLYNVARFNNLTIEKYYLRRFEGNVKNKKEPNSSSK

SEQ ID NO: 3846 - protein, 922 aa, Artificial
  Synthetic
MAKKNKMKPRELREAQKKARQLKAAEINNNAAPAIAAMPAAEVIAPAAEKKKSSVKAAGMKSILVSENKMYITSFGKGNSAVLEYEVDNNDYNKTQLSSKDNSNIELGDVDEVNITFSSKHGFGSGVEINTSNPTHRSGESSPVRWDMLGLKSELEKRFFGKTFDDNIHIQLIYNILDIEKILAVYVTNIVYALNNMLGVKGSESHDDFIGYLSTNNTYDVFIDPDNSSLSDDKKANVRKSLSKFNALLKTKRLGYFGLEEPKTKDNRVSEAYKKRVYHMLAIVGQIRQCVFHDKSGAKRFDLYSFINNIDPEYRETLDYLVDERFDSINKGFIQGNKVNISLLIDMMKGYEADDIIRLYYDFIVLKSQKNLGFSIKKLREKMLDEYGFRFKDKQYDSVRSKMYKLMDFLLFCNYYRNDVVAGEALVRKLRFSMTDDEKEGIYADEAAKLWGKFRNDFENIADHMNGDVIKELGKADMDFDEKILDSEKKNASNLLYFSKMIYMLTYFLDGKEINDLLTTLISKFDNIKEFLKIMKSSAVDVECELTAGYKLFNDSQRITNELFIVKNIASMRKPAASAKLTMFRDALTILGIDDNITDDRISEILKLKEKGKGIHGLRNFTTNNVIESSRFVYLIKYANAQKIREVAKNEKVVMFVLGGIPDTQIERYYKSCVEFPDMNSSLEVKRSELARMIKNIRFDDFKNVKQQAKGRENVAKERAKAVIGLYLTVMYLLVKNLVNVNARYVIAIHCLERDFGLYKEIIPELASKNLKNDYRILSQTLCELCDERDKSPNLFLKKNERLRKCVEVDINNADSIMTRKYRNCIAHLTVVRELKEYIGDIRTVDSYFSIYHYVMQRCITKREDDTKQEEKIKYEDDLLKNHGYTKDFVKALNSPFGYNIPRFKNLSIEQLFDRNEYLTEK

SEQ ID NO: 3847 - protein, 940 aa, Artificial
  Synthetic
MEKMEKIRKSENRKSRAKAAGLKSTFVVADKLALTSFGKGNKANLEKIIKNEEVEEINKPPKFDAKVEEKQIHIIGKTIKDGITEKPAGMRNDLIGAKQELEKMFFGKTFDDNIHIQLIYNILDIKKIFSVYANNIVYAVDHLDRTAKDKDVDYLGTLFTGNTYKHLLSVNPGDSKYKLKKEALKRFNTYYESAKSHFIYFGDVFYRKPTYEEASAMKEKGQGKKAQKPLVKTKAEVHQILRFLGTIRQCLVHKTDAKRDIIFNPDSMSNEFKTLIDSYYNGRVKALNDDFIKHNGSSSLPILFHYYGATEENRRAELTEGFYDFIIKRENKNMGFSLKKIREKMLEKQEASFIKEDGYNSVRHKLYILMDFIIYKTYAADIELQESIVATLRSNLTDEDKEATYEIQAKALWNKIGDDIVKKLMPLIDGNKIKGYKDEKIEIKKEWLKDVMISTENASYMTKMVYFMTLFLDGKEINEFLTVLINKFENIQGFFDVLGHNALAEKIEEPKEISKRPLKGFAELAAFTQKSTDVGLTEHLRLFENSVNISDEIRVTKNFARMERTIPDINRAQYADAAKVLGVIGAGEQDIDEYIEDKILGNPKRRTEGDKNLRNFLANNVVESSRFRHIVRYGDVTKVREIMQHKEVIRFVLKKIYENVPTQIDRYIFSLEKDKTFDTPEKKIDFLTEQINQISFEKFFGVQQKTKANSAENVDKEKKKALIGLYLTIAYLLTKNLVNINARYLMAVYNLEKDFSLLGFGDLQKMNKDKSNLPDYAMITKDFLNKDMLKPKNAKYMHTNLEDYSNFLFNKYRNSIAHLAVLEEASKYISEKGKITSYFELYHYIMQRSLQKEYELAKEHRYDMDDMYQNEEIPRKFNMAKKYHTYCKDLVKILNVPFGYNLGRFKAISIEPLFDRNHMGESLKADLTQSGSNKEKRNDE

SEQ ID NO: 3848 - protein, 954 aa, Artificial; identical to SEQ ID NO: 2909
  Synthetic

SEQ ID NO: 3849 - protein, 918 aa, Artificial
  Synthetic
MAKKNKMKPRELREAQKKARQLKAAEINNNAVPAIAAMPAAEAAAPAAEKKKSSVKAAGMKSILVSENKMYITSFGKGNSAVLEYEVDNNDYNKTQLSSKDNSNIELCDVGKVNITFSSRRGFESGVEINTSNPTHRSGESSSVRGDMLGLKSELEKRFFGKNFDDNIHIQLIYNILDIEKILAVYVTNIVYALNNMLGEGDESNYDFMGYLSTFNTYKVFTNPNGSTLSDDKKANVRKSLSKFNVLLKTKRLGYFGLEEPKTKDNRVSEAYKKRVYHMLAIVGQIRQCVFHDKSGAKRFDLYSFINNIDPEYRDTLDYLVEERLKSINKDFIQGNKVNISLLIDMMKGYEADDIIRLYYDFIVLKSQKNLGFSIKKLREKMLEEYGFRFKDKQYDSVRSKMYKLMDFLLFCNYYRNDIAAGEALVRKLRFSMTDDEKEGLYADEAAKLWGKFRNDFENIADHMNGDVIKELGKADMDFDEKILDSEKKNASDLLYFSKMIYMLTYFLDGKEINDLLTTLISKFDNIKEFLKIMKSSAVNVECELTAGYKLFNDSQRITNELFIVKNIASMRKPAASAKLTMFRDALTILGIDDKITDDRISEILKLKEKGKGIHGLRNFITNNVIESSRFVYLIKYANAQKIRKVAENEKVVMFVLGGIPDTQIERYYKSCVEFPDMNSSLEVKRSELARMIKNISFDDFKNVKQQAKGRENVAKERAKAVIGLYLTVMYLLVKNLVNVNARYVIAIHCLERDFGLYKEIIPELASKNLKNDYRILSQTLCELCDKSPNLFLKKNERLRKCVEVDINNADSSMTRKYRNCIAHLTVVRELKEYIGDIRTVDSYFSIYHYVMQRCITKREDDKKQEEKIKFEDDLLKNHGYTKDFVKALNSPFGYNIPRFKNLSIEQLFDRNEYLTEK

SEQ ID NO: 3850 - protein, 924 aa, Artificial; identical to SEQ ID NO: 2910
  Synthetic

SEQ ID NO: 3851 - protein, 936 aa, Artificial
  Synthetic
MSNKSIAKASGLKSTFKTGKDTYLMTSFGRGNTALAEKDIKEGTLEDILHTFSASLIGKKDVRIQKNKLQADVQLPVQDHNQLQAKSAIEKIFFGASCEDNFHVQIAYNVMDIKKLLTVYANNIVFTVNNLLRIEDEDFLGVFGVMNDFEKAQIAYAIISTGLITKDKGKYPTYYINKDAWYENQDGLLAPLKESVNQHKNPNIAFFTNVSNYIVNSLGFREFSNIQKAAKSFESIKEMGLDKCANYFSDAFSDSKGNINLEFIYESLRLLGSMRQTAFHSYDIQGISPGGKDFYSLFDIDIKASARTKEIIDTITGNKLNALNDNFVKTNTVNLNILFSAYPNIEKKELVKQFYDFSVRKVFKNMGFSVKNLREDILANESAVKKLGEKKYDSVRSKLYSLMDFVIYNYYLSHPQEADDFIELLRMNCVSKRGAEPEKIEDEKKQALYREEAARLWNQISGIVLENILPGIDKVQSRDKKLKEELDSGLQETVRSVVQTPDDLSYFAKAMYCICAFLDGKEINMFLDSLINSFDNIESLREIAGEVNCPVEFNANYSFFNHCGKMADELRFIKSIARMNKGKKASKNSNLHIKGFQYFDSAAILGEYDEEKVKALFRLEERTQKGQKVDHTLRNFFINNVIVSNRFNYVIRFINPKHARAIMENEALVSFALREINEKQIVRYYLSVRNNEDPIEADSDCMRKKLVSKLMHVSFATFEKVSNDASEAVEKERLKALVGLYLTIIYLIAKALVRINTSYSIAFGIFERDCEIIKQKAHDEKNALLEEKMKRILAKKKSASKAEYRSITQYFDARGRINRRVKRLIERNSRHYDERTFRQVLNCAEHLSVVSSFPAYVSEIKSVESYFDLYHYILLRVLKDGNFIKQEATLKAYEAAVRHQTAYKDFLYGILAPFAYNQARYINLACKKRFIESYGK

SEQ ID NO: 3852 - protein, 940 aa, Artificial; identical to SEQ ID NO: 3847
  Synthetic

SEQ ID NO: 3853 - protein, 922 aa, Artificial; identical to SEQ ID NO: 3587
  Synthetic

SEQ ID NO: 3854 - protein, 921 aa, Artificial; identical to SEQ ID NO: 3789
  Synthetic

SEQ ID NO: 3855 - protein, 952 aa, Artificial
  Synthetic
MGKKIHARDLREQRKTDRTEKFADQNKKREAERAVQKKDAAVSVKSVSSVSSKKDNVTKSMAKAAGVKSVFAVGNTVYMTSFGRGNDAVLEQKIVDTSHEPLNIDDPAYQLNVVTMNGYSVTGHRGETVSAVTDNPLRRFNGGKKDEPEQSVPTDMLCLKPTLEKKFFGKEFNDNIHIQLIYNILDIEKILAVYSTNAIYALNNMSADENIENSDFFMKRTTDETFDDFEKKKESTNSREKADFDAFEKFIANYRLAYFADAFYVNKKNPKGKAKNVLREDKELYSVLTLIGKLRHWCVHSEEGRAEFWLYKLDELKSDFKNVLDVVYNRPVEEINNRFIENNKVNIQILGSVYKNTDIAELVRSYYEFLITKKYKNMGFSIKKLRESMLEGKGYADKEYDSVRNKLYQMTDFILYTGYINEDSDRADDLVNTLRSSLKEDDKTTVYCKEADYLWKKYRESIREVADALDVDNIKNLSGSNIEIRDNELRKCFISYADSVSEFTKLIYLLTRFLSGKEINDLVTTLINKFDNIRSFLEILDELGLDRTFTAEYSFFEGSTKYLAELVELNSFVKSCSFDINAKRTMYRDALDILGIKSGKTEEDIEKMIDNILQIDANGDKKLKKNNGLRNFIASNVIDSNRFKYLVRYGNPKKIRETAKCKPAVRFVLNEIPDAQIERYYEACCPKNTALCSANKRREKLADMIAEIKFENFSDAGNYQKANVTSKTHEAEIKRKNQAIIRLYLTVMYIMLKNLVNVNARYVIAFHCVERDTKLYAESGLEVGNIEKNKTNLTMAVMGVKLENGIIKTEFDKSLAENAANRYLRNARWYKLILDNLKKSERAVVNEFRNTVCHLNAIRNININIKEIKEVENYFALYHYLIQKHLEKRFADNGGSTGDFISKLEEHKTYCKDFVKAYCTPFGYNLVRYKNLTIDGLFDKNYPGKDDSDEQK

SEQ ID NO: 3856 - protein, 923 aa, Artificial; identical to SEQ ID NO: 2862
  Synthetic

SEQ ID NO: 3857 - protein, 919 aa, Artificial; identical to SEQ ID NO: 2975
  Synthetic

SEQ ID NO: 3858 - protein, 954 aa, Artificial; identical to SEQ ID NO: 3519
  Synthetic

SEQ ID NO: 3859 - protein, 921 aa, Artificial
  Synthetic
MAKKNKMKPRERREAQKKARQLKAAEINNNAVPAIAAMPAAEAAAPAAEKKKSSVKAAGMKSILVSENKMYITSFGKGNSAVLEYEVDNNDYNKTQLSSKDNSNIELCDVDEVNITFSSKHGFESGVKINTSNPTHRSGESSSVRGDMLGLKSELEKRFFGKTFDDNIHIQLIYNILDIEKILAVYVTNIVYALNNMLGLENESNNDFMGYLSAKNTYDVFTDPDESDLSKNIKGNIKKSLSKFNDLLKTKRLGYFGLEEPKTKDKRVSEAYKKRVYHMLAIVGQIRQSVFHDKSNELDEYLYSFIDIIDSEYRETLDYLIDERFDSINKGFIQGNKVNISLLIDMMKGYEADDIIRLYYDFIVLKSQKNLGFSIKKLREKMLEEYGYRFKDKQYDSVRSKMYKLMDFLLFCNYYRNDVVAGEALVRKLRFSMTDDEKEGIYADEAAKLWGKFRNDFENIADHMNGDVIKELGKADMDFDEKILDSEKKNASDLLYFSKMIYMLTYFLDGKEINDLLTTLISKFDNIKEFLKIMKSSAVNVECELTAGYKLFNDSQRITNELFIVKNIASMRKPAASAKLTMFRDALTILGIDDKITDDRISEILKLKEKGKGIHGLRNFITNNVIESSRFVYLIKYANAQKIREVAKNEKVVMFVLGGIPDTQIERYYKSCVEFPDMNSSLEVKRSELARMIKNISFDDFKNVKQQAKGRENVAKERAKAVIGLYLTVMYLLVKNLVNVNARYVIAIHCLERDFGLYKEIIPELASKNLKNDYRILSQTLCELCDNRDESPNLFLKKNKRLRKCVEVDINNADSSMTRKYRNCIAHLTVVRELKEYIGDIRTVDSYFSIYHYVMQRCITKREDDKKQEEKIKFEDDLLKNHGYTKDFVKALNSPFGYNIPRFKNLSIEQLFDRNEYLTEK

SEQ ID NO: 3860 - protein, 922 aa, Artificial; identical to SEQ ID NO: 3163
  Synthetic

SEQ ID NO: 3861 - protein, 940 aa, Artificial; identical to SEQ ID NO: 3847
  Synthetic

SEQ ID NO: 3862 - protein, 922 aa, Artificial; identical to SEQ ID NO: 2840
  Synthetic

SEQ ID NO: 3863 - protein, 922 aa, Artificial; identical to SEQ ID NO: 3121
  Synthetic

SEQ ID NO: 3864 - protein, 927 aa, Artificial
  Synthetic
MPNHTKTKAKRLGVKSVLARKDKRLAITAFGRGNRAEIATECGSGGEGVTLPQVTPYFTVKDVREEIELERGRLSVAIPNPAENPAEDYLRLKGTLETEFFGREFPGNNVRIQIIHNILDIQKILGLYVTDIIYSVNNLQDSPEDIFGQEASREKVKAALEKMTPYFGYFGGAFQSPPKSKKGKSENDGETAEDKHNLSVIQFLTAMRQATANFENFRILFSSHLERDLRIDWKPLEENYRNRIAGINGKFMEHSATNLKIILDVLGVTRPEEKAEIARDYYRFSILKSGKYLGVNMTKLSEIMFQKNASAINGKNFDSFRKKIQMIVNFLLFRALRDTPMLDKMVARLRDTADDDAKAKVYESFAQAAWEELMKMNRNPILEKFEKGFPSEYRPRKNGKTDAITLSPEERAIDAALADVKLRAEDATPFTKILSFLCNFLEGKEINELLTAYIHKLESIQSFIDTLKELGEEVEFAEDYSLFSEDGGKRAGKIAEELRWLASIGKMKPDLNEAKRSLYVKAIQMLGVPDGSEYVTDEWLGKNVLLNAEDRKDRNKTSEVNPFRNFLARNVVDSRRFLYLLRYTRPEAVRALMANPKIVRYVLGRIPENQADAYYKNIIGKDKATGGEKPDRLTARLSEFSFETLANDETRKGTAANSKVKNPKEKNIEIERLKALTGLYLTVAYIAVKNLVKANARYGIAFSILDRDYALFEKKPGKDAFREAEQDGKNRLFTLVEYLLDRDDKVWYEPDPNKSHEENKLACRAYFDAKENRRYFSKKWRNIFRRHLRDAKDLCKAGELLSAARNDAENLSVLGALGRYVGDFRKGKDKGRMQSYFELYHFLLQRRMLEETLKEHMFLRIAYAGKLAEHRTPCTDLINIAYVSLGYNLARYKNLTCAALFDEQSDEGKERAARIGAKRKGKRRQPG

SEQ ID NO: 3865 - protein, 939 aa, Artificial; identical to SEQ ID NO: 2818
  Synthetic

SEQ ID NO: 3866 - protein, 951 aa, Artificial; identical to SEQ ID NO: 3003
  Synthetic

SEQ ID NO: 3867 - protein, 922 aa, Artificial; identical to SEQ ID NO: 3163
  Synthetic

SEQ ID NO: 3868 - protein, 918 aa, Artificial; identical to SEQ ID NO: 2830
  Synthetic

SEQ ID NO: 3869 - protein, 924 aa, Artificial; identical to SEQ ID NO: 2910
  Synthetic

SEQ ID NO: 3870 - protein, 954 aa, Artificial; identical to SEQ ID NO: 3131
  Synthetic

SEQ ID NO: 3871 - protein, 922 aa, Artificial; identical to SEQ ID NO: 2840
  Synthetic

SEQ ID NO: 3872 - protein, 931 aa, Artificial
  Synthetic
MEGRDMTETKSKREDIAKPPAAKSRSKAAGLKSTFAVNGSVLLTSFGRGNDAVPEKLITEKAVSELNTVKPRFSVEKPATSYSSSFGIKSHISATADNPLAGRAPVGEDAIRAKEVLEQRVFGKTFPDDNIHIQLIYNILDIRKILSTYANNVVFTINSMRRLDEYDREQDYLGYLYTGNSYERLLDIADKYAVDGEDWRNTAAGISNDFEKKQFQTINGFWDLLDMIEPYICYFSEAFFCETTVKNPDSGRIVPCLEQRSDGDIYNILRILSIVRQTCMHDNASMRTVMFTLGQNSVRDRKNGFDELAELLDYLYDEKIDIVNRDFLRNQKNNIELLSRIYGSSADSPERDRLVQNFYDFRVLSQDKNLGFSIKKLREKLLDSPALSVVRSKKYDTMRSKIYSLIDFMIYRKFSENHVAVDDFVEELRSLLTEDEKESAYSRWAETLINDGFAQEILVKLLPQTDPAVIGKIKGKKLLNDSIAGIKLKKDASFFTKIINVLCMFQDGKEINELVSSLVNKFANIQSFVDVMRSQGIDCGFTADYAMFAESGRISRELHILKGIARMQHSIAGLGDVKIYSSDDKFHGVSRRVYTDAAYILGFGERSEDNDGYVDDYVSSKLLGGADKNLRNFITNNVIKNRRFLYTVRYMNPKRAKKLVQNDALVVLALSGIPETQIDRYYKSCIEKRSFNPDLNEKIAALSEMITTLKIDDFEDVKQNPEKNANYEAKKNQRISKERYKACIGLYLTVLYLICKNLVKINARYSIAIGCLERDTQLHGVDFKGAAYMTRDVFIAKGWINPKKPTVKSIKEQYAFLTPYIFTTYRNMIAHLAAVTNAYKYIPQMDRFKSWFHLYHTVIQHSLIQQYEYDRDYGRKGAPVVSERVLQLLEQCREHSNYSRDLLHILNLPFGYNLPRYLNLSSEKYFDANAI

SEQ ID NO: 3873 - protein, 922 aa, Artificial; identical to SEQ ID NO: 2937
  Synthetic

SEQ ID NO: 3874 - protein, 954 aa, Artificial
  Synthetic
MGKKIHARDLREQRKTDRTEKFADQNKKREAERAVQKKDAAVSVKSVSSVSSKKDNVTKSMAKAAGVKSVFAVGNTVYMTSFGRGNDAVLEQKIVDTSHEPLNIDDPAYQLNVVTMNGYSVTGHRGETVSAVTDNPLRRFNGGKKDEPEQSVPTDMLCLKPTLEKKFFGKEFNDNIHIQLIYNILDIEKILAVYSTNAIYALNNMSADENIENSDFFMKRTTDETFDDFEKKKESTNSREKADFDAFEKFIGNYRLAYFADAFYVNKKNPKGKARNVLREDKELYSVLTLIGKLRHWCVHSEEGRAEFWLYKLDELKDDFKNVLDVVYNRPVEEINNRFIENNKVNIQILGSVYKNTDIAELVRSYYEFLITKKYKNMGFSIKKLRESMLEGKGYADKEYDSVRNKLYQMTDFILYTGYINEDSDRADDLVNTLRSSLKEDDKTTVYCKEADYLWKKYRESIREVADALDGDNIKRLSKSNIEIQEDKLRKCFISYADSVSEFTKLIYLLTRFLSGKEINDLVTTLINKFDNIRSFLEIMDELGLDRTFTAEYSFFEDSTKYLDELVELNSFVKSCSFDINAKRTMYRDALDILGIESDKTEEDIEKMIDNILQIDANGDKKLKKNNGLRNFIASNVIDSNRFKYLVRYGNPKKIRETAKCKPAVRFVLNEIPDAQIERYYEACCPKNTALCSANKRREKLADMIAEIKFENFSDAGNYQKANVTSKTHEAEIKRKNQAIIRLYLTVMYIMLKNLVNVNARYVIAFHCVERDTKLYAESGLEVGNIEKNKTNLTMAVMGVKLENGIIKTEFDKSLAENAANRYLRNARWYKLILDNLKKSERAVVNEFRNTVCHLNAIRNININIDGIKEVENYFALYHYLIQKHLENRFADKKVERDTGDFISKLEEHKTYCKDFVKAYCTPFGYNLVRYKNLTIDGLFDKNYPGKDDSDQQK

SEQ ID NO: 3875 - protein, 923 aa, Artificial; identical to SEQ ID NO: 2924
  Synthetic

SEQ ID NO: 3876 - protein, 918 aa, Artificial; identical to SEQ ID NO: 3715
  Synthetic

SEQ ID NO: 3877 - protein, 919 aa, Artificial
  Synthetic
MAKKNKMKPRELREAQKKARQLKVAEINNNAAPAIAAMPAAEVIAPVAGKKKSSVKAAGMKSILVSENKMYITSFGKGNSAVLEYEVDNNDYNKTQLSSKDNSNIELGNVNEVNITFSSKHGFESGVEINTSNPTHRSGESSPVRWDMLGLKSELEKRFFGKTFDDNIHIQLIYNILDIEKILAVYVTNIVYALNNMLGIKDSESYDDFMGYLSAKNTYEVFTHPDKSDLSDKVKGNIKKSFSTFNDLLKTKRLGYFGLEEPKTKDTRVSQAYKKRVYHMLAIVGQIRQSVFHDKSSKLDEDLYSFIDIIDPEYRETLDYLVDERFDSINKGFIQGNKVNISLLIDMMKGYEADDIIRLYYDFIVLKSQKNLGFSIKKLREKMLEEYGFRFKDKQYDSVRSKMYKLMDFLLFCNYYRNDIAAGEALVRKLRFSMTDDEKEGIYADEAAKLWGKFRNDFENIADHMNGDVIKELGKADMDFDEKILDSEKKNASDLLYFSKMIYMLTYFLDGKEINDLLTTLISKFDNIKEFLKIMKSSAVDVECELTAGYKLFNDSQRITNELFIVKNIASMRKPAASAKLTMFRDALTILGIDDKITDDRISEILKLKEKGKGIHDLRNFITNNVIESSRFVYLIKYANAQKIREVAKNEKVVMFVLGGIPDTQIERYYKSCVEFPDMNSSLEAKRSELARMIKNIRFDDFKNVKQQAKGRENVAKERAKAVIGLYLTVMYLLVKNLVNVNARYVIAIHCLERDFGLYKEIIPELASKNLKNDYRTLSQTLCGLCDKSPNLFLKKNKRLRKCVEVDINNADSIMTRKYRNCIAHLTVVRELKEYIGDIRTVDSYFSIYHYVMQRCITKRENDTKQEKKIKYEDDLLKNHGYTKDFVKALNSPFGYNIPRFKNLSIEQLFDRNEYLTEK

SEQ ID NO: 3878 - protein, 919 aa, Artificial; identical to SEQ ID NO: 3877
  Synthetic

SEQ ID NO: 3879 - protein, 922 aa, Artificial
  Synthetic
VIFMAKKNKMKPRELREAQKKARQLKAAEINNNAVPAIAAMPAAEVIAPAAEKKKSSVKAAGMKSILVSENKMYITSFGKGNSAVLEYEVDNNDYNQTQLSSDGSSNIELRGVNEVNITFSSKHGFESGVEINTSNPTHRSGESSPVRWDMLGLKSELEKRFFGKTFDDNIHIQLIYNILDIEKILAVYVTNIVYALNNMLGEGDDESHDDFMGYLSAKNTYDVFTDPDESDLSKNIKGNIKKSLSKFNDLLKTKRLGYFGLEEPKTKDTNALEAYKKRVYHMLAIVGQIRQSVFHDKSSKLDEDLYSFIDIIDSEYRETLDYLVDERFDSINKGFIQGNKVNISLLIDMMKGYEADDIIRLYYDFIVLKSQKNLGFSIKKLREKMLEEYGYRFKDKQYDSVRSKMYKLMDFLLFCNYYRNDVVAGEALVRKLRFSMTDDEKEGIYADEAAKLWGKFRNDFENIADHMNGDVIKELGKADMDFDEKILDSEKKNASDLLYFSKMIYMLTYFLDGKEINDLLTTLISKFDNIKEFLKIMKSSAVDVECELTAGYKLFNDSQRITNELFIVKNIASMRKPAASAKLTMFRDALTILGIDDKITDDRISEILKLKEKGKGIHGLRNFITNNVIESSRFVYLIKYANAQKIREVAENEKVVMFVLGGIPDTQIERYYKSCVEFPDMNSPLEAKRSELARMIKNIRFDDFKNVKQQAKGRENVAKERAKAVIGLYLTVMYLLVKNLVNVNARYVIAIHCLERDFGLYKEIIPELASKNLKNDYRILSQTLCELCDKSPNLFLKKNERLRKCVEVDINNADSSMTRKYRNCIAHLTVVRELKEYIGDIRTVDSYFSIYHYVMQRCITKREDDIKQEEKIKYEDDLLKNHGYTKDFVKALNSPFGYNIPRFKNLSIEQLFDRNEYLTEK

SEQ ID NO: 3880 - protein, 946 aa, Artificial; identical to SEQ ID NO: 2799
  Synthetic

SEQ ID NO: 3881 - protein, 924 aa, Artificial; identical to SEQ ID NO: 2910
  Synthetic

SEQ ID NO: 3882 - protein, 922 aa, Artificial; identical to SEQ ID NO: 3121
  Synthetic

SEQ ID NO: 3883 - protein, 925 aa, Artificial
  Synthetic
MAKKNKMKPRELREAQKKARQLKAAEIKNNAVPAIAAMPAAEAAAPAVEKKKSSVKAAGMKSILVSENKMYITSFGKGNSAVLEYEVDKVDNNNYNKTQLSSKDNSNIELGDVNEVNITFSSKRGNESGVEINTSNPTHRSGESSPVRWDMLGLKSELEKRFFGKTFDDNIHIQLIYNILDIEKILAVYVTNIVYALNNMLGIKGSESYDDFMGYLSARNTYEVFTHPDKSNLSDKVKGNIKKSLSKFNDLLKTKRLGYFGLEEPKTKDTRVSQAYKKRVYHMLAIVGQIRQCVFHDKSGAKRFDLYSFINNIDPEYRDTLDYLVEERLKSINKDFIEGNKVNISLLIDMMKGYEADDIIRLYYDFIVLKSQKNLGFSIKKLREKMLEEYGYRFKDKQYDSVRSKMYKLMDFLLFCNYYRNDVVAGEALVRKLRFSMTDDEKEGIYADEASKLWGKFRNDFENIADHMNGDVIKELGKADMDFDEKILDSEKKNASDLLYFSKMIYMLTYFLDGKEINDLLTTLISKFDNIKEFLKIMKSSAVDVECELTAGYKLFNDSQRITNELFIVKNIASMRKPAASAKLTMFRDALTILGIDDKITDDRISEILKLKEKGKGIHGLRNFITNNVIESSRFVYLIKYANAQKIREVAKNEKAVMFVLGGIPDTQIERYYKSCVEFPDMNSSLEAKRSELARMIKNIRFDDFKNVKQQAKGRENVAKERAKAVIGLYLTVMYLLVKNLVNVNARYVIAIHCLERDFGLYKEIIPELASKNLKNDYRILSQTLCELCDDRDESPNLFLKKNKRLRKCVEVDINNADSSMTRKYRNCIAHLTVVRELKEYIGDIRTVDSYFSIYHYVMQRCITKREDDTKQEEKIKYEDDLLKNHGYTKDFVKALNSPFGYNIPRFKNLSIEQLFDRNEYLTEK

SEQ ID NO: 3884 - protein, 919 aa, Artificial; identical to SEQ ID NO: 3538
  Synthetic

SEQ ID NO: 3885 - protein, 920 aa, Artificial; identical to SEQ ID NO: 3577
  Synthetic

SEQ ID NO: 3886 - protein, 952 aa, Artificial; identical to SEQ ID NO: 2996
  Synthetic

SEQ ID NO: 3887 - protein, 919 aa, Artificial; identical to SEQ ID NO: 2975
  Synthetic

SEQ ID NO: 3888 - protein, 922 aa, Artificial; identical to SEQ ID NO: 2896
  Synthetic

SEQ ID NO: 3889 - protein, 922 aa, Artificial
  Synthetic
MAKKNKMKPRELREAQKKARQFKAAEINNNAAPAIAAMPAAEVIAPVAEKKKSSVKAAGMKSILVSENKMYITSFGKGNSAVLEYEVDNNDYNKTQLSSKDNSNIELGDVDEVNITFSSKHGFGSGVEINTSNPTHRSGESSPVRWDMLGLKSELEKRFFGKTFDDNIHIQLIYNILDIEKILAVYVTNIVYALNNMLGEGDDESHDDFMGYLSTFNTYKVFTNPNGSTLSDDKKENIRKSLSKFNALLKTKRLGYFGLEEPKTKDTRASEAYKKRVYHMLAIVGQIRQCVFHDKSGAKRFDLYSFINNIDPEYRDTLDYLVDERFDSINKGFIQGNKVNISLLIDMMKGYEADDIIRLYYDFIVLKSQKNLGFSIKKLREKMLEEYGYRFKDKQYDSVRSKMYKLMDFLLFCNYYRNDVVAGESLVRKLRFSMTDDEKEGIYADEAEKLWGKFRNDFENIADHMNGDVIKELGKADMDFDEKILDSEKKNASDLLYFSKMIYMLTYFLDGKEINDLLTTLISKFDNIKEFLKIMKSSAVDVECELTAGYKLFNDSQRITNELFVVKNIASMRKPAASAKLTMFRDALTILGIDDKITDDRISEILKLKEKGKGIHGLRNFITNNVIESSRFVYLIKYANAQKIREVAKNEKVVMFVLGGIPDTQIERYYKSCVEFPDMNSSLEAKRSELARMIKNISFDDFKNVKQQAKGRENVAKERAKAVIGLYLTVMYLLVKNLVNVNARYVIAIHCLERDFGLYKEIIPELASKNLKNDYRILSQTLCELCDDRDESPNLFLKKNERLRKCVEVDINNADSSMTRKYRNCIAHLTVVRELKEYIGDIRTVDSYFSIYHYVMQRCITKRENDTKQEEKIKYEDDLLKNHGYTKDFVKALNSPFGYNIPRFKNLSIEQLFDRNEYLTEK

SEQ ID NO: 3890 - protein, 918 aa, Artificial; identical to SEQ ID NO: 2830
  Synthetic

SEQ ID NO: 3891 - protein, 925 aa, Artificial; identical to SEQ ID NO: 3610
  Synthetic

SEQ ID NO: 3892 - protein, 980 aa, Artificial; identical to SEQ ID NO: 3544
  Synthetic

SEQ ID NO: 3893 - protein, 922 aa, Artificial; identical to SEQ ID NO: 3723
  Synthetic

SEQ ID NO: 3894 - protein, 931 aa, Artificial; identical to SEQ ID NO: 3872
  Synthetic

SEQ ID NO: 3895 - protein, 924 aa, Artificial
  Synthetic
MAKKNKMKPRELREAQKKARQLKAAEIKNNAVPAIAAMPAAEAAAPAVEKKKSSVKAAGMKSILVSENKMYITSFGKGNSAVLEYEVDKVDNNNYNKTQLSSKDNSNIELGDVNEVNITFSSKRGNESGVEINTSNPTHRSGESSPVRWDMLGLKSELEKRFFGKTFDDNIHIQLIYNILDIEKILAVYVTNIVYALNNMLGEGDESNYDFMGYLSTFNTYKVFTNPNGSTLSDDKKENIRKSLSKFNALLKTKRLGYFGLEEPKTKDTRASEAYKKRVYHMLAIVGQIRQCVFHDKSGAKRFDLYSFINNIDPEYRETLDYLVDERFDSINKGFIQGNKVNISLLIDMMKGYEADDIIRLYYDFIVLKSQKNLGFSIKKLREKMLDEYGFRFKDKQYDSVRSKMYKLMDFLLFCNYYRNDVIAGEALVRKLRFSMTDDEKEGIYADEAAKLWGKFRNDFENIADHMNGDVIKELGKADMDFDEKILDSEKKNASDLLYFSKMIYMLTYFLDGKEINDLLTTLISKFDNIKEFLKIMKSSAVNVECELTAGYKLFNDSQRIPNELFIVKNIASMRKPAASAKLTMFRDALTILGIDDKITDDRISEILKLKEKGKGIHGLRNFITNNVIESSRFVYLIKYANAQKIREVAENEKVVMFVLGGIPDTQIERYYKSCVEFPDMNSSLEVKRSELARMIKNISFDDFKNVKQQAKGRENVAKERAKAVIGLYLTVMYLLVKNLVNVNARYVIAIHCLERDFGLYKEIIPELASKNLKNDYRILSQTLCELCDDRDESPNLFLKKNRRLRKCVEVDINNADSSMTRKYRNCIAHLTVVRELKEYIGDIRTVDSYFSIYHYVMQRCITKREDDTKQEEKIKYEDDLLKNHGYTKDFVKALNSPFGYNIPRFKNLSIEQLFDRNEYLTEK

SEQ ID NO: 3896 - protein, 925 aa, Artificial
  Synthetic
MAKKNKMKPRELREAQKKARQLKAAEINNNAVPAIAAMPAAEVIAPAAEKKKSSVKAAGMKSILVSENKMYITSFGKGNSAVLEYEVDKVDDNDYNKTQLSSKDNSNIELGNVNEVNITFSSRRGFESGVEINTSNPTHRSGESSSVRGDMLGLKSELEKRFFGKTFDDNIHIQLIYNILDIEKILAVYVTNIVYALNNMLGVKGSESYDDFMGYLSAQNTYYIFTHPDKSNLSDKVKGNIKKSLSKFNDLLKTKRLGYFGLEEPKTKDKRVSEAYKKRVYHMLAIVGQIRQSVFHDKSSKLDEDLYSFIDIIDSEYRETLDYLVDERFDSINKGFIQGNKVNISLLIDMMKGYEADDIIRLYYDFIVLKSQKNLGFSIKKLREKMLDEYGFRFKDKQYDSVRSKMYKLMDFLLFCNYYRNDVVAGEALVRKLRFSMTDDEKEGIYADEAAKLWGKFRNDFENIADHMNGDVIKELGKADMDFDEKILDSEKKNASDLLYFSKMIYMLTYFLDGKEINDLLTTLISKFDNIKEFLKIMKSSAIDVECELTAGYKLFNDSQRITNELFIVKNIASMRKPAASAKLTMFRDALTILGIDDNITDDRISEILKLKEKGKGIHGLRNFITNNVIESSRFVYLIKYANAQKIREVAKNEKVVMFVLGGIPDTQIERYYKSCVEFPDMNSSLEAKRSELARMIKNISFDDFKNVKQQAKGRENVAKERAKAVIGLYLTVMYLLVKNLVNVNARYVIAIHCLERDFGLYKEIIPELASKNLKNDYRILSQTLCELCDNRDKSPNLFLKKNKRLRKCVEVDINNADSSMTRKYRNCIAHLTVVRELKEYIGDIRTVDSYFSIYHYVMQRCITKREDDTKQEEKIKYEDDLLKNHGYTKDFVKALNSPFGYNIPRFKNLSIEQLFDRNEYLTEK

SEQ ID NO: 3897 - protein, 1140 aa, Artificial
  Synthetic
VIFMAKKNKMKPRELREAQKKARQLKAAEIKNNAVPAIAAMPAAEAAAPAVEKKKSSVKAAGMKSILVSENKMYITSFGKGNSAVLEYEVDKVDNNNYNKTQLSSKDNSNIELGDVNEVNITFSSKRGNESGVEINTSNPTHRSGESSPVRWDMLGLKSELEKRFFGKTFDDNIHIQLIYNILDIEKILAVYVTNIVYALNNMLGEGDESNYDFMGYLSTFNTYKVFTNPNGSTLSDDKKENIRKSLSKFNALLKTKRLGYFGLEEPKTKDTRASEAYKKRVYHMLAIVGQIRQCVFHDKSGAKRFDLYSFINNIDPEYRETLDYLVDERFDSINKGFIQGNKVNISLLIDMMKGYEADDIIRLYYDFIVLKSQKNLGFSIKKLREKMLDEYGFRFKDKQYDSVRSKMYKLMDFLLFCNYYRNDIAAGESLVRKLRFSMTDDEKEGIYADEAAKLWGKFRNDFENIADHMNGDVIKELGKADMDFDEKILDSEKKNASDLLYFSKMIYMLTYFLDGKEINDLLTTLISKFDNIKEFLKIMKSSAVDVECELTAGYKLFNDSQRITNELFIVKNIASMRKPAASAKLTMFRDALTILGIDDKITDDRISEILKLKEKGKGIHGLRNFITNNVIESSRFVYLIKYANAQKIREVAKNEKVVMFVLGGIPDTQIERYYKSCVEFPDMNSSLGVKRSELARMIKNISFDDFKNVKQQAKGRENVAKERAKAVIGLYLTVMYLLVKNLVNVNARYVIAIHCLERDFGLYKEIIPELASKNLKNDYRILSQTLCELCDKSPNLFLKKNERLRKCSLRAIFFSSITNPSTRFVNSLVYAGVCVAGALSAVHGGISVGQLTSFLSYANQYTKPFNEISGVVTELQNALACADRIFELIEETPQTPEPADAKTLTDPDGSVALEDVSFSYVPEQHLIEHFDLAAKPGQRIAIVGPTGCGKTTIINLLMRFYDVDSGSIQVEGTDIRDITRHSLRRSYGMVLQDTWLKRGTIRENIAYGRPEATLEEVVEAAKAAHAHSFIKRLPQGYDTVIGEDGGSISQGQKQLLCIARVMLCLPPMLILDEATSSIDTRTEIRIQKAFQKMMEGRTSFIVAHRLSTIRDADTILVMRDGHIVEQGDHESLLQKGGFY

SEQ ID NO: 3898 - protein, 925 aa, Artificial; identical to SEQ ID NO: 3125
  Synthetic

SEQ ID NO: 3899 - protein, 925 aa, Artificial; identical to SEQ ID NO: 3125
  Synthetic

SEQ ID NO: 3900 - protein, 924 aa, Artificial; identical to SEQ ID NO: 2967
  Synthetic

SEQ ID NO: 3901 - protein, 939 aa, Artificial
  Synthetic
MAKKKRITAKERKQNHRESLMKKADSNAEKEKAKKPVVENKPDTAISKDNTPKPNKEIKKSKAKLAGVKWVIKANNDVAYISSFGKGNNSVLEKRIMGDVSSNVNKDSHMYVNPKYTKKNYEIKNGFSSGSSLVTYPNKPDKNSGMDALCLKPYFEKDFFGHIFTDNMHIQAIYNIFDIEKILAKHITNIIYTVNSFDRNYNQSGNDTIGFDINYRIPYLKYGGGKDSKGNPKNKSKWKKRENFINFYNEAKPHLGYYENIFYDHGEPISEEKFYNYLNILNFIRNNTFHYKDNDIELYSENYSEEYVFINCLNEFVKNKFKNVNKNFISNEKNNLYIILNAYGEDTENVEVVKKYSKELYKLSVLKTNKNLGVNVKKLRESAIENGYCPLPYDKENDVAKLSSVKHKLYKTYDFVITHYLNSNDKPLLEIVEALRLSKNDDEKEIVYKKYAEKLFKADDVINPIKAISKLFVEKGNKLFREKVRINKEYIEDVSIDKNIYDFTKVIFFMTCFLDGKEINDLLTNIISKLQIIEDHNNVIKFIAENDDAVYKDYSDKYAIFRNAGKIATELEAIKSIARMENKIENAPNEPLLKDALLSLGVSDDTKVLENTYKKYFDSKEKTDKQSQKVSTFLMNNVINNNRFKYVIKYINPADINGLAKNRYLVKFVLSKIPEEQIDSYYKLFSNEEEPSCEEKIKLLTKKISKLNFQTLFENYKIPNVEKEKKKAIITLYFTIVYILVKNLVNINGLYTLALYFVERDGFFYKDICEKKDKKQLYKDDDYLLLPEIFSGSKYREETKNLKLPKEKDRDIMKKYLPNDEDRKEYNKFFKQYRNNIVHLNIIAKLSELTKNIDKDINSYFDIYHYCTQRVMFDYCKKNNNVVLAKMKDLAHIKSDCDEFSSKHTYPYSSAVLRFMNLPFAYNVPRFKNLSYKKFFDKQ

SEQ ID NO: 3902 - protein, 952 aa, Artificial; identical to SEQ ID NO: 3107
  Synthetic

SEQ ID NO: 3903 - protein, 919 aa, Artificial; identical to SEQ ID NO: 3508
  Synthetic

SEQ ID NO: 3904 - protein, 924 aa, Artificial; identical to SEQ ID NO: 2967
  Synthetic

SEQ ID NO: 3905 - protein, 921 aa, Artificial; identical to SEQ ID NO: 2836
  Synthetic

SEQ ID NO: 3906 - protein, 925 aa, Artificial
  Synthetic
MAKKNKMKPRELREAQKKARQLKAAEINNNAAPAIAAMPAAEVIAPAAEKKKSSVKAAGMKSILVSKNKMYITSFGKGNSAVLEYEVDKVDNNNYNKTQLSSKDNSNIELGDVNEVNITFSSKRGNESGVEINTSNPTHRSGESSPVRWDMLGLKSELEKRFFGKTFDDNIHIQLIYNILDIEKILAVYVTNIVYALNNMLGIKDSESYDDFMGYLSARNTYEVFTHPDKSNLSDKVKGNIKKSLSKFNDLLKTKRLGYFGLEEPKTKDTRVSQAYKKRVYHMLAIVGQIRQSVFHDKSSKLHEDLYSFIDIIDSEYRETLDYLVDERFDSINKGFIQGNKVNISLLIDMMKGYEADDIIRLYYDFIVLKSQKNLGFSIKKLREKMLDEYGFRFKDKQYDSVRSKMYKLMDFLLFCNYYRNDVAAGEALVRKLRFSMTDDEKEGIYADEAAKLWGKFRNDFENIADHMNGDVIKELGKADMDFDEKILDSEKKNASDLLYFSKMIYMLTYFLDGKEINDLLTTLISKFDNIKEFLKIMKSSAVNVECELTAGYKLFNDSQRITNELFIVKNIASMRKPAASAKLTMFRDALTILGIDDKITDDRISEILKLKEKGKGIHGLRNFITNNVIESSRFVYLIKYANAQKIREVAENEKVVMFVLGGIPDTQIERYYKSCVEFPDMNSSLEVKRSELARMIKNIRFDDFKNVKQQAKGRENVAKERAKAVIGLYLTVMYLLVKNLVNVNARYVIAIHCLERDFGLYKEIIPELASKNLKNDYRILSQTLCELCDNGDESPNLFLKKNRRLRKCVEVDINNADSSMTRKYRNCIAHLTVVRELKEYIGDIRTVDSYFSIYHYVMQRCITKREDDTKQEDKIKYEDDLLKNHGYTKDFVKALNSPFGYNIPRFKNLSIEQLFDRNEYLTEK

SEQ ID NO: 3907 - protein, 952 aa, Artificial; identical to SEQ ID NO: 3107
  Synthetic

SEQ ID NO: 3908 - protein, 919 aa, Artificial
  Synthetic
MAKKNKMKPRELREAQKKARQLKAAEINNNAAPAIAAMPAAEVIAPVAGKKKSSVKAAGMKSILVSENKMYITSFGKGNSAVLEYEVDNNDYNQTQLSSKNSSNIELRGVNEVNITFSSKHGFESGVEINTSNPTHRSGESSPVRWDMLGLKSELEKRFFGKTFDDNIHIQLIYNILDIEKILAVYVTNIVYALNNMLGIKGSESYDDFMGYLSARNTYEVFTHPDKSNLSDKVKGNIKKSLSKFNDLLKTKRLGYFGLEEPKTKDTRVSQAYKKRVYHMLAIVGQIRQCVFHDKSGAKRFDLYSFINNIDPEYRDTLDYLVEERLKSINKDFIEGNKVNISLLIDMMKGYEADDIIRLYYDFIVLKSQKNLGFSIKKLREKMLEEYGYRFKDKQYDSVRSKMYKLMDFLLFCNYYRNDVVAGEALVRKLRFSMTDDEKEGIYSDEAEKLWGKFRNDFENIADHMNGDAIKELGKADMDFDEKILDSEKKNASDLLYFSKMIYMLTYFLDGKEINDLLTTLISKFDNIKEFLKIMKSSAVDVECELTAGYKLFNDSQRITNELFIVKNIASMRKPASSAKLTMFRDALTILGIDDNITDDRISEILKLKEKGKGIHGLRNFITNNVIESSRFVYLIKYANAQKIRKVAKNEKVVMFVLGGIPDTQIERYYKSCVEFPDMNSSLEVKRSELARMIKNISFDDFKNVKQQAKGRENVAKERAKAVIGLYLTVMYLLVKNLVNVNARYVIAIHCLERDFGLYKEIIPELASKNLKNDYRILSQTLCELCDKSPNLFLKKNERLRKCVEVDINNADSSMTRKYRNCIAHLTVVRELKEYIGDIRTVDSYFSIYHYVMQRCITKRENDTKQEEKIKYEDDLLKNHGYTKDFVKALNSPFGYNIPRFKNLSIEQLFDRNEYLTEK

SEQ ID NO: 3909 - protein, 952 aa, Artificial; identical to SEQ ID NO: 3107
  Synthetic

SEQ ID NO: 3910 - protein, 923 aa, Artificial; identical to SEQ ID NO: 2862
  Synthetic

SEQ ID NO: 3911 - protein, 923 aa, Artificial; identical to SEQ ID NO: 3339
  Synthetic

SEQ ID NO: 3912 - protein, 919 aa, Artificial; identical to SEQ ID NO: 2876
  Synthetic

SEQ ID NO: 3913 - protein, 922 aa, Artificial; identical to SEQ ID NO: 2834
  Synthetic

SEQ ID NO: 3914 - protein, 919 aa, Artificial; identical to SEQ ID NO: 2825
  Synthetic

SEQ ID NO: 3915 - protein, 940 aa, Artificial; identical to SEQ ID NO: 3847
  Synthetic

SEQ ID NO: 3916 - protein, 922 aa, Artificial; identical to SEQ ID NO: 3094
  Synthetic

SEQ ID NO: 3917 - protein, 922 aa, Artificial; identical to SEQ ID NO: 2834
  Synthetic

SEQ ID NO: 3918 - protein, 952 aa, Artificial; identical to SEQ ID NO: 3107
  Synthetic

SEQ ID NO: 3919 - protein, 926 aa, Artificial; identical to SEQ ID NO: 3065
  Synthetic

SEQ ID NO: 3920 - protein, 922 aa, Artificial; identical to SEQ ID NO: 3551
  Synthetic

SEQ ID NO: 3921 - protein, 954 aa, Artificial
  Synthetic
MGKKIHARDLREQRKTDRTEKFADQNKKREAERAVQKKDAAVSVKSVSSVSSKKDNVTKSMAKAAGVKSVFAVGNTVYMTSFGRGNDAVLEQKIVDTSHEQLNIDDPAYQLNVVTMNGYSVTGHRGETVSAVTDNPLRRFNGGKKDEPEQSVPTDMLCLKPTLEKKFFGKEFNDNIHIQLIYNILDIEKILAVYSTNAIYALNNMSADENIENSDFFMKRTTDETFDDFEKKKESTNSREKADFDAFEKFIGNYRLAYFADAFYVNKKNPKGKAKNVLREDKELYSVLTLIGKLRHWCVHSEEGRAEFWLYKLNELKDDFKNVLDVVYNRPVEEINNRFIENNKVNIQILGSVYKNTDIAELVRSYYEFLITKKYKNMGFSIKKLRESMLEGKGYADKEYDSVRNKLYQMTDFILYTGYINEDSDRADDLVNTLRSSLKEDDKTTVYCKEADYLWKKYRESIREVADALDGDNIKRLSKSNIEIQEDKLRKCFISYADSVSEFTKLIYLLTRFLSGKEINDLVTTLINKFDNIRSFLEIMDELGLDRTFTAEYSFFEDSTKYLDELVELNSFVKSCSFDINAKRTMYRDALDILGIKSGKTEEDIEKMIDNILQIDANGDKKLKKNNGLRNFIASNVIDSNRFKYLVRYGNPKKIRETAKCKPAVRFVLNEIPDAQIERYYEACCPENTALCSANKKREKLADMIAEIEFENFSDAGNYQKANVTSKTHEAEIKRKNQAIIRLYLTVMYIMLKNLVNVNARYVIAFHCVERDTKLYAESGLEVGNIEKNKTNLTMAVMGVKLENGIIKTEFDKSLAENAANRYLRNARWYKLILDNLKKSERAVVNEFRNTVCHLNAIRNININIDGIKEVENYFALYHYLIQKHLENRFADKKVERDTGDFISKLEEHKTYCKDFVKAYCTPFGYNLVRYKNLTIDGLFDKNYPGKDDSDEQK

SEQ ID NO: 3922 - protein, 921 aa, Artificial
  Synthetic
MAKKNKMKPRELREAQKKARQLKAAEINNNATPTIAAMPAAEVIAPAAEKKKSSVKAAGMKSILVSKNKMYITSFGKGNSAVLEYEVDKVDNDNYNKTQLSSKDNSNIELGDVDEVNITFSSKHGFGSGVEISTSNPTHRSGESSPVRWDMLGLKSELEKRFFGKTFDDNIHIQLIYNILDIEKILAVYVTNIVYALNNMLGEGDESNYDFMGYLSTFNTYKVFTNPNGSTLSDDKKENIRKSLSKFNALLKTKRLGYFGLEEPKTKDTRASEAYKKRVYHMLAIVGQIRQSVFHDKSSKLDEDLYSFIDIIDPEYRETLDYLVDERFDSINKGFIQGNKVNISLLIDMMKGYEADDIIRLYYDFIVLKSQKNLGFSIKKLREKMLEEYGFRFKDKQYDSVRSKMYKLMDFLLFCNYYRNDIAAGESLVRKLRFSMTDDEKEGIYADEAAKLWGKFRNDFENIADHMNGDVIKELGKADMDFDEKILDSEKKNASDLLYFSKMIYMLTYFLDGKEINDLLTTLISKFDNIKEFLKIMKSSAVDVECELTAGYKLFNDSQRITNELFIVKNIASMRKPAASAKLTMFRDALTILGIDDKITDDRISEILKLKEKGKGIHGLRNFITNNVIESSRFVYLIKYANAQKIREVAKNEKVVMFVLGGIPDTQIERYYKSCVEFPDMNSSLEAKRSELARMIKNIRFDDFKNVKQQAKGRENVAKERAKAVIGLYLTVMYLLVKNLVNVNARYVIAIHCLERDFGLYKEIIPELASKNLKNDYRILSQTLCELCDKSPNLFLKKNERLRKCVEVDINNADSSMTRKYRNCIAHLTVVRELKEYIGDIRTVDSYFSIYHYVMQRCITKRENDTKQEDKIKYEDDLLKNHGYTKDFVKALNSPFGYNIPRFKNLSIEQLFDRNEYLTEK

SEQ ID NO: 3923 - protein, 921 aa, Artificial; identical to SEQ ID NO: 3252
  Synthetic

SEQ ID NO: 3924 - protein, 922 aa, Artificial; identical to SEQ ID NO: 2840
  Synthetic

SEQ ID NO: 3925 - protein, 922 aa, Artificial; identical to SEQ ID NO: 3327
  Synthetic

SEQ ID NO: 3926 - protein, 922 aa, Artificial; identical to SEQ ID NO: 3551
  Synthetic

SEQ ID NO: 3927 - protein, 956 aa, Artificial; identical to SEQ ID NO: 3282
  Synthetic

SEQ ID NO: 3928 - protein, 924 aa, Artificial
  Synthetic
MAKKNKMKPRELREAQKKARQFKAAEINNNAAPAIAAMPAAEVIAPVAEKKKSSVKAAGMKSILVSENKMYITSFGKGNSAVLEYEVDNNDYNKTQLSSKDNSNIELCGVNEVNITFSSKHGFESGVEINTSNPTHRSGESSPVRWDMLGLKSELEKRFFGKTFDDNIHIQLIYNILDIEKILAVYVTNIVYALNNMLGEGDESNYDFMGYLSTFNTYKVFTNPNGSTLSDDKKENIRKSLSKFNALLKTKRLGYFGLEEPKTKDTRVLEAYKKRVYHMLAIVGQIRQCVFHDLSEHSEYDLYSFIDNSKKVYRECRETLDYLVDERFDSINKGFIQGNKVNISLLIDMMKGYEADDIIRLYYDFIVLKSQKNLGFSIKKLREKILDEYGFRFKDKQYDSVRSKMYKLMDFLLFCNYYRNDIAAGESLVRKLRFSMTDDEKEGIYADEAAKLWGKFRNDFENIADHMNGDVIKELGKADMDFDEKILDSEKKNASDLLYFSKMIYMLTYFLDGKEINDLLTTLISKFDNIKEFLKIMKSSAIDVECELTAGYKLFNDSQRITNELFIVKNIASMRKPAASAKLTMFRDALTILGIDDKITDDRISEILKLKEKGKGIHGLRNFITNNVIESSRFVYLIKYANAQKIREVAKNEKVVMFVLGGIPDTQIERYYKSCVEFPDMNSSLEAKRSELARMIKNIRFDDFKNVKQQAKGRENVAKERAKAVIGLYLTVMYLLVKNLVNVNARYVIAIHCLERDFGLYKEIIPELASKNLKNDYRILSQTLCELCDNGDESPNLFLKKNKRLRKCVEVDINNADSSMTRKYRNCIAHLTVVRERKEYIGGIGTVDSYFSIYHYVMQRCITKREDDTKQEEKIKYEDDLLKNHGYTKDFVKALNSPFGYNIPRFKNLSIEQLFDRNEYLTEK

SEQ ID NO: 3929 - protein, 922 aa, Artificial
  Synthetic
MAKKNKMKPRELREAQKKARQLKAAEINNNAVPAIAAMPAAEAIAPAAEKKKSSVKAAGMKSILVSENKMYITSFGKGNSAVLEYEVDNNDYNQTQLSSKGSSNIELHGVNEVNITFSSKHGFESGVEINTSNPTHRSGESSPVRWDMLGLKSELEKRFFCKTFDDNIHIQLIYNILDIEKILAVYVTNIVYALNNMLGVKGSESHDDFIGYLSTNNIYDVFIDPDNSSLSDDKKANVRKSLSKFNDLLKTKRLGYFGLEEPKTKDTRVSQAYKKRVYHMLAIVGQIRQCVFHDKSGAKRFDIYSFINNIDPEYRETLDYLVDERFDSINKGFIQGNKVNISLLIDMMKGYEADDIIRLYYDFIVLKSQKNLGFSIKKLREKMLDEYGFRFKDKQYDSVRSKMYKLMDFLLFCNYYRNDVVAGEALVRKLRFSMTDDEKEGIYADEAEKLWGKFRNDFEYIADHMNGDVIKELGKADMDFDEKILDSEKKNASDLLYFSKMIYMLTYFLDGKEINDLLTTLISKFDNIKEFLKIMKSSAVNVECELTAGYKLFNDSQRITNELFIVKNIASMRKPAASAKLTMFRDALTILGIDDNITDDRISEILKLKEKGKGIHGLRNFITNNVIESSRFVYLIKYANAQKIREVAENEKVVMFVLGGIPDTQIERYYKSCVEVPDMNSSLEAKRSELARMIKNISFDDFKNVKQQAKGRENVAKERAKAVIGLYLTVMYLLVKNLVNVNARYVIAIHCLERDFGLYKEIIPELASKNLKNDYRILSQTLCELCDNGDESPNLFLKKNKRLRKCVEVDINNADSSMTRKYRNCIAHLTVVRELKEYIGDIRTVDSYFSIYHYVMQRCITKRENDTKQEEKIKYEDDLLKNHGYTRDFVKALNSPFGYNIPRFKNLSIEQLFDRNEYLTEK

SEQ ID NO: 3930 - protein, 925 aa, Artificial
  Synthetic
MAKKNKMKPRELREAQKKARQLKAAEINNNAVPAIAAMPAAEVIAPVAGKKKSSVKAAGMKSILVSENKMYITSFGKGNSAVLEYEVDKVDDNDYNKTQLSSKGSSNIELHGVNEVNITFSSKHGFESGVEINTSNPTHRSGESSPVRGDMLGLKSELEKRFFGKTFDDNIHIQLIYNILDIEKILAVYVTNIVYALNNMLGIKDSESYDDFMGYLSAKNTYEVFTHPDKSNLSDKAKGNIKKSFSTFNDLLKTKRLGYFGLEEPKTKDTRVSQAYKKRVYHMLAIVGQIRQCVFHDLSEHSEYDLYSFIDNSKKVYRECRETLDYLVDERFDSINKGFIQGNKVNISLLIDMMKGYEADDIIRLYYDFIVLKSQKNLGFSIKKLREKMLDEYGFRFKDKQYDSVRSKMYKLMDFLLFCNYYRNDVVAGEALVRKLRFSMTDDEKEGIYADEAAKLWGKFRNDFENIADHMNGDVIKELGKADMDFDEKILDSEKKNASDLLYFSKMIYMLTYFLDGKEINDLLTTLISKFDNIKEFLKIMKSSAVDVECELTAGYKLFNDSQRITNELFIVKNIASMRKPAASARLTMFRDALTILGIDDKITDDRISEILKLKEKGKGIHGLRNFITNNVIESSRFVYLIKYANAQKIREVAKNEKVVMFVLGGIPDTQIERYYKSCVEFPDMNSSLEAKRSELARMIKNISFDDFKNVKQQAKGRENVAKERAKAVIGLYLTVMYLLVKNLVNVNARYVIAIHCLERDFGLYKEIIPELASKNLKNDYRILSQTLCELCDKSPNLFLKKNERLRKCVEVDINNADSSMTRKYRNCIAHLTVVRELKEYIGDIRTVDSYFSIYHYVMQRCITKRENDTKQEDKIKYEDDLLKNHGYTKDFVKALNSPFGYNVPRFKNLSIEQLFDRNEYLTEK

SEQ ID NO: 3931 - protein, 927 aa, Artificial
  Synthetic
MAKKNKMKPRELREAQKKARQLKAAEINNNAAPAIAAMPAAEVIAPAAEKKKSSVKAAGMKSILVSENKMYITSFGKGNSAVLEYEVDKVDNDNYNKTQLSSKDNSNIELGDVDEVNITFSSKHGFGSGVEISTSNPTHRSGESSPVRWDMLGLKSELEKRFFGKTFDDNIHIQLIYNILDIEKILAVYVTNIVYALNNMLGEGDESNYDFMGYLSTFNTYKVFTNPNGSTLSDDKKENIRKSLSKFNALLKTKRLGYFGLEEPKTKDTRASEAYKKRVYHMLAIVGQIRQCVFHDLSEHSEYDLYSFIDNSKKVYRECRETLDYLVDERFDSINKGFIQGNKVNISLLIDMMKGYEADDIIRLYYDFIVLKSQKNLGFSIKKLREKMLDEYGFRFKDKQYDSVRSKMYKLMDFLLFCNYYRNDVVAGEALVRKLRFSMIDDEKEGIYADEAAKLWGKFRNDFENIADHMNGDVIKELGKADMDFDEKILDSEKKNASDLLYFSKMIYMLTYFLDGKEINDLITTLISKFDNIKEFLKIMKSSAVDVECELTAGYKLFNDSQRITNELFIVKNIASMRKPAASAKLTMFRDVLTILGIDDKITDDRISEILKLKEKGKGIHGLRNFITNNVIESSRFVYLIKYANAQKIREVAKNEKVVMFVLGGIPDTQIERYYKSCVEFPDMNSSLEAKRSELARMIKNISFDDFKNVKQQAKGRENVAKERAKAVIGLYLTVMYLLVKNLVNVNARYVIAIHCLERDFGLYKEIIPELASKNLKNDYRILSQTLCELCDDRDKSPNLFLKKNKRLRKCVEVDINNADSSMTRKYRNCIAHLTVVRELKEYIGDIRTVDSYFSIYHYVMQRCITKRENDTKQEDKIKYEDDLLKNHGYTKDFVKALNSPFGYNIPRFKNLSIEQLFDRNEYLTEK

SEQ ID NO: 3932 - protein, 952 aa, Artificial; identical to SEQ ID NO: 3107
  Synthetic

SEQ ID NO: 3933 - protein, 956 aa, Artificial; identical to SEQ ID NO: 3282
  Synthetic

SEQ ID NO: 3934 - protein, 919 aa, Artificial; identical to SEQ ID NO: 2876
  Synthetic

SEQ ID NO: 3935 - protein, 924 aa, Artificial; identical to SEQ ID NO: 2910
  Synthetic

SEQ ID NO: 3936 - protein, 924 aa, Artificial; identical to SEQ ID NO: 2910
  Synthetic

SEQ ID NO: 3937 - protein, 922 aa, Artificial; identical to SEQ ID NO: 3428
  Synthetic

SEQ ID NO: 3938 - protein, 952 aa, Artificial; identical to SEQ ID NO: 3107
  Synthetic

SEQ ID NO: 3939 - protein, 919 aa, Artificial; identical to SEQ ID NO: 2968
  Synthetic

SEQ ID NO: 3940 - protein, 920 aa, Artificial; identical to SEQ ID NO: 3169
  Synthetic

SEQ ID NO: 3941 - protein, 925 aa, Artificial; identical to SEQ ID NO: 3883
  Synthetic

SEQ ID NO: 3942 - protein, 926 aa, Artificial
  Synthetic
MAKKNKMKPRELREAQKKARQLKAAEINNNAVPAIAAMPAAEVIAPVAEKKKSSVKAAGMKSILVSKNKMYITSFGKGNSAVLEYEVDNNDYNKTQLSSKDNSNIELCGVNEVNITFSSKRGFESGVEINTSNPTHRSGESSPVRGDMLGLKSELEKRFFGKTFDDNIHIQLIYNILDIEKILAVYVTNIVYALNNMLGEGDDESHDDFMGYLSARNTYEVFTHPDKSNLSDKVKGNINKVKGNIKKSFSTFNDLLKTKRLGYFGFEEPKTKDTRVSQAYKKRVYHMLAIVGQIRQSVFHDKSSKLDEDLYSFIDIIDSEYRETLDYLVDERFDSINKGFIQGNKVNISLLIDMMKGYEADDIIRLYYDFIVLKSQKNLGFSIKKLREKMLEEYGYRFKDKQYDSVRSKMYKLMDFLLFCNYYRNDVVAGEALVRKLRFSMTDDEKEGIYADEAAKLWGKFRNDFENIADHMNGDVIKELGKADMDFDEKILDSEKKNASDLLYFSKMIYMLTYFLDGKEINDLLTTLISKFDNIKEFLKIMKSSAVDVECELTAGYKLFNDSQRITNELFIVKNIASMRKPAASAKLTMFRDALTILGIDDKITDDRISEILKLKEKGKGIHGLRNFITNNVIESSRFVYLIKYANAQKIREVAKNEKVVMFVLGGIPDTQIERYYKSCVEVPDVNSSLEAKRSELARMIKNISFDDFKNVKQQAKGRENVAKERAKAVIGLYLTVMYLLVKNLVNVNARYVIAIHCLERDFGLYKEIIPELASKNLKNDYRILSQTLCELCDKSPNLFLKKNERLRKCVEVDINNADSNMTRKYRNCIAHLTVVRELKEYIGDIRTVDSYFSIYHYVMQRCITKREDDKKQEEKIKFEDDLLKNHGYTKDFVKALNSPFGYNIPRFKNLSIEQLFDRNEYLTEK

SEQ ID NO: 3943 - protein, 921 aa, Artificial; identical to SEQ ID NO: 3859
  Synthetic

SEQ ID NO: 3944 - protein, 921 aa, Artificial; identical to SEQ ID NO: 3859
  Synthetic

SEQ ID NO: 3945 - protein, 921 aa, Artificial; identical to SEQ ID NO: 2836
  Synthetic

SEQ ID NO: 3946 - protein, 925 aa, Artificial
  Synthetic
MAKKNKMKPRELREAQKKARQLKAAEINNNAVPAIAAMPAAEVIAPAAEKKKSSVKAAGMKSILVSKNKMYITSFGKGNSAVLEYEVDKVDNNNYNKTQLSSKDNSNIELGDVNEVNITFSSKHGFESGVEINTSNPTHRSGESSPVRWDMLGLKSELEKRFFGKTFDDNIHIQLIYNILDIEKILAVYVTNIVYALNNMLGIKDSESHDDFIGYLSTNNIYDVFIDPDNSSLSDDKKANVRKSLSKFNALLKTKRLGYFGLEEPKTKDTKASEAYKKRVYHMLAIVGQIRQCVFHDKSGAKRFDLYSFINNIYPEYRDTLDYLVDERFDSINKGFIQGNKVNISLLIDMMKGYEADDIIRLYYDFIVLKSQKNLGFSIKKLREKMLDEYGFRFKDKQYDSVRSKMYKLMDFLLFCNYYRNDVAAGEALVRKLRFSMTDDEKDGIYADEAAKLWGKFRNDFENIADHMNGDVIKELGKADMDFDEKILDSEKKNASDLLYFSKMIYMLTYFLDGKEINDLLTTLISKFDNIKEFLKIMKSSAVNVECELTVGYKLFNDSQKITNELFIVKNIASMRKPAASAKLTMFRDALTILGIDDKITDDRISEILKLKEKGKGIHGLRNFITNNVIESSRFVYLIKYANAQKIREVAENEKVVMFVLGGIPDTQIERYYKSCVEFPDMNSSLEAKRSELARMIKNISFDDFKNVKQQAKGRENVAKERAKAVIGLYLTVMYLLVKNLVNVNARYVIAIHCLERDFGLYKEIIPELASKNLKNDYRILSQTLCELCDERDKSPNLFLKKNERLRKCVEVDINNADSIMTRKYRNCIAHLTVVRELKEYIGDIRTVDSYFSIYHYVMQRCITKREDDTKQEEKIKYEDDLLKNHGYTKDFVKALNSPFGYNIPRFKNLSIEQLFDRNEYLTEK

SEQ ID NO: 3947 - protein, 922 aa, Artificial; identical to SEQ ID NO: 2906
  Synthetic

SEQ ID NO: 3948 - protein, 927 aa, Artificial
  Synthetic
MAKKNKMKPRELREAQKKARQLKAAEINNNAAPAIAAMPAAQVIAPAAEKKKSSVKAAGMKSILVSENKMYITSFGKGNSAVLEYEVDKVDNNNYNKTQLSSKDNSNIELGDVNEVNITFSSKHGFESGVEINTSNPTHRSGESSPVRWDMLGLKSELEKRFFGKTFDDNIHIQLIYNILDIEKILAVYVTNIVYALNNMLGEGDESNYDFMGYLSTFNTYKVFTNPNGSTLSDDKKENIRKSLSKFNALLKTKRLGYFGLEEPKTKDTRVLEAYKKRVYHMLAIVGQIRQCVFHDLSEHSEYDLYSFIDNSKKVYRECRETLDYLVDERFDSINKGFIQGNKVNISLLIDMMKGYEADDIIRLYYDFIVLKSQKNLGFSIKKLREKILDEYGFRFKDKQYDSVRSKMYKLMDFLLFCNYYRNDIAAGESLVRKLRFSMTDDEKEGIYADEAAKLWGKFRNDFENIADHMNGDVIKELGKADMDFDEKILDSEKKNASDLLYFSKMIYMLTYFLDGKEINDLLTTLISKFDNIKEFLKIMKSSAVNVECELTAGYKLFNDSQRITNELFIVKNIASMRKPAASAKLTMFRDALTILGIDDKITDDRISEILKLKEKGKGIHGLRNFITNNVIESSRFVYLIKYANAQKIREVAKNEKVVMFVLGGIPDTQIERYYKSCVEFPDMNSSLEVKRSELARMIKNISFDDFKNVKQQAKGRENVAKERAKAVIGLYLTVMYLLVKNLVNVNARYVIAIHCLERDFGLYKEIIPELASKNLKNDYRILSQTLCELCDNGDESPNLFLKKNKRLRKCVEVDINNADSNMTRKYRNCIAHLTVVRELKEYIGDIRTVDSYFSIYHYVMQRCITKREDDTKQEEKIKYEDDLLKNHGYTKDFVKALNSPFGYNIPRFKNLSIEQLFDRNEYLTEK

SEQ ID NO: 3949 - protein, 922 aa, Artificial; identical to SEQ ID NO: 3620
  Synthetic

SEQ ID NO: 3950 - protein, 922 aa, Artificial; identical to SEQ ID NO: 3428
  Synthetic

SEQ ID NO: 3951 - protein, 922 aa, Artificial
  Synthetic
MAKKNKMKPRELREAQKKARQLKAAEINNNAAPAIAAMPAAEAAAPAAEKKKSSVKAAGMKSILVSENKMYITSFGKGNSAVLEYEVDNNDYNKTQLSSKGSSNIELHGVNEVNITFSSKHGFESGVEINTSNPTHRSGESSPVRGDMLGLKSELEKRFFGKTFDDNIHIQLIYNILDIEKILAVYVTNIVYALNNMLGEGDDESHDDFMGYLSTFNTYKVFTNPNGSTLSDDKKENIRKSLSKFNALLKTKRLGYFGLEEPKTKDTRVSQAYKKRVYHMLAIVGQIRQCVFHDKSGAKRFDLYSFINNIDPEYRETLDYLVDERFDSINKGFIEGNKINISLLIDMMKGYEADDIIRLYYDFIVLKSQKNLGFSIKKLREKMLDEYGFRFKDKQYDPVRSKMYKLMDFLLFCNHYRNDVAAGEALVRKLRFSMTDDEKEGIYADEAAKLWGKFRNDFENIADHMNGDVIKELGKADMDFDEKILDSEKKNASDLLYFSKMIYMLTYFLDGKEINDLLTTLISKFDNIKEFLKIMKSSAVDVECELTAGYKLFNDSQRITNELFIVKNIASMRKPAASAKLTMFRDALTILGIDDNITDDRISEILKLKEKGKGIHGLRNFITNNVIESSRFVYLIKYANAQKIREVAKNEKVVMFVLGGIPDTQIERYYKSCVEFPDMNSSLEAKRSELARMIKNISFDDFKNVKQQAKGRENVAKERAKAVIGLYLTVMYLLVKNLVNVNARYVIAIHCLERDFGLYKEIIPELASKNLKNDYRILSQTLCELCDDRDESPNLFLKKNKRLRKCVEVDINNADSSMTRKYRNCIAHLTVVRELKEYIGDIRTVDSYFSIYHYVMQRCITKRENDTKQEEKIKYEDDLLKNHGYTKDFVKALNSPFGYNIPRFKNLSIEQLFDRNEYLTEK

SEQ ID NO: 3952 - protein, 925 aa, Artificial; identical to SEQ ID NO: 3125
  Synthetic

SEQ ID NO: 3953 - protein, 952 aa, Artificial; identical to SEQ ID NO: 3496
  Synthetic

SEQ ID NO: 3954 - protein, 920 aa, Artificial; identical to SEQ ID NO: 3577
  Synthetic

SEQ ID NO: 3955 - protein, 919 aa, Artificial
  Synthetic
MAKKNKMKPRELREAQKKARQLKAAEIKNDAVPAIAAMPAAEAAAPAVEKKKSSVKAAGMKSILVSENKMYITSFGKGNSAVLEYEVDNNDYNKTQLSSEDNSNIELCDVDEVNITFSSKHGFESGVEINTSNPTHRSGESSPVRGDMLGLKSELEKRFFGKTFDDNIHIQLIYNILDIEKILAVYVTNIVYALNNMLGEGGDESHDDFMGYLSAKNTYDVFTDPDESDLSKNIKGNIKKSLSKFNDLLKTKRLGYFGLEEPKTKDKRVSEAYKKRVYHMLAIVGQIRQSVFHDKSNELDEYLYSFIDIIDSEYRDTLDYLVDERFDSINKGFVQGNKVNISLLIDMMKGYEADDIIRLYYDFIVLKSQKNLGFSIKKLREKMLDEYGFRFKDKQYDSVRSKMYKLMDFLLFCNYYRNDIAAGEALVRKLRFSMTDDEKEGIYADEAEKLWGKFRNDFENIADHMNGDVIKELGKADMDFDEKILDSEKKNASDLLYFSKMIYMLTYFLDGKEINDLLTTLISKFDNIKEFLKIMKSSAVDVECELTAGYRLFNDSQRITNELFIVKNIASMRKPAASAKLTMFRDALTILGIDDKITDDRISEILKLKEKGKGIHGLRNFITNNVIESSRFVYLIKYANAQKIREVAKNEKVVMFVLGGIPDTQIERYYKSCVEFPDMNSSLEAKRSELARMIKNISFDDFKNVKQQAKGRENVAKERAKAVIGLYLTVMYLLVKNLVNVNARYVIAIHCLERDFGLYKEIIPELASKNLKNDYRILSQTLCELCDESPNLFLKKNERLRKCVEVDINNADSSMTRKYRNCIAHLTVVRELKEYIGDIRTVDSYFSIYHYVMQRCITKREDDKKQEEKIKFEDDLLKNHGYTKDFVKALNSPFGYNIPRFKNLSIEQLFDRNEYLTEK

SEQ ID NO: 3956 - protein, 922 aa, Artificial; identical to SEQ ID NO: 3327
  Synthetic

SEQ ID NO: 3957 - protein, 925 aa, Artificial; identical to SEQ ID NO: 3883
  Synthetic

SEQ ID NO: 3958 - protein, 922 aa, Artificial; identical to SEQ ID NO: 3227
  Synthetic

SEQ ID NO: 3959 - protein, 925 aa, Artificial; identical to SEQ ID NO: 3610
  Synthetic

SEQ ID NO: 3960 - protein, 922 aa, Artificial
  Synthetic
MAKKNKMKPRELREAQKKARQLKAAEINNNAAPAIAAMPAAEVIAPAAEKKKSSVKAAGMKSIFVSENKMYITSFGKGNSAVLEYEVDNNDYNQTQLSSKGSSNIELHGVNEVNITFSSKHGFGSGVEINTSNPTHRSGESSPVRWDMLGLKSELEKRFFGKTFDDNIHIQLIYNILDIEKILAVYVTNIVYALNNMLGVKGSESYDDFMGYLSARNTYEVFTHPDKSNLSDKAKGNIKKSFSTFNDLLKTKRLRYFGLEEPKTKDTRVSQAYKKRVYHMLAIVGQIRQSVFHDKSSKLDEDLYSFIDIIDPEYRETLDYLVDERFDSINKGFIQGNKVNISLLIDMMKGYEADDIIRLYYDFIVLKSQKNLGFSIKKLREKMLDEYGFRFKDKQYDSVRSKMYKLMDFLLFCNYYRNDVAAGEALVRKLRFSMTDDEKEGIYADEAAKLWGKFRNDFENIADHMNGDVIKELGKADMDFDEKILDSEKKNASDLLYFSKMIYMLTYFLDGKEINDLLTTLISKFDNIKEFLKIMKSSAVDVECELTAGYKLFNDSQRITNELFIVKNIASMRKPAASAKLTMFRDALTILGIDDNITDDRISEILKLKEKGKGIHGLRNFITNNVIESSRFVYLIKYANAQKIREVAENEKVVMFVLGGIPDTQIERYYKSCVEVPDMNSSLEAKRSELARMIKNISFDDFKNVKQQAKGRENVAKERAKAVIGLYLTVMYLLVKNLVNVNARYVIAIHCLERDFGLYKEIIPELASKNLKNDYRILSQTLCELCDDRDESPNLFLKKNKRLRKCVEVDINNADSSMTRKYRNCIAHLTVVRELKEYIGDIRTVDSYFSIYHYVMQRCITKREDDKKQEEKIKYEDDLLKNHGYTKDFVKALNSPFGYNIPRFKNLSIEQLFDRNEYLTEK

SEQ ID NO: 3961 - protein, 952 aa, Artificial; identical to SEQ ID NO: 2976
  Synthetic

SEQ ID NO: 3962 - protein, 919 aa, Artificial; identical to SEQ ID NO: 2975
  Synthetic

SEQ ID NO: 3963 - protein, 922 aa, Artificial; identical to SEQ ID NO: 3889
  Synthetic

SEQ ID NO: 3964 - protein, 954 aa, Artificial
  Synthetic
MGKKIHARDLREQRKTDRTEKFADQNKKREAERAVQKKDAAVSVKSVSSVSSKKDNATKSMAKAAGVKSVFAVGNTVYMTSFGRGNDAVLEQKIVDTSHEPLNIDDPAYQLNVVTMNGYSVTGHRGETVSAVTDNPLRRFNGGKKDEPEQSVPTDMLCLKPTLEKKFFGKEFNDNIHIQLIYNILDIEKILAVYSTNAIYALNNMSADENIENSDFFMKRTTDETFDDFEKKKESTNSREKADFDAFEKFIANYRLAYFADAFYVNKKNPKGKARNVLREDKELYSVLTLIGKLRHWCVHSEEGRAEFWLYKLDELKDDFKNVLDVVYNRPVEEINNRFIENNKVNIQILGSVYKNTDIAELVRSYYEFLITKKYKNMGFSIKKLRESMLEGKGYADKEYDSVRNKLYQMTDFILYTGYINEDSDRADDLVNTLRSSLKEDDKTTVYCKEADYLWKKYCESIREVAEALDGDNIKRLSKSNIEIRDNELRKCFISYADSVSEFTKLIYLLTRFLSGKEINDLVTTLINKFDNIRSFLEILDELGLDRTFTAEYSFFEGSTKYLAELVELNSFVKSCSFDINAKRTMYRDALDILGIKSGKTEEDIEKMIDNILQIDANGDKKLKKNNGLRNFIASNVIDSNRFKYLVRYGNPKKIRETAKCKPAVRFVLNEIPDAQIERYYEACCPKNTALCSANKRREKLADMIAEIKFENFSDAGNYQKANVTSKTHEAEIKRKNQAIIRLYLTVMYIMLKNLVNVNARYVIAFHCVERDTKLYAESGLEVGNIEKNKTNLTMAVMGVKLENGIIKTEFDKSLAENAANRYLRNARWYKLILDNLKKSERAVVNEFRNTVCHLNAIRNININIDGIKEVENYFALYHYLIQKHLENRFADKKVERDTGDFISKLEEHKTYCKDFVKAYCTPFGYNLVRYKNLTIDGLFDKNYPGKDDSDKQK

SEQ ID NO: 3965 - protein, 925 aa, Artificial
  Synthetic
MAKKNKMKPRELREAQKKARQLKAAEINNNAAPAIAAMPAAEVIAPAAEKKKSSVKAAGMKSILVSKNKMYITSFGKGNSAVLEYEVDKVDNNNYNKTQLSSKDNSNIELGDVNEVNITFSSKRGNESGVEINTSNPTHRSGESSPVRWDMLGLKSELEKRFFGKTFDDNIHIQLIYNILDIEKILAVYVTNIVYALNNMLGIKDSESYDDFMGYLSARNTYEVFTHPDKSNLSDKVKGNIKKSLSKFNDLLKTKRLGYFGLEEPKTKDTRVSQAYKKRVYHMLAIVGQIRQSVFHDKSSKLHEDLYSFIDIIDSEYRETLDYLVDERFDSINKGFIQGNKVNISLLIDMMKGYEADDIIRLYYDFIVLKSQKNLGFSIKKLREKMLDEYGFRFKDKQYDSVRSKMYKLMDFLLFCNYYRNDVAAGEALVRKLRFSMTDDEKEGIYADEAAKLWGKFRNDFENIADHMNGDVIKELGKADMDFDEKILDSEKKNASDLLYFSKMIYMLTYFLDGKEINDLLTTLISKFDNIKEFLKIMKSSAVDVECELTAGYKLFNDSQRITNELFIVKNIASMRKPAASAKLTMFRDALTILGIDDKITDDRISEILKLKEKGKGIHGLRNFITNNVIESSRFVYLIKYANAQKIREVAKNEKVVMFVLGGIPDTQIERYYKSCVEFPDMNSSLEAKRSELARMIKNISFDDFKNVKQQAKGRENVAKERAKAVIGLYLTVMYLLVKNLVNVNARYVIAIHCLERDFGLYKEIIPELASKNLKNDYRILSQTLCELCDERDKSPNLFLKKNERLRKCVEVDINNADSIMTRKYRNCIAHLTVVRELKEYIGDIRTVDSYFSIYHYVMQRCITKREDDTKQEEKIKYEDDLLKNHGYTKDFVKALNSPFGYNIPRFKNLSIEQLFDRNEYLTEK

SEQ ID NO: 3966 - protein, 1011 aa, Artificial
  Synthetic
MVVTYLKWIIILREGTMKMAKKKNAKQRREEEKNRLKAKIEKFKIKYAEQETVDKITEEIAQSDKIMRTESILVQHTKKSLAKASGVKSVFIKDDEVIMTSFGRGNDAVVEKIIKDNNVDEKNTKPAYEIVDIEKNGDLIKVQSRRCKNIESANTELPPEKIGMDLIRCKDKLEEIYFGRTFNDNIHIQLIYNILDIEKILSVYINNAVYALGNLERKENDKEKDLVGYLSARAGYNKVINKAINDEKIKDRIEDLKEFIENGNRLGYFGDIFFKKEEVSKNGKKPKKVEVLKSEKEIFDILALLGSLRQFCFHYDEAVFENEDGVIDKEYNDNSWLYNLEKLEPEFKDTLDYFYNRKINDINKGFIKTNQINLHIICDELGLNWDKEQVVGDYYDFLIAKKYKNIGFSIKKIREHMFDIYEAFDIKDKRFDSVRSIMYKIIDFVIYYSFIHYKQDEVDEIVNYLRSTLSEEQKKEKYIKLAGNIWAEYKTQFNKLKDILLANIKEFSDAKEDDVYYEEFKNFKFNEVGKEKLGENAEYFCKLMYLLTLFLDGKEINDLLTTLINKFDNIRSFVELMKEENIECIFDKKFAFFDESKNVCSTLREINSFARMQKPLNNVSVKREMYKDAIKILLKDTRAEEQNIDRILNEYIPSKEDKGIKKDFRNFIIKNIIKSNRFMYLVKYSNPTDVRNLASNRNVVKFVLNAIPDTQIDRYYKSCIQHYSNEVDKETQIQELTDIITGIDYLDFLDVRQSYRNEDKSKKQAVVTLYLTILYILTKNLVNVNSRYVIALHCLERDSKLYGYTKLSKKNNKKLEKIKPPKYHEFTKYFIDNRYFDRKKKNKKYGEYTSKKISTYIETNMKNFIGCEQFRTPERYRDTQIDMFVKYRNSIAHLNAVRKASKYINDIRGFDTYFELYHYIMQRDLKDILEKIAEGAAKETEEGQKQDELLKTYFDNLDKYGTYVKDFVKALNIPFAYNYPRYKNLSIDELFDKNNTRKTIKIQDKKLEERT

SEQ ID NO: 3967 - protein, 924 aa, Artificial; identical to SEQ ID NO: 2843
  Synthetic

SEQ ID NO: 3968 - protein, 919 aa, Artificial; identical to SEQ ID NO: 2825
  Synthetic

SEQ ID NO: 3969 - protein, 925 aa, Artificial; identical to SEQ ID NO: 3125
  Synthetic

SEQ ID NO: 3970 - protein, 919 aa, Artificial; identical to SEQ ID NO: 2893
  Synthetic

SEQ ID NO: 3971 - protein, 954 aa, Artificial; identical to SEQ ID NO: 2909
  Synthetic

SEQ ID NO: 3972 - protein, 954 aa, Artificial; identical to SEQ ID NO: 2909
  Synthetic

SEQ ID NO: 3973 - protein, 954 aa, Artificial; identical to SEQ ID NO: 2858
  Synthetic

SEQ ID NO: 3974 - protein, 921 aa, Artificial; identical to SEQ ID NO: 2881
  Synthetic

SEQ ID NO: 3975 - protein, 919 aa, Artificial; identical to SEQ ID NO: 2893
  Synthetic

SEQ ID NO: 3976 - protein, 922 aa, Artificial
  Synthetic
MAKKNKMKPRELREAQKKARQLKAAEINNNAAPAIAAMPAAEVIAPAAEKKKSSVKAAGMKSILVSKNKMYITSFGKGNSAVLEYEVDNNDYNQTQLSSKNSSNIELHGVNEVNITFSSKHGFESGVEINTSNPTHRSGESSPVRGDMLGLKSELEKRFFGKTFDDNIHIQLIYNILDIEKILAVYVTNIVYALNNMLGEGDDESHDDFMGYLSAKNTYDVFTDPDESDLSKNIKGNIKKSLSKFNDLLKTKRLGYFGLEEPKTKDTNALEAYKKRVYHMLAIVGQIRQSVFHDKSSKLDEDLYSFIDIIDSEYRETLDYLVDERFDSINKGFIQGNKVNISLLIDMMKGYEADDIIRLYYDFIVLKSQKNLGFSIKKLREKMLEEYGYRFKDKQYDSVRSKMYKLMDFLLFCNYYRNDVVAGEALVRKLRFSMTDDEKEGIYADEASKLWGKFRNDFENIADHMNGDVIKELGKADMDFDEKILDSEKKNASDLLYFSKMIYMLTYFLDGKEINDLLTTLISKFDNIKEFLKIMKSSAVNVECELTTGYKLFNDSQRITNELFIVKNIASMRKPAASAKLTMFRDALTILGIDDKITDDRISEILKLKEKGKGIHGLRNFITNNVIESSRFVYLIKYANAQKIREVAENEKVVMFVLGGIPDTQIERYYKSCVEFPDMNSSLKAKRSELARMIKNIRFDDFKNVKQQAKGRENVAKERAKAVIGLYLTVMYLLVKNLVNVNARYVIAIHCLERDFGLYKEIIPELASKNLKNDYRILSQTLCELCDNRDESPNLFLKKNKRLRKCVEVDINNADSNMTRKYRNCIAHLTVVRELNKYIKDIRTVDSYFSIYHYVMQRCITKREDDKKQEEKIKYEDDLLKNHGYTKDFVKALNSPFGYNIPRFKNLSIEQLFDRNEYLTEK

SEQ ID NO: 3977 - protein, 926 aa, Artificial; identical to SEQ ID NO: 3065
  Synthetic

SEQ ID NO: 3978 - protein, 925 aa, Artificial; identical to SEQ ID NO: 3555
  Synthetic

SEQ ID NO: 3979 - protein, 900 aa, Artificial; identical to SEQ ID NO: 2863
  Synthetic

SEQ ID NO: 3980 - protein, 1001 aa, Artificial; identical to SEQ ID NO: 3134
  Synthetic

SEQ ID NO: 3981 - protein, 922 aa, Artificial; identical to SEQ ID NO: 2817
  Synthetic

SEQ ID NO: 3982 - protein, 954 aa, Artificial; identical to SEQ ID NO: 2989
  Synthetic

SEQ ID NO: 3983 - protein, 954 aa, Artificial; identical to SEQ ID NO: 2846
  Synthetic

SEQ ID NO: 3984 - protein, 922 aa, Artificial; identical to SEQ ID NO: 2840
  Synthetic

SEQ ID NO: 3985 - protein, 922 aa, Artificial; identical to SEQ ID NO: 3375
  Synthetic

SEQ ID NO: 3986 - protein, 922 aa, Artificial; identical to SEQ ID NO: 2840
  Synthetic

SEQ ID NO: 3987 - protein, 925 aa, Artificial; identical to SEQ ID NO: 3965
  Synthetic

SEQ ID NO: 3988 - protein, 919 aa, Artificial; identical to SEQ ID NO: 2876
  Synthetic

SEQ ID NO: 3989 - protein, 927 aa, Artificial
  Synthetic
MAKKNKMKPRELREAQKKARQLKAAEINNNAAPAIAAMPAAQVIAPAAEKKKSSVKAAGMKSILVSENKMYITSFGKGNSAVLEYEVDKVDNNNYNKTQLSSKDNSNIELGDVNEVNITFSSKHGFESGVEINTSNPTHRSGESSSVRGDMLGLKSELEKRFFGKTFDDNIHIQLIYNILDIEKILAVYVTNIVYALNNMLGEGDESNYDFMGYLSTFNTYKVFTNPNGSTLSDDKKENIRKSLSKFNALLKTKRLGYFGLEEPKTKDTRVLEAYKKRVYHMLAIVGQIRQCVFHDLSEHSEYDLYSFIDNSKKVYRECRETLDYLVDERFDSINKGFIQGNKVNISLLIDMMKGYEADDIIRLYYDFIVLKSQKNLGFSIKKLREKILDEYGFRFKDKQYDSVRSKMYKLMDFLLFCNYYRNDIAAGESLVRKLRFSMTDDEKEGIYADEAAKLWGKFRNDFENIADHMNGDVIKELGKADMDFDEKILDSEKKNASDLLYFSKMIYMLTYFLDGKEINDLLTTLISKFDNIKEFLKIMKSSAIDVECELTAGYKLFNDSQRITNELFIVKNIASMRKPAASAKLTMFRDALTILGIDDKITDDRISEILKLKEKGKGIHGLRNFITNNVIESSRFVYLIKYANAQKIREVAKNEKVVMFVLGGIPDTQIERYYKSCVEFPDMNSSLEAKRSELARMIKNIRFDDFKNVKQQAKGRENVAKERAKAVIGLYLTVMYLLVKNLVNVNARYVIAIHCLERDFGLYKEIIPELASKNLKNDYRILSQTLCELCDNGDESPNLFLKKNKRLRKCVEVDINNADSSMTRKYRNCIAHLTVVRELKEYIGDIRTVDSYFSIYHYVMQRCITKREDDTKQEEKIKYEDDLLKNHGYTKDFVKALNSPFGYNIPRFKNLSIEQLFDRNEYLTEK

SEQ ID NO: 3990 - protein, 954 aa, Artificial; identical to SEQ ID NO: 2989
  Synthetic

SEQ ID NO: 3991 - protein, 922 aa, Artificial; identical to SEQ ID NO: 3227
  Synthetic

SEQ ID NO: 3992 - protein, 921 aa, Artificial; identical to SEQ ID NO: 3252
  Synthetic

SEQ ID NO: 3993 - protein, 921 aa, Artificial
  Synthetic
VIFMAKKNKMKPRELREAQKKARQLKAAEINNNAVPAIAAMPAAEAAAPAAEKKKSSVKAAGMKSILVSENKMYITSFGKGNSAVLEYEVDNNDYNKTQLSSKDNSNIELCDVNEVNITFSSKHGFESGVEINTSNPTHRSGESSPVRWDMLGLKSELEKRFFGKTFDDNIHIQLIYNILDIEKILAVYITNIVYALNNMLGVKGSESHDDFIGYLSTNNIYDVFIDPDNSSLSDDKKANVRKSLSKFNALLKTKRLGYFGLEEPKTKDNRVSEAYKKRVYHMLAIVGQIRQSVFHDKSSKLHEDLYSFIDIIDSEYRETLDYLVDERFDSINKGFIQGNKVNISLLIDMMKGYEADDIIRLYYDFIVIKSQKNLGFSIKKLREKMLDEYGFRFKDKQYDSVRSKMYKLMDFLLFCNYYRNDVVAGEALVRKLRFSMTDDEKEGIYADEAEKLWGKFRNDFENIADHMNGDVIKELGKADMDFDEKILDSEKKNASDLLYFSKMIYMLTYFLDGKEINDLLTTLISKFDNIKEFLKIMKSSAVDVECELTAGYKLFNDSQRITNELFIVKNIASMRKPASSAKLTMFRDALTILGIDDNITDDRISEILKLKEKGKGIHGLRNFITNNVIESSRFVYLIKYANAQKIRKVAKNEKVVMFVLGGIPDTQIERYYKSCVEFPDMNSSLEVKRSELARMIKNISFDDFKNVKQQAKGRENVAKERAKAVIGLYLTVMYLLVKNLVNVNARYVIAIHCLERDFGLYKEIIPELASKNLKNDYRILSQTLCELCDKSPNLFLKKNRRLRKCVEVDINNADSSMTRKYRNCIAHLTVVRELKEYIGDIRTVDSYFSIYHYVMQRCITKRENDTKQEEKIKYEDDLLKNHGYTKDFVKALNSPFGYNIPRFKNLSIEQLFDRNEYLTE

SEQ ID NO: 3994 - protein, 952 aa, Artificial; identical to SEQ ID NO: 3107
  Synthetic

SEQ ID NO: 3995 - protein, 922 aa, Artificial; identical to SEQ ID NO: 3428
  Synthetic

SEQ ID NO: 3996 - protein, 1141 aa, Artificial
  Synthetic
MGVEKNKVFESVIMNFDQERKYGFIEYKETNNLFFHMENVKNPKEIVKGAKVRFEIYENPKPKKQNQRFSAINVEVITDETHKEAKIQKNEFKTFDQFTKELQETQKVNGETKKEHITKNKHTNVKAAGVKSVFAVDDGNVLITSFGRGNAADIETLKSDDDKTINLTETENQKKYVVTNKRSNVKGLADNPTKVESIIPGETQIGFKSILEKHFFGRTFNDNIHIQIIHNILDIKKILAVHTNNIVYALDNIHERGRENSAEKPIDMIGAGGISTSKEYEQYCSEKSDYEDNFLKQLINNERIAYFGNAFFKDEGNKKVMRTEKEIYYILGMLNEVRNVSTHFTEEDNRDWAKANLYNLSNRLKVGSKEVLNQLYKEKIDKIDANGFVNKGCKRDFSILFKSLNLTTDKDKGELVVCFYDFSIRKNYKNIGFSIKTLREYMLKISNSTLCADTISNNAIRPKAYKLYDFIIWHYYMNKPDKINDFVEKLRTQNKNDEKIKLYYDEAVCLLSELGREIHTMTSCVHNIENTSYEITDKKQKEYYKMQINSLNSADKVSDFSKVIYLVTLFLDGKEINDLLTTLINKFDNIASLLSVLEKQSGKKVEFVENYSFFNSSNLLKEKTLNKSENYTCKIVEELREINSFARMTGDCKIRKSAFEDASQLLGYHDKTVNNLFEVLRLKELESKDWKKRTDDEQQEYDRLLNKHHYFKSGKKLPDTGLRNFIINNVIESRRFNYIVRYADPKKIRKCTENNELLKFAFKDVPDSQVDRYYNICVTNKITNATREEKIERLVDIIKSMNLSKVATVKQRDKQDNVEKQKQLAIMSLYLNILYQIAKNLVYVNSRYVMAFHSLERDSQMLFDAYYDVKRGYCDLSTVLLFGVDDLQNRNRGSYKYLRDNRRSNKDVIETFGDFKGKVSKVVEKKNQGLTNEIYDSLCNVAGTTKTEVQNEIKSILKSNGLDESASSYLSHKLVNKVHSYKYLKQNLDCADNTMINQFRNNVAHLNTIRNMDGIENVTGITSYFQIYHYLMQKALYKEFKKCRENAVRKWIPYITENAEPKYVYWNKKEQQEVEVSFNPKIFGYMENIKNHSNTYCKDFVKALCAPFAYNLPRFKNLSIEELFDMHELSEEPKESMKLTD

SEQ ID NO: 3997 - protein, 922 aa, Artificial; identical to SEQ ID NO: 3716
  Synthetic

SEQ ID NO: 3998 - protein, 954 aa, Artificial
  Synthetic
MGKKIHARDLREQRKTDRTEKFADQNKKREAERAVQKKDATVSVKSVSSVSSKKDNATKSMAKAAGVKSVFSVGNTVYMTSFGRGNDAVLEQKIVDTSHEPLNIDDPAYQLNVVTMNGYSVTGHRGETVSAVTDNPLRRFNGGKKDEPEQSVPTDMLCLKPTLEKKFFGKEFNDNIHIQLIYNILDIEKILAVYSTNAIYALNNMSADENIENSDFFMKRTTDETFDDFEKKKESTNSREKADFDAFEKFIGNYRLAYFADAFYVNKKNPKGKARNVLREDKELYSVLTLIGKLRHWCVHSEEGRAEFWLYKLDELKDDFKNVLDVVYNRPVEEINNRFIENNKVNIQILGSVYKNTDIAELVRSYYEFLITKKYKNMGFSIKKLRESMLEGKGYADKEYDSVRNKLYQMTDFILYTGYINEDSDRADDLVNTLRSSLKEDDKTTVYCKEADYLWKKYRESIREVADALDGDNIKRLSKSNIEIQEDKLRKCFISYADSVSEFTKLIYLLTRFLSGKEINDLVTTLINKFDNIRSFLEIMDELGLDRTFTAEYSFFEGSTKYLAELVELNSFVKSCSFDINAKRTMYRDALDILGIKSGKTEEDIEKMIDNILQIDANGDKKLKKNNGLRNFIASNVIDSNRFKYLVRYGNPKKIRETAKCKPAVRFVLNEIPDAQIERYYEACCPENTALCSANKKREKLADMIAEIEFENFSDAGNYQKANVTSKTHEAEIKRKNQSIIRLYLTVMYIMLKNLVNVNARYVIAFHCVERDTKLYAESGLEVGNIEKNKTNLTMAVMGVKLENGIIKTEFDKSFAENAANRYLRNARWYKLILDNLKKSERAVVNEFRNTVCHLNAIRNININIDGIKEVENYFALYHYLIQKHLENRFADKKVERDTGDFISKLEEHKTYCKDFVKAYCTPFGYNLVRYKNLTIDGLFDKNYPGKDDSDKQK

SEQ ID NO: 3999 - protein, 923 aa, Artificial
  Synthetic
MAKKNKMKPRELREAQKKARQLKAAEIKNNAVPAIAAMPAAEAAAPAVEKKKSSVKAAGMKSILVSENKMYITSFGKGNSAVLEYEVDNNDYNKTQLSSEDNSNIELCDVDEVNITFSSKHGFESGVEINTSNPTHRSGESSPVRGDMLGLKSELEKRFFGKTFDDNIHIQLIYNILDIEKILAVYVTNIVYALNNMLGEGGDESHDDFMGYLSAKNTYDVFTDPDESDLSDKVKGNIKKSFSTFNDLLKTKRLGYFGLEEPKTKDTRVSEAYKKRVYHMLAIVGQIRQCVFHDLSEHSEYDLYSFIDNSKKVYRECRETLNYLVDERFDSINKGFIQGNKVNISLLIDMMKDDYEADDIIHLYYDFIVLKSQKNLGFSIKKLREKMLDEYGFRFKDKQYDSVRSKMYKLMDFLLFCNYYRNDVVAGEALVRKLRFSMTDDEKEGIYADEAEKLWGKFRNDFENIADHMNGDVIKELGKADMDFDEKILDSEKKNASDLLYFSKMIYMLTYFLDGKEINDLLTTLISKFDNIKEFLKIMKSSAVDVECELTAGYRLFNDSQRITNELFIVKNIASMRKPAASAKLTMFRDALTILGIDDKITDDRISEILKLKEKGKGIHGLRNFITNNVIESSRFVYLIKYANAQKIREVAKNEKVVMFVLGGIPDTQIERYYKSCVEFPYMNSSLEAKRSELARMIKNISFDDFKNVKQQAKGRENVAKERAKAVIGLYLTVMYLLVKNLVNVNARYVIAIHCLERDFGLYKEIIPELASKNLKNDYRILSQTLCELCDESPNLFLKKNERLRKCVEVDINNADSSMTRKYRNCIAHLTVVRELKEYIGDIRTVDSYFSIYHYVMQRCITKREDDKKQEEKIKFEDDLLKNHGYTKDFVKALNSPFGYNIPRFKNLSIEQLFDRNEYLTEK

SEQ ID NO: 4000 - protein, 924 aa, Artificial; identical to SEQ ID NO: 2910
  Synthetic

SEQ ID NO: 4001 - protein, 925 aa, Artificial; identical to SEQ ID NO: 3965
  Synthetic

SEQ ID NO: 4002 - protein, 954 aa, Artificial; identical to SEQ ID NO: 2909
  Synthetic

SEQ ID NO: 4003 - protein, 975 aa, Artificial; identical to SEQ ID NO: 2912
  Synthetic

SEQ ID NO: 4004 - protein, 926 aa, Artificial; identical to SEQ ID NO: 3065
  Synthetic

SEQ ID NO: 4005 - protein, 984 aa, Artificial; identical to SEQ ID NO: 2979
  Synthetic

SEQ ID NO: 4006 - protein, 975 aa, Artificial; identical to SEQ ID NO: 2938
  Synthetic

SEQ ID NO: 4007 - protein, 922 aa, Artificial
  Synthetic
MAKKNKMKPRELREAQKKARQLKAAEINNNAAPAIAAMPAAEVIAPAAEKKKSSVKAAGMKSILVSENKMYITSFGKGNSAVLEYEVDKVDNNNYNKTQLSSKDNSNIELGDVNEVNITFSSKRGNESGVEINTSNPTHRSGESSPVRWDMLGLKSELEKRFFGKTFDDNIHIQLIYNILDIEKILAVYVTNIVYALNNMLGIKKSESYDDFMGYLSARNTYEVFTHPDKSNLSDKAKGNIKKSFSTFNDLLKTKRLGYFGLEEPKTKDTRVSQAYKKRVYHMLAIVGQIRQSVFHDKSSKLDEDLYSFIDIIDSEYRETLDYLVDERFDSINKGFIQGNKVNISLLIDMMKGYEADDIIRLYYDFIVLKSQKNLGFSIKKLREKMLEEYGYRFKDKQYDSVRSKMYKLMDFLLFCNYYRNDVIAGEALVRKLRFSMTDDEKEGIYADEAAKLWGKFRNDFENIADHMNGDAIKELGKADMDFDEKILDSEKKYASDLLYFSKMIYMLTYFLDGKEINDLLTTLISKFDNIKEFLKIMKSSAVNVECELTAGYKLFNDSQRITNELFIVKNIASMRKPAASAKLTMFRDALTILGIDDKITDDRISEILKLKEKGKGIHGLRNFVTNNVIESSRFVYLIKYANAQKIREVAKNEKVVMFVLGGIPDTQIERYYKSCVEFPDMNSSLEAKRSELARMIKNIRFDDFKNVKQQAKGRENVAKERAKAVIGLYLTVMYLLVKNLVNVNARYVIAIHCLERDFGLYKEIIPELASKNLKNDYRILSQKLCELCDKSPNLFLKKNERLRKCVEVDINNADSIMTRKYRNCIAHLTVVRELKEYIGDIRTVDSYFSIYHYVMQRCITKRENDTKQEDKIKYEDDLLKNHGYTKDFVKALNSPFGYNIPRFKNLSIEQLFDRNEYLAEK

SEQ ID NO: 4008 - protein, 918 aa, Artificial; identical to SEQ ID NO: 2830
  Synthetic

SEQ ID NO: 4009 - protein, 925 aa, Artificial; identical to SEQ ID NO: 2987
  Synthetic

SEQ ID NO: 4010 - protein, 975 aa, Artificial; identical to SEQ ID NO: 2912
  Synthetic

SEQ ID NO: 4011 - protein, 900 aa, Artificial
  Synthetic
MNNQPHKSTSKRLGVQTIVNKNNNIFVFSNNQPKTKSVQLADEHQQLIEQNNDLDNFKTNLEYGNIKFGLSNNALEAFYPNQYTIHKKSSSINQWLVQKYCPTQCPDSNLILQLIHNNEDFKKIIALYLDMVFSMKVFKSDRNEDYISKIFNNMNAQKIIGKVKPVIDSIRKRPYLFGFDPKDSASDQQIAYHLKNISMLRNYIAHDSDDNLRLDSDVYASLTEQLDQFIEQENKNFTEQNGHNLALISQFYPSWSDEQVVKKYHDYHFNMLDKNLGVNLRQIALLIREKNNISQVLDDDRRAKFNVALKFYLYTWLKENQAQLDDYIQQLRQAQLDDKDAIYQKIAQDIPANDINRLIKLCQQIDFQAKPTRFKHIPVKMINEQWDFRVLMIHSLTKFLTIKETNELISALLNKIEAISNLLEIDRALKLQAVDAIQPNQWFFASLPMPNKLIKQAQQAKPKHQSRPKPTNGIRGLAELQAQIQPSITHSVSSDNQSIQHQPVTTSLKSIDYERIARQLTVVNRIRSYHQPKHAEYHRQELIDAISLFYGVDQDKIADDTFEEKIKIRVNGSTQSVPRSLKNILRNNVIKTRFFNYLVRYVEPKKVANLLHGNYGLALFLVQQLTPSQLESLMNEYIKLEDENQLVGQTPREELTETQKQRLGQYEHQLAMIFSEKNLFDVLRESQNDGRKISFIKPYLTCIYLLIKNLNRINAYYSIAFSMYERDYRLSGLPLFKYKKKDDPYFNTKMTEMILSNNKKYHQVFANLDKIKQLDLADYQAILSDQPQKGLKNLFKEYRSQVMHYNVVDYLLNRDFHFPKKFEYRNYFRIYQWLMQCSLLNMEQSGEINTFTNLLAKYRADLDKYQRYSKKFVYQINLLFAYNYARYKDLSDERIFNRKY

SEQ ID NO: 4012 - protein, 919 aa, Artificial; identical to SEQ ID NO: 3710
  Synthetic

SEQ ID NO: 4013 - protein, 921 aa, Artificial; identical to SEQ ID NO: 3859
  Synthetic

SEQ ID NO: 4014 - protein, 999 aa, Artificial; identical to SEQ ID NO: 3286
  Synthetic

SEQ ID NO: 4015 - protein, 929 aa, Artificial; identical to SEQ ID NO: 3732
  Synthetic

SEQ ID NO: 4016 - protein, 918 aa, Artificial; identical to SEQ ID NO: 3659
  Synthetic

SEQ ID NO: 4017 - protein, 922 aa, Artificial; identical to SEQ ID NO: 2815
  Synthetic

SEQ ID NO: 4018 - protein, 927 aa, Artificial; identical to SEQ ID NO: 3071
  Synthetic

SEQ ID NO: 4019 - protein, 919 aa, Artificial; identical to SEQ ID NO: 3710
  Synthetic

SEQ ID NO: 4020 - protein, 922 aa, Artificial; identical to SEQ ID NO: 2840
  Synthetic

SEQ ID NO: 4021 - protein, 919 aa, Artificial; identical to SEQ ID NO: 3746
  Synthetic

SEQ ID NO: 4022 - protein, 963 aa, Artificial
  Synthetic
MKKQTAKNRREAAKAEKMAEIQKIADKRRAEEQKKAEAQLRLSKETELKQREEKIKRIEESIEKKERFNGSKAKAAGLKSIFVLNEDELLITSFGKGNAAIPEQKVKNGVIIPAAEKTSLSIAAAGAKYNVSGRIITDAIADNPLNSEVKSSGQDLIGCKAALERQYFGKEYKDNIHVQIAYSVLDIEKILTVHVNNIVFAINNMLRFGGDEYFDLVGYMGLDQDYIRFAYPQLLKKPNPSSVAVAELFEKLLQQPQLGYFGNILMPTKPELAEGKKGDGRVLDKELCYYYLAVVGEFRQATAHGLEKNRSAMFRLEAEFDKKSGGCRREARASLDKLYSDRVKRLNGEFLEKANKDLYILFKTFGADTEEKRSSIVRDYYKFIVLKQQKNLGFSIKHLRETISMFQNDAAWITDDKYSSFRAKIYHAVDFTIYEYYMQNSGRIDALVDRLRASISESEKEAIYRVEAEQLWYEIRKTVNGSIKPMMTEDGIAAIPDLKLSADYIGELAVSEKAHTFSEAIYLLTHFLDGKEINDLLTKLINKFEIIASFRKTLEDLGREADFCHEYSLLNESEELAKELRAILRFARMTEPAPTAKKQMLVEAAEILGFVESDESVEQYIDNMLNTAKLRKKNNEKNANGFRNFIINNVIESSRFKYLVRFGNPKKIRKLAENRTVIDFALKSIPDAQILRYYNSCNGTEDEYTPEMRDDLAERISGLHFNDFEDVYQGKGGTKEQEEDKERKKSIIRLYLTVLYLIEKNLVYVNARYFIAFHCAERDGLLHDSVKYSNKNIQEDRAAFAKFFVETKMKNKKARSYLQQNFENSDNWSLRAYRNCVEHMNAVRNADKYIGDIKSIGSYFELYHYLVQRSLIDQFVRDCRTPSTRQKGEFIMSEERACGKLLLYMKLVMKYGTYCKDFVKALNVPFAYNLPRYKNLSINELFDMNDYKPNLLKKQGFDLLEDA

SEQ ID NO: 4023 - protein, 922 aa, Artificial
  Synthetic
MAKKNKMKPRELREAQKKARQLKAAEINNNAAPAIAAMPAAEVIAPAAEKKKSSVKAAGMKSILVSENKMYITSFGKGNSAVLEYEVDKVDNNVYNQTQLSSKGSSNIKLCGVNEVNITFSSKHGFESGVEINTSNPTHRSGESSPVRWDMLGLKSELEKRFFGKTFDDNIHIQLIYNILDIEKILAVYVTNIVYALNNMLGVKDSESYDDFMGYLSAKNTYDVFTDPDESDLSKNIKGNIKKSLSKFNDLLKTKRLGYFGLEEPKTKDTRVSQAYKKRVYHMLAIVGQIRQSVFHDKSSKLDEDLYSFIDIIDSEYRETLDYLVDERFDSINKGFIQGNKVNISLLIDMMKGYEADDIIRLYYDFIVLKSQKNLGFSIKKLREKMLDEYGFRFKDKQYDSVRSKMYKLMDFLLFCNYYRNDVVAGETLVRKLRFSMTDDEKEGIYADEAAKLWGKFRNDFENIADHMNGDVIKELGKADMDFDEKILDSEKKNASDLLYFSKMIYMLTYFLDGKEINDLLTTLISKFDNIKEFLKIMKSSAVDVECELTAGYKLFNDSQRITNELFIVKNIASMRKPAASAKLTMFRDALTILGIDDNITDDRISEILKLKEKGKGIHGLRNFITNNVIESSRFVYLIKYANAQKIRKVAKNEKVVMFVLGGIPDTQIERYYKSCVEFPDMNSSLEVKRSELARMIKNISFDDFKNVKQQAKGRENVAKERAKAVIGLYLTVMYLLVKNLVNVNARYVIAIHCLERDFGLYKEIIPELASKNLKNDYRILSQTLCELCDKSPNLFLKKNRRLRKCVEVDINNADSSMTRKYRNCIAHLTVVRELKEYIGDIRTVDSYFSIYHYVMQRCITKREDDTKQEEKIKYEDDLLKNHGYTKDFVKALNSPFGYNIPRFKNLSIEQLFDRNEYLTEK

SEQ ID NO: 4024 - protein, 929 aa, Artificial
  Synthetic
MLLYAIIQASTKRDRKGGVRMEREVKKPPKKSLAKAAGLKSTFVISPQEKELAMTAFGRGNDALLQKRIVDGVVRDVAGEKQQFQVQRQDESRFRLQNSRLADRTVTADDPLHRAEAPHRQPLGAGMDQLRRKAILEQKYFGRTFDDNIHIQLIYNILDIHKMLAVPANHIVHTLNLLGGYGETDFVGMLPAGLPYDKLWTPKAGDTSRSGKRDIKADIAAYAKRPQLAYLGAAFYDVTPGKSKRDAARGRVKREQDVYTILSLMSLLRQFCAHDSVRIWGQNTPAALYGLQALPQDMKDLLDDGWRRALGGVNDHFLDTNKVNLLTLFEYYGAETKQARVALTQDFYRFVVLKEQKNMGFSLRRLREELLKLPDAAYLTGQEYDSVRQKLYMLLDFLLCRLYAQERADRCEELVSALRCALSDEEKNAVYQAEAAALWQALGDTLRRELLPLLKGKKLQDKDKKKPDELGLSRDVLDGVLFRPAQQGNRANADYFCRLMHLSTWFMDGKEINTLLTTLISKLENIDSLRSVLESMGLACSFVPAYAMFDHSRYIAGQLRVVNNIARMRKPAITAKREMYRAAVVLLGVDSPEAAAAITDDLLQIDPETGKVRPRGDSARDTGLRNFIANNVVESRRFTYLLRYMTPEQARVLAQNEKLIAFVLSTVPSAQLERYCRTCGREDITGRPAQIRYLTAQIMGVRYESFTDVEQRGRGDNPRKERYKALIGLYLTVLYLAVKNMVNCNARYVIAFYCRDRDTALYQKEVCWYDLEEDKKSGKQRQVEDYTALTRYFVSQGYLNRHACGYLRSNMNGVGNGLLTAYRNAVDHLNAIPPLGSLCRDIGRVDSYFALYHYAVQQYLNGRYYRKTPREQELFAAMAQHRTWCSDLVKALNTPFGYNLARYKNLSIDGLFDREGDHVVREDGEKPAE

SEQ ID NO: 4025 - protein, 919 aa, Artificial
  Synthetic
MAKKNKMKPRELREAQKKARQLKAAEINNNAAPAIAAMPAAEVIAPAAEKKKSSVKAAGMKSILVSENKMYITSFGKGNSAVLEYEVDNNDYNQTQLSSKDNSNIQLGGVNEVNITFSSKHGFESGVEINTSNPTHRSGESSPVRGDMLGLKSELEKRFFGKTFDDNIHIQLIYNILDIEKILAVYVTNIVYALNNMLGVKGSESHDDFIGYLSTNNIYDVFIDPDNSSLSDDKKANVRKSLSKFNALLKTKRLGYFGLEEPKTKDNRVSQAYKKRVYHMLAIVGQIRQCVFHDKSGAKRFDLYSFINNIDPEYRDTLDYLVEERLKSINKDFIEDNKVNISLLIDMMKGYEADDIIRLYYDFIVLKSQKNLGFSIKKLRDKMLDEYGFRFKDKQYDSVRSKMYKLMDFLLFCNYYRNDIAAGESLVRKLRFSMTDDEKEGIYADEAAKLWGKFRNDFENIADHMNGDVIKELGKADMDFDEKILDSEKKNASDLLYFSKMIYMLTYFLDGKEINDLLTTLISKFDNIKEFLKIMKSSAVDVECELTAGYKLFNDSQRITNELFIVKNIASMRKPAASAKLTMFRDALTILGIDDKITDDRISGILKLKEKGKGIHGLRNFITNNVIESSRFVYLIKYANAQKIREVAKNEKVVMFVLGGIPDTQIERYYKSCVEFPDMNSSLGVKRSELARMIKNISFDDFKNVKQQAKGRENVAKERAKAVIGLYLTVMYLLVKNLVNVNARYVIAIHCLERDFGLYKEIIPELASKNLKNDYRILSQTLCELCDKSPNLFLKKNERLRKCVEVDINNADSSMTRKYRNCIAHLTVVRELKEYIGDICTVDSYFSIYHYVMQRCITKRENDTKQEEKIKYEDDLLKNHGYTKDFVKALNSPFGYNIPRFKNLSIEQLFDRNEYLTEK

SEQ ID NO: 4026 - protein, 922 aa, Artificial; identical to SEQ ID NO: 3316
  Synthetic

SEQ ID NO: 4027 - protein, 922 aa, Artificial
  Synthetic
MAKKNKMKPRELREAQKKASQLKAAEINNNAVPAIAAMPAAEVIAPVAGKKKSSVKAAGMKSILVSENKMYITSFGKGNSAVLEYEVDNNDYNKTQLSSKDNSNIELCGVNEVNITFSSKHGFESGVEINTSNPTHRSGESSPVRWDMLGLKSELEKRFFGKTFDDNIHIQLIYNILDIEKILAVYVTNIVYALNNMLGIKDSESYDDFMGYLSAKNTYDVFTDPDESDLSKNIKGNIKKSLSKFNDLLKTKRLGYFGLEEPKTKDKRVSEAYKKRVYHMLAIVGQIRQSVFHDKSNELDEYLYSFIDIIDSEYRDTLDYLVDERFDSINKGFIQGNKVNISLLIDMMKGYEADDIIRLYYDFIVLKSQKNLGFSIKKLREKMLDEYGFRFKDKQYDSVRSKMYKLMDFLLFCNYYRNDVVAGESLVRKLRFSMTDDEKEGIYADEAAKLWGKFRNDFENIADHMNGDVIKELGKADMDFDEKILDSEKKNASDLLYFSKMIYMLTYFLDGKEINDLLTTLISKFDNIKEFLKIMKSSAVDVECELTAGYKLFNDSQRITNELFIVKNIASMRKPAASAKLTMFRDALTILGIDDNITDDRISEILKLKEKGKGIHGLRNFITNNVIESSRFVYLIKYANAQKIREVAKNEKVVMFVLGGIPDTQIERYYKSCVEFPDMNSSLEAKRSELARMIKNISFDDFKNVKQQAKGRENVAKERAKAVIGLYLTVMYLLVKNLVNVNARYVIAIHCLERDFGLYKEIIPELASKNLKNDYRILSQTLCELCDERDKSPNLFLKKNERLRKCVEVDINNADSIMTRKYRNCIAHLTVVRELKEYIGDIRTVDSYFSIYHYVMQRCITKREDDTKQEEKIKYEDDLLKNHGYTKDFVKALNSPFGYNIPRFKNLSIEQLFDRNEYLTEK

SEQ ID NO: 4028 - protein, 919 aa, Artificial; identical to SEQ ID NO: 2825
  Synthetic

SEQ ID NO: 4029 - protein, 923 aa, Artificial; identical to SEQ ID NO: 2862
  Synthetic

SEQ ID NO: 4030 - protein, 900 aa, Artificial; identical to SEQ ID NO: 2863
  Synthetic

SEQ ID NO: 4031 - protein, 954 aa, Artificial; identical to SEQ ID NO: 3519
  Synthetic

SEQ ID NO: 4032 - protein, 923 aa, Artificial; identical to SEQ ID NO: 2862
  Synthetic

SEQ ID NO: 4033 - protein, 954 aa, Artificial; identical to SEQ ID NO: 3519
  Synthetic

SEQ ID NO: 4034 - protein, 922 aa, Artificial; identical to SEQ ID NO: 3551
  Synthetic

SEQ ID NO: 4035 - protein, 918 aa, Artificial; identical to SEQ ID NO: 2830
  Synthetic

SEQ ID NO: 4036 - protein, 922 aa, Artificial; identical to SEQ ID NO: 3163
  Synthetic

SEQ ID NO: 4037 - protein, 954 aa, Artificial; identical to SEQ ID NO: 3461
  Synthetic

SEQ ID NO: 4038 - protein, 919 aa, Artificial; identical to SEQ ID NO: 3263
  Synthetic

SEQ ID NO: 4039 - protein, 924 aa, Artificial; identical to SEQ ID NO: 2910
  Synthetic

SEQ ID NO: 4040 - protein, 926 aa, Artificial; identical to SEQ ID NO: 3065
  Synthetic

SEQ ID NO: 4041 - protein, 925 aa, Artificial; identical to SEQ ID NO: 3965
  Synthetic

SEQ ID NO: 4042 - protein, 922 aa, Artificial; identical to SEQ ID NO: 2937
  Synthetic

SEQ ID NO: 4043 - protein, 924 aa, Artificial; identical to SEQ ID NO: 2910
  Synthetic

SEQ ID NO: 4044 - protein, 922 aa, Artificial; identical to SEQ ID NO: 2840
  Synthetic

SEQ ID NO: 4045 - protein, 924 aa, Artificial; identical to SEQ ID NO: 2910
  Synthetic

SEQ ID NO: 4046 - protein, 922 aa, Artificial
  Synthetic
MLLCAIIQASTKRDRKGGVRMEREVKKPPKKSLAKAAGLKSTFVISPQEKELAMTAFGRGNDALLQKRIVDGVVRDVAGEKQQFQVQRQDESRFRLQNSRLADRTVTADDPLHRAEAPHRQPLGAGMDQLRRKAILEQKYFGRTFDDNIHIQLIYNILDIHKMLAVPANHIVHTLNLLGGYGETDFVGMLPAGLPYDKLRVVKKKNGDTVDIKADIAAYAKRPQLAYLGAAFYDVTPGKSKRDAARGRVKREQDVYTILSLMSLLRQFCAHDSVRIWGQNTPAALYGLQALPQDMKDLLDDGWRRALGGVNDHFLDTNKVNLLTLFEYYGAETKQERVALTQDFYRFVVLKEQKNMGFSLRRLREELLKLPDAAYLTGQEYDSVRQKLYMLLDFLLCRLYAQERVDRCEELVSALRCALSDEEKDAVYQAEAAALWQALRRELLPLLKGKKLQDKDKKKLDELGLSRDVLDGVLFRPAQQGNRANADYFCRLMHLSTWFMDGKEINTLLTTLISKLENIDSLRSVLESMGLACSFVPAYAMFDHSRYIAGQLRVVNNIARMRKPAITAKREMYRAAVVLLGVDSPEAAAAITDDLLQIDPETGKVRPRGDSARATGLRNFIANNVVESRRFTYLLRYMTPEQARVLAQNEKLIAFVLSTVPDTQLERYCRTCGREDITGRPAQIRYLTAQIMGVRYESFTDVEQRGKGDNPKKERYKALIGLYLTVLYLAVKNMVNCNARYVIAFYCRDRDTALYQKEVCWYDLEEDKKSGKQRQVEDYTALTRYFVSQGYLNRHACGYLRSNMNGISNGLLTAYRNAVDHLNVIPPLGSLCRDIGRVDSYFALYHYAVQQYLNGRYYRKTPREQELFAAMAQHRTWCSDLVKALNTPFGYNLARYKNLSIDGLFDREGDHVVREDGEKPAE

SEQ ID NO: 4047 - protein, 984 aa, Artificial; identical to SEQ ID NO: 2827
  Synthetic

SEQ ID NO: 4048 - protein, 954 aa, Artificial; identical to SEQ ID NO: 2989
  Synthetic

SEQ ID NO: 4049 - protein, 924 aa, Artificial; identical to SEQ ID NO: 2910
  Synthetic

SEQ ID NO: 4050 - protein, 919 aa, Artificial
  Synthetic
MAKKNKMKPRELREAQKKARQLKAAEINNNAAPAIAAMPAAEVIAPAAEKKKSSVKAAGMKSIFVSENKMYITSFGKGNSAVLEYEVDNNDYNQTQLSSEDSSNIELCGVTKVNITFSSKHGLESGVEINTSNPTHRSGESSPVRWDMLGLKSELEKRFFGKTFDDNIHIQLIYNILDIEKILAVYVTNIVYALNNMLGIKKSESYDDFMGYLSARNTYEVFTHPDKSNLSDKAKGNIKKSFSTFNDLLKTKRLGYFGLEEPKTKDTRVSQAYKKRVYHMLAIVGQIRQCVFHDKSGAKKFDLYSFINNIDSEYRETLDYLVDERFDSINKGFIQGNKVNISLLIDMMKGYKADDIIRLYYDFIVLKSQKNLGFSIKKLREKMLDEYGFRFKDKQYDSVRSKMYKLMDFLLFCNYYRNDVIAGEALVRKLRFSMTDDEKEGIYADEAEKLWGKFRNDFENIADHMNGDVIKELGQADMDFDEKILDSEKKNASDLLYFSKMIYMLTYFLDGKEINDLLTTLISKFDNIKEFLKIMKSSAVDVECELTAGYKLFNDSQRITNELFIVKNIASMRKPAASAKLTMFRDALTILGIDDKITDDRISEILKLKEKGKGIHGLRNFITNNVIESSRFVYLIKYANAQKIREVAKNEKVVMFVLGGIPDTQIERYYKSCVEFSDMNSSLEAKRSELARMIKNISFDDFKNVNQQVKGRENVAKERAKAVIGLYLTVMYLLVKNLVNVNARYVIAIHCLERDFGLYKEIIPELASKDLKNDYRILSQTLCELCDKSPNLFLKKNERLRKCVEVDINNADSSMTRKYRNCIAHLTVVRELKEYIGDIRTVDSYFSIYHYVMQRCITKREDDTKQEEKIKYEDDLLKNHGYTKDFVKALNSPFGYNIPRFKNLSIEQLFDRNEYLTEK

SEQ ID NO: 4051 - protein, 922 aa, Artificial; identical to SEQ ID NO: 2840
  Synthetic

SEQ ID NO: 4052 - protein, 954 aa, Artificial; identical to SEQ ID NO: 2846
  Synthetic

SEQ ID NO: 4053 - protein, 975 aa, Artificial; identical to SEQ ID NO: 2912
  Synthetic

SEQ ID NO: 4054 - protein, 984 aa, Artificial; identical to SEQ ID NO: 2827
  Synthetic

SEQ ID NO: 4055 - protein, 929 aa, Artificial; identical to SEQ ID NO: 4024
  Synthetic

SEQ ID NO: 4056 - protein, 926 aa, Artificial; identical to SEQ ID NO: 3079
  Synthetic

SEQ ID NO: 4057 - protein, 922 aa, Artificial; identical to SEQ ID NO: 3327
  Synthetic

SEQ ID NO: 4058 - protein, 922 aa, Artificial; identical to SEQ ID NO: 2840
  Synthetic

SEQ ID NO: 4059 - protein, 922 aa, Artificial; identical to SEQ ID NO: 2840
  Synthetic

SEQ ID NO: 4060 - protein, 956 aa, Artificial; identical to SEQ ID NO: 3282
  Synthetic

SEQ ID NO: 4061 - protein, 925 aa, Artificial
  Synthetic
MAKKNKMKPRELREAQKKARQLKAAEIKNNAVPAIAAMPAAEAAAPAVEKKKSSVKAAGMKSILVSENKMYITSFGKGNSAVLEYEVDKVDNNNYNKTQLSSKDNSNIELGDVNEVNITFSSKRGNESGVEINTSNPTHRSGESSPVRWDMLGLKSELEKRFFGKTFDDNIHIQLIYNILDIEKILAVYVTNIVYALNNMLGEGGDESHDDFMGYLSAKNTYDVFTDPDESDLSKNIKGNIKKSLSKFNDLLKTKRLGYFGLEEPKTKDKRASEAYKKRVYHMLAIVGQIRQSVFHDKSSKLHEDLYSFIDIIDSEYRETLDYLVDERFDSINKGFIQGNKVNISLLIDMMKGYEADDIIRLYYDFIVLKSQKNLGFSIKKLREKMLDEYGFRFKDKQYDSVRSKMYKLMDFLLFCNYYRNDVIAGEALVRKLRFSMTDDEKEGIYADEAAKLWGKFRNDFENIADHMNGDVIKELGKADMDFDEKILDSEKKNASDLLYFSKMIYMLTYFLDGKEINDLLTTLISKFDNIKEFLKIMKSSAVNVECELTAGYKLFNDSQRITNELFIVKNIASMRKPAASAKLTMFRDALTILGIDDNITDDRISEILKLKEKGKGIHGLRNFITNNVIESSRFVYLIKYANAQKIREVAENEKVVMFVLGGIPDTQIERYYKSCVESPDMNSSLEAKRSELARMIKNISFDDFKNVKQQAKGRENVAKERAKAVIGLYLTVMYLLVKNLVNVNARYVIAIHCLERDFGLYKEIIPELASKNLKNDYRILSQTLCELCDDGNESPNLFLKKNKRLRKCVEVDINNADSSMTRKYRNCIAHLTVVRELKEYIGDIRTVDSYFSIYHYVMQRCITKRENDTKQEDKIKYEDDLLKNHGYTKDFVKALNSPFGYNIPRFKNLSIEQLFDRNEYLTEK

SEQ ID NO: 4062 - protein, 984 aa, Artificial; identical to SEQ ID NO: 2827
  Synthetic

SEQ ID NO: 4063 - protein, 904 aa, Artificial
  Synthetic
MNHKNKSKIKASGFKSAFIVGDKVVTTSFGKGNAAILEKEVTDDVVRELNASDSNYNLNIATEKGRKKYKIKGRWINNLNKDSNSSEKNIVVTGDDPREYSIMRDDSNERIGMDVIRIKDKVEEEIFGKAFPEDNIHIQLAYNILDIQKILAAYVNNIVYSLNNLAHRKNGSDFIGMFPSDSTLKQLHTDNKLFDKYDKFMTAINPYLEYHPTVFLEEIKQERKIKWNVCSDDDLFSLFRILSDVRQSCVHGENSMYTYDMSDRNDVHTKEKRAYLDKMYYKKICQVNTDFIKTNKTNLNILFNLYNAASFGQKSKIINAYYDFVVIQESKNLGFSIKEIRELMIEKHIGKLKEKGYDSFRGKMYTLIDFILFRHYTDESNVAIAEGFVNNLRASLSDEERSKLYNDQCDSAFSTLRIMLDKLVTDVNASSINELVRKAAESNIDIDISAVQIQSKATYFVKTLYVLTLFLDGKEINEFISSLINKFDNIASFISVMKECGIPCDFENDYKLFADSEKISRELRTLKSFARMKIEIPKITADMYDDAVCILGLKDKNGKHILEYNDDHTDYLCDYVDDKICDIDNERGKKDTKLRNFLINNVIKSRRFWYVIRYINPQNARRLMNNRACVRFVLDRIPDTQLRRYYESVSGKGATECERKKQLEFLCDAIITMNINQFEDVPQNDANENVIKERYKAVIGLYLTVLYLLTKNLVKVNSRYTTACCCLERDSKLHGLIEYDKHGKPDYENFCGRLVEKALEEKWINKRYRGYFKENYVRFYDYKIHTFFRNKIVHLNAVMEADKYIDGIEKVDSYFMIYHYIMQRMIDNGCKPTGGRTPGFEIKDYENQLQSAKKHNTYSKDIVKGLCRPFGYNLSRFKNLTIMEVFNRQEILEERKKNALENNV

SEQ ID NO: 4064 - protein, 921 aa, Artificial; identical to SEQ ID NO: 2881
  Synthetic

SEQ ID NO: 4065 - protein, 922 aa, Artificial; identical to SEQ ID NO: 2840
  Synthetic

SEQ ID NO: 4066 - protein, 923 aa, Artificial; identical to SEQ ID NO: 2862
  Synthetic

SEQ ID NO: 4067 - protein, 922 aa, Artificial
  Synthetic
MAKKNKMKPRELREAQKKARQLKAAEINNNAAPAIAAMPAAEVIAPVAGKKKSSVKAAGMKSILVSENKMYITSFGKGNSAVLEYEVDKVDNNDYNQTQLSSKGSSNIELCGVNEVNITFSSKHGFESGVEINTSNPTHRSGESSPVRWDMLGLKSELEKRFFGKTFDDNIHIQLIYNILDIEKILAVYVTNIVYALNNMLGVKGSESHDDFIGYLSTNNIYDVFIDPDNSSLSDDKKANVRKSLSKFNVLLKTKRLGYFGLEEPKTKDTRVSQAYKKRVYHMLAIVGQIRQCVFHDKSGAKRFDLYSFINNIDHEYRETLDYLVDERFDSINKGFIQGNKVNISLLIDMMKGYEADDIIRLYYDFIVLKSQKNLGFSIKKLREKMLEEYGFRFKDKQYDSVRSKMYKLMDFLLFCNYYRNDIAAGEALVRKLRFSMTDDEKEGIYADEAAKLWGKFRNDFENIADHMNGDVIKELGKADMDFDEKILDSEKKNASDLLYFSKMIYMLTYFLDGKEINDLLTTLISKFDNIKEFLKIMKSSAVDVECELTAGYKLFNDSQRITNELFIVKNIASMRKPAASAKLTMFRDALTILGIDDKITDDRISEILKLKEKGKGIHDLRNFITNNVIESSRFVYLIKYANAQKIREVAKNEKVVMFVLGGIPDTQIERYYKSCVEFPDMNSSLEAKRSELARMIKNIRFDDFKNVKQQAKGRENVAKERAKAVIGLYLTVMYLLVKNLVNVNARYVIAIHCLERDFGLYKEIIPELASKNLKNDYRTLSQTLCGLCDKSPNLFLKKNKRLRKCVEVDINNADSIMTRKYRNCIAHLTVVRELKEYIGDIRTVDSYFSIYHYVMQRCITKRENDTKQEKKIKYEDDLLKNHGYTKDFVKALNSPFGYNIPRFKNLSIEQLFDRNEYLTEK

SEQ ID NO: 4068 - protein, 922 aa, Artificial
  Synthetic
MAKKNKMKPRELREAQKKARQLKAAEINNNAVPAIAAMPAAEVIAPAAEKKKSSVKAAGMKSILVSENKMYITSFGKGNSAVLEYEVDNNDYSKTQLSSKDNSNIELGDVNEVNITFSSKHGFESGVEINTSNPTHRSGESSPVRGDMLGLKSELEKRFFGKTFDDNIHIQLIYNILDIEKILAVYVTNIVYALNNMLGVKGSESYDDFMGYLSAQNTYYIFTHPDKSNLSDKVKGNIKKSLSKFNDLLKTKRLGYFGLEEPKTKDKRVSEAYKKRVYHMLAIVGQIRQSVFHDKSSKLHEDLYSFIDIIDSEYRETLDYLVDERFDSINKGFIQGNKVNISLLIDMMKGYEADDIIRLYYDFIVLKSQKNLGFSIKKLREKMLDEYGFRFKDKQYDSVRSKMYKLMDFLLFCNYYRNDVVAGEALVRKLRFSMTDDEKEGIYADEAEKLWGKFRNDFENIADHMNGDVIKELGKADMDFDEKILDSEKKNASDLLYFSKMIYMLTYFLDGKEINDLLTTLISKFDNIKEFLKIMKSSAVDVECELTAGYKLFNDSQRITNELFIVKNIASMRKPAASAKLTMFRDALTILGIDDKITDDRISEILKLKEKGKGIHGLRNFITNNVIESSRFVYLIKYANAQKIREVAKNEKVVMFVLGGIPDTQIERYYKSCVEVPDMNSSLEAKRSELARMIKNIRFDDFKNVKQQAKGRENVAKERAKAVIGLYLTVMYLLVKNLVNVNARYVIAIHCLERDFGLYKEIIPELASKNLKNDYRILSQTLCELCDDRDKSPNLFLKKNKRLRKCVEVDINNADSSMTRKYRNCIAHLTVVRELKEYIGDIRTVDSYFSIYHYVMQRCITKRENDTKQEDKIKYEDDLLKNHGYTKDFVKALNSPFGYNIPRFKNLSIKQLFDRNEYLTEK

SEQ ID NO: 4069 - protein, 923 aa, Artificial
  Synthetic
MAKKNKMKPRELREAQKKARQLKAVEINNNAVPEIAAMPAAEVIAPVAEKKKSSVKAAGMKSILVSENKMYITSFGKGNSAVLEYEVDNNDYNKTQLSSKNSSNIELRGVNEVNITFSSKHGFESGVEINTSNPTHRSGESSPVRWDMLGLKSELEKRFFGKTFDDNIHIQLIYNILDIEKILAVYVTNIVYALNNMLGIKGSESYDDFMGYLSARNTYEVFTHPDKSSLSDDKKANVRKSLSKFNVLLKTKRLGYFGLEEPKTKDTRVSQAYKKRVYHMLAIVGQIRQSVFHDKSSKLHEDLYSFIDIIDSEYRETLDYLVDERFDSINKGFIQGNKVNISLLIDMMKDDYEADDIIRLYYDFIVLKSQKNLGFSIKKLREKMLDEYGFRFKDKQYDSVRSKMYKLMDFLLFCNYYRNDVIAGEALVRKLRFSMTDDEKEGIYADEAAKLWGKFRNDFENIADHMNGDVIKELGKADMDFDEKILDSEKKNASYLFYFSKMIYMLTYFLDGKEINDLLTTLISKFDNIKEFLKIMKSSAVDVECELTAGYKLFNDSQRITNELFIVKNIASMRKPAASAKLTMFRDALTILGIDDNITDDRISEILKLKEKGKGIHGLRNFITNNVIESSRFVYLIKYANAQKIREVAKNEKVVMFVLGGIPDTQIERYYKSCVEFPDMNSSLEAKRSELARMIKNISFDDFKNVKQQAKGRENVAKERAKAVIGLYLTVMYLLVKNLVNVNARYVIAIHCLERDFGLYKEIIPELASKNLKNDYRILSQTLCELCDNGDESPNLFLKKNKRLRKCVEVDINNADSSMTRKYRNCIAHLTVVRELKEYIGDIRTVDSYFSIYHYVMQRCITKRENDTKQEDKIKYEDDLLKNHGYTKDFVKALNSPFGYNIPRFKNLSIEQLFDRNEYLTEK

SEQ ID NO: 4070 - protein, 925 aa, Artificial; identical to SEQ ID NO: 2833
  Synthetic

SEQ ID NO: 4071 - protein, 919 aa, Artificial; identical to SEQ ID NO: 2893
  Synthetic

SEQ ID NO: 4072 - protein, 921 aa, Artificial; identical to SEQ ID NO: 2881
  Synthetic

SEQ ID NO: 4073 - protein, 925 aa, Artificial
  Synthetic
MAKKNKMKPRELREAQKKARQLKAAEINNNAAPAIAAMPAAEVIAPAAEKKKSSVKAAGMKSILVSENKMYITSFGKGNSAVLEYEVDKVDNNVYNQTQLSSKGSSNIKLCGVNEVNITFSSKHGFESGVEINTSNPTHRSGESSPVRGDMLGLKSELEKRFFGKTFDDNIHIQLIYNILDIEKILAVYVTNIVYALNNMLGEGDDESHDDFMGYLSAQNTYYIFTHPDKSNLSDKVKGNIKKSLSKFNDLLKTKRLGYFGLEEPKTKDKRVSEAYKKRVYHMLAIVGQIRQSVFHDKSNELDEYLYSFIDIIDSEYRDTLDYLVDERFDSINKGFVQGNKVNISLLIDMMKGYEADDIIRLYYDFIVLKSQKNLGFSIKKLREKMLDEYGFRFKDKQYDSVRSKMYKLMDFLLFCNYYRNDVAAGEVLVRKLRFSMTDDEKEWIYADEAEKLWGKFRNDFENIADHMNGDVIKELGKADMDFDEKILDSEKKNASDLLYFSKMIYMLTYFLDGKEINDLLTTLISKFDNIKEFLKIMKSSAVDVECELTAGYKLFNDSQRITNELFIVKNIASMRKPAASAKLTMFRDALTILGIDDKITDDRISEILKLKEKGKGIHGLRNFITNNVIESSRFVYLIKYANAQKIREVAENEKVVMFVLGGIPDTQIERYYKSCVEFPDMNSSLEVKRSELARMIKNISFDDFKNVKQQAKGRENVAKERAKAVIGLYLTVMYLLVKNLVNVNARYVIAIHCLERDFGLYKEIIPELASKNLKNDYRILSQTLCELCDDRDESPNLFLKKNKRLRKCVEVDINNADSNMTRKYRNCIAHLTVVRELKEYIGDIRTVDSYFSIYHYVMQRCITKREDDTKQEEKIKYEDDLLKNHGYTKDFVKALNSPFGYNIPRFKNLSIEQLFDRNEYLTEK

SEQ ID NO: 4074 - protein, 954 aa, Artificial; identical to SEQ ID NO: 3461
  Synthetic

SEQ ID NO: 4075 - protein, 954 aa, Artificial
  Synthetic
MGKKIHARDLREQRKTDRTEKFADQNKKREAERAVPKKDAAVSVKSVSSVSSKKDNVTKSMAKAAGVKSVFAVGNTVYMTSFGRGNDAVLEQKIVDTSHEPLNIDDPAYQLNVVTMNGYSVTGHRGETVSAVTDNPLRRFNGGKKDEPEQSVPTDMLCLKPTLEKKFFGKEFNDNIHIQLIYNILDIEKILAVYSTNAIYALNNMSADENIENSDFFMKRTTDETFDDFEKKKESTNSREKADFDAFEKFIGNYRLAYFADAFYVNKKNPKGKAKNVLREDKELYSVLTLIGKLRHWCVHSEEGRAEFWLYKLDELKDDFKNVLDVVYNRPVEEINNRFIENNKVNIQILGSVYKNTDIAELVRSYYEFLITKKYKNMGFSIKKLRESMLEGKGYADKEYDSVRNKLYQMTDFILYTGYINEDSDRADDLVNTLRSSLKEDDKTTVYCKEADYLWKKYRESIREVADALDVDNIKNLSGSNIEIRDNELRKCFISYADSVSEFTKLIYLLTRFLSGKEINDLVTTLINKFDNIRSFLEIMDELGLDRTFTAEYSFFEGSTKYLAELVELNSFVKSCSFDINAKRTMYRDALDILGIESDKTEEDIEKMIDNILQIDANGDKKLKKNNGLRNFIASNVIDSNRFKYLVRYGNPKKIRETAKCKPAVRFVLNEIPDAQIERYYEACCPKNTALCSANKRREKLADMIAEIEFENFSDAGNYQKANVTSRTSEAEIKRKNQAIIRLYLTVMYIMLKNLVNVNARYVIAFHCVERDTKLYAESGLEVGNIEKNKTNLTMAVMGVKLENGIIKTEFDKSLAENAANRYLRNARWYKLILDNLKKSERAVVNEFRNTVCHLNAIRNININIKEIKEVENYFALYHYLIQKHLENRFADKKVERDTGDFISKLEEHKTYCKDFVKAYCTPFGYNLVRYKNLTIDGLFDKNYPGKDDSDKQK

SEQ ID NO: 4076 - protein, 931 aa, Artificial
  Synthetic
MEGRDMTETKSKREDIAKPPAAKSRSKAAGLKSTFAVNGSVLLTSFGRGNDAVPEKLITEKAVSELNTVKPRFSVEKPATSYSSSFGIKSHISATADNPLAGRAPVGEDAIRAKEVLEQRVFGKTFPDDNIHIQLIYNILDIRKILSTYANNVVFTITSMRRLDEYDREQDYLGYLYTGNSYERLLDIADKYAVDGEDWRNTAAGISNDFEKKQFQTINGFWDLLDMIEPYICYFSEAFFCETTVKNPDSGRIVPCLEQRSDGDIYNILRILSIVRQTCMHDNASMRTVMFTLGQNSVRDRKNGFDELAELLDYLYDEKIDIVNRDFLRNQKNNIELLSRIYGSSADSPERDRLVQNFYDFRVLSQDKNLGFSIKKLREKLLDSPALSVVRSKKYDTMRSKIYSLIDFMIYRKFSENHVAVDDFVEELRSLLTEDEKESAYSRWAETLINDGFAQEILVKLLPQTDPAVIGKIKGKKLLNDSIAGIKLKKDASFFTKIINVLCMFQDGKEINELVSSLVNKFANIQSFVDVMRSQGIDCGFTADYAMFAESGRISRELHILKGIARMQHSIAGLGDVKIYSSDDKFHGVSRRVYTDAAYILGFGERSEDNDGYVDDYVSSKLLGGADKNLRNFITNNVIKNRRFLYTVRYMNPKRAKKLVQNDALVVLALSGIPETQIDRYYKSCIEKRSFNPDLNEKIAALSEMITTLKIDDFEDVKQNPEKNANYEAKKNQRISKERYKACIGLYLTVLYLICKNLVKINARYSIAIGCLERDTQLHGVDFKGAAYMTRDVFIAKGWINPKKPTVKSIKEQYAFLTPYIFTTYRNMIAHLAAVTNAYKYIPQMDRFKSWFHLYHTVIQHSLIQQYEYDRDYGRKGAPVVSERVLQLLEQCREHSNYSRDLLHILNLPFGYNLPRYLNLSSEKYFDANAI

SEQ ID NO: 4077 - protein, 925 aa, Artificial
  Synthetic
MAKKNKMKPRELREAQKKARQLKAAEINNNAAPAIAAMPAAEVIAPAAEKKKSSVKAAGMKSILVSENKMYITSFGKGNSAVLEYEVDKVDNNNYNKTQLSSKDNSNIELGDVNEVNITFSSKRGNESGVEINTSNPTHRSGESSPVRWDMLGLKSELEKRFFGKTFDDNIHIQLIYNILDIEKILAVYVTNIVYALNNMLGIKKSESYDDFMGYLSARNTYEVFTHPDKSNLSDKAKGNIKKSFSTFNDLLKTKRLGYFGLEEPKTKDTRVSQAYKKRVYHMLAIVGQIRQSVFHDKSSKLDEDLYSFIDIIDSEYRETLDYLVDERFDSINKGFIQGNKVNISLLIDMMKGYEADDIIRLYYDFIVLKSQKNLGFSIKKLREKMLEEYGYRFKDKQYDSVRSKMYKLMDFLLFCNYYRNDVIAGEALVRKLRFSMTDDEKEGIYADEAAKLWGKFRNDFENIADHMNGDAIKELGKADMDFDEKILDSEKKYASDLLYFSKMIYMLTYFLDGKEINDLLTTLISKFDNIKEFLKIMKSSAVDVECELTAGYKLFNDSQRITNELFIVKNIASMRKPAASAKLTMFRDALTILGIDDNITDDRISEILKLKEKGKGIHGLRNFITNNVIESSRFVYLIKYANAQKIREVAKNEKAVMFVLGGIPDTQIERYYKSCVEFPDMNSSLEAKRSELARMIKNISFDDFKNVKQQAKGRENVAKERAKAVIGLYLTVMYLLVKNLVNVNARYVIAIHCLERDFGLYKEIIPELASKNLKNDYRILSQTLCELCDERDKSPNLFLKKNERLRKCVEVDINNADSIMTRKYRNCIAHLTVVRELKEYIGDIRTVDSYFSIYHYVMQRCITKREDDTKQEEKIKYEDDLLKNHGYTKDFVKALNSPFGYNIPRFKNLSIEQLFDRNEYLTEK

SEQ ID NO: 4078 - protein, 921 aa, Artificial; identical to SEQ ID NO: 3252
  Synthetic

SEQ ID NO: 4079 - protein, 954 aa, Artificial; identical to SEQ ID NO: 2989
  Synthetic

SEQ ID NO: 4080 - protein, 923 aa, Artificial; identical to SEQ ID NO: 2862
  Synthetic

SEQ ID NO: 4081 - protein, 931 aa, Artificial
  Synthetic
MEGRDMTETKSKREDIAKPPAAKSRSKAAGLKSTFAVNGSVLLTSFGRGNDAVPEKLITEKAVSELNTVKPRFSVEKPATSYSSSFGIKSHISATADNPLAGRAPVGEDAIRAKEVLEQRVFGKTFPDDNIHIQLIYNILDIRKILSTYANNVVFTITSMRRLDEYDREQDYLGYLYTGNSYERLLDIADKYAVDGEDWRNTAAGISNDFEKKQFQTINGFWDLLDMIEPYICYFSEAFFCETTVKNPDSGRIVPCLEQRSDGDIYNILRILSIVRQTCMHDNASMRTVMFTLGQNSVRDRKNGFDELAELLDYLYDEKIDIVNRDFLRNQKNNIELLSRIYGSSADSPERDRLVQNFYDFRVLSQDKNLGFSIKKLREKLLDSPALSVVRSKKYDTMRSKIYSLIDFMIYRKFSENHVAVDDFVEELRSLLTEDEKESAYSRWAETLINDGFAQEILVKLLPQTDPAVIGKIKGKKLLNDSIAGIKLKKDASFFTKIINVLCMFQDGKEINELVSSLVNKFANIQSFVDVMRSQGIDCGFTADYAMFAESGRISRELHILKGIARMQHSIAGLGDVKIYSSDDKFHGVSRRVYTDAAYILGFGERSEDNDGYVDDYVSSKLLGGADKNLRNFITNNVIKTRRFLYTVRYMNPKRAKKLVQNDALVVLALSGIPETQIDRYYKSCIEKRSFNPDLNEKIAALSEMITTLKIDDFEDVKQNPEKNANYEAKKNQRISKERYKACIGLYLTVLYLICKNLVKINARYSIAIGCLERDTQLHGVDFKGAAYMTRDVFIAKGWINPKKPTVKSIKEQYAFLTPYIFTTYRNMIAHLAAVTNAYKYIPQMDRFKSWFHLYHTVIQHSLIQQYEYDRDYGRKGAPVVSERVLQLLEQCREHSNYSRDLLHILNLPFGYNLPRYLNLSSEKYFDANAI

SEQ ID NO: 4082 - protein, 984 aa, Artificial; identical to SEQ ID NO: 2827
  Synthetic

SEQ ID NO: 4083 - protein, 922 aa, Artificial; identical to SEQ ID NO: 3620
  Synthetic

SEQ ID NO: 4084 - protein, 922 aa, Artificial; identical to SEQ ID NO: 3723
  Synthetic

SEQ ID NO: 4085 - protein, 924 aa, Artificial; identical to SEQ ID NO: 2910
  Synthetic

SEQ ID NO: 4086 - protein, 939 aa, Artificial; identical to SEQ ID NO: 2818
  Synthetic

SEQ ID NO: 4087 - protein, 954 aa, Artificial; identical to SEQ ID NO: 2989
  Synthetic

SEQ ID NO: 4088 - protein, 924 aa, Artificial; identical to SEQ ID NO: 2910
  Synthetic

SEQ ID NO: 4089 - protein, 927 aa, Artificial; identical to SEQ ID NO: 3948
  Synthetic

SEQ ID NO: 4090 - protein, 922 aa, Artificial; identical to SEQ ID NO: 3327
  Synthetic

SEQ ID NO: 4091 - protein, 922 aa, Artificial; identical to SEQ ID NO: 2840
  Synthetic

SEQ ID NO: 4092 - protein, 910 aa, Artificial; identical to SEQ ID NO: 2966
  Synthetic

SEQ ID NO: 4093 - protein, 15 aa, Artificial
  Synthetic
  misc_feature (4)..(4): Xaa can be any naturally occurring amino acid
DKHXFGAFLNLARHN

SEQ ID NO: 4094 - protein, 12 aa, Artificial
  Synthetic
GLLFFVSLFLDK

SEQ ID NO: 4095 - protein, 7 aa, Artificial
  Synthetic
  misc_feature (4)..(4): Xaa can be any naturally occurring amino acid
SKIXGFK

SEQ ID NO: 4096 - protein, 10 aa, Artificial
  Synthetic
  misc_feature (7)..(7): Xaa can be any naturally occurring amino acid
DMLNELXRCP

SEQ ID NO: 4097 - protein, 15 aa, Artificial
  Synthetic
  misc_feature (2)..(2): Xaa can be any naturally occurring amino acid
  misc_feature (14)..(14): Xaa can be any naturally occurring amino acid
RXZDRFPYFALRYXD

SEQ ID NO: 4098 - protein, 10 aa, Artificial
  Synthetic
  misc_feature (9)..(9): Xaa can be any naturally occurring amino acid
LRFQVBLGXY

SEQ ID NO: 4099 - protein, 10 aa, Artificial
  Synthetic
GLLFFVSLFL

SEQ ID NO: 4100 - protein, 9 aa, Artificial
  Synthetic
  misc_feature (4)..(4): Xaa can be any naturally occurring amino acid
RHQXRFPYF

SEQ ID NO: 4101 - protein, 8 aa, Artificial
  Synthetic
RHQDRFPY

SEQ ID NO: 4102 - protein, 886 aa, Artificial
  Synthetic
MKITKIDGVSHYKEKEKGVLKGKDILNGKIEKIVKKRYDATIESKIYKEFIKLRKNRIEQNNEKSILKLIKLNIDKNEKEIKTLLLNKFKIKEKNKKYDKYMLDENKLDNDIKIYESVESLYFLIKEIYLGQNNKKWNISKIDLEKIMEEDNNLIMLGYKLKKNITENDYPYLYSDKNGQESTSVYKLLKKLIEENKDRNQDIRKSQEYEKIRKNFEEYKNRKINLLVKSIKNNKINIQYINNEIKSHNNSREENIIKFFKKMIEEKNEPILKDKLKLFKLEVFFDEEFLEEIKKLLDSDDFDKSYNKKISELRGKIFNRIREEIKNNKNRDELENIYFLELKKYIENNLSHKKEKDKNNNNTGEEKSKELYLKFLKKVLFIDDNNRISIEKLKSRIDDNFKNLLIQHVIEYGKIKYYVENDDYIRNIVKNGELKLETKDLEYIKTKETLIRKMAVLVSFATNSYYNLFGRTENNIPTQEISDDLLLGKIENEIYIKGERNRRYVFKEKMLNYFFYSEIFGDNKIVEVLNAISSSIYNIRNGVNHFDKMILGKYNNGLDLKDSDTIKDYFNFKKKEIQQDLKDRFISNNLQYYYTENEIKKYFEKYKFEILKTKASFAPNFKRILIKGENLSISESNNSYEFFKAYSESSDKNTEYNEFMKTRNFLLKELYYNNFYTEFLNNKAKFNEAVKKVKKNKKKRAENKGRAAGKSYDMIENYNFSDNIPEYISYIHKSEMERIEINTEKNRRDTSKHIRDFIEEIFLEGFIEYLDNNNFKFLKKRNEVDKEREEIVRNLNIQIEGLDILNENDSEILNLYLFFNMIDNKRISEFRNDMIKYKQFLAKRQNIDSKFLKIDIEKIEAIIEFVIITKEKLEILEGETKEQKKR

SEQ ID NO: 4103 - protein, 713 aa, Artificial
  Synthetic
MCMKITKIDGVSHYKEKEKGVLKAKGVLNEEIQKIVKKRYDKTIESKIYKEFIKLRKNRIEQNNEKSILELIKSNIDKNEKEIKTLLWKNFKIKEKNKKYDKYILDENKLDNDIKIYESAESLYFFIKEVYLGENNKKWNISKIDLEKIMEEDSDLIMLGYKLKKNIKEDDYPYLYRDKNGQESTSVYELLKKLIEENKDRNQDIRESEEYRKIQKEFKEYKNRKINLLVKSILNNKVNIKYNTNNNSLEDSNSKREKEIIEFFKKMIEEKNKPILKDKLELFRLEVFFDEEFLEEIKKLLDSDDSDKSDNKKIAELRGKIFSRIREKIKEDKNRGILKNIYFLELRKYIENNLSHKKEKNKNKNNNIGEEKSKELYLEFLKKVLFIDDNNRISIEKLKSRIDDNFKNLLIQHVIEYGKIKYYVENDDYIRNIVKNGELKLETENLEYIRIRETLIRKMAVLVSFAANSFYNLFENITSDILTANINLDSDVIKIGNNRLKEKFLNYFFYSEEISDKEDFLKALKDSIYNVRNGVNHFDKMILGKYNNGLDLKDSNTIKDYFNFKKKEIQQDLKDRFISNNLQYYYTENEIKKYFEKYKFEILKTKASFAPNFKRILIKGENLSISESNNSYEFFKAYSESSDKNTEYNEFMKTRNFLLKELYYNNFYTEFLNNKAKFKDFKDKVAFALVSPFLVSSMIAISPVLFIESLIED

SEQ ID NO: 4104 - protein, 480 aa, Artificial
  Synthetic
MKITKIDGISHKKYIKEGKLVKSTSEENKTDERLSELLIIRLDTYIKNPDNASEEENRIRRENLKEFFSNKVLYLKDGILYLKDRREKNQLQNKNYSEEDISEYDLKNKNSFSVLKKILLNEDINSEELEIFRNDFEKKLDKINSLKYSLEENRANYQKINENNIKKVEGKSKRNIFYNYYKDSAKRNDYINNIQEAFDKLYKKEDIENLFFLIENSKKHEKYKIRECYHKIIGRKNDKENFATIIYEEIQNVNNMKELIEKVPNVSELKKSQVFYKYYLNKEKLNDENIKYVFCHFVEIEMSKLLKNYVYKKPSNISNDKVKRIFEYQSLKKLIENKLLNKLDTYVRNCGKYSFYLQDGEIATSNFIVENRQNEAFLRNIIGVSSAAYFSLRNILETENENDITGRIKGKTVKNNKGEEKYISGEIDKLYDNNKQNEVKKNLKMFYSYDFNMNSKKEIEDFFSNIDEAIRQSKKYRGSH

SEQ ID NO: 4105 - protein, 480 aa, Artificial; identical to SEQ ID NO: 4104
  Synthetic

SEQ ID NO: 4106 - protein, 637 aa, Artificial
  Synthetic
LYMKITKIDGISHKKYIKEGKLVKSTSEENKTDERLSELLTIRLDTYIKNPDNASEEENRIRRENLKEFFSNKVLYLKDGILYLKDRREKNQLQNKNYSEQDISEYDLKNKNNFLVLKKILLNEDINSEELEIFRNDFEKKLDKINSLKYSLEENKANYQKINENNIEKVEGKSKRNIFYNYYKDSAKRNDYINNIQEAFDKLYKKEDIENLFFFIENSKKHEKYKIRECYHKIIGRKNDKENFSKIIYEEIQNVNNMKELIEKVPNVSELKKSQVFYKYYLNKEKLNDENIKYVFCHFVEIEMSKLLKNYVYKKPSNISNDKVKRIFEYQSLKKLIENKLLNKLDTYVRNCGKYSFYLQDGEIATSNFIVGNRQNEAFLRNIIGVSSAAYFSLRNILETENENDITGRIKGKTVKNNKGEEKYISGEIDKLYDNNKQNEVKKNLKMFYSYDFNMNSKKEIEDFFSNIDEAISSIRHGIVHFNLELEGKDIFTFKNIVPSQISKKMFQDEINEKKLKLKIFRQLNSANVFRYLEKYKILNYLKRTRFEFVNKNIPFVPSFTKLYSRIDDLKNSLCIYWKIPKANDNNKTKEITDAQIYLLKNIYYGDKVLNEADPKSFKSLSKISYGLGKDKNNLYF

SEQ ID NO: 4107 - protein, 862 aa, Artificial
  Synthetic
MKITKIDGISHKKYIKEGKLVKSTSEENKTDERLSELLTIRLDTYIKNPDNASEEENRIRRENLKEFFSNKVLYLKDGILYLKDRREKNQLQNKNYSEEDISEYDLKNKNSFLVLKKILLNEDINSEELEIFRNDFEKKFNKINSLKYSLEENKANYQKINENNIKKVEGKSKRNIFYNYYKDSAKRNDYINNIQEAFDKLYKKEDIENLFFLIENSKKHEKYKIRECYHKIIGRKNDKENFSKIIYEEIQNVNNMKELIEKVPNVSELKKSQVFYKYYLNKEKLNDENIKYVFCHFVEIEMSKLLKNYVYKKPSNISNDKVKRIFEYQSLKKLIENKLLNKLDTYVRNCGKYSFYLQDGEIATSDFIVGNRQNEAFLRNIIGVSSTAYFSLRNILETENENDITGRIKGKTVKNNKGEEKYISGEIDKLYDNNKQNEVKKNLKMFYSYDFNMNRKKEIEDFFSNIDEAISSIRHGIVHFNLELEGKDIFTFKNIVPSQISKKMFQNEINEKKLKLKIFRQLNSANVFRYLEKYKILNYLNRTRFEFVNKNIPFVPSFTKLYSRIDDLKNSLCIYWKIPKANDNNKTKEITDAQIYLLKNIYYGEFLNYFMSNNGNFFEITKEIIELNKNDKRNLKTGFYKLQKFENLQEKTPKEYLANIQSLYMINAGNQDEEEKDTYIDFIQKIFLKGFMTYLANNGRLSLIYIGSDEETNTSLAEKKQEFDKFLKKYEQNNNIEIPHEINEFVREIKLGKILKYTESLNIFYLILKLLNHKEFTNLKGSLEKYQSANKEEAFSDQLELINLLNLDNNRVTEDFELEADEIGKFLDFNGNKVKDNKELKKFDTNKIYFDGENIIKHRAFY

SEQ ID NO: 4108 - protein, 440 aa, Artificial
  Synthetic
MKITKIDGISHKKYIKEGKLVKSTSEENKTDERLSELLTIRLDTYIKNPNNASEEENRIRRENLKEFFSNKVLYLKDGILYLKDRREKNQLQNKNYSEEDISEYDLKNKNNFLVLKKILLNEDINSEELEIFRNDFEKKLDKINSLKYSLEENKANYQKINENNIEKVEGKSKRNIFYNYYKDSAKRNDYINNIQEAFDKLYKKEDIENLFFLIENSKKHEKYKIRECYHKIIGRKNDKENFATIIYEEIQNVNNMKELIEKVPNVSELKKSQVFYKYYLNKEKLNDENIKYVFCHFVEIEMSKLLKNYVYKKPSNISNDKVKRIFEYQSLKKLIENKLLNKLDTYVRNCGKYSFYLQDGEIAISDFIVGNRQNEAFLRNIIGVSSTAYFSLRNILETENENDITGRIKGKTVKNNKGGEKYNSRQHLKDKYVAERLSIE

SEQ ID NO: 4109 - protein, 672 aa, Artificial
  Synthetic
MKVTKVDGISHKKYIEEGKLVKSTSEENRTSERLSELLSIRLDIYIKNPDNASEEENRIRRENLKKFFSNKVLYLKDSVLYLKNRNEKNAVQDKNYSEEDISEYDLKNKNSFSVLKKILLNEDINSEELEIFRKDVEAKLNKINSLKYSFEENKANYQKINENNVEKVGGKSKRNIIYDYYRESAKRNDYINNVQEAFDKLYKKEDIEKLFFLIENSKKHEKYKIRECYHKIIGRKNDKENFAKIIYEEIQNVNNIKELIEKVPNMSELKKSQVFYKYYLDKEELNDKNIKYAFCHFVEIEMSKLLKNYVYKKPSNISNDKVKRIFEYQNLKKLIENKLLNKLDTYVRNCGKYNYYLQVGEIATSDFIARNRQNEAFLRNIIGVSSVAYFSLRNILETENENDITGRMRGKTVKNNKGEEKYVSGEVDKIYNENKQNEVKENLKMFYSYDFNMDNKNEIEDFFANIDEAISSIRHGIVHFNLELEGKDIFAFKNIVPSEISKKMFQNEINEKKLKLKIFRQLNSANVFRYLEKYKILNYLKRTRFEFVNKNIPFVPSFTKLYSRIDDLKNSLGIYWKTPKTNDDNKTKEIIDAQIYLLKNIYYGEFLNYFMSNNGNFFEISREIIELNKNDKRNLKTGFYKLQKFEDIQEKTPKEYLANIQSLYMINAGNQD

SEQ ID NO: 4110 - protein, 868 aa, Artificial
  Synthetic
MKVTKVDGISHKKYIEEGKLVKSTSEENRTSERLSELLSIRLDIYIKNPDNASEEENRIRRENLKKFFSNKVLHLKDSVLYLKNRKEKNAVQDKNYSEEDISEYDLKNKNSFSVLKKILLNEDINSEELEIFRKDVEAKLNKINSLKYSFEENKANYQKINENNVEKVGGKSKRNIIYDYYRESAKRNDYINNVQEAFDKLYKKEDIEKLFFLIENSKKHEKYKIRECYHKIIGRKNDKENFAKIIYEEIQNVNNIKELIEKVPDMSELKKSQVFYKYYLDKEELNDKNIKYAFCHFVEIEMSQLLKNYVYKRLSNISNDKIKRIFEYQNLKKLIENKLLNKLDTYVRNCGKYNYYLQDGEIATSDFIARNRQNEAFLRNIIGVSSVAYFSLRNILETENENDITGRMRGKTVKNNKGEEKYVSGEVDKIYNENKQNEVKENLKMFYSYDFNMDNKNEIEDFFANIDEAISSIRHGIVHFNLELEGKDIFAFKNIVPSEISKKMFQNEINEKKLKLKIFRQLNSANVFRYLEKYKILNYLKRTRFEFVNKNIPFVPSFTKLYSRIDDLKNSLGIYWKTPKTNDDNKTKEIIDAQIYLLKNIYYGEFLNYFMSNNGNFFEISKEIIELNKNDKRNLKTGFYKLQKFEDIQEKTPKEYLANIQSLYMINAGNQDEEEKDTYIDFIQKIFLKGFMTYLANNGRLSLMYIGNDEQINTSLAGKKQEFDKFLKKYEQNNNIEIPHEINEFVREIKLGKILKYTESLNMFYLILKLLNHKELTNLKGSLEKYQSANKEETFSDELELINLLNLDNNRVTEDFELEANEIGKFLDFNGNKIKDRKELKKFDTNKIYFDGENIIKHRAFYNIKKYG

SEQ ID NO: 4111 - protein, 710 aa, Artificial
  Synthetic
MKVTKVDGISHKKYIEEGKLVKSTSEENRTSERLSELLSIRLDIYIKNPDNASEEENRIRRENLKKFFSNKVLHLKDSVLYLKNRKEKNAVQDKNYSEEDISEYDLKNKNSFSVLKKILLNEDINSEELEIFRKDVEAKLNKINSLKYSFEENKANYQKINENNIEKVEGKSKRNIIYDYYRESAKRNDYINNVQEAFDKLYKKEDIETLFFLIENSKKHEKYKIRECYHKIIGRKNDKENFAKIIYEEIQNVNNIKELIEKVPDMSELKKSQVFYKYYLDKEELNDENIKYVFCHFVEIEMSKLLKNYVYKKPSNISNDKVKRIFEYQSLKKLIENKLLNKLDTYVRNCGKYNYYLQDGEIATSDFIARNRQNEAFLRNIIGVSSVAYFSLRNILETENENDITGRMRGKTVKNNKGEEKYVSGEVDKIYNENKQNEVKENLKMFYSYDFNMDNKNEIEDFFANIDEAISSIRHGIVHFNLELEGKDIFAFKNIAPSEISKKMFQNEINEKKLKLKIFRQLNSANVFRYLEKYKILNYLKRTRFEFVNKNIPFVPSFTKLYSRIDDLKNSLGIYWKTPKTNDDNKTKEIIDAQIYLLKNIYYGEFLNYFMSNNGNFFEISREIIELNKNDKRNLKTGFYKLQKFEDIQEKTPKEYLANIQSLYMINAGNQDEEEKDTYIDFIQKIFLKGFMTYLANNGRLSLIYIGSDE

SEQ ID NO: 4112 - protein, 710 aa, Artificial
  Synthetic
MKVTKVDGISHKKYIEEGKLVKSTSEENRTSERLSELLSIRLDIYIKNPDNASEEENRIRRENLKKFFSNKVLHLKDSVLYLKNRKEKNAVQDKNYSEEDISEYDLKNKNSFSVLKKILLNEDINSEELEIFRKDVEAKLNKINSLKYSFEENKANYQKINENNIEKVEGKSKRNIIYDYYRESAKRNDYINNVQEAFDKLYKKEDIEKLFFLIENSKKHEKYKIREYYHKIIGRKNDKENFAKIIYEEIQNVNNIKELIEKVPDMSELKKSQVFYKYYLDKEELNDENIKYVFCHFVEIEMSKLLKNYVYKKPSNISNDKVKRIFEYQSLKKLIENKLLNKLDTYVRNCGKYNYYLQDGEIATSDFIARNRQNEAFLRNIIGVSSVAYFSLRNILETENENDITGRMRGKTVKNNKGEEKYVSGEVDKIYNENKQNEVKENLKMFYSYDFNMDNKNEIEDFFANIDEAISSIRHGIVHFNLELEGKDIFAFKNIAPSEISKKMFQNEINEKKLKLKIFRQLNSANVFRYLEKYKILNYLKRTRFEFVNKNIPFVPSFTKLYSRIDDLKNSLGIYWKTPKTNDDNKTKEIIDAQIYLLKNIYYGEFLNYFMSNNGNFFEISREIIELNKNDKRNLKTGFYKLQKFEDIQEKTPKEYLANIQSLYMINAGNQDEEEKDTYIDFIQKIFLKGFMTYLANNGRLSLIYIGSDE

SEQ ID NO: 4113 - protein, 655 aa, Artificial
  Synthetic
MKVTKVDGISHKKYIEEGKLVKSTSEENRTSERLSELLSIRLDIYIKNPDNASEEENRIRRENLKKFFSNKVLHLKDSVLYLKNRNEKNAVQDKNYSEEDISEYDLKNKNSFSVLKKILLNEDINSEELEIFRKDVEVKLNKINSLKYSFEENKANYQKINENNVEKVGGKSKRNIIYDYYRESAKRNDYINNVQEAFDKLYKKEDIENLFFLIENSKKNEKYKIRECYHKIIGRKNDKENFAKIIYEEIQNVNNIKELIEKVPDMSELKKSQVFYKYYLDKEELNDKNIKYAFCHFVEIEMSKLLKNYVYKKPSNISNDKVKRIFEYQSLKKLIENKLLNKLDTYVRNCGKYNYYLQDGEIATSDFIARNRQNEAFLRNIIGVSSAAYFSLRNILETENENDITGRMRGKTVKNNKGEEKYVSGEVDKIYNENKQNEVKENLKMFYSYDFNVDNKNEIEDFFVNIDEAISSIRHGIVHFNLELEGKDIFAFKNIAPSEISKKMFQNEINEKKLKLKIFRQLNSANVFRYLEKYKILNYLKRTRFEFVNKNIPFVPSFTKLYSRIDDLKNSLGIYWKTPKTNDDNKTKEIIDAQIYLLKNIYYGEFLNYFMSNNGNFFEISKEIIELNKNDKRNLKTGFYKLQKFEDIQEKTPKE

SEQ ID NO: 4114 - protein, 720 aa, Artificial
  Synthetic
MKVTKVDGISHKKYIEEGKLVKSTSEENRTSERLSELLSIRLDIYIKNPDNASEEENRIRRENLKKFFSNKVLHLKDSVLYLKNRNEKNAVQDKNYSEEDISEYDLKNKNSFSVLKKILLNEDINSEELEIFRKDVEAKLNKINSLKYSFEENKANYQKINENNVEKVGGKSKRNIIYDYYRESAKRNDYINNVQEAFDKLYKKEDIEKLFFLIENSKKHEKYKIRECYHKIIGRKNDKENFAKIIYEEIQNVNNIKELIEKVPDMSELKKSQVFYKYYLDKEELNDKNIKYAFCHFVEIEMSKLLKNYVYKKPSNISNDKVKRIFEYQSLKKLIENKLLNKLDTYVRNCGKYNYYLQDGEIATSDFIARNRQNEAFLRNIIGVSSVAYFSLRNILETENENDITGRMRGKTVKNNKGEEKYVSGEVDKIYNENKQNEVKENLKMFYSYDFNVDNKNEIEDFFVNIDEAISSIRHGIVHFNLELEGKDIFAFKNIAPSEISKKMFQNEINEKKLKLKIFRQLNSANVFRYLEKDRILDYLRSTRFEFVNKNIPFVPSFTKLYDRIDDLKNSLDIYWKIPKTKDDIKTKEITDAQIYLLKNIYYGKFLDYFMSRNGNFFKISREVIKLNKNDKRNLKTGFYKLQKFEDIQEKTPKEYLANIQSLYMINAGNQDEEEKDTYIDFIQKIFLKGFMTYLANNGRLSLMYIGNDEQINTSLAGKK

SEQ ID NO: 4115 - protein, 407 aa, Artificial
  Synthetic
MKVTKVDGISHKKYIEEGKLVKSTSEENRTSERLSELLSIRLDIYIKNPDNASEEENRIRRENLKKFFSNKVLHLKDSVLYLKNRNEKNTVQDKNYSEEDISEYDLKNKNSFSVLKKILLNEDINSEELEIFRKDVEAKLNKINSLKYSFEENKANYQKINENNVEKVGGKSKRNIIYDYYRESAKRNDYINNVQEAFDKLYKKEDIENLFFLIENSKKHEKYKIRECYHKIIGRKNDKENFAKIIYEEIQNVNNIKELIEKVPDMSELKKSQVFYKYYLDKEELNDKNIKYAFCHFVEIEMSKLLKNYVYKKPSNISNDKVKRIFEYQSLKKLIENKLLNKLDTYVRNCGKYNYYLQDGEIATSDFIARNRQNEAFLRNIIGVSSVAYFSLRNILETENENDITGR

SEQ ID NO: 4116 - protein, 699 aa, Artificial
  Synthetic
MKVTKVDGISHKKYIEEGKLVKSTSEENRTSERLSELLSIRLDIYIKNPDNASEEENRIRRENLKKFFSNKVLHLKDSVLYLKNRKEKNAVQDKNYSEEDISEYDLKNKNSFLVLKKILLNEDINSEELEIFRKDVEAKLNKINSLKYSFEENKANYQKINENNVEKVGGKSKRNIIYDYYRESAKHNDYINNVQEAFDKLYKKEDIENLFFLIENSKKHEKYKIRECYHKIIGRKNDKENFAKIIYEEIQNVNNIKELIEKVPNMSELKKSQVFYKYYLDKEELNDKNIKYAFCHFVEIEMSKLLKNYVYKKPSNISNDKVKRIFEYQSLKKLIENKLLNKLDTYVRNCGKYNYYLQDGEIATSDFIARNRQNEAFLRNIIGVSSVAYFSLRNILETENENDITGRMRGKTVKNNKGEEKYVSGEVDKIYNENKQNEVKENLKMFYSYDFNMDNKNEIEDFFANIDEAISSIRHGIVHFNLELEGKDIFAFKNIAPSEISKKIFQNEINEKKLKLKIFRQLNSANVFNFYEKDVIIKYLKNTKFNFVNKNIPFVPSFTKLYNKIDDLRNTLKFSWKIPKDKEEKDAQIYLLKNIYYGEFLNKFVKNSKDFFKITDEVIKINKQINQKTGYYKYQKFENIEKTVPVEYLAIIQSRDMINNQDKEEKNTYIDFVQQIFLKGFIDYLNKNNLKYIENNNNN

SEQ ID NO: 4117 - protein, 718 aa, Artificial
  Synthetic
MKVTKVDGISHKKYIEEGKLVKSTSEENRTSERLSELLSIRLDIYIKNPDNASEEENRIRRENLKKFFSNKVLHLKDSVLYLKNRKEKNAVQDKNYSEEDISEYDLKNKNSFSVLKKILLNEDVNSEELEIFRKDVEAKLNKINSLKYSFEENKANYQKINENNVEKVGGKSKRNIIYDYYRESAKHNDYINNVQEAFDKLYKKEDIENLFFLIENSKKHEKYKIRECYHKIIGRKNDKENFAKIIYEEIQNVNNIKELIEKVPDMSELKKSQVFYKYYLDKEELNDENIKYAFCHFVEIEMSKLLKNYVYKKPSNISNDKVKRIFEYQSLKKLIENKLLNKLDTYVRNCGKYNYYLQDGEIATSDFIARNRQNEAFLRNIIGVSSVAYFSLRNILETENENDITGRMRGKTVKNNKGEEKYVSGEVDKIYNENKQNEVKENLKMFYSYDFNMDNKNEIEDFFANIDEAISSIRHGIVHFNLELEGKDIFAFKNIVPSEISKKMFQNEINEKKLKLKIFKQLNSANVFNFYEKDVIIKYLKNTKFNFVNKNIPFVPSFTKLYNKIDDLRNTLKFSWKIPKDKEEKDAQIYLLKNIYYGEFLNKFVKNSKDFFKITDEVIKINKQRNQKTGYYKYQKFENIEKTVPVEYLAIIQSRDMINNQDKEEKNTYIDFVQQIFLKGFIDYLNKNNLKYIENNNNNDNNDIFSKIKIKKDNKEKY

SEQ ID NO: 4118 - protein, 684 aa, Artificial
  Synthetic
MKVTKVDGISHKKYIEEGKLVKSTSEENRTSERLSELLSIRLDIYIKNPDNASEEENRIRRENLKKFFSNKVLHLKDSVLYLKNRNEKNAVQDKNYSEEDISEYDLKNKNSFSVLKKILLNEDINSEELEIFRKDVEAKLNKINSLKYSFEENKANYQKINENNVEKVGGKSKRNIIYDYYRESAKHNDYINNVQEAFDKLYKKEDIEKLFFFIENSKKHEKYKIRECYHKIIGRKNDKENFAKIIYEEIQNVNNIKELIEKVPDMSELKKSQVFYKYYLDKEELNDKNIKYAFCHFVEIEMSKLLKNYVYKKPSNISNDKVKRIFEYQSLKKLIENKLLNKLDTYVRNCGKYNYYLQDGEIATSDFIARNRQNEAFLRNIIGVSSVAYFSLRNILETENENDITGRMRGKTVKNNKGEEKYVSGEVDKIYNENKQNEVKENLKMFYSYDFNVDNKNEIEDFFVNIDEAISSIRHGIVHFNLELEGKDIFAFKNIAPSEISKKMFQNEINEKKLKLKIFRQLNSANVFNFYEKDVIIKYLKNTKFNFVNKNIPFVPSFTKLYNKIDDLRNTLKFSWKIPKDKEEKDAQIYLLKNIYYGEFLNKFVKNSKDFFKITDEVIKINKQRNQKTGYYKYQKFENIEKTVPVEYLAIIQSRDTINNQDKEEKNTYIDFVQQIFLKGFIDY

SEQ ID NO: 4119 - protein, 714 aa, Artificial
  Synthetic
MKVTKVDGISHKKYIEEGKLVKSTSEENRTSERLSELLSIRLDIYIKNPDNASEEENRIRRENLKKFFSNKVLHLKDSVLYLKNRKEKNAVQDKNYSEEDISEYDLKNKNSFSVLKKILLNEDINSEELEIFRKDVEAKLNKINSLKYSFEKNKANYQKINENNIEKVGGKSKRNIIYDYYRESAKRNDYINNVQEAFDKLYKKEDIEKLFFLIENSKKHEKYKIRECYHKIIGRKNDKENFAKIIYEEIQNVNNIKELIEKVPDMSELKKSQVFYKYYLDKEELNDKNIKYAFCHFVEIEMSQLLKNYVYKRLSNISNDKIKRIFEYQNLKKLIENKLLNKLDTYVRNCGKYNYYLQDGEIATSDFIAGNRQNEAFLRNIIGVSSVAYFSLRNILETENENDITGRMRGKTVKNNKGEEKYVSGEVDKIYNENKQNEVKENLKMFYSYDFNMDNKNEIEDFFANIDEAISSIRHGIVHFNLELEGKDIFAFKNIVPSEISKKMFQNEINEKKLKLKIFRQLNSANVFNFYEKDVIIKYLKNTKFNFVNKNIPFVPSFTKLYNKIDDLRNTLKFSWKIPKDKEEKDAQIYLLKNIYYGEFLNKFVKNSKDFFKITDEVIKINKQRNQKTGYYKYQKFENIEKTVPVEYLAIIQSRDMINNQDKEEKNTYIDFVQQIFLKGFIDYLNKNNLKYIENNNNNDIFSRIKIKKDSKER

SEQ ID NO: 4120 - protein, 757 aa, Artificial
  Synthetic
MKVTKVDGISHKKYIEEGKLVKSTSEENRTSERLSELLSIRLDIYIKNPDNASEEENRIRRENLKKFFSNKVLHLKDSVLYLKNRNEKNAVQDKNYSEEDISEYDLKNKNSFLVLKKILLNGDINSEELEIFRNDFEKKLDKLNSLKYSLEENKANYQKINENNIKKVEGKSKRNIFYNYYKDSAKRNDYINNIQEAFDKLYKKEDIENLFFLIENSKKHEKYKIRECYHKIIGRKNDKENFAKIIYEEIQNVNNIKELIEKVPDMSELKKSQVFYKYYLDKEELNDENVKYVFCHFVEIEMSKLLKNYVYKKPSNISNDKVKRIFEYQSLKKLIENKLLNKLDTYVRNCGKYNYYLQDGEIATSDFIAGNRQNEAFLRNIIGVSSVAYFSLRNILETENENDITGRMRGKTVKNNKGEEKYVSGEVDKIYNENKQNEVKENLKMFYSYDFNMDNKNEIEDFFANIDEAISSIRHGIVHFNLELEGKDIFAFKNIAPSEISKKMFQNEINEKKLKLKIFRQLNSANVFRYLEKYKILNYLKRTRFEFVNKNIPFVPSFTKLYSRIDDLKNSLGIYWKTPKTNDDNKTKEIIDAQIYLLKNIYYGEFLNYFMSNNGNFFEISREIIELNKNDKRNLKTGFYKLQKFEDIQEKTPKEYLANIQSLYMINAGNQDEEEKDTYIDFIQKIFLKGFMTYLANNGRLSLIYIGSDEETNTSLAEKKQEFDKFLKKYEQNNNIEIPHEINEFVREIKLGKILKY

SEQ ID NO: 4121 - protein, 556 aa, Artificial
  Synthetic
MKVTKVDGISHKKYIEEGKLVKSTSEENRTGERLSELLSIRLDIYIKNPDNASEEENRIRRENLKKFFSNKVLHLKDSVLYLKNRKEKNAVQDKNYSEEDISEYDLKNKNSFSVLKKILLNEDINSEELEIFRKDVEAKLNKINSLKYSFEENKANYQKINENNVEKVVGKSKRNIIYDYYRESAKRNDYINNVQEAFDKLYKKEDIEKLFFLIENSKKHEKYKIRECYHKIIGRKNDKENFAKIIYEEIQNVNNMKELIEKVPDMSELKKSQVFYKYYLDKEELNDENVKYVFCHFVEIEMSQLLKNYVYKRLSNISNDKIKRIFEYQNLKKLIENKLLNKLDTYVRNCGKYNYYLQVGEIATSDFIARNRQNEAFLRNIIGVSSVAYFSLRNILETENENDITGRMRGKTVKNNKGEEKYVSGEVDKIYNENKKNEVKENLKMFYSYDFNMDNKNEIEDFFANIDEAISSIRHGIVHFNLELEGKDIFTFKNIVPSQISKKMFQDEINEKKLKLKIFKQLNSANVFNFYEKDVIIKYLKNTFLNLYSFSRPSIL

SEQ ID NO: 4122 - protein, 698 aa, Artificial
  Synthetic
LYMKITKIDGISHKKYIKEGKLVKSTSEENKTDERLSELLTIRLDTYIKNPDNASEEENRIRRENLKEFFSNKVLYLKDGILYLKDRREKNQLQNKNYSEEDISEYDLKNKNNFLVLKKILLNEDINSEELEIFRNDFEKKLDKINSLKYSLEENKANYQKINENNIEKVEGKSKRNIFYNYYKDSAKRNDYINNVQEAFDKLYKKEDIEKLFFLIENSKKHEKYKIRECYHKIIGRKNDKENFAKIIYEEIQNVNNIKELIEKVPDMSELKKSQVFYKYYLDKEELNDENIKYAFCHFVEIEMSKLLKNYVYKKPSNISNDKVKRIFEYQSLKKLIENKLLNKLDTYVRNCGKYNYYLQVGEIATSDFIARNRQNEAFLRNIIGVSSVAYFSLRNILETENENDITGRMRGKTVKNNKGEEKYVFGEVDKIYNENKQNEVKENLKMFYSYDFNMNSKKEIEDFFSNIDEAISSIRHGIVHFNLELEGKDIFAFKNIAPSEISKKMFQNEINEKKLKLKIFRQLNSANVFNFYEKDVIIKYLKNTKFNFVNKNIPFVPSFTKLYNKIDDLRNTLKFSWKIPKDKEEKDAQIYLLKNIYYGEFLNKFVKNSKDFFKITDEVIKINKQRNQKTGYYKYQKFENIEKTVPVEYLAIIQSRDMINNQDKEEKNTYIDFVQQIFLKGFIDYLNKNNLKYIENN

SEQ ID NO: 4123 - protein, 673 aa, Artificial
  Synthetic
LYMKITKIDGISHKKYIKEGKLVKSTSEENKTDERLSELLTIRLDTYIKNPDNASEEEKRIRRETLKEFFSNKVLHLKDGILYLKDRREKNQLQNKNYSEQDISEYDLKNKNSFSVLKKILLNEDINSEELEIFRNDFEKKLDKINSLKYSLEENKANYQKINENNIKKVEGKSKRNIFYNYYKDSAKRNDYINNIQEAFDKLYKKEDIENLFFLIENSKKHEKYKIRECYHKIIGRKNDKENFATIIYEEIQNVNNMKELIEKVPDMSELKKSQVFYKYYLDKEELNDENIKYAFCHFVEIEMSKLLKNYVYKKPSNISNDKVKRIFEYQSLKKLIENKLLNKLDTYVRNCGKYNYYLQDGEIATSDFIAGNRQNEAFLRNIIGVSSVAYFSLRNILETENKNDITGKIRGKTRIESKTGEEKYIPGEVDQIYYENKQNEVKNKLKMFYGYDFDMDNKKEIEDFFANIDEAISSIRHGIVHFNLELEGKDIFAFKNIVPSEISKKMFQNEINEKKLKLKIFRQLNSANVFNFYEKDVIIKYLKNTKFNFVNKNIPFVPSFTKLYNKIDDLRNTLKFSWKIPKDKEEKDAQIYLLKNIYYGEFLNKFVKNSKDFFKITDEVIKINKQRNQKTGYYKYQKFENIEKTVPVEYLAIIQSRDMINNQDKEEKNTYI

SEQ ID NO: 4124 - protein, 630 aa, Artificial
  Synthetic
MKVTKVDGISHKKYIEEGKLVKSTSEENRTGERLSELLSIRLDIYIKNPDNASEEENRIRRENLKKFFSNKVLHLKDSVLYLKNRKEKNAVQDKNYSEEDISEYDLKNKNSFSVLKKILLNEDVNSEELEIFRKDVEAKLNKINSLKYSFKENKANYQKINENNVEKVGGKSKRNIIYDYYRESAKRDAYVSNVKEAFDKLYKEEDIAKLVLKIENLTKLEKYKIREFYHEIIGRKNDKENFAKIIYEEIQNVNNMKELIEKVPDMSELKKSQVFYKYYLDKEELNDKNIKYAFCHFVEIEMSKLLKNYVYKKPSNISNDKVKRIFEYQSLKKLIENKLLNKLDTYVRNCGKYNYYLQDGEIATSDFIAGNRQNEAFLRNIIGVSSVAYFSLRNILETENKDDITGKIRGKTRIESKTGEEKYIPGEVDQIYYENKQNEVKNKLKMFYGYDFDMDNKKEIEDFFANIDEAISSIRHGIVHFNLELEGKDIFAFKNIVPSEISKKMFQNEINEKKLKLKIFRQLNSANVFNFYEKDVIIKYLKNTKFNFVNKNIPFVPSFTKLYNKIDDLRNTLKFSWKIPKVKEEKDAQIYLLKNIYYGEFLNKFVKNSKDFFKITDEVIKINKQRNQKT

SEQ ID NO: 4125 - protein, 692 aa, Artificial
  Synthetic
MKITKIDGISHKKYIKEGKLVKSTSEENKTDERLSELLTIRLDTYIKNPDNASEEENRIRRENLKEFFSNKVLHLKDGILYLKDRREKNQLQNKNYSEEDISEYDLKNKNNFLVLKKILLNEDINSEELEIFRNDFEKKLDKINSLKYSLEENKANYQKINENNIKKVEGKSKRNIFYNYYKDSAKRNDYINNIQEAFDKLYKKEDIENLFFLIENSKKHEKYKIRECYHKIIGRKNDKENFSKIIYEEIQNVNNMKELIEKVPNVSELKKSQVFYKYYLNKEKLNDENIKYVFCHFVEIEMSKLLKNYVYKKPSNISNDKVKRIFEYQSLKKLIENKLLNKLDTYVRNCGKYNYYLQDGEIATSDFIARNRQNEAFLRNIIGVSSVAYFSLRNILETENKDDITGKIRGKTRIDSKTREEKYIPGEVDQIYYENKQNEVKNKLKMFYGYDFDMDNKKEIEDFFANIDEAISSIRHGIVHFNLELEGKDIFAFKNIAPSEISKKMFQNEINEKKLKLKIFKQLNSANVFRYLEKDRILDYLRSTRFEFVNKNIPFVPSFTKLYDRIDDLKISLNIYWKTPKTNDDIKTKEITDAQIYLLKNIYYGKFLDKFLNEENGIFISIKDKIIELNRNQNKRTGFYKLEKFETLKANTPTEYLEKLQSLHKINYDREKIEKWIAAGDQNLCVLDAELI

SEQ ID NO: 4126 - protein, 772 aa, Artificial
  Synthetic
MKVTKVGGISHKKYTSEGRLVKSESEENRTDERLSALLNMRLDMYIKNPSSTETKENQKRIGKLKKFFSNKMVYLKDNTLSLKNGKKENIDREYSETDISEYDVRDSKNFAVLKKIYLNENVNSEELEVFRKDIKKKLNKINSLKYSFEKNKANYQKINENNIEKVGGKSKRNIIYDYYRESAKRNDYINNVQEAFDKLYKKEDIEKLFFLIENSKKHEKYKIRECYHKIIGRKNDKENFAKIIYEEIQNVNNIKELIEKVPNMSELKKSQVFYKYYLDKEELNDKNIKYAFCHFVEIEMSKLLKNYVYKKPSNISNDKVKRIFEYQSLKKLIENKLLNKLDTYVRNCGKYNYYLQDGEIATSDFIAGNRQNEAFLRNIIGVSSVAYFSLRNILETKNKDDITGKIRGKTRIESKTGEEKYIPGEVDQIYYENKQNEVKNKLKMFYGYDFDMDNKKEIEDFFANIDEAISSIRHGIVHFNLELEGKDIFAFKNIVPSEISKKMFQNEINEKKLKLKIFRQLNSANVFNFYEKDVIIKYLKNTKFNFVNKNIPFVPSFTKLYNKIDDLRNTLKFSWKIPKDKEEKDAQIYLLKNIYYGKFLDYFMSRNGNFFEISREVIKLNKNNKKNVKTGFYKLEKFENLEARSPKEYLAKVQSLYIINVANQDEEEKNTYIDFIQKVFLKGFIDYLNKNNLKYIENNNNNDIFSRIKIKKDSKERYDKILKNYEKNNRNKEIPHEINEFVREIKLGKILKYTESLNMFYLILKSLNHKEL

SEQ ID NO: 4127 - protein, 633 aa, Artificial
  Synthetic
MKVTKVGGISHKKYTSEGRLVKSESEENRTDERLSALLNMRLDMYIKNPSNTETKENKKRIGKLKKFFSNKMVYLKDNTLSLKNGKKENIDREYSETDISEYDVRDSKNFAVLKKIYLNENVNSEELEVFRKDIKKKLNKINSLKYSFEKNKANYQKINENNIEKVEGKSKRNIIYDYYRESAKRDAYVSNVKEAFDKLYKEEDIAKLVLKIENLTKLEKSKIREFYHEIIGRKNDKENFAKIIYEEIQNVNNMKELIEKVPDMSELKKSQVFYKYYLDKEELNDENVKYVFCHFVEIEMSKLLKNYVYKKPSNISNDKVKRIFEYQSLKKLIENKLLNKLDTYVRNCGKYNYYLQDGEIATSDFIARNRQNEAFLRNIIGVSSVAYFSLRNILETENKDDITGKMRGKTRIESKTGEEKYIPGEVDQIYYENKQNEVKNKLKMFYGYDFDMDNKKEIEDFFANIDEAISSIRHGIVHFNLDLDGKDIFAFKNIVPSEISKKMFQNEINEKKLKLKIFRQLNSANVFRYLEKDRILDYLRSTRFEFVNKNIPFVPSFTKLYDRIDDLKISLNIYWKTPKTNDDIKTKEITDAQIYLLKNIYYGKFLDYFMSRNGNFFEISREVIKLNKIGRAV

SEQ ID NO: 4128 - protein, 470 aa, Artificial
  Synthetic
MTYLANNGRLSLIYIGSDEETNTSLAGKKQEFDKFLKKYEQNNNIEIPHEINEFVREIKLGKILKYTESLNMFYLILKLLNHKELTNLKGSLEKYQSANKEEAFSDQLELINLLNLDNNRVIEDFELEADEIGKFLDFNGNKIKDRKELKKFDTNKIYFDGENIINHRAFYNIKKYGMLNLLEKIADKAKYKISLKELKEYSNKKNEIEKNYTMQQNLHRKYARPKKDEKFNDEDYKEYEKAIGNIQKYTHLKNKVEFNELNLLQGLLLKILHRLVGYTSIWERDLRFRLKGEFPENQYIEEIFNFDNSKNVKYKSGQIVEKYINFYKELYKDNVEKRSIYSDKKVKKLKQEKKDLYIRNYIAHFNYIPHAEISLLEVLENLRKLLSYDRKLKNAVMKSVVNILKEYGFVAKFKIGADKKIGIQTLESEKIVHLKNLKKKKLMTDRNSKELCELVKVMFEYKMEEKKSEN

SEQ ID NO: 4129 - protein, 896 aa, Artificial
  Synthetic
MSELKKSQVFYKYYLDKEELNDENIKYAFCHFVEIEMSKLLKNYVYKKPSNISNDKVKRIFEYQNLKKLIENKLLNKLDTYVRNCGKYNYYLQVGEIATSDFIARNRQNEAFLRNIIGVSSVAYFSLRNILETENENDITGRMRGKTVKNNKGEEKYVSGEVDKIYNENKQNEVKENLKMFYSYDFNMDNKNEIEDFFANIDEAISSIRHGIVHFNLELEGKDIFAFKNIVPSEISKKMFQNEINEKKLKLKIFRQLNSANVFRYLEKYKILNYLKRTRFEFVNKNIPFVPSFTKLYSRIDDLKNSLGIYWKTPKTNDDNKTKEIIDAQIYLLKNIYYGEFLNYFMSNNGNFFEISREIIELNKNDKRNLKTGFYKLQKFEDIQEKTPKEYLANIQSLYMINAGNQDEEEKDTYIDFIQKIFLKGFMTYLANNGRLSLIYIGSDEETNTSLAEKKKEFDKFLKKYEQNNNIEIPHEINEFVREIKLGKILKYTESLNMFYLILKLLNHKELTNLKGSLEKYQSANKEEAFSDQLELINLLNLDNNRVTEDFELEADEIGKFLDFNGNKIKDRKELKKFDTNKIYFDGENIIKHRAFYNIKKYGMLNLLEKIADKAKYKISLKELKEYSNKKNEIEKNYTMQQNLHRKYARPKKDEKFTDEDYKKYEKAIRNIQQYTHLKNKVEFNELNLLQGLLLKILHRLVGYTSIWERDLRFRLKGEFPENQYIEEIFNFDNSKNVKYKSGQIVEKYINFYKELYKDNVEKRSIYSDKKVKELKKEKKDLYIRNYIAHFNYIPNAEVSLLEVLENLRKLLSYDRKLKNAVMKSVVDILKEYGFVATFKIGADKKIGIQTLESEKIVHLKNLKKKKLMTDRNSEELCELVKVMFEYKMKEKKSEN

SEQ ID NO: 4130 - protein, 453 aa, Artificial
  Synthetic
MDLLNRAIYLQDGEIATSDFIARNRQNEAFLRNIIGVSSVAYFSLRNILETENENDITGRMRGKTVKNNKGEEKYVSGEVDKIYNENKQNEVKENLKMFYSYDFNMDNKNEIEDFFANIDEAISSIRHGIVHFNLELEGKDIFAFKNIAPSEISKKMFQNEINEKKLKLKIFRQLNSANVFRYLEKYKILNYLKRTRFEFVNKNIPFVPSFTKLYSRIDDLKNSLGIYWKTPKTNDDNKTKEIIDAQIYLLKNIYYGEFLNYFMSNNGNFFEISREIIELNKNDKRNLKTGFYKLQKFEDIQEKTPKEYLANIQSLYMINAGNQDEEEKDTYIDFIQKIFLKGFMTYLANNGRLSLMYIGNDEQINTSLAGKKQEFDKFLKKYEQNNNIEIPHEINEFVREIKLGKILKYTESLNMFYLILKLLLYLHLLKFLHYMHHIKMLIILYHILQKVL

SEQ ID NO: 4131 - protein, 664 aa, Artificial
  Synthetic
MSWAERLSGLLSGLNIVHSLPPFRRELWALCAIMATMTMTKRRSRTQTTPENNPRHPLAMPATVSIEMWERFSFYGMQAILAYYLYYATTDGGLGLERAQATTLLGAYGASVYLCTLAGGWIGDRLIGTERTLLTGCIALMVGHLSLSTLSGGAGATFGLALIAIGSGFVKTAYIDFVQQIFLKGFIDYLNKNNLKYIENNNNNDIFSRIKIKKDSKERYDKILKNYEKNNRNKEIPYEINEFVREIKLGKILKYTERLNMFYLILKLLNHKELTNLKGSLEKYQSANKEEAFSDQLELINLLNLDNNRVTEDFELEVNEIGKFLDFNRNKIKDRKELKKFDTKKIYFDGENIIKHRAFYNIKKYGMLNLLEKIADKAKYKISIEELRNYSNKKNEIEKNHTTQENLHRKYARPRKDEKFTDEDYENYKRAIKNIEEYTHLKNKVEFNELNLLQGLLLRILHRLVGYTSIWERDLRFRLKGEFPENQYIEEIFNFNNKQNVKYKSGQIVEKYIKFYKELYQNDEMKINKYSSANIKVLKQEKKDLYIRNYIAHFNYIPHAEISLLEVLENLRKLLSYDRKLKNAVMKSVVDILKEYDFVVKFKIGADKKIEIQSLKSEEIVHLKKLKLKDNDKKKEPIKTYRNSKELCKLVKVMFEYKYGRKKF

SEQ ID NO: 4132 - protein, 731 aa, Artificial
  Synthetic
MINLYKYMGMKSVKNIEDRLFAVIQKIMNESIEASYISQYDNFNKLKNISNKIIAVLDAGDYIDNAKVIRDLDRLIYKYEIFTMIPNLDNKHIVSIQSDQNSFCEFINKSIVDHLNYDVSINIPYIILPYCESFCANSVYILSYCNKIVELTIDEYKLICTELYKYNIDIKKLIKCFFSYQSRVTTNTCFVYFPLDMDIENTVYCQLKDKITVSVFIGNEIFKNKLYYNSFYFLGSKSEYKKFFHVYKSKYIKCISYKNLIDRIKKFDNVFYNYNIAQEIDLLLLEVKKFYINSLNRLSNILKGIKTDLLRIQDDKLKEQLQYYYEYKQIEYDELSISKNKFCKFYSEILNYILNNGLSNDYYDINLLNLDNNRVTEDFELEANEIGKFLDFNGNKIKDRKELKKFDTNKIYFDGENIIKHRAFYNIKKYGMLNLLEKISDEAKYKISIEELKNYSNKKNEIEKNHTTQENLHRKYARPRKDEKFTDEDYKKYEKAIRNIQQYTHLKNKVEFNELNLLQSLLLRILHRLVGYTSIWERDLRFRLKGEFPENQYIEEIFNFDNSKNVKYKNGQIVEKYINFYKELYKDDTEKISIYSDKKVKELKKEKKDLYIRNYIAHFNYIPHAEISLLEVLENLRKLLSYDRKLKNAVMKSVVDILKEYGFVVKFKIGADKKIEIQSLKSEEIVHLKKLKLKDNDKKKEPIKTYRNSKELCKLVKVMFEYKMEEKSSEK

SEQ ID NO: 4133 - protein, 384 aa, Artificial
  Synthetic
MSFSVKKLFSNLFLSVVLEGNECIFFGQVFRNGKLLKTINAKFTDINIDSIDEKIIKYIEEQEKAYFGVYVSVFFNDDSQGALPSVSFDEYKKFNINTKNLTSLIMQDSWSIYANLNAIKKYKNLQKELEKNDFYKIQEKIHRKYNQKPNLISRTENKKDFNDYKKAIENIQNYTQLKNKIEFNDLNLLQGLLFRILHRLAGYTSLWERDLQFKLKGEFPEDKYIDEIFNSDRNNNQKYKSGGIAYKYVDFLIEKEEGKRAGKNKVKKRSEKEGSFIIRNYIAHFNYIPDAEKSILEMLEELRELLKYDRKLKNAVMKSIKDIFKEYGFIVEFGISHESNSKKIKVLNVESEKIKHLKNNGLVTTRNSKDLCKLVKVMLEYKKS

SEQ ID NO: 4134 - protein, 319 aa, Artificial
  Synthetic
MKIDTYEKSYNGTHSLYNLIKLGRNRYTIELRIYEEITEEEEKFFKKLFKEEIKKYENLQKELEKNDFYKIQENIHRKYNQKPNLILRTENKKDFNDYKKAIENIQNYTQLKNKIEFNDLNLLQSLLFRILHRLAGYTSLWERDLQFKLKGEFPEDKYIDEIFNFDNSKNEKYKNGAIVFKYVDFLIEKKEGKRAGTKKINKKSEEKGLEIRNYIAHFNYIPDATKSILEILEELRNLLKYDRKLKNAVMKSIKDIFKEYGFIVEFTISHTKNGKKIKVCSVKSEKIKHLKNNELITTRNSEDLCDLVKIMLEYKKLQK

SEQ ID NO: 4135 - protein, 649 aa, Artificial
  Synthetic
LFKILVLPLRKIDFKFAQRPDLLLANSKYSQDEIKKYLENVKIKFTNKNIPFVPEFSKLYNRIENLKGDNALKLGQNIIVPKRKEAKDSQLYLLKNIYYGEFVEKFVNDNENFVKIAEEIIEINKTAGTNEKTKFYKLEKFKTLSADTPTKYLKKLQSLHKINYDKEKVEESKDVYVDFVQKIFLKGFVNYLQNSNTLRVLNLLKLDKDEVITTKKSFYDENLKKWEKMGSDLSELPTDIYEFVKKIKVDEINYSDRMSIFYLLLKLLNHKELTSLRGNLEKYESMNKNNIYEEELEIINLVSLDNNKVQTNFELEADEVGKFLNTATPIKKITQLNDFSDIYADRQNVIKYRSFYNLKKYSVLDLIAEIVGKGNAKIKEEEIKKYENLQNELEEKGFYRIQENIHKKYNKNPKMINKKDLEDYDNAIRKIEEYTQMKNKLEFNDLNLLQSIMFRILHRMAGYTSIWERDLQFKLRGEYPEKSTEISEMFTGRIIDNYKNFIKPLKEINKSLKKPTESERKNKKGMYIRNYIAHFNYIPYAELSILEMLERLRALLSYDRKLKNAVMKSVTDILKEYGFEVEFKISHPEEINQNNNEIVETIEVKKVESVKIEHLKNAKFKKDKKLITKKNSEELCKLVKVMLEYKKPE

SEQ ID NO: 4136 - protein, 613 aa, Artificial
  Synthetic
MGKDVFSFINRNISFVPSFTKIYNRVQDLANSLEIKEWKIPDESEGKDAQIYLLKNIYYGKFLDKFLNEENGIFISIKDKIIELNRNQNKRTGFYKLEKFEKIEETNPKKYLEIIQSLYMINIEEIDSEGKNIFLDFIQKIFLKGFFEFIKNDYNYLLELKKVQDKKNIFDSKMSEYIAGEKTLEDMEEINEIIQDIKITEIDKILNQTDKINCFYLLLKLLNYKEITELKGNLEKYQILSKTNVYEKELMLLNIVNLDNNKVKIENFKISAEEIGKFIEKINIEEINKNKKIKTFEELRNFEKGENTGEYYNIYSDDKNIKNIRNLYNIKKYGMLDLLEKISEKINYCIKKKDLEEYSKLRKQLEDEKTNFYKIQEYLHSKYQQKPKKILWKNNKNDYEKYKKSIENIEKYVHLKNKIEFNELNLLQSLLLKILHRLVGFTSIWERDLRFRLTGEFSDESDVEDIFDHRKRYKGTGGGICKKYDRFINTYTEYKNNNKMKNVKFDDNTPVRNYIAHFNYLPNPKYSILKMMEKLRKLLDYDRKLKNAVMKSIKDILEEYGFKAEFIINSDKEIILNLVKSVEIIHLGKEDLKSHRNSEDLCKLVKAMLEYSK

SEQ ID NO: 4137 - protein, 605 aa, Artificial
  Synthetic
MKVTKIDGISHKKYEEKGKLVKINNEKKDITEERFNDIEVKTMELFQKTLDFYVKNYEKCEEQNKERREKAKNYFSKVKLIVDNKKIKICNENPEKMEIEDFNEYDVRNRKYFNILNKILNEENRTEEDLEVFENDLQKKLNQIQSIKNSLEENKAHFKKESINNTTDRVKGNNKKSLFYEYYRNSSKHQEYVNNIFEAFDKLYSNSHEDINNLFLEITKDSNDRNIRKIREAYHEILNKNKTEFGEELYKKIQDNISNFDKLLEIEPEIKELTKSQIFYKYYIDKVSLDGTNVKHCFSHLVEIEVNQLLKNYVYSKRSTNKEKLENIFEYCKLRNLVKNKLVNKLNSYIRNCGKYNSYINNNDVVNSEKISEIRTKEAFLRSIIGVSSSAYFSLRNILNTDNTQDITNKVDKEVDKLYQENKKIELEERLKLFFGNYFDINNQQEIEDFLMNIDKIISSIRHEIIHFKMEANAQNIFDFNNINLGNTAKNIFNNEINEEKIKFKIFKQLNSANVFDYLSNKDITEYMDKVVFSFTNRNVSFVPSFTKIYNRVQDLANSLEIKEWKIPDESEGKDAQIYLLKNIYYGKFLDKFLNEENGIFISIK

SEQ ID NO: 4138 - protein, 673 aa, Artificial
  Synthetic
MKITKIGGISHKKYEEKGKLIKSNEIEKDVIEERFSNIEAKTTELFSKTLDFYVKNYEKCEEQNKERREKAKNYFSKVKLIVDNKKITIFNENTEKIEIEGFNEYDVRDEKYFNVLNKILKEENCTEEDLEVFENDLQKKLNQIQSIKNSLEKNKAHFKKESINNTTDRVKGNNKKSLFYEYYRNSSKHQEYVNNIFEAFDKLYSNSHEDINNLFLEITKDSNNRNIRKIREVYNEILNKNKTEFGEELYKKIQDNISNFDKLLEIEPEIKELTKSQIFYKYYIDKVSLDGTNIKHCFSHLVEIEVNQLLKNYVYSKRSTNKEKLENIFEYCKLRNLVKNKLVNKLNNYIRNCGKYNSYINNNDVVNSEKISEIRTKEAFLRSIIGVSSSAYFSLRNILNTDNTQDITNKVKGEVEKLYQENKKVKLEERLKLFFGNNFDINNQQEIEDFLMNIDKIISNIRHEIIHFKIEANAHSIFDFNNVTLGNKAKNIFNNEINEERIKFKIFKQLNSANVFDYLSDENITEYMGKVIFSFTNRNIPFVPSFRKIYNRVQDLANSLKIKEWKISDESEGKDAQIYLLKNIYYGEFLDDFLNEKNEKFIKIKDEIIELNKNQNKITGFYKLEKFEKIEEKNPKKYLEIIQSLYMINIEEIDNEEKNIFLDFIQKIFLKGF

SEQ ID NO: 4139 - protein, 672 aa, Artificial
  Synthetic
MKITKIGGISHKKYEEKGKLIKSNEIEKDVIEERFSNIEAKTTELFSKTLDFYVKNYEKCEEQNKERREKAKNYFSKVKLIVDNKKITIFNENTEKIEIEGFNEYDVRDEKYFNVLNKILKEENCTEEDLEVFENDLQKKLNQIQSIKNSLEKNKAHFKKESINNTTDRVKGNNKKSLFYEYYRNSSKHQEYVNNIFEAFDKLYSNSHEDINNLFLEITKDSNNRNIRKIREVYNEILNKNKTEFGEELYKKIQDNISNFDKLLEIEPEIKELTKSQIFYKYYIDKVSLDGTNIKHCFSHLVEIEVNQLLKNYVYSKRSTNKEKLENIFEYCKLRNLVKNKLVNKLNNYIRNCGKYNSYINNNDVVNSEKISEIRTKEAFLRSIIGVSSSAYFSLRNILNTDNTQDITNKVKGEVEKLYQENKKVKLEERLKLFFGNNFDINNQQEIEDFLMNIDKIISNIRHEIIHFKIEANAHSIFDFNNVTLGNKAKNIFNNEINEERIKFKIFKQLNSANVFDYLSDENITEYMGKVIFSFTNRNIPFVPSFRKIYNRVQDLANSLKIKEWKISDESEGKDAQIYLLKNIYYGEFLDDFLNEKNEKFIKIKDEIIELNKNQNKITGFYKLEKFEKIEEKNPKKYLEIIQSLYMINIEEIDNEEKNIFLDFIQKIFLKG

SEQ ID NO: 4140 - protein, 671 aa, Artificial
  Synthetic
MKITKIGGISHKKYEEKGKLIKSNEIEKDVIEERFSNIEAKTTELFSKTLDFYVKNYEKCEEQNKERREKAKNYFSKVKLIVDNKKITIFNENTEKIEIEGFNEYDVRDEKYFNVLNKILKEENCTEEDLEVFENDLQKKLNQIQSIKNSLEKNKAHFKKESINNTTDRVKGNNKKSLFYEYYRNSSKHQEYVNNIFEAFDKLYSNSHEDINNLFLEITKDSNNRNIRKIREVYNEILNKNKTEFGEELYKKIQDNISNFDKLLEIEPEIKELTKSQIFYKYYIDKVSLDGTNIKHCFSHLVEIEVNQLLKNYVYSKRSTNKEKLENIFEYCKLRNLVKNKLVNKLNNYIRNCGKYNSYINNNDVVNSEKISEIRTKEAFLRSIIGVSSSAYFSLRNILNTDNTQDITNKVKGEVEKLYQENKKVKLEERLKLFFGNNFDINNQQEIEDFLMNIDKIISNIRHEIIHFKIEANAHSIFDFNNVTLGNKAKNIFNNEINEERIKFKIFKQLNSANVFDYLSDENITEYMGKVIFSFTNRNIPFVPSFRKIYNRVQDLANSLKIKEWKISDESEGKDAQIYLLKNIYYGEFLDDFLNEKNEKFIKIKDEIIELNKNQNKITGFYKLEKFEKIEEKNPKKYLEIIQSLYMINIEEIDNEEKNIFLDFIQKIFLK

SEQ ID NO: 4141 - protein, 570 aa, Artificial
  Synthetic
MKITKIGGISHKKYEEKGKLIKSNEIEKDVIEERFSNIEAKTTELFSKTLDFYVKNYEKCEEQNKERREKAKNYFSKVKLIVDNKKITIFNENTEKIEIEDFNEYDVRNRKYFNVLNKILNGENYTEEDLEVFENDLQKKLNQIQSIKNSLEENKAHFKKESINNTTDRVKGNNKKSLFYEYYRNSSKHQEYVNNIFEAFDKLYSNSHEDINNLFLEITKDSNDRNIRKIREAYHEILNKNKTEFGEELYKKIQDNINNFDKLLEIEPEIKELTKSQIFYKYYIDKVSLDGTNIKHCFSHLVEIEVNQLLKNYVYSKRSTNKEKLENIFEYCKLRNLVKNKLVNKLNSYIRNCGKYNSYINNNDVVNSEKISEIRTKEAFLRSIIGVSSSAYFSLRNILNTDNTQDITNKVKGEVEKLYQENKKVKLEERLKLFFGNNFDINNQQEIEDFLMNIDKIISNIRHEIIHFKIEANAHSIFDFNNVTLGNKAKNIFNNEINEERIKFKIFKQLNSANVFDYLSDENITEYMGKVIFSFTNRNIPFVPSFRKIYNRVQDLANSLKIKEWKKNRK

SEQ ID NO: 4142 - protein, 669 aa, Artificial
  Synthetic
MRGDYMKITKIDGISHKKYKEKGKLIKSNEIEKDVTEERFNDIEVKTTELFQKTLDFYVKNYEKCEEQNKERREKAKNYFSKVKLIVDNKKITIFNENTEKIEIEGFNEYDVRDEKYFNVLNKILKEENCTEEDLEVFENDLQKKLNQIQSIKNSLEENKAHFKKESVNNTADRVKGNNKKSLFYEYYRNSSKHQEYVNNIFEAFDKLYSNSHEDMNNLFSAITKDSNDRNIKKIREAYHEILNKNKIEFGEELYKKIQDNINNFDKLLEIEPEIKELTKSQIFYKYYIDKVSLDGTNIKHCFSHLVEIEVNQLLKNYVYSKRSTNKEKLENIFEYCKLKNLVKNKLVNKLNSYIRNCGKYNSYINNNDVVNSEKISEIRTKEAFLRSIIGVSSSAYFSLRNILNTDNTQDITNKVKGEVEKLYQENKKVKLEERLKLFFGNNFDINNQQEIEDFLMNIDKIISNIRHEIIHFKIEANAHSIFDFNNVTLGNKAKNIFNNEINEERIKFKIFKQLNSANVFDYLSDENITEYMGKVIFSFTNRNIPFVPSFRKIYNRVQDLANSLKIKEWKISDESEGKDAQIYLLKNIYYEEFLDEFLNEENGIFISIKDKIIELNRNQNKRTGFYKLEKFEKIEEKNPKKYLEIIQSLYMINIEEIDNEEKKIGRAV

SEQ ID NO: 4143 - protein, 615 aa, Artificial
  Synthetic
MRGDYMKITKIDGISHKKYKEKGKLIKSNEIEKDVTEERFNDIEVKTTELFQKTLDFYVKNYEKCEEQNKERREKAKNYFSKVKLIVDNKKITIFNENTEKIEIEGFNEYDVRDEKYFNVLNKILKEENCTEEDLEVFENDLQKKLNQIQSIKNSLEENKAHFKKESVNNTADRVKGNNKKSLFYEYYRNSSKHQEYVNNIFEAFDKLYSNSHEDMNNLFSAITKDSNDRNIKKIREAYHEILNKNKIEFGEELYKKIQDNINNFDKLLEIEPEIKELTKSQIFYKYYIDKVSLDGTNIKHCFSHLVEIEVNQLLKNYVYSKRSTNKEKLENIFEYCKLKNLVKNKLVNKLNSYIRNCGKYNSYINNNDVVNSEKISEIRTKEAFLRSIIGVSSSAYFSLRNILNTDNTQDITNKVKGEVEKLYQENKKVKLEERLKLFFGNNFDINNQQEIEDFLMNIDKIISNIRHEIIHFKIEANAHSIFDFNNVTLGNKAKNIFNNEINEERIKFKIFKQLNSANVFDYLSDENITEYMGKVIFSFTNRNIPFVPSFRKIYNRVQDLANSLKIKEWKISDESEGKDAQIYLLKNIYYEEFLDEFLNEENGIFISIKDKITI

SEQ ID NO: 4144 - protein, 563 aa, Artificial
  Synthetic
MKITKINGISHKKYEEKGKLVKINDEKKNITEERFNDIEAKTTELFQKTLDFYVKNYEKCEDQNKERREKAKNYFSKVKILVDNKKITICNENTEKMEIEDFNEYDVRNRKFFNVLNKILNRENYTEEDLEVFENDLQKRIGRIKSIKNSLEENKAHFKKENVNDNNRVKGNNKKSLFYEYYRVSSKHQEYVDNIFETFDKLYSNSHENMNNLFLEITKDSNDRNIRKIREAYHEILNKNKTEFGEELYKKIQDNISNFDKLLEIEPEIKELTKSQIFYKYYIDKVSLDGTNIKHCFSHLVEIEVNQLLKNYVYSKRSTNKEKLENIFEYCKLRNLVKNKLVNKLNNYIRNCGKYNSYINNNDVVNSEKISEIRTKEAFLRSIIGVSSSAYFSLRNILNTDNTQDITNKVKGEVEKLYQENKKVKLEERLKLFFGNNFDINNQQEIEDFLMNIDKIISNIRHEIIHFKIEANAHSIFDFNNVTLGNKAKNIFNNEINEERIKFKIFKQLNSANVFDYLSDENITEYMGKVIFSFTNRNIPFVPSFRKIYNRVQDLANSLESIL

SEQ ID NO: 4145 - protein, 683 aa, Artificial
  Synthetic
MRGGYMKITKIGGISHKKYEEKGKLIKSNEIEKDVIEERFNDIEKKTKELFLKTLDSYVKNYEKCEEQNKERREKAKNYFSKVKLIIDNEKITICNENTEKMEIEDFNEYDVRNRKYFNVLNKILNGENYTEEDLEVFENDLQKKLNQIQSIKNSLEENKAHFKKESINNTTDIVKGNNKKSLFYEYYRNSSKHQEYVNNIFEAFDKLYSNSHEDINNLFLEITKDSNDRNIRKIREAYHEILNKNKTEFGEELYKKIQDSISNFDKLLEIEPEIKELTKSQIFYKYYIDKVNLDETSTKHCFCHLVEIEVNQLLRNYVYSKRNISKEKLKNIFEYCKLKNLIKNKLVNKLNNYIRNCGKYNGYISNNDVINSEKISEIRTKEAFLRSIIGVSSSAYFSLRNILNTDNTQDITNKVDKEVDKLYQENKKIELEERLKLFFGNHFDINNQQEIKAFLMNIDKIISSIRHEIIHFKMEANVQNIFDFNNINLGNKAKNIFSNEINEEKIKFKIFKQLNSANVFDYLSDENITEYMGKAVFSFTNRNIPFVPSFTKIYNKVQDLANSLEIKKWKIPNESEGKDAQIYLLKNIYYGKFLDEFLNEENGIFISIKDKIIELNRNQNKRTGFYKLEKFEKIEETNPKKYLEIIQSLYMINIEEIDSEGKNIFLDFIQKIFLKGFFEFIK

SEQ ID NO: 4146 - protein, 320 aa, Artificial
  Synthetic
VNNIFEAFDKLYSNSHEDINNLFLEITKDSNDRNIRKIREAYHEILNKNKTEFGEELYKKIQDSISNFDKLLEIEPEIKELTKSQIFYKYYIDKVNLDETSTKHCFCHLVEIEVNQLLRNYVYSKRNISKEKLKNIFEYCKLKNLIKNKLVNKLNNYIRNCGKYNGYISNNDVINSEKISEIRTKEAFLRSIIGVSSSAYFSLRNILNTDNTQDITNKVDKEVDKLYQENKKIELEERLKLFFGNYFDINNQQEIKVFLMNIDKIISSIRHEIIHFKMEANVQNIFDFNNINLGNKAKNIFSNEINEEKINVDKDVVVTN

SEQ ID NO: 4147 - protein, 881 aa, Artificial
  Synthetic
MKITKIDGISHKKYKEKGKLIKSNEIEKDITEERFNDIEAKTTELFQKTLDFYVKNYENSEDQNKERREKAKNYFSKVKILVDNKKITICNENTEKMEIEDFNEYDVRNRKFFNVLNKILNRENCTEEDLEVFENDLQKRIGRIKSIKNSLEENKAHFKKESINNNINYDKVKGNNKRSIFYEYYKNSLKHQEYINNIFEAFDKLYSNSHEAMNNLFSEITKDSKDRNIRKIREAYHEILNKNKTEFGEELYKKIQDNRNNFDKLLEIEPEIKELTKSQIFYKYYIDKVNLDETSIKHCFCHLVEIEVNQLLKNYVYSKRNINKEKLENIFEYCKLRNLVKNKLVNKLNNYIRNCGKYNAYISNNDVVVNSEKISEIRTKEAFLRSIIGVSSSAYFSLRNILNTDNTQDITNKVDKEVDKLYQENKKIELEEILKLFFGNYFDINNQQEIKVFLMNIDKIISSIRHEIIHFKMETNAQNIFDFNNVNLGNTAKNIFSNEINEEKIKFKIFKQLNSANVFDYLSNKDITEYMDKVVFSFTNRNVSFVPSFTKIYNRVQDLANSLEIKEWKIPDESEGKDAQIYLLKNIYYGKFLDKFLNEENIADIYVKLEKYNIGGSVKDRAALGMIEAAEKEGKLKPGGTIVEPTSGNTGIALALIGKAKGYRVIIIMPDSMSVERRSILAAYGAELILTEGAKGMKGAIAEAEKLASENGYFLPQQFENPANPAKHYETTAKEILDDFPQIDAFISGVGTAGTLSGVGKRLKEERPGVQVFAVEPATSAVLSGEQPGKHSQQGLGAGFIPGNYDANLVDGIIKITNEQAIEFATRASKENGLFVGISSGSAIAAAYEVAKKLGKGKKVLAVLPDGGEKYLSLEIFRKSL

SEQ ID NO: 4148 - protein, 587 aa, Artificial
  Synthetic
MLRRMCMKITKIDGISHKKYKEKGKLIKSNEIEKDITEERFNDIEAKTTELFQKTLDFYVKNYENSEDQNKERREKAKNYFSKVKILVDNKKITICNENTEKMEIEDFNEYDVRSGKYFNVLNKILNGENYTEEDLEVFENDLQKRIGRIKSIKNSLEENKAHFKKESINNNIIYDRVKGNNKKSLFYEYYRISSKHQEYVNNIFEAFDKLYSNSHEAMNNLFSEITKDSKERNIRKTREAYHEILNKNKTEFGEELYKKIQDNISNFDKLLEIEPEIKELTKSQIFYKYYIDKVNLDETTIKHCFCHLVEIEVNQLLKNYVYSKRNINKEKLENIFEYCKLKNLVKNKLVNKLNNYIRNCGKYNAYISNNDVVVNSEKISEIRTKEAFLRSIIGVSSSAYFSLRNILNTDNTQDITNKVDKEVDKLYQENKKIELEERLKLFFGNYFDINNQQEIKVFLMNIDKIISSIRHEIIHFKMETNAQNIFEFNNVNLGNTAKNIFSNEINEEKIKFKIFKQLNSANVFDYLSNKDIREYMGKAVFSFTNRNVSFVPSFTKIYNRVQDLANSLEIKEWKIPDESEGKDAQI

SEQ ID NO: 4149 - protein, 514 aa, Artificial
  Synthetic
MKISKIDDISHKKYKGKGKLIKSNEIEKDITEERFNDIEAKTKELFQKALDFYVKNYEKCEDQNKERREKAKNYFSKVKILVDNKKITICNENTEKMEIEDFNEYDVRSGKYFNVLNKILNGENYTEEDLEVFENDLQKRIGRIKSIKNSLEENKAHFKKESINNNIIYDRVKGNNKKSLFYEYYRISSKHQEYVNNIFEAFDKLYSNSHEAMNNLFSEITKDSKDRNIRKIREAYHEILNKNKTEFGEELYKKIQDNRNNFDKLLEIEPEIKELTKSQIFYKYYIDKVNLDETSIKHCFCHLVEIEVNQLLKNYVYSKRNINKEKLENIFEYCKLRNLVKNKLVNKLNNYIRNCGKYNAYISNNDVVVNSEKISEIRTKEAFLRSIIGVSSSAYFSLRNILNSNNTQDITNDRILKQELDDIYQENNKKNKLEKNLKLFFGNYFDVMRESEIREFFTNIRDIIKRIRNKIIHFEMEANAQNIFDFNNINLGNTAKNIFNNEINEEKIKFKIFK

SEQ ID NO: 4150 - protein, 541 aa, Artificial
  Synthetic
MLRRMCMKITKIDGISHKKYKEKGKLIKNNDTAKDVTEERFYDIKTKTTELFQKTLDFYVKNYEQCEEQNKERREKAKNYFSKVKLIIENRKITIFNENTEKIEIEGFNEYDVRDEKYFNVLNKILKEENCTEEDLEVFENDLQKKLNQIQSIKNSLEENKAHFKKESVNNTADRVKGNNKKSLFYEYYRISSKHQEYANNIFEAFDKLYSNSHEAMNNLFSEITKDSKNRNIRKIREAYHEILNKNKTEFGEELYKKIQDNRNNFDKLLEIEPEIKELTKSQIFYKYYIDKVNLDETSIKHCFCHLVEIEVNQLLKNYVYSKRNINKEKLENIFEYCKLRNLVKNKLVNKLNNYIRNCGKYNAYISNNDVVVNSEKISEIRTKEAFLRSIIGVSSSAYFSLRNILNSNNTQDITSDRILKQELDDIYQENNKKNKLEKNLKLFFGNYFDVMRELEIREFFANIRDIIKRIRNKIIHFEMEANAQNIFDFNNINLGNTAKNIFNNEINEEKMKFKIFKQLNSANVFDYLSNKDIREYMGKA

SEQ ID NO: 4151 - protein, 318 aa, Artificial
  Synthetic
LNTDNTQDITNKVKGEVEKLYQENKKVKLEERLKLFFGNNFDINNQQEIEDFLMNIDKIISNIRHEIIHFKIEANAHNIFDFNNVTLGNKAKNIFNSEINEERIKFKIFKQLNSANVFDYLSDENITEYMGKVIFSFTNRNIPFVPSFRKIYNRVQDLANSLKIKEWKISDESEGKDAQIYLLKNIYYGEFLDDFLNEKNEKFIKIKDEIIELNKNQNKITGFYKLEKFEKLKANTPTEYLEKLQSLHKINYNREKIEEDKDIYVDFVQKIFLKGFINYLQKSNSLKPLNLLNLKKDEVINSEKSSYDERKKYEQTDS

SEQ ID NO: 4152 - protein, 592 aa, Artificial
  Synthetic
MKVTKIDGISHKKFEDEGKLVRYTGNFNIKNEMKERLEKLKELKLSNYVKNPENVKNKDKNKEKETKSRRENLKKYFSEIILRKKEEKYLLKKTRKFKNITEEINYDDIKKRENQQKIFDVLKELLEQRINENDKEEILNFDSVKLKEVFGEDFIKKESKIKAIEESLEKNRADYRKDYVELENEKYEDVKGQNKRSLVFEYYKNPENREKFKENIKYAFENLYTEENIKNLYSEIEEIFGKVHLKSKVRDFYQNRIIGESEFSEKDEEGISILYKQIINSVEKKEKFVEFLQKVKIKDLTKSQIFYKYFLENEELNDENIKYVFSYFVEIEVNKLLKENVYKTKKFNEGNKYRVKNIFNYDKLKNLVVYKLENKLNNYIRNCGKYNYHMENGCVATSDTNMKNRQTEAFLRSILGVSSFGYFSLRNILGVNDNDFYEMEEELTEDERKNENFILKKAKEDITSKNIFEKVVDKSFEKKGIYQIKENLKMFYGNSFDKVDKDELKKFFVNMLEAITSVRHRIVHYNINTNSENIFDFSNIEVSKLLKNIFEKEIDTRELKLKIFRQLNSAGVFDYWESWKIKKYLENIEFKF

SEQ ID NO: 4153 - protein, 878 aa, Artificial
  Synthetic
MKVTKIDGLSHKKFEDEGKLVKFKNNKNINEIKERLKKLKELKLDNYIKNPENVKNKDKDAEKETKIRRTNLKKYFSEIILRKEDEKYILKKTKKFKNINQQEIFDVLKEIKIKETEKEEIITFDSEKLKKVFGEDFVKKEAKIKAIEKSLKINKANYKKDSIKIGDDKYSNVKGEKKRSRIYEYYKKSENLKKFEENIREAFEKLYTEENIKELYSKIEEVLKKTHLKSIVREFYQNEIIGESEFSKKNGDGISILYNQIKDSIKKEENFIEFIENIGNLKLKDLTKSQIFYKYFLENEELNDENIKFAFCYFVEIEVNNLLKENVYKIKRFNEGNKKRIKNIFEYGKLKKLIVYKLENKLNNYVRNCGKYNYHMENGDIATSDINMRNRQTEAFLRSIIGVSSFGYFSLRNILGVNDDDFYEIEEGLTEEERKNESNVLKKAKEDITSKSIFEKVVDKSFEKKGIHSIRKNVKMFYGDSFDKANEDELKQFFVNMLNAITSIRHRVVHYNMNTNSENIFNFSDIEVSRLLKSIFEKETDKRELKLKIFRQLNSAGVFDYWENWKIEKYLKNIEFKFVNKNIPFVPSFTKLYNRIDNLKAGNALKLGNHIIIPKRKEARDSQIYLLKNIYYGEFVEKFVNNNDNFEKIFREIIKINKNAGTNTKTKFYKLEKFETLKANTPTEYLEKLQSLHKINYDKEKVEEDKDTYVDFVQKIFLKGFINYLQKSNSLKPLNLLNLKKDEVINSEKSSYDEKLKQWENNGSKLSEMPKEIYEYIKKIQINKINYSNRMSIFYLLLKLIDHRELTNLRGNLEKYESMNKNEIYSEELNIVNLVSLDNNKVRANFNLESEDIGKFLKTETSIKNINQLNNFSGIFAD

SEQ ID NO: 4154 - protein, 695 aa, Artificial
  Synthetic
MKVTKIDGLSHKKFEDEGKLVKFRDNKNINEMKERLKKLKELKLDNYIKNPENVKNKDKDAEKETKIRRTNLKKYFSEIILRKEDEKYILKKTKKFKNINQEIDYYDVKSKKNQQEIFDILKEILELKIKETEKEEIITFDSEKLKKVFGEDFVKKETKIKAIEKSLKINKANYKKDSIKIGDDKYSNVKGENKRSCIYEYYKKSENLKKFEENIREAFEKLYTEENIKELYSKIEEVLKKTHLKSIVREFYQNEIIGESEFSKKNGDGISILYNQIKDSIKKEENFIEFIENIGNLELKDLTKSQIFYKYFLENEELNDENIKFAFCYFVEIEVNNLLKENVYKIKRFNEGNKKRIKNIFEYGKLKKLIVYKLENKLNNYVRNCGKYNYHMENGDIATSDINMRNRQTEAFLRSIIGVSSFGYFSLRNILGVNDDDFYEIEEGLTEEERKNESNVLKKAKEDITSKSIFEKVVDKSFEKKGIHSIKENLKMFYGDSFDKANGDELKQFFVNMLNAITSIRHSVVHYDMNTNSENIFNFSDIEVSRLLKSIFEKETDKRELKLKIFRQLNSAGVFDYWENWKIKKYLENIKFEFVNKNVPFVPSFTKLYNRIDNLKGSNALNLGYINIPKRKEARDSQIYLLKNIYYGEFVEEFIKNNDNFEKIFREIIEINKNAGRNKQTNFYKLEKFEKLKAN

SEQ ID NO: 4155 - protein, 367 aa, Artificial
  Synthetic
MKVTKIDGLSHKKFEDEGKLVKFRNNKNINEIKERLKKLKELKLDNYIKNPENVKNKDKDAEKETKIRRTNLKKYFSEIILRKEDEKYILKKTKKFKDINQEIDYYDVKSKKNQQEIFDVLKEILELKIKETEKEEIITFDSEKLKKVFGEDFVKKEAKIKAIEKSLKINKANYKKDSIKIGDDKYSNVKGENKRSRVYEYYKKSETHEKFRKNIIEAFEKLYTEENIKELYSKIEEVFKKTHLKSIVREFYQNEIIGESEFSKKDENGKSILYNQIEDSIKKDENFVEFLENIENLQLKELTKSQIFYKYFLENDLIDIIASDAHNLSTRKPYMKKAYDIIVDKYGKKRAENLFYKTPARIMMERD

SEQ ID NO: 4156 - protein, 338 aa, Artificial
  Synthetic
MKVTKIDGLSHKKFEDEGKLVKIEDASQKNETLERLENLKGIKLGNYIKNPDKTKNKDNKKRRKGLKEYFSEITLRKENEKYVLLKGKKLKKINNDIKDTDIKAKDKKEEVFDILKEILKLNLLANDAEEKIQFDSIKLKNVFGKDFVKKELQIKSIEESLEKNKADYRKEFIETENHKYGNVKGKNKRSRIYEYYKKSENHKKFEDNIREAFEKLYTEENIKELYSKIEQVLKKTHLKSIVREFYKNEIIGESEFSKKNGDRISILYNQIKDSIKKEENFIEFIENIGNLELKDLTKSQIFYKNIKKVTGASFHYIILMYNCQLLFHIFWISFNFVV

SEQ ID NO: 4157 - protein, 343 aa, Artificial
  Synthetic
MKVTKIDGLSHKKFEDEGKLVKIEDASQKNETLERLENLKGIKLGNYIKNTDKTKNKDNKKRRKGLKEYFSEITLRKENEKYVLLKGKKLKKINNDIKDTDIKAKDKKEEVFDILKEILKLNLLANDAEEKIQFDSIKLKNVFGKDFVKKELQIKSIEESLEKNKADYRKEFIETENHKYGNVKGKNKRSHIYEYYKKSENHKKFEDNIREAFEKLYTEENIKELYSKIEQVLKKTHLKSIVWEFYKNEIIGESEFSKKNGDGISILYNQIKDSIKKEENFIEFIENIGNLELKDLTKSQIFYKYFLENEELNDENIKFVFCYFVEIEVSDLLKGNVYKASKI

SEQ ID NO: 4158 - protein, 601 aa, Artificial
  Synthetic
MTIHKSKGLEFPVVIIAGMDKKRNIKSSSEMIRTSEKMGIGIDIIDDILKYKYPSIYKEIIGLEKTKEEKEEELRILYVAMTRAKEKLIMTAKVKSVEKLLQKLNESVKLNIYNNKLSSKCIMSIDTYLEIIMMSLTEAYNTQKVGKELEIKIDKNDFLVYSKSVENVIKINEKSDIKIGDIYIENIGNLELKDLTKSQIFYKYFLENEELNDENIKNIFCYFVEIEVSDLLKGNVYKASKIYENKIKNIFEYGKLKNLIVYKLENKLNNYVRNCGKYNYHMENGDIATSDINMRNRQTEAFLRSMIGVSSFGYFSLRNILGVNDDDFYETEEDLTKAKKDITIKKIFEEVVDKSFEKKGIHNIKENLEMFYGDSFDKANEDELKQFFVNMLNAITSIRHRVVHYNMNTNSENIFNFSDIEVSRLLKNIFEKETDKRELKLKIFRQLNSAGVFDYWESWKIKKYLENIKFEFVNKNIPFVPSFTKLYNRIDDLKAGNALKLGNHIIIPKRKEARDSQIYLLKNIYYGKFVEEFIKNNDNFEKIFREIIEINKNAGTNKQTNFYKLEKFEKLKANTPTEYLEKLQSLHKINYNREKIEEDNI

SEQ ID NO: 4159 - protein, 453 aa, Artificial
  Synthetic
MKEGKLKKIIKIDWTIFYSKPRIQILGILIFLDIILLFSVTKEMEKGFSIYSVSTSIVLFILFILLNGLFIFYYKNKFPNIEFYDDYFIFKKEKVYYENLKYFFFKDNRVFQMKKFSKILYKPDGGNWKKIDGSGYDYDLFSVFQKCFLEKNFLKAVENIENGGVEIFPFQNQGFVKNKFLFSSEEGLQELTQIFENSPKIQVSNKSVKFDNEIYDWENYNIEFEIGTITVSDLKKNTILEIETKNTVICQEILLKKLIENKLLNKLDTYVRNCGKYNYYLQVGEIATSDFIARNRQNEAFLRNIIGVSSVAYFSLRNILETENENDITGRMRGKTVKNNKGEEKYVSGEVDKIYNENKQNEVKENLKMFYSYDFNMDNKNEIEDFFANIDEAISSIRHGIVHFNLELEGKDIFAFKNIAPSEISKKIFQNEINEKKLKLKIFRQLNSANVFN

SEQ ID NO: 4160 - protein, 711 aa, Artificial
  Synthetic
MKVTKVDGISHKKYIEEGKLVKSTSEENRTSERLSELLSIRLDTYIKNPDNASEEENRIRRENLKEFFSNKVLYLKDGILYLKDRREKNQLQNKNYSEEDISEYDLKNKNSFSVLKKILLNEDINSEELEIFRKDVEAKLNKINSLKYSLEENKANYQKINENNIKKSLLPIFIDSYITDSTLTGGINPQIGEDYIKTISILNFPGFSVPGMIDRLNRTDIEYIWGSRYIMLEKITIKKILDKYYNKWWAARLSFKDMFIEFFSKNETTNPNQSAMNAAIEVRDEKTKLDEDRDIVGYYTTTVILKNKNRDVVERQAQEVRTLLSSLGFVVQIEDFYTLDCWLGVMPGNNYFNERRPFMNSKVLSHMLPINSVWAGNKWNKHLDTPPLLYCQTTGNTPFRLNLHYTDVGHTLIVGPTGSGKTLLAQTLAKILNVPFAIADATSLTEAGYVGEDVENIVLKLVQAADFDIEKAQRGIIYIDEIDKISRKSDNPSITRDVSGEGVQQALLKILEGTVANVPPTGGRKHPQQELIHIDTTNILFICGGAFVGLDKIVADRIGKKGIGFNSDVAKNVKEGESELIAKVMPQDLHKFGMIPELLGRIPVITSTRELVEEDLMSILTDPKNALTKQYKRMFELEGVDLEFTEDSLREIAKKALARGTGARGLRAICESTLQETMFDLPSDLDITKVVVTPESVGGDNAPEIIRGKKG

SEQ ID NO: 4161 - protein, 465 aa, Artificial
  Synthetic
  misc_feature (279)..(279): Xaa can be any naturally occurring amino acid
MKVTKRKGFNIKDVFHEKKEDKGVLSKIDDENDYMENKFKELASISLSTFIKDPVKSTKEENKKRREGLKEYFKNIEIYLKSEEVKINDKQDNKNTPSEGVEQTDLKESTKEIGKDVFNNIIKGEAHNLECFKKKLEEHKKYLEKVKKSLNKNKSQYKVEQNQVSGTSKRNKFYDFYAKLNKLGEYKCRIEKAFDSLYSKNDILKIKENLTKKEEDNKKEGKNNKEEKFKKKEFFDSCKAILGSKINKDIQTDEGVTLKYIEGLKDHPLTQSRFFYKYXLSDEKNELTEENIKYCFPHFIEIEMHYLLRSLVKLNAKQRKEKAENIFKSHEIIKCYIKNKLKNKLILYIQNSGKIKEYHSKYKGAIESSHLSDIRKGEGFIRNVIGATSSAYFSFRNIVNPKEKDDLLGKCMCCYPKETEKQKANIDSLDIYRVKQMLAIFYGEYFCGLKDDEVRCFLEVIKNSI

SEQ ID NO: 4162 - protein, 313 aa, Artificial
  Synthetic
MKKILFLVALLPLTLVAQTVIVPNRYAFQKEDNQYQLNMLTKFLLEKQGFKVYMESEAPAELLQNPCDALKADVKNESNMMTSKVQFLLTDCTNKAVFTSQIGKSREKEFKKSYQEALRNALSGTELATFKADYQAPSVASKPSIPSATTAVPELTATAAPISEPLILFLYAKPTNWGYELFDKKTNELQFKLRKINTPDVFLAFDVEEQKYGILDLLEKIVTKADLKITKEEIKKYKNLQKELEKNDFYKIQEKIHRKYNQKPNLISRTENKKDFNDYKKAIENIQNYTQLKNKIEFNDLNLLQGLLFRILH

SEQ ID NO: 4163 - protein, 629 aa, Artificial
  Synthetic
LQDCIKRAVKRTTEAARNINGGKTDEELILARAGKLSAIQKNERVQWFFAGLMADSTSEGRVQKDNYKHDADEAQKKAEYIEEIKQDVVALAFADYLKQFSFILDIKNILYADRNFPVEALKKTLREERKTAEEKTKQSGEKADWICAKLYFLLHLIPVEEVSNLRQQIRKWEIVVDKPEVATAADEAENKEIANNGQPLEARQQKALTEPIIQALDLYIFMHDAQYVGEEIGKVTADWAERFFEHGKGAMDRVFPAQDRQKESQAFRDLREMRRFGNAVLHDIYAQNKISSKKIEEWRSQKAKVEGKKGLQTELQKLHENWVNNRKNPEWQRKGKDESEGEKYKAYRETLAAVEAYRLLAGEVKLQDHLRLHRLLMAVLGRLVDFSGLFERDLYFALLALCHEKGVKDIKAVFKDSKGDETPFEETDENYGWNRFQNGQIFKAVDQLKEDYASIKNELVKFFGDIEKKGSSRNIRNRFAHLKMLTPPKEGEFSLHQGVHINLTQEVNKARQLMSYDRKLKNAVTKSIIELLEREGLKLSWQIQSGDAAEPAAKSGEGAAPASKKVSHNVRNPHIETKWIPHLGGKLLDKKDTDGKIVRDAKGNPVKEAITERHYGDTYLAMVELLFRG

SEQ ID NO: 4164 - protein, 629 aa, Artificial; identical to SEQ ID NO: 4163
  Synthetic

SEQ ID NO: 4165 - protein, 629 aa, Artificial
  Synthetic
LQDCIKRAVKRTTEAARNINGGKTDEELILARAGKLSAIQKNERVQWFFAGLMADSTSEGRVQKDNYKHDADEAQKKAEYIEEIKQDVVALAFADYLKQFSFILDIKNILYADRNFPVEALKKTLREERKTAEEKTKQSGEKADWICAKLYFLLHLIPVEEVSNLRQQIRKWEIVVDKPEVATAADEAENKEIANNGQPLEARQQKALTEPIIQALDLYIFMHDAQYVGEEIGKVTADWAERFFEHGKGAMDRVFPAQDRQKESQAFRDLREMRRFGNAVLHDIYVQNKISSKKIEEWRSQKAKVEGKKGLQTELQKLHENWVNNRKNPEWQRKGKDESEGEKYKAYRETLAAVEAYRLLAGEVKLQDHLRLHRLLMAVLGRLVDFSGLFERDLYFALLALCHEKGVKDIKAVFKDSKGDETPFEETDENYGWNRFQNGQIFKAVDQLKEDYASIKNELVKFFGDIEKKGSSRNIRNRFAHLKMLTPPKEGEFSLHQGVHINLTQEVNKARQLMSYDRKLKNAVTKSIIELLEREGLKLSWQIQSGDAAEPAAKSGEGAAPASKKVSHNVRNPHIETKWIPHLGGKLLDKKDTDGKIVRDAKGNPVKEAITERHYGDTYLAMVELLFRG

SEQ ID NO: 4166 - protein, 604 aa, Artificial
  Synthetic
LGHGPRTSPSAARRKPDEIPCRPGRGRATQWCTADPGPGTAWLPPAAPRPGRAGQAAPFSPRPDPFGPSRPHHSAPYIEDLKCDVVALAFAAWLKEADFDFLLALSADTPKPEIPLCDLDRIDLPAVNTRAADWQKALYFLVHLVPVDDIGRLLHQMRKWELLAKDSEPAGGIAMERIRQIQAALELYLYMHDAKFEGGAALAGIGEFKALFDSDDAFARIFPLQPGADDDRRVPRRGLREIVRFGHLPALLPVFGKHRIATAEVDEYLRLEHPQEDGKSEIARLQAHREALHEEWTEKKKDFAGDRLRTYVETLAAVVRHRHLAAHVTLTDHVRLHRLLMAVLGRLVDYSGLWERDLYFVTLALVHEAGCRPGEVFTDKGRKRLGQGRIVDALRDFQQTPDAGRIKDGLRRYFSAVWEKGNCSVRRRNNFAHFDMLKPANLPVDLTACVNDSRDLMAYDRKLRNAVSQSVRELLHREGLDFEWTMDPAAPHRLGAATMESRGAPHLGGMRVPEKRVPQGRGRARRRQILENLHGDRFIAMAAALFGRCSPQRPESVVDWRPDAMDWSPPRGKNRNPGGKNRRGNGHGGGRKHGNAGRKPGRPV

SEQ ID NO: 4167 - protein, 877 aa, Artificial
  Synthetic
LAGPEQIAKSRFWTSDWQAKIKRAEAFVRIWRHALALAGLTLKDLVDITDDILGGEGARKKALAALRADPSKQAHFDQKRTVLFGEGVRKEEGKKPSLLDVVDRCDLASGLIDGAAKLRHAVFHFKGREYFLDELAELPKRFPANVGAAAQQLWQSDVTGRAARLNADLVAVHVPLFLTQEQAAQVFALLAADTIAEVPLPRFSRLLERARPWVEDKDAGVRLPEPANRRDLEDPARLCQYTLIKCIYERPFRAWLARQPAAAIAGWYDRAVARSSAAAKQENAKGDAVAERVITARAAALPKPAKDGDVVTFLFDLSRATASEMRVQRGYESDPDKARAQAEFIDRLLRDVVILALSAYLTKEKLGWVLDLKPGQIPAEPPLSSLDDVKAPEAAGEAEKWPAALYLLLHLLPVEAVGQLLHQLFRWNTAATRETDLPEPEERRRQRLEAAMTLYLDMHDAKFEGGSPLQQYEAFRGLFASGRGFERVFPRVSDQKAEQRIPKRGLREIMRFGRLALVKAICRDSTIDDGTVGAVMANEDSEGKDKSKIAALQERREELHEKWVKQKRLDKDDLRDYCATLNAIAQHRHAANFVYLVDHVRAHRAIMAVLGRLVDYAGLFERDLYFVTLALLHQNSLRPQEFFNTKGLEDVRNGEIISALHERKGDAPQAAGVEQKLARHFTKIWGPKNRIRGIRNDLMHLNMLQASPPTPRLTHWINEARELMAYDRKLKNAVSKSIIELLAREGLAARWTIRTSGGAHDLADGILSSRCAEHLGGMKLKLRGADRRDKGQPIAERLHSDAFVGMVAAAFDGKPVKADSILDSLSTVNWEASVHTKRHGDRGGPSRPHSPREKLRPGQRRRDREGRSGAKPDVRAK

SEQ ID NO: 4168 - protein, 811 aa, Artificial
  Synthetic
VNRDDVAWINQHWPDDTTKSRYWTSDGQTEIKRHEIFVRIWRSALAHANRTLADWLDPDGKATDIAEGGNTFEQVLAATGQATVVQTANLFGSRAAALESHDAIQDLARLVWTVYTQLRHNSFHFKGVDGFKVALTPKLAEIAPGALQFTTNLLRGDFRDSEARLRAVLRAAQVEGFLDRGRLAEIWAALHPAGEAGLGPALPRFNRIVQRVDGTGAIAELPCAVNQFDMANPAIHCRYVVTKLLYERGFRAWVAMATTDQINAWIKSAEDRTQKAKDEIHGHPEDKARMVGALRLRDGQGIMDFLSELTALTATEFRVQAGYEPNRAAAQEQAEYLFHLQCDVLALAFKEYIRAARLGWLSDTLKPDRVARGVLSDVDKLADPKATPDFEDWQAGIYAVLHLVPVDEVGRLLHQLRRWANGQPADETSVKIERLLELYLDMHDDKFEGGVPLHDHPDLQALFETPDLLAQVLPQVGATEDERRRVPLRGLREMLRFGNLRILKGVFAKAPITTAGVAKLAEYEKSRADGLGGIDHAQQIRQKRHETLAKLRMLGPDSYGDVRDYLFVTKRIIRHRRLANHVRLVNHVRVNQILMSVLGRFADCAGLFERDLYFTLLALIHELGQKPEAVFDAKALGKFEDGQILTALDRNKTPLPASIACELQRHFGLDAKGAGPNRKRRNDFAHFNLLRSKTPINLTAAMNDARALLSHDRKLKNAVSASIVTLLEREQIVAHWNMGTDHQLADAVIGTRRIVHLKSAELAENLRDKRFLTLIAQLFNGRVNNLPDDIAALDRPGIEALAARVTGGGGR

SEQ ID NO: 4169 - protein, 811 aa, Artificial
  Synthetic
VNRDDVAWINQHWPDDTTKSRYWTSDGQTEIKRHEIFVRIWRSALAHANRTLADWLDPDGKATDIAEGGNTFEQVLAATGQATVVQTANLFGSRAAALESHEAIQDLARLVWTVYTQLRHNSFHFKGVDGFKVALTPKLAEIAPGALQFTTNLLRGDFRDSEARLRAVLRAAQVEGFLDRGRLAEIWAALHPAGEAGLGPALPRFNRIVQRVDGTGAIAELPCAVNQFDMANPAIHCRYVVTKLLYERGFRAWVAMATTDQINAWIKSAEDRTQKAKDEIHGHPEDKARMVGALRLRDGQGIMDFLSELTALTATEFRVQAGYEPNRAAAQEQAEYLFHLQCDVLALAFKEYIRAARLGWLSDTLKPDRVARGVLSDVDKLADPKATPDFEDWQAGIYAVLHLVPVDEVGRLLHQLRRWANGQPADETSVKIERLLELYLDMHDDKFEGGVPLHDHPDLQALFETPDLLAQVLPQVGATEDERRRVPLRGLREMLRFGNLRILKGVFAKAPITTAGVAKLAEYKKSRADGLGGIDHAQQIRQKRHETLAKLRMLGPDSYGDVRDYLFVTKRIIRHRRLANHVRLVNHVRVNQILMSVLGRFADCAGLFERDLYFTLLALIHELGQKPEAVFDAKALGKFEDGQILTALDRNKTPLPASIACELQRHFGLDAKGAGPNRKRRNDFAHFNLLRSKTPINLTAAMNDARALLSHDRKLKNAVSASIVTLLEREQIVAHWNMGTDHQLADAVIGTRPIVHLKSAELAENLRDKRFLTLIAQLFNGRVNNLPDDIAALDRPGIEALAARVTGGGGR

SEQ ID NO: 4170 - protein, 806 aa, Artificial
  Synthetic
VAWINQHWPDDTTKSRYWTSDGQTEIKRHEIFVRIWRSALAHANRTLADWLDPDGKATDIAEGGNTFEQVLAATGQATVVQTANLFGSRAAALESHEAIQDLARLVWTVYTQLRHNSFHFKGVDGFKVALTPKLAEIAPGALQFTTNLLRGDFRDSEARLRAVLRAAQVEGFLDRGRLAEIWAALHPAGEAGLGPALPRFNRIVQRVDGTGAIAELPCAVNQFDMANPAIHCRYVVTKLLYERGFRAWVAMATTDQINAWIKSAEDRTQKAKDEIHGHPEDKARMVGALRLRDGQGIMDFLSELTALTATEFRVQAGYEPNRAAAQEQAEYLFHLQCDVLALAFKEYIRAARLGWLSDTLKPDRVARGVLSDVDKLADPKATPDFEDWQAGIYAVLHLVPVDEVGRLLHQLRRWANGQPADETSVKIERLLELYLDMHDDKFEGGVPLHDHPDLQALFETPDLLAQVLPQVGATEDERRRVPLRGLREMLRFGNLRILKGVFAKAPITTAGVAKLAEYEKSRADGLGGIDHAQQIRQKRHETLAKLRMLGPDSYGDVRDYLFVTKRIIRHRRLANHVRLVNHVRVNQILMSVLGRFADCAGLFERDLYFTLLALIHELGQKPEAVFDAKALGKFEDGQILTALDRNKTPLPASIACELQRHFGLDAKGAGPNRKRRNDFAHFNLLRSKTPINLTAAMNDARALLSHDRKLKNAVSASIVTLLEREQIVAHWNMGTDHQLADAVIGTRPIVHLKSAELAENLRDKRFLTLIAQLFNGRVNNLPDDIAALDRPGIEALAARVTGGGGR

SEQ ID NO: 4171 - protein, 806 aa, Artificial; identical to SEQ ID NO: 4170
  Synthetic

SEQ ID NO: 4172 - protein, 806 aa, Artificial; identical to SEQ ID NO: 4170
  Synthetic

SEQ ID NO: 4173 - protein, 844 aa, Artificial
  Synthetic
MATAVSIGKLIHYQGGIEAIGNKEDLVNSKFLTDAGLTEIKQNESFVRQWLELIAIANTTLSQLVDPDGKHEDIFAATSFDDALKGLNNISDFDSKFKLLFGENHRLYDDDTERQKLLRIIYDTISALRNASFHFKNIQGFNKALEDNLSTKGRRQKGVVDKIIEYTKVHQQKQHELLIADLKAANVEDYLSQLQLDYLFEVVCKGERELLDMPKFSKLLLRAGEIGEKIISPVNATAMEHPAYQCCFISLKMLYDQDFVNWLKKQSNKNIASWMDSAKTRATNAAKKIFRNGTNISSKMARLRNIVEDETLVEYFSFITAETANEFQVQQQKNRYQSNSASAKEQSNFVEQFKQDFLIYAFKGYIGDIKFGKLDQGEKLLKCNAKGSLLPENNRSDTGAEDIERPWLYLVLHLVPIEVVNRITLQIKKHSVLTNSTLDDTRAAYTDIHQAFSLYLGVHGAILGLQSLSNEPELQVFFEKESDFNNLFTDNGEGLVPVKGLRDILRFGNLEQLKKMFSDKKVASDDITNLKEYLEATGGKSKIARAQEKRIELHKTLTELPKRLTKPRVKQTGIDTYEKNNNISISGSISEYRKDLKCIVSYRELKNKIYLYNVKQAHQLIMATQARLLGYSQIRERDLYFVLLTQLMLRGVTLEKEKKKKDKDKLNALDTDTVLYEEEKKKLEKQIKPERSLKDLVEKGLIFLALDQLSSSDKDLKAIHSEIEDMFVGVSPDSDNRNLRNRLAHFKDLGNKNLINITSQINEVRKMMSYDRKLKNAVSKSMIDLFERYNLILSFKVQSHKLQLKNLKSKQITHLNNKGITENLLSDDYVSVIKRLLLTEQNPE

SEQ ID NO: 4174 - protein, 838 aa, Artificial
  Synthetic
MRTKRKQYKIKTKNNRKIDDILSDKSNLRAIFNDLRSNTELQKHFKEKLAFCYPIFIKVKKEKMFDDIEKLIKLVEEARESVAYLRHRCFHYKDVTITEMLKALNNNTETDKTEDIDYSVAAEYFLRDINNLYDAFREQIRSSGIADYYPADIISGCFKKCGLQFVLYSPQNSLMPSFKNIYKRGSNLYKAYQEEKEQKDKEYKRHNTNIVQEESKELSWYIEVSDTEQGKTAYRNLLQLIYYHAFLPEVRENESLITVYFAKTKEWNRKVAETKAKKKNAGKTYKDKPIRAYRYEAIPDYVGERLDDYFKILQREQMAKAKDVNEGNAENNNYIQFIRDVVVWAFGAYLEERLEKYKKDLQSSHSQKDKKDVNDALKELFPDDKDKRQFFMKCKFTDVLINDVGENNQITEMEDLETSKEQQNREIKRKDLLCFYLFLRLLDEREISGLKHQFVRYRCSLKERRLPDNRKDVDEEIVLLEELEELMELVSYTMPSVPELSGKAESGLDLVISKYFKDFFEKSALKNQDIMKLYYQSDNKTPVFRKYMALLMRSAPLQLYKDMFRNYYIITEKECQEYIKTSQDIDAFQCKLNELHKELEHVRLKTVEDKKGKIFYYLAGSDAERVKEYEDTLSKVVRYKRLQHKLTFESLYTIFKIHVDIAARMVGYTEDWERDMLFLFKSLEYNEKLNEGVVEKIFNNKDEKGHIVKKLKDNLNSEDKEKIGILCWHKEITDKNFVEIIWIRNPIAHLNHFMQTVKNPKRSLEKMINALCVLLSYDRKRQNSVTKTINDLLLNEYHVKIKWKRWVDKNCNIYPELFMRVKNHRFTHEIITTVHFRG

SEQ ID NO: 4175 - protein, 598 aa, Artificial
  Synthetic
MMPSFKNVFIRGCNITKGNFNLKECEWFKDKDTYNKDAYLAYKNLLQLIYYHSFLPSVSSDETIITKYINKTKAWNQKIAIAKQKGKINKYQYKYNDMPNYQIGIKLSDYLSNLQRLQSIRENDDNIAEKGNYYTDFVKDVFVFAFNGYLQSKIPNLCGTVKSPCKHNSKTILDDLFVDANLSLKMKTGHNKLSEFAGMYLFLKLLDQRELNKLLHQFIRYRTSTNKINEDLSKVEELIALVQFTLPPPTTDENYNENLEDYFSKFIDGNYMTDYVDLYSQEDKKTPILQRSISLIGRSGAMALYTDIFTQQVKSYTVTKSDYDKYYEYNFGHSSELSVIEKKQNELQTLHKDIVTAKKDADIKEKVSKYETLVKEVQEYNQCRQKVTFETLYKVHQIHIDILGRFASFAEDWERDMFFMLAALKRLGKTSLDVNKVFEEGGVVGKLSDALKTSKTLFCNLCWADDSVNERDIKFKIRVRNILAHLNHMTQYNEKGNQPSIIDIINKLRILLAYDLKRQNAVTKSIQDLLLKDYKIKLVLEPVKTKEELKIFKIKSLDSDYIVHLKNIDSANSKKGIAIKANNNFMIELIEKLLVFKY

SEQ ID NO: 4176 - protein, 422 aa, Artificial
  Synthetic
MRVTKVKVKDAGKDKMVLIHRKTTGAQLVYSGQPVSNETNTILPDKKRDSFDLSILNKTIIKFETVRKQKLNIDQYKTLEKIIKYPKQELPTQIKAEEILPFLNHKFQEPVKYWKEGKEEKFNLTLLIVEAVKAQDKRILQPYHEWKEWYIKTKSDLLKKSIENNRIDLSDNLSKRKKALQAWETDFTTTGSIDLSHYHKVYMTDVLCKMLQEVKPLTDERGKINTNAYHRELKKALQTHQPAIFGTREAPNETNRLNNQLSIYHLEVVKYMEHYFPIKTSKRRNTADDIVHYLKAQTLKTTIEKQLVNAIRANIIQQGKTNHHELKADTSSSDLTKIKTNEAFVLNLIGACAFAANNIRNMVDNEQTLDVLGKREFIDSLTGTRISSQLYSFFFGESLSTSKAEKETQLWGNTWSGTTNTE

SEQ ID NO: 4177 - protein, 422 aa, Artificial; identical to SEQ ID NO: 4176
  Synthetic

SEQ ID NO: 4178 - protein, 422 aa, Artificial; identical to SEQ ID NO: 4176
  Synthetic

SEQ ID NO: 4179 - protein, 422 aa, Artificial; identical to SEQ ID NO: 4176
  Synthetic

SEQ ID NO: 4180 - protein, 641 aa, Artificial
  Synthetic
MKVSKVKVKVGAGRSSERMVFMRRTSKIGSLVYEDEQRNGKPETDDKTTSILPDKKRDSFILSIVNKTIPKKEIVKKNLGKGFVNEYYNAIAGIIDSFLEKKIVDRKHYIIVNKLTEEEIKQYLNHRFQEANYKYVRDKEEVNFNLPKLLKESAKSNSTAPLQPYKEWAEWHIETKSVRLIRSIQNNRLVIDTQEEAENMSPRKRALLKWENEFLLSHKLDLQDVEKTYLIDDLIHALHEVTYTTNDKGFINGNEYHRFLKKALQSHQQNIFGSRETPNKVNRENAELYSYNMEVVKYLEHYFPIKKTNRRNTLDTKDYYLNGINIKDRVRKQLENAVRNNLVRQGKYTLHTLTTDTANSDNLSKIKADEGFALTMLNQCAFAANNVRNIIDPTQVEDILLDRPFNESLEKFNSAQMLHLSSFFDVKEFNEPLRAIRDAVAKIRHNIIHYKVNALNVIFKIETFGSTEKQYKDTIFGSLLQADMMNVSESLAKQLMTGNVLEYYPMLELKSFFSKNSISLYRSVIPFAPGFKRVMKKGENYQNANNKDDKSKYYNLKIESFLPQESFTKEAYDARYFLLKLIYNNIFLPKFTESTDWFKSTVNGVIALNREENVRKGKKHKIAFAEIRLMDSRDTIGTYAA

SEQ ID NO: 4181 - protein, 305 aa, Artificial
  Synthetic
LSAESSEKLFGKRAEGYDINRADNQLYVYNTEVVKYMEHYFPVKSSKRRNSTAEIKYYLQTDTIKCCLHHQIINAVRGLALREGKFNLHGFDDKLIPNERNVSSSILNELKTSEGFVLNMLGGCAFAANCLRNIVDATQRSDLLGFRCFEVSLKKGKSNSDLFALFFGFGREDMDDDSEWEKHLYAARYSVSEIRNRVAHYHKSAIENIYNITDFKYRENSMCSYTDTKFTTALQNEIYNTPKALSLQLMTGKVLEYYPKEKLVSFFQKYKFSLYRSVVPFAPGFKNIMRTGVNYQNATQNSLFL

SEQ ID NO: 4182 - protein, 596 aa, Artificial
  Synthetic
MRVSKVKVDKEMVLMHRNNKEGALIIGNSTDNKTNYILPKKKKENFYKSIINKTLVKDIKFIDEYKKTRTKPRDRDIELTLTNLIEKNNAHPLKNKDIETINKNLRGKFNKYLSYNGNEPFNLAELIYEYSTKNDIKIPQPYKDWVEWYIETKSKFLIKSIENNRIVIENGEEKLSKRKKVLIGFEEKLKEKGEIDLSDVANKFNITSLVKEISPKVEEYIEKDKKRTYKDKNNNKLERELNFAIKDTLQEHQKGIFGTRENPKERDNDKLSIYNLEVVKYIEHYFPIKKSQRTYNIGSIKHHISEETIKSTIQHQIENAVRLNMIHLGKSIHHEYKNSISSTDLSNTKRQEAFVLNMIGACAFATNNIRNIIDSEQGEDILVRKAFTDSLNKGKVDYNLLKLFLGKGSNSNEETLWALRGSIRGIRNNVIHYKKDAIEKIFKIEVFENPINGNDQNETPYSKSIFGKYLQEDISKLSGLFANQLMTGGVLSYYSIDDLKAILDKIEFNLCRSSIPFTPSFKKVFKGGRDYQEKKPSLNLNNYITKEKNHETEEEYQARYFLLKLLYNNIFIPSFEGNYFREAAKYVLEENKNNAL

SEQ ID NO: 4183 - protein, 524 aa, Artificial
  Synthetic
MKVSKVKVSVGNNEKQMMTMFRNSNKGALVYWDDKSRDDQTERIIPGQKMENFALSILNQTLVKKGVFLSMLRMGTSGKVASKHANGTEMRVTHKEKEKAGKAYESIRALLAFVLSSDFGSREFKKNVPKEIERSLLDCMITKKFREEIYLMDEKTGEKRRLTDLILEALSSGDVLILTPYVKWRDDFVALKSSFLRRSIHNNRITVANGGSKRMSVLEAWSEALISPEKDQTEKNKVQGFSKINAISEVPTRYNIDLLIKNLNKVEMGEFKDNGTLKRGHEFHKRLKVCLQTHQKTIFGTRDNPNLTNRGDNELYCYNLEVVKYLNHFFPINVPSAKRLTKDRILYYLNEKTMKRTIEAQLHNALRANLIRNGKLRWHDLLGRDDITNKDLITLKMDEGFLLSIIDACAFAGNNVRNIIDRYQTGDIIYKDILKKSIEKGVSDGPLFGLFFNIEDSQPILTKDLWALRGAVQKIRNDIFHYMFNLPNNDGGMHDDRSATKVKTILNVTEFEYDGDNKTDKSSR

SEQ ID NO: 4184 - protein, 311 aa, Artificial
  Synthetic
LSCRLSSRSNPSIDATNPDWAKLFETLKPYTDWVESYIHFKQTTIQKSIEQNKIQSAHSPRKLVLHKYATAFLEGRVMGYESLAAKYQLADLAESFKVVDLNKNKNANYEIKKILQQHQRNILGELKTDPELNQYGIEVKKYIERYFPIKSKPKRNKHSRADFLKKELIESTVKQQFKNAVYHYVLEQGKLEAYNLTSPKTKDLQNIRAGEAFSFKFINACAFASNNLKTILNPECEEDILGKNCFIQNLPDSTARPNVVQKMIPFFSDEIQNVNFDEAIWAIRGSIQKIRNEVYHCKKHAWEKNTQNKRL

SEQ ID NO: 4185 - protein, 732 aa, Artificial
  Synthetic
MENNSEKKKYLKTLVGDNVYLSPISLDDVEEYTEMVNNIEVSVGLGCVVYTNIMDFESEKELLNSIKKEKIFGVRLLENDELLGNVGFKSIGEIHRTAEMGIMLGNPKYQRKGYGMEAINLLLDYGFSFLNLRNISLNVFEYNEVAYNLYKKIDISKVTKNDKNIFQVSSLEGKLNVKIPYPVVTENKKQKSYNEETVKFLDEFIKAEVKAGLPSAQIAVIKDGNLELLSSYGYVNNYKQDGTELKDKVKVTDNTVYDLASNTKMYATNYAIMKLVSEKKLNLDDYVHKFYPEFKGNGKEKIQISDLLKHQAGFPPDPQYFNDKYDKDDGIPNGKNDLYAIGKEKVKNAIMKTPLAYEPKTSTKYSDVDYMLLGLIIEKVTSQDLDTYMKENFYNKLNLKRTMFNPLKNGVSKNETAATELNGNTRDNTIDFINARKYTIQGEVHDEKAYYSMQGVSGHAGLFSNAYEVAKLAQVIINEGGYDNVKFFDKTTLDNFIKPKDINASYGLGWRRQGDFIYRWAFSGLASRETVGHTGWTGTLTVIEPSQNLVIVLLTNAKNSRVIDPSKKPNDFYGNHYYTTNYGVISSIIIDAFSNMNSKKDTNLRMNSILEDMIKGKFNLIKTDSDYKNSADIRDTVELINLLNLDNNRVTEDFELEADEIGKFLDFNGDKVKDRKELKKFDTKKIYFDGENIIKHRAFYNIKKYGMLNLLEKIADKAKYKISIEELRKVRT

SEQ ID NO: 4186 - protein, 623 aa, Artificial
  Synthetic
MLGYYIAILWGVILFIIFPCYPLNKWVLHNKWNHSDWATFLGGFLGAFITLFGVWWQVTKTQKQKEKDEMKNHLLGLKYNLEKNIKKFDYLYKNIIIFSYTLRSFYDRIDKGFFEEIDSNGVFIDTKIFNLNFTNDILDLKNAIIDAKIAENDEAYIKNYIFESNEEKLKKRLFCEELIDKEDIRKIFEDKNFKFKNFIKKTENENFTINFDNLFNLECNSELNVKKVIGQNSQRLNLFIKNTIDEYKSKIKTSFSSEFLEKYKGIIDNLIENENKFEKIYYPEEHKNELYIYKKNLFLNIGNPNFDKIYGLISNDIKEADAKFLFDSDGEDIRNNKISEIDAILKNLNDKLNGYSKEYKEKYIKKLKENNDFFKKNIQNENYNSFEEFKEDYNKVSEYKRIRDLVEFNYLNKIESYLIDINWKLAIQMARFERDMHYIVNGLDYLYIIRLEKNRNQDRSSPYPKYKNGVLDYTKSYYNFKDYQEFMDICSKFGIDLSENSEINKPENESIRNYISHFYIVRNPFVDYSIAEQIDRVSNLLSYSTRYNNSTYASVFEVFKKDVNLDYDKLKKKFKLIGNNDILKRLMKPKKVSVLELESYNSNYVKNLIIKLLTKIENTNDTL

SEQ ID NO: 4187 - protein, 522 aa, Artificial
  Synthetic
MEMRRLEWEIYLDIKDGMKFLKIKRKVKVKRNYDGNKYILNINENNNKEKIDNNKFIRKYINYKKNDNILKEFTRKFHAGNILFKLKGKEGIIRIENNDDFLETEEVVLYIEAYGKSEKLKALGITKKKIIDEAIRQGITKDDKKIEIKRQENEEEIEIDIRDEYTNKTLNDCSIILRIIENDELETKKSIYEIFKNINMSLYKIIEKIIENETEKVFENRYYEEHLREKLLKDDKIDVILTNFMEIREKIESNLEIMGFVKFYLNVGGDKKKSENKKILVEKILNINVDLTVEDIADFVIKELEFWNITKRIEKVKKVNNEFLEKRRNRTYIKSYVLLDKHEKFKIERENKKDKIVKFFVENIKNNSIKEKIEKILAEFKIDELIKKLEKELKKGNCDTEIFGIFKKHYKVNFDSKKFSKKSDEEKELYKIIYRYLKGRIEKILISEEKVRLKKMKKIEIEKILNKSILSKKVLKRVKQYTLEHVMYLGKLVHNDIDMTTVNTNDFSMLHAKEELDLELIT

SEQ ID NO: 4188 - protein, 805 aa, Artificial
  Synthetic
LFLWIIEEIIYEIIKLYKDLKEEIIMGNLFGYKRWYEVRDKEDYKIKRKVKVKRNYDGNKYILNINENNNKEKIDDNKFIREFVNYKKNDNVLREFKRKFHAGNILFKLKGKERIKRIENDDDFLETEEVVLYIEVYGKSEKLKALGITKKKIIDEAIRQGITKDDKKIEIKRQKIEINIRDKYTNKTVDDCSVILRIIENDELETKKSIYEIFKNINMNLYKIIEKIIVNKTEKVFENRYYEEHLREKLLKDDKTEVILTNFMEIREKIKSNLEIMGFVKFYLNVGGDKKKSENKKIFVEKILNINVDLTVEDIVDFIVKELKFWNITKRIEKVKEFNNKFLENKRNRTYIKSYVLLDKHEKFKIERENKKDKIVKFFVENIKNNSIKEKIEKILAEFKIDELTKKLEKELKKGNCDTEIFGIFKKHYKVNFDSKKFSNKSDEEKELYKIIYRYLKGRIEKILINGEKVRLKKMEKIEIEKILNESILSEKILKRIKQYTLEHIMYLGKLVHNKINMATVNTNDFFRLHAKEELDLELITFFASTNMELNKIFSRENINNDENIDFFGGDREKNYVIDKKNLNSKIKIIRDLDFIDNKNNITNDFINKFTKIGTNERNRILHASGKKRDSQGTQDDYNKVINIIQNLKISDEEVSKALNLDVVFKDKKNIITEINDIKISEENSNDIKYLPSFSKVLPEILNLYRNNPKNKPFDTIETEKIVLNALIYVNKELYKKLILEDDLKKNRSENIFLQELKKTLGNIDETDENIIENYYKNAQISASKGNNKVIKKYQKKVIECYIGY

SEQ ID NO: 4189 - protein, 333 aa, Artificial
  Synthetic
MGNLFGHKRWYEVRDKEDYKIRRKVKVKRNYDGNKYILNINENNNKEKIDNNKFIREFVNYKKNDNVLREYKRKFHAGNILFKLKGKEKIKRIENNDDFLETEEVVLYIEVYGKSEKLKALGITKKKIIDEAIRQRITKDDKKIEIKRQENKKKIEINIRDKCTNKTVDDCSVILRIIENDELETKKSIYEIFKNINMNLYKIIEKIIENEAEKVFENRYYKEYLKEKLLEDNQINIILTNFMKIREKIESNPEIMGFVKFYFNVGGDKKKSENKKMFVEKILNINVDLTVEDIVDFIIGELKFYGIIKRIEKLQEKTVNRTDEDVKNTYKNT

SEQ ID NO: 4190 - protein, 303 aa, Artificial
  Synthetic
MGNLFGYKRWYEVSDRGDNKIKRKVKIKRNYDGNKYILNINENNNKEKIENNEFIREFVNYKKNDNVLREFKRKFHAGNILFKLKGNKRSIGDSNDFLKTEEIILDKEVYGQSEKLRNEKGITKQDILKEIIDKGIDKSNDKILVKTKLGKEITINFTDEDKKNKKEYQITLKIIPENELKIKREVYNVFKIINMNLYQIIKGIIENKEIFKNRYYDEILKEKLSKNNQIINTLTNLNKIRKEIRDNRDNIIGFVKFYLNVSGDKKKSENKKMFVEKILNINVDLTVEDIVDFIVKELKFWNI

SEQ ID NO: 4191 - protein, 454 aa, Artificial
  Synthetic
MGNLFGYKKWYKVDKTIEKDGKTNTIKKEVRIKRNYLTDRYILNTNNKDKNNINNGDFVDQFIEYKTKNDAFKKFTKKFHMGNILFKLKGNKRSIEDTNGFLKTEEIILDKEVYGQSEKLRNEKGITKQDILKEIIDKGIDKSNDKILVKTKFGKEITINFTDEDKKNKNEYQITLKIIPENELKIKREVYNVFKIINMNLYQIIKGIIENKEIFKNRYYDEILKEKLSKNNQIINTLTNLNKIRKEIRDNRDNIIGFVKFYLNVSGDKKKSENKKMFVEKILNTNVDLTVEDIVDFIVKELKFWNITKRIEKVKEFNNEFLENRRNRTYIKSYVLLDKHEKFKRDRENKKDIIVKSFIKDIKNNTMEQKINQILRKFKIKELTKKLDEAGIAYGIYYPVPLHLQKVYKNLGYKEGTLPNAEYLSKRTIAIPVDPELTEEEKEYIVDFLNNLDL

SEQ ID NO: 4192 - protein, 559 aa, Artificial
  Synthetic
LFLWIIEEVIYEIIKLYKNLKEEIIMGNLFGYKRWYEVRDKEDYKIKRKVKVKRNYDGNKYILNINENNNKEKIDDNKFIREFVNYKKNDNVLIEFKRKFHAGNILFKLKGNKRSIEDSNGFLETGEIILDKEVYGQSEKLRNEKGITKQDILKEIIDKGIDKSNDKILVKTKFGKEITINFTDEDKKNKNEYQITLKIIPENELKIKREVYDVFKMINMDLYQIIKEIIENEVEKVFKNRYYEEHLKEKLLEDNQINVILTNFMKIREKIKSNPEIMGFIKFYLNVDGDKKKSENKKMFVEKILNINVDLTEEDIVDFIVKELKFWNITKRIEKLQEKKADRTDEDIKKTYINTYISLDKHEKFKKYDRNKKDTIVKSFIKDIKDNTMKQKINQILRKFKIEELIDKLRIENKNFDTEIFRIFKDHYQEIFSSEKFEEKSDEEKELYKIIYRYLKGRIEKILINEEKIKTKELKINKILDEKKLSEKVLKRVKQYTLEHIMYLGKLRHNDIVKITVNTDDFSRLHAKEELDLELITFFASINMELNKIFEINKEKNDF

SEQ ID NO: 4193 - protein, 371 aa, Artificial
  Synthetic
LFLWIIEEVIYEIIKLYKNLKEEIIMGNLFGYKKWYKVDKIIKDKKGKESTIKQEVRIKRNYTVDRYTLNTNNKEKNNINNEDFVNQFIEYKTNNDIFRKFTRKFHAGNILFKLKGNKRSIEDSNGFLKTEEIILDKEVYGQSEKLRNEKGITKQDILKEIIDKGIDKSNDKILVKTKFGKEITINFTDEDKKNKNEYQITLKIIPENELKIKREVYNIFKIINMNLYQIIKEIIENEVQKVFKNRYYEEYLKEKLLEDNQINVILTNFMEIREKIKSNLEIMGFVKFYLNVGGDKKKSENKKMFVEKILNINVDLTVEDIVDFIVKELKFWNITKRIEKVKEFNNKSLENRRNRTYIKSYVLLDKHEKFK

SEQ ID NO: 4194 - protein, 898 aa, Artificial
  Synthetic
MGNLFGYKKWYKVDKIIKDKKGKKSTIKQEVRIKRNYLTNRYILNTNNKDKNNINNEDFVDQFIEYKTKNDIFEKFTRKFHMGNILFKLKGNKRSIEDSNDFLKTEEVVLDKEIYGQSEKLRNEKGITKQGILKEIIDKGINESNDSILIKTKFGKEIKINFTDESKKNKNEYQITLKVIPENELKIKREVYDVFKMINMDLYQIIKEIIENEVQKVFKNRYYEEYLREKLLEDNQINVILTNFMKIREKTKSNSEIMGFVKFYLNVGGDKKKSENKKMFVEKILNINVDLTEEDIVDFIVKELKFYGIIKRIEKLQEKKADRTDKDIKKTYINTYVSLDKHEKFKKYNRNKKDTIVKSFIKDIKDNTMKQKINQILRKFKIEELINKLRIENKNFDTEIFRIFKEHYQEIFNSEKFEEKSDEEKELYKIIYRYLKGRIEKILINEQKVRLKKMEKIEVEKILNESILSEKILKRVKQYTLEHVMYLGKLVHNDIDRSIVNTNDFSRLHAKEELDLELITFFASTNMELNKIFSRENINNDENIDFFGGDREKNYVLDKKNLNSKIEIIRDLDFIDNKNSITNNFISKFTKIGTNERNRILHASSKERDLQGTQDDYNKVINIIQNLKISDEEVSKALNLDVVFKDKKNIITKINDIEISEENNSIIKYLPSFSKVLPEILNLYKNKNKNNPFDTTETERIMLNALIYVNKELYKKLILEKNLEENESKNKFLKELKKNLGGTDEIDENIIESYYKNTQISASKGNNKAIKKYQKKIIECYIKYLEENYRELFDFSDFKMNIQEIKKQIKEINDNKTYKRITIKTSDKSIVINNDFEYIISIFALLNNNIFINKIRNRFFSTSVWLNTSEYQNIIDILDEIMQLNTLRNECITENWNL

SEQ ID NO: 4195 - protein, 672 aa, Artificial
  Synthetic
LKGNKRSIEDSNDFLKTEEVVLDKEIYGQSEKLRNEKGITKKDILKEINKQKIDNSVKKISMNTNSGKTIVINFSDKLKKDKDDYQITLNIISEDELERKRKIYDIFKMINMDLYQIIKEIIENEVQKVFKNRYYEEHLREKLLKDDKIDVILTNFMKIREKIENNPEIMGFIKFYLNVGGDKKKSENKKIFVEKILNTNVDLTVEDVVDFIVKELKFWNITKRIEKVKEFNNKSLENKRNRTYIKSYVQLDKHEKFKIERENKKDKIVKLFVKDIHNNTMEEKINQILNKFKIKELIEKLKENTENKNFDTEIFGIFKTHYQNIFSSEKFSNKSDEEKELYKIIYRYLKGRIEKILINEEKVRLKKMEKIEIEKILNESILSEKILKRVKQYTLEHIMYLGKLIHNKINMATVNTNDFSRLHAKEELDLELITFFASTNMELNKIFNGKEKVTDFFGSNLNGQKITLKEKVPSFKLNILKKLNFINNENNIDEKLSHFYSFQKEGYLLRNKILHNSYGNIQETKNLEEKYKNVKNLIDELKVSDEEISKSLNLDVIFEGKNNIIIEINKLQTGKYKDKKYLPSFSKIVPEIMRKFREINKDKSFDIESEKIILNAVQYVNKILYEKITSNEENEFIKTLPDKLVKKNNNKENKNSLSIEEYYKNAQVSSSK

SEQ ID NO: 4196 - protein, 607 aa, Artificial
  Synthetic
MGNLFGYKKWYKVDKTIEKDGKTNTVKKEVRIKRNYLTDRYILNTNNKDKNNINNGDFVDQFIEYKTNNDIFRKFTRKFHMGNILFKLKAKESIKKAKESIKKIESYNNFLEKEKAILEIEIYQQSEKLIEEENITKKDIIDKAIKEKITEDSNEIKMQIKSKENKLKEIKISINKETEEYHIKLRSINNDELNLKREIYEILKSINANLYIITKNAISNADFKKRNYENFLRENIMEHLKKNIGEKSKITFLKSLSNSLKKLQGNIKENDEIINFIKYYSNINGCKTVSENKKNFLEKILNTEVSVSENDIIDFIIGELKFYGIIKRIEKLQEKTVNRTDKDIKNTYKNTYVLLDKHEKFKKYNRNPKDIIVKSFIKDIKDNTMEQKINQILRKFKIEELIKKLKMEDKNFDTEIFGIFKVHYQEIFSSEKFEKKSDEEKELYKIIYRYLKGRIEKILVNEQKVRLKKMEKIEIEKILNESILSEKILKRVKQYTLEHIMYLGKLRHNDIVKITVNTDDFSRLHAKEELDLELITFFASTNMELNKIFEINKEKNDFFGDSFKINDTKVLLKNEVTSSKLYILKNLNFIDNENKVKKEEFISKFIT

SEQ ID NO: 4197 - protein, 894 aa, Artificial
  Synthetic
MKDKLDMLNKNEAVTDLRFGIVSEKYEKGITSFDYERIKAEEELDRNIAAYVTFAADIFAKSVIKSDYRTKKDNNSDVLQYSDKEFRNSEVIRDNAEKNILQYWGGYSRWGTENSKLPENNKVSDFGKLDVSDLCIDIKKHLAGIRNSSVHYTTKIKNESAADGSNVKILFEKDLADINIIYADKYYSNNVWMFYSLEDINKLIAFLYKEKRVIRQVQIPSFSRILKRKAMQDVINEIFKDDFDENIVNPELKEKYRNSLYFMLKEIYYNAFIIQPELKEKFKDKIKTMKSELYNKLKTIDKKEYKALYCMLSNEESALKNFADRIYSVDGDNVSFADICKILMTDYNMQNQEKKNIESMEQKKKNKGKDENYKHFPLLLHKVLKELFIEYLKQTHELEFLRNNICIKSDVTMESFESQIKGVEIYKDLKEKIDKNNSLLDWYVIAHFLMPKQLNHLIGNIKNYIQFATNIDKRAESVKNLTESGMVKRIQYYDDIVRTLEFSAQYIGKISNNINDYFNSEDEYVSFLSKYVGFINDKSEDVLTELKDFCREKINNGSQIIGIYYGGDNVIINRNVIYAQMYSNAEVFSNIYKKVTKNDIINYYEKQNDLKDVFKSGVCQNEDEQRSLCEFQQLKNRIELTELSTYADMVNDFMAQFVEWAYLRERDLMYFQLGIHYIRLFYSDNVLDEKYHKLSDNVIDIEEGALLYQIVAMYDYELRIFETDNSGNAKRIGQGGPGKSIPVFLKKYCNVTDVYECGLELFEDINQHEHIIRFRNDIAHMRYMSNQAMNIMSIVSNIYKSFFVYDTKLKKSISLVFKNILMRYGVIADLVFSYNNKNQSIKDDMDINIINIKNLKSDKYVYKIVNEDIVKQVEIEIRNQVFLEQLHNLLYFSR

SEQ ID NO: 4198 - protein, 894 aa, Artificial; identical to SEQ ID NO: 4197
  Synthetic

SEQ ID NO: 4199 - protein, 894 aa, Artificial; identical to SEQ ID NO: 4197
  Synthetic

SEQ ID NO: 4200 - protein, 894 aa, Artificial; identical to SEQ ID NO: 4197
  Synthetic

SEQ ID NO: 4201 - protein, 894 aa, Artificial; identical to SEQ ID NO: 4197
  Synthetic

SEQ ID NO: 4202 - protein, 894 aa, Artificial; identical to SEQ ID NO: 4197
  Synthetic

SEQ ID NO: 4203 - protein, 894 aa, Artificial; identical to SEQ ID NO: 4197
  Synthetic

SEQ ID NO: 4204 - protein, 894 aa, Artificial; identical to SEQ ID NO: 4197
  Synthetic

SEQ ID NO: 4205 - protein, 314 aa, Artificial
  Synthetic
MYSNAEVFSNIYKKVTKNDIINYYEKQNDLKDVFKSGVCQNEDEQRSLCEFQQLKNRIELTELSTYADMVNDFMAQFVEWAYLRERDLMYFQLGIHYIRLFYSDNVLDEKYHKLSDNVIDIEEGALLYQIVAMYDYELRIFETDNSGNAKRIGQGGPGKSIPVFLKKYCNVTDVYECGLELFEDINQHEHIIRFRNDIAHMRYMSNQAMNIMSIVSNIYKSFFVYDTKLKKSISLVFKNILMRYGVIADLVFSYNNKNQSIKDDMDINIINIKNLKSDKYVYKIVNEDIVKQVEIEIRNQVFLEQLHNLLYFSR

SEQ ID NO: 4206 - protein, 894 aa, Artificial
  Synthetic
MKDKLDMLNKNEAVTDLRFGIVSEKYEKGITSFDYERIKAEEELDRNIAAYVTFAADIFAKSVIKSDYRTKKDNNSDVLQYSDKEFRNSEVIRDNAEKNILQYWGGYSRWGTENSKLPENNKVSDFGKLDVSDLCIDIKKHLAGIRNSSVHYTTKIKNESAADGSNVKILFEKDLADINIIYADKYYSNNVWMFYSLEDINKLIAFLYKEKRVIRQVQIPSFSRILKRKAMQDVINEIFKDDFDENIVNPELKEKYRNSLYFMLKEIYYNAFIIQPELKEKFKDKIKTMKSELYNKLKTIDKKEYKALYCMLSNEESALKNFADRIYSVDGDNVSFADICKILMTDYNMQNQEKKNIESMEQKKKNKGKDENYKHFPLLLHKVLKELFIEYLKQTHELEFLRNNICIKSDVTMESFESQIKGVEIYKDLKEKIDKNNSLLDWYVIAHFLMPKQLNHLIGNIKNYIQFATNIDKRAESVKNLTESGMVKRIQYYDDIVRTLEFSAQYIGKISNNINDYFNSEDEYVSFLSKYVGFINDKSEDVLTELKDFCREKINNGSQIIGIYYGGDNVIINRNVIYAQMYSNAEVFSNIYKKVTKNDIINYYEKQNDLKDVFKSGVCQNEDEQRSLCEFQQLKNRIELTELSTYADMVNDFMAQFVEWAYLRERDLMYCQLGIHYIRLFYSDNVLDEKYHKLSDNVIDIEEGALLYQIVAMYDYELRIFETDNSGNAKRIGQGGPGKSIPVFLKKYCNVTDVYECGLELFEDINQHEHIIRFRNDIAHMRYMSNQAMNIMSIVSNIYKSFFVYDTKLKKSISLVFKNILMRYGVIADLVFSYNNKNQSIKDDMDINIINIKNLKSDKYVYKIVNEDIVKQVEIEIRNQVFLEQLHNLLYFSR

SEQ ID NO: 4207 - protein, 445 aa, Artificial
  Synthetic
MPKQLNHLIGNIKNYIQFATNIDKRAESVKNLTESGMVKRIQYYDDIVRTLEFSAQYIGKISNNINDYFNSEDEYVSFLSKYVGFINDKSEDVLTELKDFCREKINNGSQIIGIYYGGDNVIINRNVIYAQMYSNAEVFSNIYKKVTKNDIINYYEKQNDLKDVFKSGVCQNEDEQRSLCEFQQLKNRIELTELSTYADMVNDFMAQFVEWAYLRERDLMYFQLGIHYIRLFYSDNVLDEKYHKLSDNVIDIEEGALLYQIVAMYDYELRIFETDNSGNAKRIGQGGPGKSIPVFLKKYCNGTDVYECGLELFEDINQHEHIIRFRNDIAHMRYMSNQAMNIMSIVSNIYKSFFVYDTKLKKSISLVFKNILMRYGVIADLVFSYNNKNQSIKDDMDINIINIKNLKSDKYVYKIVNEDIVKQVEIEIRNQVFLEQLHNLLYFSR

SEQ ID NO: 4208 - protein, 894 aa, Artificial
  Synthetic
MKDKLDMLNKNEAVTDLRFGIVSEKYEKGITSFDYERIKAEEELDRNIAAYVTFAADIFAKSVIKSDYRTKKDNNSDVLQYSDKEFRNSEVIRDNAEKNILQYWGGYSRWGTENSKLPENNKVSDFGKLDVSDLCIDIKKHLAGIRNSSVHYTTKIKNESAADGSNVKILFEKDLADINIIYADKYYSNNVWMFYSLEDINKLIAFLYKEKRVIRQVQIPSFSRILKRKAMQDVINEIFKDDFDENIVNPELKEKYRNSLYFMLKEIYYNAFIIQPELKEKFKDKIKTMTSELYNKLKTIDKKEYKALYCMLSNEESALKNFADRIYSVDGDNVSFADICKILMTDYNMQNQEKKNIESMEQKKKNKGKDENYKHFPLLLHKVLKELFIEYLKQTHELEFLRNNICIKSDVTMESFESQIKGVEIYKDLKEKIDKNNSLLDWYVIAHFLMPKQLNHLIGNIKNYIQFATNIDKRAESVKNLTESGMVKKIQYYDDIVRTLEFSAQYIGKISNNINDYFNSEDEYVSFLSKYVGFINDKSEDVLTELKDFCREKINNGSQIIGIYYGGDNVIINRNVIYAQMYSNAEVFSNIYKKVTKNDIINYYEKQNDLKDVFKSGVCQNEGEQRSLCEFQQLKNRIELTELSTYADMVNDFMAQFVEWAYLRERDLMYFQLGIHYIRLFYSDNVLDEKYHKLSDNVIDIEEGALLYQIVAMYDYELRIFETDNSGNAKRIGQGGPGKSIPVFLKKYCNGTDVYECGLELFEDINQHEHIIRFRNDIAHMRYMSNQAMNIMSIVSNIYKSFFVYDTKLKKSISLVFKNILMRYGVIADFVFSYNNKNQSIKDDMDINIINIKNLKSDKYVYKIVNEDIVKQVEIEIRNQVFLEQLHNLLYFSR

SEQ ID NO: 4209 - protein, 894 aa, Artificial; identical to SEQ ID NO: 4208
  Synthetic

SEQ ID NO: 4210 - protein, 894 aa, Artificial
  Synthetic
MKDKLDMLNKNEAITDLRFGIVSEKYEKGITSFDYERIKAEEELDRNIAAYVTFAADIFAKSVIKSDYRTKKDNNSDVLQYSDKEFRNSEVIRDNAEKNILQYWGGYSRWGTENSKLPENNKVSDFGKLDVSDLCIDIKKHLAGIRNSSVHYTTKIKNESAADGSNVKILFEKDLADINIIYADKYYSNNVWMFYSLEDINKLIAFLYKEKRVIRQVQIPSFSRILKRKAMQDVINEIFKDDFDENIVNPELKEKYRNSLYFMLKEIYYNAFIIQPELKEKFKDKIKTMTSELYNKLKTIDKKEYKALYCMLSNEESALKNFADRIYSVDGDNVSFADICKILMTDYNMQNQEKKNIESMEQKKKNKGKDENYKHFPLLLHKVLKELFIEYLKQTHELEFLRNNICIKSDVTMESFESQIKGVEIYKDLKEKIDKNNSLLDWYVIAHFLMPKQLNHLIGNIKNYIQFATNIDKRAESVKNLTESGMVKKIQYYDDIVRTLEFSAQYIGKISNNINDYFNSEDEYVSFLSKYVGFINDKSEDVLTELKDFCREKINNGSQIIGIYYGGDNVIINRNVIYAQMYSNAEVFSNIYKKVTKNDIINYYEKQNDLKDVFKSGVCQNEGEQRSLCEFQQLKNRIELTELSTYADMVNDFMAQFVEWAYLRERDLMYFQLGIHYIRLFYSDNVLDEKYHKLSDNVIDIEEGALLYQIVAMYDYELRIFETDNSGNAKRIGQGGPGKSIPVFLKKYCNGTDVYECGLELFEDINQHEHIIRFRNDIAHMRYMSNQAMNIMSIVSNIYKSFFVYDTKLKKSISLVFKNILMRYGVIADFVFSYNNKNQSIKDDMDINIINIKNLKSDKYVYKIVNEDIVKQVEIEIRNQVFLEQLHNLLYFSR

SEQ ID NO: 4211 - protein, 545 aa, Artificial
  Synthetic
LKNFADRIYSVDGDNVSFADICKILMTDYNMQNQEKKNIESMEQKKKNKGKDENYKHFPLLLHKVLKELFIEYLKQTHELEFLRNNICIKSDVTMESFESQIKGVEIYKDLKEKIDKNNSLLDWYVIAHFLMPKQLNHLIGNIKNYIQFATNIDKRAESVKNLTESGMVKRIQYYDDIVRTLEFSAQYIGKISNNINDYFNSEDEYVSFLSKYVGFINDKSEDVLTELKDFCREKINNGSQIIGIYYGGDNVIINRNVIYAQMYSNAEVFSNIYKKVTKNDIINYYEKQNDLKDVFKSGVCQNEDEQRSLCEFQQLKNRIELTELSTYADMVNDFMAQFVEWAYLRERDLMYFQLGIHYIRLFYSDNVLDEKYHKLSDNVIDIEEGALLYQIVAMYDYELRIFETDNSGNAKRIGQGGPGKSIPVFLKKYCNVTDVYECGLELFEDINQHEHIIRFRNDIAHMRYMSNQAMNIMSIVSNIYKSFFVYDTKLKKSISLVFKNILMRYGVIADLVFSYNNKNQSIKDDMDINIINIKNLKSDKYDIK

SEQ ID NO: 4212 - protein, 402 aa, Artificial
  Synthetic
MQGIFQKENTDKALKYGIYRHLPTYEKIIRNLVSFLSKYVGFINDKSEDVLTELKDFCREKINNGSQIIGIYYGGDNVIINRNVIYAQMYSNAEVFSNIYKKVTKNDIINYYEKQNDLKDVFKSGVCQNEDEQRSLCEFQQLKNRIELTELSTYADMVNDFMAQFVEWAYLRERDLMYFQLGIHYIRLFYSDNVLDEKYHKLSDNVIDIEEGALLYQIVAMYDYELRIFETDNSGNAKRIGQGGPGKSIPVFLKKYCSGTDVYECGLELFEDINQHEHIIRFRNDIAHMRYMSNQAMNIMSIVSNIYKSFFAYDTKLKKSISLVFKNILMRYGVIADLVFSYNNKNQSIKDDMDINIINIKNLKSDKYVYKIVNEDIVKQVEIEIRNQVFLEQLHNLLYFSR

SEQ ID NO: 4213 - protein, 566 aa, Artificial
  Synthetic
MKDKLDMLNKNEAVTDLRFGIVSEKYEKGITSFDYERIKAEEELDRNIAAYVTFAADIFAKSVIKSDYRTKKDNNSDVLQYSDKEFRNSEVIRDNAEKNILQYWGGYSRWGTENSKLPENNKVSDFGKLDVSDLCIDIKKHLAGIRNSSVHYTTKIKNESAADGSNVKILFEKDLADINIIYADKYYSNNVWMFYSLEDINKLIAFLYKEKRVIRQVQIPSFSRILKRKAMQDVINEIFKDDFDENIVNPELKEKYRNSLYFMLKEIYYNAFIIQPELKEKFKDKIKTMKSELYNKLKTIDKKEYKALYCMLSNEESALKNFADRIYSVDGDNVSFADICKILMTDYNMQNQEKKNIESMEQKKKNKGKDENYKHFPLLLHKVLKELFIEYLKQTHELEFLRNNICIKSDVTMESFESQIKGVEIYKDLKEKIDKNNSLLDWYVIAHFLMPKQLNHLIGNIKNYIQFATNIDKRAESVKNLTESGMVKRIQYYDDIVRTLEFSAQYIGKISNNINDYFNSEDEYVSFLSKYVGFINDKSEDVLTELKDFCREKINNGSQIWCATCQ

SEQ ID NO: 4214 - protein, 566 aa, Artificial; identical to SEQ ID NO: 4213
  Synthetic

SEQ ID NO: 4215 - protein, 566 aa, Artificial; identical to SEQ ID NO: 4213
  Synthetic

SEQ ID NO: 4216 - protein, 356 aa, Artificial
  Synthetic
LSYLAAKYIDLGKGVYHFTMKDKLDMLNKNEAVTDLRFGIVSEKYEKGITSFDYERIKAEEELDRNIAAYVTFAADIFAKSVIKSDYRTKKDNNSDVLQYSDKEFRNSEVIRDNAEKNILQYWGGYSRWGTENSKLPENNKVSDFGKLDVSDLCIDIKKHLAGIRNSSVHYTTKIKNESAADGSNVKILFEKDLADINIIYADKYYSNNVWMFYSLEDINKLIAFLYKEKRVIRQVQIPSFSRILKRKAMQDVINEIFKDDFDENIVNPELKEKYRNSLYFMLKEIYYNAFIIQPELKEKFKDKIKTMKSELYNKLKTIDKKEYKALYCMLSNEESALKNFADRIYSVDGDNVSFA

SEQ ID NO: 4217 - protein, 425 aa, Artificial
  Synthetic
MKDKLDMLNKNEAVTDLRFGIVSEKYEKGITSFDYERIKAEEELDRNIAAYVTFAADIFAKSVIKSDYRTKKDNNSDVLQYSDKEFRNSEVIRDNAEKNILQYWGGYSRWGTENSKLPENNKVSDFGKLDVSDLCIDIKKHLAGIRNSSVHYTTKIKNESAADGSNVKILFEKDLADINIIYADKYYSNNVWMFYSLEDINKLIAFLYKEKRVIRQVQIPSFSRILKRKAMQDVINEIFKDDFDENIVNPELKEKYRNSLYFMLKEIYYNAFIIQPELKEKFKDKIKTMKSELYNKLKTIDKKEYKALYCMLSNEESALKNFADRIYSVDGDNVSFADICKILMTDYNMQNQEKKNIESMEQKKKNRNSRQIVRILKLIHFRMKWNQMQIQTDLWMRQQKHPQVQRNRMRMDLHMNILKSLIHTA

SEQ ID NO: 4218 - protein, 702 aa, Artificial
  Synthetic
MKVSKVKHRRTAVSVNKKNNTVKGILYDDPIKKDSKGDGASAYVSTKYVVDDVVRNSSRLYSPFNSKKLIIDDKTKVVANSLRQHFKNFVKIYLNCESIDEQQMKFTPDNKYLMDNRVRISLPSDVNEEKLVEAIVNSSLRKSLNKKCNIQIKAGLRETFDIPELIKKAIKIYCIDEKRNLNDAEKLDMYALFSFMYEDKYKNRQKKLIINSISNQVTKVKVCENGNRLLKLSIADTKKKPLWDFMIEYSNSDKKKQDTMLRNIRKSIVLFVCGVENYKNIENDNKLDICSWDGYDINENQQFVCVNTNNSNDDYFISSTELRRANLDHYMKAVAKLNDDRNKFWFQHFESVIETFFSKKAKRNIERIKSAYLCEYLWRDFCSYVALKYVDLGKGVYHFTMADKLALINRNKYEKSIIFGEIESRYNNGISSFDYERIKAEELFERNISTYTTFATNIFSKAVVQDDYIKNHNKASDVLQYSDKEFSDSKVLRNDAMKRILQYWGGQSRWNNTLNKINVDTLCIDIKEHLSNIRNSSVHYTSKVSLSGDKNESIVYMLFKKDFAEIRNIFASKYYSNNVWMFYSIEKINGLMEYLYGDNSTVIDAQIPAYNNIIKRKNIADVIEKIIKKNSYKTINELELIKKYRACLYFILKEIYYNRFIKQENLKEQFIQFVDNDNNLLDDNKNTFYIQKRHLRSPNNHK

SEQ ID NO: 4219 - protein, 614 aa, Artificial
  Synthetic
MTEYNQQNNQIKKVRSSNDSIFDQPIYQHYKVLLKKAIANAFADYLKNNKDLFGFIGKPFKANEIREIDKEQFLPDWTSRKYEALCIEVSGSQELQKWYIVGKFLNAMSLNLMVGSMRSYIQYVTDIKRRAASIGNELHVSVQDVEKVEKWVQVIEVCSLLASRTSNQFEDYFNDKDDYARYLKSYVDFSNVDMPSEYSALVDFSNEEQSDLYVDPKNPKVNRNIVHSKLFAADHILRDIVEPVSKDNIEEFYSQKAEIAYCKIKGKEITAEEQKAVLKYQKLKNRVELRDIVEYGEIINELLGQLINWSFMRERDLLYFQLGFHYDCLRNDSKKPERYKNIKVDENSIKDAILYQIIGMYVNGVTVYAPEKDDDKLKEQCVKGGVGVKVSAFHRYSKYLGLNEKTLYNAGLEIFEVVAEHEDIINLRNGIDHFKYYLGDYRSMLSIYSEVFDRFFTYDIKYQKNVLNLLQNILLRHNVIVEPILESGFKTIGEQTKPGAKLSIRSIKSDTFQYKVKGGTLITDAKDERYLETIRKILYYAENEEDNLKKSVVVTNADKYEKNKESDDQNKQKEKKNKDNKGKKNEETKSDAEKNNNERLSYNPFANLNFKLSN

SEQ ID NO: 4220 - protein, 458 aa, Artificial
  Synthetic
VCSLLASRTSNQFEDYFNDKDDYARYLKSYVDFSNVDMPSEYSALVDFSNEEQSDLYVDPKNPKVNRNIVHSKLFAADHILRDIVEPVSKDNIEEFYSQKAEIAYCKIKGKEITAEEQKAVLKYQKLKNRVELRDIVEYGEIINELLGQLINWSFMRERDLLYFQLGFHYDCLRNDSKKPERYKNIKVDENSIKDAILYQIIGMYVNGVTVYAPEKDDDKLKEQCVKGGVGVKVSAFHRYSKYLGLNEKTLYNAGLEIFEVVAEHEDIINLRNGIDHFKYYLGDYRSMLSIYSEVFDRFFTYDIKYQKNVLNLLQNILLRHNVIVEPILESGFKTIGEQTKPGAKLSIRSIKSDTFQYKVKGGILITDAKDERYLETIRKILYYAENEEDNLKKSVVVTNADKYEKNKESDDQNKQKEKKNKDNKGKKNEETKSDAEKNNNERLSYNPFANLNFKLSN

SEQ ID NO: 4221 - protein, 326 aa, Artificial
  Synthetic
VSAVKEISTGNSNGNVIGAAVKNNSGKMGIIDSNGQNKVEQAYDSKKPEGYKNIKVDENSIKDAILYQIIGMYVNGVTVYAPEKDGDKLKEQCVKGGVGVKVSAFHRYSKYLGLNEKTLYNAGLEIFEVVAEHEDIINLRNGIDHFKYYLGDYRSMLSIYSEVFDRFFTYDIKYQKNVLNLLQNILLRHNVIVEPILESGFKTIGEQTKPGAKLSIRSIKSDTFQYKVKGGILITDAKDERYLETIRKILYYAENEEDNLKKSVVVTNADKYEKNKESDDQNKQKEKKNKDNKGKKNEEIKSDAEKNNNERLSYNPFANLNFKLSN

SEQ ID NO: 4222 - protein, 539 aa, Artificial
  Synthetic
LSLGIKEERICETKEDNWWPNLEMPGLCGPDSEMFYFRSDDEIPEKFDPDDNRWVEIWNDVFMQYNHKEDGTIEILKHKNVDTGMGLERVTAILEGVNDNYLSSIWKDVIEKICEISNTKYEDNKESIRIIADHIRTSVFISADYSGIKPSNVGQGYILRRLIRRSIRHAKKLNIDISSNWDIEIAKLIINKYKKYYKELEENENVVYEVLTNEKNKFNKTIEKGLREFEKVTKDNNDIDASTAFKLYDTYGFPLELTVELAHEKNIKVDENSIKDAILYQIIGMYVNGVTVYAPEKDGDKLKEQCVKGGVGVKVSAFHRYSKYLGLNEKTLYNAGLEIFEVVAEHEDIINLRNGIDHFKYYLGDYRSMLSIYSEVFDRFFTYDIKYQKNVLNLLQNILLRHNVIVEPILESGFKTIGEQTKPGAKLSIRSIKSDTFQYKVKGGILITDAKDERYLETIRKILYYAENEEDNLKKSVVVTNADKYEKNKESDDQNKQKEKKNKDNKGKKNEEIKSDAEKNNNERLSYNPFANLNFKLSN

SEQ ID NO: 4223 - protein, 506 aa, Artificial
  Synthetic
LIKSSFCLNGHQKNTYHYARKLEKAQNSKKWYIVGKFLNSRSLNLMAGSMRSYIQYVNDIKRRADGIGNELHVIAQNLDVVDKWVQVIEVCLLLSSRVSNEFEDYFYDKDDYAAYLKSYVDFDNSDMPSEYSALVEFSDQGKVDLYVDPSNPKVNRNIVQSKLFAADYILRDIIEPVSKDEIEDFYNQKDEITTCKIKGAELTDEEQKKILKYQKLKNRVELRDVVEYGEIINELLGQLINWSFMRERDLLYFQLGFHYNCLRNDSAKPEEYKNLVLDDVSIKDAILHQIIGMYVNGVAIYAPGKDKNKLESQCVKGRVGGKIGAFCGYSLYLKLAADTLYNAGLEVFEVLPEHEDIINLRNGIDHFKFYLGGYRSIISLYSEVFDRFFTYDMKYQKNVLNLLQNILLRHNVIIEPIFESGIKKIGKDTKPCAKLCISSIKSDSFEYKIKDGTLITDAKDKRYLETIKKLLYYPDIESNVKILLRKDNFNQNKDKKNVNNRKTKNN

SEQ ID NO: 4224 - protein, 726 aa, Artificial
  Synthetic
MLDHLYNNKVSRAAQVPSYNSVMVRKYFPENITSTLKYQKPGYDEDTLEKWYSACYYLLKEIYYNSFLQSDEALALFEESVNNLKGDNKDQELAVKNFRNNYKNIKSSCTSFSQVCQMYMTEYNQQNNQFKKVRSSKDSIVDKPIYQHYKLLLKKVIANAFASYLQHNEELFGFIGKPLKVNCLKEIDKEQFLPEWTSKKYVSLCEEVRKSPELQKWYIVGKFLNSRSLNLMAGSMRSYIQYVNDIKRRADGIGNELHVIAQNLDVVNKWVQVIEVCLLLSSRVSNEFEDYFYDKDDYAAYLKSYVDFDNSDMPSEYSALVEFSDQGKVDLYVDPSNPKVNRNIVQSKLFAADYILRDIIEPVSKDEIEDFYNQKDEITTCKIKGAELTDEEQKKILKYQKLKNRVELRDVVEYGEIINELLGQLINWSFMRERDLLYFQLGFHYNCLRNDSAKPEEYKNLVLDDISIKDAILHQIIGVYVNGVAIYAPGKDKNKLESQCVKGRVGGKIGAFCGYSLYLKLAADTLYNAGLEVFEVLPEHEDIINLRNGIDHFKFYLGGYRSIISLYSEVFDRFFTYDMKYQKNVLNLLQNILLRHNVIIEPIFESGIKKIGKDTKPCAKLSIRSIISDSFEYKIKDGNLIADAKDKRYLETIKKILFYPEVEPEVRILSSKDSFEQNNQYGYMKEKSENNKNKKNKKNNGNRDEKKNSDGLTYNPFLNLPFELPE

SEQ ID NO: 4225 - protein, 888 aa, Artificial
  Synthetic
MIKAQEALQRELAVNVAFAANNLARAVCDMTNLKDKESDFLIWNKKDIANKLKNKDDMASVSVVLQFFGGKSSWDIDAFREAYKGNKYNYEVCFIDDLRKAVYAARNESFHFKTALVNNDIWNTEFFGKLFIKETEICLDIEKDRFYSNNLPVFYSDNDLKKMLDHLYNNKVSRAAQVPSYNSVMVRKYFPENITSTLKYQKPGYDEDTLEKWYSACYYLLKEIYYNSFLQSDEALALFEESVNNLKGDNKDQELAVKNFRNNYKNIKSSCTSFSQVCQMYMTEYNQQNNQFKKVRSSKDSIVDKPIYQHYKLLLKKVIANAFASYLQHNEELFGFIGKPLKVNCLKEIDKEQFLPEWTSKKYVSLCEEVRKSPELQKWYIVGKFLNSRSLNLMAGSMRSYIQYVNDIKRRADGIGNELHVIAQNLDVVNKWVQVIEVCLLLSSRVSNEFEDYFYDKDDYAAYLKSYVDFDNSDMPSEYSALVEFSDQGKVDLYVDPSNPKVNRNIVQSKLFAADYILRDIIEPVSKDEIEDFYNQKDEITTCKIKGAELTDEEQKKILKYQKLKNRVELRDVVEYGEIINELLGQLINWSFMRERDLLYFQLGFHYNCLRNDSAKPEEYKNLVLDDISIKDAILHQIIGVYVNGVAIYAPGKDKNKLESQCVKGRVGGKIGAFCGYSLYLKLAADTLYNAGLEVFEVLPEHEDIINLRNGIDHFKFYLGGYRSIISLYSEVFDRFFTYDMKYQKNVLNLLQNILLRHNVIIEPIFESGIKKIGKDTKPCAKLSIRSIISDSFEYKIKDGNLIADAKDKRYLETIKKILFYPEVEPEVRILSSKDSFEQNNQYGYMKEKSENNKNKKNKKNNGNRDEKKNSDGLTYNPFLNLPFELPE

SEQ ID NO: 4226 - protein, 704 aa, Artificial
  Synthetic
MVRKYFPENITSTLKYQKPGYDEDTLEKWYSACYYLLKEIYYNSFLQSDEALALFEESVNNLKGDNKDQELAVKNFRNNYKNIKSSCTSFSQVCQMYMTEYNQQNNQFKKVRSSKDSIVDKPIYQHYKLLLKKVIANAFASYLQHNKELFGFIGKPLKVNCLKEIDKEQFLPEWTAKKYVSLCEEVRKSPELQKWYIVGKFLNSRSLNLMAGSMRSYIQYVNDIKRRADGIGNELHVIAQNLDVVDKWVQVIEVCLLLSSRVSNEFEDYFYDKDDYAAYLKSYVDFDNSDMPSEYSALVEFSDQGKVDLYVDPSNPKVNRNIVQSKLFAADYILRDIIEPVSKDEIEDFYNQKDEITICKIKGAELTDEEQKKILKYQKLKNRVELRDVVEYGEIINELLGQLINWSFMRERDLLYFQLGFHYNCLRNDSAKPEEYKNLVLDDISIKDAILHQIIGMYVNGVAIYAPGKDENKLESQCAQGGAGGKIGAFCRYSLYLKLAADTLYNAGLEVFEVLPEHEDIIKLRNGIDHFKFYLGGYRSIMSLYSEVFDRFFTYDMKYQKNVLNLLQNILLRHNVIIEPIFEFGIKKIGKDTKPCAKLCISSIKSDSFEYKIKDGTLITDAKDKRYLETIKKILFYPEVESEVRILSSKDSFEQNNQYGYMKGKSENNKNKKNKKNNGNRDEKKNSDGLTYNPFLNLPFELPE

SEQ ID NO: 4227 - protein, 562 aa, Artificial
  Synthetic
LQHNKELFGFIGKPLKVNCLKEIDKEQFLPEWTAKKYVSLCEEVRKSPELQKWYIVGKFLNSRSLNLMAGSMRSYIQYVNDIKRRADGIGNELHVIAQNLDVVDKWVQVIEVCLLLSSRVSNEFEDYFYDKDDYAAYLKSYVDFDNSDMPSEYSALVEFSDQGKVDLYVDPSNPKVNRNIVQSKLFAADYILRDIIEPVSKDEIEDFYNQKDEITICKIKGAELTDEEQKKILKYQKLKNRVELRDVVEYGEIINELLGQLINWSFMRERDLLYFQLGFHYNCLRNDSAKPEEYKNLVLDDISIKDAILHQIIGMYVNGVAIYAPGKDKNKLESQCVKGRVGGKIGAFCGYSLYLKLAADTLYNAGLEVFEVLPEHEDIINLRNGIDHFKFYLGGYRSIISLYSEIFDRFFTYDMKYQKNVLNLLQNILLRHNVIIEPIFESGIKKIGKDTKLCAKLCISSLKSDSFEYKIKDGTLITDAKDKRYLETIKKILFYPEVESEVRILSSKDSFEQNNQYGYMKGKSENNKNKKNKKNNGNRDEKKNSDGLTYNPFLDLPFELPE

SEQ ID NO: 4228 - protein, 318 aa, Artificial
  Synthetic
MGKLVMNVLVKSSNGITQVSADAKLLSQRKVFIEGEISPETACEFIKKIIVLNAENQEKFIDVLINSPGGEINSGLAMYDVIQSSKAPIRVFCIGRAYSMAKYLGLNEKTLYNAGLEIFEVVAEHEDIINLRNGIDHFKYYLGDYRSMLSIYSEVFDRFFTYDIKYQKNVLNLLQNILLRHNVIVEPILESGFKTIGEQTKPGAKLSIRSIKSDTFQYKVKGGTLITDAKDERYLETIRKILYYAENEEDNLKKSVVVTNADKYEKNKESDDQNKQKEKKNKDNKGKKNEETKSDAEKNNNERLSYNPFANLNFKLSN

SEQ ID NO: 4229 - protein, 786 aa, Artificial
  Synthetic
MKLSKEKHTRSAVANEEQNIGGILYRFPGKSIDGVKDQMLRRDKEVKKLYNVFNQIQVGTKPKKWNNDEKLSPEENERRAQQKNIKIENYKWREACSKYVKSSQKTINYVIFYSYGKAENKLRYMRKNEDILKKMQEEEKLPKFSGGKLEDFVAYTLRKSLVVSKYDTQEFDSVAAMVVFLECIGKSNISDHEKEIVCKLLELIRKDFSKLDPNVKGSQGANIVRSVRNQNMIVQPQGDRFLFPQVYAKENETVTNKNVEKEGLNEFLLNYANLDDEKRAESLRKLRRILDVYFSAPNYYEKDMDITLSDNIEKGKFNVWEKHECGKKVTDLFVDIPDVLMEAGAENIKLDAVVEKRERKVLNDRVRKQNIICYRYTRAVVEKYNSNEPLFFENNAINQYWIHHIENAVERILKNCKAGKLFKLRKGYLAEKVWKDAINLISIKYIALGKAVYNFALDDIWKDKKNKELGIVDERIRNGITSFDYEMIKAHENLQRELAVDIAFSVNNLARAVCDMSNLGNKESDFLLWKRNDIADKLKNKDDMASVSAVLQFFGGKSSWDINIFKEAYKGKKKYNYEVRFIDDLRKAIYCARNENFHFKTALVNDEKWNTELFGKIFKRETEFCLNVEKDRFYSNNLYMFYQVSELRNMLDHLYSRSVSRAAQVPSYNSVIVRTAFPEYITNVLGYQKPGYDADTLGKWYSACYYLLKEIYYNSFLQSDRALQLFEKSVKTLSWDDEEQKRAVDNFKKYFSDIKSACTSLAQVCQIYILDSRKRDEDTTSRIAAN

SEQ ID NO: 4230 - protein, 709 aa, Artificial
  Synthetic
MKLSKEKHTRSAVANEEQNIGGILYRFPGKSIDGVKDQMLRRDKEVKKLYNVFNQIQVGTKPKKWNNDEKLSPEENERRAQQKNIKMKNYKWREACSKYVESSQRIINDVIFYSYRKAKNKLRYMRKNEDILKKMQEAEKLSKFSGGKLEDFVAYTLRKSLVVSKYDTQEFDSVAAMVVFLECIGKNNISDHEREIVCKLLELIRKDFSKLDPNVKGSQGANIVRSVRNQNMIVQPQGDRILFPQVYAKENETVTNKNVEKEGLNEFLLNYANLDDEKRAESLRKLRRILDVYFSAPNHYEKDMDITLSDNIEKEKFNVWEKHECGKKETGLFVDIPDVLMEAEAENIKLDAVVEKRERKVLNDRVRKQNIICYRYTRAVVEKYNSNEPLFFENNAINQYWIHHIENAVERILKNCKAGKLFKLRKGYLAEKVWKDAINLISIKYIALGKAVYNFALDDIWKDKKNKELGIVDERIRNGITSFDYEMIKAHENLQRELAVDIAFSVNNLARAVCDMSNLGNKESDFLLWKRNDIADKLKNKDDMASVSAVLQFFGGKSSWDINIFKDAYKGKKKYNYEVRFIDDLRKAIYCARNENFHFKTALVNDEKWNTELFGKIFERETEFCLNVEKDRFYSNNLYMFYQVSELRNMLDHLYSRSVSRAAQVPSYNSVIVRTAFPEYITNVLGYQKPSYDADTLGKWYSACYYLLK

SEQ ID NO: 4231 - protein, 859 aa, Artificial
  Synthetic
MKLSKEKHTRSAVANEEQNIGGILYRFPGKSIDGVKDQMLRRDKEVKKLYNVFNQIQVGTKPKKWNNDEKLSPEENERRAQQKNIKMKNYKWREACSKYVESSQRIINDVIFYSYRKAKNKLRYMRKNEDILKKMQEAEKLSKFSGGKLEDFVAYTLRKSLVVSKYDTQEFDSVAAMVVFLECIGKNNISDHEREIVCKLLELIRKDFSKLDPNVKGSQGANIVRSVRNQNMIVQPQGDRFLFPQVYAKENETVTNKNVEKEGLNEFLLNYANLDDEKRAESLRKLRRILDVYFSAPNHYEKDMDITLSDNIEKEKFNVWEKHECGKKETGLFVDIPDVLMEAEAENIKLDAVVEKRERKVLNDRVRKQNIICYRYTRAVVEKYNSNEPLFFENNAINQYWIHHIENAVERILKNCKAGKLFKLRKGYLAEKVWKDAINLISIKYIALGKAVYNFALDDIWKDKKNKELGIVDERIRNGITSFDYEMIKAHENLQRELAVDIAFSVNNLARAVCDMSNLGNKESDFLLWKRNDIADKLKNKDDMASVSAVLQFFGGKSSWDINIFKDAYKGKKKYNYEVRFIDDLRKAIYCARNENFHFKTALVNDEKWNTELFGKIFERETEFCLNVEKDRFYSNNLYMFYQVSELRNMLDHLYSRSVSRAAQVPSYNSVIVRTAFPEYITNVLGYQKPSYDADTLGKWYSACYYLLKEIYYNSFLQSDRALQLFEKSVKTLSWDDKKQQRAVDNFKDHFSDIKSACTSLAQVCQIYMTEYNQQNNQIKKVRSSNDSIFDQPVYQHYKVLLKKAIANAFADYLKNNKDLFGFIGKPFKANEIREIDKEQFLPDWTSRKYEALCIEVSG

SEQ ID NO: 4232 - protein, 719 aa, Artificial
  Synthetic
MKLSKEKHTRSAVANEEQNIGGILYRFPGKSIDGVKDQMLRRDKEVKKLYNVFNQIQVGTKPKKWNNDEKLSPEENERRAQQKNIKMKNYKWREACSKYVESSQRIINDVIFYSYRKAKNKLRYMRKNEDILKKMQEAEKLSKFSGGKLEDFVAYTLRKSLVVSKYDTQEFDSVAAMVVFLECIGKNNISDHEREIVCKLLELIRKDFSKLDPNVKGSQGANIVRSVRNQNMIVQPQGDRFLFPQVYAKENETVTNKNVEKEGLNEFLLNYANLDDEKRAESLRKLRRILDVYFSAPNHYEKDMDITLSDNIEKEKFNVWEKHECGKKETGLFVDIPDVLMEAEAENIKLDAVVEKRERKVLNDRVRKQNIICYRYTRAVVEKYNSNEPLFFENNAINQYWIHHIENAVERILKNCKAGKLFKLRKGYLAEKVWKDAINLISIKYIALGKAVYNFALDDIWKDKKNKELGIVDERIRNGITSFDYEMIKAHENLQRELAVDIAFSVNNLARAVCDMSNLGNKESDFLLWKRNDIADKLKNKDDMASVSAVLQFFGGKSSWDINIFKEAYKGKKKYNYEVRFIDDLRKAIYCARNENFHFKTALVNDEKWNTELFGKIFKRETEFCLNVEKDRFYSNNLYMFYQVSELRNMLDHLYSRSVSRAAQVPSYNSVIVRTAFPEYITNVLGYQKPGYDADTLGKWYSACYYLLKEIYYNSFLQS

SEQ ID NO: 4233 - protein, 705 aa, Artificial
  Synthetic
MKLSKEKHTRSAVANEEQNIGGILYRFPGKSIDGVKDQMLRRDKEVKKLYNVFNQIQVGTKPKKWNNDEKLSPEENERRAQQKNIKMKNYKWREACSKYVESSQRIINDVIFYSYRKAKNKLRYMRKNEDILKKMQEAEKLSKFSGGKLEDFVAYTLRKSLVVSKYDTQEFDSVAAMVVFLECIGKNNISDHEREIVCKLLELIRKDFSKLDPNVKGSQGANIVRSVRNQNMIVQPQGDRFLFPQVYAKENETVTNKNVEKEGLNEFLLNYANLDDEKRAESLRKLRRILDVYFSAPNHYEKDMDITLSDNIEKEKFNVWEKHECGKKETGLFVDIPDVLMEAEAENIKLDAVVEKRERKVLNDRVRKQNIICYRYTRAVVEKYNSNEPLFFENNAINQYWIHHIENAVERILKNCKAGKLFKLRKGYLAEKVWKDAINLISIKYIALGKAVYNFALDDIWKDKKNKELGIVDERIRNGITSFDYEMIKAHENLQRELAVDIAFSVNNLARAVCDMSNLGNKESDFLLWKRNDIADKLKNKDDMASVSAVLQFFGGKSSWDINIFKEAYKGKKKYNYEVRFIDDLRKAIYCARNENFHFKTALVNDEKWNTELFGKIFKRETEFCLNVEKDRFYSNNLYMFYQVSELRNMLDHLYSRSVSRAAQVPSYNSVIVRTAFPEYITNVLGYQKPGYDADTLGKWYSACY

SEQ ID NO: 4234 - protein, 711 aa, Artificial
  Synthetic
MKLSKEKHTRSAVANEEQNIGGILYRFPGKSIDGVKDQMLRRDKEVKKLYNVFNQIQVGTKPKKWNNDEKLSPEENERRAQQKNIKMKNYKWREACSKYVESSQRIINDVIFYSYRKAKNKLRYMRKNEDILKKMQEAEKLSKFSGGKLEDFVAYTLRKSLVVSKYDTQEFDSVAAMVVFLECIGKNNISDHEREIVCKLLELIRKDFSKLDPNVKGSQGANIVRSVRNQNMIVQPQGDRFLFPQVYAKENETVTNKNVEKEGLNEFLLNYANLDDEKRAESLRKLRRILDVYFSAPNHYEKDMDITLSDNIEKEKFNVWEKHECGKKETGLFVDIPDVLMEAEAENIKLDAVVEKRERKVLNDRVRKQNIICYRYTRAVVEKYNSNEPLFFENNAINQYWIHHIENAVERILKNCKAGKLFKLRKGYLAEKVWKDAINLISIKYIALGKAVYNFALDDIWKDKKNKELGIVDERIRNGITSFDYEMIKAHENLQRELAVDIAFSVNNLARAVCDMSNLGNKESDFLLWKRNDIADKLKNKDDMASVSAVLQFFGGKSSWDINIFKEAYKGKKKYNYEVRFIDDLRKAIYCARNENFHFKTALVNDEKWNTELFGKIFKRETEFCLNVEKDRFYSNNLYMFYQVSELRNMLDHLYSRSVSRAAQVPSYNSVIVRTAFPEYITNVLGYQKPGYDADTLGKWYSACYYLLKEI

SEQ ID NO: 4235 - protein, 718 aa, Artificial
  Synthetic
MKLSKEKHTRSAVANNGDIKSAEVNNGNTKSEEVNNGDTRSAVANEEQNIGGILYRFPGKSIDGVKDQMLRRDKEVKKLYNVFNQIQVGTKPKKWNNDEKLSPEENERRAQQKNIKMKNYKWREACSKYVESSQRIINDVIFYSYRKAKNKLRYMRKNEDILKKMQEAEKLSKFSGGKLEDFVAYTLRKSLVVSKYDTQEFDSVAAMVVFLECIGKNNISDHEREIVCKLLELIRKDFSKLDPNVKGSQGANIVRSVRNQNMIVQPQGDRILFPQVYAKENETVTNKNVEKEGLNEFLLNYANLDDEKRAESLRKLRRILDVYFSAPNHYEKDMDITLSDNIEKEKFNVWEKHECGKKETGLFVDIPDVLMEAEAENIKLDAVVEKRERKVLNDRVRKQNIICYRYTRAVVEKYNSNEPLFFENNAINQYWIHHIENAVERILKNCKAGKLFKLRKGYLAEKVWKDAINLISIKYIALGKAVYNFALDDIWKDKKNKELGIVDERIRNGITSFDYEMIKAHENLQRELAVDIAFSVNNLARAVCDMSNLGNKESDFLLWKRNDIADKLKNKDDMASVSAVLQFFGGKSSWDINIFKDAYKGKKKYNYEVRFIDDLRKAIYCARNENFHFKTALVNDEKWNTELFGKIFERETEFCLNVEKDRFYSNNLYMFYQVSELRNMLDHLYSRSVSRAAQVPSYNSVIVRTAFPEYITNVLGYQ

SEQ ID NO: 4236 - protein, 747 aa, Artificial
  Synthetic
MKLSKEKHTRSAVANNGDIKSAEVNNGNTKSEEVNNGDTRSAVANEEQNIGGILYRFPGKSIDGVKDQMLRRDKEVKKLYNVFNQIQVGTKPKKWNNDEKLSPEENERRAQQKNIKMKNYKWREACSKYVESSQRIINDVIFYSYRKAKNKLRYMRKNEDILKKMQEAEKLSKFSGGKLEDFVAYTLRKSLVVSKYDTQEFDSVAAMVVFLECIGKNNISDHEREIVCKLLELIRKDFSKLDPNVKGSQGANIVRSVRNQNMIVQPQGDRFLFPQVYAKENETVTNKNVEKEGLNEFLLNYANLDDEKRAESLRKLRRILDVYFSAPNHYEKDMDITLSDNIEKEKFNVWEKHECGKKETGLFVDIPDVLMEAEAENIKLDAVVEKRERKVLNDRVRKQNIICYRYTRAVVEKYNSNEPLFFENNAINQYWIHHIENAVERILKNCKAGKLFKLRKGYLAEKVWKDAINLISIKYIALGKAVYNFALDDIWKDKKNKELGIVDERIRNGITSFDYEMIKAHENLQRELAVDIAFSVNNLARAVCDMSNLGNKESDFLLWKRNDIADKLKNKDDMASVSAVLQFFGGKSSWDINIFKDAYKGKKKYNYEVRFIDDLRKAIYCARNENFHFKTALVNDEKWNTELFGKIFERETEFCLNVEKDRFYSNNLYMFYQVSELRNMLDHLYSRSVSRAAQVPSYNSVIVRTAFPEYITNVLGYQKPGYDADTLGKWYSACSVSYTHLTLPTIA

SEQ ID NO: 4237 - protein, 750 aa, Artificial
  Synthetic
MKLSKEKHTRSAVANNGDIKSAEVNNGNTKSEEVNNGDTRSAVANEEQNIGGILYRFPGKSIDGVKDQMLRRDKEVKKLYNVFNQIQVGTKPKKWNNDEKLSPEENERRAQQKNIKMKNYKWREACSKYVESSQRIINDVIFYSYRKAKNKLRYMRKNEDILKKMQEAEKLSKFSGGKLEDFVAYTLRKSLVVSKYDTQEFDSVAAMVVFLECIGKNNISDHEREIVCKLLELIRKDFSKLDPNVKGSQGANIVRSVRNQNMIVQPQGDRFLFPQVYAKENETVTNKNVEKEGLNEFLLNYANLDDEKRAESLRKLRRILDVYFSAPNHYEKDMDITLSDNIEKEKFNVWEKHECGKKETGLFVDIPDVLMEAEAENIKLDAVVEKRERKVLNDRVRKQNIICYRYTRAVVEKYNSNEPLFFENNAINQYWIHHIENAVERILKNCKAGKLFKLRKGYLAEKVWKDAINLISIKYIALGKAVYNFALDDIWKDKKNKELGIVDERIRNGITSFDYEMIKAHENLQRELAVDIAFSVNNLARAVCDMSNLGNKESDFLLWKRNDIADKLKNKDDMASVSAVLQFFGGKSSWDINIFKDAYKGKKKYNYEVRFIDDLRKAIYCARNENFHFKTALVNDEKWNTELFGKIFERETEFCLNVEKDRFYSNNLYMFYQVSELRNMLDHLYSRSVSRAAQVPSYNSVIVRTAFPEYITNVLGYQKPGYDADTLGKWYSACYYLLKEIYYNSFLQSD

SEQ ID NO: 4238 - protein, 768 aa, Artificial
  Synthetic
MKLSKEKHTRSAVANNGDIKSAEVNNGNTKSEEVNNGDTRSAVANEEQNIGGILYRFPGKSIDGVKDQMLRRDKEVKKLYNVFNQIQVGTKPKKWNNDEKLSPEENERRAQQKNIKMKNYKWREACSKYVESSQRIINDVIFYSYRKAKNKLRYMRKNEDILKKMQEAEKLSKFSGGKLEDFVAYTLRKSLVVSKYDTQEFDSVAAMVVFLECIGKNNISDHEREIVCKLLELIRKDFSKLDPNVKGSQGANIVRSVRNQNMIVQPQGDRFLFPQVYAKENETVTNKNVEKEGLNEFLLNYANLDDEKRAESLRKLRRILDVYFSAPNHYEKDMDITLSDNIEKEKFNVWEKHECGKKETGLFVDIPDVLMEAEAENIKLDAVVEKRERKVLNDRVRKQNIICYRYTRAVVEKYNSNEPLFFENNAINQYWIHHIENAVERILKNCKAGKLFKLRKGYLAEKVWKDAINLISIKYIALGKAVYNFALDDIWKDKKNKELGIVDERIRNGITSFDYEMIKAHENLQRELAVDIAFSVNNLARAVCDMSNLGNKESDFLLWKRNDIADKLKNKDDMASVSAVLQFFGGKSSWDINIFKDAYKGKKKYNYEVRFIDDLRKAIYCARNENFHFKTALVNDEKWNTELFGKIFERETEFCLNVEKDRFYSNNLYMFYQVSELRNMLDHLYSRSVSRAAQVPSYNSVIVRTAFPEYITNVLGYQKPGYDADTLGKWYSACYYLLKEIYYNSFLQSDRACLLYTSPSPRDGLLSR

SEQ ID NO: 4239 - protein, 771 aa, Artificial
  Synthetic
MKLSKEKHTRSAVANNGDIKSAEVNNGNTKSEEVNNGDTRSAVANEEQNIGGILYRFPGKSIDGVKDQMLRRDKEVKKLYNVFNQIQVGTKPKKWNNDEKLSPEENERRAQQKNIKMKNYKWREACSKYVESSQRIINDVIFYSYRKAKNKLRYMRKNEDILKKMQEAEKLSKFSGGKLEDFVAYTLRKSLVVSKYDTQEFDSVAAMVVFLECIGKNNISDHEREIVCKLLELIRKDFSKLDPNVKGSQGANIVRSVRNQNMIVQPQGDRFLFPQVYAKENETVTNKNVEKEGLNEFLLNYANLDDEKRAESLRKLRRILDVYFSAPNHYEKDMDITLSDNIEKEKFNVWEKHECGKKETGLFVDIPDVLMEAEAENIKLDAVVEKRERKVLNDRVRKQNIICYRYTRAVVEKYNSNEPLFFENNAINQYWIHHIENAVERILKNCKAGKLFKLRKGYLAEKVWKDAINLISIKYIALGKAVYNFALDDIWKDKKNKELGIVDERIRNGITSFDYEMIKAHENLQRELAVDIAFSVNNLARAVCDMSNLGNKESDFLLWKRNDIADKLKNKDDMASVSAVLQFFGGKSSWDINIFKDAYKGKKKYNYEVRFIDDLRKAIYCARNENFHFKTALVNDEKWNTELFGKIFERETEFCLNVEKDRFYSNNLYMFYQVSELRNMLDHLYSRSVSRAAQVPSYNSVIVRTAFPEYITNVLGYQKPSYDADTLGKWYSACYYLLKEIYYNSFLQSDRALQLFEKSVKTLSWDDKKQQ

SEQ ID NO: 4240 - protein, 728 aa, Artificial
  Synthetic
MKLSKEKHTRSAVANNGDIKSAEVNNGNTKSEEVNNGDIRSAVANEEQNIGGILYRFPGKSIDGVKDQMLRRDKEVKKLYNVFNQIQVGTKPKKWNNDEKLSPEENERRAQQKNIKMKNYKWREACSKYVESSQRIINDVIFYSYRKAENKLRYMRKNEDILKKMQEAEKLSKFSGGKLEDFVAYTLRKSLVVSKYDTQEFDSVAAMVVFLECIGKNNISDHEREIVCKLLELIRKDFSKLDPNVKGSQGANIVRSVRNQNMIVQPQGDRFLFPQVYAKENETVTNKNVEKEGLNEFLLNYANLDDEKRAESLRKLRRILDVYFSAPNHYEKDMDITLSDNIEKEKFNVWEKHECGKKETGLFVDIPDVLMEAEAENIKLDAVVEKRERKVLNDRVRKQNIICYRYTRAVVEKYNSNEPLFFENNAINQYWIHHIENAVERILKNCKAGKLFKLRKGYLAEKVWKDAINLISIKYIALGKAVYNFALDDIWKDKKNKELGIVDERIRNGITSFDYEMIKAHENLQRELAVDIAFSVNNLARAVCDMSNLGNKESDFLLWKRNDIADKLKNKDDMASVSAVLQFFGGKSSWDINIFKEAYKGKKKYNYEVRFIDDLRKAIYCARNENFHFKTALVNDEKWNTELFGKIFERETEFCLNVEKDRFYSNNLYMFYQVSELRNMLDHLYSRSVSRAAQVPSYNSVIVRTAFPEYITNVLGYQKPGYDADTLG

SEQ ID NO: 4241 - protein, 733 aa, Artificial
  Synthetic
MKLSKEKHTRSAVANNGDIKSAEVNNGNTKSEEVNNGDIRSAVANEEQNIGGILYRFPGKSIDGVKDQMLRRDKEVKKLYNVFNQIQVGTKLKKWNNDEKLSPEENERRAQQKNIKMKNYKWREACSKYVESSQRIINDVIFYSYRKAKNKLRYMRKNEDILKKMQEAEKLSKFSGGKLEDFVAYTLRKSLVVSKYDTQEFDSVAAMVVFLECIGKNNISDHEREIVCKLLELIRKDFSKLDPNVKGSQGANIVRSVRNQNMIVQPQGDRFLFPQVYAKENETVTNKNVEKEGLNEFLLNYANLDDEKRAESLRKLRRILDVYFSAPNHYEKDMDITLSDNIEKEKFNVWEKHECGKKETGLFVDIPDVLMEAEAENIKLDAVVEKRERKVLNDRVRKQNIICYRYTRAVVEKYNSNEPLFFENNAINQYWIHHIENAVERILKNCKAGKLFKLRKGYLAEKVWKDAINLISIKYIALGKAVYNFALDDIWKDKKNKELGIVDERIRNGITSFDYEMIKAHENLQRELAVDIAFSVNNLARAVCDMSNLGNKESDFLLWKRNDIADKLKNKDDMASVSAVLQFFGGKSSWDINIFKEAYKGKKKYNYEVRFIDDLRKAIYCARNENFHFKTALVNDEKWNTELFGKIFERETEFCLNVEKDRFYSNNLYMFYQVSELRNMLDHLYSRSVSRAAQVPSYNSVIVRTAFPEYITNVLGYQKPGYDADTLGKWYSA

SEQ ID NO: 4242 - protein, 897 aa, Artificial
  Synthetic
MKLSKEKHTRSAVANEEQNIGGILYRFPGKSIDGVKDQMLRRDKEVKKLYNVFNQIQVGTKPKKWNNDEKLSPEENERRAQQKNIKIENYKWREACSKYVKSSQKTINYVIFYSYGNAENKLRYMRKNEDILKKMQEEEKLPKFSGGKLEDFVAYTLRKSLVVSKYDTQEFDSVAAMVVFLECIGKNNISDHEREIVCKLLELIRKDFSKLDPNVKGSQGANIVRSVRNQNMIVQPQGDRFLFPQVYAKENETVTNKNVEKEGLNEFLLNYANLDDEKRAESLRKLRRILDVYFSAPNHYEKDMDITLSDNIEKEKFNVLEKHECGKKETGLFVDIPDVLMEAEAENIKLDAVVEKRERKVLNDRVRKQNIICYRYTRAVVEKYNSNEPLFFENNAINQYWIHHIENAVERILKNCKAGKLFKLRKGYLAEKVWKDAINLISIKYIALGKAVYNFALDDIWKDKKNKELGIVDERIRNGITSFDYEMIKAHENLQRELAVDIAFSVNNLARAVCDMSNLGNKESDFLLWKRNDIADKLKNKDDMASVSAVLQFFGGKSSWDINIFKEAYKGKKKYNYEVRFIDDLRKAIYCARNENFHFKTALVNDEKWNTELFGKIFKRETEFCLNVEKDRFYSNNLYMFYQVSELRNMLDHLYSRSVSRAAQVPSYNSVIVRTAFPEYITNVLGYQKPGYDADTLGKWYSACYYLLKEIYYNSFLQSDRALQLFEKSVKTLSWDDKKQQRAVDNFKDHFSDIKSACTSLAQVCQIYMTEYNQQNNQIKKVRSSNDSIFDQPIYQHYKVLLKKAIANAFADYLKNNKDLFGFIGKPFKANEIREIDKEQFLPDWTSRKYEALCIEVSGSQELQKWYIVGKFLNAMSLNLMVGSMRSYIQYVTDIKR

SEQ ID NO: 4243 - protein, 775 aa, Artificial
  Synthetic
MKLSKEKYTRSAVANNGDIKSAEVNNGNTKSEEVNNEYIRSAVANEKQNIGGVLYHAHGTDTIDLQDQMLRRDKEVKKLYNVFNQIQVGTKPKKWNNDEKLSPEENERRAQQKNIKMKNYKWREACSKYVESSQRIINDVIFYSYRKAENKLRYMRKNEDILKKMQEAEKLSKFSGGKLEDFVAYTLRKSLVVSKYDTQEFDSVAAMVVFLECIGKNNISDHEREIVCKLLELIRKDFSKLDPNVKGSQGANIVRSVRNQNMIVQPQGDRFLFPQVYAKENETVTNKNVEKEGLNEFLLNYANLDDEKRAESLRKLRRILDVYFSAPNHYEKDMDITLSDNIEKGKFNVWEKHECGKKVTDLFVDIPDVLMEAEAENIKLDAVVEKRERKVLTDRVRRQNIICYRYTRAVIEKYNSNEPLFFENNAINQYWIHHIENAVERILKNCKAGKLFKLRKGYLAEKVWKDAINLISIKYIALGKAVYNFALDDIWKDKENKELGIVDERIRNGITSFDYEMIKAHENLQRELAVDIAFSVNNLARAVCDMSNLGNKESDFLLWKRNDIADKLKNKDDMASVSAVLQFFGGKSSWDINIFKEAYKGKKKYNYEVRFIDDLRKAIYCARNENFHFKTALVNDEKWNTELFGKIFERETEFCLNVEKDRFYSNNLYMFYQVSELRNMLDHLYSRSVSRAAQVPSYNSVIVRTAFPEYITNVLGYQKPGYDADTLGKWYSACYYLLKEIYYNSFLQSDRALQLFEKSVKTLSWDDKKQQRAVY

SEQ ID NO: 4244 - protein, 787 aa, Artificial
  Synthetic
MKLSKEKYTRSAVANNGDIKSAEVNNGNTKSEEVNNEYIRSAVANEKQNIGGVLYHAHGTDTIDLQDQMLRRDKEVKKLYNVFNQIQVGTKPKKWNNDEKLSPEENERRAQQKNIKMKNYKWREACSKYVESSQRIINDVIFYSYRKAENKLRYMRKNEDILKKMQEAEKLSKFSGGKLEDFVAYTLRKSLVVSKYDTQEFDSVAAMVVFLECIGKNNISDHEREIVCKLLELIRKDFSKLDPNVKGSQGANIVRSVRNQNMIVQPQGDRFLFPQVYAKENETVTNKNVEKEGLNEFLLNYANLDDEKRAESLRKLRRILDVYFSAPNHYEKDMDITLSDNIEKGKFNVWEKHECGKKVTDLFVDIPDVLMEAEAENIKLDAVVEKRERKVLTDRVRRQNIICYRYTRAVIEKYNSNEPLFFENNAINQYWIHHIENAVERILKNCKAGKLFKLRKGYLAEKVWKDAINLISIKYIALGKAVYNFALDDIWKDKENKELGIVDERIRNGITSFDYEMIKAHENLQRELAVDIAFSVNNLARAVCDMSNLGNKESDFLLWKRNDIADKLKNKDDMASVSAVLQFFGGKSSWDINIFKEAYKGKKKYNYEVRFIDDLRKAIYCARNENFHFKTALVNDEKWNTELFGKIFERETEFCLNVEKDRFYSNNLYMFYQVSELRNMLDHLYSRSVSRAAQVPSYNSVIVRTAFPEYITNVLGYQKPGYDADTLGKWYSACYYLLKEIYYNSFLQSDRALQLFEKSVKTLSWDDKKQQRAVYKIVDTVSDAKLY

SEQ ID NO: 4245 - protein, 708 aa, Artificial
  Synthetic
MKLSKEKHIRSAVANEEQNIGGVLYHVLGTDTIGLKDQMLIRDRDVKQLYNVFNQIQVGDKPKKWKNDEKLSPEENERRAQQKNIKMKNYKWREACSKYVESSQRTINDVLFYSYMEADKKIRNMRKNEDILIKMQEVTKLPKFSGGKLEDFVAYTLRKSLVVSKNSTQEFDSVAAMVVFLECIGKSNISDHEKEIVCKLLELIRKDFSKLDPNVEGSQGANIVRSVRNQNMIVQPQGDRFSFPQVSDKEKKTVTNKNVEKEGLNEFLLNYANLDDEKRAEILRKLRRILDVYFSAPNHYEKDMDITLSDNIDKEKFNVWKKYECGKKVTDLFVDIPDVLMEAEAENIKLDAVVEKRERKVLADRVRRQNIICYRYTRAVVEKYNSNESLFFENDAINQYWIHHIENAVERILKNCKAGKLFKLRMGYLAEKVWKDAINLISIKYIALGKAVYNFALDDIWKDKKDKELGIVDERIRNGITSFDYEMIKAYENLQRELSVDIAFSVNNLARAVCDMSNLKDRESDFLLWKKEDIADKLKNKDDMASVSAVLQFFGGKSSWDINIFKEAYKGKNKYNYEVRFIDDLRKAIYCARNENFHFKTALVNNEKWNTELFGKIFERETEFCLNVEKDRFYSNNLYMFYPVSELRNMLDQLYSRSVSRAAQVPSYNSVFIRKNFPEDITNVLRYQKPGYDADTLDKWYSACYYLL

SEQ ID NO: 4246 - protein, 708 aa, Artificial; identical to SEQ ID NO: 4245
  Synthetic

SEQ ID NO: 4247 - protein, 674 aa, Artificial
  Synthetic
MKLSKEKHIRSAVANEEQNIGGVLYHVLGTDTIGLKDQMLIRDRDVKQLYNVFNQIQVGDKPKKWKNDEKLSPEENERRAQQKNIKMKNYKWREACSKYVESSQRTINDVLFYSYMEADKKIRNMRKNEDILIKMQEVTKLPKFSGGKLEDFVAYTLRKSLVVSKNSTQEFDSVAAMVVFLECIGKSNISDHEKEIVCKLLELIRKDFSKLDPNVEGSQGANIVRSVRNQNMIVQPQGDRFSFPQVSDKEKKTVTNKNVEKEGLNEFLLNYANLDDEKRAEILRKLRRILDVYFSAPNHYEKDMDITLSDNIDKEKFNVWKKYECGKKVTDLFVDIPDVLMEAEAENIKLDAVVEKRERKVLADRVRRQNIICYRYTRAVVEKYNSNESLFFENDAINQYWIHHIENAVERILKNCKAGKLFKLRMGYLAEKVWKDAINLISIKYIALGKAVYNFALDDIWKDKKDKELGIVDERIRNGITSFDYEMIKAYENLQRELSVDIAFSVNNLARAVCDMSNLKDRESDFLLWKKEDIADKLKNKDDMASVSAVLQFFGGKSSWDINIFKEAYKGKNKYNYEVRFIDDLRKAIYCARNENFHFKTALVNNEKWNTELFGKIFERETEFCLNVEKDRFYSNNLYMFYPVSELRNMLDQLYSRSVSRAAQVPSYNSVFIR

SEQ ID NO: 4248 - protein, 674 aa, Artificial; identical to SEQ ID NO: 4247
  Synthetic

SEQ ID NO: 4249 - protein, 728 aa, Artificial
  Synthetic
MKLSKEKHIRSAVANEEQNIGGVLYHVPGTDTIDLKDQMLIRDRDVKQLYKVFNQIQVGNKPKKWKKDEKLSPEENERRAQQKNIKMKNYKWREACSEYVESSQRTINDVLFYSYMEADKKIRNMRKNEDILKKMQEVTKLPKFSGGKLEDFVAYTLRKSLVVSKNSTQEFDSVAAMVVFLECIGKSNISDHEKEIVYKLLELIRKDFSKLDPNVKDSQGANIVRSVRNQNMIVQPQGDRFLFPQVSDKEKKTVTNKNVEKEGLNEFLLNYANLDDEKRAEILRKLRRILDVYFSAPNHYEKDMEITLSDNIDKEKFNVWKKYECGKKVTGLFVNIPDVLMEAEAENIKLDAVVEKRERKILADRVRRQNIICYRYTRAVVEKYNSNESLFFENDAINQYWIHHIENAVERILKNCKAGKLFKLRKGYLAEKVWKDAINLISIKYIALGKAVYNFALDDIWKDKKDKELGIVDERIRNGITSFDYEMIKAYENLQRELAVDIAFSVNNLARAVCDMSNLKDRESDFLLWKKEDIADKLKNKDDMASVSAVLQFFGGKSSWDINIFKEAYKGKNKYNYEVRFIDDLRKAIYCARNENFHFKTALVNNEKWNTELFGKIFERETEFCLNVEKDRFYSNNLYMFYPVSELRNMLDQLYSRSVSRAAQVPSYNSVFIRKNFPEDITNVLRYQKPGYDADTLGKWYSACYYLLKEIYYNSFLQSDKALQLFEK

SEQ ID NO: 4250 - protein, 716 aa, Artificial
  Synthetic
MKLSKEKHIRSAVANEEQNIGGVLYHVPGTDTIDLKDQMLIRDRDVKQLYKVFNQIQVGNKPKKWKKDEKLSPEENERRAQQKNIKMKNYKWREACSEYVESSQRTINDVLFYSYMEADKKIRNMRKNEDILKKMQEVTKLPKFSGGKLEDFVAYTLRKSLVVSKNSTQEFDSVAAMVVFLECIGKSNISDHEKEIVYKLLELIRKDFSKLDPNVKDSQGANIVRSVRNQNMIVQPQGDRFLFPQVSDKEKKTVTNKNVEKEGLNEFLLNYANLDDEKRAEILRKLRRILDVYFSAPNHYEKDMEITLSDNIDKEKFNVWKKYECGKKVTGLFVNIPDVLMEAEAENIKLDAVVEKRERKILADRVRRQNIICYRYTRAVVEKYNSNESLFFENDAINQYWIHHIENAVERILKNCKAGKLFKLRKGYLAEKVWKDAINLISIKYIALGKAVYNFALDDIWKDKKDKELGIVDERIRNGITSFDYEMIKAYENLQRELAVDIAFSVNNLARAVCDMSNLKDRESDFLLWKKEDIADKLKNKDDMASVSAVLQFFGGKSSWDINIFKEAYKGKNKYNYEVRFIDDLRKAIYCARNENFHFKTALVNNEKWNTELFGKIFERETEFCLNVEKDRFYSNNLYMFYPVSELRNMLDQLYSRSVSRAAQVPSYNSVFIRKNFPEDITNVLRYQKPGYDADTLGKWYSACYYLLKEIYYNSL

SEQ ID NO: 4251 - protein, 554 aa, Artificial
  Synthetic
MKLSKEKHIRSAVANEEQNIGGVLYHVPGTDTIDLKDQMLIRDRDVKQLYKVFNQIQVGNKPKKWKKDEKLSPEENERRAQQKNIKMKNYKWREACSEYVESSQRTINDVLFYSYMEADKKIRNMRKNEDILKKMQEVTKLPKFSGGKLEDFVAYTLRKSLVVSKNSTQEFDSVAAMVVFLECIGKSNISDHEKEIVYKLLELIRKDFSKLDPNVKDSQGANIVRSVRNQNMIVQPQGDRFLFPQVSDKEKKTVTNKNVEKEGLNEFLLNYANLDDEKRAEILRKLRRILDVYFSAPNHYEKDMEITLSDNIDKEKFNVWKKYECGKKVTGLFVNIPDVLMEAEAENIKLDAVVEKRERKILADRVRRQNIICYRYTRAVVEKYNSNESLFFENDAINQYWIHHIENAVERILKNCKAGKLFKLRKGYLAEKVWKDAINLISIKYIALGKAVYNFALDDIWKDKKDKELGIVDERIRNGITSFDYEMIKAYENLQRELAVDIAFSVNNLARAVCDMSNLKDRESDFLLWKKEDIADKLKNKDDMVSVAASLPVE

SEQ ID NO: 4252 - protein, 774 aa, Artificial
  Synthetic
MKLSKEKQIRSAVANKEKNTEGVLYRFPGDDIGGVQAQMLVRDRDVKQLYNVFNQIQLGNKPKEWMNDEKLSPEENERRAQQKNIKMKNYKWRKACSKYVESSQRAINDILFYSYKEADKKIRNMSKNEDILIKMQNAEKLSKFSSGKLEDFVAYTLRKSLVVSKYGNQEFDSIAAMVVFLECIGKSNISDHEKEIVYKLLDLIRKDFSKLDPSIQDSQGANIVRSIRNQNMIVQPQGDRFSFPQVSDEEKKTVTNKNVEKDGLNEFMLNYANLDEEKRAEVLRKLRRILDVYFSAPSHYEKDMDITLSDNVNKGKFYVWKKHECGKKENGLFVDIPDVLVEAEAESIKLDAVVEKRERKVLADRVRRQNIICYRYTRAVVEKYNSNEPIFFENDTINQYWIHHIENAVERILKNCKTGTLFKLRKGYLAEKVWKDAINLISIKYIALGKAVYNFALDDIWKDKKDKKLGIVDERIRNGITSFDYEMIKAHENLQRELAVNIAFSVNNLARAVCDMSNLGDKESDFLLWKRNDIADKLKNKDDMASVSAVLQFFGGKSSWDINIFKEAYKGKKKYNYEVQFIDDLRKAIYCARNENFHFKTALVNNEKWNTELFGKIFERETEFCLNVEKDRFYSNNLYMFYPVSELRNMLDHLYSRSVSRAAQVPSYNSVLVRTVFPEYITNVLRYQKPGYDADTLGKWYNACYYLLKEIYYNSFLQSDKALQLFEKSVRTLRWDDKKQQRAVDNFKNHFSDIKSACTSLAQVCQIYMTEYNQ

SEQ ID NO: 4253 - protein, 663 aa, Artificial
  Synthetic
LKWRKNMKLSKVTYRVKDKNAKYKKEYNVRAAVANNSENAGGVLYHVPGVDLIDLREQMLDRDRSVRLLYNIFNHIQTGTKPKKWGNDETLSVDENERKAKEQNIKIMNYKWREACSEYIEKSQSTINSVLFYSYEESGYKTKRMNDNEAIIVKMQYENRLSHFTGGKLEDFVAYTLRNSLVVSRYDNQEFDSVNAMVVFINNIGNGNISDKDKKTICKLADLIRNDFSKLNPNVQSSQGANMVRSVRNQNMVVQPQGDKVSFPLVSDEGKNTVTNKNVEKKGLNEFLLNYANLDDEERMEKLRKLRRIIDVYFSSPSHYQKDMDISLSDNIDKTKFDVWKKHETGKKNTELFVDIPDELLTAETEKIKLDAVLEKKARKRLTDSIRKQNMICYRYTRAVVEKYNSTENLFFENDSINQYWIHHIENAVERILKSCKAETLFKLRRGYLTEKVWKDAINLISIKYIALGKVIYNFTVDDIWKDKKVKNLGSIDEKIKHGITSFDYEMIKAQEALQRELAVNVAFAANNLARAVCDMTNLKDKESDFLIWNKKDIANKLKNKDDMASVSVVLQFFGGKSSWDIDAFREAYKGNKYNYEVCFIDDLRKAVYAARNESFHFKTALVNNDIWNTEFFGKLFIKETEICLDIEKDRFYSNNLPVFYSD

SEQ ID NO: 4254 - protein, 649 aa, Artificial
  Synthetic
MKLSKVTYRVKDKNAKYKKEYNVRAAVANNSENAGGVLYHVPGVDLIDLREQMLDRDRSVRLLYNIFNHIQTGTKPKKWGNDETLSVDENERKAKEQNIKIMNYKWREACSEYIEKSQSTINSVLFYSYEESGYKTKRMNDNEAIIVKMQYENRLSHFTGGKLEDFVAYTLRNSLVVSRYDNQEFDSVNAMVVFINNIGNGNISDKDKKTICKLADLIRNDFSKLNPNVQSSQGANMVRSVRNQNMVVQPQGDKVSFPLVSDEGKNTVTNKNVEKKGLNEFLLNYANLDDEERMEKLRKLRRIIDVYFSSPSHYQKDMDISLSDNIDKTKFDVWKKHETGKKNTELFVDIPDELLTAETEKIKLDAVLEKKARKRLTDSIRKQNMICYRYTRAVVEKYNSTENLFFENDSINQYWIHHIENAVERILKSCKAETLFKLRRGYLTEKVWKDAINLISIKYIALGKVIYNFTVDDIWKDKKVKNLGSIDEKIKHGITSFDYEMIKAQEALQRELAVNVAFAANNLARAVCDMTNLKDKESDFLIWNKKDIANKLKNKDDMASVSVVLQFFGGKSSWDIDAFREAYKGNKYNYEVCFIDDLRKAVYAARNESFHFKTALVNNDIWNTEFFGKLFIKETEICLDIEKDRFYSN

SEQ ID NO: 4255 - protein, 761 aa, Artificial
  Synthetic
LKWRKNMKLSKVTYRVKDKNAKYKKEYNVRAAVANNSENAGGVLYHVPGVDLIDLREQMLDRDRSVRLLYNIFNHIQTGTKPKKWGNDETLSVDENERKAKEQNIKIMNYKWREACSEYIEKSQSTINSVLFYSYEESGYKTKRMNDNEAIIVKMQYENRLSHFTGGKLEDFVAYTLRNSLVVSRYDNQEFDSVNAMVVFINNIGNGNISDKDKKTICKLADLIRNDFSKLNPNVQSSQGANMVRSVRNQNMVVQPQGDKVSFPLVSDEGKNTVTNKNVEKKGLNEFLLNYANLDDEERMEKLRKLRRIIDVYFSSPSHYQKDMDISLSDNIDKTKFDVWKKHETGKKNTELFVDIPDELLTAETEKIKLDAVLEKKARKRLTDSIRKQNMICYRYTRAVVEKYNSTENLFFENDSINQYWIHHIENAVERILKSCKAETLFKLRRGYLTEKVWKDAINLISIKYIALGKVIYNFTVDDIWKDKKVKNLGSIDEKIKHGITSFDYEMIKAQEALQRELAVNVAFAANNLARAVCDMTNLKDKESDFLIWNKKDIANKLKNKDDMASVSVVLQFFGGKSSWDIDAFREAYKGNKYNYEVCFIDDLRKAVYAARNESFHFKTALVNNDIWNTEFFGKLFIKETEICLDIEKDRFYSNNLPVFYSDNDLKKMLDHLYNNKVSRAAQVPSYNSVMVRKYFPENITSTLKYQKPGYDEDTLEKWYSACYYLLKEIYYNSFLQSDEALALFEESVNNLKGDNKDQEL

SEQ ID NO: 4256 - protein, 653 aa, Artificial
  Synthetic
LKWRKNMKLSKVTYRVKDKNAKYKKEYNVRAAVANNSENAGGVLYHVPGVDLIDLREQMLDRDRSVRLLYNIFNHIQTGTKPKKWGNDETLSVDENERKAKEQNIKIMNYKWREACSEYIEKSQSTINSVLFYSYEESGYKTKRMNDNEAIIVKMQYENRLSHFTGGKLEDFVAYTLRNSLVVSRYDNQEFDSVNAMVVFINNIGNGNISDKDKKTICKLADLIRNDFSKLNPNVQSSQGANMVRSVRNQNMVVQPQGDKVSFPLVSDEGKNTVTNKNVEKKGLNEFLLNYANLDDEERMEKLRKLRRIIDVYFSSPSHYQKDMDISLSDNIDKTKFDVWKKHETGKKNTELFVDIPDELLTAETEKIKLDAVLEKKARKRLTDSIRKQNMICYRYTRAVVEKYNSTENLFFENDSINQYWIHHIENAVERILKSCKAETLFKLRRGYLTEKVWKDAINLISIKYIALGKVIYNFTVDDIWKDKKVKNLGSIDEKIKHGITSFDYEMIKAQEALQRELAVNVAFAANNLARAVCDMTNLKDKESDFLIWNKKDIANKLKNKDDMASVSVVLQFFGGKSSWDIDAFREAYKGNKYNYEVCFIDDLRKAVYAARNESFHFKTALVNNDIWNTEFFGKLFIKAVSYTHLRAHETSQ

SEQ ID NO: 4257 - protein, 346 aa, Artificial
  Synthetic
MDISLSDNIDKTKFDVWKKHETGKKNTGLFVDIPDELLTAETEKIKLDAVLEKQARKRLTDSIRKQNMVCYRYTRAVVEKYNLTENLFFENDYINQYWIHHIENAVERILKSCKAETLFKLRMGYLTEKVWKDAINLISIKYIALGKVIYNFAVDDIWKDKKVKNLGSIDEKIKHGITSFDYEMIKAQEALQRELAVNVAFAANNLARAVCDMTNLKDKESDFLIWNKKDIANKLKNKDDMASVSVVLQFFGGKSSWDIDAFREAYKGNKYNYEVCFIDDLRKAVYAARNESFHFKTALVNNDIWNTEFFGKLFIKETEICLDIEKDRFYSNNLPVFYSDNDLKKC

SEQ ID NO: 4258 - protein, 548 aa, Artificial
  Synthetic
MEADKKIRNMRKNEDILKKMQEVTKLPKFSGGKLEDFVAYTLRKSLVVSKNSTQEFDSVAAMVVFLECIGKSNISDHEKEIVYKLLELIRKDFSKLDPNVKDSQGANIVRSVRNQNMIVQPQGDRFLFPQVSDKEKKTVTNKNVEKEGLNEFLLNYANLDDEKRAEILRKLRRILDVYFSAPNHYEKDMEITLSDNIDKEKFNVWKKYECGKKVTGLFVNIPDVLMEAEAENIKLDAVVEKRERKILADRVRRQNIICYRYTRAVVEKYNSNESLFFENDAINQYWIHHIENAVERILKNCKAGKLFKLRKGYLAEKVWKDAINLISIKYIALGKAVYNFALDDIWKDKKDKELGIVDERIRNGITSFDYEMIKAYENLQRELAVDIAFSVNNLARAVCDMSNLKDRESDFLLWKKEDIADYAIMLEVYKKYGYCKFLAQKLGFYNYDIGKYTYRMINEEYGLENYLEKMVADEVVLLQQKDRSELISMINAKQDGKLLKKVATLNQVLEERELDYRIKEFETTRYIEDSDGNKKKKKYKNAWKIVRF

SEQ ID NO: 4259 - protein, 499 aa, Artificial
  Synthetic
MILLINIGYIILKMLLNVYLRVVKQKHCLKLRRGYLTEKVWKDAINLISIKYIALGKVIYNFTVDDIWKDKKVKNLGSIDEKIKHGITSFDYEMIKAQEALQRELAVNVAFAANNLARAVCDMTNLKDKESDFLIWNKKDIANKLKNKDDMASVSVVLQFFGGKSSWDIDAFREAYKGNKYNYEVCFIDDLRKAVYAARNESFHFKTALVNNDIWNTEFFGKLFIKETEICLDIEKDRFYSNNLPVFYSDNDLKKMLDHLYNNKVSRAAQVPSYNSVMVRKYFPENITSTLKYQKPGYDEDTLEKWYSACYYLLKEIYYNSFLQSDEALALFEESVNNLKGDNKDQELAVKNFRNNYKNIKSSCTSFSQVCQMYMTEYNQQNNQFKKVRSSKDSIVDKPIYQHYKLLLKKVIANAFASYLQHNKELFGFIGKPLKVNCLKEIDKEQFLPEWTSKKYVSLCEEVRKSPELQKMVYCWKVFKFKVSKSYGRFYEILYTICK

SEQ ID NO: 4260 - protein, 461 aa, Artificial
  Synthetic
LSKYLDYGTSDSGLSTWAELGRFCNDGEVNYGIYRDALNPIPNRNIVMSKLYGADTIIPKVINRVNEDIIKEYYQMIKEIDQYRIKGKCDSEDEQKKLLHFQKIKNKIEFRDIVEYSELINDLLGQLINWSFLRERDLLYFQLGFHYACLHNKSRKPEGYDIVKRNNGTTVKGTILRQIAGLYINGIGILDKTTSGDYKEAAQAGGSFGRFYSYSNKVMESTGFYAPDDEEGRKNSLYLAGLELFENLNEHESIVKKRNDIDHFKYYMGKAGSLLDLYSEVFDRFFTYDMKYQKNVINMLENILMRYFVIISPKVGSGTKLLDNNGKKERAQIEIISSGICSDEFSYEYSGGNVKTPARNTEFLNTVARILYYPEEIESYSLVKVQGEFSVTRTDGKNRYPEKKNGNNNNQKNRGNRQNYQRNKNHNNKKSSMSETVYTSSSPNESFGYNPFRDLPRDFKM

SEQ ID NO: 4261 - protein, 381 aa, Artificial
  Synthetic
  misc_feature (343)..(381): Xaa can be any naturally occurring amino acid
MVSDYFEDEDDYARYLAGFLDYESSLGDYSVSPSGMLKDFCRTAVDSSDDETINIYYDGENPILQRNIVLAKLYGNGQIISDVLKANRVNVGDIQEYYRSKDKLTAYKTTGTFNSIDELKQIKKYQELKNHVEFIDIVEYSEILNELQAQLVNYTFLRERDLLYFQLGFHFSCLKNDSYKPSDYVRIEAGDKVISNAILHQIASLYINGISLYIKDEADTYVKDKDKSAGGNIRVFFKYCKNTFTEYSDSQTVYSAGLELFENLDEHGQIIDLRNYIDHFKYYISDKSVNSGRSMIDIYSEVFDRFFTYDLKYHKNIPNTLYNILMGHFIETNFDFSTGTKDXXXXXXXXXXXXXXXXXXXXXXXXXXXXXXXXXXXXXXX

SEQ ID NO: 4262 - protein, 867 aa, Artificial
  Synthetic
MGDISKVSKGESVAFGTVNEGFETGISSFDYERMKAEDSLNRAMIKYISFAVNIFDASVRNPEQRTGGKEDILLLKPENIVMYEDAVKRVLRYFGGISKFSESSLDVSDKNGFFTALKDELYAARNYAFHYVTGEAEKREKPVVTTLLDTEYMLVGSIFRKKYFSNNVPMFYRTADIDNLMSRLYKSNRVILAQMPSFNKVLSRNAVVDFANAYLAGDSKREMSQPEISEQFRSSFYFLLKEIYYYDFILKEDLLERFKNGVECAQASAIKKENNSRKHVAMKNAYRDFMSRADKLTKTKGITFGQFCQEIMTEYNQQNSQKQKKPSAVEKTYVVKGQTRTSVREVEDKEQIYKHYRTLLYAGIREAFLIYLKEEAAFGFLRSPKDGREKFRDLKEEDFSQGWTTECYTKLKDAIIEDKELSSWYVTAHFMNQKHLNHLIGEIKNYVQFIDDIEKRAKVTGNRVCSTEEKMGKFTSLLEVLEFCKLFCGQVSNNLEDYFANNEEYAKYVAGFVDYGGTSAALLQAFCRENKELNYYDELNPIPNRNIILSLLYGNTAVLSSSMKKVTLQEVKGYQKNKESLSGVFKNGACKDENEQRKMSNYQKQKNRIEFVDVLTLTELLNDLYGQLISYSYLRERDLMFMQLGFYYTKLFHTSSVPAQDKLRVLSGDCDIKDGAVLYQIAAMYSYDLPIYGISKQGVAVRKKSGVSTGAKLNQFSTEYCGGKWDIYTNGLYFFEDVDGRHKDYVEVRNYIEHFKYFADHKKSILDLYSDLYNGFFSYDTKLKKSMSFVLPNILLSHFVNAKLSYEKDVVQKNSESYRRARIVIREKDIKSDFLTYKNKENSKAFYVPARNDVFLKEVLDMISFKR

SEQ ID NO: 4263 - protein, 867 aa, Artificial; identical to SEQ ID NO: 4262
  Synthetic

SEQ ID NO: 4264 - protein, 493 aa, Artificial
  Synthetic
  misc_feature (2)..(33): Xaa can be any naturally occurring amino acid
LXXXXXXXXXXXXXXXXXXXXXXXXXXXXXXXXPLKWYVLAHFLSPKHLNHLTGAFKSYGVFINDIERRAGDTGNRTEKEIIRAESGRIKSIVDMLVFSSTFCGMTTNIIEDYFEDKEEYDKMLIRFVEQDKDNASEDVVVTKKSCGEKKHLIGIYYDAANPIINRNMIRALMYGDLRMLCQIWNTVTIREIKNYNKLKENLSGVFEKGTCTSKEEQKKLREFQSEKNRIELHDLLTFTEIISDLNGQLVNWSYFRERDLMYMQLGVQYTKLFFTNTIGPEDIRRKISGKGFSITDGAMLYQIVALYNFGLPLYGFDETKKGRIVSNAGASVGKTISKFITNYCDEDVYYEGLFFFENIGEHEAITETRNYIDHFKYYADHKRSLLDLYSEVYERFFNYSVNYRKSVSYILPNILERYFIVLNTEMDKGERLGRNGKESRYHTVAGIRVKKVSSANFTYKLKVGNEEKKYQIPAHSGEFLTTVKKILEYKAEN

SEQ ID NO: 4265 - protein, 627 aa, Artificial
  Synthetic
MISFRNRKIRKRIYGNDFYGYWQEKESGQAKDGKEQKAWESFENRIDQIGRERSFGAICQGLMVEYMLQNRDISMVQTETGDGKTNKKQIYKHYRTLLYICIRSAFTEYLREKWEELRTPVLTVKEWSKEEFCQTDGLKHLSLFDHLKETFNDAESGSFWYMAAHFINQKYLNHLIGSIRNYLQFTEDIEDRALSLGDCVDNKREEKNLRYRNTLEILEFVAQFCERTTNVMEDYFESNQEYAAYLSGFVDYNVSKKETDIEKALYGFCRQKFKVDGKEYMAGIYYDGENLIPNRNIIRANMYGNVSCLKPYMDRITLKEIRTMYADQNKLDIVLKEGVCRTEEEQKALKEFQNEKNRIELFDLCTYTQILNDMQAKLIGWSYMRERDLMYYQLGYYYTKLFWTDAISEEDARRRLVGELVNVEDGVILYQILAFNSYNLPMIANKNNTVTFLKGEGSIGGKAITAFLKNYENAERIYEEALDLFENTDEHAAIINTRNYIEHFKYFIKSDRSMMDLYSEVYDRFFRHDHNRKKNVPDSLKNVLADNFMIADISMELGSKKVGEKKKGFREHKSARIEFTDKGIRSTDMTYTVKPDPKDSKKDEKVLVPAHSEVFLKQFQKILEYRI

SEQ ID NO: 4266 - protein, 776 aa, Artificial
  Synthetic
LYSGEDLYKEIRKELYAIRNITFHYTTKADKDQTQKHDLAEYLFEEEFSDITELFREKYYANNVWKYYDVEVINTIMENIYCGRKYRAAQVPAFKNIISRPELPQVMNGFVKGNSLRRLMNCPDRDVINKYWSALFFVLKELYYYDFLQEQKKPEDNVKERFFRAIEKLSGQENDDKKQKAWESFGNRIDQIGRDRSFGAICQGLMIEYMLQNSDISMVQTETDNGKANNKKQIYKHYRTLLYNCIREAFIEYLREKWEELRTPVLTVKEWSKEEFCRADGLKHLSLFDHLKKTFNDAESGSSWYMAAHFINQKYLNHLLGSIRNYLQFTEDIEDRAISLGDCVDNKREEKNLRYRNTLEILEFVAQFCERTTNVMEDYFESNQEYAEYLSGFVDYNTTKKETDIEKALYSFCKQKFKVDGKEYMAGIYYDGENLIPNRNIIRANMYGNTSCLKPCMDRITLKEIRTMYADQNKLDLVLKEGVCHTEEEQKAYREYQNEKNRIELFDVCTYTQILNDMQARLIGWSYMRERDLMYYQLGYYYTKLFWTDSISEEDARRRLVGNLVNVEDGAILYQILAFNSYNLPIIANKNNTVTLLKDEGSIGGKAITAFFKNYENAEMIYEEALDLFENMDEHAAIINTRNYIEHFKYFIKSDRSMMDLYSEIYDRFFRHDHNRKKNVPDSLKNVLADNFMIVDIDMELGSKKVGEKKKGFREHKAARIEFTDSGIRSTDMTYTIKPDIKDNKKDKKVLVPARSEVFLKQFRKILEYRIQDKIQ

SEQ ID NO: 4267 - protein, 661 aa, Artificial
  Synthetic
LYSGEDLYKEIRKELYAIRNITFHYTTKAEKDQTQKHDLAEYLFEEEFSDITELFREKYYANNVWKYYDAEVINTIMENIYCGRKYRAAQVPAFKNIISRPELPQVMNGFVKGNSLRRLMNCPDRDVINKYWSALFFVLKELYYYDFLQEQKRPEDNVKERFFRAIKKLSGQEKGDKEQKAWESFENRIDQIGRDRSFGAICQGLMIEYMLQNSDISMVQTETDNGKANNKKQIYKHYRTLLYNCISEAFIEYLREKWKELRTPVLTAKEWSKEEFCRVDGLKHLSLFDHLKETFNDAESGSSWYMAAHFINQKYLNHLLGSIRNYLQFTEDIEDRAISLGDCVDNKREEKNLRYRNTLEILEFVAQFCERTTNVMEDYFESNQEYAEYLSGFVDYNTTKKETDIEKALYSFCKQKFKVDGKEYMAGIYYDGENLIPNRNIIRANMYGNTSCLKPCMDRITLKEIRTMYADQNKLDMVLKEGVCHTEEEQKAYREYQNEKNRIELFDVCTYTQILNDMQARLIGWSYMRERDLMYYQLGYYYTKLFWTDSISEEDARRRLVGNLVNVEDGAILYQILAFNSYNLPIIANKNNTVTLLKDEGSIGGKAITAFFKNYENAEMIYEEALDLFENMDEHAAIINTRNYIEHFKYFIKSDRSMMDL

SEQ ID NO: 4268 - protein, 683 aa, Artificial
  Synthetic
MENIYCGRKYRAAQVPAFKNIISRPELPQVMNGFVKGNSLRRLMNCPDRDVINKYWSALFFVLKELYYYDFLQEQKKPEDNVKERFFRAIEKLSGQENDDKKQKAWESFGNRIDQIGRDRSFGAICQGLMIEYMLQNSDISMVQTETDNGKANNKKQIYKHYRTLLYNCIREAFIEYLREKWEELRTPVLTVKEWSKEEFCRADGLKHLSLFDHLKKTFNDAESGSSWYMAAHFINQKYLNHLLGSIRNYLQFTEDIEDRAISLGDCVDNKREEKNLRYRNTLEILEFVAQFCERTTNVMEDYFESNQEYAEYLSGFVDYNTTKKETDIEKALYSFCKQKFKVDGKEYMAGIYYDGENLIPNRNIIRANMYGNTSCLKPCMDRITLKEIRTMYADQNKLDLVLKEGVCHTEEEQKAYREYQNEKNRIELFDVCTYTQILNDMQARLIGWSYMRERDLMYYQLGYYYTKLFWTDSISEEDARRRLVGNLVNVEDGAILYQILAFNSYNLPIIANKNNTVTLLKDEGSIGGKAITAFFKNYENAEMIYEEALDLFENMDEHAAIINTRNYIEHFKYFIKSDRSMMDLYSEIYDRFFRHDHNRKKNVPDSLKNVLADNFMIVDIDMELGSKKVGEKKKGFREHKAARIEFTDSGIRSTDMTYTIKPDIKIIKMIKKFSYLHAQKYF

SEQ ID NO: 4269 - protein, 677 aa, Artificial
  Synthetic
MENILETISAKLIKGESIEELTQEALDKGISPKDILTKSLLEGMTRAGEMFKEKTLTMYDVLESAKNMEKSVKILKPLLRDEDIVKKGKILTASVQGDFHDIGKNLCILMLESNGFQVIDMGVDVPQEKIEECIKKESPNILMLSAMIAPTMEVMKMTIEYLREKWKELRTPVLTAKEWSKEEFCRVDGLKHLSLFDHLKETFNDAESGSSWYMAAHFINQKYLNHLLGSIRNYLQFTEDIEDRAISLGDCVDNKREEKNLRYRNTLEILEFVAQFCERTTNVMEDYFESNQEYAEYLSGFVDYNTTKKETDIEKALYSFCKQKFKVDGKEYMAGIYYDGENLIPNRNIIRANMYGNTSCLKPCMDRITLKEIRTMYADQNKLDMVLKEGVCHTEEEQKAYREYQNEKNRIELFDVCTYTQIQHDMQARLIGWSYMRERDLMYYQLGYYYTKLFWTDSISEEDARRRLVGNLVNVEDGAILYQILAFNSYNLPIIANKNNTVTLLKDVGSIGGKAITAFFKNYENAEMIYEEALDLFENMDEHAAIINTRNYIEHFKYFIKSDRSMMDLYSEIYDRFFRHDHNRKKNVPDSLKNVLADNFMIVDIDMELGSKKVGEKKKGFREHKAARIEFTDSADMTYTIKPDIKDNKKVLVPARSEVFLKQFRKILEYRIQDKTQ

SEQ ID NO: 4270 - protein, 479 aa, Artificial
  Synthetic
MVAHFMTPKHLNHLRGEIKSYFAYIHGIEDRRYMAMGVRVPVNEVKRTQYRKILEILDLAAEYNGRISAKWEDYYTSEQEYAENIHQYLNFSNPHDRRDLKEQLRSFCNEKNNNSPSGYIGIFYNEKGPILNRNVARARMYGTEMILAKALVNDKVQKEEILEYYRSLKMLKKNVFKKCKCENIGQEKKRRSYQQQKNRIELVDILKYSEILNDLMSQLISWCYLRERDRMYFQIGFYYVALSAEASKIPEDSKLRILKGKGDSSGTEINITDNAVLYQMAAVYTYELPVYCLDEEGNAIVSKSAPRNTLTANGVRAFCQEYCREEWANKDTSIYENGLELFESPQDERDIIELRNYIDHFKYYARRDRSILELYSKVFERFFKHDVKLKKSVTVILSNILARYFVIPKLSINYREEEEGEEKHKITEIDITELKTDVTIHKYEKKEADNQTKIYKKTLDYYNEKFLNRLKKVLTYNQG

SEQ ID NO: 4271 - protein, 501 aa, Artificial
  Synthetic
  misc_feature (2)..(85): Xaa can be any naturally occurring amino acid
LXXXXXXXXXXXXXXXXXXXXXXXXXXXXXXXXXXXXXXXXXXXXXXXXXXXXXXXXXXXXXXXXXXXXXXXXXXXXXXXXXXXXDAESYFGEHQGISDEMKLASFCRQPIDELKADGTPQIIGLYHDGTNEILNRNIVRASLYGTDKIIQGAADKVTETDIRDFYRMQTAVSQEELADRAKDQAEKAKRIKEVQNKKNRVELVNVKIYSDILNDLMTQLVSWAYFRERDLMYLALGAQYMRIFHGKKISEESVLRKLKWRDVVNIQEGAVLYQIVAMYTYHLPLYQVKYAADGRGIEEVKERIGMYGYKKDYFEKYCHREDILRPVLYFFEVEKDQEKIRSIRNYIDHFSYFVKADKSILDLYSDFYNMFFSYSENFRKSISFILPNILSKYFVLADIHLSKKTREAVTMNNVRVMRNCAGFDIDKELKSYQFTYNIKASVEDEDSTDGKEECTENTLNHIDEKTDLTTCKQSKILPVKIDARDAQFLKDIKQILRYSNV

SEQ ID NO: 4272 - protein, 470 aa, Artificial
  Synthetic
MAYQKLTKQRYYANNVGLFYRAEEIQELVQELYSQKNITEAQIPAFRTVLKRKDLPGYMEELGILFPDNTQEKSKGDFEGTLYFLMKEIYYRDFIVKDKAAAYFFKAVDQNKEQSKKEDKHTERAAENFHRYVKSLEKKYNKKEISFGTVCQYIMMEYNQQNTTKQETEIYKHFKMLISLCIRKAFGNYIKETYRFLFHPIYSKQQGEPEYLDTLELESGVKEKNYEWFTLAHFLHPVQLNHLVGDLKSYIQYREDILRRIVFAEQRVYADQQKEVQQKVKTAKEILEVLEFVREVSGRVSNEYTDYYENEEEYAEFLYQYIDFRKREGKSAFESLKYFCQNILDSGTVVDLYADTENPKVLRNIELTRMYAGSNVKIPEYEKITEDEIKMYYQEKNSVALILSRGLCRNEKEQKKVIEFNWKKKRLTLNEITDVFSLVNDLLGKMISFSYLRERSNVSSSWILLYGIMC

SEQ ID NO: 4273 - protein, 331 aa, Artificial
  Synthetic
VVDLYADTENPKVLRNIELTRMYAGSNVKIPEYEKITEDEIKMYYQEKNSVALILSRGLCRNEKEQKKVIEFNWKKKRLTLNEIVNDLLGKMISFSYLRERDQMYLLLGFYYMALCAENKSENHLGWKGETLDKLESSDSKFDIGGGLVLYQIVSAFNFGSKLLYISEDGRWKMAGGAFPGKYGRFENDYNHRTSLSKVIRLFENESYEREIIYWRDYVDHMKYYVNQNQSIMEIYSAFYSKVLGYSAKLRKSVVFNLQAALEKHHINPECIWMTSDGKCADIKLMKNLESQKFTYKLAKREGEKTERKICMNALNENFLKTIRTSLEYKK

SEQ ID NO: 4274 - protein, 675 aa, Artificial
  Synthetic
MKISKVDHVKSGIDQKLSSQRGMLYKQPQKKYEGKQLEEHVRNLSRKAKALYQVFPVSGNSKMEKELQIINSFIKNILLRLDSGKTSEEIVGYINTYSVASQISGDHIQELVDQHLKESLRKYTCVGDKRIYVPDIIVALLKSKFNSETLQYDNSELKILIDFIREDYLKEKQIKQIVHSIENNSTPLRIAEINGQKRLIPANVDNPKKSYIFEFLKEYAQSDPKGQESLLQHMRYLILLYLYGPDKITDDYCEEIEAWNFGSIVMDNEQLFSEEASMLIQDRIYVNQQIEEGRQSKDTAKVKKNKSKYRMLGDKIEHSINESVVKHYQEACKAVEEKDIPWIKYISDHVMSVYSSKNRVDLDKLSLPYLAKNTWNTWISFIAMKYVDMGKGVYHFAMSDVDKVGKQDNLIIGQIDPKFSDGISSFDYERIKAEDDLHRSMSGYIAFAVNNFARAICSDEFRKKNRKEDVLTVGLDEIPLYDNVKRKLLQYFGGASNWDDSIIDIIDDKDLVACIKENLYVARNVNFHFAGSEKVQKKQDDILEEIVRKETRDIGKHYRKVFYSNNVAVFYCDEDIIKLMNHLYQREKPYQAQIPSYNKVISKTYLPDLIFMLLKGKNRTKISDPSIMNMFRGTFYFLLKEIYYNDFLQASNLKEMFCEGLKNNVKNKTKKTKKI

SEQ ID NO: 4275 - protein, 774 aa, Artificial
  Synthetic
  misc_feature (15)..(107): Xaa can be any naturally occurring amino acid
MIKNLIQDWIRALFXXXXXXXXXXXXXXXXXXXXXXXXXXXXXXXXXXXXXXXXXXXXXXXXXXXXXXXXXXXXXXXXXXXXXXXXXXXXXXXXXXXXXXXXXXXXXKSADFIKKLRYIGEDINKEFGQLLKKGIEQYKNIEEPDHTIISKVYDYFGDSYIEAKALRKWDDLKDHEIEALIYVMVSYYLRKSLCGTIDLDEGKIRKVLGTDVSVHADTENAITCHTNVGDMVDKKSVSIRSTIQKLLISMLQQDPEQRRKMFGQIGKMDVYIFILVLHKDFSKIRQMQNLEKSIRNQNVPVQCRRIYSKKATAGRGGVSSEDKVVRLMPSSAVFDNQPINEISRRSYEFSFLQKYAAAEDKHDRDKILIEVNSLLVLFLYGEQAYGDRSEGKATDLEIVPCDQREDWKHFSPDAYQKLNDYLSQDDKRASDSKVFWSSLKSELRKAMLIHYQESLRVLAGKYKAEGKKKEEWPAEMKEAMYWITWFEDCVERILRIQRANTRLSLYKLESGYLYKKSWREFLSFMGQKYIALGKAVYHIILPHNYMQGCKYDLGQVPAFYKERGITGFDYEYIKAVEALQRETSAYVASAAGNFIRSVSRQQDESKDLLLESQSAYFRNMTPENLSRAYIRVMRYFGGESAWQDWDALSKASDIEQFKRELLNIIRSCLYVLRNQSFHYAEGIVNELGGLSQDEAAVIESIIERRIDSISGVIREKYYSNNAWMFYADENIKGLLNVLYKKTGEIPAQVPSFHSACKKDQLLRLFMGETYKRAD

SEQ ID NO: 4276 - protein, 549 aa, Artificial
  Synthetic
VFNIYRNFIDEIFEIIDKFDFKESNSISYLFPKFHKIYKRICKSENINDRQNGARKYLLQTIYYYYFQYEIENNKNDIFKYLNLYKSKIKAKKISYSHIIDNKDVNNKNIEILYRNIQREGMLNNRLLQMNNEWIEFIMIQFIEFISTKKLNWILDDLSEYRKKEKLDEKNKNKLLENLKQKMNKNITYSNDSYVFISLAQFLDLKEISNLIHDIKKFVQFREKNISKYKPEKNKVYIEELRKISYILKVMLEHKERVIQKHYLESYDEGISIMYGKDIEKKGIKDIKIKIKNENQEVINQPLYKSGNDENSSWIVLYGIEQAKRNGTFKFFKEFFNTNEDIKLCKEDIQKYEHLYNEKEENQRKVDEYISSEENNNIEEIKEINNNKKQLFYYYKNMINGDGLKKGYDFINDIYSHCLSWAYRIERDCSIYKVEAYNGKIKNFRNEIAHFNYFQKTDKSLLDLLNDFYNIFDYNLKYQRDVQKVINNIFEKYQVVREDGGPVIFYCKVDKKLKLSENLVPKKHSKYPEIELVHKKYVIFFKKLFEHKK

SEQ ID NO: 4277 - protein, 708 aa, Artificial
  Synthetic
MKVVRPYGVSKTDHMRADVRVRRIHPNSFRNEAQDVANFAVSHSKLILAQWISLIDKVITKPSKGGAPSVDQFNLRNGIGESVWKLFLSKDLLNAPTTKRLKRLEREWWSKIHPYGSDIDPTGIMNFKGRWFKVFCEDIEPAKVDFELIALALHDHLYSRERRLGESSTARARGLILARADSIGCNVLKERQQLLSFGTPWNNDEIKQYKTATNLVDELKSAAKKYEGQRAARTKRAIGQVFHNHYGKLFVDDDGKPINVAMAQRAFPGLFALHEAAKSNIKRILKAPQDHWLKKFPDSPGSFMEGLSDDWRNKEINHLIRLGKVIHYEAAKLGGAYRPSQIFDNWSGNFSTSAFWSTDGQIAIKQSEAFVRNWRTIVSFASRSITNWADPNSAEEKDILGEREILRAVESLSIAEFDRLASIYFGNSVERFATTSRAYRQDVMKLALLGLSRLRHSTFHFSGLSSFLDALHSLPEDCNEAVAEAVRGLYKDDINAHAQHLSEKLRSVDVERFLEQDQVDSLCHVLIDSEVYFNDLPNFQSILHRGQDAYLFRKIDMRLPSVATRLSLNNQSTKCQYLILKLLYEGPFAKWLCDLPSDILHEFVKQHMDRATNEARRIGENDKHIARAAGTIKIQENDTIFDLFSMLRRLSLSESRESQKQSVSKRNMGKYLRKLELDVIAQTFQYFVEANYFDWIFDLRVGPESYSF

SEQ ID NO: 4278 - protein, 708 aa, Artificial; identical to SEQ ID NO: 4277
  Synthetic

SEQ ID NO: 4279 - protein, 708 aa, Artificial; identical to SEQ ID NO: 4277
  Synthetic

SEQ ID NO: 4280 - protein, 860 aa, Artificial
  Synthetic
MRIIRPYGRSAVIVQQVKDGTARERRIERNGAAQPEGKAAAGSPVQPVAALLAEGEPMLRQWLSIIDKIIAKPAADRAVKNIADARKRERLEKENREKQKIRQVREVLGQAVWEYLEAEQLLTEEEKQKLKEYWDSKISAAAAKQGRRGDFPKGKLYRLFAGEAEWRDIDKNKAETIVNKIYRHLYGQACKIVPPHKAGADRAQYGHKQHSNQDKRAKSEGLIADRARAIAANVLQPRRVLANTDFSERDIERYRDKLRSHKDGDLAARIRQAVLAEQEKADKQPAYNIAVGELRAIWPVIFGEAKKYAEAQEADKALLAVHNALKEAYKQRLKGKPLFVDKQKAFLPQGAEAKNKLKELVVERLEKLLPADDEALFALLRNRRKNQDISHFIRLGKIIHYTAADKARAAEADKAGADVTDFAGDETSFIARYWPKAEEVTDSRYWGSAGQTEIKQNEAFVRVWRRALAFAARTVKDWVDPDNKIKGDILFSISEALSADRFNAAKAEHKYNLLFADDGDISDKKPSIAQQDWCFFALKALYSLRNAAFHFKGMGEFVGALQKMGKLHEITGKETAEEKAKKEAENNIIKAVCPVLTKRYQQHRQKYQERLKDRLENIQLAYYLGGADIRFLWHKIATSNSSLLPLPRLRRVLERAEKAWKGGKQGEDSSGKLLPEIALPDYVPAQNREGEEGEAANCQWTVLKLLYDGAFKTWLDALPYGKVQGYIDEAICRATGAAQNLNKKNAKGEPKSAEELALTVSRNDGLYKLQPGDTIETFFYQLTAATATEMRVQNHYESNGAKAREQAAYIEDLKCDVVALALAAYLQVEDEGQRKNLAFVLDIPQRKKTENPSIDVHKQL

SEQ ID NO: 4281 - protein, 343 aa, Artificial
  Synthetic
MPSARGTDIYAREELRAEIASAFAAQAFGIDYTQNKYMENHEAYIQDYIKVLENEPNELFAAIKDAEKISDYLIEKGEFGLEKETEMSRDASFIKNMDTYVALHREYIEEVSQNKEPIVINGYGGPGAGKSTACMEITAALKKEGYNAEYVQEYAKELVYEKDMEMLDGSPEHQYEILKEQTRRMDRLYDQVDFIVTDSPVMLNTIYNKQLTPEYESLVNELQGEYINYSFFMERDVSNFEEEGRIHNLTESIEKDNEIKDMLQKNEIKYKTYNHENVNEIVNDAIDFYEKINEGKSNEKEVVRDAENIQLTGAEAARFRMAMKGQERALDMFMNDESIPEHN

SEQ ID NO: 4282 - protein, 758 aa, Artificial
  Synthetic
LAKAYRPAKQKKKHSYGAIRGAVQQIRNNVNHYKKDALNTIFNISEFENPSTTDNKNQTNYAETIYKNLFVTELKKIPEAFAQQLKTGGVLSYYTLDNLKTLLTTFQFSLCRSVIPFAPGFKKVFNGGINYQNATKDESFYELMLERYLPKENFAEEAYNARYFLLKLIYNNLFLPQFTTSKNAFADSVSFVQQQNKKQAEHSKRPKAFAFEAVRPMTNADSIAGYMAYVQSELMQEQNKKEEKATDETRINFEKFMLQVYIKGFDSFLKAQEFDFIQLPQPQLSATDNNQQKADKLNQLETAITGDCKLTPHYAKADVATHIAFYVFCKLLDAGHLSNLRNELIKFRESVDEFQFGHLLEIIEICLLSADIVPTDYRKLYSNEADCLARLTPFIEDGADITNWSDLFVQTDKHTPVIHANIELSVKYGTTKLLEQIVSKDPLFKTTEANFTAWNTAQKSIEQLIKQREDHHEKWVKAKNADDKEKQEKRRDKSNWAQQYINEHGDDYLDICDYINTYNWLDNKMHFVHLNRLHSLTIELLGRMAGFVALFDRDFQFVDAQRSNDKFKIEEFVNLKRMDEKLNAVPRKKIKEIQDIRYKISQRNGNKIDESVRDILIQSIHEKRNYYNSTFLLVNNDEKKENKVYDIRNHLAHFNYLTKNAADYSLLDLINELRELLNYDRKLKNAVSKAFIDLFDKHGMKLTLKLNAQHKLEVENLESKQLYHLGTSAKDKPEYRLTTNQVPTKYCAMCRSLLEMKN

SEQ ID NO: 4283 - protein, 758 aa, Artificial; identical to SEQ ID NO: 4282
  Synthetic

SEQ ID NO: 4284 - protein, 758 aa, Artificial; identical to SEQ ID NO: 4282
  Synthetic

SEQ ID NO: 4285 - protein, 758 aa, Artificial; identical to SEQ ID NO: 4282
  Synthetic

SEQ ID NO: 4286 - protein, 697 aa, Artificial
  Synthetic
VEFRDSIFKSLLQKEIEKAPLCFAEKLISGGVFSYYPSERLKEFVGNHPFSLFRKTMPFSPGFKRVMKSGGNYQNANRDGRFYDLDIGVYLPKDGFGDEEWNARYFLMKLIYNQLFLPYFADAENHLFRECVDFVKRVNRDYNCKNNNSEEQAFIDIRSMREDESIADYLAFIQSNIIIEENKKKETNKEGQINFNKFLLQVFVKGFDSFLKDRTELNFLQLPELQGDGTRGDDLESLDKLGAVVAVDLKLDATGIDADLNENISFYTFCKLLDSNHLSRLRNEIIKYQSANSDFSHNEDFDYDRIISIIELCMLSADHVSTNDNESIFPNNDKDFSGIRPYLSTDAKVETFEDLYVHSDAKTPITNATMVLNWKYGTDKLFERLMISDQDFLVTEKDYFVWKELKKDIEEKIKLREELHSLWVNTPKGKKGAKKKNGRETTGEFSEENKKEYLEVCREIDRYVNLDNKLHFVHLKRMHSLLIELLGRFVGFTYLFERDYQYYHLEIRSRRNKDAGVVDKLEYNKIKDQNKYDKDDFFACTFLYEKANKVRNFIAHFNYLTMWNSPQEEEHNSNLSGAKNSSGRQNLKCSLTELINELREVMSYDRKLKNAVTKAVIDLFDKHGMVIKFRIVNNNNNDNKNKHHLELDDIVPKKIMHLRGIKLKRQDGKPIPIQTDSVDPLYCRMWKKLLDLKPTPF

SEQ ID NO: 4287 - protein, 352 aa, Artificial
  Synthetic
VNADKLSHFFAEGVNVDDDENVIHASMETFRKYGTRDLFHKLMLQDDRFLVSSDDYREWEEMKEKIEGGKVKQRELLHAEWCEAKEKDKKSRKVKSNSRTCFEKKFMGAKAEEYYSLCKVIDKYNWLDNKLHLVHLNKLHNLVIEILGRMVGFTALFERDFQYICKSDSEYEQLYNLDFNMGLPKFKNSIKGSGKAKNSTQNIDHNATGIGNSSNLLKENSNGTHYCKNLSGDGVEDKLKRLFLYDDYRNVRNFVAHFNYLTRVEDDLGGNDAVKLSGTRYSLIELINELRNLLKYDRKLKNAVSKSFIDMFERHGMHVKMKLNHNHKLFVDSISPRKIKHLGGVVIRSGEG

SEQ ID NO: 4288 - protein, 422 aa, Artificial
  Synthetic
MKLFGQLGVRFKKLEMKYTIVKSMLGKKILKIKGFEYRPNMKYADTEMKDLMDNDIAKIPVFIEEKLKSSGVMRFYKQEDLQSIWERKQGFSLLTTNAPFVPSFKRVFAKGHDYQTSRNRKYDLALTIFDRLEYGEEKFRARYFLTKLVYYQQFMPWFTTDSSAFREAANFVLHLNKNRQQDAKAFTNIREVEKNELPRDYMSYVQGQIAIHEDATEDTPNHFEKFISQIFIKGFDKYMIASDLVFIQSPENQELEQSEIEEMRFDIQVTPSFLKNKDDYISFWTFCKMLDAKHLSELRNEMIKYNGDLTEEQEIIGLALLGVDSRENDWTQFFSSEQEYEDVMKGYVGDALYEREPYRQSDGKTPVLFRGVEQARKYGTETVIQRLFDANPEFKVSQSNIAEWERQKETIEGTIKRKKKFA

SEQ ID NO: 4289 - protein, 794 aa, Artificial
  Synthetic
MAVLVSFAANSYYNLFGSASEDILGTEVVKNRRTNVIKVKSYIFKEKMLNYFFDSEDFDVNKTIEVLESISYSIYNIRNGVGHFNKLVLGKYKKKDINTNKRVEEDLNNNEEIKGYFIKKRGEIEKKIKERFLSNNLQYYYAKERIENYFEVYEFEILKEKIPFAPNFKRIIKKGENLLNNKKNKKYEYFKNFDKNSVEEKKEFLKTRNFLLKELYYNNFYKEFLSKKEEFKKIVIEVKEEKKNRGNNKKSGVSFQSIDDYDTKINISDYIASIHKKEMERVEKYNEEKQKDTAKYIRDFVEEIFLTGFINYLEKDKRLHFLKEEFSILCNNNNVVDFNININEEKIKEFLKENDSKTLNLYLFFNMIDSKRISEFRNELIKYKQFTKKRLDEEKEFLGIKIELYETLIEFVILTREKLDTKKSEETDAWLVDKLYVKEKNECNEYEYKEYEEILKLFVDEKILSSKEAPYYATNNKTPILLSNFEKTRKYGTQSFLSEVQSNYKYSKVEKENIEDYNKKEEIEKKKKSNIEKLQDLKVELHKKWEQNKITEKEIKKYNDTIKEIREYNYLKNKEELQNVYLLHEILSDLLARNVAFFNKWERDFKFIVIAIKQFLRENDKEKVENFLNPPDNSKGKKVYFSVSKYKNTVENIDGIHKNFMNLIFLNNKFMNRKIDKMNCTIWVYFRNYIAHFLHLHTKNEKISLINQMNLLIKLFSYDKKVQNHILKSTKTLLEKYNIQINFEISNDKNEVFKYKIKNRLYSKKGKMLGKNNKFEILENEFLENVKAMLEYSE

SEQ ID NO: 4290 - protein, 794 aa, Artificial; identical to SEQ ID NO: 4289
  Synthetic

SEQ ID NO: 4291 - protein, 748 aa, Artificial
  Synthetic
MLNYFFDSEDFDINKTIEVLESISYSIYNIRNGVGHFNKLVLGKYKKKDINTNKRVEEDLNNNEEIKGYFIQKRGEIEKKIKERFLSNNLQYYYAKERIENYFEVYEFEILKEKIPFAPNFKRIIKKGEDLFNNKKNKKYEYFKNFDKNSAEEKKEFLKTRNFLLKELYYNNFYKEFLSKKEELKKIVIEVKEEKKNRGNNKKSGVSFQNIDDYDTKINISDYIASIHKKEMERVEKYNEEKQKDTAKYIRDFVEEIFLTGFINYLEKDERLHFLKEEFSVLCNSNNNVIDFNVNINEEKIKEFLKENDSKTLNLYLFFNMIDSKRISEFRNELIKYKQFTKKRLDEEKEFLGIKIELYETLIEFVILTREKLDTKKSEETDAWLVDKLYVKEKNECNEYEYKEYEEILKLFVDEKILISKEAPYYATNNKTPIILSNFEKTRKYGTQNLLAKIQSSYKYNEIEKQKIENYNEKKESEKKKKSNIEKLQDLKVELHKKWEQNKITEKEIKKYNDTIKEIREYNYLKNKEELQNVYLLHEILSDLLARNVAFFNKWERDFKFIVIAIKQFLRENDKEKVENFLNPPDNSKGKKVYFSVSKYKNTVENIDGIHKNFMNLIFLNNKFMNRKIDKMNCTIWVYFRNYIAHFLHLHTKNEKISLINQMNLLIKLFSYDKKVQNHILKSTKTLLEKYNIQINFEISNDKNEVFKYKIKNRLYSKKGKMLGKNNKFEILENEFLENVKAMLEYSE

SEQ ID NO: 4292 - protein, 794 aa, Artificial
  Synthetic
LKFLKKVLFIDDNNRISIEKLKSRIDDNFKNLLIQHVIEYGKIKYYVENDDYIRNIVKNGELKLETKDLEYIKTKETLIRKMAVLVSFAANSYYNLFGSVSEDILGTEVVKNRRTNVIKVKSYIFKEKMLNYFFDSEDFDINKTIEVLESISYSIYNVRNGVGHFNKLILGKYKKKDINTNKRVEEDLNNNEEIKGYFIQKRGEIEKKIKERFLSNNLQYYYAKEKIENYFKVYEFEILKEKIPFAPNFKRIIKKGEDLFNDKNNKKYEYFKNFDKNNDDEKKEFLRTRNFLLKELYYNNFYKEFFSERKKYEFKKIITEVKEEKKNRGNNKKSGVSFQNIDDYDTKINISDYIASIHKKEMERVEKYNEEKQKDTAKYIRDFVEEIFLTGFINYLEKDERLHFLKEEFSVLCNSNNNVIDFNVNINEEKIKEFLKENDSKTLNLYLFFNMIDSKRISEFRNELIKYKQFTKKRLDEEKEFLGIKIELYETLIEFVILTREKLDTKKSEETDVWLADKLYVKENNGYKEYEEILKLFVDEKILSSKEAPYYATDNKTPILLSNFEKIRKYGTQSFLSKIQSNYRYSEVEKQKIENNNEKKDSEKKKKSNIEKLQDLKVELHKKWEQNKITEKEIEKYNDTIKEIREYNYLKNKEELQNVYLLHEILSDLLARNVAFFNKWERDFKFIVIAIKQFLRENDKEKVENFLNPPDNSKGKKVYFSVSKYKNTVENIDGIHKNFMNLIFLNNKFMNRKIDKMNCTIWVYFRNYIAHFLHLHTKNEKISLINQMNLLGRV

SEQ ID NO: 4293 - protein, 871 aa, Artificial
  Synthetic
LKFLKKVLFIDDNNRISIEKLKSRIDDNFKNLLIQHVIEYGKIKYYVENDDYIKNIVKNGELKLETKDLEYIKTKETLIRKMALLVSFAVNSYYNLFGSVSEDILGTEVVKNRRTNVIKVKSYIFKEKMLNYFFDSEDFDVNKTIEVLESISYSIYNIRNGVGHFNKLVLEKYKKKDIDTNKRVEEDLNNNKEIKGYFIKKRDEIEKKIKERFLSNNLQYYYAKERIENYFEVYEFEILKEKIPFAPNFKRIIKKGEDLFNNKKNKKYEYFKNFDKNSAEEKKEFLKTRNFLLKELYYNNFYKEFLSKKEEFKKIVIEVKEEKKNRGNNKKSGVSFQSIDDYDTKINISDYIASIHKKEMERVEKYNEEKQKDTAKYIRDFVEEIFLTGFINYLEKDERLHFLKEEFSVLCNSNNNVIDFNVNINEEKIKEFLKENDSKTLNLYLFFNMIDSKRISEFRNELIKYKQFTKKRVDEEKEFLGIKIELYETLIEFVILTREKLDTKKSEETDAWLADKLYVKENNGYKEYEEILKLFVDEKILSSKEAPYYATDNKTPILLSNFEKIRKYGTQSFLSKIQSNYRYSEVEKQKIENYNEKKESEKKKKSNIEKLQDLKVELHKKWEQNKITEKEIKKYNDTIKEIREYNYLKNKEELQNVYLLHEILSDLLARNVAFFNKWERDFKFIVIAIKQFLRENDKEKVNEFLNPPDDSKGKKVYFSVSKYKNTVENIDGIHKNFMNLIFLNNKFMNRKIDKMNCTIWVYFRNYIAHFLHLHTKNEKISLINQMNLLIKLFSYDKKVQNHILKSTKTLLEKYNIQINFEISNDKNEVFKYKIKNRLYSKKGKMLGKNNEFEILEKEFLKNVKAMLEYSE

SEQ ID NO: 4294 - protein, 565 aa, Artificial
  Synthetic
LYYNNFYKEFLSKKEEFKKIVIEVKEEKKNRGNNKKSGVSFQSIDDYDTKINISDYIASIHKKEMERVEKYNEEKQKDTAKYIRDFVEETFLTGFINYLEKDKRLHFLKEEFSILCNNNNNVVDFNININEEKIKEFLKENDSKTLNLYLFFNMIDSKRISEFRNELIKYKQFTKRRLDEEKEFLGIKIELYETLIEFVILTREKLDTKKSEEIDAWLVDKLYVKDNNEYKEYEEILKLFVDEKILSSKEAPYYATDNKTPILLSNFEKTRKYGTQSFLSEIQSNYKYSKVEKENIEDYNKKEEIEQKKKSNIEKLQDLKVELHKKWEQNKITEKEIKKYNDTIKEIREYNYLKNKEELQNVYLLHEMLSDLLARNVAFFNKWERDFKFIVIAIKQFLRENDKEKVNEFLNPHKSDGSRDNFSVTNYRSKMKSIINNIHENFMSLLFLNNNFTWGNLRNYIAHFEYLHKEKDTISFIGQANLLIKLFSYDKKVQNHIIKSMKTLLEKYNIEIRFEISNDSEEIFEYKIKYINSKKGKMLGKNNEFEILKNEFVRNVKALLEYSKL

SEQ ID NO: 4295 - protein, 345 aa, Artificial
  Synthetic
MGSGKLINKFSQHSIKSLISIFFSYLKCILLNPYYLFIPFNLSSKKTSATMEKQPRQILISATLNTGEKKESEKKKKSNIEKLQDLKVELHKKWEQNKITEKEIEKYNDTIKEIREYNYLKNKEELQNVYLLHEILSDLLARNVAFFNKWERDFKFIVIAIKQFLRENDKEKVNEFLNPHKSDGSKDNFSVTNYRSKMKSIINNIHENFMSLLFLNNNLATGGIQMGRNNNFTWGNLRNYIAHFEYLHKEKDTISFLNQANLLIKLFSYDKKVQNHIIKSMKTLLEKYNIEIGFEISNDSEEIFEYKIKYINSKKGKMLGKNNEFEILENEFVRNVKALLEYSKL

SEQ ID NO: 4296 - protein, 379 aa, Artificial
  Synthetic
MNALFNKFYSSESEYDEKLKKFIEETILGDKKNTSFYSTDGKTPIVHSNLEKMRKYGTENFLSKVLKNSKYTLNNITAKEKFEAKVSDELKEYKILEKVNKFNKNEKRKKLIEYYNDCRCYLHKKWIENKKNKEEFEYKEIYKKIIEEIRKYNYLENKEKLQNVYLLHEILSDLLARNVAFLNKWERDFKFIVIAIKQFLRENDKEKVDEFLNPHKSDGSRDNFSVTNYRSKIRLVINNIHENFMSLLFLNDNLATGGIQMGRNNNFTWGNLRNYIAHFEYLHKEKDTISFIGQANLLIKLFSYDKKVQNHIIKSMKTLLEKYNIEIRFEISNDSEEIFEYKIKYINSKKGKMLGKNNEFEILENEFVRNVKALLEYSE

SEQ ID NO: 4297 - protein, 754 aa, Artificial
  Synthetic
MKGGSMKITKVDGLSHYKKQDKGILKKKWRDLDERKQREKIEERYNKQIESKIYKEFFRLKNKKRIEKEEDQNIKSLYFFIKEMYLNEENEEWELKNINLEILDDKERVIKGYKFKEDVYFFKEGDKKYYLRTLLNNLIEKIQNENRDKVRKNKEFSDLKEIFKKYKDRKIKLLLESINNNKINLEYKKENVNEEIYGINPTNDREMTFHELLKEIIEKKDEQKSILEEKLDNFDITNFLENIEKIFNEETEINIIKGKVLNELREYIREKEENNSDYKLKQIYNLELKKYIENNFSYKKQKSKSKNGKNDYLYLNFLKKIMFIEEVDEKKGINKEKFKNKINSNFKNLFVQHILDYGKLLYYKENDEYIKNTGQLETKDLEYIKTKETLIRKMAVLVSFAANSYYNLFGRTENNILTQEISDDLLLGKIENEIYIKGEKNRRYVFKEKMLNYFFNPEIFGDNKIVEVLSAISSSIYNIRNGVNHFDKINLGQYNNLDLSEIKKYFIEKRDKIKEKVKEKFSSNNLQYYYAKKEIENYFKAYEFEILKEKIPFAPNFKRIIKKGEDLFNNKKNKKYEYFKNFDKNIAEEKKEFLKTRNFLLKELYYNNFYKEFLSKKEEFKKVVIEVKEEKKNRGNINNKKSGVSFQSIDDYDTKINISDYIASIHKKEMERVEKYNEEKQKDTAKYIRDFVEEIFLTGFINYLEKDKRLHFLKEEFSILCNNNNNVVDFNININEEKIKEFLKENDSKTLNLY

SEQ ID NO: 4298 - protein, 835 aa, Artificial
  Synthetic
MKITKIDGVSHYKEKEKGVLKGKDILNGKIEKIVKKRYDATIESKIYKEFIKLRKNRIEQNNEKSILKLIKLNIDKNEKEIKTLLLNKFKIKEKNKKNDKYMLDENKLDNDIKIYESVESLYFLIKEIYLGQNNKKWNISKIDLEKIMEEDNNLIMLGYKLKKNITENDYPYLYSDKNGQESTSVYKLLKKLIEENKDRNQDIRKSQEYEKIRKNFEEYKNRKINLLVKSIKNNKINIQYINNEIKSHNNSREENIIKFFKKMIEEKNESILKDKLKLFKLEVFFDEEFLEEIKKLLDSDDFDKSYNKKISELRGKIFNRIREEIKNNKNRDELENIYFLELKKYIENNLSHKKEKNKNNNNTGEEKSKELYLKFKKKVLFIDDNNRINIEKLKSRIDDNFKNLLIQHVIEYGKIKYYVENDDYIRNIVKNGELKLETKDLEYIKTKETLIRKMAVLVSFAVNSYYNLFGSVSEDILGTEVVKNRRTNVIKVKSYIFKEKMLNYFFDSEDFDVNKTIEVLESISYSIYNIRNGVGHFNKLVLEKYKKKDINTNKRVEEDLNNNKEIKGYFIKKRDEIEKKIKERFLSNNLQYYYAKERIENYFEVYEFEILKEKIPFAPNFKRIIKKGEDLFNNKKNKKYEYFKNFDKNSAEEKKEFLKTRNFLLKELYYNNFYKEFLSKKEEFKKIVIEVKEEKKNRGNNKKSGVSFQSIDDYDTKINISDYIASIHKKEMERVEKYNEEKQKDTAKYIRDFVEEIFLTGFINYLEKDERLHFLKEEFSVLCNSNNNVIDFNVNINEEKIKEFLKENDSKTLNLYLFFNMIDSKRISEFRNELI

SEQ ID NO: 4299 - protein, 625 aa, Artificial
  Synthetic
  misc_feature (625)..(625): Xaa can be any naturally occurring amino acid
MTEQNERPYNGTYYTLEDKHFWAAFLNLARHNAYITLTHIDRQLAYSKADITNDEDILFFKGQWKNLDNDLERKARLRSLILKHFSFLEGAAYGKKLFENKSSGNKSSKNKELTKKEKEELQANALSLDNLKSILFDFLQKLKDFRNYYSHYRHPESSELPLFDGNMLQRLYNVFDVSVQRVKRDHEHNDKVDPHCHFNHLVRKGKKDRCGNNDNPFFKHHFVDREGKVTEAGLLFFVSLFLEKRDAIWMQKKIRGFKGGTETYQQMTNEVFCRSRISLPKLKLESLRTDDWMLLDMLNELVRCPKSLYDRLREEDRARFRVPVDILSDEDDTDGTEEDPFKNTLVRHQDRFPYFALRYFDLKKVFTSLRFHIDLGTYHFAIYKKNIGEQPEDRHLTRNLYGFGRIQDFAEEHRPEEWKRLVRDLDYFETGDKPYITQTTPHYHIEKGKIGLRFVPEGQHLWPSPEVGATRTGRSKYAQDKRLTAEAFLSVHELMPMMFYYFLLREKYSEEASAERVQGRIKRVIEDVYAVYDAFARDEINTRDELDACLADKGIRRGHLPRQMIAILSQEHKDMEEKVRKKLQEMIADTDHRLDMLDRQTDRKIRIGRKNAGLPKSGVIADWLX

SEQ ID NO: 4300 - protein, 776 aa, Artificial
  Synthetic
MTEQNEKPYNGTYYTLEDKHFWAAFFNLARHNAYITLTHIDRQLAYSKADITNDEDILFFKGQWKNLDNDLERKARLRSLILKHFSFLEGAAYGKKLFESQSSGNKSSKKKELTKKEKEELQANALSLDNLKSILFDFLQKLKDFRNYYSHYRHPESSELPLFDGNMLQRLYNVFDVSVQRVKRDHEHNDKVDPHRHFNHLVRKGKKDRCGNNDNPFFKHHFVDREEKVTEAGLLFFVSLFLEKRDAIWMQKKIRGFKGGTETYQQMTNEVFCRSRISLPKLKLESLRTDDWMLLDMLNELVRCPKSLYDRLREEDRARFRVPVDILSDEDDTDGAEEDPFKNTLVRHQDRFPYFALRYFDLKKVFTSLRFHIDLGTYHFAIYKKNIGEQPEDRHLTRNLYGFGRIQDFAEEHRPEEWKRLVRDLDYFETGDKPYITQTTPHYHIEKGKIGLRFVPEGQHLWPSPEVGATRTGRSKYAQDKRLTAEAFLSVHELMPMMFYYFLLREKYSEEASAERVQGRIKRVIEDVYAVYDAFARGEIDTLDRLDACLADKGIRRGHLPRQMIAILSQEHKDMEEKVRKKLQEMIADTDHRLDMLDRQTDRKIRIGRKNAGLPKSGVIADWLVRDMMRFQPVAKDTSGKPLNNSKANSTEYRMLQRALALFGGEKERLTPYFRQMNLTGGNNPHPFLHETRWESHTNILSFYRSYLKARKAFLQSIGRSDRVENHRFLLLKEPKTDRQTLVAGWKGEFHLPRGIFTEAVRDCLIEMGHDEVASY

SEQ ID NO: 4301 - protein, 719 aa, Artificial
  Synthetic
MTEQNEKPYNGTYYTLEDKHFWAAFLNLARHNAYITLTHIDRQLAYSKADITNDEDILFFKGQWKNLDNDLERKARLRSLILKHFSFLEGAAYGKKLFESQSSGNKSSKKKELTKKEKEELQANALSLDNLKSILFDFLQKLKDFRNYYSHYRHPESSELPLFDGNMLQRLYNVFDVSVQRVKRDHEHNHKVDPHRHFNHLVRKGKKDRYGNNDNPFFKHHFVDREEKVTEAGLLFFVSLFLEKRDAIWMQKKIRGFKGGTEAYQQMTNEVFCRSRISLPKLKLESLRTDDWMLLDMLNELVRCPKSLYDRLREEDRACFRVPVDILSVEDDTDGAEEDPFKNTLVRHQDRFPYFALRYFDLKKVFTSLRFHIDLGTYHFAIYKKNIGEQPEDRHLTRNLYGFGRIQDFAEEHRPEEWKRLVRDLDYFETGDKPYITQTTPHYHIEKGKIGLRFVPEGQHLWPSPEVGATRTGRSKYAQDKRLTAEAFLSVHELMPMMFYYFLLRENYSDEASAERVQGRIKRVIEDVYAVYDAFARGEIDTLDRLDACLADKGIRRGHLPRQMIAILSQEHKDMEEKVRKKLQEMIADTDHRLDMLDRQTDRKIRIGRKNAGLPKSGVIADWLVRDMMRFQPVAKDTSGKPLNNSKANSTEYRMLQRALALFGGEKERLTPYFRQMNLTGGNNPHPFLHETRWESHTNILSFYRSYLEARKAFLQSIG

SEQ ID NO: 4302 - protein, 368 aa, Artificial
  Synthetic
MTEQNERPYNGTYYTLEDKHFWAAFLNLARHNAYITLAHIDRQLAYSKADITNDEDILFFKGQWKNLDNDLERKARLRSLILKHFSFLEGAAYGKKLFESQSSGNKSSKKKELTKKEKEVLQANALSLDNLKSILFDFLQKLKDFRNYYSHYRHPESSELPLFDGNMLQRLYNVFDVSVQRVKRDHEHNDKVDPHRHFNHLVRKGKKDRYGNNDNPFFKHHFVDREGKVTEAGLLFFVSLFLEKRDAIWMQKKIRGFKGGTETYQQMTNEVFCRSRISLPKLKLESLRTDDWMLLDMLNELVRCPKSLYDRLREEDRARFRVPVDILSDEDDTDGTEEDPFKNTLVRHQDRFPYFALRYFDLKKVFTS

SEQ ID NO: 4303 - protein, 705 aa, Artificial
  Synthetic
MTEQNERPYNGTYYTLEDKHFWAAFFNLARHNAYITLAHIDRQLAYSKADITNDEDILFFKGQWKNLDNDLERKARLRSLILKHFSFLEGAAYGKKLFESQSSGNKSSKKKELTKKEKEELQANALSLDNLKSILFDFLQKLKDFRNYYSHYRHPESSELPLFDGNMLQRLYNVFDVSVQRVKRDHEHNDKVDPHRHFNHLVRKGKKDKYGNNDNPFFKHHFVDREGTVTEAGLLFFVSLFLEKRDAIWMQKKIRGFKGGTETYQQMTNEVFCRSRISLPKLKLESLRTDDWMLLDMLNELVRCPKSLYDRLREEDRARFRVPVDILSDEDDTDGTEEDPFKNTLVRHQDRFPYFALRYFDLKKVFTSLRFHIDLGTYHFAIYKKNIGEQPEDRHLTRNLYGFGRIQDFAEEHRPEEWKRLVRDLDYFETGDKPYISQTTPHYHIEKGKIGLRFVPEGQHLWPSPEVGATRTGRSKYAQDKRLTAEAFLSVHELMPMMFYYFLLREKYSDEASAEMVQGRIKRVIEDVYAVYDAFARDEINTRDELDACLADKGIRRGHLPRQMIAILSQEHKDMEEKVRKKLQEMIADTDHRLDMLDRQTDRKIRIGRKNAGLPKSGVIADWLVRDMMRFQPVAKDTSGKPLNNSKANSTEYRMLQRALALFGGEKERLTPYFRQMNLTGGNNPHPFLHETRWESHTNILSFYR

SEQ ID NO: 4304 - protein, 812 aa, Artificial
  Synthetic
MTEQNERPYNGTYYTLEDKHFWAAFLNLARHNAYITLAHIDRQLAYSKADITNDEDILFFKGQWKNLDNDLERKARLRSLILKHFSFLEGAAYGKKLFESQSSGNKSSKKKELTKKEKEELQANALSLDNLKSILFDFLQKLKDFRNYYSHYRHPESSELPMFDGNMLQRLYNVFDVSVQRVKRDHEHNDKVDPHRHFNHLVRKGKKDRCGNNDNPFFKHHFVDREGTVTEAGLLFFVSLFLEKRDAIWMQKKIRGFKGGTEAYQQMTNEVFCRSRISLPKLKLESLRTNDWMLLDMLNELVRCPKSLYDRLREEDRARFRVPVDILSDEDDTDGTEEDPFKNTLVRHQDRFPYFALRYFDLKKVFTSLRFHIDLGTYHFAIYKKNIGEQPEDRHLTRNLYGFGRIQDFAEEHRPEEWKRLVRDLDYFETGDKPYITQTTPHYHIEKGKIGLRFVPEGQLLWPSPEVGATRTGRSKYAQDKRFTAEAFLSVHELMPMMFYYFLLREKYSEEVSAEKVQGRIKRVIEDVYAVYDAFARDEINTRDELDACLADKGIRRGHLPRQMIAILSQEHKDMEEKVRKKLQEMMADTDHRLDMLDRQTDRKIRIGRKNAGLPKSGVIADWLVRDMMRFQPVAKDTSGKPLNNSKANSTEYRMLQRALALFGGEKERLTPYFRQMNLTGGNNPHPFLHETRWESHTNILSFYRSYLKARKAFLQSIGRSDRVENHRFLLLKEPKTDRQTLVAGWKGEFHLPRGIFTEAVRDCLIEMGYDEVGSYKEVGFMAKAVPLYFERASKDRVLNLNQLPLIFFQSD

SEQ ID NO: 4305 - protein, 456 aa, Artificial
  Synthetic
MTEQNERPYNGTYYTLEDKHFWAAFFNLARHNAYITLAHIDRQLAYSKADITNDEDILFFKGQWKNLDNDLERKARLRSLILKHFSFLEGAAYGKKLFENKSSGNKSSKKKELTKKEKEELQANALSLDNLKSILFDFLQKLKDFRNYYSHYRHPESSELPLFDGNMLQRLYNVFDVSVQRVKRDHEHNDKVDPHRHFNHLVRKGKKDRYGNNDNPFFKHHFVDREEKVTEAGLLFFVSLFLEKRDAIWMQKKIRGFKGGTETYQQMTNEVFCRSRISLPKLKLESLRTDDWMLLDMLNELVRCPKSLYDRLREEDRACFRVPVDILSDEDDTDGAEEDPFKNTLVRHQDRFPYFALRYFDLKKVFTSLRFHIDLGTYHFAIYKKNIGEQPEDRHLTRNLYGFGRIQDFAEEHRPEEWKRLVRDLDYFETGDKPYLRLRLIQSLGKRTHLHLLPPS

SEQ ID NO: 4306 - protein, 411 aa, Artificial
  Synthetic
MTEQNEKPYNGTYYTLEDKHFWAAFLNLARHNAYITLTHIDRQLAYSKADITNDEDILFFKGQWKNLDNDLERKARLRSLILKHFSFLEGAAYGKKLFESQSSGNKSSKKKELTKKEKEELQANALSLDNLKSILFDFLQKLKDFRNYYSHYRHPESSELPLFDGNMLQRLYNVFDVSVQRVKRDHEHNHKVDPHRHFNHLVRKGKKDKYGNNDNPFFKHHFVDREGKVTEAGLLFFVSLFLEKRDAIWMQKKIRGFKGGTETYQQMTNEVFCRSRISLPKLKLESLRTDDWMLLDMLNELVRCPKSLYDRLREEDRARFRVPVDILSDEDDTDGTEEDPFKNTLVRHQDRFPYFAILRSEESLHFPPLPYRFGHLPLRHIQEEHRRAAGRPPSDAQPVRLRPNTGFRRGA

SEQ ID NO: 4307 - protein, 411 aa, Artificial; identical to SEQ ID NO: 4306
  Synthetic

SEQ ID NO: 4308 - protein, 616 aa, Artificial
  Synthetic
MENDKKLEESACYTLNDKHFWAAFLNLARHNVYITVNHINKTLGEGEINRDGYETTLENTWNEIKDINKKARLRELIIKHFPFLEAATYQQRSTDSTKQKEEKQAEAQSLESLKHCLFPFLKKLQKSRDHYSHYKHSKSLERPKFEEDLQKKMYNIFDVSIRLVKEDYKHNTDINLKEDFKHLNRTGKFKYSFADNKGNITESGLLFFISLFLEKKDAIWMQKKLKGFKDSREKYQKMTNEVFCRSRILLPKLRLESTQTQDWILLDMLNELIRCPKSLYERLREKERKEFKVPIEIADEDYDAEQEPFRNTLVRHQDRFPYFALRYFDYNEIFTNLRFQIDLGTYHFSIYKKLIGGNKEDRHLTHKLYGFERIQEFAKQNRPDEWKALVKDLDTFNKEEEKLYISETTPHYHLENEKIGIVFKNHNIWPSTQTELTNNNRKKYNLGVSIKAEAFLSVHELLPMMFYYLLLKTKNTHNGNEVEAKKKGTKNKKQEKHKIEAIIESKIKDIYNLYDAFANGEINSIEELEEHCKGKDIEIGHLPKQMIAILKDEHKDMAKKAETKQEKMILATENRLKTLDKKLKGKIRNGKRCNSALKSGEIASWLVNDMMRFQPV

SEQ ID NO: 4309 - protein, 482 aa, Artificial
  Synthetic
MEDDKKTTDSISYELKDKHFWAAFLNLARHNVYITVNHINKILEEDEINRDGYENTLENSWNEIKDINKKDRLSKLIIKHFPFLEAATYRQNPTDTTKQKEEKQAEAQSLESLKKSFFVFIYKLRDLRNHYSHYKHSKSLERPKFEEGLLEKMYNIFNASIRLVKEDYQYNKDINPDEDFKHLDRTEEEFNYYFTKDNEGNITESGLLFFVSLFLEKKDAIWLQQKLRGFKDNRESKKKMTNEVFCRSRMLLPKLRLESTQTQDWILLDMLNELIRCPKSLYERLQGEDREKFRVPIEIADEDYDAEQEPFKNTLVRHQDRFPYFALRYFDYNEIFTNLRFQIDLGTYHFSIYKKLIGGQKEDRHLTHKLYGFERIQEFDKQNRPDEWKAIVKDSDTFKKKEEKEEEKPYISETTPHYHLENKKIGIAFKNHNIWPSTQTELTNNKRKKYNLGTSIKAEAFLSVHELLPMMFYYPVVKDGKY

SEQ ID NO: 4310 - protein, 424 aa, Artificial
  Synthetic
VKMEDDKKTTDSISYALKDKHFWAAFLNLARHNVYITVNHINKILEEDEINRDGYENTLENSWNEIKDINKKDRLSKLIIKHFPFLEAATYRQNPTDTTKQKEEKQAEAQSLESLKKSFFVFIYKLRDLRNHYSHYKHSKSLERPKFEEDLQNKMYNIFDVSIQFVKEDYKHNTDINPKKDFKHLDRKRKGKFHYSFADNEGNITESGLLFFVSLFLEKKDAIWVQKKLEGFKCSNESYQKMTNEVFCRSRMLLPKLRLESTQTQDWILLDMLNELIRCPKSLYERLQGVNRKKFYVSFDPADEDYDAEQEPFKNTLVRHQDRFPYFALRYFDYNEIFTNLRFQIDLGTYHFSIYKKLIGGQKEDRHLTHKLYGFERIQEFDKQNRPDEWKAIVKDSDTFKKKEEKEEEKPYISETTPHYHLEN

SEQ ID NO: 4311 - protein, 496 aa, Artificial
  Synthetic
MENDKRLEESACYTLNDKHFWAAFLNLARHNVYITINHINKLLEIRQIDNDEKVLDIKALWQKVDKDINQKARLRELMIKHFPFLEFAIYNNNKDGKQEEKQAKAQSFESLKDCLFLFLKKLQESRNYYSHYKYSESSQEPKLEKELRKKMYNIFDASIRLVKEDYQYNKDIDPEKDFKHLERKEDFNYLFTDKDNKGKITKNGLLFFVSLFLEKKDAIWMQQKLRGFKDNRGNKEKMTHEVFCRSRMLLPKIRLESTQTQDWILLDMLNELIRCPKSLYERLQGAYREKFKVPFDSIDEDYDAEQEPFRNTLVRHQDRFPYFALRYFDYNEIFKNLRFQIDLGTYHFSIYKKLIGGQKEDRHLTHKLYGFERIQEFAKQNRPDEWKAIVKDLDTYETSNERYISETTPHYHLENQKIGIRFRNGNKEIWPSLKTNGENNEKSKYKLDKQYQAEAFLSVHELLPMMFYYLLLKKEEPNNDKKNASIVEGFIKREIR

SEQ ID NO: 4312 - protein, 841 aa, Artificial
  Synthetic
VRMENDKRLEESTCYTLNDKHFWAAFLNLARHNVYITINHINKLLEIRQIDNDEKVLDIKALWQKVDKDINQKARLRELMIKHFPFLEFAIYNNNKDGKQEEKQAKAQSFESLKRCLFLFLEKLQEARNYYSHYKYSESSKEPEFEEGLLEKMYNIFDENIQLVINDYQHNKDINPEKDFKHLDRTEEEFNYYFTKDKKGNITESGLLFFVSLFLEKKDAIWMQQKFRGFKDNRGNKEKMTHEVFCRSRMLLPKIRLESTQTQDWILLDMLNELIRCPKSLYERLQGAYREKFKVPFDSIDEDYDAEQEPFRNTLVRHQDRFPYFALRYFDYNEIFKNLRFQIDLGTYHFSIYKKLIGGQKEDRHLTHKLYGFERIQEFAKQNRPDEWKAIVKDLDTYETSNERYISETTPHYHLENQKIGIRFRNGNKEIWPSLKTNGENNEKSKYKLDKQYQAEAFLSVPELLPMMFYYLLLKKEEPNNDKKNASIVEGFIKREIRYIYKLYDAFANGEINNIDDLEKYCEDKGIPKRHLPKQMVAILYDEHKDMVEEAKRKQKEMVKDTKKLLATLEKQTQGEIEDGGRNIRLLKSGEIARWLVNDMMRFQPVQKDNEGNPLNNSKANSTEYQMLQRSLALYNKEEKPTRYFRQVNLINSSNPHPFLKWTKWEECNNILSFYRSYLTKKIEFLNKLKPEDWEKNQYFLKLKEPKTNRETLVQGWKNGFNLPRGIFTEPIREWFKRHQNDSKEYKNVEALDRVGLVTKVIPLFFKEEYFKEDAQKEINNCVQPFYSFPYNVGNIHKPDEKDFLPSEERKKLWGDKKYKFKGYKAKVKSKKLTDKEKEEY

SEQ ID NO: 4313 - protein, 396 aa, Artificial
  Synthetic
VKMEDDKKTTESTNMLDNKHFWAAFLNLARHNVYITVNHINKVLELKNKKDQDIIIDNDQDILAIKTHWEKVNGDLNKTERLRELMTKHFPFLETAIYTKNKEDKEEVKQEKQAKAQSFDSLKHCLFLFLEKLQEARNYYSHYKYSESTKEPMLEKELLKKMYNIFDDNIQLVIKDYQHNKDINPDEDFKHLDRTEEEFNYYFTRNKKGNITASGLLFFVSLFLEKKDAIWMQQKLRGFKDNRESKKKMTHEVFCRRRMLLPKLRLESTQTQDWILLDMLNELIRCPKSLYERLQGEDREKFKVPFDPADEDYDAEQEPFKNTLVRHQDRFPYFALRYFDYNEIFTNLRFQIDLGTYHFSIYKKLIGGQKEDRHLTHKLYGFERIQEFNKQNRPDE

SEQ ID NO: 4314 - protein, 539 aa, Artificial
  Synthetic
MEDDKKTKESTNMLDNKHFWAAFLNLARHNVYITVNHINKVLELKNKKDQDIIIDNDQDILAIKTHWEKVDGDLNKTERLRELMTKHFPFLETAIYTKNKEDKEEVKQEKQAEAQSLESLKDCLFLFLEKLQEARNYYSHYKYSEFSKEPEFKEELLEKMYNIFDANIQLVINDYQHNKDIDPEEDFKHLDTIEDSSYSFTVKDNKEKITASGLLFFVSLFLEKKDAIWMQQKLRGFKDNRESKKKMTHEVFCRSRILLPKLRLESTQTQDWILLDMLNELIRCPKSLYERLQGEDREKFKVPFDPADENYDAEQEPFKNTLVRHQDRFPYFALRYFDYNEIFTNLRFQIDLGTYHFSIYKKLIGGQKEDRHLTHKLYGFERIQEFAKQNRPDEWKAIVKDSDTFKKKEELKGKTIGVQLGSIQEQFAKDNGSVPKLYNNFTEALLDLQNQKIDAVIIAEVSGNEYLKTMKGIKKIDTIKDKLPSASIAFRKADSKLTKEFSDAILKLKDSQKISATVEIAAIFSEKTTELNSSRCLIP

SEQ ID NO: 4315 - protein, 770 aa, Artificial
  Synthetic
VKMKEEEEKGKTPVVSTYNKDDKHFWAAFLNLARHNVYITINHINKLLEIREIDNDEKVLDIKALWQKVNKDLNQKARLRELMTKHFPFLETAIYTKNKEDKKEVKEEKQAKAQSFDSLNHCLFLFLEKLQEARNYYSHYKYSESSKEPMLEKELLKKMYNIFDNNIQLVIKDYQHNKDINPDEDFKHLDRTEEDFNYYFARNKKGNITASGLLFFVSLFLEKKDAIWMQQKLTGFKDNRENKKKMTHEVFCRSRMLLPKLRLESTQTQDWILLDMLNELIRCPKSLYERLKGEDRKKFEVPFDSTDEDYDAEQDPFKNTLIRHQDRFPYFVLRYFDYNEIFKNLRFQIDLGTYHFSIYKKLIGGQKEDRHLTHKLYGFERIQEFTKQHRPDDWKAIVKDFDTYETSEEPYISETTPHYHLENQKIGIRFRNGNNDIWPSLETNGENNEKSKYKLDKPYQAEAFLSVHELLPMMFYYLLLKKEEPNNDKKNASRVEGFIKREIRDIFKLYDAFANDEINNIDDLKKYCKDKHIEIRHLPKQMIAILESKPKDMAKEAKRKQKEMVKDTKKLLATLEKQTQKEKEDDGRNVKLLKSGEIARWLVNDMMRFQPVQKDNEGKPLNNSKANSTEYQMLQRSLALYNKEENPTRYFRQVNLIESSNPHPFLKWTKWEECNNILTFYYTYLTKKIEFLNKLKPEDWKKNQYFLKLKEPKTNRKTLVQGWKNGFNLPRGIFTEPIREWFERHQNDSEEYKKVEKLNKAGLVTKVIPL

SEQ ID NO: 4316 - protein, 647 aa, Artificial
  Synthetic
VKMKEEETPVVSTYNKDDKHFWAAFLNLARHNVYITINHINKLLEIREIDNDEKILDIKTLWEKVNGDLNKTERLRELMTKHFPFLETAIYSKNKEDKEEVKQEKQATAQSFKSLEHCLFLFLKKLQEARNYYSHYKYSESTKEPMLEKELLKKMYNIFDDNIQLVIKDYQHNKDINPDEDFKHLNRTEKEFNYYFTTNKKGNITASGLLFFVSLFLEKKDAIWMQQKLRGFKDNRESKKKMTHEVFCRSRMLLPKLRLESTQTQDWILLDMLNELIRCPKSLYERLQGVDREKFRVPIEIADEDYDAEQEPFKNTLVRHQDRFPYFALRYFDYNEIFTNLRFQIDLGTYHFSIYKKLIGGQKEDRHLTHKLYGFERIQEFNKQNRPDEWKALVKDLDTYETSEEPYISETTPHYHLENQKIGIRFRNGNNDIWPSLETNGENNEKSKYKLDKQYQAEAFLSVHELLPMMFYYLLLKKEKPNNDEINASIVEGFIKREIRYIYKLYDAFANGEINSIGDLEKYCEDKGIPKRHLPKQMVAILYDEHKDMVKEAKRKQRKMVKETEKLLAALEKQTQEEIEDGGRNIRLLKSGEIARWLVNDMMRFQPVQKDNEGNPLNNSKANSTEYQMLQRSLALYNKEEKPTRYF

SEQ ID NO: 4317 - protein, 309 aa, Artificial
  Synthetic
MEDDKKTTGSISYELKDKHFWAAFLNLARHNVYITINHINKLLEIREIDNDEKVLDIKALWEKVNGDLNKTERLRELMTKHFPFLETAIYTKNKEDKKEVKQEKQAEAQSLESLKDCLFLFLEKLQEARNYYSHYKYSEFSKEPEFEEGLLEKMYNIFDDNIQLVIKDYQHNKDINPDEDFKHLDRKGQFKYSFADNEGNITESGLLFFVSLFLEKKDAIWMQQKLRGFKDNRESKKKMTHEVFCRSRMLLPKLRLESTQTQDWILLDMLNELIRTNACKENTEKSSISPSTPQTKTTMQSKSLSKTHW

SEQ ID NO: 4318 - protein, 832 aa, Artificial
  Synthetic
LQKQDKLFVDRKKNAIFAFPKYITIMENKEKTEPIYYELTDKHFWAAFLNLARHNVYTTVNHINKLLEIAELKNDEDVLNIKDSWNKQAEKLDKKVRLRNLLMRHFPFLEAAAYEKTTSKDSNSKEQKEKEQAEALSLDNLKNVLFIFLEKLQSLRNYYSHYKYSEEAQKPTFENDLLKNMYKIFDTNVRLVKRDYMHHENVDMQRDFSHLNRKKQEGQTRKIIANPNFRYHFADEKGNMTIAGLLFFISLFLDKKDAIWMQKKLKGFKDGRNLREQMTNEVFCRSRISLPKLKLENVQTKDWMQLDMLNELVRCPKSLYERLREKDRESFKVPFDIFSDDYDAEEEPFKNTLVRHQDRFPYFVLRYFDLNEIFEQLRFQIDLGTYHFSIYNKLIGDEDEVRHLTHHLYGFARIQDFAPQNQPEEWRKLVKDLDHFETSQKPYISKTAPHYHLENEKIGIKFCSTHNNLFPSLKREKTCNGRSKFNLGTQFTAEAFLSVHELLPMMFYYLLLTKDYSRKESADKVEGIIRKEISNIYAIYDAFANGEINSIADLTCRLQKTNILQGHLPKQMISILEGRQKDMEKEAERKIGEMIDDTQRRLDLLCKQTNQKIRIGKRNAGLLKSGKIADWLVNDMMRFQPVQKDQNNIPINNSKANSTEYRMLQRALALFGSENFRLKAYFNQMNLVGNDNPHPFLAETQWEHQTNILSFYRNYLEARKKYLKGLKPQNWKQYQHFLILKVQKTNRNTLVTGWKNSFNLPRGIFTQPIREWFEKHNNSKRIYDQILSFDRVGFVAKAIPLYFAEEYKDNVQPFYDYPFNIGNRLKPKKGNS

SEQ ID NO: 4319 - protein, 845 aa, Artificial
  Synthetic
MRTIRTVRKKTPSKTRWSGIRIASPTSRYFDLKKVFTSLRFHIDLGTYHFAIYKKNIGEQPEDRHLTRNLYGFGRIQDFAEEHRPEEWKRLVRDLDYFETGDKPYITQTTPHYHIEKGKIGLRFVPEGQHLWPSPEVGATRTGRSKYAQDKRFTAEAFLSVHELMPMMFYYFLLREKYSDEASAERVQGRIKRVIEDVYAVYDAFARGEIDTLDRLDACLADKGIRRGHLPRQMIAILSQEHKDMEEKVRKKLQEMIADTDHRLDMLDRQTDRKIRIGRKNAGLPKSGVIADWLVRDMMRFQPVAKDTSGKPLNNSKANSTEYRMLQRALALFGGEKERLTPYFRQMNLTGGNNPHPFLHETRWESHTNILSFYRSYLKARKAFLQSIGRSDRVENHRFLLLKEPKTDRQTLVAGWKGEFHLPRGIFTEAVRDCLIEMGLDEVGSYKEVGFMAKAVPLYFERASKDRVQPFYGYPFNVGNSLKPKKGRFLSKEKRAEEWESGKERFRDLEAWSHSAARRIEDAFVGIEYASWENKTKIEQLLQDLSLWEAFESKLKVKADKINIAKLKKEILEAKEHPYLDFKSWQKFERELRLVKNQDIITWMMCRDLMEENKVEGLDTGTLYLKDIRTDVYEQGSLNVLNRVKPMRLPVVVYRADSRGHVHKEQAPLATVYIEERDTKLLKQGNFKSFVKDRRLNGLFSFVDTGGLAMEQYPISKLRVEYELAKYQTARVCAFEQTLELEESLLTRYPHLPDKNFRKMLESWSDPLLDKWPDLHRKVRLLIAVRNAFSHNQYPMYDEAVFSSIRKYDPSSLDAIEERMGLNIAHRLSEEVKQAKEMVERIIQV

SEQ ID NO: 4320 - protein, 845 aa, Artificial; identical to SEQ ID NO: 4319
  Synthetic

SEQ ID NO: 4321 - protein, 869 aa, Artificial
  Synthetic
MQKKIRGFKGGTETYQQMTNEVFCRSRISLPKLKLESLRTDDWMLLDMLNELVRCPKSLYDRLHEEDRARFRVPVDILSDEDDTDGTEEDPFKNTLVRHQDRFPYFALRYFDLKKVFTSLRFHIDLGTYHFAIYKKNIGEQPEDRHLTRNLYGFGRIQDFAEEHRPEEWKRLVRDLDYFETGDKPYITQTTPHYHIEKGKIGLRFVPEGQHLWPSPEVGATRTGRSKYAQDKRLTAEAFLSVHELMPMMFYYFLLREKYSDEASAERVQGRIKRVIEDVYAVYDAFARDEINTRDELDACLADKGIRRGHLPRQMIAILSQEHKDMEEKIRKKLQEMIADTDHRLDMLDRQTDRKIRIGRKNAGLPKSGVIADWLVRDMMRFQPVAKDTSGKPLNNSKANSTEYRMLQRALALFGGEKERLTPYFRQMNLTGGNNPHPFLHETRWESHTNILSFYRSYLKARKAFLQSIGRSDRVENHRFLLLKEPKTDRQTLVAGWKSEFHLPRGIFTEAVRDCLIEMHDEVGSYKEVGFMAKAVPLYFERACKDRVQPFYDYPFNVGNSLKPKKGRFLSKEDRAEEWESGKERFRLAKLKKEILEAKEHPYLDFKSWQKFERELRLVKNQDIITWMMCRDLMEENKVEGLDTGTLYLKDIRTEVQEQGSLNVLNRVKSMRLPVVVYRADSRGHVHKEQAPLATVYIEERDTKLLKQGNFKSFVKDRRLNGLFSFVDTGGLAMEQYPISKLRVEYELAKYQTARVCAFEQMLELEESLLTRYPHLPDKNFRKMLESWSDPLLDKWPDLHRKVRLLIAVRNAFSHNQYPMYDEAVFSSIRKYDPSSLDAIEERMGLNIAHRLSEEVKQAKEMVERIIQV

SEQ ID NO: 4322 - protein, 795 aa, Artificial
  Synthetic
VPFDIFSDDYNAEEEPFKNTLVRHQDRFPYFVLRYFDLNEIFTQLRFQIDLGTYHFSIYNKRIGDEDEVRHLTHHLYGFARIQDFAQQNQPEVWRKLVKDLDYFEASQEPYISKTTPHYHLENEKIGIKFCSAHNNLFPSLQTDKTCNGRSKFNLGTQFTAEVFLSVHELLPMMFYYLLLTKDYSRKESANKVEGIIRKEISNIYDIYDAFANGEINSIADLTCRLQKTNILQGHLPKQMISILEGRQKDMEKEAERKIGEMIDDTQRRLDLLCKQTNQKIRIGKRNAGLLKSGKIADWLVSDMMRFQPVQKDTNNAPINNSKANSTEYRMLQHALALFGSESSRLKAYFRQMNLVGNANPHPFLAETQWEHQNNILSFYRKYLEARKKYLGSLKPKDWKQYQHFLMLKEQKSNRNTLVAGWKNGFNLPRGIFTEPIRKWFEEHNNSEGLYDQILSFGRVGFVAKAIPLYFAEECKDCVQPFYDYPFNVGNKLKPKKGQFLDKKEHVELWQKNKELFKNYPPEKRKTDLAYLDFLSWKKFERELRLIKNQDIVTWLMFKELFKTTTVEGLKIGEIHLRDIDTNTANEESNNILNRIMPMKLPVKTYETDNKGNILKERPLATFYIEETETKVLKQGNFKVLAKDRRLNGLLSFAETTDIDLEKNPITKLSVDHELIKYQTTRISIFEMTLGLEKKLIDKYSTLPTDSFRNMLERWLQCKANRPELKNYVNSLIAVRNAFSHNQYPMYDATLFAEVKKFTLFPSVDTKKIELNIAPQLLEIVGKAIKEIEKSENKN

SEQ ID NO: 4323 - protein, 348 aa, Artificial
  Synthetic
  misc_feature (342)..(345): Xaa can be any naturally occurring amino acid
MQKKIKGFKGGTENYMRMTNEVFCRNRMVIPKLRLETDYDNHQLMFDMLNELVRCPLSLYKRLKQEDQDKFRVPIEFLDEDNEADNSYQENANSDENPTEETDPLKNTLVRHQHRFPYFVLRYFDLNEVFKQLRFQINLGCYHFSIYDKTIGERTEKCHLTRTLFGFDRLQNFSVKLQPEHWKNMVKHLDTEESSDKPYLSDAMPHYQIENEKIGIHFLKTDTEKKETVWPSLEVEEVSSNRNKYKSEKNLTVDAFLSTHELLPMMFYYQLLSSEEKTRAAAGDKVQGVLQSYRKKIFDIYDDFANGTINSMQKLDERLAKDNLLRGNMPQQMLAILERQEXXXXICS

SEQ ID NO: 4324 - protein, 886 aa, Artificial
  Synthetic
MQKKIPGFKKASENYMKMTNEVFCRNHILLPKIRLETVYDKDWMLLDMLNEVVRCPLSLYKRLTPADQNKFKVPEKSSDNANRQEDDNPFSRILVRHQNRFPYFVLRFFDLNEVFTTLRFQINLGCYHFAICKKQIGDKKEVHHLTRTLYGFSRLQNFTQNTRPEEWNTLVKTTEPSSGNDGKTVQGVPLPYISYTIPHYQIENEKIGIKIFDGDTAVDTDIWPSVSTEKQLNKPDKYTLTPGFKADVFLSVHELLPMMFYYQLLLCEGMLKTDAGNAVEKVLIDTRNAIFNLYDAFVQEKINTITDLENYLQDKPILIGHLPKQMIDLLKGHQRDMLKAAEQKKAMLIKDTERRLERLNKQPEQKPNVAAKNIGALLRNGQIADWLVKDMMRFQPVKRDKEGNPINCSKANSTEYQMLQRAFAFYATDSCRLPRYFEQLHLINCDNSHLFLSRFEYDKQPNLIAFYAAYLKAKLDFLNELQPQNWVSDNYFLLLRAPKNNRQKLAEGWKNGFNLPRGLFTEKIKTWFNEHKTIVDISDCDIFKNRVGQVARLIPVFFDKKFKDHSQPFYRYNFNVGNVSKPTEAKYLSKEKREELFKSYQNKFKNNIPAEKTKEYREYKNFSLWKKFERELRLIKNQDILTWLMCKNLFDEKIEQGIDIPYIKLDSLQTNTSTKGSLNALAQVLPMVLAIYIGNSESNNGTGANEEENKGPMVYIKEEGTKLLKWGNFKTLLADRRIKGLFSYIEHDDIDLKQHPLTKRRVDLELDLYQTCRIDIFQQTLGLEAQLLNKYSDLNTDNFYQMLIGWRKKEGIPRDIKEDTDFLKDVRNAFSHNQYPDSKKIAFSRIRKFNPKKTILNEKKGLGIAKQMYEEVEKVVNRIKGIELFD

SEQ ID NO: 4325 - protein, 787 aa, Artificial
  Synthetic
MEKPLPPNVYTLKHKFFWGAFLNIARHNAFITICHINEQLGLTTPPNDDKIADVVCGTWNNILNNDHDLLKKSQLTELILKHFPFLAAMCYHPPKKEGKKKGSQKEQQKEKENEAQSQAEALNPSELIKALKTLVKQLRTLRNYYSHYKHKKPDAEKDIFKHLYKAFDASLRMVKEDYKAHFTVNLTQDFAHLNRKGKNKQDNPKFDRYRFEKDGFFTESGLLFFTNLFLDKHDAYWMLKKVSGFKASHKQSEKMTTEVFCRSRILLPKLRLESRYDHNQMLLDMLSELSRCPKLLYEKLSEKDKKHFQVEADGFLDEIEEEQNPFKDALIRHQDRFPYFALRYLDLNESFKSIRFQVDLGTYHYCIYDKKIGDEQEKRHLTRTLLSFGRLQDFTEINRPQEWKALTKDLDYKETSKQPFISKTTPHYHITDNKIGFRLGTSKELYPSLEVKDGANRIAKYPYNSDFVAHAFISVHELLPLMFYQHLTGKSEDLLKETVRHIQRIYKDFEEERINTIEDLEKANQGRLPLGAFPKQMLGLLQNKQPDLSEKAKIKIEKLIAETKLLSHRLNTKLKSSPKLGKRREKLIKTGVLADWLVKDFMRFQPVAYDVQNQPIESSKANSTEFQLIQRALALYGGEKNRLEGYFKQTNLIGNTNPHPFLNKFNWKACRNLVDFYQQYLEQREKFLEAIKNQPWEPYQYCLLLKIPKENKKIWLKVGNKEALACQEGCLPKRLERSFRKTSRYPNLLERRLKNTVEWALSPEPLHCTLGKDTKTTTRVFTTFRTS

SEQ ID NO: 4326 - protein, 365 aa, Artificial
  Synthetic
MEKPLPPNVYTLKHKFFWGAFLNIARHNAFITICHINEQLGLKIPSNDDKIADVVCGTWNNILNNDHDLLKKSQLTELILKHFPFLAAMCYHPPKKEGKKKGSQKEQQKEKENEAQSQAEALNPSELIKALETLVNQLHNLRNYYSHYKHKKPDAEKDIFKHLYKAFDASLRMVKEDYKAHFTVNLTRDFAHLNRKGKNKQDNPKFDRYRFEKDGFFTESGLLFFTNLFLDKRDAYWMLKKVSGFKASHKQSEKMTTEVFCRSRILLPKLRLESRYDHNQMLLDMLSELSRCPKLLYEKLSEENKKHFQVEADGFLDEIEEEQNPFKDALIRHQDRFPYFALRYLDLNESFKSINSLCILNNTDF

SEQ ID NO: 4327 - protein, 365 aa, Artificial; identical to SEQ ID NO: 4326
  Synthetic

SEQ ID NO: 4328 - protein, 381 aa, Artificial
  Synthetic
LPRGLFTEAIREILSEDLTLSKPIRKEIKKHGRVGFISRAITLYFRERYQDDHQSFYNLPYELEAKASTPKPPLPKKREYVLRAEHYEYWQQNKPQSPTELQRLELHTSDRWKDYLLYKRWQHLEKKLRLYRNQDVMLWLMTLELTKNHFKELKLNYHQLKLENLAVNVQEADAKLNPLNQTLPMVLPVKVYPATAFGEVQYQETPIRTVYIREEHTKALKMGNFKALVKDRRLNGLFSFIKEENDTQKHPISQLRLRRELEIYQSLRVDAFKETLDLEEKLLKKHTSLSSLENKFRILLEEWKKEYAASSMITDEHIAFIASVRNAFCHNQYPFYEEALHAPIPLFTVAQPTTEEKDGLGIAEALLRVLREYCEIVKSQI

SEQ ID NO: 4329 - protein, 754 aa, Artificial
  Synthetic
SIRFQVDLGTYHYCIYDKKIGDEQEKRHLTRTLLSFGRLQDFTEINRPQEWKALTKDLDYKETSKQPFISKTTPHYHITDNKIGFRLGTSKELYPSLEVKDGANRIAKYPYNSDFVAHAFISVHELLPLMFYQHLTGKSEDLLKETVRHIQRIYKDFEEERINTIEDLEKANQGRLPLGAFPKQMLGLLQNKQPDLSEKAKIKIEKLIAETKLLSHRLNTKLKSSPKLGKRREKLIKTGVLADWLVKDFMRFQPVAYDVQNQPIESSKANSTEFQLIQRALALYGGEKNRLEGYFKQTNLIGNTNPHPFLNKFNWKACRNLVDFYQQYLEQREKFLEAIKNQPWEPYQYCLLLKIPKENRKNLVKGWEQGGISLPRGLFTEAIRETLSEDLTLSKPIRKEIKKHGRVGFISRAITLYFRERYQDDHQSFYNLPYELEAKASTPKPPLPKKREYVLRAEHYEYWQQNKPQSPTELQRLELHTSDRWKDYLLYKRWQHLEKKLRLYRNQDVMLWLMTLELTKNHFKELKLNYHQLKLENLAVNVQEADAKLNPLNQTLPMVLPVKVYPATAFGEVQYQETPIRTVYIREEQTKALKMGNFKALVKDRRLNGLFSFIKEENDTQKHPISQLRLRRELEIYQSLRVDAFKETLSLEEKLLNKHASLSSLENEFRTLLEEWKKKYAASSMVTDEHIAFIASVRNAFCHNQYPFYKETLHAPILLFTVAQPTTEEKDGLGIAEALLRVLREYCEIVKSQI

SEQ ID NO: 4330 - protein, 754 aa, Artificial; identical to SEQ ID NO: 4329
  Synthetic

SEQ ID NO: 4331 - protein, 840 aa, Artificial
  Synthetic
MNNLINVNFKKFDLESDKYFFAAYLNKATQNVYIILKDISESLGLGFELLNDNNIMTANMWSYLQSNKEPEVSIRIIEKLNKQFPFINYLAKRNSFVKRNEFVATPYDYYEVFELIIEQLVKFRNYYSHPLSEKVVMKQSIIEGMRVLFDSSRREVKKRFAFKTKEINHLVRLSSRKINDKKESYESEFFEYRFADKFNLISEKGFAFFVSMWLPRTDAQFFLKNIKGFSRTDTISQKAILEIFTFYSLRIPQTKFECDYSNEIYFSEMINELQRCPKELYHLLNQEDREKFESLNNSRFNNNEYEALPILKRNDNRFFYFALRYLDNIFKNTKFNIDLGYYCFHVYNQEIDGIARKRRWVKHISVFGNLKDFTLNNRPKEWIEKINKNQDSQNENNEIYVTETVPHYHINEHNIGLKIINNYSDLKNSNKIWPELQKFKFENKEKLKPRNEKPDCWLSLYELPAIVFYEILRRKNNKGDSAEKIINNHCNNIKSFFEDIEKGLFHSNYTEDALKKELENRNLEKSHIPKAIIKYLTSAKTESFEVKAQNKLDELYYETCEMLNKINRQKSSFCEKPGSKDYVEMKCEVLADFLARDMIRLQKPIRNDFGKANGTEFSLLHAKLAFFGINKNTLLDTFKLCNLSESSNPHPFLDKINIKQSNNLLDFYEIYLNNRKDYFKSCLTEKKYNEYHFLKLGERRKKSGEKYIIKLAKELKDENVINLPRGLFLNPIIETLLIDDKTKSLAQEVKKMKRVNVSFIIEKYFSEIRKDQPQEFYRYKKSYEILNKLFDNREKFEKREALTKKQFDTNELEKLTTKIYEKTSDNELTRLLAQKIKSQI

SEQ ID NO: 4332 - protein, 744 aa, Artificial
  Synthetic
LFMPFYHSTIDKALFGAYLNMARNNLRMVLTNIEEKVYGKSGNWKEDNMRHSPVIKALEKNEQPDISKRITDMLLRDLPFLKLTVKSKINPSPNDYAKSLIGFIEQLSDLRNFNCHYLHNSYKTNPEIIESLRHIFDAARRRVKIRFNNTTEEVEHLVRKTARMVNGKRVGIEKKNYSFAFADAHEEITEIGIAFFTCLFLDKKYITLFLKQLKGFKDSRTRKTRATINTFGFFNIRIPQPKLQSNDTKEGLLMDILEDLKRCPNELFEHLSAKDQERFRVKADNLIEENEVLQKRFSDRFPYLALRYFELTDHVKDFQFHTDLGKYNFKHYKKQVGGEERIRQLQKNMKGTGRLKDFTEDKMPEEWNVLVKRSDELPEGYMEPHIVFTIPHYHFVNNQIGVCINDVAKYPDAKTRKNPEPDIWLSIYELPALIFLHLLTKRDDGSSEIKWVLYRHDQNIKRFFKALVEDKLQPGFTKETLQSELNKYNLEYSHIPKVLIEYLLKKTVKNVQQKAEDKLHVLLSETIVLLRKFDEDVEKAKEKEGGKRYKPIQSGKIADFIARDMLFLQPPVNEKDGKANSTLFQVLQARLAYYGRDKNLLNSLYKECNLIDSANAHPFLNNVPLAYSIVDYYKNYLLKRKEYLEKLLEKCMKGKINSNEFHFLHLGAREKRSGDSYYKNLAKTFSEKPINFPRGLFLNAIKQQSKNKNGESIKKFLEEHERVNTIFLIQEHFKTVEEDEAQPF

SEQ ID NO: 4333 - protein, 458 aa, Artificial
  Synthetic
MDTPSSIERKHIVLTDKYYFAAYLNMARHNVYMVLTDINTRLGFEKVPGDDAGAVSVIVLQKLKEDSTKKNVIAPDIQLKIIKELHAHFSFLKPMMFAWKKPIGEATEEEIQKMEYAPGDYYTFFAVFLKALNDLRNEYTHVATQPFDFPADLLHALRVTFDAGVRKAKARFSFEAKDVEHLVRQVKGGKEKPAFKYKFQLKGSKSLTTYGLSFFICLLLERKYASLFTQKLEGLKDKRTRAFKATYEVFAVHCITLPKARYTSDSGEGSLLLDMLNELKRCPDILFPHLQAKNQDVFRIPVEDVPGMEQEEDNNFVLLKRYEDRFPYLALRFMDEVKWFQKLHFPVDLGNYHYHLYDKTVDGMPRVGSLWEKMIGYGRLPDYQQAFLEKKVPDSWLRLWKNHEVRTEGAKAPYIPPAMPHYHLPDNNIAIRITTENGWPDLTINEADADKNKPGKKH

SEQ ID NO: 4334 - protein, 765 aa, Artificial
  Synthetic
MNNEQNLEQRIFAQAKNIRDDKAYFGAHLNLARHNAFIILHHINQRLGFIDQNVQDDAQFKKFKCLTILKQSSKPDLIAKSLDLIRFHFPFLQILTDKLSDIRSSNGERKILTPQEEGEIIESLLTDLNGYRNEYCHGENKSHVPDSYLIKNLKSIYDASLRMVKERFKLEPHKIKHLERNNKDGEKLNFKYALSNNSSISEKGLVFFINLFLEVKDSYSFIKKIEGFKNAGTNSLNATTYCFTIQHVRLPNPKITSQEYTKEELLLRMMNYLEKVPDQIFKTLSPADQENCKSNVDVFETPIEGDLIEKSLHKRYRDQFPEFALNYIDYYKLFPNIRFQINLGKFIFSVKDKEILGETRKRRQIQMLRGFGQIQDYQNKKNIPEIWQSLINKSHEIPEDFPDPYINDMEPHYHIENNNIYFKFMEPDTTHWPRIDARIENQNNINAHPRPRLLQADGILSVYELAPLLFYEMIRSDKSKSAETILSIQKSNIERLLNDIKSGELTKVALDKIPNPYSPSTKKFNTAKQVILKEKIEKRKIELNEKLKKYKLALDDLPKMILYYLLNIEHEDISLKVIPIIKSITVILNTQTHPANFEYLAVPKKSKHAYLKAMITNWEELNISTGPMGIYFANTFVGTTTLNPESIEDTLSISLGPDIATQLKRTKIAENTKKETFSAKKHSNIAWEIDIKNSKTRDIEVRIEDQIPLSKLNEVEVETKELSGGMLDQSTGIITWNVKIPAGKSIKKILKYQVRYPKSMKLILE

SEQ ID NO: 4335 - protein, 448 aa, Artificial
  Synthetic
METEEQIIENRIRTLANDPQYFGGYLNMARHNIYLIINNLTKTFSYLNFKEIADDAEIASDTHILSNIFDTSNSIIDEERIKVYNYLIKRHYLPFLKIFNAENIIEIGNEYTIDFKRLHNFIIKSFKKITDLRNAYSHYLSIDDDGNIANSNKKELDSSIKGDIDLLFKYAPQYSYIRNNQTQTGTDYTHLENYLLFEISENNTLTDQGLYFFINLFLTREHATKFLKRFKGFKNETTPPFRATIQAFTSYALKLPDERLGNENPIHSLLMEILAELNKCPKELFIHLTDEWKKEFEPVLSENGRKNIVLNSINYNELNNEDIEEVTKELSTLKRYDDRYPYFALRYLEDTNCLKRIRFQITLGKLIVNRYDKKIIGINQDRRVLKTVNTFGKLSDFVDKESDVLEILKHHVINTENIVFEQYAPHYNTNNNKIAFYIFDEEDEKMRR

SEQ ID NO: 4336 - protein, 448 aa, Artificial; identical to SEQ ID NO: 4335
  Synthetic

SEQ ID NO: 4337 - protein, 448 aa, Artificial; identical to SEQ ID NO: 4335
  Synthetic

SEQ ID NO: 4338 - protein, 448 aa, Artificial; identical to SEQ ID NO: 4335
  Synthetic

SEQ ID NO: 4339 - protein, 448 aa, Artificial; identical to SEQ ID NO: 4335
  Synthetic

SEQ ID NO: 4340 - protein, 448 aa, Artificial; identical to SEQ ID NO: 4335
  Synthetic

SEQ ID NO: 4341 - protein, 448 aa, Artificial; identical to SEQ ID NO: 4335
  Synthetic

SEQ ID NO: 4342 - protein, 448 aa, Artificial; identical to SEQ ID NO: 4335
  Synthetic

SEQ ID NO: 4343 - protein, 448 aa, Artificial; identical to SEQ ID NO: 4335
  Synthetic

SEQ ID NO: 4344 - protein, 448 aa, Artificial; identical to SEQ ID NO: 4335
  Synthetic

SEQ ID NO: 4345 - protein, 448 aa, Artificial; identical to SEQ ID NO: 4335
  Synthetic

SEQ ID NO: 4346 - protein, 448 aa, Artificial; identical to SEQ ID NO: 4335
  Synthetic

SEQ ID NO: 4347 - protein, 448 aa, Artificial; identical to SEQ ID NO: 4335
  Synthetic

SEQ ID NO: 4348 - protein, 448 aa, Artificial; identical to SEQ ID NO: 4335
  Synthetic

SEQ ID NO: 4349 - protein, 448 aa, Artificial; identical to SEQ ID NO: 4335
  Synthetic

SEQ ID NO: 4350 - protein, 448 aa, Artificial; identical to SEQ ID NO: 4335
  Synthetic

SEQ ID NO: 4351 - protein, 448 aa, Artificial; identical to SEQ ID NO: 4335
  Synthetic

SEQ ID NO: 4352 - protein, 448 aa, Artificial; identical to SEQ ID NO: 4335
  Synthetic

SEQ ID NO: 4353 - protein, 448 aa, Artificial; identical to SEQ ID NO: 4335
  Synthetic

SEQ ID NO: 4354 - protein, 448 aa, Artificial; identical to SEQ ID NO: 4335
  Synthetic

SEQ ID NO: 4355 - protein, 448 aa, Artificial; identical to SEQ ID NO: 4335
  Synthetic

SEQ ID NO: 4356 - protein, 448 aa, Artificial; identical to SEQ ID NO: 4335
  Synthetic

SEQ ID NO: 4357 - protein, 448 aa, Artificial; identical to SEQ ID NO: 4335
  Synthetic

SEQ ID NO: 4358 - protein, 448 aa, Artificial; identical to SEQ ID NO: 4335
  Synthetic

SEQ ID NO: 4359 - protein, 448 aa, Artificial; identical to SEQ ID NO: 4335
  Synthetic

SEQ ID NO: 4360 - protein, 448 aa, Artificial; identical to SEQ ID NO: 4335
  Synthetic

SEQ ID NO: 4361 - protein, 448 aa, Artificial; identical to SEQ ID NO: 4335
  Synthetic

SEQ ID NO: 4362 - protein, 448 aa, Artificial; identical to SEQ ID NO: 4335
  Synthetic

SEQ ID NO: 4363 - protein, 448 aa, Artificial; identical to SEQ ID NO: 4335
  Synthetic

SEQ ID NO: 4364 - protein, 448 aa, Artificial; identical to SEQ ID NO: 4335
  Synthetic

SEQ ID NO: 4365 - protein, 448 aa, Artificial; identical to SEQ ID NO: 4335
  Synthetic

SEQ ID NO: 4366 - protein, 448 aa, Artificial; identical to SEQ ID NO: 4335
  Synthetic

SEQ ID NO: 4367 - protein, 448 aa, Artificial; identical to SEQ ID NO: 4335
  Synthetic

SEQ ID NO: 4368 - protein, 448 aa, Artificial; identical to SEQ ID NO: 4335
  Synthetic

SEQ ID NO: 4369 - protein, 448 aa, Artificial; identical to SEQ ID NO: 4335
  Synthetic

SEQ ID NO: 4370 - protein, 448 aa, Artificial; identical to SEQ ID NO: 4335
  Synthetic

SEQ ID NO: 4371 - protein, 448 aa, Artificial; identical to SEQ ID NO: 4335
  Synthetic

SEQ ID NO: 4372 - protein, 589 aa, Artificial
  Synthetic
METKEQIGKNVYKTSENDPLYFGGYLNMARHNVFLIINHLTEVFDSLGYTKINDDEDIVNQDHILSQIFDPSKKELENERIRIYNYMIKRHHLPFLKVFNSEILNDEDGENMGIDFKSLHNFIIKSFKTLNDLRNSYSHYLAIDDDGNKIEKRSNIVDVSIKSDIKQLFKHAPKFSFIRNQETQHEEDYNHLDRYRIFENETNILTDQGLYFFINLFLERNHATKFLKKIKGFKNETTPPFRATIQSFTSFALKLPDIRLSNERPLFSLLMNMLTELNKCPKELFNHLTQKDKKEFEPLLNDEEKHNVVLNSTNYSEISDDELDEAIREITALKRYNDRFPYFALRFLDETNALKNIRFQITLGKLIIKRYDKEIAGIEENRRVIKTINAFGKLSDFIDNEEVVLKELKKNLADNNDIRFEQYSPHYNTNNIKIAFYVFDEGDDKTKYPFVFENKENNSDIQNNPSGFLSIHDLPKMLLFECLDINLKPENIIIDFIRSTNLEMFDLSELEKIRKQANYEPEYFSKRINKEKYLISKKGIKYLSKEVENNMLEDLGLSKDELILKDKDSFMKLTNSKKYIEYFSQIKYQ

SEQ ID NO: 4373 - protein, 721 aa, Artificial
  Synthetic
MEQNRKEGSLRTQEDIQYFGSYFNMARHNLYLITNHLTSVFSHLNFSQLDDDEDIWSDKPEVNEKNILLNIFDTKNERLQDERIRVFRYLMRRHHLPCLRIFTNDFKVLETTGNTIKKDELEVDFDAVHKFLNIAFKEINLFRNSYTHYLSINEEGKRLKKKKKISSKLVPVLNSLFSYAPEYSFLRHNIDKANKDVKIYKEEVKEYYDNIKSKYKLFENDSNELTDQGMYFFITLFLERAHGIKFLKRFRGFKNETTPPFKATIQAFTTYTLKIPDVRLDNDIPEQTMIMEVLNELNKCPEELFKFLKKEDKDRFQPVISDESLTNIINSSNYEEISDEDIDRLIKENSVLKRREDRFPYFALQYLEIMSKLKNIRFQIYLGKLVLKTYDKENPNIERRVITDIHAFGKLSDFVGKEAEVLDTFNSQLKDYGYSVAWDQYKPSYAIEMNRIGFYLFNDQGDKVENKILPSLCKNKNLERKVEIKVNKIQPTGFISTHMLPKFLISYLMGDVNEKNGEKTITHFLEKVNVSILDQNIINQIKSEIQNLDPIEFTKRCPKLSAIKNVKKLRVAGAIDKKIVEYQYINDTDIAKLVQKTGLAYDTMVTYSKDKFKEKTNHLNLSKKELETFAHIKYKYYLSERRKALDSVLKAYFPEIGSQDIPKELYNYLLNINEQDNKKLEHRRIKDEVTKTKKLIKDVNRSLKFEDKILLGDLATKIARD

SEQ ID NO: 4374 - protein, 686 aa, Artificial
  Synthetic
MEQNRKEGSLRTQEDIQYFGSYFNMARHNLYLITNHLTSVFSHLNFSQLDDDEDIWSDKPEVNEKNILLNIFDTKNERLQDERIRVFRYLMRRHHLPCLRIFTNDFKVLETTGNTIKKDELEVDFDAVHKFLNIAFKEINLFRNSYTHYLSINEEGKRLKKKKKISSKLVPVLNSLFSYAPEYSFLRHNIDKANKDVKIYKEEVKEYYDNIKSKYKLFENDSNELTDQGMYFFITLFLERAHGIKFLKRFRGFKNETTPPFKATIQAFTTYTLKIPDVRLDNDIPEQTMIMEVLNELNKCPEELFKFLKKEDKDRFQPVISDESLTNIINSSNYEEISDEDIDRLIKENSVLKRREDRFPYFALQYLEIMSKLKNIRFQIYLGKLVLKTYDKENPNIERRVITDIHAFGKLSDFVGKEAEVLDTFNSQLKDYGYSVAWDQYKPSYAIEMNRIGFYLFNDQGDKVENKILPSLCKNKNLERKVEIKVNKIQPTGFISTHMLPKFLISYLMGDVNEKNGEKTITHFLEKVNVSILDQNIINQIKSEIQNLDPIEFTKRCPKLSAIKNVKKLRVAGAIDKKIVEYQYINDTDIAKLVQKTGLAYDTMVTYSKDKFKEKTNHLNLSKKELETFAHIKYKYYLSERRKALDSVLKAYFPEIGSQDIPKELYNYLLNINEQDNKKLEHRRIK

SEQ ID NO: 4375 - protein, 711 aa, Artificial
  Synthetic
  misc_feature (687)..(708): Xaa can be any naturally occurring amino acid
MEQNRKEGSLRTQEDIQYFGSYFNMARHNLYLITNHLTSVFSHLNFSQLDDDEDIWSDKPEVNEKNILLNIFDTKNERLQDERIRVFRYLMRRHHLPCLRIFTNDFKVLETTGNTIKKDELEVDFDAVHKFLNIAFKEINLFRNSYTHYLSINEEGKRLKKKKKISSKLVPVLNSLFSYAPEYSFLRHNIDKANKDVKIYKEEVKEYYDNIKSKYKLFENDSNELTDQGMYFFITLFLERAHGIKFLKRFRGFKNETTPPFKATIQAFTTYTLKIPDVRLDNDIPEQTMIMEVLNELNKCPEELFKFLKKEDKDRFQPVISDESLTNIINSSNYEEISDEDIDRLIKENSVLKRREDRFPYFALQYLEIMSKLKNIRFQIYLGKLVLKTYDKENPNIERRVITDIHAFGKLSDFVGKEAEVLDTFNSQLKDYGYSVAWDQYKPSYAIEMNRIGFYLFNDQGDKVENKILPSLCKNKNLERKVEIKVNKIQPTGFISTHMLPKFLISYLMGDVNEKNGEKTITHFLEKVNVSILDQNIINQIKSEIQNLDPIEFTKRCPKLSAIKNVKKLRVAGAIDKKIVEYQYINDTDIAKLVQKTGLAYDTMVTYSKDKFKEKTNHLNLSKKELETFAHIKYKYYLSERRKALDSVLKAYFPEIGSQDIPKELYNYLLNINEQDNKKLEHRRIKXXXXXXXXXXXXXXXXXXXXXXCKS

SEQ ID NO: 4376 - protein, 452 aa, Artificial
  Synthetic
MEKNSLQDTTRTKDDVLYFGSYLNMGRHNVYLIINHVTEVFKHLGFRKLNDDEDIWSEKEQVNEGNILLNIFDPKKEKYQDERFRVFNYLIKRHHLPFLRIFTNQVLNDSGEIQNPEKKDMLIDFEGAHVFINKIFRELNEFRNSYTHYLSLSNEGTPLPKKLQINVELIKDLKTLFYYAPEFSFIRHNVLKQESKEEYETKVKAYYNDIRRKYRLFEGDESAGKLTDQGLFFFVNLFLERSNAIKFLKRFRGFKNETLPPFKATIQSFTTYALKIPDVRLDNDFPKQALLMEILTELNRCPKELYQVLGKEDKAKFDPKLEQSAINNILENVNYDELSDEHLEQAIKELVVLKRHDDRFPYFALRYLDEMNLLSQIRFQVYLGKVELKSYFKDDLGIERRILKPIYAFGKLSDFDNKEEDILRELKKNLPPDCQDIHWDQYKPHYNISQNN

SEQ ID NO: 4377 - protein, 773 aa, Artificial
  Synthetic
MDIIPKLTYTIESTPWYFGAYLNMARHNVYLLINHLTEKFSHLKYEKLKDDKEIKGKNILTEIFDTTKSDLDEERFRIYKYLVRGHYLPFIKVYSDSKGNALENNPLVYYDRLHQFINNSFALLVKFRDAFSHYLALDEHGNSIDSRQLNIDHEIAHDLETIFQDSLSLSASRFYLTQQESDFEHLKHYALFKETETKLSENGFYFFICLFLEKQYAIKFLKKIKGFKNETIPAFRATLLAFTHYTIRIPDIRLDNDEPRMGVLMEMLNELQKCPIELYKRLTDEDKKKFEPALDEESQLNLILNSTANSENLSDEQTDSLLIDLTTLKRHQNRFSYFALRCIDELNLLPGIHFQITVGKIELRAYPKVIGKVATNRRILKEVNAFGKLSAYEGKENWFSQQLKMIYEDENLVFDQYNPHYNIQENKIAFYVLDSGTSGTLLPLKKKNTLPTGFLSLNDLPKLIVRALNSPGRTVSLIKDFIAKNENIILNEDALVAWKEQLHLDPAVFTRRIIKENALRGKEGIAYLTQRKTDALFKRYKALSIKIDSLAGLKKLIDQLHSKKDKEYISQIVYTHFLNKRKDALAGILPKGLPVNQLPLKVINYLLSLETVGHKKKFLHYIKEEKRTCKTRLKALNKQENNAPKIGEIATFLARDIINMVVNEETKQNITSAYYNRLQNKIAYFSISKPEIAEMLTELNLFDKKTGHPFLDKGSIMASSGILAFYEYYLVEKAAWIDKQILHKNQLKKDLESHLNKLPFAYARRYQKNNEVN

SEQ ID NO: 4378 - protein, 773 aa, Artificial; identical to SEQ ID NO: 4377
  Synthetic

SEQ ID NO: 4379 - protein, 571 aa, Artificial
  Synthetic
MEILTIPEVIKCRTLSDDPQYFGGYLNMARLNVLNISNHIAKEFKLPLLPEEAHLKNSFLCKKENKKIDWNHVYARTIRFLSVMKVFDAESLPKEEQKTIDWEGKDFASMCDTLNIVFSELQEFSNDYSHYYSTEKETKRKTTVSDELALFLRTNFKRAIEYTKVRFKGILNDEDYQLVVSKKMLETNHTITHEGLVFLTSMFLEREYAFRFIRKIHGLSGPKDNSFIATCEVLMAFCLKLPQEQFRSDNRRQAISLELMNELKKCPKVLYHVITEEWKQKLKSVPEELETKNLHYNTKKEAIIEFEDYDLYIESLTKQVRYNNRFSEFALKYIDETGIFSEFRFQLDLGKILVDEYLKNFNDERVQRCIIENAKAFGKLNDYTNETKVMSLIVNGPPLKSFDRFAPHYNIESNKIGISTHEVTAKLVPNSKGEPAKKLHQPLPEAFLSLHELPKIILLEYLQKGEPEKLINEFILVNNSKLMNMSFIEEVKNQLPKEWDKFQRRTNAKHELAYDENTLAFLLQRKQILNKTLLAYQLNDKQIPTRILDYWLNISDADEERAISNRLKSIK

SEQ ID NO: 4380 - protein, 351 aa, Artificial
  Synthetic
MEILTIPEVIKCRTLSDDPQYFGGYLNMARLNVLNISNHIAKEFKLPLLPEEAHLKNSFLCKKENKKIDWNHVYARTIRFLSVMKVFDAESLPKEEQKTIDWEGKDFASMCDTLNIVFSELQEFSNDYSHYYSTEKETKRKTTVSDELALFLRTNFKRAIEYTKVRFKGILNDEDYQLVVSKKMLETNHTITHEGLVFLTSMFLEREYAFRFIRKIHGLSGPKDNSFIATCEVLMAFCLKLPQEQFRSDNRRQAISLELMNELKKCPKVLYHVITEEWKQKLKSVPEELETKNLHYNTKKEAIIEFEDYDLYIESLTKQVRYNNRFSEFALKYIDETGIFSEFRFQIDLGK

SEQ ID NO: 4381 - protein, 567 aa, Artificial
  Synthetic
MEILTIPEVIKCRTLSDDPQYFGGYLNMARLNVLNISNHIAKEFKLPLLPEEAHLKNSFLCKKENKKIDWNHVYARTIRFLSVMKVFDAESLPKEEQKTIDWEGKDFASMCDTLNIVFSELQEFSNDYSHYYSTEKETKRKTTVSDELALFLRTNFKRAIEYTKVRFKGILNDEDYQLVVSKKMLETNHTITHEGLVFLTSMFLEREYAFRFIRKIHGLSGPKDNSFIATCEVLMAFCLKLPQEQFRSDNRRQAISLELMNELKKCPKVLYHVITEEWKQKLKSVPEELETKNLHYNTKRETKIEFEDYDLYIESLTKQVRYNNRFSEFALKYIDETGIFSEFRFQLDLGKILVDEYLKNFNDERVQRCIIENAKAFGKLNDYTNETKVMSLIVNGPPLKSFDRFAPHYNIESNKIGISTHEVTAKLVPNSKGEPAKKLHQPLPEAFLSLHELPKIILLEYLQKGEPEKLINEFILVNNSKLMNMSFIEEVKNQLPKEWDKFQRRTNAKHELAYDENTLAFLLQRKQILNKTLLAYQLNDKQIPTRILDYWLNISDADEERAISNRL

SEQ ID NO: 4382 - protein, 608 aa, Artificial
  Synthetic
MEILTIPEVIKCRTLSDDPQYFGGYLNMARLNVLNISNHIAKEFKLPLLPEEAHLKNSFLCKKENKKIDWNHVYARTIRFLSVMKVFDAESLPKEEQKTIDWEGKDFASMCDTLNIVFSELQEFSNDYSHYYSTEKETKRKTTVSDELALFLRTNFKRAIEYTKVRFKGILNDEDYQLVVSKKMLETNHTITHEGLVFLTSMFLEREYAFRFIRKIHGLSGPKDNSFIATCEVLMAFCLKLPQEQFRSDNRRQAISLELMNELKKCPKVLYHVITEEWKQKLKSVPEELETKNLHYNTKRETKIEFEDYDLYIESLTKQVRYNNRFSEFALKYIDETGIFSEFRFQLDLGKILVDEYLKNFNDERVQRCIIENAKAFGKLNDYTNETKVMSLIVNGPPLKSFDRFAPHYNIESNKIGISTHEVTAKLVPNSKGEPAKKLHQPLPEAFLSLHELPKIILLEYLQKGEPEKLINEFILVNNSKLMNMSFIEEVKNQLPKEWDKFQRRTNAKHELAYDENTLAFLLQRKQILNKTLLAYQLNDKQIPTRILDYWLNISDADEERAISNRLKSIKRDCMSRLKALSKFNENGNRNKIPGIGEMATFLAKDII

SEQ ID NO: 4383 - protein, 737 aa, Artificial
  Synthetic
MEILTIPEVIKCRTLSDDPQYFGGYLNMARLNVLNISNHIAKEFKLPLLPEEAHLKNSFLCKKENKKIDWNHVYARTIRFLSVMKVFDAESLPKEEQKTIDWEGKDFASMCDTLNIVFSELQEFSNDYSHYYSTEKETKRKTTVSDELALFLRTNFKRAIEYTKVRFKGILNDEDYQLVVSKKMLETNHTITHEGLVFLTSMFLEREYAFRFIRKIHGLSGPKDNSFIATCEVLMAFCLKLPQEQFRSDNRRQAISLELMNELKKCPKVLYHVITEEWKQKLKSVPEELETKNLHYNTKRETKIEFEDYDLYIESLTKQVRYNNRFSEFALKYIDETGIFSEFRFQLDLGKILVDEYLKNFNDERVQRCIIENAKAFGKLNDYTNETKVMSLIVNGPPLKSFDRFAPHYNIESNKIGISTHEVTAKLVPNSKGEPAKKLHQPLPEAFLSLHELPKIILLEYLQKGEPEKLINEFILVNNSKLMNMSFIEEVKNQLPKEWDKFQRRTNAKHELAYDENTLAFLLQRKQILNKTLLAYQLNDKQIPTRILDYWLNISDADEERAISNRLKSIKRDCMSRLKALSKFNENGNRNKIPGIGEMATFLAKDIIEMVVSEGKKRKITSFYYDKMQECLALFGDPDKKQLFIHIVTKELKLNDPGGHPFLDKLDLQKINSTTGFYEIYLQEKGHKMVPENNPKTGKVIYTDHSWMALTFYKIEFNDKVDMLMTVVKLPLKKLNI

SEQ ID NO: 4384 - protein, 737 aa, Artificial
  Synthetic
MEILTIPEVIKCRTLSDDPQYFGGYLNMARLNVLNISNHIAKEFKLPLLPEEAHLKNSFLCKKENKKIDWNHVYARTIRFLSVMKVFDAESLPKEEQKTIDWEGKDFASMCDTLNIVFSELQEFSNDYSHYYSTEKETKRKTTVSDELALFLRTNFKRAIEYTKVRFKGILNDEDYQLVVSKKMLETNHTITHEGLVFLTSMFLEREYAFRFIRKIHGLSGPKDNSFIATCEVLMAFCLKLPQEQFRSDNRRQAISLELMNELKKCPKVLYHVITEEWKQKLKSVPEELETKNLHYNTKRETKIEFEDYDLYIESLTKQVRYNNRFSEFALKYIDETGIFSEFRFQIDLGKILVDEYLKNFNDERVQRCIIENAKAFGKLNDYTNETKVMSLIVNGPPLKSFDRFAPHYNIESNKIGISTHEVTAKLVPNSKGEPAKKLHQPLPEAFLSLHELPKIILLEYLQKGEPEKLINEFILVNNSKLMNMSFIEEVKNQLPKEWDKFQRRTNAKHELAYDENTLAFLLQRKQILNKTLLAYQLNDKQIPTRILDYWLNISDADEERAISNRLKSIKRDCMSRLKALSKFNENGNRNKIPGIGEMATFLAKDIIDMVVSEGKKRKITSFYYDKMQECLALFGDPDKKQLFIHIVTKELKLNDPGGHPFLDKLDLQKINSTTGFYEIYLQEKGHKMVPENNPKTGKVIYTDHSWMALTFYKIEFNDKVDMLMTVVKLPLKKLNI

SEQ ID NO: 4385 - protein, 662 aa, Artificial
  Synthetic
MEILTIPEVIKCRTLSDDPQYFGGYLNMARLNVLNISNHIAKEFKLPLLPEEAHLKNSFLCNKENKKIDWNHVYARTIRFLSVMKVFDAESLPKEEQKTIDWEGKDFASMCDTLNIVFSELQEFSNDYSHYYSTEKETKRKTTVSDELALFLRTNFKRAIEYTKVRFKGILNDEDYQLVVSKKMLETNHTITHEGLVFLTSMFLEREYAFRFIRKIHGLSGPKDNSFIATCEVLMAFCLKLPQEQFRSDNRRQAISLELMNELKKCPKVLYHVITEEWKQKLKSVPEELETKNLHYNTKRETKIEFEDYDLYIESLTKQVRYNNRFSEFALKYIDETGIFSEFRFQLDLGKILVDEYLKNFNDERVQRCIIENAKAFGKLNDYTNETKVMSLIVNGPPLKSFDRFAPHYNIESNKIGISTHEVTAKLVPNSKGEPAKKLHQPLPEAFLSLHELPKIILLEYLQKGEPEKLINEFILVNNSKLMNMSFIEEVKNQLPKEWDKFQRRTNAKHELAYDENTLAFLLQRKQILNKTLLAYQLNDKQIPTRILDYWLNISDADEERAISNRLKSIKRDCMSRLKALSKFNENGNRNKIPGIGEMATFLAKDIIEMVVSEGKKRKITSFYYDKMQECLALFGDPDKKQLFIHIVTKELKLNDPGGHPF

SEQ ID NO: 4386 - protein, 682 aa, Artificial
  Synthetic
METLTIPEVIKCRTLSDDPQFFGGYLNMARLNVFNISNHIAKEFNLSLLSEEAHLKDSFLCKKENKKINWNHVYSQTKRFLSVLKVFDAACLPKEEQKTINWEGKDFASMCDTLNIVFGELQEFSNDYSHYYSTEKGTIRKTTVSEEMALFLKINFNRAIEYTKEKFKGVLNDEDYLLVASIELFGAENRITTEGLVFLISMFLEREYAFRLIGKIKELLGTQNNCFIAIREVLMAFCLKLPHNRFQSDNTRQAFSLDLINELNRCPKVLYNAIAEEGKKKLRSIPGEPENKNLHDNNTKKEAKIEAEAYELYIESLTRQIRYSNRFPDFALKFIDETDIFSEFRFQIDLGKLLVDEYLKFFNGEQVQRRIIENVKAFGKINDFNDEAKVMNRIGNGHSLKRFEQFAPHYNTENNKIGISRHQSTAKLGSGSKGETEQKLHQPLPEAFLSLHELPKVILLDYLQKGEPEKLINDFILINNSKLMNMSFIEAVKTQLPPEWDEFQRRTDAKKEMAYNEKTLAYLLQRKQILNQVLTAYQLNDKQIPGRILDYWLNVTDAEEERAISNRIKSIKRDCMSRLKALGKFAENGNRNKIPGIGEMATFLAKDIIDMVVSEGKKRKITSFYYNKMQECLALFADPEKKQLFIHIVTNELKLNDSGGHPFLDKLDLQKINSTSNFYEIY

SEQ ID NO: 4387 - protein, 590 aa, Artificial
  Synthetic
METQISNIENKYRILNDDPQYFGGYLNMARLNVFNISNHIAKEFNLPLLPEEGHLKNSFLCQKENKKVNWNHIFSKTNRFLSILKVFDVESLPKEEQKMTDSEGKEFALMSDSLKIVFGELQEFRNDYSHYYSTENGTSRKTTVSDEMSLFLRTNFLRAIQYTKERFKGVLNDEDYQLVASKKVLEADNTITVEGLVFLTSMFLEREYAFQFIGKITGLKGTQNNSFISTREVLMAFCLKLPHDRFQSDDTRQAFSLDLINELTRCPKELYNAITEEGKMKFQPKLDEPGIKNLLDNSTNNKKKIDAEDYDEYIESLTKRIRYNNRFSDFALKYIEETDILGDFRFQIDLGKLFVDEYDKFFNGEEVPRRIIENVKAFGKLNDFNDESILLAQIENGYPSKGFEQFAPHYNTENNKIGISVKVDTAKLRSNSKGEPGKNLNQPLPEAFLSLNELPKIILLDYLQKGEPEQLINDFILINNSKLMKMSFIEEIKNLLPKEWNEFRKRADTRKQAAYNNETLAYLLERKQILNQVLVSYQLNDKQIPGRILDYWLNIKEVEEGRAVSDRLKLMKRDCMSRLKALEKFKIDRN

SEQ ID NO: 4388 - protein, 737 aa, Artificial
  Synthetic
METQISNIENKYRILNDDPQYFGGYLNMARLNVFNISNHIAKEFNLPLLPEEGHLKNSFLCQKENKKVNWNHIFSKTNRFLSILKVFDVESLPKEEQKMTDSEGKDFALMSDSLKIVFGELQEFRNDYSHYYSTENGTSRKTTVSDEMSLFLRTNFLRAIQYTKERFKGVLNDEDYQLVASKKVLEADNTITVEGLVFLTSMFLEREYAFQFIGKITGLKGTQNNSFISTREVLMAFCLKLPHDRFQSDDTRQAFSLDLINELTRCPKELYNAITEEGKMKFQPKLDEPGIKNLLDNSTNNKKKIDAEDYDEYIESLTKRIRYNNRFSDFALKYIEETDILGDFRFQIDLGKLFVDEYDKFFNGEEVPRRIIENVKAFGKLNDFNDESILLAQIENGYPSKGFEQFAPHYNTENNKIGISVKVDTAKLRSNSKGEPGKNLNQPLPEAFLSLNELPKIILLDYLQKGEPEQLINDFILINNSKLMKMSFIEEIKNLLPKEWNEFRKRADTRKQAAYNNETLAYLLERKQILNQVLVSYQLNDKQIPGRILDYWLNIKEVEEGRAVSDRLKLMKRDCMSRLKALEKFKIDRNRSKIPKTGEMATFLAKDIVDMVVSEGIKKKITSFYYDKMQECLALFADPEKKRLFIHIVIRELRLNGTGGHPFLFQLNFDKINCTSDFYSEYLREKGHKMVKEKNLKTGKIVLTDHSWMALTFYKLEFNDKVDKLMTVVKLPLNKLN

SEQ ID NO: 4389 - protein, 378 aa, Artificial
  Synthetic
METNQQTHENRRRTLTNDPQYFGGYLNMARLNIYNINNHIATDFKQATLPEEGQIPAAFLCNKTIKNLNWNHVHTRAVRFLPILKVFDSESLPKDERENSDTEGKDFASMSDTLKVVFSELQEFRNDYSHYYSTEKQDSRKLTVSPELANFLTVNFQRAIAYTKARMKDVLTDADYALVENLQMVAPDNKITTEGLVFLIAMFLEREQAFQFTGKIQGLKGTQFNSFIATREVLMSFCVKLPHDKFVSENLEQALTLDIINELNRCPKTLYSVITDKEKQQFRPELDAQGIDNLIANSTNDDERERILDEIDYQDYIEGLTKRVRYSNRFSYFAMRYIDEKNVFDKLRFHIDLGKYEVDNYTKQFAGEQAERKVLENA

SEQ ID NO: 4390 - protein, 651 aa, Artificial
  Synthetic
METNQQTHENRRRTLTNDPQYFGGYLNMARLNIYNINNHIATDFKQATLPEEGQIPAAFLCNKTIKNLNWNHVHTRAVRFLPILKVFDSESLPKDERENSDTEGKDFASMSDTLKVVFSELQEFRNDYSHYYSTEKQDSRKLTVSPELANFLTVNFQRAIAYTKARMKDVLTDADYALVENLQMVAPDNKITTEGLVFLIAMFLEREQAFQFTGKIQGLKGTQFNSFIATREVLMSFCVKLPHDKFVSENLEQALTLDIINELNRCPKTLYSVITDKEKQQFRPELDAQGIDNLIANSTNDDERERILDEIDYQDYIEGLTKRVRYSNRFSYFAMRYIDEKNVFDKLRFHIDLGKYEVDNYTKQFAGEQAERKVLENAKAFGKLSSFTDPELIQQRIDKQQHTAGFDQFAPHYNADNNKIGLSTKENIATLIAKSKASSKVEHNLKQPLPQAFLSLHELPKIILLEYLQKGQAEELINDFILLNDTRLMDITFIEEVKSQLPADWDEFSKRSDAKKKKAYSDSTLKYLRQRKTTLNTILSKSNLNDKQIPTRILNYWLNIKEVDDKRSVSDRIKLMKRDCMTRLKAVEKHKLNKSVKTPKVGEMATFLAKDIVDMIVSEEKKQKITSFYYDKMQECLALFANAEKKALFIH

SEQ ID NO: 4391 - protein, 582 aa, Artificial
  Synthetic
METNQQTHENRRRTLTNDPQYFGGYLNMARLNIYNINNHIATDFKQATLPEEGQIPAAFLCNKTIKNLNWNHVHTRAVRFLPILKVFDSESLPKDERENSDTEGKDFTSMSDTLKVVFSELQDFRNDYSHYYSTEKGDSRKLIVSPELANFLTVNFQRAIAYTKARMKDVLTDTDYALVENLQMVAPDNKITTEGLVFLIAMFLEREQAFQFTGKIQGLKGTQFNSFIATREVLMSFCVKLPHDKFVSENLEQALTLDIINELNRCPKTLYSVITDKEKQQFRPELDAQGIDNLIANSTNDDERETILDEIDYQDYIEGLTKRVRYSDRFSYFAMRYIDEKNVFDKLRFHIDLGKYEVDNYTKQFAGEQAERKVLENANAFGKLSSFTDPELIQQRIDKQQHTAGFDQFAPHYNADNNKIGLSTKENIATLIAKSKASSKVEHNLKQPLPQAFLSLHELPKIILLEYLQKGQAEELINDFILLNDTRLMDITFIEEVKSQLPANWDEFSKRSDAKKKKAYSDSTLKYLRQRKTTLNTILSKSNLNDKQIPTKILNYWLNIKEVDDKRSVSDRIKLMKRDCMT

SEQ ID NO: 4392 - protein, 672 aa, Artificial
  Synthetic
METNQQTHENRRRTLTNDPQYFGGYLNMARLNIYNINNHVATDFKRKPLPEEGHIPDALLCNKTIKNLNWNHVHTRALRFLPILKVFDSESLPKDERENSDTEGKDFTSMSDTLKVVFSELQDFRNDYSHYYSTEKGDSRKLIVSPELANFLTVNFQRAIAYTKARMKDVLTDTDYALVENLQMVAPDNKITTEGLVFLIAMFLEREQAFQFTGKIQGLKGTQFNSFIATREVLMSFCVKLPHDKFVSENLEQALTLDIINELNRCPKTLYSVITDKEKQQFRPELDAQGIDNLIANSTNDDERETILDEIDYQDYIEGLTKRVRYSDRFSYFAMRYIDEKNVFDKLRFHIDLGKYEVDNYTKQFAGEQAERKVLENANAFGKLSSFTDPELIQQRIDKQQHTAGFDQFAPHYNADNNKIGLSTKENIATLIAKSKASSKVEHNLKQPLPQAFLSLHELPKIILLEYLQKGQAEELINDFILLNDTRLMDITFIEEVKSQLPANWDEFSKRSDAKKKKAYSDSTLKYLRQRKTTLNTILSKSNLNDKQIPTRILNYWLNIKEVDDKRSVSDRIKLMKRDCMTRLKAVEKHKLNKSVKIPKVGEMATFLAKDIVDMIVSEEKKQKITSFYYDKMQECLALFANAEKKALFIHIVTNELKLFENGGHPFLQNIN

SEQ ID NO: 4393 - protein, 837 aa, Artificial
  Synthetic
METNQQTHENRRRTLTNDPQYFGGYLNMARLNIYNINNHVATDFKQATLPEEGQIPASFLCNKTIKNLNWNHVHTRALRFLPILKVFDSESLPKDERENSDSEGKDFASMSDTLKVVFSELQDFRNDYSHYYSTEKQDSRKLTVSPELANFLTVNFKRAIAYTKARMKDVLTDADYALVENLQMVAADNRIATEGLVFLIAIFLEREQAFQFIGKIQGLKGTQFNSFIATREVLMSFCVKLPHDKFVSENLEQALTLDIINELNRCPKTLYSVITDKEKQQFRPELDAQGIDNLIANSTNDDERETILDEIDYQDYIEGLTKRVRYSNRFSYFAMRYIDEKNVFDKLRFHIDLGKYEVDNYTKQFAGEQAERKVLENANAFGKLSSFTDPELIQQRIDKQQHTAGFNQFAPHYNADNNKIGLSTKENIATLIAKSKASSKVEHNLKQPLPQAFLSLHELPKIILLEYLQKGQAEELINDFILLNDTRLMDITFIEEVKSQLPANWDEFSKRSDAKKKKAYSDSTLKYLRQRKTTLNTILSKSNLNDKQIPTRILNYWLNIKEVDDKRSVSDRIKLMKRDCMTRLKAVEKHKLNKSVKIPKVGEMATFLAKDIVDMIVSEEKKKKITSFYYDKMQECLALFANAEKKALFIHIVTNELKLFENGGHPFLQNINLQQIRKTSQFYQAYLVEKGNKMVPRLNPKTNKTSKVDESWMMKQFYVKEWKEEIGKQLTVVKLPANKSQIPFTIRQWDEKEKYDLNVWLQHVTVGKNKDGKKAVNLPTNLFDEALCDLLREQLDTKIVNYNPAANYNELLKIWWKTRNDDTQQFYQSEREYDIYN

SEQ ID NO: 4394 - protein, 565 aa, Artificial
  Synthetic
METNQQTHENRRRTLTNDPQYFGGYLNMARLNIYNINNHVATDFKRKPLPEEGQIPDALLCNKTIKNLNWNHVHTRALRFLPILKVFDSESLPKDERKNSDTEGKDFTSMSDTLKVVFSELQEFRNDYSHYYSTEKGDSRKLIVSPELANFLTINFKRAITYTKARMKDVLTDADYALVENLQMVATDNKITTEGLVFLIAMFLEREQAFQFIGKIQGLKGTQFNSFIATREVLMSFCVKLPHDKFVSENQEQALTLDIINELNRCPKTLYSIITDKEKQQFRPELDAQGIENLIANSTNNEERERILDEIDYQDYIEGLTKRVRYNNRFSYFAMRYIDEKNIFDKLRFHIDLGKYEVDNYTKQFAGEQAERKVLENAKAFGKLSSFTDPELSQQRIDKQQQTAGFEQFAPRYHADNNKIGLSNKENIATLTAKSKAGSKVEHNLKQPLPQAFLSLHELPKIILLEYLQKGQAEELINDFILLNDTRLMDITFIEEVKSQLPDGWNEFNKRSDAKKKKAYSDSTLRYLHQRKTILNTILSKYNLNDKQIPTRILNYWLNIKEVDD

SEQ ID NO: 4395 - protein, 537 aa, Artificial
  Synthetic
METNQQTHENRRRTLTNDPQYFGGYLNMARLNIYNINNHVATDFKRKPLPEEGQIPDALLCNKTIKNLNWNHVHTRALRFLPILKVFDSESLPKDERKNSDTEGKDFTSMSDTLKVVFSELQEFRNDYSHYYSTEKGDSRKLIVSPELANFLTINFKRAITYTKARMKDVLTDADYALVENLQMVATDNKITTEGLVFLIAMFLEREQAFQFIGKIQGLKGTQFNSFIATREVLMSFCVKLPHDKFVSENQEQALTLDIINELNRCPKTLYSIITDKEKQQFRPELDAQGIENLIANSTNNEERERILDEIDYQDYIEGLTKRVRYNNRFSYFAMRYIDEKNIFDKLRFHIDLGKYEVDNYTKQFAGEQAERKVLENAKAFGKLSSFTDPELSQQRIDKQQQTAGFEQFAPRYHADNNKIGLSNKENIATLTAKSKAGSKVEHNLKQPLPQAFLSLHELPKIILLEYLQKGQAEELINDFILLNDTRLMDITFIEEVKSQLPDGWNEFNKRSDAKKKKAYSDSTLRYLHQRKTILNT

SEQ ID NO: 4396 - protein, 796 aa, Artificial
  Synthetic
METNQQTHENRRRTLTNDPQYFGGYLNMARLNIYNINNHVATDFKRKPLPEEGQIPDALLCNKTIKNLNWNHVHTRALRFLPILKVFDSESLPKDERKNSDTEGKDFTSMSDTLKVVFSELQEFRNDYSHYYSTEKGDSRKLIVSPELANFLTINFKRAITYTKARMKDVLTDADYALVENLQMVATDNKITTEGLVFLIAMFLEREQAFQFIGKIQGLKGTQFNSFIATREVLMSFCVKLPHDKFVSENQEQALTLDIINELNRCPKTLYSIITDKEKQQFRPELDAQGIENLIANSTNNEERERILDEIDYQDYIEGLTKRVRYNNRFSYFAMRYIDEKNIFDKLRFHIDLGKYEVDNYTKQFAGEQAERKVLENAKAFGKLSSFTDPELSQQRIDKQQQTAGFEQFAPRYHADNNKIGLSNKENIATLTAKSKAGSKVEHNLKQPLPQAFLSLHELPKIILLEYLQKGQAEELINDFILLNDTRLMDITFIEEVKSQLPDGWNEFNKRSDAKKKKAYSDSTLRYLHQRKTILNTILSKYNLNDKQIPTRILNYWLNIKEVDDKRSVSDRIKLMKRDCMTRLKAVEKHKLNKSVKIPKVGEMATFLAKDIVDMIVSEEKKKKITSFYYDKMQECLALFTNAEKKALFIHIVTNELKLLENDGHPFLQNINLQQIRKTSQFYQAYLIEKGNKMVPRLNPKTNKTSKVDESWMMKQFYVKEWKEEIGKQLTVVKLPANKSRIPFTICQWDKKESHDLNTWLQHVTVGKNKDGKKAVNLPTNLFDEALCDLLREQLD

SEQ ID NO: 4397 - protein, 449 aa, Artificial
  Synthetic
METNQQTHENRRRTLTNDPQYFGGYLNMARLNIYNINNHVATDFKRKPLPEEGQIPDALLCNKTIKNLNWNHVHTRALRFLPILKVFDSESLPKDERKNSDTEGKDFTSMSDTLKVVFSELQEFRNDYSHYYSTEKGDSRKLIVSPELANFLTINFKRAITYTKARMKDVLTDADYALVENLQMVATDNKITTEGLVFLIAMFLEREQAFQFIGKIQGLKGTQFNSFIATREVLMSFCVKLPHDKFVSENQEQALTLDIINELNRCPKTLYSIITDKEKQQFRPELDAQGIENLIANSTNNEERERILDEIDYQDYIEGLTKRVRYNNRFSYFAMRYIDEKNIFDKLRFHIDLGKYEVDNYTKQFAGEQAERKVLENAKAFGKLSSFTDPELSQQRIDKQQQTAGFEQFAPRYHADNNKIGLSNKENIATLTAKSKAGSKVEHNLKQPL

SEQ ID NO: 4398 - protein, 553 aa, Artificial
  Synthetic
METNQQTHENRRRTLTNDPQYFGGYLNMARLNIYNINNHVATDFKRKPLPEEGQIPDALLCNKTIKNLNWNHVHTRALRFLPILKVFDSESLPKDERKNSDTEGKDFTSMSDTLKVVFSELQEFRNDYSHYYSTEKGDSRKLIVSPELANFLTINFKRAITYTKARMKDVLTDADYALVENLQMVATDNKITTEGLVFLIAMFLEREQAFQFIGKIQGLKGTQFNSFIATREVLMSFCVKLPHDKFVSENQEQALTLDIINELNRCPKTLYSIITDKEKQQFRPELDAQGIENLIANSTNNEERERILDEIDYQDYIEGLTKRVRYNNRFSYFAMRYIDEKNIFDKLRFHIDLGKYEVDNYTKQFAGEQAERKVLENAKAFGKLSSFTDPELSQQRIDKQQQTAGFEQFAPRYHADNNKIGLRNKENIATLAAKSKAGSKVEHNLKQPLPQAFLSLHELPKIILLEYLQKGQAEELINDFILLNDTRLMDITFIEEVKSQLPDGWNEFNKRSDAKKKKAYSDSTLRYLHQRKTILNTILSKYNLNDKQIPTRI

SEQ ID NO: 4399 - protein, 407 aa, Artificial
  Synthetic
MEANEQNQENRRRTLTNDPQYFGGYLNMARLNIYNINNHIAADFGQAVLPEEGQIPSGFLCNKEIKKLNWNHIYAKTRRFLPILKVFDIESLPKEEQVNSDKEGKDFAAMSDTLKVVFSELQDFRNDYSHYYSTEKGENRKLTISAELTDMLTINFKRAIAYTKVRMKDVLTDADYELVETKQVVTTGNIITTEGLVFLTCMFLEREHAFQFIGKIQGLKGTQFNSFIATREVLMSFCVKLPHDKFVSENLEQALTLDIINELNRCPKTLYGVITDEEKMQFRPELDELDIEKLIANSTNDDERERILDEIGYEEYIEGLTKRVRYNNRFPYFAMRFIEEKNVFDKLRFHIDLGKYEVDRYTKQLAGEQTERVVQENVKAFGKLSSFTDPELIQQKIDNQQRTDGFE

SEQ ID NO: 4400 - protein, 569 aa, Artificial
  Synthetic
MEANEQNQENRRRTLTNDPQYFGGYLNMARLNIYNINNHIAADFGQAVLPEEGQIPSGFLCNKEIKKLNWNHIYAKTRRFLPILKVFDIESLPKEEQVNSDKEGKDFAAMSDTLKVVFSELQDFRNDYSHYYSTEKGENRKLTISAELTDMLTINFKRAIAYTKVRMKDVLTDADYELVETKQVVTTGNIITTEGLVFLTCMFLEREHAFQFIGKIQGLKGTQFNSFIATREVLMSFCVKLPHDKFVSENLEQALTLDIINELNRCPKTLYGVITDEEKMQFRPELDELDIEKLIANSTNDDERERILDEIGYEEYIEGLTKRVRYNNRFPYFAMRFIEEKNVFDKLRFHIDLGKYEVDRYTKQLAGEQTERVVQENVKAFGKLSSFTDPELIQQKIDNQQRTDGFEQFAPHYNADNNKIGLSNKESIAILIPKSKPESKVGNNLKQPLPQAFLSLHELPKIILLDYLQKGKAEELINDFILLNDTRLMDITFIEEVKLKLPANWNEFAKRSDAKKKKAYSDAAMEYLLQRKATLNDVLITYNLNDKQIPTRILNYWLNIKDVEDNRSV

SEQ ID NO: 4401 - protein, 569 aa, Artificial; identical to SEQ ID NO: 4400
  Synthetic

SEQ ID NO: 4402 - protein, 828 aa, Artificial
  Synthetic
MKSNEQTYENKRRTLTNDPQYFGGYLNMVRLNIYNISNHIASDFGQAQLPEEGQIPTSFLCNKGIKKLNWNHVYTKTRRFLPILKVFDAESLPKEERENYEKEGKDFAAMSDTLKVVFTELQAFRNDYSHYYSTEKGENRKLTVSGELADFLTINFKRAIAYTKVRMKDVLTDADYELVENRQIVVDNNTITTEGLVFLISMFLEREQAFQFIGKIQGLKGTQFNSFIATREVLMSFCVKLPHDKFVSEDLEQALTLDIINELNRCPKTLYKVSTEEAKLQFRPELDAQGIDNLLANSTNIDECEKILDEINYEDYIEGLTKRVRHNNRFSYFAMRYIDEKNVFEKLRFHIDLGKYEVDTYTKQLAGEQTERVVFENVKAFGKLNSFTDSESVQQRIDKQQRTGGFEQFAPHYNAENNKIGLSSKEEVALLLPKSKPDTKVAYNLKQPLPQAFLSLHELPKVILLEYLQKGKSEQMINDFILLNDTRLMDMTFIEEVKSKLPFGWNEFTKRSDAKKKKAYSNATMKYLLQRKTIVNDVLIDYNLNHKQIPTRILDYWLNIKDVEDSRSVSDRIKLMKRDCMTRVKVLEKHKLDKSVKTPKVGEMASFLAKDIVDMIVSKEKKQKITSFYYDIMQECLALFADAEKKALFIHIVTNELKLFENGGHPFIQNINLQQLHKTSQFYEAYLKEKGNKQVSKFNPKTNKTSKVDDSWMMQQFYTKEWNDEIKKQLTVVKLPANKTHIPFTIRMWEEKEKYNLETWLHNVTVGKNIKDGKKAVNLPTNLFDEALCILLRKQLDTLAPNYNPAANYNELLKLWWKTRNDDTQDFY

SEQ ID NO: 4403 - protein, 805 aa, Artificial
  Synthetic
MENDQQILENRRRTLANDPQYFGGYLNMARLNIYNISNHLATSFEQKALHEEGQIPASFLCNKSIKKINWNHVYSKARRFLPILKIFDADSLPKEERETSDKEGKDFTAMNETLKLVFDELQAFRNDYSHYYSTEKADSRKLTISVELADFLTVNFKRAIAYTKVRMKDVLADDDYAVVESKQIVTPDNQITTEGLVFLTCIFLEREQAFQFIGKVQGLKGTQFNSFIATREVLLAYCVKLPHDKFVSEDLRQALTLDIINELNRCPKTLYEVITEEEKQQFRPELDAQGIDNLIANSTNEEEREKILDEIDYEDYIESLTKRVRHSNRFPYFAMRYIEEKNVFDKLRFHIDLGKYEVEKYNKQFDGEATERKVVENAKAFGKLSSFTNQETVELKIDSAQRTNGFEQFAPHYNADNNKIGLSNKESEARLLTKAKPESKVSYNLKQPLPQAFLSLHELPKIILLEYLQKGKAEEMINDFIKVNDSQLMNMQFIDEIKEQLPADWNEFGKRSDSKKKKAYTNAARQYLLQRKATLNKVLANYQLNDKQVPTRILNYWLNVKEVDDSRSVSDRIKLMKRDCMSRLKVMEKHKVDKSARTPKVGEMATFLAKDIVDMIVSTDKKQKITSFYYDKMQECLALYADNEKKATFIHIVTNELKLLEKDGHPFLANINLRQIRKTSQLYELYLVEKANKQVKKMNPKTQRTNNVDESWMMKSFYAKEWNEEMGKQLTVVKLPANKTNIPFTIRQWEEKEKHNLQAWLHNITKGKTSKDGKKAVDLPTNLFDDTLCELLREALINEGIDATP

SEQ ID NO: 4404 - protein, 458 aa, Artificial
  Synthetic
MENDQQILENRRRTLANDPQYFGGYLNMARLNIYNISNHLAASFEQKVLPEEGQIPASFLCNKSIKKINWNHVYSKARRFLPILKVFDADSLPKEERETTDKEGKDFTAMNETLKLVFDELQAFRNDYSHYYSTEKADSRKLTISVELADFLTVNFKRAIAYTKVRMKDVLADDDYTMVESKQIVTPDNLITTEGLVFLTCMFLEREQAFQFIGKVQGLKGTQFNSFIATREVLLAYCVKLPHDKFVSEDLGQALTLDIINELNRCPKTLYEVITEEEKQQFRPELDAQGIDNLIANSTNEEEREKILDEIDYEDYIESLTRRVRHSNRFSYFAMRYIEEKNVFDKLRFHIDLGKYEVDKYNKQFDGEATECKVVENAKAFGKLSSFTNQETVELKIDSAQRTNGFEQFAPHYNADNNKIGLSNKESEARLLTKAKPESKVSYNLKQPLPQAFLSLHE

SEQ ID NO: 4405 - protein, 663 aa, Artificial
  Synthetic
  misc_feature (612)..(624): Xaa can be any naturally occurring amino acid
  misc_feature (626)..(639): Xaa can be any naturally occurring amino acid
MDTIEKTEHKGLNVYKTLETDPQYFGGYLNMARLNIFSINNYVADKLKISALVNEEKMLDSFLCNNNRKHLNWNLAHSIAVKFFPIMKVFDFESLPKLERTVDLNNINTGKDFVAMAVVLRYLFREIQEFRNDYSHYYSIVNGNKRKTIISREVAEFLRLNFTRAIEYTKERFNGVLNNEDFEYVKERVLVNQDNTITTDGFVFLISMFLEREHAFQFIGKIKGLKGTQYSSFIATREVFMAFCVKLPHDRFVSEDKRQALTLDIINTLNRCPKELYTVITDEERKVFKPSLDSLKLKNLLDNSTNDQADIEDYDNYIEVLTRKIRHSNRFSFFALKFIDETDIFSKLRFHINLGKLLIEEYEKPINNELYPRSIVQNVKAFGKLSDFEDGIEVLKQIDKEGNSLGFEQYAPFYNTKNNKIGLHTNSAKSIVINKPKSESKIKKSLKQALPEAFLSLHELPKIIVLEYLAKGKSEELINDFILICNSKIINKQFIDEVKGELPKDWNEFNKRSDSKKDPAYKPNALAYLIKRKKIVDEVLAQYNLNHKQIPTRILDYWLCIVDRNADRAISERIKRMKREGMDRLKAYRKFKKTGKGKIPKIGEMATFMAKXXXXXXXXXXXXXKXXXXXXXXXXXXXXPCLPIPKKNSYLLILSAKSFGLTR

SEQ ID NO: 4406 - protein, 873 aa, Artificial
  Synthetic
MDTIERIEIKSANVYKTLENDPQYFGAYLNMARLNIFSINNSVADKIKVAPIPNEEKILDSFLCNHNRKHLNWNLAHAIAVKFLPIIKVFNFEGLPKSERTSDFNNINTGKDFAAMADALRSLFGEIQEFRNDYSHYYSITNGNKRKTTISKEVAEFLNKNFARAIEYTKDRFNGVLNNEDFYHVKERVLVNKDNTITTDGLVFLIAMFLEREHAFQFIGKIKGLKGTQYNSFIATREVLMAFCAKLPHDRFVSEDKKQAFTLDIINTLNRCPKELYAVITEEERKAFKPNLDSLKIENLLNNSTNDRADIENYDKYIEALTRKVRHSNRFSYCALKFIDETNIFKQLRFQINLGKLGLDEYEKPINNELYPRSIVQNVKAFGKLSDFEDEKEVLKQIDKEGNSLGFDQYAPFYNTKNNKIGLHTNNAKSIVINKAKSESKIKNKLKKALPEAFLSLNELPKIIVLEYLEKGKSEELINDFILASNSKITNKQFIDEVKGKLPNDWNEFNKRSDSKKETAYKPNALAYLRNRKKILDEVLAQYNLNHKQIPTRILDYWLSVVDINSERAISDRIKRMKREGMDRLKSYQKYKKTRKGRIPKIGEMATFLAKDIIDMIISTDKKKKITSFYYDKMQECLALFADPDKKALFIDIISKELHLNELDGHPFLKYIRFSKISYTQDLYESYLQEKANKMIDVKNHRTGRTNQIDKSWMMTTFYRREWNKEAGKQLTEVKLPHNLSCIPFSLRQLKEKTSNNLDEWLHNITKGKEVNDGKKPINLPTNLFDETLIRLLKSDLDTQHEQYPEDAKYNELFKIWWRKRGDSTQSFYNAEREYLIYDEKVNFKLQENAEFADFYSDNLRKAYKAKQADRRI

SEQ ID NO: 4407 - protein, 736 aa, Artificial
  Synthetic
MEENLNSLLSRTRTISNDPQYFGGYLNMARLNIFNISNYIGKLFSQSQLDDDDHIANSFLTNETIKNLNWNHVFSKALRFLPIVKLFDLEEYPREIIDELGKKFIAPNETKDFHNMRKSLKLIFSNINNFRNDYSHFYSTISGTNRKLEIEDDIANLLRNAFTFAISHTKLRLKEVLKEEDFNLVSEKKMVEEGNKITTEGLVFLICMFLEREHAFHFIKRIIGFRGNHIKSFVATHEVFMTFCVKLPHDKLISEDYEQRLAMDMVKELNNCPKDLYRLLTERERAKLRYCSPLIGGNHNDVDQLDYDSYREMLVSNIRHRNRFFYFALRFIDETNCFPTLRFHIDIGKLELVSYLKSFAGSEEERRIVVDVKTFGKLSEFVEEDTLHKKIDKNGYTTGFDQFSPRYNFKLNKIGIRKSGTKFPIILPTIVSKSDQTGNIKIRLKQYAPDAFLSLHMLPQIILIEYLERGASEKVINDFINKNKEILDKKFIQQIKGELPTDWAKFQKRSDSKKRPAYDTYNLKSLTDRKQYLNDVLEKHNLNVKQIPTRVLEYWLNLNDVDGSQLFSNRIKLMKKECTDRLKVIEKSKINPNIRTPKVGEMATFLAKDIVDMIVDSEIKSQCSSFYYHKLQKSLAFYATSDEKKIFSEIKDELKLIGTGGHPFLSRVLDKSPINTLEFYIYYLKEKADTRTYKTEKNNSWIEKTFYTTVKDKKTKKRMVTVRMPENASNIPYTIQ

SEQ ID NO: 4408 - protein, 593 aa, Artificial
  Synthetic
METTTVAEFSKTRTMESDPQYFGSYLNMARHNIFNISNYIADYFNLSRLKDDDLIQNSFLCNPDIQKINWPYVFGRTKHLLSILKVFDTDTLPKDEVLSSSQAGKQFLLMNETLKLVFRELQQFRNDYSHYYSAEKGSDKKIIIDEQLVQFLNLNFKRAISYTRERFKDVFSEDDFKYAINLKLVKEDNKITVHGMVFLIAMFLEREEAFSFISRISGLKGTYSKSFLATREVLMAFCVKLPHDKFKSNDEKQATSLDLINELNRCPLDLWNNLNQSDKMKFIPDLEVDENGDHLAEEYEIYAETITKQIRYKNRFTEFALKYIDYAGVLPKYKMLIDVGKISLGSYTKIMNNEPYEREIQDEVIAFDKTVEYTKKDEVLKRVDAEKRTKGFTRFNPHYSSAANKIGLLYKSDFSQVMPAQDRKLGIRLNHPAARAFLSANELTKVILLDYLIPREPERIINRFIQKNKQILDLNFINQIKEQIGFNEFARRTSKKNEHAYTEGALNHLTFRKNQLQAILSKYNLTIAQIPSKIIDYWLNIKPVDEYRKAAERITRIRLETKTRYKEHLKARIANKPALKQGIMASYLARDII

SEQ ID NO: 4409 - protein, 766 aa, Artificial
  Synthetic
MEDLILEHRDKGKSKNNETQSKRTLGNDPQYFGAYLNMARHNIFTINNHLVKKLKLQDTLVLSDEESIPDSFLVKKIKEKPNLLFTQLIRFLPIAKVFNPELLPKEEQEKEKEENIDFKSLADTLKICFGELNKFRNDYTHYYSKTNGLDRKIIIDENLAVFLRINKTRAIEYTKKRFKDIFEDKHFIITEKKELVDQSSKITQDGLVFFICLFLDRENAFQFINRIIGFKDTRTPEYKATREVFSSFCVNLPHDKFISDDPVQAFILDMLNELNRCPLELYNNITKKEKKQFQPDISDKISNIEENSIPEEISVDKYEEYIQNITTKIRRKDRFPYFALKYLDMKDDYQLKFHINLGKALLDTHKKLCLGKEENREIVEDVKIFGKLKDFENEDKIIKNIDKKKKMEFKQFNPHFHIENNKIGFSFNLKSCSIKYGLSEKPNLKLSIPDGFLSINELPKVLLLELLKKGKSIEIIKSFLNTNRENILNKEFIERVKEDLVFEKSFYRSFQKKKEPAYSEKALSILKDRKTKLNSLLRQHNLNDKQIPARILNYWLDIKPVKEEMSIANKIKAMKKDCIDRLKAKKKNKAPKVGEMATYLAHDIVDMIIDEKLKNKITSFYYDKMQECLALFSDEEKKQLFLQICEKELNLFDEKKGHPFLKELDLYNINKTSDIYEKYLEKKGNNMKTLKNEKQQKSYQSDTSWLYTTFYVKSKNPTTNKWETKVNLPPDLSKLPFSIRNLLRKKSNFEQWLKNVTDGYSDNDKP

SEQ ID NO: 4410 - protein, 603 aa, Artificial
  Synthetic
MENLNKRTLTTDPQYFGGYLNSARHNIFTISNYIAERINPLMKKGKLSIRKDDDEIADSFICTKIIEKPNLFFTNLVRFLPIVKVYDSDKLPKAEKEKPSSEGIDFETLADDMKICFKELNGFRNDYSHYFSKETGTERKIVIDERLSVFLRTNYQRAIEYTKIRFKDVYEESHFKIAADKILVNESNVITQDGLVFFTCLFLDRENAFHFINRIIGFKDTRTLGFRATREVFSAYCVTLPHDKFTSDDEKQGFILDLLNELNKCPKELYDNITEEERKIFRPDVSESIDKITESSIPEDLAFEDYDEYIQSIITKKRKSDRFPYFAIKYLDGKKDFDINFHLNLGKVELLSRKKKFLGEEVDRDIVEDVKVFGKLAEYTNEKEVSRKLGLEFQLFNPHYQIENNKMGISFSPKLCSVKSENDKPNLKLNPPDAFLSVHELPKIVLAELFEKGKAKEIIESFIGINKDKILNREFIEEVKSKLVFEKPFYRSFQSKRGAAYNDKGLQILKERKTKLNEILREYNLNDRQIPERILDYWLNINDVKSESEIANRIKAMKKDCRDRVKAKAKNKAPKAGEMATYLAKDIVDMVIDEKVKQKITSF

SEQ ID NO: 4411 - protein, 469 aa, Artificial
  Synthetic
MERIFGHCCPHHDSVCFVRFLGTMVSNQDGRENVLDILYIADRTRKLKPMNTVPASENKGQSRTVEDDPQYFGLYLNLARENLIEVESHVRIKFGKKKLNEESLKQSLLCDHLLSVDRWTKVYGHSRRYLPFLHYFDPDSQIEKDHDSKTGVDPDSAQRLIRELYSLLDFLRNDFSHNRLDGTTFEHLEVSPDISSFITGTYSLACGRAQSRFADFFKPDDFVLAKNRKEQLISVADGKECLTVSGLAFFICLFLDREQASGMLSRIRGFKRTDENWARAVHETFCDLCIRHPHDRLESSNTKEALLLDMLNELNRCPRILYDMLPEEERAQFLPALDENSMNNLSENSLNEESRLLWDGSSDWAEALTKRIRHQDRFPYLMLRFIEEMDLLKGIRFRVDLGEIELDSYSKKVGRNGEYDRTITDHALAFGKLSDFQNEEEVSRMISGEASYPVRFSLFAPRYAIYDKR

SEQ ID NO: 4412 - protein, 420 aa, Artificial
  Synthetic
MNTVPASENKGQSRTVEDDPQYFGLYLNLARENLIEVESHVRIKFGKKKLNEESLKQSLLCDHLLSVDRWTKVYGHSRRYLPFLHYFDPDSQIEKDHDSKTGVDPDSAQRLIRELYSLLDFLRNDFSHNRLDGTTFEHLEVSPDISSFITGTYSLACGRAQSRFADFFKPDDFVLAKNRKEQLISVADGKECLTVSGLAFFICLFLDREQASGMLSRIRGFKRTDENWARAVHETFCDLCIRHPHDRLESSNTKEALLLDMLNELNRCPRILYDMLPEEERAQFLPALDENSMNNLSENSLNEESRLLWDGSSDWAEALTKRIRHQDRFPYLMLRFIEEMDLLKGIRFRVDLGEIELDSYSKKVGRNGEYDRTITDHALAFGKLSDFQNEEEVSRMISGEASYPVRFSLFAPRYAIYDKR

SEQ ID NO: 4413 - protein, 423 aa, Artificial
  Synthetic
MEEQFLQKERNMGDNPYYFCHFINMAHHNVNLILEEIYNSVYEKYTQDKEENIKAICNSMISKSRKNPDEKAKMMNMCIRHFPFLDYYKEKDQNSDVLTILLNQFLVPLHGLRNQFSHYKHPQEAYCISGFDLLFEQAKTGAQMRMKYSDEDISKVKSKVVNHDSILTERGILFFICLFLDKRNIYLFLSKIKGFRDRRPDEKYKSATLEVFSQYYCHVPYRKLDSSDVALDMLNELNRCPKALYDVLSDEDRERFIVDNVENADNRDEISDEDDEEMPRSVMKRSDDRFPYFALRYFEKQNNLDEISFHLYLGRKEAKPAHEKVINGEMRTHKILKDIHVFGRLENYRNEEICNAIKNREDIEFYAPSYRIVENRIGLLLRRQNDFTLEEANEEKIFEGNLCPDVILSTHELGALFFYNYLH

SEQ ID NO: 4414 - protein, 764 aa, Artificial
  Synthetic
MEEQFLQKERNMGDNPYYFCHFINMAHHNVNLILEEIYNSVYEKYTQDKEENIKAICNSMISKSRKNPDEKAKMMNMCIRHFPFLDYYKEKDQNSDVLTILLNQFLVPLHGLRNQFSHYKHPQEAYCISGFDLLFEQAKTGAQMRMKYSDEDISKVKSKVVNHDSILTERGILFFICLFLDKRNIYLFLSKIKGFRDRRPDEKYKSATLEVFSQYYCHVPYRKLDSSDVALDMLNELNRCPKALYDVLSDEDRERFIVDNVENADNRDEISDEDDEEMPRSVMKRSDDRFPYFALRYFEKQNNLDEISFHLYLGRKEAKPAHEKVINGEMRTHKILKDIHVFGRLENYRNEEICNAIKNREDIEFYAPSYRIVENRIGLLLRRQNDFTLEEANEEKIFEGNLCPDVILSTHELGALFFYNYLHKKGWIESAPYLYIRNFISDFKRFIEDIKNGKLTPVESEDDFYLIKKKKRDETKDNDKKSIAVQERRREKLKEKLKGYHLEPDWIPDACREYMLGYKADQKDYYTKQRFCSMKKETDSRIKQIEAIRKREDNSIIRQTRVGEIAQELARDIVFLIPPYKNEKGADTKINNMEFDVLQKMLAYFPLNKKDIYPFLKNIRNWDKHPFLKYTLHTEHQSLLDFYQDYLNCKKRWISKNIRYDKQKGNYLVDANKTEQECRYFLKTDKLRTAKEKEYFEEPDKPVYLPTGFFVDPIVEAMRKNGYELKENSNIVGCLKIYFVSKIQPMYDLSRYYTYYDGKEERSM

SEQ ID NO: 4415 - protein, 673 aa, Artificial
  Synthetic
MEEQFLQKERNMGDNPYYFCHFINMAHHNVNLILEEIYNSVYEKYTQDKEENIKAICNSMISKSRKNPDEKAKMMNMCIRHFPFLDYYKEKDQNSDVLTILLNQFLVPLHGLRNQFSHYKHPQEAYCISGFDLLFEQAKTGAQMRMKYSDEDISKVKSKVVNHDSILTERGILFFICLFLDKRNIYLFLSKIKGFRDRRPDEKYKSATLEVFSQYYCHVPYRKLDSSDVALDMLNELNRCPKALYDVLSDEDRERFIVDNVENADNRDEISDEDDEEMPRSVMKRSDDRFPYFALRYFEKQNNLDEISFHLYLGRKEAKPAHEKVINGEMRTHKILKDIHVFGRLENYRNEEICNAIKNREDIEFYAPSYRIVENRIGLLLRRQNDFTLEEANEEKIFEGNLCPDVILSTHELGALFFYNYLHKKGWIESAPYLYIRNFISDFKRFIEDIKNGKLTPVESEDDFYLIKKKKRDETKDNDKKSIAVQERRREKLKEKLKGYHLEPDWIPDACREYMLGYKADQKDYYTKQRFCSMKKETDSRIKQIEAIRKREDNSIIRQTRVGEIAQELARDIVFLIPPYKNEKGADTKINNMEFDVLQKMLAYFPLNKKDIYPFLKNIRNWDKHPFLKYTLHTEHQSLLDFYQDYLNCKKRWISKNIRYDKQKGNYLVDANK

SEQ ID NO: 4416 - protein, 417 aa, Artificial
  Synthetic
MDISNEKTSRYKDLENDPYYFNHFINMGRHNAYLILHDVYKTVYKEELSLEENNLAVFRKKVLEKSQNKPDEIAKVINILLRHFPFLAYYEEKQQYVKEKHKYESLNRLADYLGALNKIRNQTSHYKHNKEDIYLPDYQGLFQMGVKEAQNRMKYEDKDVKHLYRTQYYNLVNNNILTEAGISYFVCLFLDKKNGYLFLSRIKGFKDRNKTSERYKSATLEAFTQFHSHVPYPKLDSSDIALDMLNELNRCPKQLYNVLSAEDQNKFIATLSEDGDDELPKPLMKRSEDRFPYFALRYFEKSGKLDNITFQLYLGRKHAQEPHTKKIAGVERIHFLLKNMHVFGKLPFYKEEEAHRFYGENEEVEFYAPAFRMVGNRIGLVLREELQSHYTVPATNKTEKDKNYPDAILSTHELSGL

SEQ ID NO: 4417 - protein, 541 aa, Artificial
  Synthetic
LLIRIRFYSFGKNYSNMETPNKTSTSAYKDLQNDPYYFSHFINMGRHNAYLIIHYIYKCVYKEELNLIESNLYQFSSKVKANSKKNPDELTKVIRLLLLHFPFLAYYDNAEREKRDERVVGRSNDGNWNKKVKERPYLSDKNTVSSNSEKASEKATSESHICLERLSQFLIVLNNLRNETSHYKHPKKSTLLPDFQKMYQSGIKEAQRRMNYEDKDIQHLFKDPHYKLIETQKQTETVGLTKFNGQKKVNRQPQVNGQTGTDKLAKVDKLTGFDKLTEVDELQDLDELTEIGIYYFICLFLDKKNGYLLLSRIRGFKDRNRTSEKYKSATLEAFTQFHCLVPNPKLESSNIAMDMLNELNRCPRQLYQVLSQDDKEKFVATDTEKEEDSDEVPEPIMKRSEDRFPYFALRYFEEMSRLGLSGTLDQITFQLFLGRKHDQEPHTKILNGTQRTHSLLKNMHVFGKLPFYQKEEAYQFYEGNEEVEFYAPAYRIVGNRIGLVLKDIHPHYTIPKSDGNYKNGNCKNGNCKNENCPDAILSTHE

SEQ ID NO: 4418 - protein, 362 aa, Artificial
  Synthetic
MDTPNFSERIPVSLQSHPYYFAHYLNMARHNAYVILEYVNRELIKPGKNLDEDNLIQSTVLKDGYFDRKPDELSHRNRLLVQHFPFLREAENEGARTCNPVSYKLKTALAALNQWRNNASHYPLNQNHEKDFDLQPFFSFAIEACKKRMREVFQPDDFYLLETNEKQFYTLHNENGFTEKGLYCFICFFLEKKYAFQFLAGIKGFKNTTDNKFRATLETFTEHCCRLPKPKLDSSDIKLDMLGELSRCPAPLFDLLDIEERKKFIREPEEVKPDESGDREEVQQVLMKRYDDRFPYFALRYFEEKNLLKGISFHIHIGRWIKSEHTKKIMGAERDRRLLKDIRTFGELKEFSPEHEPYRYKT

SEQ ID NO: 4419 - protein, 452 aa, Artificial
  Synthetic
MNNPENQKEKTSIGTHPFYFGHYLNMARHNAYIILCALSKKYNFNIPDESEQNEAQLNHFKILNFAADKEKRPDELNAIKEDLQFHFPVLKAFQLSEFGKSFSDLLILLGDLRNRYSHVYYKKDFKHEVELRDILKQARKDAIKRMNSVIPEEEFHHLVKVKESKIPFKFYLTERDRNTLTEKGVAFLCCLFLEKKFAFRFLSRLENFHRTEEKWARATLETFTEYCCILPYDRLDSSDIKLDMINELNRCPRELYYLLDDSLKKKFLDKPEAEEDLTETSTDENAEYEKPTPLRRHSDRFPWFALNFFENVYPGIHFQVKLGRVLTQDLYDKTIASTSRDRRILKDINSLGHPFKYPVESAPDSWYNIKQASETGLVNTAMRAGEIDQYSPKFRITEKRIGLFLNKPYTIPFWPNLSKEAKPKKSGPIITTCKASAIKPDAILSTYELQNR

SEQ ID NO: 4420 - protein, 515 aa, Artificial
  Synthetic
METKTSKTSTLMTINKNPYYFGQYCNMAINNIYLILKKVSTKVYGEEKIKTPCNIIEFIEEIINNKRPDEINYITYLILNYLPFLTYYYKPNINLIFILRTYIEALIELKNETTIYSYKHNFVKLPNINELFTYAVTGTLQRITDIDEKDLIPVKDNSSIILQKDNGLTSKGFYFLICLFLERKYAFSFLSKIEINTAFTDIQNRFFLEVYTQLCCKVPVFNSSNNDIILEIFNELNRCPLSVYYVLDKKDKASFRENYKNDRNEDIQASIMKRLESKFAYLTLKFFEETKSLDGISFHLKLGNIHQKEPHKKEIIGEVRTHHLLKEMKGFGPLAFYKEEEAYSFYTNNSEIESYSPKYRITGNRIGLSLNNDSSKNYKIIYENVSPDVILSINDLHSLFFYNYLYKQNLINESPKELIEKFMLSFKDFTEDLKTGKLTPVSIEHTIKKRRKHTEEEIQKLEEAKIELQQKLDPYQLKIKYIPDQSREYLFGYSPHSLEHRIKSKFDRMWKEAIH

SEQ ID NO: 4421 - protein, 522 aa, Artificial
  Synthetic
MTHEPTQKALFGAFLNTAQHNAYLIINEVNEKLGKADVEEGKLDNDAYALHILTNKEIKTLPLKILSRRLLMEGFPFLCALGFSQDATQTDNFEALKTKLQKALKTLNEYRNFYSHYYEQSIDWQKCQFADLDLIREDFIKTFTTYASEEQVSKSYEEVKKKKEELDKCKKGLSLAKRKKQTWEINDLKQKEEVLRDELLKAQQAHFQLKEKKERKENLLKRYPNISGAELNKLIQDKESPYHSFWKKNNPHRFSKKGLVFFICLFLSKEQANLFLSSISGFKRTDASYFWAVRAMYMHHCCHLPQPRLESSDMLLDILNELNRCPKVLYNLLSETNRAYFEKDINYKEGSVLQTDEEGNLVTIQKMLRHQDRLPYFILKYLDETNAFPDLRFQIYLGKLVTDVYKKPKMLEKNELGELVEQDGQRLILKEVHAFGKPSDFADKINLPKELEVNEIQDKYGEMKQEELKVGTIVQFSPQYHISSNRIALKLFKTKDGKFYSEKPDNDKQARLIILNKNWFWF

SEQ ID NO: 4422 - protein, 748 aa, Artificial
  Synthetic
MERASFWFEVKKMLKIGCKFFLFLITHYIYKLTLECYLTITMSTFDQSEYLKSEHFQKGVKIESKKHSLIQSIAEDLRRCPKILFNVITPSGKRQFLPTFGELQETDLIEDHSKIDLATDFEENERLAKPNIRSKNRFSEYALRYIDEIGLLGNYHFQLDLGSFVLTQYKKNFLGSNVPRKVVDHAMTFSKLKDIVNEDEVRNKISHNVHGLVFEMFNPHYNIRNNKIAISSKLEYSTVFFNPNHDRKVAIKLRQPQPEAFISIHELPKLLLLDYLSKGKVEELIKNFIQSNRQKKLNIDFIKKVKSLLPGEDHWTIIERLPDNRFGSGYSDVQLEIISERKRVLNGVLNSYSLNVKQIPTRILDHWLNIQDSNIDLLFSNRIRSMKSDCLKRLQAFDVNSRHYTGRIPSYTEMAYFLVKDIVSMVISDSKKSKITSFYFKKLVDCILNYSDPEKRKLFFLIIASELRLLDLGGHPFLGRLDLHNISTTKDFYVSYLQEKGCKMVSQMDSYTQRMKLVDQSWLFTTFFQRKWNESSGMYKLFVRYPKMDMDIPLKIRRWYKPHSDLQSWLNKTSSSGSSNKRGKGVDLPANLFDKVICELLRAKLNDLNVAYKPDANYNELLKLWWSSCNDIVQTFYNLERQYFISGEVVKFHIGTCPNFKDYYSSALEAVFRRNVEERTLEQQKGSVLPDIQITDVEYPFKHTIAETEKKIRILQEQDQMMLLMLRQLMEDDQLFSFSEGDSLLKDK

SEQ ID NO: 4423 - protein, 748 aa, Artificial; identical to SEQ ID NO: 4422
  Synthetic

SEQ ID NO: 4424 - protein, 323 aa, Artificial
  Synthetic
MGAIENKHIFAAYANLAIDGLIKTLNFIAKKLDTQKQLSSWDIKHVITLIDSIFDQNPQNNLEQVVEGYLPWIKPIIEMKTPKKGERQSDKLCIEYKTIITAFASLLNDVRNYYTHYYHDPICIYPGGYDIPSSLNCIYDSAINIIKERFQAEEKEMEHLRRYTRKKGRVVLKTEDDHFYYTLANNNDLSEKGYAFFISMFLERKYSYLFLKKLSGFKRGDSLQYRLTLEVFTALSTKPPVERLRTTKDTKQDRALDILNELSKIPIELYQTLEPKYREMYNETLQPTDAEDPYGLPDRSRIRFRSRFEAFALHFLDKQADFK

SEQ ID NO: 4425 - protein, 323 aa, Artificial; identical to SEQ ID NO: 4424
  Synthetic

SEQ ID NO: 4426 - protein, 323 aa, Artificial; identical to SEQ ID NO: 4424
  Synthetic

SEQ ID NO: 4427 - protein, 845 aa, Artificial
  Synthetic
MGAIENKHIFAAYANLAIDGLIKTLNFIAKKLDTQKQLSSWDIKHVITLIDSIFDQNPQNNLEQVVEGYLPWIKPIIEMKTPKKGERQSDKLCIEYKTIITAFASLLNDVRNYYTHYYHDPICIYPGGYDIPSSLNCIYDSAINIIKERFQAEEKEMEHLRRYTRKKGRVVLKTEDDHFYYTLANNNDLSEKGYAFFISMFLERKYSYLFLKKLSGFKRGDSLQYRLTLEVFTALSTKPPVERLRTTKDTKQDRALDILNELSKIPIELYQTLEPKYREMYNETLQPTDAEDPYGLPDRSRIRFRSRFEAFALHFLDKQADFKEIGFYTYLGNYFHNGYQKTRVDRETKDRYINFQLAGFCKNIQDISAKKLSEALNVKSIDISTDSIPDINSFEPYLVQSTPHYIVNGNNIGIKVLPEGKDTYPTIDEKGAKMPIADFWLSKYELPAMLFYTYLRNNNIHKSHCPLSVKDIIERSIHKSTKQKHPEERSELMLRRVMKAIFWTDSKLNEVERIKSQKSAFGKRQHEILKAGRIAETLVRDMLWLQPSKNNGRDKVTEPNFQAIQVSLAYFGIRRNDLTEIFTRAGLINSSNPHPFLAQIGTNYTSLIEFYIAYLKERKVYFSRIQKKILQGKLNIQCHPLRDLQREPNKPQEKEEAIFLPRGLFNEAIINCLKKSKLKHLIESPTREKSPALNVSYLIQNYFRAYFEDQSQEFYAQPRNYRLFDNLSPNKGKSKSYLSLEQRIKKMEELRPSKIPVAEANKLLEKEDRLYRKNYNEICDNESIIRLYQIQDILLFMMTKEYLPSDLYNRINKYKLENVKGILNERVSYLIDLNPLKIQGEDIKI

SEQ ID NO: 4428 - protein, 386 aa, Artificial
  Synthetic
MGAIENKHIFAAYANLAIDGLIKTLNFIAKKLDTQKQLSSWDIKHVITLIDSIFDQNPQNNLEQVVEGYLPWIKPIIEMKTPKKGERQSDKLCIEYKTIITAFASLLNDVRNYYTHYYHDPICIYPGGYDIPSSLNCIYDSAINIIKERFQAEEKEMEHLRRYTRKKGRVVLKTEDDHFYYTLANNNDLSEKGYAFFISMFLERKYSYLFLKKLSGFKRGDSLQYRLTLEVFTALSTKPPVERLRTTKDTKQDRALDILNELSKIPIELYQTLEPKYREMYNETLQPTDAEDPYGLPDRSRIRFRSRFEAFALHFLDKQADFKEIGFYTYLGNYFHNGYQKTRVDRETKDRYINFQLAGFCKNIQDISAKKLSEALNVKSIDISTD

SEQ ID NO: 4429 - protein, 672 aa, Artificial
  Synthetic
MGAIENKHIFAAYANLAIDGLIKTLNFIAKKLDTQKQLSSWDIKHVITLIDSIFDQNPQNNLEQVVEGYLPWIKPIIEMKTPKKGERQSDKLCIEYKTIITAFASLLNDVRNYYTHYYHDPICIYPGGYDIPSSLNCIYDSAINIIKERFQAEEKEMEHLRRYTRKKGRVVLKTEDDHFYYTLANNNDLSEKGYAFFISMFLERKYSYLFLKKLSGFKRGDSLQYRLTLEVFTALSTKPPVERLRTTKDTKQDRALDILNELSKIPIELYQTLEPKYREMYNETLQPTDAEDPYGLPDRSRIRFRSRFEAFALHFLDKQADFKEIGFYTYLGNYFHNGYQKTRVDRETKDRYINFQLAGFCKNIQDISAKKLSEALNVKSIDISTDSIPDINSFEPYLVQSTPHYIVNGNNIGIKVLPEGKDTYPTIDEKGAKMPIVDFWLSKYELPAMLFYTYLRNNNIHKSHCPLSVKDIIERSIHKSTKQKHPEERSELMLRRVMKAIFWTDSKLNEVERIKSQKSAFGKRQHEILKAGRIAETLVRDMLWLQPSKNNGRDKVTEPNFQAIQVSLAYFGIRRNDLTEIFTRAGLINSSNPHPFLAQIGTNYTSLIEFYIAYLKERKVYFSRIQKKILQGKLNIQCHPLRDLQREPNKPQDKEEAIFLPRGLFNEAIFSR

SEQ ID NO: 4430 - protein, 672 aa, Artificial; identical to SEQ ID NO: 4429
  Synthetic

SEQ ID NO: 4431 - protein, 640 aa, Artificial
  Synthetic
MGAIENKHIFAAYANLAIDGLIKTLNFIAKKLDTQKQLSSWDIKHVITLIDSIFDQNPQNNLEQVVEGYLPWIKPIIEMKTPKKGERQSDKLCIEYKTIITAFASLLNDVRNYYTHYYHDPICIYPGGYDIPSSLNCIYDSAINIIKERFQAEEKEMEHLRRYTRKKGRVVLKTEDDHFYYTLANNNDLSEKGYAFFISMFLERKYSYLFLKKLSGFKRGDSLQYRLTLEVFTALSTKPPVERLRTTKDTKQDRALDILNELSKIPIELYQTLEPKYREMYNETLQPTDAEDPYGLPDRSRIRFRSRFEAFALHFLDKQADFKEIGFYTYLGNYFHNGYQKTRVDRETKDRYINFQLAGFCKNIQDISAKKLSEALNVKSIDISTDSIPDINSFEPYLVQSTPHYIVNGNNIGIKVLPEGKDTYPTIDEKGAKMPIADFWLSKYELPAMLFYTYLRNNNIHKSHCPLSVKDIIERSIHKSTKQKHPEERSELMLRRVMKAIFWTDSKLNEVERIKSQKSAFGKRQHEILKAGRIAETLVRDMLWLQPSKNNGRDKVTEPNFQAIQVSLAYFGIRRNDLTEIFTRAGLINSSNPHPFLASSKARRIYSVSFISLPPNKKAPNQIVQDKANRRSISCAKRKL

SEQ ID NO: 4432 - protein, 603 aa, Artificial
  Synthetic
MGAIENKHIFAAYANLAIDGLIKTLNFIAKKLDTQKQLSSWDIKHVITLIDSIFDQNPQNNLEQVVEGYLPWIKPIIEMKTPKKGERQSDKLCIEYKTIITAFASLLNDVRNYYTHYYHDPICIYPGGYDIPSSLNCIYDSAINIIKERFQAEEKEIEHLRRYTRKKGRVVLKTEDDHFYYTLVNNNDLSEKGYAFFISMFLERKYSYLFLKKLSGFKRGDSLQYRLTLEVFTALSTKPPVERLRTTKDTKQDRALDILNELSRIPIELYQTLEPKYREMYNETLQPTDAEDPYGLPDRSRIRFRSRFEAFALHFLDKQADFKEIGFYTYLGNYFHNGYQKTRVDRETKDRYINFQLAGFCKNIQDISAKKLSEALNVKSIDISTDSIPDINSFEPYLVQSTPHYIVNGNNIGIKVLPEGKDTYPTIDEKGAKMPIADFWLSKYELPAMLFYTYLRNNNIHKSHCPLSVKDIIERSIHKSTKQKHPEERSELMLRRVMKAIFWTDSKLNEVERIKSQKSAFGKRQHEILKAGRIAETLVRDMLWLQPSKNNGRDKVTEPNFQAIQVSLAYFGIRRNDLTEIFTRAGLINSSNPHPFLAQIGTT

SEQ ID NO: 4433 - protein, 890 aa, Artificial
  Synthetic
MGAIENKHIFAAYANLAIDGLIKTLNFIAKKLDTQKQLSSWDIKHVITLIDSIFDQNPQNNLEQVVEGYLPWIKPIIEMKTPKKGERQSDKLCIEYKTIITAFASLLNDVRNYYTHYYHDPICIYPGGYDIPSSLNCIYDSAINIIKERFQAEEKEIEHLRRYTRKKGRVVLKTEDDHFYYTLVNNNDLSEKGYAFFISMFLERKYSYLFLKKLSGFKRGDSLQYRLTLEVFTALSTKPPVERLRTTKDTKQDRALDILNELSRIPIELYQTLEPKYREMYNETLQPTDAEDPYGLPDRSRIRFRSRFEAFALHFLDKQADFKEIGFYTYLGNYFHNGYQKTRVDRETKDRYINFQLAGFCKNIQDISAKKLSEALNVKSIDISTDSIPDINSFEPYLVQSTPHYIVNGNNIGIKVLPEGKDTYPTIDEKGAKMPIADFWLSKYELPAMLFYTYLRNNNIHKSHCPLSVKDIIERSIHKSTKQKHPEERSELMLRRVMKAIFWTDSKLNEVERIKSQKSAFGKRQHEILKAGRIAETLVRDMLWLQPSKNNGRDKVTEPNFQAIQVSLAYFGIRRNDLTEIFTRAGLINSSNPHPFLAQIGTNYTSLIEFYIAYLKERKVYFSRIQKKILQGKLNIQCHPLRDLQREPNKPQDKEEAIFLPRGLFNEAIINCLKKSKLKQLIESPTREKSPALNVSYLIQNYFRTYFEDQSQEFYAQPRNYRLFDKLSPNKGKSKSYLSLEQRIKKMEELRPSKIPVAEANKLLEKEDRLYRKNYNEICDNESIIRLYQIQDILLFMMTKEYLPSDLYNRINKYKLENVKGILNERVSYLIDLNPLKIQGEDIKIKDYGKLFYIHHDTRISSLNKVLSKVKRSNSISSSCLLYTSPSPRD

SEQ ID NO: 4434 - protein, 863 aa, Artificial
  Synthetic
MGAIENKHIFAAYANLAIDGLIKTLNFIAKKLDTQKQLSSWDIKHVITLIDSIFDQNPQNNLEQVVEGYLPWIKPIIEMKTPKKGERQSDKLCIEYKTIITAFASLLNDVRNYYTHYYHDPICIYPGGYDIPSSLNCIYDSAINIIKERFQAEEKEIEHLRRYTRKKGRVVLKTEDDHFYYTLVNNNDLSEKGYAFFISMFLERKYSYLFLKKLSGFKRGDSLQYRLTLEVFTALSTKPPVERLRTTKDTKQDRALDILNELSRIPIELYQTLEPKYREMYNETLQPTDAEDPYGLPDRSRIRFRSRFEAFALHFLDKQADFKEIGFYTYLGNYFHNGYQKTRVDRETKDRYINFQLAGFCKNIQDISAKKLSEALNVKSIDISTDSIPDINSFEPYLVQSTPHYIVNGNNIGIKVLPEGKDTYPTIDEKGAKMPIADFWLSKYELPAMLFYTYLRNNNIHKSHCPLSVKDIIERSIHKSTKQKHPEERSELMLRRVMKAIFWTDSKLNEVERIKSQKSAFGKRQHEILKAGRIAETLVRDMLWLQPSKNNGRDKVTEPNFQAIQVSLAYFGIRRNDLTEIFTRAGLINSSNPHPFLAQIGTNYTSLIEFYIAYLKERKVYFSRIQKKILQGKLNIQCHPLRDLQREPNKPQDKEEAIFLPRGLFNEAIINCLKKSKLKQLIESPTREKSPALNVSYLIQNYFRTYFEDQSQEFYAQPRNYRLFDKLSPNKGKSKSYLSLEQRIKKMEELRPSKIPVAEANKLLEKEDRLYRKNYNEICDNESIIRLYQIQDILLFMMTKEYLPSDLYNRINKYKLENVKGILNERVSYLIDLNPLKIQGEDIKIKDYGKLFYIHHDTRISSL

SEQ ID NO: 4435 - protein, 764 aa, Artificial
  Synthetic
MGAIENKHIFAAYANLAIDGLIKTLNFIAKKLDTQKQLSSWDIKHVITLIDSIFDQNPQNNLEQVVEGYLPWIKPIIEMKTPKKGERQSDKLCIEYKTIITAFASLLNDVRNYYTHYYHDPICIYPGGYDIPSSLNCIYDSAINIIKERFQAEEKEIEHLRRYTRKKGRVVLKTEDDHFYYTLVNNNDLSEKGYAFFISMFLERKYSYLFLKKLSGFKRGDSLQYRLTLEVFTALSTKPPVERLRTTKDTKQDRALDILNELSRIPIELYQTLEPKYREMYNETLQPTDAEDPYGLPDRSRIRFRSRFEAFALHFLDKQADFKEIGFYTYLGNYFHNGYQKTRVDRETKDRYINFQLAGFCKNIQDISAKKLSEALNVKSIDISTDSIPDINSFEPYLVQSTPHYIVNGNNIGIKVLPEGKDTYPTIDEKGAKMPIADFWLSKYELPAMLFYTYLRNNNIHKSHCPLSVKDIIERSIHKSTKQKHPEERSELMLRRVMKAIFWTDSKLNEVERIKSQKSAFGKRQHEILKAGRIAETLVRDMLWLQPSKNNGRDKVTEPNFQAIQVSLAYFGIRRNDLTEIFTRAGLINSSNPHPFLAQIGTNYTSLIEFYIAYLKERKVYFSRIQKKILQGKLNIQCHPLRDLQREPNKPQDKEEAIFLPRGLFNEAIINCLKKSKLKQLIESPTREKSPALNVSYLIQNYFRTYFEDQSQEFYAQPRNYRLFDKLSPNKGKSKSYLSLEQRIKKMEELRPSKIPVAEANKLL

SEQ ID NO: 4436 - protein, 767 aa, Artificial
  Synthetic
MGAIENKHIFAAYANLAIDGLIKTLNFIAKKLDTQKQLSSWDIKHVITLIDSIFDQNPQNNLEQVVEGYLPWIKPIIEMKTPKKGERQSDKLCIEYKTIITAFASLLNDVRNYYTHYYHDPICIYPGGYDIPSSLNCIYDSAINIIKERFQAEEKEIEHLRRYTRKKGRVVLKTEDDHFYYTLVNNNDLSEKGYAFFISMFLERKYSYLFLKKLSGFKRGDSLQYRLTLEVFTALSTKPPVERLRTTKDTKQDRALDILNELSRIPIELYQTLEPKYREMYNETLQPTDDEDPYGLPDRSRIRFRSRFEAFALHFLDKQADFKEIGFYTYLGNYFHNGYQKTRVDRETKDRYINFQLAGFCKNIQDISAKKLSEALNVKSIDISTDSIPDINSFEPYLVQSTPHYIVNGNNIGIKVLPEGKDTYPTIDEKGAKMPIADFWLSKYELPAMLFYTYLRNNNIHKSHCPLSVKDIIERSIHKSTKQKHPEERSELMLRRVMKAIFWTDSKLNEVERIKSQKSAFGKRQHEILKAGRIAETLVRDMLWLQPSKNNGRDKVTEPNFQAIQVSLAYFGIRRNDLTEIFTRAGLINSSNPHPFLAQIGTNYTSLIEFYIAYLKERKVYFSRIQKKILQGKLNIQCHPLRDLQREPNKPQDKEEAIFLPRGLFNEAIINCLKKSKLKQLIESPTREKSPALNVSYLIQNYFRTYFEDQSQEFYAQPRNYRLFDKLSPNKGKSKSYLSLEQRIKKMEELRPSKIPVAEANKLLEKE

SEQ ID NO: 4437 - protein, 824 aa, Artificial
  Synthetic
MGAIENKHIFAAYANLAIDGLIKTLNFIAKKLDTQKQLSSWDIKHVITLIDSIFDQNPQNNLEQVVEGYLPWIKPIIEMKTPKKGERQSDKLCIEYKTIITAFASLLNDVRNYYTHYYHDPICIYPGGYDIPSSLNCIYDSAINIIKERFQAEEKEMEHLRRYTRKKGRVVLKTEDDHFYYTLANNNDLSEKGYAFFISMFLERKYSYLFLKKLSGFKRGDSLQYRLTLEVFTALSTKPPVERLRTTKDTKQDRALDILNELSRIPIELYQTLEPKYREMYNETLQPTDAEDPYGLPDRSRIRFRSRFEAFALHFLDKQADFKEIGFYTYLGNYFHNGYQKTRVDRETKDRYINFQLAGFCKNIQDISAKKLSEALNVKSIDISTDSIPDINSFEPYLVQSTPHYIVNGNNIGIKVLPEGKDTYPTIDEKGAKMPIADFWLSKYELPAMLFYTYLRNNNIHKSHCPLSVKDIIERSIHKSTKQKHPEERSELMLRRVMKAIFWTDSKLNEVERIKSQKSAFGKRQHEILKAGRIAETLVRDMLWLQPSKNNGRDKVTEPNFQAIQVSLAYFGIRRNDLTEIFTRAGLINSSNPHPFLAQIGTNYTSLIEFYIAYLKERKVYFSRIQKKILQGKLNIQCHPLRDLQREPNKPQDKEEAIFLPRGLFNEAIINCLKKSKLKQLIESPTREKSPALNVSYLIQNYFRTYFEDQSQEFYAQPRNYRLFDKLSPNKGKSKSYLSLEQRIKKMEELRPSKIPVAEANKLLEKEDRLYRKNYNEICDNESIIRLYQIQDILLFMMTKEYLPSDLYNRINKYKLENVKGIFK

SEQ ID NO: 4438 - protein, 784 aa, Artificial
  Synthetic
MGAIENKHIFAAYANLAIDGLIKTLNFIAKKLDTQKQLSSWDIKHVITLIDSIFDQNPQNNLEQVVEGYLPWIKPIIEMKTPKKGERQSDKLCIEYKTIITAFASLLNDVRNYYTHYYHDPICIYPGGYDIPSSLNCIYDSAINIIKERFQAEEKEMEHLRRYTRKKGRVVLKTEDDHFYYTLANNNDLSEKGYAFFISMFLERKYSYLFLKKLSGFKRGDSLQYRLTLEVFTALSTKPPVERLRTTKDTKQDRALDILNELSRIPIELYQTLEPKYREMYNETLQPTDAEDPYGLPDRSRIRFRSRFEAFALHFLDKQADFKEIGFYTYLGNYFHNGYQKTRVDRETKDRYINFQLAGFCKNIQDISAKKLSEALNVKSIDISTDSIPDINSFEPYLVQSTPHYIVNGNNIGIKVLPEGKDTYPTIDEKGAKMPIADFWLSKYELPAMLFYTYLRNNNIHKSHCPLSVKDIIERSIHKSTKQKHPEERSELMLRRVMKAIFWTDSKLNEVERIKSQKSAFGKRQHEILKAGRIAETLVRDMLWLQPSKNNGRDKVTEPNFQAIQVSLAYFGIRRNDLTEIFTRAGLINSSNPHPFLAQIGTNYTSLIEFYIAYLKERKVYFSRIQKKILQGKLNIQCHPLRDLQREPNKPQEKEEAIFLPRGLFNEAIINCLKKSKLKQLIESPTREKSPALNVSYLILNYFRTYFEDQSQEFYAQPRNYRLFDKLSPNKGKSKSYLSLEQRIKKMEELRPSKIPVAEANKLLEKEDRLYRKNYNEICDNESI

SEQ ID NO: 4439 - protein, 872 aa, Artificial
  Synthetic
MGAIENKHIFAAYANLAIDGLIKTLNFIAKKLDTQKQLSSWDIKHVITLIDSIFDQNPQNNLEQIVEGYLPWIKPIIEMKTPKKGERQSDKLCIEYKTIITAFASLLNDVRNYYTHYYHDPICIYPRGYDIPSSLNCIYDSAINIIKERFQAEEKEMEHLRRYTRKKGRVVLKTEDDHFYYTLVNNNGLSEKGYAFFISMFLERKYSYLFLKKLSGFKRGDSLQYRLTLEVFTALSTKPPVERLRTTKDTKQDRALDILNELSKIPIELYQTLEPKYREMYNETLQPTDAEDPYGLPDRSRIRFRSRFETFALHFLDKQADFKEIGFYTYLGNYFHNGYQKTRVDRETKDRYINFQLAGFCKNIQDISAKKLSEALNVKSIDISTDSIPDINSFEPYLVQSTPHYIVNGNNIGIKVLPEGKDTYPTIDEKGAKMPIADFWLSKYELPAMLFYTYLRNNNIHKSHCPLSVKDIIERSIHKSTKQKHPEERSELMLRRVMKAIFWTDSKLNEVERIKSQKSAFGKRQHEILKAGRIAETLVRDMLWLQPSKNNGRDKVTEPNFQAIQVSLAYFGIRRNDLTEIFTRAGLINSSNPHPFLAQIGTNYTSLIEFYIAYLKERKVYFSRIQKKILQGKLNIQCHPLRDLQREPNKPQDKEEAIFLPRGLFNEAIINCLKKSKLKQLIESPTREKSPALNVSYLIQNYFRTYFEDQSQEFYAQPRNYRLFDKLSPNKGKSKSYLSLEQRIKKMEELRPSKIPVAEANKLLEKEDRLYRKNYNEICDNESIIRLYQIQDILLFMMTKEYLPSDLYNRINKYKLENVKGILNERVSYLIDLNLLKIQGEDIKIKDYGKLFYIHHDTRISSLNKVLSKVKR

SEQ ID NO: 4440 - protein, 812 aa, Artificial
  Synthetic
MGAIENKHIFAAYANLAIDGLIKTLNFIAKKLDTQKQLSSWDIKHVITLIDSIFDQNPQNNLEQIVEGYLPWIKPIIEMKTPKKGERQSDKLCIEYKTIITAFASLLNDVRNYYTHYYHDPICIYPRGYDIPSSLNCIYDSAINIIKERFQAEEKEMEHLRRYTRKKGRVVLKTEDDHFYYTLVNNNGLSEKGYAFFISMFLERKYSYLFLKKLSGFKRGDSLQYRLTLEVFTALSTKPPVERLRTTKDTKQDRALDILNELSKIPIELYQTLEPKYREMYNETLQPTDAEDPYGLPDRSRIRFRSRFETFALHFLDKQADFKEIGFYTYLGNYFHNGYQKTRVDRETKDRYINFQLAGFCKNIQDISAKKLSEALNVKSIDISTDSIPDINSFEPYLVQSTPHYIVNGNNIGIKVLPEGKDTYPTIDEKGAKMPIADFWLSKYELPAMLFYTYLRNNNIHKSHCPLSVKDIIERSIHKSTKQKHPEERSELMLRRVMKAIFWTDSKLNEVERIKSQKSAFGKRQHEILKAGRIAETLVRDMLWLQPSKNNGRDKVTEPNFQAIQVSLAYFGIRRNDLTEIFTRAGLINSSNPHPFLAQIGTNYTSLIEFYIAYLKERKVYFSRIQKKILQGKLNIQCHPLRDLQREPNKPQDKEEAIFLPRGLFNEAIINCLKKSKLKQLIESPTREKSPALNVSYLIQNYFRTYFEDQSQEFYAQPRNYRLFDKLSPNKGKSKSYLSLEQRIKKMEELRPSKIPVAEANKLLEKEDRLYRKNYNEICDNESIIRLYQIQDILLFMMTKEYLPSDLYNRIN

SEQ ID NO: 4441 - protein, 871 aa, Artificial
  Synthetic
MGAIENKHIFAAYANLAIDGLIKTLNFIAKKLDTQKQLSSWDIKHVITLIDSIFDQNPQNNLEQIVEGYLPWIKPIIEMKTPKKGERQSDKLCIEYKTIITAFASLLNDVRNYYTHYYHDPICIYPRGYDIPSSLNCIYDSAINIIKERFQAEEKEMEHLRRYTRKKGRVVLKTEDDHFYYTLVNNNGLSEKGYAFFISMFLERKYSYLFLKKLSGFKRGDSLQYRLTLEVFTALSTKPPVERLRTTKDTKQDRALDILNELSKIPIELYQTLEPKYREMYNETLQPTDAEDPYGLPDRSRIRFRSRFETFALHFLDKQADFKEIGFYTYLGNYFHNGYQKTRVDRETKDRYINFQLAGFCKNIQDISAKKLSEALNVKSIDISTDSIPDINSFEPYLVQSTPHYIVNGNNIGIKVLPEGKDTYPTIDEKGAKMPIADFWLSKYELPAMLFYTYLRNNNIHKSHCPLSVKDIIERSIHKSTKQKHPEERSELMLRRVMKAIFWTDSKLNEVERIKSQKSAFGKRQHEILKAGRIAETLVRDMLWLQPSKNNGRDKVTEPNFQAIQVSLAYFGIRRNDLTEIFTRAGLINSSNPHPFLAQIGTNYTSLIEFYIAYLKERKVYFSRIQKKILQGKLNIQCHPLRDLQREPNKPQDKEEAIFLPRGLFNEAIINCLKKSKLKQLIESPTREKSPALNVSYLIQNYFRTYFEDQSQEFYAQPRNYRLFDKLSPNKGKSKSYLSLEQRIKKMEELRPSKIPVAEANKLLEKEDRLYRKNYNEICDNESIIRLYQIQDILLFMMTKEYLPSDLYNRINKYKLENVKGILNERVSYLIDLNLLKIQGEDIKIKDYGKLFYIHHDTRISSLNKVLSKVK

SEQ ID NO: 4442 - protein, 852 aa, Artificial
  Synthetic
MGAIENKHIFAAYANLAIDGLIKTLNFIAKKLDTQKQLSSWDIKHVITLIDSIFDQNPQNNLEQIVEGYLPWIKPIIEMKTPKKGERQSDKLCIEYKTIITAFASLLNDVRNYYTHYYHDPICIYPRGYDIPSSLNCIYDSAINIIKERFQAEEKEMEHLRRYTRKKGRVVLKTEDDHFYYTLVNNNGLSEKGYAFFISMFLERKYSYLFLKKLSGFKRGDSLQYRLTLEVFTALSTKPPVERLRTTKDTKQDRALDILNELSKIPIELYQTLEPKYREMYNETLQPTDAEDPYGLPDRSRIRFRSRFETFALHFLDKQADFKEIGFYTYLGNYFHNGYQKTRVDRETKDRYINFQLAGFCKNIQDISAKKLSEALNVKSIDISTDSIPDINSFEPYLVQSTPHYIVNGNNIGIKVLPEGKDTYPTIDEKGAKMPIADFWLSKYELPAMLFYTYLRNNNIHKSHCPLSVKDIIERSIHKSTKQKHPEERSELMLRRVMKAIFWTDSKLNEVERIKSQKSAFGKRQHEILKAGRIAETLVRDMLWLQPSKNNGRDKVTEPNFQAIQVSLAYFGIRRNDLTEIFTRAGLINSSNPHPFLAQIGTNYTSLIEFYIAYLKERKVYFSRIQKKILQGKLNIQCHPLRDLQREPNKPQDKEEAIFLPRGLFNEAIINCLKKSKLKQLIESPTREKSPALNVSYLIQNYFRTYFEDQSQEFYAQPRNYRLFDKLSPNKGKSKSYLSLEQRIKKMEELRPSKIPVAEANKLLEKEDRLYRKNYNEICDNESIIRLYQIQDILLFMMTKEYLPSDLYNRINKYKLENVKGILNERVSYLIDLNLLKIQGEDIKIKDYGKLF

SEQ ID NO: 4443 - protein, 825 aa, Artificial
  Synthetic
MGAIENKHIFAAYANLAIDGLIKTLNFIAKKLDTQKQLSSWDIKHVITLIDSIFDQNPQNNLEQIVEGYLPWIKPIIEMKTPKKGERQSDKLCIEYKTIITAFASLLNDVRNYYTHYYHDPICIYPRGYDIPSSLNCIYDSAINIIKERFQAEEKEMEHLRRYTRKKGRVVLKTEDDHFYYTLVNNNGLSEKGYAFFISMFLERKYSYLFLKKLSGFKRGDSLQYRLTLEVFTALSTKPPVERLRTTKDTKQDRALDILNELSKIPIELYQTLEPKYREMYNETLQPTDAEDPYGLPDRSRIRFRSRFETFALHFLDKQADFKEIGFYTYLGNYFHNGYQKTRVDRETKDRYINFQLAGFCKNIQDISAKKLSEALNVKSIDISTDSIPDINSFEPYLVQSTPHYIVNGNNIGIKVLPEGKDTYPTIDEKGAKMPIADFWLSKYELPAMLFYTYLRNNNIHKSHCPLSVKDIIERSIHKSTKQKHPEERSELMLRRVMKAIFWTDSKLNEVERIKSQKSAFGKRQHEILKAGRIAETLVRDMLWLQPSKNNGRDKVTEPNFQAIQVSLAYFGIRRNDLTEIFTRAGLINSSNPHPFLAQIGTNYTSLIEFYIAYLKERKVYFSRIQKKILQGKLNIQCHPLRDLQREPNKPQDKEEAIFLPRGLFNEAIINCLKKSKLKQLIESPTREKSPALNVSYLIQNYFRTYFEDQSQEFYAQPRNYRLFDKLSPNKGKSKSYLSLEQRIKKMEELRPSKIPVAEANKLLEKEDRLYRKNYNEICDNESIIRLYQIQDILLFMMTKEYLPSDLYNRINKYKLENVKGILNE

SEQ ID NO: 4444 - protein, 770 aa, Artificial
  Synthetic
MGAIENKHIFAAYANLAIDGLIKTLNFIAKKLDTQKQLSSWDIKHVITLIDSIFDQNPQNNLEQVVEGYLPWIKPIIEMKTPKKGERQSDKLCIEYKTIITAFASLLNDVRNYYTHYYHDPICIYPRGYDIPSSLNCIYDSAINIIKERFQAEEKEMEHLRRYTRKKGRVVLKTEDDHFYYTLANNNDLSEKGYAFFISMFLERKYSYLFLKKLSGFKRGDSLQYRLTLEVFTALSTKPPVERLRTTKDTKQDRALDILNELSKIPIELYQTLEPKYREMYNETLQPTDAEDPYGLPDRSRIRFRSRFETFALHFLDKQADFKEIGFYTYLGNYFHNGYQKTRVDRETKDRYINFQLAGFCKNIQDISAKKLSEALNVKSIDISTDSIPDINSFEPYLVQSTPHYIVNGNNIGIKVLPEGKDTYPTIDEKGAKMPIADFWLSKYELPAMLFYTYLRNNNIHKSHCPLSVKDIIERSIHKSTKQKHPEERSELMLRRVMKAIFWTDSKLNEVERIKSQKSAFGKRQHEILKAGRIAETLVRDMLWLQPSKNNGRDKVTEPNFQAIQVSLAYFGIRRNDLTEIFTRAGLINSSNPHPFLAQIGTNYTSLIEFYIAYLKERKVYFSRIQKKILQGKLNIQCHPLRDLQREPNKPQDKEEAIFLPRGLFNEAIINCLKKSKLKQLIESPTREKSPALNVSYLIQNYFRTYFEDQSQEFYAQPRNYRLFDKLSPNKGKSKSYLSLEQRIKKMEELRPSKIPVAEANKLLEKEDRL

SEQ ID NO: 4445 - protein, 818 aa, Artificial
  Synthetic
MGAIKNKHIFAAYANLAIDGLIKTLNFIAKKLDTQKQLSSWDIKHVITLIDSIFDQNPQNNLEQVVEGYLPWIKPIIEMKTPKKGERQSDKLCIEYKTIITAFASLLNDVRNYYTHYYHDPICIYPGGYDIPSSLNCIYDSAINIIKERFQAEEKEMEHLRRYTRKKGRVVLKTEDDHFYYTLANNNDLSEKGYAFFISMFLERKYSYLFLKKLSGFKRGDSLQYRLTLEVFTALSTKPPVERLRTTKDTKQDRALDILNELSKIPIELYQTLEPKYREMYNETLQPTDAEDPYGLPDRSRIRFRSRFEAFALHFLDKQADFKEIGFYTYLGNYFHNGYQKTRVDRETKDRYINFQLAGFCKNIQDISAKKLSEALNVKSIDISTDSIPDINSFEPYLVQSTPHYIVNGNNIGIKVLPEGKDTYPTIDEKGAKMPIADFWLSKYELPAMLFYTYLRNNNIHKSHCPLSVKDIIERSIHKSTKQKHPEERSELMLRRVMKAIFWTDSKLNEVERIKSQKSAFGKRQHEILKAGRIAETLVRDMLWLQPSKNNGRDKVTEPNFQAIQVSLAYFGIRRNDLTEIFTRAGLINSSNPHPFLAQIGTNYTSLIEFYIAYLKERKVYFSRIQKKILQGKLNIQCHPLRDLQREPNKPQDKEEAIFLPRGLFNEAIINCLKKSKLKQLIESPTREKSPALNVSYLIQNYFRTYFEDQSQEFYAQPRNYRLFDKLSPNKGKSKSYLSLEQRIKKMEELRPSKIPVAEANKLLEKEDRLYRKNYNEICDNESIIRLYQIQDILLFMMTKEYLPSDCLLYTSPSPRDA

SEQ ID NO: 4446 - protein, 642 aa, Artificial
  Synthetic
LDTQKQLSSWDIKHVITLIDSIFDQNPQNNLEQVVEGYLPWIKPIIEMKTPKKGERQSDKLCIEYKTIITAFASLLNDVRNYYTHYYHDPICIYPGGYDIPSSLNCIYDSAINIIKERFQAEEKEMEHLRRYTRKKGRVVLKTEDDHFYYTLANNNDLSEKGYAFFISMFLERKYSYLFLKKLSGFKRGDSLQYRLTLEVFTALSTKPPVERLRTTKDTKQDRALDILNELSRIPIELYQTLEPKYREMYNETLQPTDAEDPYGLPDRSRIRFRSRFEAFALHFLDKQADFKEIGFYTYLGNYFHNGYQKTRVDRETKDRYINFQLAGFCKNIQDISAKKLSEALNVKSIDISTDSIPDINSFEPYLVQSTPHYIVNGNNIGIKVLPEGKDTYPTIDEKGAKMPIADFWLSKYELPAMLFYTYLRNNNIHKSHCPLSVKDIIERSIHKSTKQKHPEERSELMLRRVMKAIFWTDSKLNEVERIKSQKSAFGKRQHEILKAGRIAETLVRDMLWLQPSKNNGRDKVTEPNFQAIQVSLAYFGIRRNDLTEIFTRAGLINSSNPHPFLAQIGTNYTSLIEFYIAYLKERKVYFSRIQKKILQGKLNIQCHPLRDLQREPNKPQDKEEAIFLPRGLFNEAIINCL

SEQ ID NO: 4447 - protein, 821 aa, Artificial
  Synthetic
MGAIENKHIFAAYANLAIDGLIKTLNFIAKKLDTQKQLSSWDIKHVITLIDSIFDQNPQNNLEQIVEGYLPWIKPIIEMKTPKKGERQSDKLCIEYKTIITAFASLLNDVRNYYTHYYHDPICIYPGGYDIPSSLNCIYDSAINIIKERFQAEEKEMEHLRRYTRKKGRVVLKTEDDHFYYTLANNNDLSEKGYAFFISMFLERKYSYLFLKKLSGFKRGDSLQYRLTLEVFTALSTKPPVERLRTTKDTKQDRALDILNELSKIPIELYQTLEPKYREMYNETLQPTDAEDPYGLPDRSRIRFRSRFETFALHFLDKQADFKEIGFYTYLGNYFHNGYQKTRVDRETKDRYINFQLAGFCKNIQDISAKKLSEALNVKSIDISTDSIPDINSFEPYLVQSMPHYIVNGNNIGIKVLPEGKDTYPTIDEKGAKMPIADFWLSKYELPAMLFYTYLRNNNIHKSHCPLSVKDIIERSIHKSTKQKHPEERSELMLRRVMKAIFWTDSKLNEVERIKSQKSAFGKRQHEILKAGRIAEMLVRDMLWLQPSKNNGRDKVTEPNFQAIQVSLAYFGIRRNDLTEIFTRAGLINSSNPHPFLAQIGTNYTSLIEFYIAYLKERKVYFSRIQKKILQGKLNIQCHPLRDLQREPNKPQEKEEAIFLPRGLFNEAIINCLKKSKLKQLIESPTREKSPALNVSYLIQNYFRTYFEDQSQEFYAQPRNYRLFDKLSPNKGKSKSYLSLEQRIKKMEELRPSKIPVAEANKLLEKEDRLYRKNYNEICDNESIIRLYQIQDILLFMMTKEYLPSDLYNRINKYKLENVKG

SEQ ID NO: 4448 - protein, 723 aa, Artificial
  Synthetic
MGAIENKHIFAAYANLAIDGLIKTLNFIAKKLDTQKQLSSWDIKHVITLIDSIFDQNPQNNLEQIVEGYLPWIKPIIEMKTPKKGERQSDKLCIEYKTIITAFASLLNDVRNYYTHYYHDPICIYPGGYDIPSSLNCIYDSAINIIKERFQAEEKEMEHLRRYTRKKGRVVLKTEDDHFYYTLVNNNDLSEKGYAFFISMFLERKYSYLFLKKLSGFKRGDSLQYRLTLEVFTALSTKPPVERLRTTKDTKQDRALDILNELSKIPIELYQTLEPKYREMYNETLQPTDAEDPYGLPDRSRIRFRGRFEAFALHFLDKQADFKEIGFYTYLGNYFHNGYQKTRVDRETKDRYINFQLAGFCKNIQDISAKKLSEVLNVKSIDISTDSIPDINSFEPYLVQSTPHYIVNGNNIGIKVLPEGKDTYPTIDEKGAKMPIADFWLSKYELPAMLFYTYLRNNNIHKSHCPLSVKDIIERSIHKSTKQKHPEERSELMLRRVMKAIFWTDSKLNEVERIKSQKSAFGKRQHEILKAGRIAETLVRDMLWLQPSKNNGRDKVTEPNFQAIQVSLAYFGIRRNDLTEIFTRAGLINSSNPHPFLAQIGTNYTSLIEFYIAYLKERKVYFSRIQKKILQGKLNIQCHPLRDLQREPNKPQDKEEVIFLPRGLFNEAIINCLKKSKIKQLIESPTREKSPALNVSYLIQNYFKTYFEDQSQEFYAQPRNYCS

SEQ ID NO: 4449 - protein, 636 aa, Artificial
  Synthetic
  misc_feature (620)..(623): Xaa can be any naturally occurring amino acid
MGAIKNKHIFAAYANLAIDGLIKTLNFIAKKLDTQKQLSSWDIKHVITLIDSIFDQNPQNNLEQVVEGYLPWIKPIIEMKTPKKGERQSDKLCIEYKTIITAFASLLNDVRNYYTHYYHDPICIYPGGYDIPSSLNCIYDSAINIIKERFQAEEKEMEHLRRYTRKKGRVVLKTEDDHFYYTLANNNDLSEKGYAFFISMFLERKYSYLFLKKLSGFKRGDSLQYRLTLEVFTALSTKPPVERLRTTKDTKQDRALDILNELSKIPIELYQTLEPKYREMYNETLQPTDAEDPYGLPDRSRIRFRSRFEAFALHFLDKQADFKEIGFYTYLGNYFHNGYQKTRVDRETKDRYINFQLAGFCKNIQDISAKKLSEALNVKSIDISTDSIPDINSFEPYLVQSTPHYIVNGNNIGIKVLPEGKDTYPTIDEKGAKMPIADFWLSKYELPAMLFYTYLRNNNIHKSHCPLSVKDIIERSIHKSTKQKHPEERSELMLRRVMKAIFWTDSKLNEVERIKSQKSAFGKRQHEILKAGRIAETLVRDMLWLQPSKNNGRDKVTEPNFQAIQVSLAYFGIRRNDLTEIFTRAGLINSSNPHPFLAQIGTNYTSLIEFYIAYLKERKXXXXIFHEYKRKFSKGN

SEQ ID NO: 4450 - protein, 375 aa, Artificial
  Synthetic
MGAIENKHIFAAYANLAIDGLIKTLNFIAKKLDTQKQLSSWDIKHVITLIDSIFDQNPQNNLEQVVEGYLPWIKPIIEMKTPKKGERQSDKLCIEYKTIITAFASLLNDVRNYYTHYYHDPICIYPGGYDIPSSLNCIYDSAINIIKERFQAEEKEMEHLRRYTRKKGRVVLKTEDDHFYYTLANNNDLSEKGYAFFISMFLERKYSYLFLKKLSGFKRGDSLQYRLTLEVFTALSTKPPVERLRTTKDTKQDRALDILNELSRIPIELYQTLEPKYREMYNETLQPTDAEDPYGLPDRSRIRFRSRFEAFALHFLDKQADFKEIGFYTYLGNYFHNGYQKTRVDRETKDRYINFQSQAFVKTSKISPQRNYRRH

SEQ ID NO: 4451 - protein, 467 aa, Artificial
  Synthetic
MGAIENKHIFAAYANLAIDGLIKTLNFIAKKLDTQKQLSSWDIKHVITLIDSIFDQNPQNNLEQIVEGYLPWIKPIIEMKTPKKGERQSDKLCIEYKTIITAFASLLNDVRNYYTHYYHDPICIYPRGYDIPSSLNCIYDSAINIIKERFQAEEKEMEHLRRYTRKKGRVVLKTEDDHFYYTLVNNNGLSEKGYAFFISMFLERKYSYLFLKKLSGFKRGDSLQYRLTLEVFTALSTKPPVERLRTTKDTKQDRALDILNELSKIPIELYQTLEPKYREMYNETLQPTDAEDPYGLPDRSRIRFRSRFETFALHFLDKQADFKEIGFYTYLGNYFHNGYQKTRVDRETKDRYINFQLAGFCKNIQDISAKKLSEALNVKSIDISTDSIPDINSFEPYLVQSTPHYIVNGNNIGIKVLPEGKDTYPTIDEKGAKMPIADFWLSKYELPAMLFYTYLRNNNCLLYTSPS

SEQ ID NO: 4452 - protein, 744 aa, Artificial
  Synthetic
MGAIENKHIFAAYANLAIDGLIKTLNFIAKKLDTQKQLSSWDIKHVITLIDSIFDQNPQNNLEQVVEGYLPWIKPIIEMKTPKKGERQSDKLCIEYKTIITAFASLLNDVRNYYTHYYHDPICIYPRGYDIPSSLNCIYDSAINIIKERFQAEEKEMEHLRNYTLVNNNGLSEKGYAFFISKFLERKYSYLFLKKLSGFKRGDSLQYRLTLEVFTALSTKPPVERLRTTKDTKQDRALDILNELSRIPIELYQTLEPKYREMYNETLQPTDAEDPYGLPDRSRIRFRSRFEAFALHFLDKQADFKEIGFYTYLGNYFHNGYQKTRVDRETKDRYINFQLAGFCKNIQDISAKKLSEALNVKSIDISTDSIPDINSFEPYLVQSTPHYIVNGNNIGIKVLPEGKDTYPTIDEKGAKMPIADFWLSKYELPAMLFYTYLRNNNIHKSHCPLSVKDIIERSIHKSTKQKHPEERSELMLRRVMKAIFWTDSKLNEVERIKSQKSAFGKRQHEILKAGRIAETLVRDMLWLQPSKNNGRDKVTEPNFQAIQVSLAYFGIRRNDLTEIFTRAGLINSSNPHPFLAQIGTNYTSLIEFYIAYLKERKVYFSRIQKKILQGKLNIQCHPLRDLQREPNKPQEKEEAIFLPRGLFNEAIINCLKKSKLKHLIESPTREKSPALNVSYLIHNYFRAYFEDQSQEFYAQPRNYRLFDKLSPNKGKSKSYLSLEQRIKKMEELRTKAIQDSCCRS

SEQ ID NO: 4453 - protein, 744 aa, Artificial; identical to SEQ ID NO: 4452
  Synthetic

SEQ ID NO: 4454 - protein, 744 aa, Artificial; identical to SEQ ID NO: 4452
  Synthetic

SEQ ID NO: 4455 - protein, 657 aa, Artificial
  Synthetic
MGAIENKHIFAAYANLAIDGLIKTLNFIAKKLDTQKQLSSWDIKHVITLIDSIFDQNPQNNLEQVVEGYLPWIKPIIEMKTPKKGERQSDKLCIEYKTIITAFASLLNDVRNYYTHYYHDPICIYPGGYDIPSSLNCIYDSAINIIKERFQAEEKEMKHLRNYTLVNNNGLSEKGYAFFISKFLERKYSYLFLKKLSGFKRGDSLQYRLTLEVFTALSTKPPVERLRTTKDTKQDRALDILNELSKIPIELYQTLEPKYREMYNETLQPTDAEDPYGLPDRSRIRFRSRFEAFALHFLDKQADFKEIGFYTYLGNYFHNGYQKTRVDRETKDRYINFQLAGFCKNIQDISAKKLSEALNVKSIDISTDSIPDINSFEPYLVQSTPHYIVNGNNIGIKVLPEGKDTYPTIDEKGAKMPIADFWLSKYELPAMLFYTYLRNNNIHKSHCPLSVKDIIERSIHKSTKQKHPEERSELMLRRVMKAIFWTDSKLNEVERIKSQKSAFGKRQHEILKAGRIAETLVRDMLWLQPSKNNGRDKVTEPNFQAIQVSLAYFGIRRNDLTEIFTRAGLINSSNPHPFLAQIGTNYTSLIEFYIAYLKERKVYFSRIQKKILQGKLNIQCHPLRDLQREPNKPQEKEEAIFLPRGLFNEAIINCLKK

SEQ ID NO: 4456 - protein, 570 aa, Artificial
  Synthetic
MPIADFWLSKYELPAMLFYTYLRNNNIHKSHCPLSVKDIIERSIHKSTKQKHPEERSELMLRRVMKAIFWTDSKLNEVERIKSQKSAFGKRQHEILKAGRIAETLVRDMLWLQPSKNNGRDKVTEPNFQAIQVSLAYFGIRRNDLTEIFTRAGLINSSNPHPFLAQIGTNYTSLIEFYIAYLKERKVYFSRIQKKILQGKLNIQCHPLRDLQREPNKPQEKEEAIFLPRGLFNEAIINCLKKSKLKHLIESPTREKSPALNVSYLIQNYFRAYFEDQSQEFYAQPRNYRLFDNLSPNKGKSKSYLSLEQRIKKMEELRPSKIPVAEANKLLEKEDRLYRKNYNEICDNESIIRLYQIQDILLFMMTKEYLPSDLYNRINKYKLENVKGILNERVSYLIDLNPLKIQGEDIKIKDYGKLFYIHHDTRISSLNKVLSKVKRNNSISSSVKIQPYENYKRECLDFEEAQIQIIPIIHSFEIAMVSMFPDLKKATPGNYYDFNELITEYEKRTKQKIDSSFLIKTRNMFLHDKYEAECIKEISDDFVYAKKIIAEFKMKIENIKLEDFSNDSSA

SEQ ID NO: 4457 - protein, 570 aa, Artificial; identical to SEQ ID NO: 4456
  Synthetic

SEQ ID NO: 4458 - protein, 570 aa, Artificial; identical to SEQ ID NO: 4456
  Synthetic

SEQ ID NO: 4459 - protein, 331 aa, Artificial
  Synthetic
LKKSKLKQLIESPTREKSPALNVSYLIQNYFRTYFEDQSQEFYAQPRNYRLFDKLSPNKGKSKSYLSLEQRIKKMEELRPSKIPVAEANKLLEKEDRLYRKNYNEICDNESIIRLYQIQDILLFMMTKEYLPSDLYNRINKYKLENVKGILNERVSYLIDLNPLKIQGEDIKIKDYGKLFYIHHDTRISSLNKVLSKVKRNNSISSSVKIQPYENYKRECLDFEEAQIQIIPIIHSFEIAMVSMFPDLKKATPGNYYDFNELITEYEKRTKQKIDSSFLIKTRNMFLHDKYEAECIKEISDDFVYAKKIIAEFKMKIENIKLEDLSNDSSA

SEQ ID NO: 4460 - protein, 570 aa, Artificial
  Synthetic
MPIADFWLSKYELPAMLFYTYLRNNNIHKSHCPLSVKDIIERSIHKSTKQKHPEERSELMLRRVMKAIFWTDSKLNEVERIKSQKSAFGKRQHEILKAGRIAETLVRDMLWLQPSKNNGRDKVTEPNFQAIQVSLAYFGIRRNDLTEIFTRAGLINSSNPHPFLAQIGTNYTSLIEFYIAYLKERKVYFSRIQKKILQGKLNIQCHPLRDLQREPNKPQDKEEAIFLPRGLFNEAIINCLKKSKLKQLIESPTREKSPALNVSYLIQNYFRTYFEDQSQEFYAQPRNYRLFDKLSPNKGKSKSYLSLEQRIKKMEELRPSKIPVAEANKLLEKEDRLYRKNYNEICDNESIIRLYQIQDILLFMMTKEYLPSDLYNRINKYKLENVKGILNERVSYLIDLNPLKIQGEDIKIKDYGKLFYIHHDTRINSLNKVLSKVKRNNSISSSVKIQPYENYKRECLDFEEAQIQIIPIIHSFEITMVSMFPDLKKATPGNYYDFNELITEYEKRTKQKIDSSFLIKTRNMFLHDKYEAECIKEISDDFVYAKKIIAEFKMKIENIKLEDLSNDSSA

SEQ ID NO: 4461 - protein, 507 aa, Artificial
  Synthetic
LQKAIFWTDSKLNEVERIKSQKSAFGKRQHEILKAGRIAETLVRDMLWLQPSKNNGRDKVTEPNFQAIQVSLAYFGIRRNDLTEIFTRAGLINSSNPHPFLAQIGTNYTSLIEFYIAYLKERKVYFSRIQKKILQGKLNIQCHPLRDLQREPNKPQDKEEAIFLPRGLFNEAIINCLKKSKLKQLIESPTREKSPALNVSYLIQNYFRTYFEDQSQEFYAQPRNYRLFDKLSPNKGKSKSYLSLEQRIKKMEELRPSKIPVAEANKLLEKEDRLYRKNYNEICDNESIIRLYQIQDILLFMMTKEYLPSDLYNRINKYKLENVKGILNERVSYLIDLNLLKIQGEDIKIKDYGKLFYIHHDTRISSLNKVLSKVKRNNSISSSVKIQPYENYKRECLDFEEAQIQIIPIIHSFEIAMVSMFPDLKKATPGNYYDFNELITEYEKRTKQKIDSSFLIKTRNMFLHDKYEAECIKEISDDFVYAKKIIAEFKMKIENIKLEDLSNDSSA

SEQ ID NO: 4462 - protein, 437 aa, Artificial
  Synthetic
MDSKYILGSYLNMANDNFINTIHLLAKKLKTPKGEDQNLDQVVSYIPRIFDNSNQVPETEQIVEFYFPWLEALKNANGFGKSELPELKIFYKDVLCSFAKNLKDLRDNYTHYIHKTISYHPIIYKKEGNTLQSSLPKALLQIYDASIKLAKERFLADENAVTHLRRYKIVGKKVVRKTEADHFMYLLEKDHLLTEKGIAFFTSLFLNRKYGYLMLKQLKGFKQGETLTYRLTLETFLAYSNIKPVERLKADKYSDVAFIMDLLGEISKIPKELYHILPETYILQYKNKLHIELNEDISLEAYCSRGRNRFDQLALTYLDRLEDFKQIGFYTYLGNYIHNGYMKARIDGTEQKRYLSEKMYGCCKNIYRDLSAIVAKQYNIEVKDSTETSYMLPNDFQPHVIRAYPHYVINNNNIGIRLLDEGESGFPILENRGTKKM

SEQ ID NO: 4463 - protein, 801 aa, Artificial
  Synthetic
  misc_feature (767)..(800): Xaa can be any naturally occurring amino acid
MEEANRYIYGAYFNMARDNFLNTIKLLADKMKLGAISGFGKDGNEVNDINKLFGDKNTYVNIENVVEFYFPWIKALEGRFSLDKGDRNLNDMKMFYKSVLTAFFTAVDSLRNKYTHYSHKDLNIREIKIECTLGGKDYCIGLLNTLDCIYDSAVNLLKLRFMAGEDEVAHLRRCKAVNKMVVVRTEKDGFYYRLSDNGGVTEKGVIFIASMFLNRKYGFLFLKQLEGFKRSDEKRYRLTLETFLAFSNIKPVDRLKSDKLDRASLGLDMLNELTKIPKELSETLSVDCLYKYLASDGEDDLRSRIRYQDRFVPLALEFISQSDEFKDFRFYTYVGNYVYKGYIKRLIDGTDKERYLSDRLCGFYKSVNDASSDAIAQKYGVEIKDSNEPDYMLPDSFRPHVLRATPHFVINNNNIGIKICGNDCLPVVNGKGVESPEPDYWLSIYELPAMLFYAYLREKNGKLLKDYKSIRELIEDVEKKADEKNDRDKGALMARHIDKEIIWTQTKLDEVKRLEEKKVAAYGKKGRVVLKSGRMADLLAHDMVRLQPATKGSDKITGANFQALQVSLAYFKRDILADVFSRAMLTTGNHRHPFLYRIDVSHCSSLRDFYVAYLGERRKYFEDVAKKITKNKLNTPCHILRRLQREGSGEEAGKDVKPKFLPRGIFTGSIKSCLEKSALNINIRNARNDVKPAINAAYLILMYYKEIEKGEFQGFYGEKRRYDILEEGKSLDLDERKKALASIKPAKIDVSEANMPMSKEEHLMRKXXXXXXXXXXXXXXXXXXXXXXXXXXXXXXXXXXQ

SEQ ID NO: 4464 - protein, 552 aa, Artificial
  Synthetic
MSKYDLPALLFYAYLRSDSRFASKCKKTIDEILRGYLSKSKDKKPKQAEKASVLMLRRIDKAIIWTQTKLNEAEKQRDNKKSFKIGEKADILAHDMLWLQPAKESKDKVSGANFRALQTSLAFFRRNELDDIFKRSFLIGGNNPHPFLSRIKINTMPSLFDFYLAYMRERLNYWEKIKLKLLKGHINVSCHPLRKLNHGKPVDQDNKKDEQPIFLPRGIFNDVIKNCLQKTKLGIYLKDQGAEKRPWNVAYQILKFHEIINDDDIQEFYKQPRKYAILDENHYLTLEERTDRLKDLKPECIEVSKANDILEKEDYLLRKSYNQVCDNESAIRLYQVQDILLFMIAQRLCNEIILGDKQEKKEKVETSFSLTLKNLSKKFDQPVHFEIKMNNVNLFSDTDIPVKNFGKMLRLKKDARFISYGKLFKGQKQNINYNDYCKEEEYFDICRIQMVKLCHELEEKLLEKGIITESPNSGYYPFADLVQRIINQGVVISSSDVKFILEARNMFLHNEYKQCCVNSINSIDSFIAEKVYNLFKQKMDNILGQLESIKPS

SEQ ID NO: 4465 - protein, 692 aa, Artificial
  Synthetic
MAFDKPRPKRRQARSDFYITDKAIMGGYFNLAQLNFFKTLMEIFTKAGIDVSKIKQDNSPKYLMILIKKLTHDDEKIDDKKWADALDLSNECLLKLQQLLYKHFPFLGPVMGGEASYNIYKLKDGHPEVKVANDVMRGVKLEDCLTVLRHFALCLNDCRNFYTHFNPYNSIDAQKEQYLSQNKVAVWLDKVKDASRRIVKQNNQLTSQDMEFLTGIDHMKPQDKVDEFGNIMTDRRGYTIKEYVEYEDYYFRIRGKRYLVDAAGAKLADQEPRNALSDFGVVFLCTFFLESDQSRRMLDELRLFETGPYDGSRDGDEFKNDILREILLFYRARIPRGKRLDPMDDTTLLAMDMLNELRKCPMPLYDVLSREGQRFFEDEVKRPNDLTPEVAKRLRSSDRFPYLALRYIDLNKCFDNIRFQVQLGKFRYKFYDKTTIDGEQVVRGLQKEVNAYGRLQDVERYRQEKYADMLQQTELVETGEEDITIANFIPDTPQSSPYLSDRTASYNIHNNRIGLFWNMPGEQEVLTGDEKMYLPDLNVDDNGKADVFLPAPKASLSVRDLPALVFYLYLQNQHPDLMPAESIIQQKYNALVRFFEDVSTGRLQPVKGINELKAAIDRYEYLTIHEIPEKLRDYLAGVAGTEDDDDCADRLDCYAMGILEKRYRRVAARIDQLKEARKMVGDKMNRYGKKSY

SEQ ID NO: 4466 - protein, 475 aa, Artificial
  Synthetic
MQQHNPKRRKAQSSFLISEKSIMGGYFNIARLNLYKTVITIFAQVGIKGDYQEDKIDRVLDALYKNLAGKSEELSKEQSQWKRLNQLKNEQIVKLQRLLFKHFPVLGPIMASEASYKIYKAELCAKDAEEKARNDKAELKKVRKSNVINDEQLMRGVGIDECLDVLATMASCLTDCRNFYSHYVPYNNKEEQKIQYGRQAKIARWLDKVIVASRRIDKQRNSLSTGEMEFLTGIDHYFPKEKVDENGRVIKDNRGWAVKEFVEYPDYYFRIKGERQLIDTSGVTLTGEKAMDALTDFGIVFFCTLFLQKTYAKMMQEELALYESGPYNGTVKGQEENDAKKNAILREMLSIYRIRIPRGKRLDSQDDTTTLAMDMLNELRKCPMSLYDVLGQEGQRFFEDEVQHPNEQTPEKAKRLRATDRFPYFALRYIDLKKDIFTRIRFQVQLGNYRFKFYNKKTIDGLEEVRSLQKEINGY

SEQ ID NO: 4467 - protein, 338 aa, Artificial
  Synthetic
MTNYHHNNQGSKSPNGQGQNRGSKYGKSGESRRQRRRQTQNFAISLTGKNVFGAYFNMARTNFVKTINYILPIAGVRGKYEENKIDKMLHALFLIQAGRGAELTPEQREWRQKLILNPEQQERLKSLLFRHFPMLKPMMADFIDHKIYKNKKKSTIQTDDEAFELLRGVSLADCLDMVVLMAETLTECRNFYTHADPYNSAVDLAKQYQHQAAIAKKLDKLVVASRRVLKEMENLSVEEVEFLTGVDHMAQIPRKDEAGQVIRDEKGRKQMKFVEYDDFYFKISGTRPVQGLSMTGPDGQPTTVDSQLPALSDFGLLFFCVLFLSKPYAKLFIEEARL

SEQ ID NO: 4468 - protein, 507 aa, Artificial
  Synthetic
MTNYHHNNQGSKSPNGQGQNRGSQYGKSGESRRQRRRQTQNFAISLTGKNVFGAYFNMARTNFVKTINYILPIAGVRGKYEENKIDKMLHALFLIQAGRGAELTPEQREWRQKLILNPEQQERLKSLLFRHFPMLKPMMADFIDHKIYKNKKKSTIQTDDEAFELLRGVSLADCLDMVVLMAETLTECRNFYTHADPYNSAVDLAKQYQHQAAIAKKLDKLVVASRRVLKEMENLSVEEVEFLTGVDHMAQVPRKDEAGQVIRDEKGRKQMKFVEYDDFYFKISGTRPVQGLSMTGIDGQPTTVDSQLPALSDFGLLFFCVLFLSKPYAKLFIEEARLFEFSPFTEVENLVIREMLSIYRIRTPRLHRIDSREDKAALSMDIFGELRRCPMELYNLLDKETDQPFFHDVVKHPNDYTPEVSKRQRHTDRFPHLALRYVDATKLFERIRFQLQLGAFRYKFYDKKNCIDGRPRVRRIQKEINGYGRLQEVEDKRFEKWGDLIQKREER

SEQ ID NO: 4469 - protein, 855 aa, Artificial
  Synthetic
MTNYHHNNQGSKRPNGQGQKLGSQQGKSVESRPRRRRQSQDFAISLTGKNVFGAYFNMARTNFVKTINYILPIAGVRGKYEENKIDKMLHALFLIQAGRGAELTPEQREWRQKLILNPEQQERLKSLLFRHFPMLKPMMADFIDHKIYKNKKKSTIQTDDEAFGLLRGVSLADCLDMVLLMAETLTECRNFYTHADPYNSAVDLAKQYQHQAAIAKKLDKLVVASRRVLKERENLSVEEVEFLTGVDHMAQIPRKDEAGQVIRDEKGRKQMKFVEYDDFYFKISGTRPVQGLSMTGPDGQPTTVDSQLPALSDFGLLFFCVLFLSKPYAKLFIEEARLFEFSPFTEVENLVMREMLSIYRIRTPRLHRIDSREDKAALSMDIFGELRRCPMELYNLLDKETDQPFFHDVVKHPNDYTPEVSKRQRHTDRFPHLALRYVDATKLFERIRFQLQLGAFRFRFYDKKNCIDGRPRVRRIQKEINGYGRLQEVEDKRFEKWGDLIQKREEREVKLEHEDMVLDLDQFLQDTADSIPYITDRRPAYNIHAGRIGLFWERSRNPKDFKYFEDGMYIPQLIVSEDLRAPISMPEPLCSLSVHDLPAMLFYEYLRGQQEGRKFKSAEQIIIDCEGDFRRFFASVADGSLKPFAREKELREYLSVNFPNLRMADIPEKIRLYLCGQPLRHNNEEETARQRLVRLTLEHLEEREQKIAHRLEHYQEDRKKIGEKDNKIGKKDHADVRHGALARYIAQSLMLWQPSIDGIGHGKLTGVNYNALTAYLATFGTPQPEEENFTPRTLLQVLQAANLVEGENPHPFINKVLARGNRNIEELYLHYLDEELNHIRACRQSLQNDPSDAAL

SEQ ID NO: 4470 - protein, 508 aa, Artificial
  Synthetic
  misc_feature (404)..(505): Xaa can be any naturally occurring amino acid
MGKEHKGNNAPKNRNKVANNSQQPRKVRRLQKTNFRISLSGKHVFGAYFNMARTNFIKTINYILPIAGVRGNYSESQINKLLQAMFLIQTGRNGELTKEQKQWEKKLRLNPEQQTKLQQLLFKHFPVLGPMMADVADHKVYLNKKKSNVQTEDEAFAQLKGVSLADCLEMIYLMAETLTECRNFYTHKSPYNTPSQLAMQYLHQEMIAKKLDKVVVASRRILKDREGFSVNEVEFLTGIDHLHQETVKDEFGNVKMKGGKVMKTFVEYDDFYFKISGKRLVKGYTVTVKDDKPVNVDTMLPALSDFGLLYFCVIFLSKPYAKLFIDEVRLFEFSPFSDNENMIMSEMLSIYRIRTPRLHKIDSRDSKATLAMDIFGELRRCPIELYDLLDKNSGQPFFHDEVKXXXXXXXXXXXXXXXXXXXXXXXXXXXXXXXXXXXXXXXXXXXXXXXXXXXXXXXXXXXXXXXXXXXXXXXXXXXXXXXXXXXXXXXXXXXXXXXXXXXXXXNFS

SEQ ID NO: 4471 - protein, 672 aa, Artificial
  Synthetic
MGKENKGNNAPKTQNKTANNSQQQKKVRRLQKTSFRISLTGKHVFGAYFNMARTNFIKTINYILPIAGVRGNYSENQINKMLRALFLIQAGRNGELTTEQKQWEKKLRLNPEQKTRLQKLLFKHFPVLSPMMADVADHKAYLNKKKSNVQTEDEAFEQLKGISLSDCLEIICLMAETLTECRNFYTHKDPYNKPSLLAAQYQHQEMIAKKLDKVIVASRRILKDREGLSVNEVEFLTGIDHLHQEVVKDEFGNVKKKDGKVMKTFVEYDDFYFKISGKRLVKGFTVTVKDDKPVNVDTMLPALSDFGLLYFCVLFLSKPYAKLFIDEVRLFEFSPFDDNENMIMSEMLSIYRIRTPRLHKIDSRDNKATLAMDIFGELRRCPIELYDLLDKNTGQPFFHDEVKRPNSHTPEVSKRLRYNDRFPTLALRYIDETELFNRIRFQLQLGAFRYKFYDKECIDGRVRVRRIQKDINGYGRLQEVADKRLDKWGDLIQKREEQSVKLEHEELYLDLDQFQQDTADSTPYVTDRRPAYNIHANRIGMYWEDSQNPKLFEVFDENKMYIPELKVSEDMKAPVKMPEPRCALSIYDLSAMLFYEYLREQEDENIPSAEQIIIDYESDYRRFFKAVAEGSLKPFQRTKEFREYLKKEYPRLHLADIPEKLQSYLCSHGLSF

SEQ ID NO: 4472 - protein, 813 aa, Artificial
  Synthetic
MGKGNKGNEVKIQQPKKKRRIQKTNFTISLTGKHVFGAYFNMARTNFIKTINYILPIAGVRGNYSENQINNMLHALFLIHAGRNSELSKEQKQWEKKLRLNLEQQTKLQKLLFKHFPVLGPMMADVADHKAFLNKKKSKVQTEDEAFVQLKGVSLSDCLEMIHLMAITLTECRNFYTHKSPYNTPSQLASQYQHQEQIAKKLDKVVVASRRILKDREGLSINEVEFLTGIDHLHQEIEKDQFGNIVKKNGKVLKTFVEYDDFYFKIFGKRLVKGLTVAVKDNDPVNVDTMLPALSDFGLLYFCVLFLSKPYAKLFIDETRLFEFSPFNDNENMILSEMLSIYRIRTPRLHKIDSRDNKAALAMDIFGELRCCPIELYDLLDKNTGQSFFHDEVKRPNSHTPEVSKRLRYDDRFPTLALRYIDETELFKRIRFQIQLGAFRYRFFDKEDCIDGRVRVRSIQKEINGYGRLQEVADKRLEKWGDMLQKREERSVKLEHEELYLDLDQFQEDTANSTPYVTDRRPSYNIHANRIGLYWEDSQNPKQFKVFDENGMYIPKLIVTEDEKAPINMPAPRCALSVYDLPAMLFYEYLREQQKGNVQAAEQIIIDYENDYRKFFKAVAEGTLKPFQKTKELREYLEENYPKLRMSDIPEKIQLYLTSKGLTHNNKPETVRERMIRLINQHLEEREKNVQRRLEHYQEDRKMVGEKENKYGKKGFADVRHGALARYLTQSMMEWQPSKDGKGYDKLTGLNYNVLTAYLATFGTPQTVEEGFTPKSLEQVLTKAHIIGGSNPHPFMNKVLSLGSRNIEELYLH

SEQ ID NO: 4473 - protein, 520 aa, Artificial
  Synthetic
MDKKQNHNIVGGQMSASTQPHSNQRRIQSTDFSIGLTGKHVYGAYFNMARTNFVKTVSYIMEIVGIRGKYSESQLNNVLQALYLIRAGQSDKLTAVQKTWKKNLRLTVEQQTLFQRLLFKHFPVLNPIMADTANYRAYLKKENKRKSTVQSEDETFEQLKGISLADCLEMLVLMGDTLTECRNFYTHLDPYNPPEELEKQYKHQALIAIKLNKVIEASRRVLKEREGLTTGEVEFLTGIDHLMQVDKKDEHGNKIYQKNGRPQKTFVEYDDFYFKVSGTRSIQGISHPALSDFGLLYLCVLFLSKHYAKLLIEESRLFEFSPFNDNENLILQEMLSIYRIRTPRPKRIDSHDDKATLAMDIFGELRRCPIVLYDLLDKEKGQPFFHDEVKRPNDHTPEVFKRIRFDDRFPHLALRYIDMAELFKRIRFQLQLGSFRYKFYDKLCADGQIRVRRIQKDINGYGRLQEVADKRWDFWGDLIQKREELPVKLEHEEVFINLDQFVQDTADSMPYITDRRPSYN

SEQ ID NO: 4474 - protein, 749 aa, Artificial
  Synthetic
MGKNYYSKNGNGSNKNAKVQKAPRLTNEPFTIREDDKKIYGAYFNMALDNFFKTIAYIFNVLDIKQFVRTKYNGEYVEVPMFSEESLHIILKYYSKFFGGTLKSDKLKKNVKKLSRLSSKDEEQEQKYEEDLDELIQSLQLTNEQQQKFQQMLFRHFPFLGPIMADYASYSIYQQASKDVSDKEYIKKRKKEIMNSYDSLRGVTLSQCLEELSKMADCLTDCRNKYTHFKPYNSLETQKTQLELQFMIAKKLDKLLAASRRLTKQNIAITTEEMEFITGIDHYENVNKQFIEREDFYFNPKGKGMAVIESTDANGAHQQSSSTYDAFSPFGIAYFCILFLSKTYARLFIDEINLFAGSPFNDSENAIMREIMSLYRVRTPRGKRLDSKATDSTLGMDMLNELRKCPMELYETLSQEGRRFFEDEVKRQNDHTPEVVKRLRSTDRFPYLAMRYIDETQMFDDIRFQVRLGSYRFRFYKKIDCVDGVDRVRRIQKEINGFGRLQDIENERKTNWEAQMQDANYKSVKLEHEDLYLDLRQFPKDTESQQPYITDRRAEYNIHNNRIGLYWNRETDTPEYLDDAKCFLPKLETTGDAGKRKAQIIQPAPLCTLSVRELPAMLFYQWLCDNYKTDMPHDSAELLIKKKYDSLVRLFTAIKNGTFSYKTTEEATVKYLKNKFKLTLTDVPQKLRMYIVGKETHPLQRLIEVTFDGYEDNSGKHKGKLEQRREKIERRLEKYKDDRKKIGDKTNTY

SEQ ID NO: 4475 - protein, 523 aa, Artificial
  Synthetic
  misc_feature (378)..(519): Xaa can be any naturally occurring amino acid
MEKSENKQHSQGFPFPHKHVRRPQPLKVDQDNKYVLGGYFSLGLNNFYKTVLLVFAKAGIPIVGKKGTILYEEEKIGQVLNTLYKCCLNPKPDFEPSEEKWVPFFKLNVNQQMKLHKLLFKHFPILSPIMADEAAYKANKRKKSKVTDTFSMTLGVSLSDCLKVIGTIAQGLVDCRNADVHFDPYNSLEDLAKQYMVQQDIVRYLVKALVASRRLDKEQNNIETEKMEFLTGYATKKSLEGYIQKWGFYPKYEQQIKKDKDGNPVYVEVTDKDGNPKKDKNGNPIYKQQLDRRTGKRMCDRDGNPIYEVQKVMVERSDFFYKIGGETTIEKNGKVYSTLTGFGLCYFCTIFLSKPQARQMLQDIRLFEHSPYPEELNXXXXXXXXXXXXXXXXXXXXXXXXXXXXXXXXXXXXXXXXXXXXXXXXXXXXXXXXXXXXXXXXXXXXXXXXXXXXXXXXXXXXXXXXXXXXXXXXXXXXXXXXXXXXXXXXXXXXXXXXXXXXXXXXXXXXXXXXXXXXXXFMTC

SEQ ID NO: 4476 - protein, 758 aa, Artificial
  Synthetic
MEKSNKKANTQPPKKVQEPKALVVNESNKYVLGGYFSLGLNNFYKTILLVFAKTGIKVMSGNGNILYSEEKIGQVLNTLFKSTLSPRPKFEAFEQAWAVNFKLTANQQVTLQKLLFHHFPVLGPIMADEEAYKVIKTKKSNVTDTYSMTLGVTLSECLKAISIIAQGLVDCRNTDVHYHPYNSLDDLARQYHVQSDIVRYLNKALVASRRIDKKRNSIETVKMEFLTGYANVDALNKYLAKWHFYPKYDQMSKRDADGNILYVQATDKQGNPLFDKGGNPKYKQERDRSGKPLYNQDGSPKYEEQKIMVERNDFFYRIGGESTIEKNAETFSTLTGFGLAYFCTLFLSKPQAKQMLADIKLFERSPYPQELNDIIRDMLSIYRLRSPKGKKLEGGDNQVTLALDILNELRKCPKELYDVLSPEGQAFFEDEVKRPNERTPEVVKRFRSKDRFSFLALRYIDEMGVFDNIRFQVQLGKLRFKFYPKTCINGEEDVRSLQKEINGYGKLHEIELERKSKYGPLLQVSTEKSVKIEHEDMYLDLLQFERDKADSQPYITDSKTFYNIYNNRIGLFWKELEYADSKNNQQVVKPQKGDYLPSLLDVKEGKAPVDMPAPMAMLSVYELPALIFYHYLRSQQKDIVNPTAEDIIIDKYYSLKRFFMDVCIGTLAPFEKKKLLVETLSSQYGLGINEIPKKLKDYLTGKNINIESKKLKLTQDILATRLKKAIRRRDGYKDDRKKIGDKENRYGKDSYVDVRHGS

SEQ ID NO: 4477 - protein, 736 aa, Artificial
  Synthetic
  misc_feature (705)..(728): Xaa can be any naturally occurring amino acid
MSTFKFINKFACGAYFNSARDNFHRAMLDILQQIGVSKHYTETELDDRLAEILNVLKGEPSPISEEDAKKIIANQTMFRQLLFRRFPILGPVISDVLHYTHRQKEKIIMKELIDERVHDLIMQNEAEEDYYLSNEQMVLQAEKEIKEALKTKKKKIIVDDCGDRDATCAECLDAILLLARCLTDCRNYFTHYLPYNPNEKLHNMYGRQCKAATWLNPVFTASRRLDKRRNRLTSAQLEFITNHNYKAKTDENGRKVKDENGKDIYIKDHSYYFSIIGESFIAKRNGDEYVQKDIENDSSAFGNCENNALSDFGLMYLCCCFLTRSQAQQFAEKAKLFANSPENMTERDFQYVLNVSAEAQPNSIQLEELNRLKTKLRVDNLDLSKEKDRAAFTALQNDRSYWQKTSENILLQEMLSIYRVRLPRGKRLDKQDNATTVALDMLNELRRCPKELFDILPTEGQQAFAAPVNNEEGETENSVARKRFTDRFPYLALRAIDEANLLPSIRFQVQLGYYRFAFYNKTCIDGSSQLRRLGKALNGFGRLSAMESRRKTEWAPEDSESETQQPNRFQRKIYTPTRLEDGKTVLDLLRPVEDKVGNEPYITDTAASYNIYNNRIGLYWEEQNGGRKNDDILEFPELRTKDTDKVGTKRPEVPQKAPLCTLSVRDLPALLFLLHINGYNSKAVEDVIVNKYKGLLKFFSDISRXXXXXXXXXXXXXXXXXXXXXXXXTRFSKVIT

SEQ ID NO: 4478 - protein, 561 aa, Artificial
  Synthetic
MATFRFQNKYVCGAYYNMAQNNFRLAILHVLSRIGINRKDEERAIPELLDTIYGFLTGDTEHFNDTQILQKKVLTLRYDQQVKLRELLFRQFPILKPIIASETHKSLQEQKEKLSEMEEYIHEFEKQLKRLYRSKKGKASQEQKEINEQIKYLKTKKSKYLDEYDTLLFSKSHDADLQLCLKILKTMAWCLYDLRDFYTHYDPYNTPESLKVKYLRQVTVANWLSQVFAASRTIDKERNSITTEEMNFLNEAKKQGNDKKWREDPDYYFAIKGQNLLSSSFIDADSPVYNDYLDELYQKYRKKRLAWMKEQRDEALERDDEEEYGFWVVEMEKLDNPERIAKIKSKICPLALSDFGVLYFCATFLPRNYTLLMADHAEVMKNSPYSMTAEELEARRNACKTDEEREKIDPTDTPRNNILREMLCIYRVRLPKGKRLDKKDTKGLLTLDILNELRKCPKEVYEQLSKEGKDFFISRVSSASHNAPDIVKRIRFGDRFPYLALRAIDESDVFKRIRFQVRLGSYRFYFYNKTCIDGSTQLRRWQKEINGFGRLQDMEALRKSL

SEQ ID NO: 4479 - protein, 600 aa, Artificial
  Synthetic
MNNSVNSFALVNESSGRGKYVAGTYFEIAIHNFFKTIDFVLRRVNIRKSDKQWADGFAHLGNWTDERMGKVLEQLALAEMSPTQLSRLSRLLYHHFPFFSPIMADAADHQVYLRVNEIKEIEQEITESDKKIKKNPVNKELVQSINEARIRLKAAHNSLERQLASTTAKEVLAKLAVMAYAMNFYRNQYSHKCHFETLNEKTLQEENEQNLAFWLEVIFKGARSIILDRKEHSQEDTKFLTQDGNLHYNVNKSKKSTRNPNFYFSPGKKNGQKWLITDFGRYYFCSLFLQRSDAIEFGKNVGLYTDSPFKLSNEERNKLQLEEKHRALEEQKIVDKEGDGHKVNPRIISNTESVQNTIIQEMLDVYRLRIPREGRIDAMMNEGTLIMDILNELRRCPKSVYETFSPADKKKFNKVGTNPDGSKSEMKLIRYHDRFPYLALRMIDQTNAIGDIRFHLRLGLFRYRFYNKKTISGELVNPVRTIQKEVNGFGRWQDVEEGRKSLYGKYFQNRIINDDGLEQPVPDSLQSLPYITDWHASYNIHACRIGMAWNLSQMEDALYLPPLTFDDGNNRNRKAPLDMPAPMCYMSIYDIPALLFYNYL

SEQ ID NO: 4480 - protein, 405 aa, Artificial
  Synthetic
MEKNNKEGKSQSFYKNKNWGKELKQRQIRKFVENMLNYSLPITNTKETSGKSILGAYANVAFDNFDKTLQYIYKKVGLKVNGTNQVAVLEKILDAYKKEKEWYRSHPNEKKPGKKSQYLLTSEQNEKMKTLLFHHFSVLAPILGSMKNAEIAKIHNEIKKDEENKSLTEEKSAEIIKKVKDVVTSAHIDSCLKVLVNLSKSLHYCRNLHSHYRAYNNRENQINMFKNFATTAGYLTNALKASAIICQTNAGNKAKQYEFVTGEYHYMKDKKEYSNYYYRIKGKRNTIKASDKIEPDQYDAISDYGLIYLTSLFLSKSDTELMLDQLEVFKNSPFKDEFTMEKAVLTSIMAVYRINIPKGKRMKMEDDNVQLCLDMLNELQKCPQELYDVISQKGKDSFKREQTEP

SEQ ID NO: 4481 - protein, 579 aa, Artificial
  Synthetic
MADYIFDYIDPDKTKRYIYGTYIEMAFHNFFITLQHIYKCVKGVYPAMQEEDFGRDENTIFIFDDLTNAEDQERIKLLLNKHFPFLKVIEDDFNETDKITIIKKCWDFLKSLRNAVEHDTETTKSIFANNKTDILRWLRTDFGCGKDVKKRGIAIAAKKEMKDRFFLPRDPKSVFYFMNNCNPESGNFAFRSLVIFVSLFLEGKYTYQFITNSELKSNFFYKEKNRAGVVNQIEFRKDDFVNLYRALSIYNINLPAVKYDAQFDKTNILGLDIINELQKCPNELYEHISKEDQNKFRVQNSDNADYPDEIFLKRFQDRFATLVLRYIDTQKLFKDIRFQVSLGKYRFKFYDKQCIDSDSADRVRILQKELKTFGRLDDMEQKRRTEWADILRISDIENPSEADTADTQPYITDQNARYNIDKHTPKIPLWWDGDCSLPVTKGQVNLGQKCQSIVPKAFLSVYDLPAMMFLHLLGGNPEALIKEYYNNYIKFFTDIRDGKLTPDTFSEKDFAQTYKIKLCDVPKQLQNFLLRKKPSVPERYQNMPLRLVKKASLNDFQNATLKVIDEKIEKVISEPQKLK

SEQ ID NO: 4482 - protein, 579 aa, Artificial; identical to SEQ ID NO: 4481
  Synthetic

SEQ ID NO: 4483 - protein, 456 aa, Artificial
  Synthetic
LYATYIEMAFHNMFLNIKHIYGVVFGRDIMAEAKANYEALNPEKKWDEDFANEFLVWKPMFEAFNNGNVEEKQKVGEMLSRHFPLLVPFTDFTNHESNYKNLTIVDILRRLSQVLRVLRNLYSHYRIELFENQKKVYLDNEYLIIRCTMNSYMGARRVIKDRFSYDEKDMRCTDQYQFVDERGRRLKEKVEIKGFRYKIGEKGKDSKLHFTPFGLVAFISLFLEKKYSKILTDKLRLIPIQDQHIINEMLAVYRIRLNAQKLNISKDADLLALDIINELQRCPKDLFSLLSPSDQKKFRHESEANDEVLMVRHSDRFPFLVMKYIDDCQLFDNIRFQVSLGKYFYKFYDKNCIDSETRVRALSKNLNGFGRLSKIEAMREGCWEDSIRQYDDIHKNTVDEKPYVTDHHAKYVINGNRIAMRIIREEEKAYLPELNAEGVRNLAPTCWLSIYDLSSL

SEQ ID NO: 4484 - protein, 405 aa, Artificial
  Synthetic
  misc_feature (2)..(41): Xaa can be any naturally occurring amino acid
  misc_feature (235)..(276): Xaa can be any naturally occurring amino acid
  misc_feature (318)..(335): Xaa can be any naturally occurring amino acid
  misc_feature (370)..(393): Xaa can be any naturally occurring amino acid
LXXXXXXXXXXXXXXXXXXXXXXXXXXXXXXXXXXXXXXXXTGLFRTRAQNGNSPFEKNENEVMFNIFCAHRIRLPKGRVESTASAHALGLDILNELQKCPSELFNTLSPEDKKQFQVKRKDDEIQPNPDDDLNLFRRNGDRFPYLAMRYIDAMRETQDDQSKVLKDIVFQVSLGKYRFKFYNRASLDTQRNDRVRVQQKEINGFGPIDKVEQKRKDKYSPIIRPISNDPKHLFXXXXXXXXXXXXXXXXXXXXXXXXXXXXXXXXXXXXXXXXXXEKTGDKGHNETINIEKLDNDKCFLPNVPISTENIAPRAWLSXXXXXXXXXXXXXXXXXXEAVIKDTYKRFVLLLKDIRSGQLKPQANKEQLQNXXXXXXXXXXXXXXXXXXXXXXXXSLRHRTENPRKS

SEQ ID NO: 4485 - protein, 609 aa, Artificial
  Synthetic
MKQNTNNRQSKNKGRKNEGSFQELTPRFFDDVKTKAVWANYLNMARQNTYQTLCHITHVLGLAYNPEDKELEANLLQIPAVTLLLKKGNAEKKQKAMKLLDKHFPFMTPMLEQYVKLQQGKSTRGKETTPEDYHAILNMILPLINLLRNKYTHYKIEDPKLDASGKIADPGILNNCHILARLLNFCFDGARRIVKERFGTGENAPLKDKDFNFLTEEGTRYYKEDKKFIERKDFKYRIFDDTQEISNIGIFMLTCLLLEKKYASEFADQTDFFGKNLEPKRRPTENEILIMREAVSVYRIRLPKDRMQSDRGESALGLDMLNELKKCPRELFDTLSPADQETFRVEANDNEDGKVLLLRSHDRFPTLALQYIDYKQLFAHIHFQVQLGNYRYKFYEKEWIDKSKEQTDKDGADERIRILQKELTGYGRLQEIESQRNERWGHIIRKIDAPRQDALDTQPYVTDHHASYLFNNNRIGLLWNTEKEHPLRNGVFMPSLELPSWLDDYPAKAAELRGTAQKTDEKVAECRAPMCWLSTYELPAVIFLSLLTGSGQAAEELIKNTTAAYRRLFADIASGKLLPGGDLTPYGIELKLLPEKIQDYLTGKEVDMN

SEQ ID NO: 4486 - protein, 508 aa, Artificial
  Synthetic
MKQNTNNRQSKNKGRKNEGSFQELTPRFFDDVKTKAVWANYLNMARQNTYQTLCHITHVLGLAYNPEDKELEANLLQIPAVTLLLKKGNAEKKQKAMKLLDKHFPFMTPMLEQYVKLQQEKSTRGKETTPEDYYAILNMILPLINLLRNKYTHYKIEDPKLDASGKIADPGILDNCHILARLLNFCFDGARRIVKERFGTGENAPLKDEDFDFLTEEGKRYYKEDKKFIERKDFKYRIFHDTQKISNIGIFMLTCLLLEKKYASEFADQTDFFGKNLEPQRRPTENEILIMREAISVYRIRLPKDRMQSDRGESALGLDMLNELKKCPRELFDTLSPADQETFRVEANDNEDGKVLLLRSHDRFPTLTLQYIDYKQLFAHIRFQVQLGNYRYKFYEKEWIDKSKEQRDKDGADERIRILQKELTGYGRLQEIESQRNERWGHIIRKIDAPRQDALDTQPYVTDHHASYLFNNNRIGLLWNTEKEHPLRNGVFMPSLELPSWLDDYPAK

SEQ ID NO: 4487 - protein, 504 aa, Artificial
  Synthetic
MSYKNQEEKYFFSVYLNLARLNAYLTLSHITKLLGKKPSPKEESLVTMPIIEALNGIDQLLLQKSQRLILKHFPFFKAIVEKEKSKATDENKLLYDVCKLFFHFLNEWRNFYTHYNHAPVNFQDDAEKENFFKYLDFIFDASLRKGKERFTWDEKNLKRFRYKSGYDKVKKLPKENPDFQYQFHKNNDLTEKGFIYFVCMFLERKDSADLINALAAVYNFQKTEESIFREIYSIYAIRIPHHRVESTDSMLTLGLDILNELKRFPKSLYEILRKSEKETFIENIKDEGQNETNFKRFNERFPYFALNFIDELKLFKDYRFHVKLGKYYFQFYDKNTVDGEIRKRDLSVNLKTFGRINEVNDVRKKDWKDLIWDDNEGETPTPPKEYAKKYITNSFPRYILESNQIGLKKVPNVSLPELNDKKTRCLAPDCYLSVFELPALIFYGLLLNKNREAEAIMTFLPIELVIVKFISSVKKFFKHFHGGKSNYLFLKNKFPIRCPILQLI

SEQ ID NO: 4488 - protein, 425 aa, Artificial
  Synthetic
VFLSKLPNPGNYPSNSKESRIIRRSMGVCSVALPKERIHSETGDLSVALDMLNELKRCPRELFDTLSPGDQERFRTISSDHNEVLQMRSKDRFAQLVLQYIDHNRLFENLRFHVNMGKLRYLFNPKKYCIDGQTRVRVLEHPLNGFGRLQEMEKERLQKDGTFADSGIKVRCFDEVRRDDADSNNYPYIVDTYTHYVLENDMVEMFFCPEGSGMKMPEVTSREGKWYVDKKVPHCRMRMSVLELPAMLFHLLLCGAKNTEVHIGKVCDNYCHLFSDMAQGNLTEENILSYGIKKEDIPQKVWDCVRGVHTGKDCRVFRKKEIRGRYEDVTRRLERLEADRKAVLGGENKIGKRGFVQIVPGRLAAYLATDICRLQPSLRKGAEYGTDRLTGMNFRLLQSSIATYNCGESDILYGRFRDMYSAVLD

SEQ ID NO: 4489 - protein, 425 aa, Artificial; identical to SEQ ID NO: 4488
  Synthetic

SEQ ID NO: 4490 - protein, 874 aa, Artificial
  Synthetic
LSVFGKKYVNVFLQKLPIYGTYKKQSLEANIIRQTFGIHTAKLPKERIVSEKSDFSIGMDMLNELKRCPKALFSTLSYADQNAFRIVSSDMNDVLQVRHTDRFAQLSLEYIDRRELFSDIRFHLNMGKLRYLKTADKHCIDGISRVRVLEDKINAFGRIHEFEARRKELGFVECYEQGGRAISTNTNIEIRDFEHVKRDDSNPDSYPYIIDTYTHYILENNKIGMHIGDYWPDLIKLDEHKWTVYNENPTCFMSSLELPAMMFHMMLCGSDATESLIKAEVDKYKKLFGAMANGTLTKENISGFGIAEENIPQKVIDCVNGKTSGKGLDKQIKKEIDEMLADTNLRIERLKSDKRSVASTQNKMGKRGFRSIQPGKLADWLAADIVKHQPSLLKGVDYGTDRITGMNYRVMQSTIATFNATTPEHSLEELKKVFSAAQFIQCEKKEHPFLYKALDRNPQNTIDLYEFYLSARQSYYKSMRRNIENGENVKLPYLNTDRNKWMRRGSVYYSTMGEIYLKDMPIELPRQMFDKKIKEALAKLPSMKDVDMQHCNVTFLIAEYLKKELKDDSQPFYQWNRNYRFTDMMICEENRSTRALSTHFIPVALREEIWEKRSELKAAYKEWALPRLSKNRDTERLSPAQKSELLDARIAKCRNEYQKNEKIIRRYKVQDALMFMMVKDMFGKGVFTAESKEFALSAITPDAKRGILSEVIPIDFKFSIDGKTYTIHSNGMKIKNYGDFYKLINDKRMKSILKIITHNVIDKDLLEKEFSSYDDKRPEAIEIVFEFEKAAYSKYPELEELVLSENHFDFGTLLRELQAKKVLSQNDGHYLSQIRNAFSHNSYPRNLRIPSNIPEIAQEMINIFRITTPLKTKK

SEQ ID NO: 4491 - protein, 874 aa, Artificial
  Synthetic
LSVFGKKYVNVFLQKLPIYGTYKKQSMEANIIRQTFGIHTAKLPKERIVSEKSDFSIGMDMLNELKRCPKALFSTLSYADQNAFRIVSSDMNDVLQVRHTDRFAQLSLEYIDRSELFSDIRFHLNMGKLRYLKTADKHCIDGISRVRVLEDKINAFGRIHEFEARRKEQGFVEGYEQGGRAISTNTNIEIRDFEHVKRDDSNPDSYPYIIDTYTHYILENNKIGMHIGDYWPDLIKLDEHKWTVYNENPTCFMSSLELPAMMFHMMLCGSDATESLIKAAVDKYKKLFGAMANGTLTKENISGFGIAEENIPQKVIDCVNGKTSGKGLDKQIKKEIDEMLADTNLRIERLKSDKRSVASTQNKMGKRGFRSIQPGKLADWLAADIVKHQPSLLKGVDYGTDRITGMNYRVMQSTIATFNATTPEHSLEELKKVFSAAQLIQCEKKEHPFLYKALNRNPQNTIELYEFYLSAKQSYYKSMRRNIENGENVKLPYLNTDRNKWMRRGSVYYSTMGEIYLKDMPIELPRQMFDKKIKEALAKLPSMKDVDMQHSNVTFLIAEYLKKELKDDFQPFYQWNRNYRFTDMMICEENRSTRALSTHFIPVALREEIWEKRSELKAAYKEWALPRLSKNRDTERLSPAQKSELLDARIAKCRNEYQKNEKIIRRYKVQDALMFMMVKDMFGKGVFTAESKEFALSAITPDAKRGILSEVIPIDFKFSIDGKTYTIHSNGMKIKNYGDFYKLINDKRMKSILKIITHNVIDKDLLEKEFSSYDDKRPEAIEIVFEFEKAAYSKYPELEELVLSENHFDFGTLLRELQAKKVLSQNDGHYLSQIRNAFSHNSYPRNLRITSNIPEIAQEMINIFRITTPLKTKK

SEQ ID NO: 4492 - protein, 844 aa, Artificial
  Synthetic
MKIPQIIEDNKHLFGTYSTMALANIRNILDHIATLACIENDFNADSDDFWHHPCMEIINPQNLCNDVTKADFVTEKLKSHFPFVVIMAEAKRQKDIAWAKNQAKKAFENRDFQKQQEFNKKQKSLLSITNADIYRVLNNLFRVLTSYRHYTSHYLINYIYFNEGSNLLKYHEQPLSYNINDYFTIALRDTAQKYSYSPEALSFIQSSRYKIENRRKILDTDFFLSIQHRNGDSSPKNLHISGVGVALLICLFLEKKYVNVFLQKLPIYGTYKKQSMEANIIRQTFGIHTAKLPKERIVSEKSDFSIGMDMLNELKRCPKALFSTLSYADQNAFRIVSSDLNDVLQVRHTDRFAQLSLEYIDRRELFSDIRFHLNMGKLRYLKTADKHCIDGISRVRVLEDKINAFGRIHEFEARRKELGFVECYEQGGRAISTNTNIEIRDFEHVKRDDSNPDSYPYIIDTYTHYILENNKIGMHIGDYWPDLIKLDEHKWTVYNENPTCFMSSLELPAMMFHMMLCGSDATESLIKAEVDKYKKLFGAMANGTLTKENISGFGIAEENIPQKVIDCVNGKTSGKGLDKQIKKEIDEMLADTNLRIERLKSDKRSVASTQNKMGKRGFRSIQPGKLADWLAADIVKHQPSLLKGVDYGTDRITGMNYRVMQSTIATFNATTPEHSLEELKKVFSAAQLIQCEKKEHPFLYKALDRNPQNTIDLYEFYLSARQSYYKSMRRNIENGENVKLPYLNTDRNKWMRRGSVYYSTMGEIYLKDMPIELPRQMFDKKIKEALAKLPSMKDVDMQHSNVTFLIAEYLKKELKDDFQPFYQWNRNYRFTDMMICEKTALQEH

SEQ ID NO: 4493 - protein, 844 aa, Artificial; identical to SEQ ID NO: 4492
  Synthetic

SEQ ID NO: 4494 - protein, 511 aa, Artificial
  Synthetic
MRIPSLIENNKKYYAIHSEMALLNAQAVLDHIQKMAGIEACAYNEKEKKPSDEDLWVHPVMIFLDKAKTSEVKAEKVQYVIERLCSYFPFMNIMAQFQREYDNEHNKTNRLEVNANDMYDALNKIFRVLKKYRDYSAHYKFEDNCFIDGCAFLRYSEQPLASMVRKYYDVALRNIKEKYNYKTEELAFIQNKRYKITKGIDGRKKTVGNPNFFLTLTSNNGDTTNKWHLSGVGVALLISLFLDKQYVNLFWTRLPIFSDNKLKEDERRVIIRSMGINSVKLPKDRIHMDKDDMSVAMDMLNELKRCPDELFDILPAEKQAHFRIISSDHNEVLMKRSTDRFTSMLLQYIDYGKKFKQIRFHVNMGKLRYLLNAEKNCIDGNIRTRVIEHPLNGYGRIDEIEELRKNEDMTYADTGIRIKDFESMTRDDSDTANYPYVVDTYTHYLLENNKVEFSFCGNSSLPEVSERNGKWYVSKDVPACRMSILELPAMAFHMLLLGSEKTEARIKSVYD

SEQ ID NO: 4495 - protein, 878 aa, Artificial
  Synthetic
MAQTRWKQSKTPAIKPVMAAYLNMARHNMYRVMLHISRQMQIIENKEEAEIAAFSVWQKLSSGTPTEQMKMIKLLQRHFPVLKPVFDVEKKKNVENAAISASPKEIKRIFTTILTALNRLRNEYSHYSPVPRKTEGEEKMIAYLYRCMDGSAREVRNRFSLTVKDPKGAKETAKVLEVNKAVFDIFQDAFRKEKVKALDKSGKVIKDNKGRTQFEFRDKEDYYYALKDANAALSDMGIVFFTCLFLEKRYAAMFLDAIKPWPQDFNEIERKAVLEVFTVYHIHLPKEKYDSTRPEYALGLDMLNELQKCPKELFDILSAKSRDALSVDIKADRPDVVTDDGVTVKDGKVQMRRVRDRFAPLALQYLDSQKAFNDIRFMVRLGHYRFKFYKKQCVADNAPDTLRVLQKEINGFGRLDEMEAARKKNYTPLFKATCVKTNDKGIEVHELVPDAPDSAPYITDTKAHYLIDNNRVGLRIDNPSFLPSLRGEKGAPIQSAGDISLLSPQAWLSTYELPGLVFYQYLYDTYDGHGKHLPSAEEIIKSYILAYKRLFVDLGEGSFDGWDEYAYAPLTLGDLPQKIKGFILHPSATIDPRFQDKANNRIDDMIKRTEAEIAGFDTKMKKLSDKSNKLGKKKYVDIRPGSIASRLVRDILFFTPVSEEKAKITSANFNSLQSALALSELGTNRIKDILRGLNHPFVMKAFEKYRVEDFHLFDFWKVYLNKRLDYLKGLDREKLEEVPFLHSSRTRWQKRDEKYIKLLAGRYEQFELPRSLFTAPTRVLLDEVALHFESGSDRDLSMGNLINLFFSKVLSDNNQPFYRWERHYDVFDKLAGVKSGISLVHQFFKPEQLAKKMRERKTLKPSLYMCEKAVNSVNQNLK

SEQ ID NO: 4496 - protein, 889 aa, Artificial
  Synthetic
MFLDAIKPWPQEFNDTEKKAVLEVLSVFHIRPPKEKYDSQRPDYALGLDMLNELQMCPSELFEVLSDKSRDMLSVDIHAQGEDVVQDDGVTGRDGKVQMKRIRDRFAPLALQYIDRQEVFDNIRFMVRLGNYRFKFYKKQCLADNGPDTLRILQKEINGFGRIQEVEIERKRKYSALFKKTRTTTDESEAKTKIQELVADTPDSKPYMTDTKVHYLFSNNRVGLRLFNDSSKLDIPEVTKQGLPLTSASEVKLLLPDAWLSIYELPGLIFYQHLYKEYGAKGNYPSAEDILKSYIDAYRRLFSDIEDGTFLGWDDTKYKPLSQDVLPIKIKKYIQNGNGVQSAYFHKKARERIKEMCEQTQAELNGFKSKISKMTSKDNKFKKGHYVDLRPGSISMRLCRDILFFMEIPEEKSVITSANFNSLQSALAMSATTNDKVDEMLSPLKHPFLQEALKKYHNLSNGKYFKVFDFYKIYLEKRANYLELLKKISSDQLIKLPFLHYSRIRWRDRSNSSIKELAGRYEQFELPRSLFTQYAKKILVENCALSLEAETAERKLGMSNLVNTYFQTVMNDTTQKFYRWPRHYRAFDLLGGKTIRNQVVHEFMTPIQLQKMMRDRKSLKPNGLILDKAKNAVKQEKGKKKITDKDLANQILRKVYKEYDENERTIRRYAVQDMLMFLMAKDILLGIDGIEKESLDKFKLKDILPNNKETILELMVPFNVSLIVNGINVTIHQEENIKIKRFGEFYRYNSDTRLKSLIPYLVKNLGTCAGVSIEIDRDKLETELSQYDLNRIEVMKQVQSLEQSIIAGAGGKNNIDKTLRENFNNLITIQGNIPYENQGRVLINVRNAFCHNEYAKDIDIPANTPLPQVADAIVKLFKTEKRRNKRKDN

SEQ ID NO: 4497 - protein, 508 aa, Artificial
  Synthetic
MNTHQEELQSWITRKRLPDTEMKKYWAAYMNLARLNFFKTLMFISNSIGDLKPAKDNNGKGNTEVNMHNMGILTALLGPEDEEKARLLIFKHFPFLRTFCIEKELSLSKQRTILIDMACIIGRYRNMYSHSIFISDDNEKVLESEKRCSEYLQSILTVSTRIIKERYRSNKNDAQRGMIDDKSLKFISENKVKFVYDENGKRITAPNKKYYLSTIDKDNTHLSYFGKLMLTCILLEKKYATDFLTQCHFLDAFNDSEVAPKLSERRLMLEVMTALRIRLAEKKLSNEKSEVQISLDILNELKKCPFELYELLGSEDKRLFTIVADTGETILLRRHEDRFPQLALSWIDSSKAFDHLRFQVNAGKLRYLFRDNKHCIDGQTRMRVLEEPLNGYRRLMEFEEERIQKQSGEIRSLWPGLDILNKDETPRNDASVLPYISDYRVRYLFDGDNIGISIGDFTPSITKTDETKYRVTGKTADCCLSKYELPGLLFYHLLTLRHGDNKRSTKHA

SEQ ID NO: 4498 - protein, 502 aa, Artificial
  Synthetic
MNTHQEELQSWITRKRLPDTEMKKYWAAYMNLARLNFFKTLMFISNSIGDLKPAKDNNGKGNTEVNMHNMGILTALLGPEDEEKARLLIFKHFPFLRTFCIEKELSLSKQRTILIDMACIIGRYRNMYSHSIFISDDNEKVLESEKRCSEYLQSILTVSTRIIKERYRSNKNDAQRGMIDDKSLKFISENKVKFVYDENGKRITAPNKKYYLSTIDKDNTHLSYFGKLMLTCILLEKKYATDFLTQCHFLDAFNDSEVAPKLSERRLMLEVMTALRIRLAEKKLSNEKSEVQISLDILNELKKCPFELYELLGSEDKRLFTIVADTGETILLRRHEDRFPQLALSWIDSSKAFDHLRFQVNAGKLRYLFRDNKHCIDGQTRMRVLEEPLNGYRRLMEFEEERIQKQSGEIRSLWPGLDILNKDETPRNDASVLPYISDYRVRYLFDGDNIGISIGDFTPSITKTDETKYRVTGKTADCCLSKYELPGLLFYHLLTLRHGDNK

SEQ ID NO: 4499 - protein, 497 aa, Artificial
  Synthetic
MNTHQEELQSWITRKRLPDTEMKKYWAAYMNLARLNFFKTLMFISNSIGDLKPAKDNNGKGNTEVNMHNMGILTALLGPEDEEKARLLIFKHFPFLRTFCIEKELSLSKQRTILIDMACIIGRYRNMYSHSIFISDDNEKVLESEKRCSEYLQSILTVSTRIIKERYRSNKNDAQRGMIDDKSLKFISENKVKFVYDENGKRITAPNKKYYLSTIDKDNTHLSYFGKLMLTCILLEKKYATDFLTQCHFLDAFNDSEVAPKLSERRLMLEVMTALRIRLAEKKLSNEKSEVQISLDILNELKKCPFELYELLGSEDKRLFTIVADTGETILLRRHEDRFPQLALSWIDSSKAFDHLRFQVNAGKLRYLFRDNKHCIDGQTRMRVLEEPLNGYRRLMEFEEERIQKQSGEIRSLWPGLDILNKDETPRNDASVLPYISDYRVRYLFDGDNIGISIGDFTPSITKTDETKYRVTGKTADCCLSKYELPGLLFYHLLTLR

SEQ ID NO: 4500 - protein, 502 aa, Artificial
  Synthetic
LILSFIIFNFIVIINQHTLNTYTRKYMKDKSFSTISSAINETITTDNIKYPEQLNLILSKRLRPKNELQPLWAAYFNMARYNMYTTLVHIATATGLSDEDNMENRMDKMRILNEPVEPEIEHRLRKLLCRHFPFAVWMICSPIRKKDSKEDSADEDYRVISVKELRDCLKTVSYTLNYFRNYYSHTRHVETRSEDIIAASRNSEKQTGIFLNKVCTVATRRVKSRFSDKSNKGQAGMIDDQSMKFITEGKVKFRNNNGIKETIYNPDHFLYPLFLNRSSALRDGTNPERLSTVGKIQLICLLLDKKYITEFLDQSGFLSAFNNDAPAPKLSERRLILEVLSDLRIRLPQRKIDATCNDIQVALDMLNELKKCPKELFELLEAKDKATFSILSSTGEHILLRRSSDRFTQLALQWFDVNKAFSRIRFHMNAGIFRYLFNDSKTCIDGKTRLRVLQEPLNCFGRIQEVEDSRESNRDGNDGPWRGFEIKGFDEAARNDVNCLPY

SEQ ID NO: 4501 - protein, 878 aa, Artificial
  Synthetic
MGYLPSYVLAAYYNDARLNIFACLNDVRQKLGKQALDNDDQIVSAIKELGLTKATPEDQARIIQYLHASFGFLGVFMDVTKAKNKQTNPEQATPLPRYYEERLIWLFSLVNDLRNTFVHPTDGECEIPRLVHRRLYFLLSRVYDASFHVLKTRFSYSTEAMRPFMRCDQKGKPKRANQFLFALASDPLNLTDQTKTPQSQVFHAFGQVLFCSLFLEKSQSAELISHFWEFVPQKLQAAWSTEQRKLIRELITIYRLRLPLQRLQSTDSTVAITLDSLAELSRCPLPLFETLSLEDQARFRFEAETTSDAEEAGSSVLFARSRDERFPSLMMRFLDFDPTNRLRFAVDLGQLHYHVRLKSAEHFTDQRARIRSLGQKIVAYGCLQAFEQAEKPADWQILENNYTQMRAEAEGLIQEAASGMSTLRPYLIPAYPHYHYFPERIGFRVDQAKTKQTASYPDLQAVTAEQAVRLEPPSAQDMQPQFWMSHEQLLQLSFYHFLWKQQGADAKQPSLDQLLLRYESGMKRLFKALSAGDGLECKTPAELQAWLDELFNTRQQFAVPVSSLPKVLVQHLLTKKQKPITRAMVEQRIQHLLAETDYRLEQLKTILASEKKRGQKGFKLLKCGPIGDFLAEDLLRFQAVDSSKSDGGKLNSQQYQILQKTLAYYGAHLEEPPKITDLLADFGLLSGAWAHPFLADLGLTQRPDQYQGLLSFYAAYLKARRRFLKRFAAIPKQWSLQALPAWLGLKPKATLANWQAELWDGEQLRQPLPVPDQFLYRPILNLVAAALQLAPQALEQEGSVSYEQGGAKVWIPPSVTWLLKRYLAAQGQEMQAMYTYPRRHHLLDTWLDQRSKQFAEKHKHYLPETERQQYTVAIRQWC

SEQ ID NO: 4502 - protein, 876 aa, Artificial
  Synthetic
MGYLPSYVLAAYYNDARLNIFACLNDVRQKLGKQALDNDDQIVSAIKELGLTKATPEDQARIIQYLHASFGFLGVFMDVTKAKNKQTNPEQATPLPRYYEERLIWLFSLVNDLRNTFVHPTDGECEIPRLVHRRLYFLLSRVYDASFHVLKTRFSYSTEAMRPFMRCDQKGKPKRANQFLFALASDPLNLTDQTKTPQSQVFHAFGQVLFCSLFLEKSQSAELISHFWEFVPQKLQAAWSTEQRKLIRELITIYRLRLPLQRLQSTDSTVAITLDSLAELSRCPLPLFETLSLEDQARFRFEAETTSDAEEAGSSVLFARSRDERFPSLMMRFLDFDPTNRLRFAVDLGQLHYHVRLKSAEHFTDQRARIRSLGQKIVAYGCLQAFEQAEKPADWQILENNYTQMRAEAEGLIQEAASGMSTLRPYLIPAYPHYHYFPERIGFRVDQAKTKQTASYPDLQAVTAEQAVRLEPPSAQDMQPQFWMSHEQLLQLSFYHFLWKQQGADAKQPSLDQLLLRYESGMKRLFKALSAGDGLECKTPAELQAWLDELFNTRQQFAVPVSSLPKVLVQHLLTKKQKPITRAMVEQRIQHLLAETDYRLEQLKTILASEKKRGQKGFKLLKCGPIGDFLAEDLLRFQAVDSSKSDGGKLNSQQYQILQKTLAYYGAHLEEPPKITDLLADFGLLSGAWAHPFLADLGLTQRPDQYQGLLSFYAAYLKARRRFLKRFAAIPKQWSLQALPAWLGLKPKATLANWQAELWDGEQLRQPLPVPDQFLYRPILNLVAAALQLAPQALEQEGSVSYEQGGAKVWIPPSVTWLLKRYLAAQGQEMQAMYTYPRRHHLLDTWLDQRSKQFAEKHKHYLPETERQQYTVAIRQ

SEQ ID NO: 4503 - protein, 793 aa, Artificial
  Synthetic
MRLDQAVLAAFYNDARLNILSCLNDIREKQGLSFIGDDAQIVSAFNDLSHILTQGTPEEASALIDRLRYRFPFIDTRTDASSRHKDFTPVPDNFQHIFQRIFKLINSLRNTLVHPVNSPLLLDMDQHKNLFFMLNDIYDDARRLLKTRFDWSTRDLMPLLRCDHKGKPKAVNKFSFALCSDPKSRSNSPVIGYNRVLYDFGHVLLCSLFLDKSQSADLIHHFWQSGHGKFWQNQKHREMIKELISAYHIRLPLQRLKADSLTTLTIDALSELSRCPQPLLKTLKKEDKDKFREALGTLDNIDISDDAGNGAGNAAANSARKQSQAEQQASYLLARSHEDRFVPLMMRFLEHDPANKLRFAIDLGQFYYHVRLKSGDFFTDNKPRVRRLGQKLICYGHLNNLNKSDFWQQLEDNFALSSQEAKQAETLASAEPLQLKPYLVKTIPHYHFDNNKIGFRLAQSTGKSTDKRANKSANQKTDYPKYPEDKGISVEDIRQPIQLDKIPAEQMQAEFWISPAQMLHIGFYHYLYQHQQNATSGKATQSKSIEVLLNTYKAGTLRLFKALKKQMPELAGEAFSAERHQAVQDYINGFYAAKGNNSDNSDYHISMANLPKVLVNALLGAQQQQVIPKQQIIDRANKLLQSTEQRQRQLERQLNAFKKRGHKDFRPIKCGNIGDFLTDDIIRFQAVDPSQNDGGKLNSQQYQILQKTLAYYGKYIDEPPQIIDLFQDFGLIEGDFKHPFLDKLGLQKNPHKYKGLLDFYKDYEKLILKSILIELAVMTIINNNRYKLHTGCA

SEQ ID NO: 4504 - protein, 500 aa, Artificial
  Synthetic
MRLDQAVLAAFYNDARLNILNCLNDIREKQGLSIIGAGDHADATQIVSAFNDLSYILTHGTPEEASALIDRLRYRFPFIDTCTDANSRHKDFTPVPDNFQHIFERIFKLINALRNTLVHPVNTPLLLDMDQHKDLFFMLNDIYDDARRLLKTRFDWSNDELKPLLRCDHKGKPKAVNKFSFALCSAPNSASKSRSNHTAIGYNEVLYDFGHVLLCSLFLDKSQSADLITYFWQSGHDKFWRNPKHREMIKELISVYHIRLPLQRLKADSLKTLTIDALSELSRCPRPLLKTLKKEDKDKFREALDPLDNIDPENVAGNGAIDSSAKSQNQVEQQASYLLARSHEDRFIPLMMRFLEHDPANKLRFAIDLGHFYYHVRLKSGNFFTDNKPRVRRLGQKLITYGHLNSLNKSDFWQQLEDNFALSNQEAEQAKKIANAKPLQLKPYLIKTIPHYHYDHNKIGIRLAQSTDKSTDKSTDKSTDKNANQKTDYPKYPEDKGINV

SEQ ID NO: 4505 - protein, 739 aa, Artificial
  Synthetic
MESIIGLGLSFNPYKTADKHYFGSFLNLADNNLKAVFAEFKERISDKSKDEDISNLIEKHFIDNMSIVDYEKNISILNGYLPIIDFLDDELENNLNTRVKNFKKSFIILAEALETLRNYYTHFYHDPITFGDNKEPLLELLDEVLLKTILDVKKKYLKTDKTKEILKDSLREEMDLLVIRKTDELREKKKTNPKFKFSTDPTQIRNSIFNDAFQGLLYEDKENNGKTQVSYRAKTKLNPKDIHKQEERDFEIPLSTSGIVFLMSLFLSKKEIEDFKSNIKGFKGKVVKDENHNSLKYMATHRVYSILAFKGLKYRIKTDTFSKVTLMMQMIDELSKVPDCVYQNLSETKQKDFIEDWNEYLKDNEENTENLENSRVVHPLIRKRYEDKFNYFAIRFLDEFANFKTLKFQVFMGYYIHDQRTKTIGTTNITTERTVKEKINVFGKLSKMDNLKKHFFSQLSDEENTDWEFFPNPSYNFLTQADNSPANNIPIYLELKNQQIIKEKDDIKAEVNNSQNRNPNKPSKRDLLNKISNTNEDFYQGDPTAILSLNEIPALLHLFLVQPDNKTGQQIENIIRIKIEKQFNSIKNPSKDDKGVPKSLFADTNVRVNAIKLKKDLGEELDMLNKKQIVFKENQKASSNYDELLKKHQFTPKNKRPALRKYVFYNSEKGEEATWLANDIKRFMPKGFKTKWKGYQHSELQRKLAFYDRHTKQDIKELLSGCEFDHFLLDINACFKEDD

SEQ ID NO: 4506 - protein, 588 aa, Artificial
  Synthetic
MESIIGLGLSFNPYKTADKHYFGSFLNLADNNLKAVFAEFKERISDKSKDEDISNLIEKHFIDNMSIVDYEKNISILNGYLPIIDFLDDELENNLNTRVKNFKKSFIILAEALETLRNYYTHFYHDPITFGDNKEPLLELLDEVLLKTILDVKKKYLKTDKTKEILKDSLREEMDLLVIRKTDELREKKKTNPKFKFSTDPTQIRNSIFNDAFQGLLYEDKENNGKTQVSYRAKTKLNPKDIHKQEERDFEIPLSTSGIVFLMSLFLSKKEIEDFKSNIKGFKGKVVKDENHNSLKYMATHRVYSILAFKGLKYRIKTDTFSKVTLMMQMIDELSKVPDCVYQNLSETKQKDFIEDWNEYLKDNEENTENLENSRVVHPLIRKRYEDKFNYFAIRFLDEFANFKTLKFQVFMGYYIHDQRTKTIGTTNITTERTVKEKINVFGKLSKMDNLKKHFFSQLSDEENTDWEFFPNPSYNFLTQADNSPANNIPIYLELKNQQIIKEKDDIKAEVNNSQNRNPNKPSKRDLLNKISNTNEDFYQGDPTAILSLNEIPALLHLFLVQPDNKTGQQIENIIRIKIEKQFIEVSS

SEQ ID NO: 4507 - protein, 588 aa, Artificial; identical to SEQ ID NO: 4506
  Synthetic

SEQ ID NO: 4508 - protein, 588 aa, Artificial; identical to SEQ ID NO: 4506
  Synthetic

SEQ ID NO: 4509 - protein, 795 aa, Artificial
  Synthetic
LKAVFAEFKERISDKSKDEDISNLIEKHFIDNMSIVDYEKNISILNGYLPIIDFLDDELENNLNTRVKNFKKSFIILAEALETLRNYYTHFYHDPITFGDNKEPLLELLDEVLLKTILDVKKKYLKTDKTKEILKDSLREEMDLLVIRKTDELREKKKTNPKFKFSTDPTQIRNSIFNDAFQGLLYEDKENNGKTQVSYRAKTKLNPKDIHKQEERDFEIPLSTSGIVFLMSLFLSKKEIEDFKSNIKGFKGKVVKDENHNSLKYMATHRVYSILAFKGLKYRIKTDTFSKVTLMMQMIDELSKVPDCVYQNLSETKQKDFIEDWNEYLKDNEENTENLENSRVVHPLIRKRYEDKFNYFAIRFLDEFANFKTLKFQVFMGYYIHDQRTKTIGTTNITTERTVKEKINVFGKLSKMDNLKKHFFSQLSDEENTDWEFFPNPSYNFLTQADNSPANNIPIYLELKNQQIIKEKDDIKAEVNNSQNRNPNKPSKRDLLNKISNTNEDFYQGDPTAILSLNEIPALLHLFLVQPDNKTGQQIENIIRIKIEKQFNSIKNPSKDDKGVPKSLFADTNVRVNAIKLKKDLGEELDMLNKKQIVFKENQKASSNYDELLKKHQFTPKNKRPALRKYVFYNSEKGEEATWLANDIKRFMPKGFKTKWKGYQHSELQRKLAFYDRHTKQDIKELLSGCEFDHFLLDINACFKEDDFEDFFSKYLKNRIETLNIILKQLHDFKNEPTPLKGVFKNCLKFLKQKNYVTENPEIIKKRILAKPAFLPRGIFDERPTMKKGKKSFDR

SEQ ID NO: 4510 - protein, 884 aa, Artificial
  Synthetic
MSLFLSKKEIEDFKSNIKGFKGKVVKDENHNSLKYMATHRVYSILAFKGLKYRIKTDTFSKVTLMMQMIDELSKVPDCVYQNLSETKQKDFIEDWNEYLKDNEENTENLENSRVVHPLIRKRYEDKFNYFAIRFLDEFANFKTLKFQVFMGYYIHDQRTKTIGTTNITTERTVKEKINVFGKLSKMDNLKKHFFSQLSDEENTDWEFFPNPSYNFLTQADNSPANNIPIYLELKNQQIIKEKDDIKAEVNNSQNRNPNKPSKRDLLNKISNTNEDFYQGDPTAILSLNEIPALLHLFLVQPDNKTGQQIENIIRIKIEKQFNSIKNPSKDDKGVPKSLFADTNVRVNAIKLKKDLGEELDMLNKKQIVFKENQKASSNYDELLKKHQFTPKNKRPALRKYVFYNSEKGEEATWLANDIKRFMPKGFKTKWKGYQHSELQRKLAFYDRHTKQDIKELLSGCEFDHFLLDINACFKEDDFEDFFSKYLKNRIETLNIILKQLHDFKNEPTPLKGVFKNCLKFLKQKNYVTENPEIIKKRILAKPAFLPRGIFDERPTMKKGKNPLIDRDEFAKWFVEYLENKDYQKFYNSEEYRIRDADFKKNAVIKKQKLKDFYTLQMVNYLLKEVFGKDEMNLQLSELFQTRQERLKLQGIAKKQMNKETGDSSENTRNQTYIWNKDVPVSFFNGKVTIDKVKLKNIGKYKRYERDERVKTFIGYEVDEKWMMYLPHNWKDRYSVKPINVIDLQIQEYEEIRSHELLKEIQNLEQYIYDHTTDKNTLLQDGNPNFKMYVLNGLLTGIKQVNIADFIVLKQNTNFDKIDFTGIASCSELEKKTIILIAIRNKFAHNQLPNKTIYDLANEFLKKEKRETYANYYLKVLKKMISDLA

SEQ ID NO: 4511 - protein, 322 aa, Artificial
  Synthetic
LIDRDEFAKWFVEYLENKDYQKFYNSEEYRIRDADFKKNAVIKKQKLKDFYTLQMVNYLLKEVFGKDEMNLQLSELFQTRQERLKLQGIAKKQMNKETGDSSENTRNQTYIWNKDVPVSFFNGKVTIDKVKLKNIGKYKRYERDERVKTFIGYEVDEKWMMYLPHNWKDRYSVKPINVIDLQIQEYEEIRSHELLKEIQNLEQYIYDHTTDKNTLLQDGNPNFKMYVLNGLLTGIKQVNIADFIVLKQNTNFDKIDFTGIASCSELEKKTIILIAIRNKFAHNQLPNKTIYDLANEFLKKEKRETYANYYLKVLKKMISDLA

SEQ ID NO: 4512 - protein, 688 aa, Artificial
  Synthetic
MENNTTLGKGISYNPYKTADKHYFGGYFNLAMNNIEFVIAEFLTRIGRKETKIANLKKVFTENMSLVDYERYIHILEEYFPIIKHLDKIHFKINDTVKEVSKEKRITYFIDNFISLLDLTNNLRNFYTHYYHESIAIEENIFDFLDESLLTTVRDTKENYLKSDKTKQILSISLKQELEILCSEKLNYLKENKIKFNRNDKEALINAVYNDAFKNFLYKKGEHFHLTDYKKTKILNPDKLEKDFDLDLSTSGIVYLLSFFLNRKELELFKGNIKGFKASVIRGTSDFEKNSIHFMATHRIYSVHCYRGLKKKIRSSNHDTKQVLLMQMLDELSKVPHVIYNSLDKELKDTFVEDWNEYFKDNEENNENLENSRVIHPVIRKRYEDKFNYFALRFLDNCVDFPTLRFQVHVGDYVHHKMEKSLIDSKIISERIIKEKVTVFARLDEVNKAKADYFNSLQAENDNRWEFFPNPSYDFPKQNTEKIMGNAKQKNAEKIGIYIQLKNSNLIQQTADAKEKLNPHKRSNTKLRKQEIIEKIINLNTDYKSKTPIVHTGEPVAYLSTHDLHSILYDLLIKGETAQAVEMKIQKQIEKQLREIVDKDTSVKILKKYNKEQTFSNINFSKLQNDLVKERDNLISLLDEHDYRIEDYDRTKKQRNYPHKRTYILYAAEKGKIAAWLADDIKRFMPKD

SEQ ID NO: 4513 - protein, 502 aa, Artificial
  Synthetic
MENKTSLGNNIYYNPFKPQDKPYFAGYLNAAMENIDSVFRELGKRLKGKEYTSENFFDAIFKENISLVEYERYVKLLSDYFPMARLLDKKEVPIKERKENFKKNFKGIIKAVRDLRNFYTHKEHGEVEITDEIFGVLDEMLKSTVLTVKKKKIKTDKTKEILKKSIEKQLDILIKKKLNYLRETAKKVEEKRRIQREMGEEIDPPFRYGNKREDLIATIYNDAFDVYIDKKKDSLKESSKAKYNTKSYPQQEEGDLKIPISKNGVVFLLSLFLTKQEIHAFKSKIAGFKATVIDEATVSEATVSHRKNSICFMATHEIFSHLAYKKLKRKVRTAEINYGEAENAEQLSVYAKETLMMQMLDELSKVPDVVYQNLSEDVQKTFIEDWNEYLKENNGDVGTMEEEQVIHPVIRKRYEDKFNYFAIRFLDEFAQFPTLRFQVHLGNYLHDSRPKENLISDRRIKEKITVFGRLSELEHKKALFIKNTETNEDREHYWEIFPNPNL

SEQ ID NO: 4514 - protein, 402 aa, Artificial
  Synthetic
MFLERKETEDLKSRVKGFKAKIIKQGEEQISGLKFMATHWVFSYLCFKGIKQKLSTEFHEETLLIQIIDELSKVPDEVYSAFDSKTKEKFVEDINEYMKEGNADLSLEDSKVIHPVIRKRYENKFNYFAIRFLDEYLSSTSLKFQVHVGNYVHDRRVKNINGTGFQTERVVKDRVKVFGRLSMISNLKADYIKEQLELPNDSNGWEIFPNPSYIFIDNNVPIHILADETTKKGIELFKDKRRKEQPEELQKRKGKLSKYNIVSMISKEAKGKDKLRIDEPLALLSLNEIPALLYQILEKGATPKDIELIIKNKLTERFEKIKNYDPETPAPASQISKRLRNNTTAKGQETLNAEKLSLLIEREIEDTETKLSSIEEKRLKAKKEQRRNLPQTSIFLIVTLAV

SEQ ID NO: 4515 - protein, 542 aa, Artificial
  Synthetic
MFLERKETEDLKSRVKGFKAKIIKQGEEQISGLKFMATHWVFSYLCFKGIKQKLSTEFHEETLLIQIIDELSKVPDEVYSAFDSKTKEKFVEDINEYMKEGNADLSLEDSKVIHPVIRKRYENKFNYFAIRFLDEYLSSTSLKFQVHVGNYVHDRRVKNINGTGFQTERVVKDRVKVFGRLSMISNLKADYIKEQLELPNDSNGWEIFPNPSYIFIDNNVPIHILADETTKKGIELFKDKRRKEQPEELQKRKGKLSKYNIVSMISKEAKGKDKLRIDEPLALLSLNEIPALLYQILEKGATPKDIELIIKNKLTERFEKIKNYDPETPAPASQISKRLRNNTTAKGQETLNAEKLSLLIEREIEDTETKLSSIEEKRLKAKKEQRRNLPQTSIFSNSDLGRIAAWLADDIKRFMPAEQRKNWKGYQHSQLQQSLAYFEKRPQEAFLLLKEGWDTSDGSSYWNNWVMNSFSENNRFEKFYENYLMKRVKYFSELAENIKQHTHNTKFLRKFIKQQMPADLFPKRHYILKDLETEKIKFYLNH

SEQ ID NO: 4516 - protein, 848 aa, Artificial
  Synthetic
  misc_feature (821)..(822): Xaa can be any naturally occurring amino acid
MEKTQTGLGIYYDHTKLQDKYFFGGFFNLAQNNIDNVIKTFILKFFPERKDKDVNAAQFLDICFKDNDADSDFLKKTKFLRMHFPVIGFLASNNDKAGFKRKFSLLLKAISELRNFYTHYYHQPIEFPSELFELLDDIFVETTSEIKKLKKKDDKTQQLLNKNLSEEYDIRYQQQIERLKELNAQGKKIPLNDETAIRNGVFNAAFNHLIYKDGGDLKPSRVYQSSYSEPDPAENGTSLSQSSILFLLSMFLERKETEDLKSRVKGFKAKFIKNGEEKISNLKLTATHWVFSYLCFKGIKQKLSTEFHEETLLIQIIDELSKVPDEVYSAFGAKTKQKFVEDINEYMKEGNADLSLEDSKVIHPVIRKRYENKFNYFAIRFLDEYLSSTSLKFQVHVGNYVHDRRIKNINGTDFQTERVVKDSIKVFGRLSKISNLKADYIKEQLSLPNDSNGWEIFPNPSYVFIDNNVPIHIQTDEATKNGIKLFKDTRRKEQPEELQKRKGKLSKHNIVEIIFKETKGKDKPRVDEPLALLSLNEIPALLYQILEKGATPEDIELIIKNKLAERFEKIKNYDPETPAPASQISKRLRNNTTAKGQETLNAEKLSILIEREIEDTETKLDAIEEKRRKAKKEYRRNSPQKSIFSNSELGRIAAWLADDIKRFMPAELRKNWKGYQHSQLQQSLAYFEKRPQEAFLLLKEGWDTSDGSSYWNIWVINSFSETEDFEKFYENYLRKRAKYFSELAGNIKQHTHNAKFLRKFIKQQMPADLFPKRHYILKDLETEKNKVLSKPLVFSRGLFDSNPTFIKGVKVTENPELFAEXXNGIATGTKRNIPSSISMAGKETIMSF

SEQ ID NO: 4517 - protein, 301 aa, Artificial
  Synthetic
MNTQPVGLGISYSHTSKNDKHFFGGFLNLGINNLEVLIAAFKLKFFSGDQKKIDIKNFVQTCFTANISDHDFESRVEFLQNYLPVVRYLDKRNKEGFKNQVELLFKSLDSLRNFYTHYYHAPLSLPQALFDLLDSTFAKVASDVKANKVKDDKSRHLLKSALSEELNARYKLQLERLKELKASGKKVNLHDHDAIRNGVLNSSFNHLIYKNEAGDTIVTRRYAARYSEIESAENGITISQSGLLFLAGLFLKRKEVEDLKSRVKGFKAKIIKEGEENISGLKYMATHWIFSYLSFKQQNKH

SEQ ID NO: 4518 - protein, 889 aa, Artificial
  Synthetic
LKASFVKFLKCIYMENHTKQTTYKYDEIADKHYFAGFFNLAWNNIEIVFKVFLKKFKLIEDKDKKIEVNPLSFVDNYFKNELALSDYRDRIDFLKQYFPVVQYLELLVSKNNDLEKCIGEEKENKRRECFRAKFKSLIRTINELRNYYTHHYHKPIIVDEATFELLDELFLTVVKEVKRYKMKGEPIRHLFKKELNNELTALIKLKKSELETRRKEGKRVNIDPVSIENAVLNDAFSHLLFGEKGEKFYQSKSTSSNQQSTINISESGLLFLLGMFLHRKESERLRSNIQGFKAKVVRDPEKPIDFKNNSLKYMATHWVFNHLAAKPIKERLNTAFQKETLLLQIADELSKVPDEVYQTFSQEKKNEFLEDINEYFKTGNDIKSFEESRVVHPVIRKRYENKFNYFVLRFLDEFIDFPTLRFQIHLGNYVHDQKEKPISQGTHLITQRIIKEKINLFGKLSEVTNNKTDFFQKLEVAGGETNLEMFPEPSYNFVGNNIPIYLNLAKSKVEGAKELNSHLIRLNNEEKKHQKKRTGNKPDKTAILSEIQISDISYGKPVALLSLNELPALLYELLINGKSGEEIENILVEKLVERYKTINNFSPDNPLPTSQISKKLRKATANERIDIDKLIRAIDREIAVSKEKANLISTKLRDWENAKTNRKYAFTKKELGQEATWLADDIKRFMPNKVKENWKGYQHSHLQLLLAFYESRPNEAYSFIQEFWNLDNDTYLFNRWLKTSFNEKSFHKFYLKYLENRKEYFENIQQQITAFKNQEKLLKKFIEQQHIWSVFYKRLYIVSPIEEQKRQLLLKPLVFTRGIFDPKPTYIEGKEFEGNKDLFADWYQYIHDEEHVLQKFYSWKRDYKELFEKFKASDEFTNNKYQLSEKQQF

SEQ ID NO: 4519 - protein, 537 aa, Artificial
  Synthetic
MENHTKQTTYKYDEIADKHYFAGFFNLAWNNIEIVFKVFLKKFKLIEDKDKKIEVNPLSFVDNYFKNELALSDYRDRIDFLKQYFPVVQYLELLVSKNNDLEKCIGEEKENKRRECFRAKFKSLIRTINELRNYYTHHYHKPIIVDEATFELLDELFLTVVKEVKRYKMKGEPIRHLFKKELNNELTALIKLKKSELETRRKEGKRVNIDPVSIENAVLNDAFSHLLFGEKGEKFYQSKSTSSNQQSTINISESGLLFLLGMFLHRKESERLRSNIQGFKAKVVRDPEKPIDFKNNSLKYMATHWVFNHLAAKPIKERLNTAFQKETLLLQIADELSKVPDEVYQTFSQEKKNEFLEDINEYFKTGNDIKSFEESRVVHPVIRKRYENKFNYFVLRFLDEFIDFPTLRFQIHLGNYVHDQKEKPISQGTHLITQRIIKEKINLFGKLSEVTNNKTDFFQKLEVAGGETNLEMFPEPSYNFVGNNIPIYLNLAKSKVEGAKELNSHLIRLNNEEKKHQKKRTGNKPDKTAILSEIQIS

SEQ ID NO: 4520 - protein, 514 aa, Artificial
  Synthetic
METKQQVGKGISYDHRRPDDKHYFGGFLNLAQNNIDGVIQEFAMRLNREYDPENKNQSLFSYFNINASFTDWERGVNILKEYWPMMEFIDRPATDKQFEAEKPENREAAKRKYFLATLGALLTSIKDLRHYYTHYYHPPVHLNDDLFLFLDHALLYTAFDVKKTKMKDDKTRQLLNQNLSLELEKLKKLKVEELKKKKEKGIKVNLQDEKGILNAIYNDAFAHIITKEKDSDKDKLETRYKSILPQDEAAETGINISISGLIFLLSLFLSRKEIEQLKSNIEGYKGKVLNIETEVDRKHNSLKYMATHWVFSILAFKGLKQRLTNSFEKESLLIQMMDELNKVPDELYQTLSETAKKEFLEDINEYVSEGDDNEKATYVVHPVIRKRYESKFNYFAIRYLDEFAQFPTLKFQIFVGQYLHDNRPKTLASNGMTAQRMIKEKINLFGNLSEVTKHKSDFFEKESAAQGWEFFPNPSYNWAGNNIYRYDRERRQSQRDTGANKQVSQTTQSGTTKR

SEQ ID NO: 4521 - protein, 408 aa, Artificial
  Synthetic
  misc_feature (408)..(408): Xaa can be any naturally occurring amino acid
METQQIGKGISYDHLSADDKHYFGGFLNLAQNNIDSVMQEFCSRLNLTYDKRKHKDIINNYFKIHYNPKEKPSHTDWERGVAILKEYWPVVNAIDLPLTAESIKNLPLDEQEKAKREYFTKTLLALFSAIETLRNYYTHYYHPPITLPESLFVFLDKTLFHTVIDVKKTKMKEDKTRQILKDSLQDQIKKLAELKKNELIEKKKENPRINTNDSEGILNSIYNDAFSHFLYTDKDSKKEVLSKWYTSRLPEEKLADSPIGISTSGLVFLLSMFLSRKEVEHLKSNITGYKGKVLAISEVTKKENGLKFMATHWVFSILAFKGIKHRITSSFEKETFLMQIVDELNKVPDEVYQTLSDGSKKTFLEDMNEYVSESVGEDEVPLYVVHPVIRKRYEDKFSYFAIRFLDEX

SEQ ID NO: 4522 - protein, 808 aa, Artificial
  Synthetic
METKEQIGKNIYYAHDIYEDKHYFGAFLNLAQNNIDQVFSEFCTRLNEPKDENIHNIIIKYFSNNVSYSDWDKRIEILKEYLPVVEYLNLPISDKLFEKYPEKEKEDKRKEYFIKNFQSLIKSVNDLRNFYTHYYHPPVVIDESMFDFLDSLLLKTCLTVRKKKMKNDKTRQILKKGIIAEWKVLEELKVNELKKNKEKNKWISIDDKEGIRNAILNDSFHHLIFKDKDSFCLKDYHKAKYSKNIFAENKIPISKSGLVFLLSLFLTKKETEQLKANIEGFKAKVIGKEDEVTKKNNSLKYMATHWVFSYLTYKGLKRRVSTSFDKVTLLTQMLDELSKVPDEVYQTFSISDKDEFLEDINEFVQESTGDDKSLIESTVVHPVIRKRYENKFNYFAIRFLDEYANFPTLKFQIFAGLFQHDHKTKNIGESNYISDRKIKEKINVFGKLSKVAKYKSDYFTENKNENEWHLFPNPSYNFVGNNIHIYLDMYRKGAEVKSVQEEINALRKIINPKKDRVNRKGKKEIIDMIYNKSSKIEYNEPTALFSLNELPAILYEFLINKKTGEDLENILVQKIVERYKTIKNYNTTQQLSNSFITKKLRKSSLKQDQINIEKLLRSINKEIEITGEKLNLIKTNKEETTKTNKQDKPERKYIFYTNELGQEATWLANDLVRFMPKFAKTNWKGYQHSELQRLLAFYDRHKNEAKTLLTTNWDLNSFPIWGSDINEAFDKDKFDEFYEEYLKKRKKTLEGFANTIELNKNDPKLLKKVLKEVFIAFDKRLFVISSIDKQKNELLAKPIVFPRGIFDN

SEQ ID NO: 4523 - protein, 363 aa, Artificial
  Synthetic
MNETDYLAKRLEYNYASIEDKHYFGGYFNLAQNNINDLSKAFKEKFGMKPKSCILDFFTQDKAIAEYQLGVEFLQKNLPVIRYLYLPTSHKRFENVPKNQLISEQRNYFKNSLKVLKNLIRDYRNFYTHHFHKPIPVFPETYKLLDDLFLAVANDVKKHRMKTDASKQLLKKGLIEELAQLEKLKLEDLKKLKREGKKVNLNDKEAITNAILNDSFSHLLPKENTISKYYSAVPTEDIDTENGVTISESGIIFLLGLFLTKKQSEDLRSRVKGFKAKLIVNPENPINKKNNSLKYMATHWVFGYLGFKGLKNRFTTTFTKDTLLAQIVDELSKVPDELYQVLPEELKNEFLEDMNEYLKEENS

SEQ ID NO: 4524 - protein, 347 aa, Artificial
  Synthetic
MESTVNAKRISYDYKNQEDKHYFGGFLNLAQNNIEETIEALGIRNQVFKKEDSNKKNKSRPAEIIAKVFQIDLKKRKTKDDGSGITYAQWESNVNFLKQYLPIVQFLNLPVSHKKFDHLPKAKKEKAKRDYFIGNFLLLIDIIGSLRHYYTHYHHKQISIEPELFTLLDEIFLHTCLVVKKRKMKSEKTRELLKRELEREVDILKKLKLAALKKQKEDGVRVSLDDEHVERAVLNESFNYLLAKRDNVYKVQPTHCSRGEDGTPFSRSGLVFLVSMFLTKKQGEDFRSRIKGFKEKIVKREENAISPTNNSLRFMATHWVFSYWSYKGFKAKLNTTFSKEVLELKGI

SEQ ID NO: 4525 - protein, 328 aa, Artificial
  Synthetic
MTQTATTNSGTLADDKQTYYYHFLKSDKFFFGSFFNLADNNLKATFNDFEKRLGIKSANGLVQKVEQYFPDNLLLSEFERRTELLTEYLPIVHKLRKINKESAEPDRSYFRDNLKMLIKAVDHLRNFYTHYYHKSIIFDERLFEFLNGALLNVCFDVKKKRMKSDTNKAFLKKHFEENFINKSKDKIKEAFDEAFSHLKVSNDGKKFSLTKFYQAKLSHKQKFSVKNDLIFDITNSDFVFLSNSGLLFLLSFFLRREEQEQLLSKMEGFKNQNELNFIATRWVFTHKCFKGLKKTIKSSYDKETLLMQMVDELSKCPDVLYKNLSDKQ

SEQ ID NO: 4526 - protein, 832 aa, Artificial
  Synthetic
LSKVPDDVYQAFSEETRNLFVEDINQYLKEGNDDYTLEEAQVIHPVIRKRYENKFNYFAIRYLDEFAGFTSLKFQVHLGNYIHDKRTKHISGTELQTERRIKERVKVFGKLSDAQRLKNDFFADKSRRDQELGWEILPNPSYVFIENNIPIYFKVDNEVAEAVKSAKASRKSLSPDERKVRSGDKAQKHIILNSISERGLLRKDEPTALLSLNEIPALLYEILVKGTSPVEIEEILKSKAVERVQVIKNYTPEQPLPGSQISKRLRSNTAVTGKQYNVDKLQQLLKKEIFLADEKLALIYKNRVELHKKIGGKVLRNYVFGFSELGREATWIAEDIKRFMPLPARREWKGYQHSQLQQSLSYYESRPNEAFNILKDNWNFDDGAMLWNSWIKDSFNEKFFDRFYERYLHGKRKYLENFLENIQNFSPGSNKILEKFLCQQMPKNFFDKRLYVLEPLEQEKDKILSYPLVFPRGLFDPAPTFIKGVQVMEEPERFAAWYRYGYSPDHPFQRFYEMERDYTDLINDDTETRPDTDKNKSDFSSEQQYALIKKKQDLKIKNIKIQDLFLKLIAETLFSDIFDYDSEIRLSDLYLTQAERIEKEQNAAQQSIRPAGDDSDNIIKDNFIWSKTIPYIKDQIYEPAVKFKDIGKFKYFLNDGRINRLLSYDTLKIWSKAEIETEIYIGSASYESIRREAIFKELQKLEEKILARYKGGHPEELEYKNNPSFKKYIVNGILRKKPDTVSETDCFWLDNFDESTFENPEVFEILSDKLPLVQEAFLLVYLRNKFAHNQLPIKEAYFYINENYPDLRGSTVSETLLNFLVHAVNNITNRCI

SEQ ID NO: 4527 - protein, 842 aa, Artificial
  Synthetic
MEQEYDFFNKTDKHFFAGLFNTALNNFDLSLAELNKRMNYKEIKGNEKEIIIIEYAFNKDERTQLDFENNFKYLSESLIFLNRIPSFIAHKNKNGSTIILKDFLKDFLCGLYQTLLNYRNYYTHFEHDDVAIGHPLIAEFLEYLLFNSVSRVKDDRVKTKAVKDKLLSKYKDDYTTIIEYKNKWICDKNEELINEGRKTFKKINNNSEAGYNYVLNSIFRRFIDDSTNTPKLQLDEKCSTDDGLTKVGFIQFLALLLNKRQVSLLFDNITYTRYTDTQLQRVITRWIFTYESYRDINYLFKSEYDEHALLLQMVSELTKCPKNLYPYLSEKNKDNFLEDINIYFKENAKLFEDDALVSHEVVRKRFEDKFPYFAIRFLDEFAKFPSLRFQVNMGKFNHDSREKEFISTGKKTERLILENLTVFENLSEATKKKNLYFEKSDSKEKSDKESNYKDVSDSIEVSDWVEYPRPKYQFNKNTIGIWLDCDGLGNYDESPKRENKKPTKHDILDKIELKDSFKKPIAYLSLHELPALLYCLLIEKKDGRFIENRIKGKIRKQRSFLESLKGDYQYSEEELKQFPKKIRLILTKKSNINSEKIKRQISNEIKVNPLKEIREKYTPKSETELSLSEKGKIATWLSKDIKRFVAKDVKGPSEEDKNKSWKGYQFSEFQALLSYYDIDKSKLSDFVFKDLNFNINKDFPFQGIVFNKSSLFDFYTHYLKSRREYLNHLLENFSNTTNEELLLPFKASKFKIKELEEYRKNKLEEPVMLVRGVFDDKPTASREKDKTEFAKWFTVSMNSSSAQKFYDFDKIYPLTLSVINGRKSEENLTINTKAGLTKQYIP

SEQ ID NO: 4528 - protein, 491 aa, Artificial
  Synthetic
MEQEYDFFNKTDKHFFAGLFNTALNNFDLSLAELNKRMNYKEIKGNEKEIIIIEYAFNKDERTQLDFENNFKYLSESLIFLNRIPSFIAHKNKNGSTIILKDFLKDFLCGLYQTLLNYRNYYTHFEHDDVAIGHPLIAEFLEYLLFNSVSRVKDDRVKTKAVKDKLLSKYKDDYTTIIEYKNKWICDKNEELINEGRKTFKKINNNSEAGYNYVLNSIFRRFIDDSTNTPKLQLDEKCSTDDGLTKVGFIQFLALLLNKRQVSLLFDNITYTRYTDTQLQRVITRWIFTYESYRDINYLFKSEYDEHALLLQMVSELTKCPKNLYPYLSEKNKDNFLEDINIYFKENAKLFEDDALVSHEVVRKRFEDKFPYFAIRFLDEFAKFPSLRFQVNMGKFNHDSREKEFISTGKKTERLILENLTVFENLSEATKKKNLYFEKSDSKEKSDKESNYKDVSDSIEVSDWVEYPRPKYQFNKNTIGIWLDCDGLGNY

SEQ ID NO: 4529 - protein, 865 aa, Artificial
  Synthetic
LFETLSAEDQDKFRIEVKDSEEETGSTVLLLRSFDRFPVLALQYLDTMHKFDRIRFQVDLGNYRYKFYEKKNWIDKADEESADRVRILQKTLTGYGRLNEIEQQRKERWGSLIRAIDQPRADSFDSKPYITDHHASYHLEDNHIGLRWNTEGQDILDKSGIFMPSTELPPEADGCMDGTVAPLQAPKCRLSVYDLPAVCFLTYLTGSGKAAEDLIINTTEKYFDFFRALSTGEIIPYNKEAKESFIPLEIKEKIKRCRTEARKTGGQQDQVLSYVIEPYGIDLASLPRKIQDYLLGDSFLSDGNARFKKLATEKLKKMLEITERKLDTIKETKKVYASKDNKLGKKSHVDIRQGTLARFLAKDMVFFKRPDPQGRIMLTSQNFDILQKELALFSKPLRGLKQLFITAELIGCKYPEENHPFLQKVLDRNPSGFLDFYIAYLSERRKYLEGILMSKQNDYSQYHFLHPERAKWSNRNRDYYNKLAARYTTIELPGNLFLEAIVKELKGIDQNKLQYPQTLSDALAQERKNVAFLINAYMKAVGEGCQPFYNYKRGYRYFSMTCKPDWDFSKPIEKLKDKYLTVGQMEQFMSDNDKEARESFYLRSLDARNAAKVTKAKNQGRYDSRKRGYLKDELEASKVEAPEKLSHSLKFYKENEKEIRRIKVQDAVLYLLAKDVLTHTMDNADLSAYKLKYIGKDNDTDILSMQLPFAVRLQIRTSDDSTKEVTIRQEDLKLKNYGDFFSFIYDSRIRPLLAQVDAELIDRSQLEKELDNYDRKRVPLFEYVHNLESRVCETLNEEQFHKDAEGNPVKMDFKYLLRYLNISEKTEDLLKAIRNAFCHGTYPEGSRVTLVFEKEDCLLYTSDAA

SEQ ID NO: 4530 - protein, 499 aa, Artificial
  Synthetic
MPAEQRKNWKGYQHSQLQQSLAYFEKRPQEAFLLLKEGWDTSDGSSYWNNWVMNSFSENNRFEKFYENYLMKRVKYFSELAENIKQHTHNTKFLRKFIKQQMPADLFPKRHYILKDLETEKNKVLSKPLVFSRGLFDSNPTFIKGVKVTENPELFAEWYSYGYKTEHTFQHFYGWERDYNELLDNELQKGNSFAKNSIHYSRESQLDLIKLKQDLKIKKIKIQDLFLKRIAEKLFENVFNYTTTLSLDEFYMTQEERAEKERIALAQSQREEGDKSSNIIKDNFIWSKTIAFESQQIYELAIKLKDLGKFNRFLLDHKVLTLLSYDQNKIWNKEQLERELSIGENSYEVIRREKLFKEIQNLELQTLSNWSWDGINHPREFEMEDQKNARHPNFKMYLVNGILRKNTNFYKEGEDFWLESLKENDFKTLPSEILETKSEMVQLLFLVIMIRNQFAHNQLPKVQLYNFIRKNYPEIQNNTAAELYLNLIKLAVQKLKENS

SEQ ID NO: 4531 - protein, 365 aa, Artificial
  Synthetic
LFDSNPTFIKGVKVTENPELFAEWYSYGYKTEHTFQHFYGWERDYNELLDNELQKGNSFAKNSIHYSRESQLDLIKLKQDLKIKKIKIQDLFLKRIAEKLFENVFNYTTTLSLDEFYMTQEERAEKERIALAQSQREEGDKSSNIIKDNFIWSKTIAFESQQIYELAIKLKDLGKFNRFLLDHKVLTLLSYDQNKIWNKEQLERELSIGENSYEVIRREKLFKEIQNLELQTLSNWSWDGINHPREFEMEDQKNARHPNFKMYLVNGILRKNTNFYKEGEDFWLESLKENDFKTLPSEILETKSEMVQLLFLVIMIRNQFAHNQLPKVQLYNFIRKNYPEIQNNTAAELYLNLIKLAVQKLKENS

SEQ ID NO: 4532 - protein, 344 aa, Artificial
  Synthetic
  misc_feature (2)..(2): Xaa can be any naturally occurring amino acid
MXEWYSYGYKTEHTFQHFYGWERDYNELLDNELQKDNSFAKNSIHYSRESQLDLIKLKQDLKIKKIKIQDLFLKRIAEKLFENVFHYPTTLSLDEFYMTQEERAEKERIALAQSLREEGDNSPNIIKDNFIWSKTIAFESQQISEPAIKLKDIGKFNRFLLDSKVKTLLSYDQNKKDKEQLERELSIGENSYEVIRREKLFKEIQNLELQTLSNWPWDGINHPREFEMEDQKNIWHPNFKMYVVNGILRKNSNFYKEDEDFWLESLKENDFKTLPSEILETKSEMVQLLFLVIMIRNQFAHNQLPEVQFYNFIRKNYPEIQNNTAAELYLNLIKLAVQKLKENS

SEQ ID NO: 4533 - protein, 758 aa, Artificial
  Synthetic
MARSTKFTKSMFSYESSFKRFSHRKGMQSGFLKSTPSKSNPYSYNYKPINGYKDYRLDSLINNQTDLWSKYSRKQDKFMLYASRYLAESNYFGEEAMFKVYQFASNEEQEKYIVEAKQNLPKREYDKLKYHKGRLVVYKSYHNHLQEYPRWDYPFVVENNAIQIYVKILGEPWIVSIQRRLIIYFLEDALFSKKKESNGIALLQNYLPHHQRDVRNGLFVFKTGQTNNLSTKEMSNLRKLFPRKLIQSYLYEDNTGDMDSPSQVLSDTSINDTEKKGTKKILNLRVGKHLKLRYIRKVWNLIYFKDIYKDKAQRMGHHKKFHITKDEFVFYTRWMYSFESIPSYKDHLIQFFIKKHFFNNEEFKELFLNSSSIDELYLQTKRNFIKWSAHNVNSEKKEKTYSLEDYKLFFESKILYINVSHFISFLNQEKVIQKNDNGIIQYKALKNLSYLIKPFYYKDKLEIEHYKTYGKVFNKLRSIKLEDCLLYEIAYRYLLNVTPSFPKYKQLIIQSFPKEKVDLLVNAIYSFEIHNKKGAFIYSIQVPFLKLNELVCLIYRNSTKIAATNKEFLFLQIYKYLVNYCKNKPVDYELYTVCYKFNQLKVLGYDDLLHFLKHIVKRGLQLTQILTQLEKFLIIKNNIQIDIQKQGTLNSLSIYECSKMNNPQKLEDLRIKAINFDIPDTDYPSILEHIEKQFIIKETPFKPVSWSHLEKHTQDMCDIMMNMLHLNLYKRNSDTESREEAKIQFRDRYFNTVVKQSD

SEQ ID NO: 4534 - protein, 878 aa, Artificial
  Synthetic
MPVSNHQQKGHKTYFTNHSNKAEISVFVNTALNNIYRIIKTIEENVFQAVPDYNREEMYKSQVFTVLFSKRNEVKKERIIQYLTRWLPWFSKGLTITDPRRFALRLVVYIQKLVELRNFYSHSLKNVVNLNLYTNAHVPSSAKDVFIDLVCDIRREERDKKDSFIPFDHVKAEYKDYMFDAILHEDLNREKYACYEQDYCNFRADFKQLYKSTKNEVRERFKKERNLNDEKLKKQGVIFSAGKGPDSKQNANKLTEFGLVFFISIFLERRMVADFLDTVYPNDIGFMDKLVKRSLTIYNAKPPKEQLISMDRKFALGLDILNMLNRVPNYIYDHLTDGAKEKAIDEEGIVMKRYNDRFPYLILQCLEYSGKLEGLQLMCLIGKNFNAKPYHKQFEGKSEIREIHKTLYAFDHLSDIRENDKYYQELRSKDHEVNYNIGEEELAIINEIKNLHTYPLYQYYPKYGIHEYSTWKYIGFVFQDESIGPPVIAQSEESETRIVITPEFRVNNTQHQFTLDQSLLKYLAYLLKGESTVSENENGLASFKDLCLQFKSDFVRLLNDIRDQNITPDSDYDYSQILNSYNIPSACIPKRIKKYLNAKQSSNNSRKHIKTKLEYMLCETKCLLAENPVRSKPLPKEEYINRKKESQYFLMRGDKATWITNDILFFMKPKLVSIEKEGQKTNHFHKLNNQQAKILQSKLALMDHNFHDIRSFMKETGVFETGSEHIFLTEQNIKAKYQKVDNFFVRYLGLRKAYLESTIKKLKTKNQIINQTELERAYYYIKSKTIRRSVANEDKHIAITTYIENLKKQPIIIHPELMKKWANDVYQKEESENNQVHNLSYIVNDLDESFARYKQQWFYQKDSLIDGFGKRPQFQKRP

SEQ ID NO: 4535 - protein, 443 aa, Artificial
  Synthetic
MHQKKQQKQKKKQSRRAKELTLKERSAYAIAANLAQSRVEHILEGDESPNSLNKLYDKITGHLREEIQRYYGKDENNKDERALIMESALDLLNRLRNYYSHILYDDPGDVSFMLKGSEEGQNKKQDEENGDRPLISWLTWLYREAWKKQDLEEKFPLWDSVDDNISRLSHYGAAFFINLFLTRSKAEHFLQRLGKFEGKNKKRSRHVFSAYCQRDRISDTFIQDPPEHMLYREIMGALKIPPFHSKAGQENKKKVEDSKYEQPPEYSDTDVLPFRSQSRARDYVLQLIDMLGLLPNIRFRGIVETKEIDKEGGIIWQPAHEIIKSKVKKKSQDEKGDKKSYDRDKRVIRKTYNRNNEALKEALKEVGQRFVYDHSDGNILFEIEQKGKDPVRGVVRWRDFLTWVYLIAFEKKPSNKIDEEIYGYLSGYKETLSEGKTPKEVYK

SEQ ID NO: 4536 - protein, 561 aa, Artificial
  Synthetic
VRECNEDEKFTAWKNGFISEMLQSTKNRIKRFEKDSEAVISSDNKPGKKNHVSLKPGAYASFIANDIVFFQECGATEKMTGLNFKVMQSRLATFTKDGSTSFNILLQTLKNAHLVSTTYGKGDHPFLYRVIKQQPSDIVQFYKIYLNEKVLYLQSDIPDNAIFLHGERKRWENRNEQYYRDLAERYLQRPIQLPRQLFESHIRQLLLSDCIKGERGNDLKEAINSAASQGRCNTTYMIMEYFADYLCDGTQFFYGLFDGDLSHEYNYRFYSLISNNIENSKKLVLTLKKGNNSKESPFISALERGIHWSKMNPLMKKGLKNDSSEGDFVHAAKRAYKEMTETERMFRRYAVQDEVLFLAAKITIRRVLGLSEQYNCLLGDIKPQGGSLLEQTIPSITTKHTINTGNKKQKPKQVQILQKNVKLKDFGKVFKLLNDRRIFDLLFNKGNEAVSMTDLCEELERYDRHRVDVFDSVLKYESKITKGYTNKELMNESGQIDFKAIQAFDKQNTTADKEDLRLIRNAFSHNQYPQYNNEPILFDKDIPEIADEISIIAKDIEENTK

SEQ ID NO: 4537 - protein, 827 aa, Artificial
  Synthetic
LKKCPFELYELLGSEDKRLFTIVADTGETILLRRHEDRFPQLALSWIDSSKAFDHLRFQVNAGKLRYLFRDNKHCIDGQTRMRVLEEPLNGYRRLMEFEEERIQKQSGEIRSLWPGLDILNKDETPRNDASVLPYISDYRVRYLFDGDNIGISIGDFTPSITKTDETKYRVTGKTADCCLSKYELPGLLFYHLLTLRHGDNKRSTKNAEDIIIDAIKRYKRLFSDVKEGILKPIKEENANQLGNRIWNSYGINIKDIPDKIIDYLLVRECNEDEKFTAWKNGFISEMLQSTKNRIKRFEKDSEAVISSDNKPGKKNHVSLKPGAYASFIANDIVFFQECGATEKMTGLNFKVMQSRLATFTKDGSTSFNILLQTLKNAHLVSTTYGKGDHPFLYRVIKQQPSDIVQFYKIYLNEKVLYLQSDIPDNAIFLHGERKRWENRNEQYYRDLAERYLQRPIQLPRQLFESHIRQLLLSDCIKGERGNDLKEAINSAASQGRCNTTYMIMEYFADYLCDGTQFFYGLFDGDLSHEYNYQFYSLISNNIENSKKLVLTLKKGNNSKESPFISALERGIHWSKMNPLMKKGLKNDSSEGDFVHAAKRAYKEMTETERMFRRYAVQDEVLFLAAKITIRRVLGLSEQYNCLLGDIKPQGGSLLEQTIPSITTKHTINTGNKKQKPKQVQILQKNVKLKDFGKVFKLLNDRRIFDLLFNKGNEAVSMTDLCEELERYDRHRVDVFDSVLKYESKITKGYTNKELMNESGQIDFKAIQAFDKQNTTADKEDLRLIRNAFSHNQYPQYNNEPILFDKDIPEIADEISIIAKDIEENTK

SEQ ID NO: 4538 - protein, 505 aa, Artificial
  Synthetic
LPAVINYKPELSTLAIILEKATQSEDRYNRLLKKAEDEGNYADFIKRNKGKQFKLQFIRKAWHLMYFKNSYTQQLESTGKHHKNFHITRDEFNDFCRYMFAFDEVPAYKNYLREMLDKKQFFKNDQFKILFENGDSLDSLYSKTKQSYEKWLQGQSTKEQETEKYTLSNYENIFQDKMLYVNVSHFTGFLKTTGIWTENEHGVIQFKALENRRYLIQEYYYADKLEKPEYKNCRKLFNELKTVKLEDALLYEIAMRYLQIDSQIVQNVRTSIIEILNQNIRFLIKNKENKALYELIVPFKKIDSYVGLLAHKKEQEMDPKSKGSSFLTNIAGYLELVKDHKDLKKVYGSFTANKNMPVLTFDDLHKIDAHLITHSIRFTNLALAMEHYFVVKKNISIVKDNRITYDEIKDLKPYFDNKTRNKAFHFGVPSKSYETFIREVEQKFLFNEVKTTKPTSFQSLSRQHKIMCGMFLELIHNDLYNKGEKDSKKKRNDAEASYFNSVISK

SEQ ID NO: 4539 - protein, 505 aa, Artificial; identical to SEQ ID NO: 4538
  Synthetic

SEQ ID NO: 4540 - protein, 505 aa, Artificial; identical to SEQ ID NO: 4538
  Synthetic

SEQ ID NO: 4541 - protein, 505 aa, Artificial; identical to SEQ ID NO: 4538
  Synthetic

SEQ ID NO: 4542 - protein, 505 aa, Artificial; identical to SEQ ID NO: 4538
  Synthetic

SEQ ID NO: 4543 - protein, 505 aa, Artificial; identical to SEQ ID NO: 4538
  Synthetic

SEQ ID NO: 4544 - protein, 505 aa, Artificial; identical to SEQ ID NO: 4538
  Synthetic

SEQ ID NO: 4545 - protein, 505 aa, Artificial; identical to SEQ ID NO: 4538
  Synthetic

SEQ ID NO: 4546 - protein, 505 aa, Artificial; identical to SEQ ID NO: 4538
  Synthetic

SEQ ID NO: 4547 - protein, 650 aa, Artificial
  Synthetic
MDTNEAYTAYNSRNSFKRIFDFKGEIAPIAEKANLNYDIKAKNAINREQRLHYFTVGHTFKNIDTEHVFEILLDEETREKRPYTFLSLQQFNTDFCTAIKEVISNIRHINSHYIHDFERIKTDNIPPEIITFLKESFELAVIQIYLKENNITYLQFIEQKNTDTTIVKYLHDKFYSLDNTKTDTKNDTSPSLAEYIAFRNTFKTLSKEKALDSLLFVTVDAGFPWKLEETHTACTITQGTYLSFNACLFLLSLFLYKSEANQLISKIKGFKKNKTDEEKSKREIFSFFSKKFSSQDIDSEENHLVKFRDLIQYINHYPVEWNKDLKLESGHPLMTDKLIAKITDMEIDRAYPDYAGNNKFQAYAKELLWNVPSKTTFTTEEIEAFAFEINKSPELKDAKKKLHDLQAKMGLYGFKKVKNEQEIAKTIKRIKWIQNDLNPVTENVKKRLAQFSLYGSYGRNQDRFMDFATRYLAEQKYFGVDAEFKMYKYFTSEEQNTELATYELPKDKKAYDKLRFHKGKLVHFSTFENHLKKYESWDTPFVIENNAIQVKLSIRQDNKKEPIEKILSIQRALMLYFLEDALFQTGNNNIIENKGRILVEQYYTVYNNDFVQSKTVLEENDSISPEQKNALKKIVPKRLLHRYFARSNKL

SEQ ID NO: 4548 - protein, 650 aa, Artificial; identical to SEQ ID NO: 4547
  Synthetic

SEQ ID NO: 4549 - protein, 650 aa, Artificial; identical to SEQ ID NO: 4547
  Synthetic

SEQ ID NO: 4550 - protein, 650 aa, Artificial; identical to SEQ ID NO: 4547
  Synthetic

SEQ ID NO: 4551 - protein, 650 aa, Artificial; identical to SEQ ID NO: 4547
  Synthetic

SEQ ID NO: 4552 - protein, 650 aa, Artificial; identical to SEQ ID NO: 4547
  Synthetic

SEQ ID NO: 4553 - protein, 650 aa, Artificial; identical to SEQ ID NO: 4547
  Synthetic

SEQ ID NO: 4554 - protein, 650 aa, Artificial; identical to SEQ ID NO: 4547
  Synthetic

SEQ ID NO: 4555 - protein, 650 aa, Artificial; identical to SEQ ID NO: 4547
  Synthetic

SEQ ID NO: 4556 - protein, 650 aa, Artificial; identical to SEQ ID NO: 4547
  Synthetic

SEQ ID NO: 4557 - protein, 709 aa, Artificial
  Synthetic
MKSSVENIYYNGVNSFKKIFDSKGAIAAIAEKSCRNFDIKAQNVVNREQRMHYFSVGHTFKQLDTENLFEYVLDEQLRIKTPTRFVSLQHFDKEFIENIKRLISDIRNINSHYIHRFDPLKIDAIPSTIVTFLKESFELAVIQIYLKEKGINYLQFSENPHADQKLVAFLHDKFLPIDEKKIAMLQNETPQLKEYKEYRKSFKALSKEAAIDQLLFAETETDYDWKLFESHPVFTISAGKYVSFYACLFLLSMFLYKSEASQLISKIKGFKKNTTEEEKSKREIVTFFSKKFNSMDIDSEEKQLVKFRDLVSYLNHYPVAWNKDLELESSNAAMTDKLKSKIIELEINRSFPSYEGNNRFAIFAKYQIWGKQHPNKFIQTEYNNAAFSNEEITAYTYETNSCPELKDAHKKLAELKAAKGLFGNRKEKNERNIEKTQKSIRKLQHEPNPIKDKLIQRIEKNLLTVSYGRNQDRFMDFSARFLAEINYFGQDARFKMYRFYSTDEQNCELEKYELPKDKKEYDSLKFHQGKLVHFSSYKEHLKRYETWDDAFVIENNAIQLKLLFDGVENTITIQRALLIYLLEDALRNSQNNTAENAGKELLEAYYSHNKVDFSAFKHILTQQESIEPQQKTEFKKLLPRRLLNHYSPAIGNCQTAPSSLPLLLEKAILAEKRYSSLTAKAKAEGNYDDFIRRNKGKQYKLQFIRKAWH

SEQ ID NO: 4558 - protein, 669 aa, Artificial
  Synthetic
MDNSTSKSFKRFFEFKGNVAPIAEKANRNFNIKNLNPINTQQRLHYFAIGHVFKSIDTEKIFTVLLDEVAKVKKPTKFSALQNTEFTFINELKCLMSDIRNINSHFIHDFEKIKIDSIDKNIIEFLKQSFELAVLQTCMDEKNINYEEFTGGGNPEKEIVDFLCDKFYPKIDNSKDLSEHQKLISDFKKKSKDEAINEILFINVSSDYNWNIFETHTVFKISKGKYLSFEACLFLLAMFLYKGEANQLISKIKGFKRNDDNKFMSKRNLFTFFSKKFSSQDIDSEENHLVKFRDLVQYLNHYPTVWNKYLELGSNNPIMTERLKEKIIELEIKRCFPELASNSSFNQFAINYIFKNGKIIECENNNIYLDIINKNDEVRKIYFSIKNNEFNRSEFKDNSFKMFALKYVVKEYYKENKAYADYLTKQIKDKEKTFDEELITNKKVEKLKKQISQNLNFIFYGRNQDRFMEFATRYLAETGYFGKDAKFKMYEFFTTDEQIEEIDRLKRTISKKEFDKLKFHQGKLVHCSTYADHIAKYKNWDTPFVVENNAVQLTVCFDNGQRKILSIQRNLMPYFLEDALYNMQNDKIEGAGKILIENYYNYHKEGFEKSRLTLKQNDTISLLEKATFKKILPKRLLHRYSPAVQNNLPENSTYKQILTKTKEAEERYV

SEQ ID NO: 4559 - protein, 349 aa, Artificial
  Synthetic
MNTAKKFHRFFEVKGNVAPIAEKADKNFILKEKNNVNLQERLWYFAIGHVFKQLDTKAIFDYKVNETTRESKPQKFTSLTSDNFSFLKKIKSFIGNIRNINSHYIHDFSVIKLNTNIEDANNDNSFMMFLKEAFELALIHIYSEEKGLKYSQFIDDKTNDKKLVEYIRDKFYSLNDSRKNLTSEEKKASEEYKKFRTDFLNKTKSQAINDILFIDNEADFDWTLYETHKVFTIKEGKYLSFDACLFLLTMFLYKNEANELISKIKGFKRSDDNTFRSKRNLFSFYSKKFSSQDIDSEEGNLIKFRDIVQYLNLYPKHWNSELEFDAKIPQMTKPLKDKIVEMEIERCFP

SEQ ID NO: 4560 - protein, 640 aa, Artificial
  Synthetic
MGETSKDSSNNDFSSSAFYRHFENAGIMGPICEKAVKNFELKGAFFKSSNESSTDLVNRRQRIHYFAIGHAFKQIDTKTIFEYKIDETAREERPTKYLSLQTNNFSLDKELFNLLRDIRNLNNHYVHIFDKIKVTKLKETNVIAFLKESFELALIKIYFKEKGHLPNNDNDIVSFLKRIFFPKKTDNKTDSIEQKERNKIWNDFTYSLTSKAQTIDAILFIDVENEFDWNINNEVKVLSIKKGKYLSFEACLFLVSMFLYKNEANHLIPKIRGYKRNDDTQMRSKRELFSFFSKKFTSQDVDAEESHLVKFRDIIQFLNHYPTTWNNDLKLESESKNQKMIKVLKDSIITMEIYRTYPNYNNDINFVSFAKDYLFKNKSNELNEEYKNKKLTKAQCEYYEEITQNPHIKIFKNEIANAIKPIAYNLKENAFKIYVKQYVLKTFFPNKRGYEKFATHRFKKNKRYITEDVEKGFKSQLFSNPKTERLKKRILEDSLIMSYGRNQDRFMDFSIRYLAEKNYFGADAQFKCYQFYTTFEQENYLNNFKKTHTKKEIDNLKYHNGKLVHFTTYQSHKRNYPEWDMPFVNQNNSVSIKIILEEKTTDEKNEVAIEKIITIQRNLITYFLEDALYNTDYDGKQLLT

SEQ ID NO: 4561 - protein, 883 aa, Artificial
  Synthetic
MEQKQLESRFNQIFNNKGHTGPIAEKAVKNFETIRQHKVSPRERLHYFAVGHALRNIDKDLKESIFEYNLDEEQKKQKPTQFTTLQSDFFRFENALLTLLKDIRNCNGHYVHTFDKLQLDEILKLQEKNKEHGILNKDAGCQIIEFLKEAFEFSILIQFLKEKPKEYEKFKKRKNENKNQSLRNLIGGYEKKLVKYLCDKFFPNEEKQKEIRDKFIEHNLEEAIEDLLFIPVDEDIEWKLGEEHVVFVIKKGKYLSFYAQLFLLSMFLYKQEANQLISKIRGFKRSEDEFQYKRNIFTFFSKKVSSQDIHSEEKHLIYFRDIIQYLNRFPTAWNEYLSPERKNLPMTKLLEKYILEEEIFRTFSTYKNDCNRELFLKYTIKRLFCKKAELFDAEKISIDDNLRKKFNYEIDTSPELKNIHEKLKGKLKPKDYYKNIKRKEELEKEENPEKLKLTKKVTEEKLFTAYGRNRDRFMDFAVRYLAEQNYFGKDAEFKMYMFETTNEQENYLKEQKNTADKKVIDQNKYHQGRLTCFKTYQKHKDDYQNWDDPFVFQNNAFQIILTFSNGERKKFSIQRKLLIYLLEDALFNHSDSIEDKGKQLLEDYFFNTLMPDFEDAKESYKTSDDVNWKHRKLLPKRLIYTVHPPRRTDSEEQIHPFEKILRETQEQERRYRLLLGKAKNMKLKEEFIKRNKGKHFKLRFIRKAWHLMYFREIYERRAKEHSHHKSFHITRDEINDFSRWMYAFDEVPPYKVYLRNMLQRKKFMENEEFAELFEKGKSLDDFYRITKKEFSKRIKNNLFQLKVDSERQYAEILSKKLVYINLSHFIKYLNAKGKLTVENGIIQYKASTNKKYLIDEYYYTEVLPREEYKVHKHLFNKLRATKL

SEQ ID NO: 4562 - protein, 451 aa, Artificial
  Synthetic
MEQKQLESRFNQIFNNKGHTGPIAEKAVKNFETIRQHKVSPRERLHYFAVGHALRNIDKDLKESIFEYNLDEEQKKQKPTQFTTLQSDFFRFENALLTLLKDIRNCNGHYVHTFDKLQLDEILKLQEKNKEHGILNKDAGCQIIEFLKEAFEFSILIQFLKEKPKEYEKFKKRKNENKNQSLRNLIGGYEKKLVKYLCDKFFPNEEKQKEIRDKFIEHNLEEAIEDLLFIPVDEDIEWKLGEEHVVFVIKKGKYLSFYAQLFLLSMFLYKQEANQLISKIRGFKRSEDEFQYKRNIFTFFSKKVSSQDIHSEEKHLIYFRDIIQYLNRFPTAWNEYLSPERKNLPMTKLLEKYILEEEIFRTFSTYKNDCNRELFLKYTIKRLFRKKAELFDAEKISIDDNLRKKFNYEIDTSPELKNIHEKLKGKLKPKDYYKNIKRKEELEKEDESPKN

SEQ ID NO: 4563 - protein, 362 aa, Artificial
  Synthetic
MDFAVRYLAEQNYFGKDAEFKMYMFETTNEQENYLKEQKNTADKKVIDQNKYHQGRLTCFKTYQKHKDDYQNWDDPFVFQNNAFQIVLTFSNGERKKFSIQRKLLIYLLEDALFNHSDSIEDKGKQLLEDYFFNTLMPDFEEAKGSYKTSDDVNWKHRKLLPKRLIYTVHPPRRTDSEEQIHPFEKILRETQEQERRYRLLLGKAKNMKLKEEFIKRNKGKHFKLRFIRKAWHLMYFREIYERRAKEHSHHKSFHITRDEINDFSRWMYAFDEVPPYKVYLRNMLQRKKFMENEEFAELFEKGKSLDEFYHLTKQEFSKRIKNNLFQLKVDSERQYAEVLSKKLVYINLSHFIKYLKCEREN

SEQ ID NO: 4564 - protein, 738 aa, Artificial
  Synthetic
MSTRYTNQKKVEENINYVFSNKGIFAAVAEKTLTNYKSKFNEGQTIQPNLHYFAVGHTFKNIDTKRIFDYQLSEDEMDILPTKYFSLQQNKFSFPIDGQTKTDKLYLLLDNIRNINAHFIHDFNFLKVDNIDENIICFLIDSFELALIKGVFAKKYGNKKHELGLDFLSNDLKDEILEEILENLDDELIVFMKEIFYQTLYVVDKKEWRNKELNQEKKDFLDSHLSSKEDWINWILFNCVEEDIDWFLNNYGDSDPHPDSKNHKHKVLTIEKGKHLSFEGSLFMMTMFLYANEANYLIPKLKGYKKNGTPQDASKLEVFRFFAKKFKSQDVDSEHKQYVKFRDMIQYVGKYPTVWNKHIHLDNYYVNELKVSILENEITQLFEQDIQNYFETKYGLQKFAKAKGDMHYAFVEVAKSYLQKKTISYKGKYQDDSIAILETLAEQITNKRQLKNIEVKLLRFSDTDYQSLSSIEKTKKQRLDKSKKMFLDKIKESKKTINKTTEKFAKRVEDNLLYISNGRNSDRFMVFACRFLAEINYFGKDAQFKMYENYYSEEEQNALKDKKQNLTQKEFDKLHYHGGKLTHFETFENHTKKYPNWDMPFVVQNNAIYVKIPGINFIKNTAFCIQRNVINYLLEHALGENYKDQQGRKWLFDYYEHKTEATDNAKRILTESKPIEASSKTKLKKLLPKKLFPKYSASETEKNILRKYLEQAEESEKLYENQKDKAKAENRLDLFVNK

SEQ ID NO: 4565 - protein, 558 aa, Artificial
  Synthetic
MSTRYTNQKKVEENINYVFSNKGIFAAVAEKTLTNYKSKFNEGQTIQPNLHYFAVGHTFKNIDTKRIFDYQLSEDEMDILPTKYFSLQQNKFSFPIDGQTKTDKLYLLLDNIRNINAHFIHDFNFLKVDNIDENIICFLIDSFELALIKGVFAKKYGNKKHELGLDFLSNDLKDEILEEILENLDDELIVFMKEIFYQTLYVVDKKEWRNKELNQEKKDFLDSHLSSKEDWINWILFNCVEEDIDWFLNNYGDSDPHPDSKNHKHKVLTIEKGKHLSFEGSLFMMTMFLYANEANYLIPKLKGYKKNGTPQDASKLEVFRFFAKKFKSQDVDSEHKQYVKFRDMIQYVGKYPTVWNKHIHLDNYYVNELKVSILENEITQLFEQDIQNYFETKYGLQKFAKAKGDMHYAFVEVAKSYLQKKTISYKGKYQDDSIAILETLAEQITNKRQLKNIEVKLLRFSDTDYQSLSSIEKTKKQRLDKSKKMFLDKIKESKKTINKTTEKFAKRVEDNLLYISNGRNSDRFMVFACRFLAEINYFGKDAQFKMYENYYSEEEQNA

SEQ ID NO: 4566 - protein, 710 aa, Artificial
  Synthetic
MSTRYTNQKKVEENINYVFSNKGIFAAVAEKTLTNYKSKFNEGQTIQPNLHYFAVGHTFKNIDTKRIFDYQLSEDEMDILPTKYFSLQQNKFSFPIDGQTKTDKLYLLLDNIRNINAHFIHDFNFLKVDNIDENIICFLIDSFELALIKGVFAKKYGDKKSKLRLDFLSNEARDEILTDILENLDKELIVFMKEIFYQTLYVVDKKEWRNKELNQEKKDFLDNHLSSKEDWINWILFNCVEEDIDWYLNNYGDYDPHPDSKNHKHKVLTIEKGKYLSFEGSLFMMTMFLYANEANYLIPKLKGYKKNGTPQDASKLEVFRFFAKKFKSQDVDSEHKQYVKFRDMIQYVGKYPTVWNKHIHLDSYYVKDLKATILENEIIQLYQEDIKNHFQSICGLKQFEDSQEEIQLAFIEVAKDYLQNKEIYYTGEYREDCITILKTSAEHLANKRQLKDIQKQLKKYINKAYKSLSSEDQGKKKKLDISKLKYIDKIRKSKNSINTTTDKFAKRVEDNLLFISNGRNSDRFMVFACRFLAEINYFGKDAQFKMYENYYSEEEQNALKDKKQNLTQKEFDKLHYHGGKLTHFETFENHTKKYPNWDMPFVVQNNAIYVKIPGINFIKNTAFCIQRNVINYLLEHALGENYKDQQGRKWLFDYYEHKTEATDNAKRILTESKPIEASSKTKLKKLLPKKLFPKYSASETEKNGSSLGLR

SEQ ID NO: 4567 - protein, 643 aa, Artificial
  Synthetic
MKKNINPFNLFFLEKGYIGSIAQKAENNFSTNCKALNGSQISDKENKATSRIYYFAVGHAFKNIDTKAIFAYKYDDDKKNLRATQYVHIQRNVFDQGLRDFIGEKVHAIRNMCSHYVHLFNDIKLEDEDSDKANIIQDQFIPFVKEAFKLAVVQAYPGESDMTIDKVDDAKIIRFLYDNFISKGEYDDLEEKKQFFKLSSDKALEKVLFIDLDEDQSICIGPGYEVFTATKGRYLSFYASLFLLSMFLYRNEAEILISRIKGFKDKRDIGNIAKRSVFTFFSKKVSSRDVDNEEMPLVKFRDIMQYLNHYPTAWNDQLSDYSSSESSKNLCNKIVEMDIKRLFHEMFETENEESLRFLTYVKLTQYEALYPKKYVRAEFLKADFTSRETEHFDIIIKESKELKGCRKKLQDLLHADSLGNEKEKEIAECTEKIQELEGAETNPDLDAVRKQIDDHLFITSYGRNQDRFMDFAARFLAEVEYFGKDAFFKVYRFETIEEQSKYLEKVKNQLPKEQYDKLKMHRGRLATYMNHNQIINYYSSFDIPFVIENNSIQVFMPSSKIIEDMDDQMLKKIFKGKGTFYVIQRPLIIYLLEQFLYEPSGRKKMTFKALIENYCGRRKKGLEKYETLLLNDSDSKAAELQDQ

SEQ ID NO: 4568 - protein, 370 aa, Artificial
  Synthetic
MNITDFIKKKTDPFIRNKGLLAPLSEIAYRNFELVCDNNEKSGDLSLQAISSIYQFSIGQTFKSHNIKQLFNYQLNDEKDRFVPTKYLSLQKKQFIDNEIASTLLKLVSAIRELNQNYTHNLEPLRIGNNIITPQIIEFLHDLFEVSIIMLLNKSVKDRNNFTSQYNEDSLNLLLKEFILTLFFPETSYTTEEIEVLRKKSKDELINEVLFFDVQSVYQWKVVNNPLMMPIQCGKYLSFTSCLFINSLFLFKEDTKIIFPNFPFLKNKTDETQVLQMFFSLFANPYTLHYIPSQHLRIAKHKDIIEYLNLYPSPWQEALNSQSPCFPMSHLLKDFLIERECNRVFLKVPHLNLILIPIIINRLMVIKIIA

SEQ ID NO: 4569 - protein, 308 aa, Artificial
  Synthetic
LIDEYYYTEVLPREEYKVHKHLFNKLRATKLEDALLYELAMKYLREDNDIVEKAKSKVSDIQSSEISFDIKDYYGNHLYTLIVPFNKLETLSILIRYKTKQEKNSKLQRTSFLGNIYHLLAFLDKNYKQLSKYKDDGGFKKIVKNFKNKKRLSFVELNTINGYIISGAVKFSKVHMELERYFINKHKIKANHIYIDLEDIKDDSNKQVFGNYYDSKLRIRNKAFHFGVPTNFFFNIEIEKIEKKFILEEVKLQNVSSFDKLNQNAKSVCRVFMEVLHSDLYRRDKNKSKEELRREFEEKYFNEIITTV

SEQ ID NO: 4570 - protein, 331 aa, Artificial
  Synthetic
MRKGKLTVENGIIQYKASTNKKYLIDEYYYTEVLPREEYKVHKHLFNKLRAAKLEDALLYELAMKYLKEDEEIVEKAKSKVSDIQSSEISFDIKDYYGNHLYTLIVPFNKLETLSILIRYKTGQENELKNKKTSFLGNIYHLLAFLDKNYKQLSKYKDDGGFKKIVKNFKNKKRLSFVELNTINGYIISGAVKFSKVHMELERYFINKHKIKANHIYIDLEDIKDDSNKQVFGNYYDSKLRIRNKAFHFGVPTNFFFNIEIEKIEKKFILEEVKLQNVSSFDKLNQNAKSVCRVFMEVLHSDLYRRDKNKSKEELRREFEEKYFNEIITTV

SEQ ID NO: 4571 - protein, 321 aa, Artificial
  Synthetic
MIQGVKFSENKERFADWFVHYKDYEHYQKFYDTNLYPVESIEDKERQKLEATIKKQQKNDVFTLLMIKKIFNDLFNQDFEANLYEMYQSKEERENNQLIAKETQNRNLNFIWNKPIAIDLFDGKVKIDEVKLKDVGSFRKYENDKRVQTFIKYHPEIQWIPYLPNTWEGINLPVNVIERQIDRYEKVRSEELLKEVQAIEKYIYEQVNDKTELLQNGNQNFKNYLVNGLLKQIQGIDVSNFKFINQQKFETINVKDLDNEASALEQKVYILINIRNQFSHNQFPKSTFYQFCQKILLIEEDELFADYYLRLFKLLKNELLD

SEQ ID NO: 4572 - protein, 764 aa, Artificial
  Synthetic
  misc_feature (644)..(649): Xaa can be any naturally occurring amino acid
MTETTKVALPNDKNQAINKLFDSADRQKTLAKIEKELPFFQYYLNQAVVNLQKLGAPDLSGDEDKAQKLIEELPDAKIQILADFLWLFKTDNPGEDFKDYRKITTMLVDKIFRLRNFFCHTERGDIKPLLTNAAFYHFFAGWALGEARLHSLEGGVKSDRIFKMSIMNAQEINKDDRTRNIYAFTRRGIIMLICMALYKDEAIEFCQALDDMKLPRVELDEELEQSDSEQTELRKKAGIRKAYHLVFLYFSKKRSFNAVDEENHDFVCFTDIIGYLNKVPMVSMDYLALNEERKRLAELEAASTESDENKRFKYTLHRRMKDRFLSFITAYCEDFNLLPSIRFKRLDISPSIGRKRYCFGIESDNSVRQSRHYAIEKDAIRFEWRAKQHYGDIHIDSLRSAISASEFKRLLLASRSTRTGKNFNASNELDAYFTAYHKVLEKMLNEPECDFINREGYLPELTAITGASREELMDNPTLLEKMRPFFPENITRFFIPRDNIPDNQTLLEQLKNALQNAIKHDDDFIARMDGATEWTSKYADVPPEKRPKRPQEYRFNNNAFISKVFALLNLYLPDDRKFRQLPKGKQHRACMDFEYQTLHAIIGRFASDPQELWDYLKGIKTVYRYEGKKRIPDHTINVIDSKRXXXXXXLQKKRTSSTRKRNASTGIPSLMQMDDSHATPSRCLHAPLSSCIRNSAKSFSHNIKVHNWTGFAHSFRKTAASSAYALDSPSLMTPSSKPSSTLTRPSGSMPSMKRKTALGKTARS

SEQ ID NO: 4573 - protein, 306 aa, Artificial
  Synthetic
  misc_feature (291)..(302): Xaa can be any naturally occurring amino acid
MNAQEINEDDKTKNTYAFTRKGIVLLACMALYKDEATEFCQSLQDMKLPTVELEEDESIDDAEKATLRKKASIRKAYHLVMSYFSQKRSYNAIDQENHDFVSFTDIIGYLNKVPTVSMDYLALNEERRKLAELDAKSTESEENRRFKYTLHRRAKDRFLSFAAGYCEDFNILPCIHFKRLDISDHIGRKRYIYGMENDNSVRQSRHYAIDKDAIRFEYRPSGHYGDIHIDYLRSAISAKEFKRLLLATRSTRTSIFNPSEALDAYFSAYHKVLEKMLNEPDCDFIDRTGYXXXXXXXXXXXXSHPG

SEQ ID NO: 4574 - protein, 681 aa, Artificial
  Synthetic
MKKQNKNNHNRSCKGRFGEKNISQNCKRNIYLPNDLKRALYKLKIDQPGYSEQKNFFVYLSFATNNIFEIAGISHDFSTDGIKVWDEIKRLKMVDKLARFLWLFRIEDPAKECPDYEEITEGIVKKLLELRNLFAHINNKKSIEAFLLDNKLANALQWGLMDVARENVLKPGLSTAKLFKQRLVTPHNDTKYEFTRKGIIFLICLALFKDEAFHFCSSLNDLKDMRKDAEWQRLRNDDAAEELKKYMTRNNYKNPSQTRAQVDMLTYFSMRSSYKAILGIGSDDQGSSAIDKEERDYKIFADIIGYLNKVPVECYDYLELADERRMLKDLNDKSEESEENKEYKYDLKSNRRLKNRFLPLAIGYCEDFDLFPSIKFKRLDISEQIGRKRYCYGKENGNANGMDRHYAIHDGSVGFEYCPDNHYGDLRISSMRSSISTYELKRLLLLETVFRCDKKKIDEAISNYFSAYHRVMERMLNASYSGDFELEDFREDFSLVSGLEPEEISKDKLFEQMGLYFPDSLLRFFLNKDNNPTPKELKALLKKKIAYRQRQCEDFLNKIDEVYKRRTSTKEELSSAGKPVKISDGVLIRKVFNLLNIFLKPEEKFRQLPKSEWHKGNKDFEYQTLHAIIGKFPLDKNKRFWSFILECRPGLKDIIGKLQAKYNSEYERRGASEARRGLNAL

SEQ ID NO: 4575 - protein, 565 aa, Artificial
  Synthetic
MKKQNKNNHNRSCKGRFGEKNISQNCKRNIYLPNDLKRALYKLKIDQPGYSEQKNFFVYLSFATNNIFEIAGISHDFSTDGIKVWDEIKRLKMVDKLARFLWLFRIEDPAKECPDYEEITEGIVKKLLELRNLFAHINNKKSIEAFLLDNKLANALQWGLMDVARENVLKPGLSTAKLFKQRLVTPHNDTKYEFTRKGIIFLICLALFKDEAFHFCSSLNDLKDMRKDAEWQRLRNDDAAEELKKYMTRNNYKNPSQTRAQVDMLTYFSMRSSYKAILGIGSDDQGSSAIDKEERDYKIFADIIGYLNKVPVECYDYLELADERRMLKDLNDKSEESEENKEYKYDLKSNRRLKNRFLPLAIGYCEDFDLFPSIKFKRLDISEQIGRKRYCYGKENGNANGMDRHYAIHDGSVGFEYCPDNHYGDLRISSMRSSISTYELKRLLLLETVFRCDKKKIDEAISNYFSAYHRVMERMLNASYSGDFELEDFREDFSLVSGLEPEEISKDKLFEQMGLYFPDSLLRFFLNKDNNPTPKELKALLKKKIAYRQRQCEDFLNKIDEVYKR

SEQ ID NO: 4576 - protein, 691 aa, Artificial
  Synthetic
MSYNITVGSRQNGRASGFHGGAPKKRTYLSGDFARDMRELRIKGTIRSPQTRKETYVDETPQFITYLTLALQNISDIIGEDVTKMRSKNSVERSLSRSGKLWEVASFLWLHAEDQPKRDFAKLSKEAAAKGEDPDYAKFAGAIVVKLWELRNMFVHWSQSRSAGVLVVNREFYRFVEGELYSAAMPDAIGSGRKSEKMFKLRLFNPHDDAKLQYEFTRKGMIFLVCLALYRHDASEFIQQFPDLQLPPREWEMEKGYKKRMTEEDLVSLRKKGGSIKAILDAFTHYSMRASRTDIDLKNKEYLNFANVLTYLNKVPMASYNYLTLREEAQALAEAAEKSTESEENKRFKYLLHPRQKDRFLTLALAFIEDFHVLDCIRFKRLDITVRPERSRYMFGPIEAGTKNEFGYELSDANGMDRHYVISHGNAEFEYVPEKSDHENRSIRISRLRGRVGEGEVMRLLLAFFTTRDANVPAEKNPVNTELHAYLRSYHRILERMLNAKTLDGLKFDSPDFKNDFKRVSGKSVDSLTKENFVEEMKPFFPAGITRYFVGDEMKLDTRALQDILASKLAARADRASDFLKRLDRLTDWRELDEEARKRVGPPICKIGELKYPPRTCKMTDAQLIKRVLDYINLNLNDPNDKFRQLPRGLRHRGIRDVEFQMLHRDIGRFGSNPDGLWRTLEKREALNGED

SEQ ID NO: 4577 - protein, 333 aa, Artificial
  Synthetic
MKAKLPMNHQDALCHLEIEGCVRGSNVHLESAFLLYLNQAVVNIQERTGIGDRYFDPDTVWSEIRKKGPGVVERLASFLWLFREEDPERDWGKDYEEYTEKIVKRIFQLRNWFAHRDRMAGKDSLIVDRAFYVLIEGLLGAAAREAADGPGMKMAKVWKAKLLSLQDKNAVDKALETYYLTKRGLIFLICLALYKDDATEFCQLIPELRLEDRYEEALEGYEVPDPKKKGSAKAMRAFFTYYSMRKGRQDLDAGDLDRMCFSDILTDLNKVPLAAHDYLPLAEERQDLDARREVSTESEANKRFKYELHPRMKDRFLSTAAGYIEDFDVLPSV

SEQ ID NO: 4578 - protein, 469 aa, Artificial
  Synthetic
  misc_feature (450)..(458): Xaa can be any naturally occurring amino acid
MMKQAKQVLLPADPKEALLKLWDRPDKSERRWLFEHELPYFQFYLNLAITHIQGIAHLDESKFDEEAIVKQIMKLDKETRFRLADFLWLSKVDDAKSLFYKDCCPQECAISFPEEKKPCNDEAGNLAEGKDDVKSFFPCCNERCPLRAKDECSNYDARIIVQLYRLRNFLAHYTRPDTTIGALLTDYQFYTFFAGWLFGEAKSKALNGQIKTDKLHKMKLMTQQTEGKDTPREQCQYAFTRKGLVFLICLALYKHEAHEFCQALVDMKLPTKELLAVEQPDEDAQTALRKKKSQREASRELFTYFSMRESYGAVWKDDHNFIYFTDLIEYLNTVPLVSLDYLALRKERELLAEDCAKSEESESNKLWKYSLHGRQKERFLSFLTAYCEDFDIIPSIEFKRQDLRPSIERHRYCFGEDEKRKNFTSDSADSDISRDRQDRHYAISRDCVHXXXXXXXXXAYSYCGVAQCD

SEQ ID NO: 4579 - protein, 774 aa, Artificial
  Synthetic
MKDIVSYFRELLSGTKYALADDATEEKISELIYNVGYSKSAKDLPNKNLKKLTQLQIVQTGIETLMRSKGKKPEDLPENIHAFVFNNAEAIQASDPGLTTDEANPVTARFLQMLMGDGDQNEGRLERRLQWVDGQLAKFSRSSSAQFAKDNRYATKGYKDVRYGRLAEILAESMLLWQPTKDTDDSIERGRNKLTGLNYRRLVDFLAIYSEDSTAKKERDGIVEEYSGLEALECVLNEAKLIGSVTYHPFLSAVLKKAPRNIENLYLAYMNAEKNYLINLKKTFAKKAATDKIEDLQSQAPAFVHPFRERWTDKVQVADNVRRMAARYLESGSTLLLPDGLFTDAILSQLQRRGLLQDVFAEAANEQDETEKELLEQRNRNVSFLISRYMESMGDHCQTFYDGDTPIFYRGYDLFKKLYGKKVRNEQLPFYMSRDVIAAELKAKEELVKKIENYCVQQNKAEAEEGMIRDINHIKKNERAILRYKVQDMVLFLTAKKMLQSQQTLQDGNATQNQESHRVNLGRQTQAAYVRQQQTLLNRSERIERMSLQDIFDGDALNETMDYEYRIDVTWKLRDEQGRVLKFKADGQPIGFDEDGNLLEKGGKPKVFKRKVFVTQKNVAIKNFGRIFRIVRDERLEKLLILLIMKVEGANLQETGQDYTVSVAELANEFTTFDSLRTDAFELIHELEKTAYPCLTNKESNETFQFKNMMRLICDTEEEAVAINQYRISFAHSLYGIEETSIGDGLQIPLVSTRMKEQMAARSQQIKEHLAAQN

SEQ ID NO: 4580 - protein, 506 aa, Artificial
  Synthetic
  misc_feature (466)..(469): Xaa can be any naturally occurring amino acid
MMRFQPAKRSADNMGVPGSKANSTEYRLLQEALAFYSTYKDRLEPYFRQVNLIGGTNPHPFLHRVDWKKCNHLLSFYHDYLEAKEQYLSHLSPADWQKHQYFLLLKVRKDIQNEKKEWKKSLVAGWKNGFNLPRGLFTESIKTWFSTHADKVQIADPKLFENRVGLIAKLIPLYYNKVYEDKPQPFYQYPFNINDRYKPEDADKQFTAASSKLWNEKKARYKNAQLEQLKKKKDLKYLDFLSWKKLERELRMLRNQDMMVWLMCKDLFAQCTVEGVEFADLKLSQLEVDVTVQDNLNVLNNVSSMILPLSVYPSDAQGNILRNSKPLYTVYVQENNTKLLKQGNFKSLLKDRRLNGLFSFIAAEGEDLQQHPLTKNRLEYELSIYQTMRISVFEQTLQLEKAILTRNETLCGNNFNNLLNSWSEHRTDKKTLQPDIDFLIAVRNAFSHNQYPMSTNMVMQDIEKFXXXXQTPKLAEKDGLGIASQLAKKTKDAASRLQNIINGGTN

SEQ ID NO: 4581 - protein, 835 aa, Artificial
  Synthetic
MEGTKMRRLGVSVYPGHSEIEDILDYLRLAATYGFSRVFTCLLSVGNQEKTIADFKEAVKLATSLGMEVIADVDLSVFEKLDLKYDNLEFFKDMGLTGIRLDGGFSGQEEAGMTFNPQGLMIELNMSIENRYLENIAAFQPKFEKLIGCHNFYPHRYTGLSVQHFLNTSKRYKDLGLRTAAFVNSKVATTGPWPVEEGLCTLEMHREWEITSAAKWLWATELIDDVIVANSFASEEELKEYLKGKDIEIVHLPKQMIAILESKPKDMVKEAKRKQKEMVKDTKKLLAALEKQTQGEIEDGGRNIRLLKSGEIARWLVNDMMRFQPVQKDNEGNPLNNSKANSTEYQMLQRSLALYNKEEKPTRYFRQVNLINSSNPHPFLKWTKWEECNNILSFYRSYLTKKIEFLNKLKPEEWKKNQYFLKLKEPKTNRETLVQGWKNGFNLPRGIFTEPIKEWFKRHQNDSEEYKKVEALDRVGLVAKVIPLFFKEEYFKEDAQKEINNCVQPFYSFPYNVGNIHKPEEKNFLHCEERRKLWDKKKDKFKDYKAKEKSKKMTDKEKEEHRSYLEFQSWNKFERELRLVRNQDIVTWLLCTELIDKLKIDELNIEELQKLRLKDIDTDTAKQEKNNILNRIMPMQLPVTVYEIDDSHNIVKDKPLHTVYIEETKTKLLKQGNFKALVKDRRLNGLFSFVKTSSEAESKSKPISKLRVEYELGAYQKARIDIIKDMLALEKTLIDNDKNLPTNKFSDMLNSWLEGKGEANKVRFQNDVDLLVAVRNAFSHNQYPMYNSEVFKGMKLLSLSSDIPEKEGLGIAKQLKDKIKETIERIIEIEKEIRN

SEQ ID NO: 4582 - protein, 561 aa, Artificial
  Synthetic
MIKDTKKRLATLDKQVKGEIEDGGRNIRLLKSGEIARWLVNDMMRFQPVQKDNEGKPLNNSKANSTEYQMLQRSLALYNKEEKPTRYFRQVNLIKSSNPHPFLEDTKWEECYNILSFYRNYLKAKIKFLNKLKPEDWKKNQYFLMLKEPKTNRKTLVQGWKNGFNLPRGIFTEPIREWFKRHQNNSEEYEKVEALDRVGLVTKVIPLFFKEEYFKEDAQKEINNCVQPFYSFPYNVGNIHKPDEKDFLPSEERKKLWGDKKDKFKGYKAKVKSKKLTDKEKEEYRSYLEFQSWNKFERELRLVRNQDIVTWLLCTELIDKLKVEGLNVEELQKLRLKDIDTDTAKQEKNNILNRIMPMQLPVTVYEIDDSHKIVKDRPLHTVYIEETKTKLLKQGNFKALVKDRRLNGLFSFVDTSSEAELKDKPISKSVVEYELGEYQNARIETIKDMLLLEETLIKKYKTLPTNKFKKMLKGWLEGKDEADKARFQNDVKLLVAVRNAFSHNQYPMRNRIAFANINPFSLSSANTSEEKGLGIANQLKDKTKETIEKIIKIEKPIETKE

SEQ ID NO: 4583 - protein, 398 aa, Artificial
  Synthetic
MKAIIYARVSTEMQEEGRSLEFQIRKCEDFCKMSGYKLKEVIQDVESGGNDNREGFLKLQQEIKKKSFDVLVVYESSRISRITLTMLNFVLELQKSNIKFVSISQSEINTTTPTGMLFFQIFAVLADYERKQISMRVKSNKWARAKAGIWQGGNIPIGYKKDEHNNIVIDPETSEDVINIFNTYLNTKSISETASIFNRNISSIKWILQNEFYIGNLMYGRKENNINTGEVKINKEITIFKGNHQALISEDLFREVQRQMLFKQRVIRKEGKFLFTGILECICGGKMFKNGVNYRCDKCKKAISMNKAEKFIIHKLLNLKELEFLNELQPQNWASDNYFLLLRAPKNDRQKLAEGWKNGFNLPRGLFTEKIKTWFNEHKTIVDISDCDIFKNRVGQVA

SEQ ID NO: 4584 - protein, 544 aa, Artificial
  Synthetic
LKSNILPENDDDYDADLHHPFLLNVLDEEPSSVEEFYEIYLEEELNHIDYMITFLKKHKAKGTALYIPFLHANRSRWKNADEDTMKKLATRYMEQPLQLPNGMFTESIFKLLMEIDNPDLHEELVKAENPDADKNLANNVSYLMSIYFKHVERDHSQPFYNTTAIEGEPSPYRHVYRIFKKLYGQQIPHTNQTTTPAYTVEEINGLRKQALTDIAKYVEKDISNWKDRQQFKFEQKLKKKLKKENDRRYKNHEQQLNVYEEVNKVVQQEINTMRTTTTAKLIRQLKKVYDNERTIRRFKTQDMLMLIMAREILKAKSQNKDFTKDFCLKYVMTDSLLDKPIDFDWSVNIEKKKKNEEGKIEKEIIRKTIRQEGMKMKNYGQFYKFASDHQRLESLLSRLPDELFLRAEIENELSYYDTNRSEVFRLVYIIESEAYKLKPELANDANTDKEWFYYADKKGKKHPKRNNFLSLLEILAAGKDGILNEDEKRSLQSTRNAFGHNTYDVDLPTVFEGKKEKMKIPEVANGIKDKIENQTEELKKSLQK

SEQ ID NO: 4585 - protein, 544 aa, Artificial; identical to SEQ ID NO: 4584
  Synthetic

SEQ ID NO: 4586 - protein, 423 aa, Artificial
  Synthetic
VEEVFNLLRRKSNPPQSKSQLDCDIHEYVEKHRKDKSKEWAEDPTALMRKQAKQVEQTEHAIRRCQIEDIVMLYAARDMLYAARDILSAKNNRTPNGTDTPQPQKFKLKHVQKDDGLLERTIDFDWVVDIDGQQKTIRQQNMKMKDYGKFYKFASDGERLKSLLAHLGGNEFQRADIEAEYANYDVSRSQVFRYVYMLESKAYQLLAKRKDNPIDLLNDQKPIPDAFWFVSKEGIRNEFRVFKENLFNEYKADVHDYKANDPDAEALVNAICNFTGTSIEEWDANQDTLMKQVKSLLTDENPNEKDKALILQVKDYCMKKDIARKAIRNNFGELIEILLRGDEPIFTDDDKYIIQHIRNAFGHNHYLKKEDEYNTVFRGKEAKLKLPEVAKTIKDWMGEKTTKALSLTPDTQRALPPKSQAAE

SEQ ID NO: 4587 - protein, 432 aa, Artificial
  Synthetic
LIYLQEKVNKTIDVRNYKTGKTSTIDKSWMMTTFYKREWNQEVGKQLTEVKLPDNLSGIPFTLRQLKEKASYSLDQWLNNVTKGKVAGDGKRPINLPTNLFDETLINLLQNDLEAQQVEYPTDAKYNELFKIWWRKRGDSTQSFYNAEREYVIFDEKVNFKLQENAMFTDFYSDSLKKAFRAKQNTRRIEQRSNRRLPDIQFSQVEKVFKRSISNTEKQIRLLKEEDQIMLLMLEELMSSDLDLKLNQIDTLLNKTITVKKPVTGNLSFGDKSEITRTIIDQRKRKDHSMLHKYVYDRRLPELFEYFEENEIPLQDLKNELEAYNTAKQMVLDAVFKFEEDIVTNNQVHDLIGSACDTGHIQHKVYLQWLKKEGMINENEYLFLNRVRNCFSHNLFPQKRTMSLFVNQWADSNFALQIAEHYNEKINAILAI

SEQ ID NO: 4588 - protein, 781 aa, Artificial
  Synthetic
MLTPLNFEPLRKKYIKKKEENMSHPPGYPYSKEEFKDLKERHEKLQKFLDTDYKGLKVWHLPDDIKEYLIQVSTPSYRQLALIKIDEIKAQTKQLIKDCKALEKKKPEERTLRAGHIAQILARDMVYLRKHHQHIKDGKVHHSKLNDEEYNRLQNLLAYFQKDDIQAHLDQYRLLELHPFLKDVKLENSKNLYEYYKKYLEKRKEYFIGVYDSIDLFAPIFKKAEQYLKKFHGVNKDEKDKKVKKSLLELKKALFNFDRQVIKIFLKNYITDWKGINLGNCKNAEDFCFHVFSIEKEFKDKTFFNIDELQNKLGYLFDFKYQENQPEKLDKNYAQIPIALPSSLFKDAIIEGIEKAMQKEGKKLTFGKDEEGNEKRTVVYALREWLENDTQVFYTHNRHYKMPEKSKEIFSKEQIKRIECQVISLENRKELYHYKELSLYEWIDKPEKYDKLKEIAQKDALKKFRSYLLSTEKVLRLEQHKDRVLWLLAKDLSENRTQGTNLDFKNFKLKDLEKFLDTPIKMEVKVNYIVDKEDIAVNNAISGKPCTSEKQLIEVGAVSETLKIKDYGDLRRFAKDRRLPNLFRYFYDVKSKGEALSKTELEKAITLLEVRNLIQRNEDGSKIFKDKITVLEKAMELEQLLHEKYGQPDTDFENTRLGKYWKQEQPKDSHISHNTYIKFLQDKTLGIDLNINPIVGMDGAQHLNNDKELAKSKRTHPEQTLEACLIILLRNKLIHNEVPYTTFLQSKMQADFTPEQVVRQIIDESMRIYDQLIAEVKKQTA

SEQ ID NO: 4589 - protein, 695 aa, Artificial
  Synthetic
LPKLLALQLLTRTAEQPIINFIQTTNAKIFNFGELEKIKDRTNYIPEVFTKRVVRERELINNKGGITYLSNKLEMNILNKYHLSIVQLAAMDKDSFKKLTGKNKKDIELLSQIKYQYLLKQRREELKKHLPTGLNLDMLPKRVLDYLMQSNERNEKKKIHQKIKDIKDEAKLLNKSIKKEIEKTQQEQRIKLGEIATFIASDMLNMIIDKELKSRITNPYYNKLQNKIAYFSLNKGEIISICDELSLFDTKKGHVFLTRNLIFKSTGIIDFYQNYLEAKIAWIDNKLFVKGKMGGYTIPNNNVPYSILKIKNEIRTYNFNTWLKNKIISPVELPNSLMDDQLAKVLKSALKKESKTYNDGDKFSILLAKYLSNDSQPFYEYTRNYTINTEPVCFDVQGLSSKDIQDKYGNRVAENEKLIRFIQTKDRILKLVCDELLLKDPSIGSKDRFKLSEIHPTSLHNPLERQAEFKHKIIRKGTEVFFTVVAKDTKEQIQEVIEYEKITSSDEKEKYPGQKWYQWTIKDFGRFKRFLKDRRLPNLSEYFEDKDITFDFLEYQIKEYDKYRNNVFDLTFELEKSIATSDLEGIRQIEQRLHIRPKGFFEIEFDVYVEWLDRKGIQYNKDLINECRNRFSHSEFPKYEHLNQIPKITRQQIIDFEYNKRTREYKNNADISISEKITNQYKTEIEQIIHQIRLQ

SEQ ID NO: 4590 - protein, 695 aa, Artificial; identical to SEQ ID NO: 4589
  Synthetic

SEQ ID NO: 4591 - protein, 695 aa, Artificial; identical to SEQ ID NO: 4589
  Synthetic

SEQ ID NO: 4592 - protein, 695 aa, Artificial; identical to SEQ ID NO: 4589
  Synthetic

SEQ ID NO: 4593 - protein, 695 aa, Artificial; identical to SEQ ID NO: 4589
  Synthetic

SEQ ID NO: 4594 - protein, 695 aa, Artificial; identical to SEQ ID NO: 4589
  Synthetic

SEQ ID NO: 4595 - protein, 695 aa, Artificial; identical to SEQ ID NO: 4589
  Synthetic

SEQ ID NO: 4596 - protein, 695 aa, Artificial; identical to SEQ ID NO: 4589
  Synthetic

SEQ ID NO: 4597 - protein, 695 aa, Artificial; identical to SEQ ID NO: 4589
  Synthetic

SEQ ID NO: 4598 - protein, 695 aa, Artificial; identical to SEQ ID NO: 4589
  Synthetic

SEQ ID NO: 4599 - protein, 695 aa, Artificial; identical to SEQ ID NO: 4589
  Synthetic

SEQ ID NO: 4600 - protein, 695 aa, Artificial; identical to SEQ ID NO: 4589
  Synthetic

SEQ ID NO: 4601 - protein, 695 aa, Artificial; identical to SEQ ID NO: 4589
  Synthetic

SEQ ID NO: 4602 - protein, 695 aa, Artificial; identical to SEQ ID NO: 4589
  Synthetic

SEQ ID NO: 4603 - protein, 695 aa, Artificial; identical to SEQ ID NO: 4589
  Synthetic

SEQ ID NO: 4604 - protein, 695 aa, Artificial; identical to SEQ ID NO: 4589
  Synthetic

SEQ ID NO: 4605 - protein, 695 aa, Artificial; identical to SEQ ID NO: 4589
  Synthetic

SEQ ID NO: 4606 - protein, 695 aa, Artificial; identical to SEQ ID NO: 4589
  Synthetic

SEQ ID NO: 4607 - protein, 695 aa, Artificial; identical to SEQ ID NO: 4589
  Synthetic

SEQ ID NO: 4608 - protein, 695 aa, Artificial; identical to SEQ ID NO: 4589
  Synthetic

SEQ ID NO: 4609 - protein, 695 aa, Artificial; identical to SEQ ID NO: 4589
  Synthetic

SEQ ID NO: 4610 - protein, 695 aa, Artificial; identical to SEQ ID NO: 4589
  Synthetic

SEQ ID NO: 4611 - protein, 695 aa, Artificial; identical to SEQ ID NO: 4589
  Synthetic

SEQ ID NO: 4612 - protein, 695 aa, Artificial; identical to SEQ ID NO: 4589
  Synthetic

SEQ ID NO: 4613 - protein, 695 aa, Artificial; identical to SEQ ID NO: 4589
  Synthetic

SEQ ID NO: 4614 - protein, 695 aa, Artificial; identical to SEQ ID NO: 4589
  Synthetic

SEQ ID NO: 4615 - protein, 695 aa, Artificial; identical to SEQ ID NO: 4589
  Synthetic

SEQ ID NO: 4616 - protein, 695 aa, Artificial; identical to SEQ ID NO: 4589
  Synthetic

SEQ ID NO: 4617 - protein, 695 aa, Artificial; identical to SEQ ID NO: 4589
  Synthetic

SEQ ID NO: 4618 - protein, 695 aa, Artificial; identical to SEQ ID NO: 4589
  Synthetic

SEQ ID NO: 4619 - protein, 695 aa, Artificial; identical to SEQ ID NO: 4589
  Synthetic

SEQ ID NO: 4620 - protein, 695 aa, Artificial; identical to SEQ ID NO: 4589
  Synthetic

SEQ ID NO: 4621 - protein, 695 aa, Artificial; identical to SEQ ID NO: 4589
  Synthetic

SEQ ID NO: 4622 - protein, 695 aa, Artificial; identical to SEQ ID NO: 4589
  Synthetic

SEQ ID NO: 4623 - protein, 695 aa, Artificial; identical to SEQ ID NO: 4589
  Synthetic

SEQ ID NO: 4624 - protein, 695 aa, Artificial; identical to SEQ ID NO: 4589
  Synthetic

SEQ ID NO: 4625 - protein, 695 aa, Artificial; identical to SEQ ID NO: 4589
  Synthetic

SEQ ID NO: 4626 - protein, 695 aa, Artificial; identical to SEQ ID NO: 4589
  Synthetic

SEQ ID NO: 4627 - protein, 386 aa, Artificial
  Synthetic
MAFWGREQDKLPNIFGQLNLLQQHPFLNGVELKDVGIYTFFRNYFEQKVSHLNSVLRKIETKTATIEDYYFINLKERTDIEERVNNLLYTQEEDVEPMIQLPGDFFYQQLLKHIEQHLPEFYTILTANEGNPARLNYVIEQYFKHHHKDEPQTLYNKKRSYHTYNQWLDKRTKKTMRNALEKEFLSVDDRTKDYQKIKEALKDKAAEATVKRGVVEKTKNIWWKGLKNINQNESRLRNIKAEDVLLYLAAMKIFKAELPELKLATEVKLKNLSAADESSLLEKQIPFELPYAFIDENETAQTIWITDTMKMKDYGKFRRFLKDRRLPNLMDMMNQFRNKFSHNQYPPKSVCGFAVDKHKDDKIAAQLAKAAIEIYENTVKKMNTST

SEQ ID NO: 4628 - protein, 803 aa, Artificial
  Synthetic
MNAIELKKEEAAFYFNQARLNISGLDEIIEKQLPHIGSNRENAKKTVDMILDNPEVLKKMENYVFNSRDIAKNARGELEALLLKLVELRNFYSHYVHKDDVKTLSYGEKPLLDKYYEIAIEATGSKDVRLEIIDDKNKLTDAGVLFLLCMFLKKSEANKLISSIRGFKRNDKEGQPRRNLFTYYSVREGYKVVPDMQKHFLLFTLVNHLSNQDEYISNLRPNQEIGQGGFFHRIASKFLSDSGILHSMKFYTYRSKRLTEQRGELKPKKDHFTWIEPFQGNSYFSVQGQKGVIGEEQLKELCYVLLVAREDFRAVEGKVTQFLKKFQNANNVQQVEKDEVLEKEYFPANYFENRDVGRVKDKILNRLKKITESYKAKGREVKAYDKMKEVMEFINNCLPTDENLKLKDYRRYLKMVRFWGREKENIKREFDSKKWERFLPRELWQKRNLEDAYQLAKEKNTELFNKLKTTVERMNELEFEKYQQINDAKDLANLRQLARDFGVKWEEKDWQEYSGQIKKQITDRQKLTIMKQRITAALKKKQGIENLNLRITTDTNKSRKVVLNRIALPKGFVRKHILKTDIKISKQIRQSQCPIILSNNYMKLAKEFFEERNFDKMTQINGLFEKNVLIAFMIVYLMEQLNLRLGKNTELSNLKKTEVNFTITDKVTEKVQISQYPSLVFAINREYVDGISGYKLPPKKPKEPPYTFFEKIDAIEKERMEFIKQVLGFEEHLFEKNVIDKTRFTDTATHISFNEICDELIKKGWDENKIIKLKDARNAALHGKIPEDTSFDEAKVLINELKK

SEQ ID NO: 4629 - protein, 803 aa, Artificial; identical to SEQ ID NO: 4628
  Synthetic

SEQ ID NO: 4630 - protein, 564 aa, Artificial
  Synthetic
MNNIELKKEEAAFYFNQAELNLKAIEDNIFDRGRRKTLLDNPRILAKVENFIFNFKDVTKNARGEIDCLLSKLTELRNFYSHYVHNDNVKILSKGEKPILEKYYQIAIDATASANVRLEIVDNGNKLTDAGVLFLLCMFLKKSQANKLISGISGFKRNDPIGQPRRNLFTYFSVREGYKVVPDMYKHFLLFALVNHLYNQDDYIENIEKAQQPSDIGKGLFFHRMASAFLNISGILRNMKFYTYQSKRLKEQRGELKHEKDIFTWTETFQGNSYFSVNGQKGVIGEDELKELCYALLIGKQDVNEVEGRITQFLKKFKNADNVQKVEDDEMLDSENFPANYFAEPAADNIKDKILNRLKKAIESYKDAGADVKAYDKMKEVMTFINNSLPADEKLKRKDYRRYLKMVRFWGEEKGNIEREFETKEWSKYFSSNFWVAKNLERLYGLAKEKNAELFNKLKATVEKMDEWEFGKYQQINKAEDLAGLRRLAKDFGLKWEEKDWEEYSRQIKKQITDSQKLTVMKQRITAGLKKKHGIENLNLRITIDSNKSRKAVLNRIAIPRGFV

SEQ ID NO: 4631 - protein, 564 aa, Artificial
  Synthetic
MDRIKNRTQHLRAEDRATFLSKDLVYFQPHTTAKDGPNGDEFRKLQAATAFFERDKEYFIRMFHQCKLNDIGTCHPFFTEDDIRKCKTNNDLYERYLKKRHDHLVYCKKLNKKATDIPIELKFLKIKNTIADDKALQDLAKEVKKNAINLPRGLFKDATVKMIELYGNDAMKNAVATSKKNPKSETPDHNTANTVYLVQKYFEQMNDSYQPFYDYDRNYRTVDEWYDNRNDGAMTQIAHVPQTKKELTTLAGTIKDSERKFNDKATYNQYLRKKAEENKPTRHVSNHNNRNSSIKIIEVTPAQKLESIIDDRDFYKVYKDKVIENEKLIRHYRTGDQMLFLMCIEFIDDPTFDKHIKEILRKERDAGHFLLKEIKPKNKKSILNTPIPYELPLTVKSKEDGKEEEKRIKSVIKIKNYGGFRRFLKDRRLDSLLTYLPGNVIERDHLEWQLSNYENKRIDIFKTIYEFEKACGENVHYKKKIAELLIKPGRAAHKHLMTKTIEIIPTISSTLQERLNKIRNAFSHNQFPPFLFVKPILKGDDSFIEQIVKYTTAEYDSYIAIIKK

SEQ ID NO: 4632 - protein, 464 aa, Artificial
  Synthetic
MTYFNIHIRPNHFSAEESSQKLKKRHNALDTLLKIERVFKESLTCDLTTSPLISQQDLLDRAKQICDHYVGKQNKLPWILRMIFSKKKMVEATYERIVRLSTPPLPVSEEVASHALSFLDGSSLGEYSQVSHWANRQALEAQFSLVRRYGYEGNDINEAKKYIHNLRQEMHFLSKNEWKLAPDSIFSLKNLIIYEKRQLNFKQSWQNLMQISVNDVAKLYSKESCPELCRELLRINLSTPDQFTDQTSADFALMIAVRRQDAPAVQFFLSHGANPDFTFNKISMISLSINRKAPAITKLLLEAGADIRQMSVSRHSLFEQILRTPDNVELLKCLIDCGFDVNQPIRDGLTALHVAAELGNLQMVELLLEHGAILDATNSEGDTPLLLSIASPKIVELLLQSGANANHANAKGRTALHYAMIVTHPILADKLSQSAEILKKYGADPDLKDNDGLTPSEYSARALG

SEQ ID NO: 4633 - protein, 474 aa, Artificial
  Synthetic
MFFNMAVNNVHTVVQFLERKYALSLDDAPPPNDEAEDRHREEREEKILGSEKKKIKIPASPIIEVLRKGTDISLQANIIRDLIHYFPFLREVKNHREKPYAYEKNKETKKKPAKQLSPGEIAELFLFYAKLLYDQRNYYTHACSKPTPLDFTGKKLYDLERIIEYNRRTVNERFFKGKVPNSQAEIELLPLTPKINIQQIISQTKNQLNLVQQEICETRDQRNLREKCGQRLSTLLSLLDAQRNQNEQNELSALDDQCEQNKLSDNPVYLLGQKFFKDDNTDLSAMGRTFVIAQFLEAKYISQMIQQLVDAGELSIPECVNSDADNKLLITRAFSITHIVLPRTRLQTDNVLNPMSIGMDSLCELHKCPEALFDMISTENQGKFRFFDDKEGIENLFKRFGKDRFAYLALNYLDMSNRTREDASPDEKTTGKFERIRFHIDMGNFFFTKYEKENMIDGTKLKHRRLSKRIYCFK

SEQ ID NO: 4634 - protein, 869 aa, Artificial
  Synthetic
  misc_feature (868)..(869): Xaa can be any naturally occurring amino acid
MKKELNREDVFTGGKTPELTIYYNIAYFRMAGLINALCGNKLERDKDALEQFMKAFINGKQKLTDMQFVKLCDYLWKGYKYDKNRSEYSLTENDKTMVLKMVAKLQDIRNFQSHIWHDNKVLVFDADLVQFIKNKHLEAIDAQRQRFSKETEVYEKENRELKKKKNKELLFDIHDGLGYITGEGRNFFLSFFLTRGEMTRFLKQRKGCKRDDTPEYKIKHLVYRHFTHRDGATRTHYGYEDNMLDQLPDKQEFLTTRHTYRLINYLNDIPEEVTNPELFPLFNTISNGILIKESVGTYIAFINKMPLLSDFEFSEVWGKDGKPYTNLVEFYHKTQPGFKFRTDLNSFHKIILNLIRDENYTGFFTTQLNLFMAHREELILVISKPLITPNDLLLIEEHYRYKLKANDFVREKLGEWKEKIEKGKWEKANEQKDKLINLLGGVIEITFYDFYWQKDEKPRNENRFMEFAIRFMADFNLLPDCEWEVEPLQIENDLIANRTATPDLKKSGSQFMNQLTDNYRLKFNDGQIAFRYQNQVFIMGHKAVKNLLIACFDGKEKMLNGFMPALLADLKKITNEHILKNHQALNTLSLLNNDSIPSYISRQWGEAEPITDMKKKAIARMDYITQQFEALIENHHYLNRADKNRQIMRCYKFFEWQYPQNSQFKFLRRNEYHRMSIYHYCLDKEQHKYDKKGHNYLYNRLIKESHNESGNIEQHLPYQIRTMLNDAKDFNDYFLRILNATHKILTDWKNQLKQGREPNNYYLSRLGFTGGLTQKVVHTRLLPFSIHPGIPVSFFYRTEMNQNPSFNLSAKVWNSESPFRVGLKESNYQYAKYLGLFNEIKTQRKIIGKMNQLIAEDALLWQIAKKYXX

SEQ ID NO: 4635 - protein, 867 aa, Artificial
  Synthetic
MKKELNREDVFTGGKTPELTIYYNIAYFRMAGLINALCGNKLERDKDALEQFMKAFINGKQKLTDMQFVKLCDYLWKGYKYDKNRSEYSLTENDKTMVLKMVAKLQDIRNFQSHIWHDNKVLVFDADLVQFIKNKHLEAIDAQRQRFSKETEVYEKENRELKKKKNKELLFDIHDGLGYITGEGRNFFLSFFLTRGEMTRFLKQRKGCKRDDTPEYKIKHLVYRHFTHRDGATRTHYGYEDNMLDQLPDKQEFLTTRHTYRLINYLNDIPEEVTNPELFPLFNTISNGILIKESVGTYIAFINKMPLLSDFEFSEVWGKDGKPYTNLVEFYHKTQPGFKFRTDLNSFHKIILNLIRDENYTGFFTTQLNLFMAHREELILVISKPLITPNDLLLIEEHYRYKLKANDFVREKLGEWKEKIEKGKWEKANEQKDKLINLLGGVIEITFYDFYWQKDEKPRNENRFMEFAIRFMADFNLLPDCEWEVEPLQIENDLIANRTATPDLKKSGSQFMNQLTDNYRLKFNDGQIAFRYQNQVFIMGHKAVKNLLIACFDGKEKMLNGFMPALLADLKKITNEHILKNHQALNTLSLLNNDSIPSYISRQWGEAEPITDMKKKAIARMDYITQQFEALIENHHYLNRADKNRQIMRCYKFFEWQYPQNSQFKFLRRNEYHRMSIYHYCLDKEQHKYDKKGHNYLYNRLIKESHNESGNIEQHLPYQIRTMLNDAKDFNDYFLRILNATHKILTDWKNQLKQGREPNNYYLSRLGFTGGLTQKVVHTRLLPFSIHPGIPVSFFYRTEMNQNPSFNLSAKVWNSESPFRVGLKESNYQYAKYLGLFNEIKTQRKIIGKMNQLIAEDALLWQIAKKY

SEQ ID NO: 4636 - protein, 554 aa, Artificial
  Synthetic
MKKELNREDVFTGGKTPELTIYYNIAYFRMAGLINALCGNKLERDKDALEQFMKAFINGKQKLTDMQFVKLCDYLWKGYKYDKNRSEYSLTENDKTMVLKMVAKLQDIRNFQSHIWHDNKVLVFDADLVQFIKNKHLEAIDAQRQRFSKETEVYEKENRELKKKKNKELLFDIHDGLGYITGEGRNFFLSFFLTRGEMTRFLKQRKGCKRDDTPEYKIKHLVYRHFTHRDGATRTHYGYEDNMLDQLPDKQEFLTTRHTYRLINYLNDIPEEVTNPELFPLFNTISNGILIKESVGTYIAFINKMPLLSDFEFSEVWGKDGKPYTNLVEFYHKTQPGFKFRTDLNSFHKIILNLIRDENYTGFFTTQLNLFMAHREELILVISKPLITPNDLLLIEEHYRYKLKANDFVREKLGEWKEKIEKGKWEKANEQKDKLINLLGGVIEITFYDFYWQKDEKPRNENRFMEFAIRFMADFNLLPDCEWEVEPLQIENDLIANRTATPDLKKSGSQFMNQLTDNYRLKFNDGQIAFRYQNQVFIMGHKAVKNLLIACFDG

SEQ ID NO: 4637 - protein, 554 aa, Artificial; identical to SEQ ID NO: 4636
  Synthetic

SEQ ID NO: 4638 - protein, 781 aa, Artificial
  Synthetic
MYTKEQKERVPPTRKELYMGGKTKTADYAVFYNIAFNGILSKIHFKETGQTEFDEAKLSVMYGQKYLDVFETARPSNIKHDFKDETYLTLRDFLWKGYETDKNSSGHALTDEDKSITRALLVKLRVIRNYHSHIWHNNDGLKFDNSLQIFIKKKHDDAINSLYATHPAEVDAYKEESKQAHLFKDNYITTEGRVFFLSFFLTSGEMSSFLQQHRGSKRTDELKFRIKHIVYRYYTHRDGSTRQKFSQEDDVLSSFSPNDQQDVLMARQSFKLITYLNDVPDSANNIDLYPLFTDSGERKPAETAQELKAFCDQRELFTTIQITDVANKKGEIQTGVLNFSIPALGDTAVRLGRGTFHKLIIDTLRRHDNGKFVYDGLTWLITERLKLIEELQKLDTLQHLDETSGMAQRKFFEEYMLHKLNGNLYLQQLMRNWFYAFEKDLKKEGKLRDKLVQGCIQDPVAPGYYDFYFEEGEKPRNTDRFSEFAVKYLIDFNLAPDWEWMMESFGVADKHGKAISGKNKAFFSHFKSGTAWRLSVTDGCVIVRLKRLPDFRFQLGHRALKNLLIAHFYQKANIGTLLNKLTKDTQKIRNVLYNKTSHTLTDLALLERKNLPRFVLLTLGDAQTAAGETVENATVATLKRISNLIAKLRDWRTNHKTISRNEKNRIIMDCYQLFDWKYPDTGTYKFLRRDEYQNMSIYHYMLERVLNLREDITYFQQKIQDAEDYGKKKKYQMAIFDNNKQIERTETILSKLLKDVKNRIPEEVNQILENSESLDDLLKNA

SEQ ID NO: 4639 - protein, 464 aa, Artificial
  Synthetic
MDYPQRKAKPQQHFKGKSSKPNRFSPGTRTGRRPSSEYDFFTGGGTKITNTDKESTKTADFTIFYNIAFENVEKVKTQLQNKTQSQQNAFWAEYFWKAHFLSKNTNGYELTQQDDRIITQLIKKVEEIRNYHSHIWHDNSVLVFSDELKRFVEQKYNEALVQLSVDFPGAVSDYQFLKQKNYEKESKLFNPIGFGGDAKNFITIEGRIFFLSFFLTTGQMNQFLQQRTGYKRADMPQFKIKRLLYTFYCNRDGAAITDFNHEDRFIDTLAPEVRQNVFKARTAFKLISYLMDYPDYWGSNDAMPLFDNNNELIKNVEQLKDYIESKNILPELKFTLIDRKIKASLELEEDAETLKKEQEDKHSTGTIAFTYDELSGFSFHINFEALHRLVLLQTLHHNMVDLPAPLAILAIELKKQANNRTTLYDILIKPIAERTDDEQVYLLTKENQYLRGGRKVTELGIIFF

SEQ ID NO: 4640 - protein, 367 aa, Artificial
  Synthetic
MHPKKSGSAPTAYEAFTDFGDKTADLAIYYNIAVANLNEIRKAINASTANPDTQLARLAEYLWSAHKDAKNSRGYELTPDDKVIINELCKKVEDIRNFYSHQWHDPCVLECSGQLVSFINDRYKLAAAMVAKDDPAAVADYEALLGKREYKPYKLFNGSVLTVEGRIFFLSFFLSSGQLSQLMQQRRGFKRTDMPLFRAKRKIYLYYTLRDGATMAHFHQEQSVLSTLSAEDQKQVLKARTAYKLISYLNDYPDFWGNTEKMPLYLSKGKKIENIDNLYEYLQQHPELLPDFEFAPPDEEETGIRKHILFTHEGLPGYEFKMDFPMLYRLVVLMQLFNATVLQESPVDTLLQNLRTVIEAGRSYSTF

SEQ ID NO: 4641 - protein, 611 aa, Artificial
  Synthetic
  misc_feature (150)..(153): Xaa can be any naturally occurring amino acid
  misc_feature (278)..(369): Xaa can be any naturally occurring amino acid
  misc_feature (469)..(472): Xaa can be any naturally occurring amino acid
  misc_feature (540)..(543): Xaa can be any naturally occurring amino acid
LRPVPHRRPREIPQGRARKRGRLPEDRGGDVRRGRRPHDTYQGVRILAYAASRHTAHRNRPEPRFGDPGATGVAACRYRRGPARRHHRDRRRRRGSHRGRCAAQDRERLYAGAGNHPVVRDQAGCAADAHHELQHVRGLPHPSSLQHLHXXXXVLPEAKKRELEAVNIDEETVIKKRHSDRFVPLLLRFIDANELFPSIRFQVNSGYLRFLHHEKAAYMDGVERPRILQDAVNGFGRIQEVERKRSASDTYLGFPLYAPSPDDDVTMPLPCITESASXXXXXXXXXXXXXXXXXXXXXXXXXXXXXXXXXXXXXXXXXXXXXXXXXXXXXXXXXXXXXXXXXXXXXXXXXXXXXXXXXXXXXXXXXXXXKHDRPRVRQHRRLLCAIEGLRQAGDRPELGVRTGAGRRGIGRAGTCGRFRRTIGGRESRPVAPETEGQVPEHVEEGHRRRARTGRRGEEALGREHRPGDXXXXRPSTTSRASTSTCSTSPLPARLSSGAWNRRSSWPTVAPTPTSTTCRSRGSIPGWSRRTSPSRSSSIPXXXXKVDMGTYPYPETTYAKVYVVRESNISAYDFVSTGRLVDVGRSKSNPHGFMIERFQVVKNERTETRRRN

SEQ ID NO: 4642 - protein, 387 aa, Artificial
  Synthetic
MAVYLAKSIVNLIKNNELKPTGKNYNVMQANLAVYESFDKVKQMFIRSKMVDSHPFLKNVLQRSPQRAIDFYKFYLSEEKAFFSNINNCTYLKFYKNRISKYDDKGAAYYKNLAEHYLKNGFVELTNHIFADEIRAKLSGKMADIDANDQKYNISFLISRYYKESQPFYFFNCVFNNEIDDPKTKKHIEKAITRYRIQDKILFAMAKTLLKTQDDVSKAQISDIAEMTLSNIMPGDNIFDKPMQNFSVKVTLDGKQLTINADNIKVKNYSTIFKTIFDRRLDTLAKLITTPQVSLTDITAELELYDREALKINKLVYDTDDAHRAIPLVKVIRNSFAHWSYPHKDSLRNKHGVISDAYVTNLHNKLVNKNLGEKVGLIKPELEMALM

SEQ ID NO: 4643 - protein, 430 aa, Artificial
  Synthetic
LDKVLPEAYSVCCPRNTIEFYERYLEEYQRYLKPLVIKLEKGKVPSLSFVNEGQRRWAKRDDAYYHELGNLYLSQAIELPRQMFDDEIKDKLREMPEMRDVDFDHANVTFLIGEYLKRVRHDESQEFYSWPRHYKYVDMLKCILNSKNGSLQAVYTQMGEREGLWQERSELEEKYAKIRLRDLGRKGLDKDEANERIKTGLGNRKKEYQKAEKVIRRYKVQDALLFMLAKNTLFNSVEVDDERFKLKDIMPDGEKDILSEVVPMDFCFRSGNSATRKLMGTIHSDNTKIKNYGDFFALANDKRMVTLLPLVGEQCLVKEEVEEEFDKYDDCRPEMISMVFDFEQWAYSAYPELKELVSNEAIKGRLFSNLLQELLGRGELTYEEKYALVGIRNAFLHNSYPKDGGVVKVRTLPDIAKSLKDVFKEYIRLE

SEQ ID NO: 4644 - protein, 507 aa, Artificial
  Synthetic
  misc_feature (5)..(10): Xaa can be any naturally occurring amino acid
  misc_feature (465)..(472): Xaa can be any naturally occurring amino acid
MKKRXXXXXXSRMISGEASYPVRFSLFAPRYAIYDNKIGYCHTSDPVYPKSKTGEKRALSNPQSMGFISVHDLRKLLLMELLCEGSFSRMQSDFLRKANRILDETAEGKLQFSALFPEMRHRFIPPQNPKSKDRREKAETTLEKYKQEIKGRKDKLNSQLLSAFDMDQRQLPSRLLDEWMNIRPASHSVKLRTYVKQLNEDCRLRLRKFRKDGDGKARAIPLVGEMATFLSQDIVRMIISEETKKLITSAYYNEMQRSLAQYAGEENRRQFRAIVAELRLLDPSSGHPFLSATMETAHRYTEGFYKCYLEKKREWLAKIFYRPEQDENTKRRISVFFVPDGEARKLLPLLIRRRMKEQNDLQDWIRNKQAHPIDLPSHLFDSKVMELLKVKDGKKKWNEAFKDWWSTKYPDGMQPFYGLRRELNIHGKSVSYIPSDGKKFADCYTHLMEKTVRDKKRELRTAGKXXXXXXXXLSLLTWLPTSSGAFTELSMNVNLCSASCKKTIGLC

SEQ ID NO: 4645 - protein, 828 aa, Artificial
  Synthetic
  misc_feature (8)..(93): Xaa can be any naturally occurring amino acid
  misc_feature (412)..(447): Xaa can be any naturally occurring amino acid
LPRLLSSXXXXXXXXXXXXXXXXXXXXXXXXXXXXXXXXXXXXXXXXXXXXXXXXXXXXXXXXXXXXXXXXXXXXXXXXXXXXXXXXXXXXXXLFYQHLRKEDNLSGGDFPSAEDIIIKQYDNLVRFFKEVKDIQPNNDEPELAKILSTFGLSKQSVPKKIYDYLSGKATAISKDFNKSAGIELNRRLNKAKGKLREFLADKDKIESADNKYGKDSFASIRYAQLADYLAESIMDWMTLKLTGLNYRVLASSLAAFGTRQTDDDIMQLLADAHIYKDAVTDHPFIAWTLGDDDNPVTDIETFYESYLKREIKQIEKYISVTTDPKTNKDVITLKKNPEDIPFLHRQRRRWQENTIAEQAERYLFIAEEGKEKPSRATLLLPDGLFTPYIIKVFELKHPELIMQLESLTDKQXXXXXXXXXXXXXXXXXXXXXXXXXXXXXXXXXXXXLIMQLESLTDKQKIGITNNAAYLINLYFESKGEMSQPFYDSTEPSYYNDSIRKVAPYKFSRSYDFFNTLKGWQIHLPVDKIKKQLLQKDTLINNQVNQLSVKGNFDSLEDAKDSLKRRLLRDLRDMQDNERAIRRHKTQDRILFLMAKDIMGDTVSQNGDLFKLENVCKEEFLNQKVPVKHTVRSGDKQMVIQKEEMPIKDYGKIYRLLSDNRMVALLSYTLFANGDTINYDHLSEELKQYDLHRSSALKSAQVLENKRFEQSREVLTDPERDEFYQGNRRYKNRARTKENEAKRNNFSTLLKDLQKLTPEQMEMFSKEDRQLIIAVRNAFCHNSYPSWDVVNKLLIQSQSERPDLELELTQIANFLITKLSGYVKQAENN

SEQ ID NO: 4646 - protein, 545 aa, Artificial
  Synthetic
  misc_feature (12)..(81): Xaa can be any naturally occurring amino acid
  misc_feature (371)..(456): Xaa can be any naturally occurring amino acid
VILFTYTKRKLXXXXXXXXXXXXXXXXXXXXXXXXXXXXXXXXXXXXXXXXXXXXXXXXXXXXXXXXXXXXXXXXXXXXXXFGSCKVLLPDPEVDSNKSKLGLSDFGMLYFCALFLSKEQLVQFCTEAKVFVNSPFNNDNNKKNNIILNMMYVYQTHIPRGKRLDSERDSQALAMDMLNELRRCPIELYNVLPAIGKREFEDNVIHQNSRTPELSKRIRTKDRFPHLALRYIDSQHLFEKIRFQVRLGSYRFCFYDKVCIDGKTHPRQLHKEINGFGRWQDMEKERKEQYGPLFQKTREESIWQKDENAYVNLRQLEPIKAGDPPHITDTITQYNIHKNRIGLYWNTSGETYLKDKASEQGETICQGYYLXXXXXXXXXXXXXXXXXXXXXXXXXXXXXXXXXXXXXXXXXXXXXXXXXXXXXXXXXXXXXXXXXXXXXXXXXXXXXXXXXXXXXXCCSTSTFVRKTILVEVISLLLKTLLSNNMITLSDSLRRLRTSSPTTMSRSWQRYSALLVSANKAYPRKFTIICQGRRQPFQRISISLQE

SEQ ID NO: 4647 - protein, 838 aa, Artificial
  Synthetic
  misc_feature (773)..(819): Xaa can be any naturally occurring amino acid
VIAPDLTPTEETCDGLSAFGMLYFCSLFLSKEQTAQLCTESRVFVTSPYQPAGNLKNNIILNMMFVYAIHIPRGKRLDCENDTQALAMDMLNELRRCPRELYNVLPAIGKRDFEDNVIHENNRTPELSKRIRSKDRFPYLALRYIDQKGLFEKIRFQVRLGSFRFCFYDKICIDGKSHPRQLHKEINGFGRLQDIEKERKEQYGPLFQLSREQSVWQKDENAYVNLKQLEPIKAGDQPHITDTFAQYNIHQNRIGLFWNTDEESKLVNKTNSQGEIICDGYYLPPLNSVDSPTEHKRKALVEMPAPLCSLSVYELPAMLFYNYLRSIDGLKGEVFPTVEEIIIKQYDNLRNFFKEVTNIQPTDNIENLTAILNAYGLSKHSVPKKIFDYLSNKNTSINKDIWKSAEIEVKDRLRRAIIRKQCFEKDQERIENTKDNKFGKDSFACIRYARIAEELTKSMMEWQSENSKMTGLNFRVLTASLAKFGDGVIKKDTIISMLRNAKIMGGDHPHCFIEQAVELEQDDIEDFYLDYVSAEIQYLTRFLTIDDQAIELEEKQLLDALRKDKEARDDARIHLKNDVDFDELPFIHKSRLRWQQSKIAELANRYLYVKEEGKETPGRATLLLPDGMFYPYIMKVFEQCHSELMNNINALSDEQKKGISNNAAYLINLYFESKGEKSQPFYDSTEPSYYNDNIRQLAPFKYARSYEFFKIIKGWQIHLSCAEIRNKLTGYKTLINNKVNGLTEKGNYISLEEAKNALRRRLHNTFYDMQDNXXXXXXXXXXXXXXXXXXXXXXXXXXXXXXXXXXXXXXXXXXXXXXXVPFVVIRRKIALFSSWRKI

SEQ ID NO: 4648 - protein, 332 aa, Artificial
  Synthetic
  misc_feature (5)..(5): Xaa can be any naturally occurring amino acid
  misc_feature (255)..(323): Xaa can be any naturally occurring amino acid
MHSVXIRNNENSEEAISLLLDIVKRCYDERWNVEKDALTGLNDHQKKNKEDEFYAQCSDEGATGEKVHLLTAFTLRSEQEERLRKLLFRHIPFLAPIMADLVAGEFRKKQKNENKEVNSIMHDSSLTDCLKALGQIALCLNYSRNFYTHANPYNSESDQEQQFDIQKTIACYLDKAFVASRRIAKKRNGYSEKDLKFLTDKAPANEDSEKYRMEEVFVLDENNQKIKKVEKDDNGKIKLDKKGDPIYIYKKKVIXXXXXXXXXXXXXXXXXXXXXXXXXXXXXXXXXXXXXXXXXXXXXXXXXXXXXXXXXXXXXXXXXXXXXVWQLQSITS

SEQ ID NO: 4649 - protein, 498 aa, Artificial
  Synthetic
MANFHFKDRHVFGTYLNMAHTNFYRTILYVFSASGIDCYTLKGDLYVTERNVSKVIDAFCRIRNNENSEEAISLLLDIVKRCYDERWNVEKDALTGLNDHQKKNKEDEFYAQCSDEGATGEKAHLLTAFTLRSEQEERLRKLLFRHIPFLAPIMADLVAGEFRKKQKNENNEVNSIMHDSSLTDCLKALGQIALCLNYSRNFYTHANPYNSESDQEQQFDIQKTVACYLDKAFVASRRIAKKRNGYSEKDLKFLTDKAPANEDSEKYRMEEVFVLDENNQKIKKVEKDDNGKIKLDKKGDPIYIYKKKVIKDDKGNPILNEKGKKQYEIVRDDKGNPIHEYETKFVERKQWYFRLFGSCKVLLPDPEVDSNKSKLGLSDFGMLYFCALFLSKEQLVQFCTEAKVFVNSPFNNDNNKKNNIILNMMYVYQTHIPRGKRLDSERDSQALAMDMLNELRRCPIELYNVLPAIGKREFEDNVIHPNSRTPELSKRIRTKDRF

SEQ ID NO: 4650 - protein, 367 aa, Artificial
  Synthetic
  misc_feature (339)..(366): Xaa can be any naturally occurring amino acid
MANYQAPPRHIFGTYLNIARANFYNTILYVFSSSGIDCYTKRGDLFVREDTVDKIIGAFSQIISGENEEMAYHTIKDIVSKSYDKRWKEDNTLRGNLVNSELNAKRAEFKSPLNDEGPDGEDARIRRSFTLGSEQEERLRKLLFRHIPLLTPIMADVIAMQFKETTNEHQEANRTLHDATLADCLKELSNIARCLTDSRNFYTHKNPYDSIEAQRTKFKLQQIIASNLDKAFIGSRRIAKKRNDYSEKDLTFLTGHDDNCRMEEVFVLDENGEKIWKVEKDKNGKDKLDKNKNSIYVYKKVKVKDKNGRNKLDEKGKPIYETLLENGEPVHEYETKFVXXXXXXXXXXXXXXXXXXXXXXXXXXXXG

SEQ ID NO: 4651 - protein, 544 aa, Artificial
  Synthetic
LTAESIIKNKYNALNVFFEFVTSGADLNSIKKKQIDLGLADNELPDKIRCFIGTKKLFNIDGKPLLDKNTREQLLKEWRPEAELRRHTINRLKAIIEEDTYRIESLGKKREKIEVGGRNNRYGRKGRADIRPGAIARYITKSLMLWQPAMPVAGGGKLTSANHQALAKYLEEYGSNDESLNNLHSIFQRAGLIGGTHPHPFINKVLKQKPMSILQLYTFYLEVEKAYAERMLAEVKTNTDDITLPPFAHPNGLRWSTTLTEAAKRYTTVPNEQNDASTDSHRAVMSLPDGLFTSHIISLLRQALPHNSELEPMRKILEGNNNMLGAAYIIRFWFDQVEGDAPQAFYNNDGDQYRRFYKTLSLLNPHRMKNRQLIPDYFSESEIKELLQIMKKKNRDQLRSAVMKAYGLKENKAEDIKQRQNAFLEMLHDVSDSEQALHRYRIQDICLFLSGRSFLVDILTKSMGGNIEKKTLEKAKEMHLRDFGFDNEFEFLDNAKIPYVFKIGNMTISMPAMSFKNYGTIFRLLGDERLKQLLEGLSAMNIYE

SEQ ID NO: 4652 - protein, 411 aa, Artificial
  Synthetic
MLEAMNNSVSTTISKLFNKGVKQQRIWTFFNKRLYTIDTFDNLKAKILAKPLVFDRGVFDDKPTFIKNKQYKDCPESFADWYQYTQNYTDYQAFYDYDRDYGELYELEKKNGGLTDKEKFIIRLKRDRKIKQTQIQDLFLKLIAEDLGKKVFNLSAEKSVISLSDIFTSRTERINQQVDAISQSQREKGDHSENKIKESYIWSKTFAYKQGQINEPEVKLKDFGKFRQLVEDARVKTIFSYNPSKEWTKKEIEEELQQYELIRREYVFKEIQDFEAYLWEQENTKGHPNNFEREGVPNFRKYIVEGVLGNLLRKHEPLIQESDKEWLKEVEINENNIASLSKQKTFVQKAFFLILLRNKFAHNQLIHVEYWNLLQNRYKPYSEDSFTSVADYLLQVTKNVISDLKKELEKT

SEQ ID NO: 4653 - protein, 737 aa, Artificial
  Synthetic
MTAQRMIKEKINLFGNLSEVTKHKSDFFEKESAAQGWEFFPNPSYNWAGNNIPVYIDMIGKEGKAKEIQVQINKYRKQLNPAPQRDKRISKKEIIEQLYKEKVVYGDPTLMLSANELMALLYELIVNGKSGAELENKIVEQIIARYEQIEAYDPTTQQLPTNQMPHKLQKSRKDSKVTDTDKLLKTIDKEIDEGNKKLELIACHRKEWEEAEQRKKSGKRNNPGTKSRKHLFYASEMGEEATWIANDLKRFMPKPARAEWKGTHHSELQRLLAFYSTQRLEAWQLVESVWTANTHSFWEENFKEAFYKPEFENFYGAYIEIRTKILTTCRSILENNPEATMNNDTEKEWDKVFTLFDKRLYRTSTTDEQKKQLLTKPFAFPRGLFDDKPTFLPGSKPNENPERFAAWYSYGYTYSGKFQSFYDMPRNYSDWYKKLKEDGKLPRLDKKTEQEKILRFRMDCDLNIKHIRFQDIYVKLMVDSLYKAVFGQQPEFDLSHLYDTRSERYENNTIAQRQKSRQEGDNSDNAINENYVWNKTFAISLYNGRITESQVKLKDVGKFRRFATDPRVQTLISYDDTRTWTKLEIENELDNKADAYEPIRRTQSLKAIQQLEKNILKKNGFNGKQHPEELKHNGNPNFRKYIANGLLKHRTDIRQEELALISDTEFQEIGLERIRQTNPLIQKAYLLILLRNKFGHNQLPDQEHFRLMRSIYPYNQQESYSAYFNHVITQIIEELNT

SEQ ID NO: 4654 - protein, 320 aa, Artificial
  Synthetic
MNRIGIKLNYNGHNRWSVPDKEINVKPDAIISTYEFLNLFLYEHLYQKKLTGLSPAEFIQDYLDRFNNFLSEFKAGHIRPVGDFSLEKRRGQGDEPDLTARRKSLQKELDRFVLKGKDLPDKIREYLLGYKQKSEKKQAKWILGGMIKETVYWRNKAEQSPEKMRSGDMAQQLARDIIFLTPPHTVKEHKQKLNSLEYDVLQYALAYFSSNREKLYSFFKEHQLTVKGDRAHPFLYKIRLDECQGILDFFIVYMQQKEKWLGWLDRNLKSPRLNEEEFFNTYSYFIKTDTKRAIEMDYESCPNYLPRGIFNEPIAKALQK

SEQ ID NO: 4655 - protein, 840 aa, Artificial
  Synthetic
MAVDYSLKQPFYQGVHKSCFTVPLNIAADNCKQKGYRNLLKEAQRSKGGLSDQSIQEAADLIEKRLSAIRNYFSHTYHTDSVLTFQKEDPVKKFLETAWSYAVSETQKDIAESDYTGIVPPLFEDKEGQFQITAAGVIFLMSFFCHRSVLNRMFGSVKGLKRSDREQMGTGEKRDYQFTRKLLSFYSLRDSYAVKAEATRPFREILSYLSCVPHESLVWLSARGKLTEKEKKAFRHFLDPTVPKEALSEESAGDGSDSERPGVRKNNKFLLFAVQFIEAWSRKEKKGLEFARYRKSRVEAPGENQDGSEKRIVRFRSEIRDTQEDWPYYLRNNHALLRLHPGENKEPVDARIGEYELLYLVLAIFDGKGAKAIQKLANYIFEAKKQIQNARVYDRYQDLLPSFLTAGNKPVSAETIRNRLAYIRGELEKMLEAVQKEKKSGRWEMHKGKKIGHILRFLSNSIDDIRRRPNVKEYNRLRDLLQQLQWDEFDKALQSYVNEKLLDETVYRQLRGFHSLDELFERCCRLELKRLEDMEKAGGDRLNRYIGLEPKGKPKNYADLNTLQKKGERFLKGHQLSIPRYFLRNALYKEYQATEERKPTSLYQIVRERLPRTNPILPDRYYLLEEDPKTYSGSDSKIIREMCFTYIEDLLCMRMARWHYEQLSEKLRKKLQWKEVQTGPAGYERFRLIYKISDELSIEFHPSDLTRLDVIEKDDMLTNISQHFLTKKGTVRWTEFVSQGMKHYRDRQKQGIEALFKWEESLRIPEGLWKEEGYLGFEKVLEEAVKHGKIQDKDKEALKRIRNDFFHEHFCGTPADWEVFKRVLKRFLNQGKNEKKRFKK

SEQ ID NO: 4656 - protein, 840 aa, Artificial; identical to SEQ ID NO: 4655
  Synthetic

SEQ ID NO: 4657 - protein, 840 aa, Artificial; identical to SEQ ID NO: 4655
  Synthetic

SEQ ID NO: 4658 - protein, 866 aa, Artificial
  Synthetic
MAVDYSLKNEWYREINKSCFTVALNVAYDNCKAKGHENLLREAQRSKGGITNEQIKNVQTEIKTRLEDIRSHFSHFYHDEKSLIFEKDNIVKDFLESAYEKAQSSVIGSTRQSDYKGVVPPLFEPHDGMITAAGVVFLASFFCHRSNVYRMLGAVKGFKHTGKEELSDGAKRDYGFTRRLMAHYSLRDSYVIKAEETKSFRDLLGYLSRVPQQAVDWLNEHNQLSEDEKKEFLNQKPSDEESQEQSKTENTDRQADRMPRRSLRKTDKFILFAAKFIEDWAQKEKMDVTFARYQKTVTEDENKNQDGKQVRDVQLKYEKDTKKLNPDFDYKWTYYIRNNHAIIQIKPDEYKQAVSARISENELKYLVLLIFQGKGWEAIKKIGDYIFHIGNKIKIGRFDHNEERRMPSFLKNPPADIIGEMVENRLKYIRDELNKVIETIKKEEPQNNKWLLYKGKKISIILKFISDSISDIKKRPDVNEYNTLRDMLQKLDFDNFYERLKSYVSEGRIEQTLYDEIKGIKDISTLCIKICELRLAALEELEKEGGDDLNKYIGLAVQEKHKNYDDSNTPQKKAERFLESQFSVGKNFLRETFYDEYIKNRKSLYEIIKEKITGITPLNENRWYLMDKNPKEFESKDSKIIRGLCNIYIQDILCMKIALWYYENLSPSYKNKLKWDFIGQGFGYDRYKLSYKTDCGITIEFKLADLNRLDIIEKPKMIENICHSFILEKDVKKQTISWHEFRQDGIAKYRKLQKEVVEAVFEFENSLKIPDKNWLTQGYVPFNKNKRFEDKGFSTFILEEAVRKGKIKSDDKEPLRKVRTDFFHEQFDSTDAERRIFDKYMPAKHDGKNKGGKMQEKQEKSYTRRI

SEQ ID NO: 4659 - protein, 866 aa, Artificial; identical to SEQ ID NO: 4658
  Synthetic

SEQ ID NO: 4660 - protein, 866 aa, Artificial; identical to SEQ ID NO: 4658
  Synthetic

SEQ ID NO: 4661 - protein, 482 aa, Artificial
  Synthetic
MAVDYSLKNEWYREINKSCFTVALNVAYDNCKAKGHENLLREAQRSKGGITNEQIKNVQTEIKTRLEDIRSHFSHFYHDEKSLIFEKDNIVKDFLESAYEKAQSSVIGSTRQSDYKGVVPPLFEPHDGMITAAGVVFLASFFCHRSNVYRMLGAVKGFKHTGKEELSDGAKRDYGFTRRLMAHYSLRDSYVIKAEETKSFRDLLGYLSRVPQQAVDWLNEHNQLSEDEKKEFLNQKPSDEESQEQSKTENTDRQADRMPRRSLRKTDKFILFAAKFIEDWAQKEKMDVTFARYQKTVTEDENKNQDGKQVRDVQLKYEKDTKKLNPDFDYKWTYYIRNNHAIIQIKPDEYKQAVSARISENELKYLVLLIFQGKGWEAIKKIGDYIFHIGNKIKIGRFDHNEERRMPSFLKNPPADIIGEMVENRLKYIRDELNKVIETIKKEEPQNNKWLLYKGKKISIILKFISDSISDIKKRPDVNEYN

SEQ ID NO: 4662 - protein, 743 aa, Artificial
  Synthetic
MAVNYSLNNKYYKDVEKSCFTVALNIAHDNCMVKGHENLLREAQRSKGGITDEMILNVQNQIESFLKNMRNYFSHYYHSDKCLIFEKDDPVKVFLESVYETTKSSVIGGTRQSDYKGVIPPIFEPHNGNYMITAAGVIFLASFFCHRSNVYRMLGAVKGFKHTGKEELSDGQKRDYGFTRKLLAHYSLRDSYSIKAEETKSFREVLGYLSLVPQKAVDWLNERNELSKDEKEEFLKQQTCEKKEDPQEQSKSENEDKRTDKIPKRSLCKTNKFILFAIKFIEELAQKEKLDVSFARYQKKVTEAENKNQDGKQARVVQLKYKRERGKQIKNPDFDRQWTYYIREEHAIIQIKPKDKQTVSARISENELKYLVLLIFEDKGREAFHELADYIFRISKSIMHNNYKPEDARRIPSFLKKSSQTVTNKMIQNRLKYIRYDLEKVKKTIDKEDPQNDKWLIYKGTKISIILKFISGSIADISKRPNVKEYDFLRDVLQKLDFKSFYERLKNYVSDGRIERKLYEKIKGIEDISELCKKVCELTLERLKSLEEKGGSELNRYIGLEAQEKHKEYEDWNKPQKKAGRFLDSQFSIGKNFLRETFYDEYIRDRKSLYEIIKEKLKDILPLNEYRWYLMDRDPREYERKEGKLIRQICNTFIQDVLCMKMALWYYENLSPSYKDKLKWDSSGQGFGYDRYKLSYRTNCGVTIEFKLADLTRLDIIEKPTMIENICRSFIVKKKDSNDKIIS

SEQ ID NO: 4663 - protein, 873 aa, Artificial
  Synthetic
MGIDYSLTSDCYRGINKSCFAVALNIAYDNCDHKGCRTLLSEVLRSKGGISDEQIKSQVVDGIQKRLKDIRNYFSHYYHAEDCLRFGDQDAVKVFLEEIYKNAESKTVGATKESDYKGVVPPLFELHNGTYMITAAGVIFLASFFCHRSNVYRMLGAVKGFKHTGKEQLSDGQKRDYGFTRRLLAYYALRDSYSVGAEDKTRCFREILSYLSRVPQLAVDWLNEQQLLTPEEKEAFLNQPAEDEGGDISDSSSSDKNKKSKEKRRSLRRDEKFILFAIQFIEGWAAEQGLDVTFARYQKTVEKAENKNQDGKQARAVQLKYRNQGLNPDFNNEWMYYIQNEHAIIQIKLNNKKAVAARISENELKYLVLLIFEEKGNDAVQKLNCYIYSMSQKIEGEWKHRPEDERWMPSFTKRADRTVTPEAVQSRLSYIRKQLQETIEKIGQEEPRNNKWLIYKGKKISMILKFISDSIRDIQRRPNVKQYHILRDALQRLDFDGFYKELQNYVNDGRIAVSLYDQIKGVNDISGLCKKVCELTLERLAGLEAKNGSELRRYIGLEAQEKHPKYGEWNTLQEKAKRFLESQFSIGKNFLRKMFYGDCCQKRCFDEEKGYNTQAKERKSLYSIVKEKLKDIKPIHDDRWYLIDRNPKNYDNKHSRIIRQMCNTYIQDVLCMKMAMWHYEKLISATEFRNKLEWNCIGQGNMGYERYSLWYKTGCGVVIQFTPADFLRLDIIEKPAMIENICQCFVLGNKKLNSGAEKKITWDKFNKDGIAKYRKRQAEAVRAIFAFEEGLKIQEDKWSHERYFPFCNILDEAVKQGKIKDTGKDKEALNRGRNDFFHEEFKSTEDQQAIFQKYFPIVERKDDTKKRRDKKQK

SEQ ID NO: 4664 - protein, 873 aa, Artificial; identical to SEQ ID NO: 4663
  Synthetic

SEQ ID NO: 4665 - protein, 856 aa, Artificial
  Synthetic
MDNKKKGNNYSIENYKEDRFLFTAALNIAYDNCKQKGCLNILAECQHSKGGISDEQIKNVKDGIESRLRDIRNYFSHYYHNENCLMFEKDDPIKVFMEATFDKAVSNLSGSTKESDYKGIEPEQLRLFEEYDKKYRITMPGVVFLASFFCHRSNVNRMMGAIKGLKRADRAEMDDGTKRDYNFTRRLLSYYSLRDSYAVKNEETRPFREILGYLSLVPHEAVDWLDSRGELSNEEKKEFLKEAKNQESKEDNDSTDEKTRRGLRKGNKFMRFAIMFTEDWSKKENLEVTFARYEKQEVHLENKKQDGKKERNIKFPHEISASDDDWPYYIRNNHAIIRIKLKDKDAVSARISENELKYLVLLIFENKGKEAIQKLGDYIFDMSQKIRYDNYEPKDARRIPSFLKITRKEPTYEEVNNRLTHIRRELGKIIETIEKELKESKWLIYKGKKITIILKFLSSSIADIKKRFNVEQHDALRDMLQKLKFDEFYKRLSSYVGDGTLDKKTYESIQGIKDISQLCKKACELRLARLDELEKNGGSVLYRYIGLEAEEKNKEYEKLNTNQAKAERFLESQFSTGKDFLRESFYEQEREQKKSLIKIVKEQFANVVPMNEERWYLMNKNPKKFKDKDNKAIKALCNTYVQDILCMKIARWYYEGLSHAYKDKIEWDSTVETGGCGYTRFRLNYKTDCGVVIEFKPSDFTRLDIIEKPKMVENICRSFITSNNDKKRTISWYDFNKEGVTKYRKQQVKAIERIFAFEKGLKIQDEKWQVQGYVPFIKRPEYENKGFKTFILEDAIQQSKIAEADKETLNKVRKDYFHEQFFSSDEDRKVFEKCMPVVDDKKKFGKKNNRMYGKKG

SEQ ID NO: 4666 - protein, 871 aa, Artificial
  Synthetic
MEKYLIKNFEGINKSKFTVALNIANDNCKNKGIQELLKEAQRSKGGITDTQITEVQEHIKERLNSVRNYFSHCYHEKKPLYFEANDPVKIFLEETFAKAVENLQGRFLSDKYKLTVPPLFEPNQNNTITAAGVIFLASFFCHRSYVYRMLGGIPGFKRSDKKKWGDGQKIDYGFTRKLMSFYSLRDSYSVNVQENKELTAFRDILGYLARVPGQAIDWLIEKGKLTKEEGKQFYLGEQSEEREEKAKKEEIKYALRKTDKFMLFAVRFIEDWAEQERIKVEFARYEKMTIVNENKKQDEKEERKVKFVSDEPTAAGWTYYIRNNHAIIKIIPDDKKKKAVSARISENELKYLVLTIIDGNGKNAIAYIGDYIFRTARQIENKSYNAESEKYAPAFVRGGQKKSVDKRIKYIRDEIQQVINDIEAEQEKQKNEQDAPAENRTWLIYKGKKISIILRYVNDNIAEYKKRLSVTEYNELRGYLQQLDFINFHRKLAEYQHHGRLPNGFAESINKFQDLSKLCIEVCERQKKKLQEMAAKGGIELEQYIGLAPKEENQEQNKYATKANNFIKVWLSIPENFLRQKFYDKFCKQQECKNKGSDKPDNTSVPQRKYFIAIIREKNIRPIHADKYYLLGQNPKDYERPDGKIIRQLCDVYCKDGLCMAMAKWYYENRLGKFKDLIEWQTGDDKQQHGYAGHTLEYQATEKIKIRFKLADFTRLDIIEPPERVKNICRQWETELLKKTRDGTISWYDFKLNGLEPYRQWQGYAVADIFWFEESLKINETQWQGRTHMPFNFEKDKPLWCNILDEAVKQNKIEKQDTQALRRVRHDCFHEEFLANYEQLKIFKNLISDKAKDAKPKDKKSRKNEQKYGKR

SEQ ID NO: 4667 - protein, 841 aa, Artificial
  Synthetic
MPVNYSLDQDYYKGTHKSCFTVPLNIAWDNGSKKGCENLLKEAMRTRGGFTQEDIEKVHRSLAEKLNGIRDYFSHYYHEDKPLEFKKGDDDAVKDFLEKTFSYAAGETQKRVKESGYQGIIPPIFELCGDQVRITAAGVIFLASFFVPRSTLERMFGAVQGFKRSDRGDLDTGQKRDYYFTRSLLSFYTLRDSYYLQADETRPFREILSYLSCVPFDSVQWLQAHGKLSKSEEKEFFGRPVEEQDEENPAQTEKQTAPAGRRMRKKNKFILFAVRFIEAWARNEKLSVEFGRYRNIQNEEDRRKQSGKKVREVFFPSALNNLSAEEQDLEGLLYIRNNHALIRIHLKAKTPVTVRISEHELMYLVLAILSGKGGNAVQKLSKYVWDVRMRSRGPLTNMPRNFPAFLRSPASEVSEQAVQNRLNYIRKTLKEIQANLQKEAQTGQWILDKGQKIRHILRFISDSMPDFRRRPSVKEYNELRELLQTLAFDDFYRKLASFQTERKLDAAVWNNLAQCKSINELCERCCQLQQQRLDELEKQGGDELKRYIGLLPKEKGKHYEEQNTPARKFERFIENQLSVPKYFLRCKLFVTGGSRRTNLLKLVQEHLKPKTSVFHEERLYLREEQPGDYPWSDRKIIQKMYYLYVQDLLCMQMAQWHYEHLTPQVKGKIDWEINSESKESDGYNRFKVEYKGPQGCRIIFRVQDFGRLDFLNKAPMLDNICQWFLSGRKEITWPEFLRDGLQRYRQRQILVVRALFRFEENLKIPEEEWKGKSHLSFDEVLERFSGKNRLSEEEKESIRRVRNDFFHEEFEATPSQWRDFERRMSEYLNKEKREKPKKKKR

SEQ ID NO: 4668 - protein, 841 aa, Artificial; identical to SEQ ID NO: 4667
  Synthetic

SEQ ID NO: 4669 - protein, 841 aa, Artificial; identical to SEQ ID NO: 4667
  Synthetic

SEQ ID NO: 4670 - protein, 841 aa, Artificial; identical to SEQ ID NO: 4667
  Synthetic

SEQ ID NO: 4671 - protein, 841 aa, Artificial; identical to SEQ ID NO: 4667
  Synthetic

SEQ ID NO: 4672 - protein, 841 aa, Artificial; identical to SEQ ID NO: 4667
  Synthetic

SEQ ID NO: 4673 - protein, 841 aa, Artificial; identical to SEQ ID NO: 4667
  Synthetic

SEQ ID NO: 4674 - protein, 841 aa, Artificial; identical to SEQ ID NO: 4667
  Synthetic

SEQ ID NO: 4675 - protein, 841 aa, Artificial; identical to SEQ ID NO: 4667
  Synthetic

SEQ ID NO: 4676 - protein, 841 aa, Artificial; identical to SEQ ID NO: 4667
  Synthetic

SEQ ID NO: 4677 - protein, 841 aa, Artificial; identical to SEQ ID NO: 4667
  Synthetic

SEQ ID NO: 4678 - protein, 841 aa, Artificial; identical to SEQ ID NO: 4667
  Synthetic

SEQ ID NO: 4679 - protein, 841 aa, Artificial; identical to SEQ ID NO: 4667
  Synthetic

SEQ ID NO: 4680 - protein, 841 aa, Artificial; identical to SEQ ID NO: 4667
  Synthetic

SEQ ID NO: 4681 - protein, 841 aa, Artificial; identical to SEQ ID NO: 4667
  Synthetic

SEQ ID NO: 4682 - protein, 841 aa, Artificial; identical to SEQ ID NO: 4667
  Synthetic

SEQ ID NO: 4683 - protein, 841 aa, Artificial; identical to SEQ ID NO: 4667
  Synthetic

SEQ ID NO: 4684 - protein, 841 aa, Artificial; identical to SEQ ID NO: 4667
  Synthetic

SEQ ID NO: 4685 - protein, 841 aa, Artificial; identical to SEQ ID NO: 4667
  Synthetic

SEQ ID NO: 4686 - protein, 841 aa, Artificial; identical to SEQ ID NO: 4667
  Synthetic

SEQ ID NO: 4687 - protein, 841 aa, Artificial; identical to SEQ ID NO: 4667
  Synthetic

SEQ ID NO: 4688 - protein, 841 aa, Artificial; identical to SEQ ID NO: 4667
  Synthetic

SEQ ID NO: 4689 - protein, 805 aa, Artificial
  Synthetic
MKVENIKEKSKKAMYLINHYEGPKKWCFAIVLNRACDNYEDNPHLFSKSLLEFEKTSRKDWFDEETRELVEQADTEIQPNPNLKPNTTANRKLKDIRNYFSHHYHKNECLYFKNDDPIRCIMEAAYEKSKIYIKGKQIEQSDIPLPELFESSGWITPAGILLLASFFVERGILHRLMGNIGGFKDNRGEYGLTHDIFTTYCLKGSYSIRAQDHDAVMFRDILGYLSRVPTESFQRIKQPQIRKEGQLSERKTDKFITFALNYLEDYGLKDLEGCKACFARSKIVREQENVESINDKEYKPHENKKKVEIHFDQSKEDRFYINRNNVILKIQKKDGHSNIVRMGVYELKYLVLMSLVGKAKEAVEKIDNYIQDLRDQLPYIEGKNKEEIKEYVRFFPRFIRSHLGLLQINDEEKIKARLDYVKTKWLDKKEKSKELELHKKGRDILRYINERCDRELNRNVYNRILELLVSKDLTGFYRELEELKRTRRIDKNIVQNLSGQKTINALHEKVCDLVLKEIESLDTENLRKYLGLIPKEEKEVTFKEKVDRILKQPVIYKGFLRYQFFKDDKKSFVLLVEDALKEKGGGCDVPLGKEYYKIVSLDKYDKENKTLCETLAMDRLCLMMARQYYLSLNAKLAQEAQQIEWKKEDSIELIIFTLKNPDQSKQSFSIRFSVRDFTKLYVTDDPEFLARLCSYFFPVEKEIEYHKLYSEGINKYTNLQKEGIEAILELEKKLIERNRIQSAKNYLSFNEIMNKSGYNKDEQDDLKKVRNSLLHYKLIFEKEHLKKFYEVMRGEGIEKKWSLIV

SEQ ID NO: 4690 - protein, 805 aa, Artificial; identical to SEQ ID NO: 4689
  Synthetic

SEQ ID NO: 4691 - protein, 805 aa, Artificial; identical to SEQ ID NO: 4689
  Synthetic

SEQ ID NO: 4692 - protein, 805 aa, Artificial; identical to SEQ ID NO: 4689
  Synthetic

SEQ ID NO: 4693 - protein, 805 aa, Artificial; identical to SEQ ID NO: 4689
  Synthetic

SEQ ID NO: 4694 - protein, 805 aa, Artificial; identical to SEQ ID NO: 4689
  Synthetic

SEQ ID NO: 4695 - protein, 805 aa, Artificial; identical to SEQ ID NO: 4689
  Synthetic

SEQ ID NO: 4696 - protein, 805 aa, Artificial; identical to SEQ ID NO: 4689
  Synthetic

SEQ ID NO: 4697 - protein, 805 aa, Artificial; identical to SEQ ID NO: 4689
  Synthetic

SEQ ID NO: 4698 - protein, 805 aa, Artificial; identical to SEQ ID NO: 4689
  Synthetic

SEQ ID NO: 4699 - protein, 805 aa, Artificial; identical to SEQ ID NO: 4689
  Synthetic

SEQ ID NO: 4700 - protein, 805 aa, Artificial; identical to SEQ ID NO: 4689
  Synthetic

SEQ ID NO: 4701 - protein, 805 aa, Artificial; identical to SEQ ID NO: 4689
  Synthetic

SEQ ID NO: 4702 - protein, 805 aa, Artificial; identical to SEQ ID NO: 4689
  Synthetic

SEQ ID NO: 4703 - protein, 805 aa, Artificial; identical to SEQ ID NO: 4689
  Synthetic

SEQ ID NO: 4704 - protein, 805 aa, Artificial; identical to SEQ ID NO: 4689
  Synthetic

SEQ ID NO: 4705 - protein, 805 aa, Artificial; identical to SEQ ID NO: 4689
  Synthetic

SEQ ID NO: 4706 - protein, 805 aa, Artificial; identical to SEQ ID NO: 4689
  Synthetic

SEQ ID NO: 4707 - protein, 805 aa, Artificial; identical to SEQ ID NO: 4689
  Synthetic

SEQ ID NO: 4708 - protein, 805 aa, Artificial; identical to SEQ ID NO: 4689
  Synthetic

SEQ ID NO: 4709 - protein, 805 aa, Artificial; identical to SEQ ID NO: 4689
  Synthetic

SEQ ID NO: 4710 - protein, 805 aa, Artificial; identical to SEQ ID NO: 4689
  Synthetic

SEQ ID NO: 4711 - protein, 805 aa, Artificial; identical to SEQ ID NO: 4689
  Synthetic

SEQ ID NO: 4712 - protein, 374 aa, Artificial
  Synthetic
MKVENIKEKSKKAMYLINHYEGPKKWCFAIVLNRACDNYEDNPHLFSKSLLEFEKTSRKDWFDEETRELVEQADTEIQPNPNLKPNTTANRKLKDIRNYFSHHYHKNECLYFKNDDPIRCIMEAAYEKSKIYIKGKQIEQSDIPLPELFESSGWITPAGILLLASFFVERGILHRLMGNIGGFKDNRGEYGLTHDIFTTYCLKGSYSIRAQDHDAVMFRDILGYLSRVPTESFQRIKQPQIRKEGQLSERKTDKFITFALNYLEDYGLKDLEGCKACFARSKIVREQENVESINDKEYKPHENKKKVEIHFDQSKEDRFYINRNNVILKIQKKDGHSNIVRMGVYELKYLVLMSLVGKAKEAVEKIDNYIQDLR

SEQ ID NO: 4713 - protein, 565 aa, Artificial
  Synthetic
MNPENIKEISKKAIYSIDQYKGAKKWCFAIVLNRACDNYEGNPHLFSESLLEFEKTNRKDWFDEETRELIEKADTEIQPNPNLKPNTTANRKLKDIRNYFSHHYHKNECLYFKNDDPIRCIMEAAYEKAKIYIKGKQIEQSDIPLPELFESSGCITPAGILLLASFFVERGILHRLMGNIGGFKDNRGEYGLTHDIFTTYCLKGSYSIQAQDHDAVMFRDILGYLSRVPTESFQRIKQPKIRKEGQLSERKTDKFIKFALNYLEHYGLKDLEGCKACFARSKIVREQEDVESIDDKEYKPHENKKKVEIHFDQSKEYPFYINRNNVILKIQKKDGHYNIVRMGVYELKYLVLLSLSGKARDSVETIDQYIQGLRDQLPSYIEKKNEKEIQEYINFLPGFIRSHLGLLNTDDDKKLKARIAYVKAKWLDKKEKSKELELHRKGRDILRYINERCDRELNRNVYNRILELLVGKDLAGFYRELEELKRTRRIDKNIVQNLSGQKTINALHEKVCDLVLKEIESLDTENLKKYLGLIPKEEKEVTFKEKVNRILDQPVIYKGCRFHFT

SEQ ID NO: 4714 - protein, 802 aa, Artificial
  Synthetic
MQVENIKKGSSQGMYSIEQYEGAKKWCFAIVLNRAQTNLQGNPKLFEETLTRFERIRKEDWFDQETKKLIYAKQEQNEVEEEIQKAADEKLRDLRNYFSHYFHTPDCLIFTQNDPVRIIMEKAYEKARFEQAKKEQEDISIEFGELFEENGRITSAGVVFFASFFAERRFLNRLMGYVQGFTRTEGEYKITRDVFSTYCLRDSYSVKTPDHDAVMFRDILGYLSRVPSESYQRIKESQMRSETQLSERKTDKFILFALNYLEDYGLEDLADYTACFARTRIKREQDENTDGKEQKPHRKKPRVEIHFERAEGDPFYIKHNNVILRTQKKGAQTYIFRMGVYELKYLVLLSLLGKGAEAVKRIDRYVHSLRNQLPHIEKKSTEEIEGYVRFLPRFVRSHLGLLGVDDEKKIKARVDYVKAKWLEKKEKSRELQLHRKGRDILRYINERCERPLNIDEYNRILELLVTKHLDGFYRELEELKKTRRIDKNIVCNLSRHKSVNALHEKVCDLVVQELESLGREELKEYVGLIPKEEKEVSFEEKTDRVVKQPVIYKGFLRNEFFRESRKSFARLVEEAVREKGEVYDVPLGGEYYEIVSLDTFDKDNKRLYETLAMDRLLLMIARQYHLSLNKELAKRAQQIEWKKEDGEEVIIFTLKNPAQPEQSCSVRFSLRDYTKLYVMDDAEFLARLCDYFLPKDEEQIDYHRLYTQGMNRYTNLQREGIEAILELEKKTIGPEQPRPPKNYIPFSEIMDKSAYNEDDQKALRRVRNALLHHNLNFARADFKRFCGIMKREGIEKRWSLAV

SEQ ID NO: 4715 - protein, 802 aa, Artificial; identical to SEQ ID NO: 4714
  Synthetic

SEQ ID NO: 4716 - protein, 802 aa, Artificial; identical to SEQ ID NO: 4714
  Synthetic

SEQ ID NO: 4717 - protein, 802 aa, Artificial; identical to SEQ ID NO: 4714
  Synthetic

SEQ ID NO: 4718 - protein, 802 aa, Artificial; identical to SEQ ID NO: 4714
  Synthetic

SEQ ID NO: 4719 - protein, 804 aa, Artificial
  Synthetic
MEFENIKKTSNKEVYSIEQYEGEKKWCFAIVLNRAQTNLEENPKLFEQTLTRFEKIMKQDWFNEETKKLIYEKEEENKVKEEIQIAASERLKNLRNYFSHYLHAPDCLIFNRNDTIRIIMEKAYEKSRFEAKKKQQEDISIEFPELFEEEDKITSAGVVFFVSFFIERRFLNRLMGYVQGFRKTEGEYNITRQVFSKYCLKDSYSVQAQDHDAVMFRDILGYLSRVPTEIYQHIKLTRKRSQDQLSERKTDKFILFALKYLEDYGLKDLADYTACFARSKIKRENEDTKETDGNKHKFHREKPVVEIHFDKEKQDQFYIKRNNVILKAQKKGGQSNVFRMGVYELKYLVLLSLLGKAEEAIQRIDRYISSLKKQLPYLDKISNEEIQKSINFLPRFVRSRLGLLQVDDEKRLKTRLEYVKAKWTDKKEGSRKLELHRKGRDILRYINERCDRPLSRKEYNNILKFIVNKDFAGFYNELEELKRTRRLDKNIIQKLSGHTTLNALHERVCDLVLQELGSLQSENLKEYIGLIPKEEKEVTFREKVDRILEQPVVYKGFLRYEFFKEDKKSFARLVEEAIKTKWSDFDIPLGEEYYNIPSLDRFDRTNKKLYETLAMDRLCLMMARQYYLRLNEKLAEKAQHIYWKKEDGREVIIFKFQNPKEQKKSFSIRFSILDYTKMYVMDDPEFLSRLWEYFIPKEAKEIDYHKHYARAFDKYTNLQKEGIDAILKLEGRIIERRKIKPAKNYIEFQEIMNRSGYNNDQQVALKRVRNALLHYNLNFEREHLKRFYGVVKREGIEKKWSLIV

SEQ ID NO: 4720 - protein, 804 aa, Artificial; identical to SEQ ID NO: 4719
  Synthetic

SEQ ID NO: 4721 - protein, 838 aa, Artificial
  Synthetic
MQFENIKDTGQKPIYSIDQYEGAKKWCFAIVLNRACDNYEDNPQLFSESLLRFEEVNRRDWFDKDIRDLIKKADTEDQIEPKRKPNTPVNRRLHDIRNYFSHSRHQDDCLYFKNDDPMRCIMEAAYEKAKIHIKGRQTEQSDIPLPELFDANNKITSAGVLFLASFFVERGILHRLMGNIGGFKDNRGKYGLTHDIFTTYCLKDSYSIHASDPKVVLFRDIAGYLSLVACEYYPTYLSKIPKENAGEKSSDEEKYAERKTDKFILFALKYLEEFVLPSLKDDYLVDIGRIDIIREESKETEEKDEQYKPHPNQGKVKVVFDSINKELPYYINHNTVILRIQKNGVMAYSCKIGVNDLKYLLLLCLQGKTDKALDAIYNYLHSMQDPPEVVKIGATDKLFQGLPEFILKQSGIKVQDKNKEKAARIKYIRDKWEKKKSESADMELHRKGRDILRYVNWHCETPLGTEKYDQLLVLLVNKNFVVFGDELNQLKRTEIISKDILEKLSGFQTINTLHQKVCNLVLEELSSLEKNDPGKLAEHIGLVRKPAPENNPPPEYKEKVRRFVEQPMIYKGFLRDQFFVNKDQDGKKLKEQKTFAKLVEETLGQNADVPLGKDFYYVPNIEKDEKKNRFHKDNAVLYETLALDRLCAMMARKCLTQINKNLAEKSEEIDWRNEDGKDFIYLKLVKSDRPQETFKIRFKVNDFAKLYVMDDPDFLGGLMKHFFPQEHSIEYHKLYRNGIERYTDRQKDGIEAILRLEDSVIRQKGMKPKPAKNYISFSEIMAQTDYPEHDQKVLNKVRRAVLHYHLKFEPADYNRFVDIMKKNKFWDGERKNKESRGR

SEQ ID NO: 4722 - protein, 838 aa, Artificial
  Synthetic
MQFENIKDTGQKPIYSIDQYEGAKKWCFAIVLNRACDNYEDNPQLFSESLLRFEEVNRRDWFDKDIRDLIKKADTEDQIEPKRKPNTPVNRRLHDIRNYFSHSRHQDDCLYFKNDDPMRCIMEAAYEKAKIHIKGRQTEQSDIPLPELFDANNKITSAGVLFLASFFVERGILHRLMGNIGGFKDNRGKYGLTHDIFTTYCLKDSYSIHASDPKVVLFRDIAGYLSLVACEYYPTYLSKIPKENAGGKSSDEEKYAERKTDKFILFALKYLEEFVLPSLKDDYLVDIGRIDIIREESKETEEKDEQYKPHPNQGKVKVVFDSINKELPYYINHNTVILRIQKNGVMAYSCKIGVNDLKYLLLLCLQGKTDKALDAIYNYLHSMQDPPEVVKIGATDKLFQGLPEFILKQSGIKVQDKNKEKAARIKYIRDKWEKKKSESADIELHRKGRDILRYVNWHCETPLGTEKYDQLLVLLVNKNFAGFGDELNQLKRTEIISKDIFEKLSGFKTINTLHQKVCNLVLEELSFFEKSNPEKLEEYIGLIRKPAPENNPPPEYKEKVRRFVEQPMIYKGFLRDQFFVNKDQDGKKLKEQKTFAKLVEETLGQNADVPLGKDFYYVPNIEKDEKKNRFHKDNAVLYETLALDRLCAMMARKCLTQINKNLAEKSEEIDWRNEDGKDFIYLKLVKSDRPQETFKIRFKVNDFAKLYVMDDPDFLGGLMKHFFPQEHSIEYHKLYRNGIERYTDRQKDGIEAILRLEDSVIRQKGMKPKPAKNYISFSEIMAQTDYPEHDQKVLNKVRRALLHYHLKFEPADYNRFVDIMKKDKFWDGERKNEESRGK

SEQ ID NO: 4723 - protein, 775 aa, Artificial
  Synthetic
MAQVSKQTSKKRELSIDEYQGARKWCFTIAFNKALVNRDKNDGLFVESLLRHEKYSKHDWYDEDTRALIKCSTQAANAKAEALRNYFSHYRHSPGCLTFTAEDELRTIMERAYERAIFECRRRETEVIIEFPSLFEGDRITTAGVVFFVSFFVERRVLDRLYGAVSGLKKNEGQYKLTRKALSMYCLKDSRFTKAWDKRVLLFRDILAQLGRIPAEAYEYYHGEQGDKKRANDNEGTNPKRHKDKFIEFALHYLEAQHSEICFGRRHIVREEAGAGDEHKKHRTKGKVVVDFSKKDEDQSYYISKNNVIVRIDKNAGPRSYRMGLNELKYLVLLSLQGKGDDAIAKLYRYRQHVENILDVVKVTDKDNHVFLPRFVLEQHGIGRKAFKQRIDGRVKHVRGVWEKKKAATNEMTLHEKARDILQYVNENCTRSFNPGEYNRLLVCLVGKDVENFQAGLKRLQLAERIDGRVYSIFAQTSTINEMHQVVCDQILNRLCRIGDQKLYDYVGLGKKDEIDYKQKVAWFKEHISIRRGFLRKKFWYDSKKGFAKLVEEHLESGGGQRDVGLDKKYYHIDAIGRFEGANPALYETLARDRLCLMMAQYFLGSVRKELGNKIVWSNDSIELPVEGSVGNEKSIVFSVSDYGKLYVLDDAEFLGRICEYFMPHEKGKIRYHTVYEKGFRAYNDLQKKCVEAVLAFEEKVVKAKKMSEKEGAHYIDFREILAQTMCKEAEKTAVNKVRRAFFHHHLKFVIDEFGLFSDVMKKYGIEKEWKFPVK

SEQ ID NO: 4724 - protein, 775 aa, Artificial; identical to SEQ ID NO: 4723
  Synthetic

SEQ ID NO: 4725 - protein, 469 aa, Artificial
  Synthetic
MQTATQEQKQKQSIYSILNYQGQRKWCFAIVLNRALDNINPKRETETGKYKNKELFYKSLLRFEGIKKQPWFDETKAEKENVTAKEIIDSKDKAAELLLNLRNYFSHNYHTEKCLYFGTESQHKQIRLIMEAAYERAKAELTGRRTGQEISAEAEKDKDGNIKKYKLSDVPWPPLFDEKDIITTAGVVFFASFFTEAGQIFRLMNWINGLKRNDDKFNITRRALSFYSLPDSYAEAIAEYEVEEDGASRTIRYKAKIFKDILNYLRRIPSETYKLYHSGEENKISGKKEEKGEDENTPVERKTDKFAEFAMRYLEDFEGVRFARYRINTKTRENEVFFDEDELKKLIDKKGVPEQEKDKKFEDYRYYYVKNNAILKTEKGSIRIGINELKYFVLLSLDKMGQQAKEKINSFLSKFTGDNLGNREFIKANIEELPPFILKKFDPLAEDKEKRIEKRVGASEKPLFSIDIL

SEQ ID NO: 4726 - protein, 790 aa, Artificial
  Synthetic
MNGIELKKEEAAFYFNQAELNLKAIEDNIFDKERRKTLLNNPQILAKMENFIFNFRDVTKNAKGEIDCLLLKLRELRNFYSHYVHKRDVRELSKGEKPILEKYYQFAIESTGSENVKLEIIENDAWLADAGVLFFLCIFLKKSQANKLISGISGFKRNDDTGQPRRNLFTYFSIREGYKVVPEMQKHFLLFSLVNHLSNQDDYIEKAHQPYDIGEGLFFHRIASTFLNISGILRNMKFYTYQSKRLVEQRGELKREKDIFAWEEPFQGNSYFEINGHKGVIGEDELKELCYAFLIGNQDANKVEGRITQFLEKFRNANSVQQVKDDEMLKPEYFPANYFAESGVGRIKDRVLNRLNKAIKSNKAKKGEIIAYDKMREVMAFINNSLPVDEKLKPKDYKRYLGMVRFWDREKDNIKREFETKEWSKYLPSNFWTAKNLERVYGLAREKNAELFNKLKADVEKMDERELEKYQKINDAKDLANLRRLASDFGVKWEEKDWDEYSGQIKKQITDSQKLTIMKQRITAGLKKKHGIENLNLRITIDINKSRKAVLNRIAIPRGFVKRHILGWQESEKVSKKIREAECEILLSKEYEELSKQFFQSKDYDKMTRINGLYEKNKLIALMAVYLMGQLRILFKEHTKLDDITKTTVDFKISDKVTVKIPFSNYPSLVYTMSSKYVDNIGNYGFSNKDKDKPILGKIDVIEKQRMEFIKEVLGFEKYLFDDKIIDKSKFADTATHISFAEIVEELVEKGWDKDRLTKLKDARNKALHGEILTGTSFDETKSLINELKK

SEQ ID NO: 4727 - protein, 790 aa, Artificial; identical to SEQ ID NO: 4726
  Synthetic

SEQ ID NO: 4728 - protein, 790 aa, Artificial; identical to SEQ ID NO: 4726
  Synthetic

SEQ ID NO: 4729 - protein, 790 aa, Artificial; identical to SEQ ID NO: 4726
  Synthetic

SEQ ID NO: 4730 - protein, 790 aa, Artificial; identical to SEQ ID NO: 4726
  Synthetic

SEQ ID NO: 4731 - protein, 790 aa, Artificial; identical to SEQ ID NO: 4726
  Synthetic

SEQ ID NO: 4732 - protein, 790 aa, Artificial; identical to SEQ ID NO: 4726
  Synthetic

SEQ ID NO: 4733 - protein, 790 aa, Artificial; identical to SEQ ID NO: 4726
  Synthetic

SEQ ID NO: 4734 - protein, 790 aa, Artificial; identical to SEQ ID NO: 4726
  Synthetic

SEQ ID NO: 4735 - protein, 790 aa, Artificial; identical to SEQ ID NO: 4726
  Synthetic

SEQ ID NO: 4736 - protein, 790 aa, Artificial; identical to SEQ ID NO: 4726
  Synthetic

SEQ ID NO: 4737 - protein, 790 aa, Artificial; identical to SEQ ID NO: 4726
  Synthetic

SEQ ID NO: 4738 - protein, 790 aa, Artificial; identical to SEQ ID NO: 4726
  Synthetic

SEQ ID NO: 4739 - protein, 790 aa, Artificial; identical to SEQ ID NO: 4726
  Synthetic

SEQ ID NO: 4740 - protein, 790 aa, Artificial; identical to SEQ ID NO: 4726
  Synthetic

SEQ ID NO: 4741 - protein, 790 aa, Artificial; identical to SEQ ID NO: 4726
  Synthetic

SEQ ID NO: 4742 - protein, 726 aa, Artificial
  Synthetic
MNGIELKKEEAAFYFNQAELNLKAIEDNIFDKERRKTLLNNPQILAKMENFIFNFRDVTKNAKGEIDCLLLKLRELRNFYSHYVHKRDVRELSKGEKPILEKYYQFAIESTGSENVKLEIIENDAWLADAGVLFFLCIFLKKSQANKLISGISGFKRNDDTGQPRRNLFTYFSIREGYKVVPEMQKHFLLFSLVNHLSNQDDYIEKAHQPYDIGEGLFFHRIASTFLNISGILRNMKFYTYQSKRLVEQRGELKREKDIFAWEEPFQGNSYFEINGHKGVIGEDELKELCYAFLIGNQDANKVEGRITQFLEKFRNANSVQQVKDDEMLKPEYFPANYFAESGVGRIKDRVLNRLNKAIKSNKAKKGEIIAYDKMREVMAFINNSLPVDEKLKPKDYKRYLGMVRFWDREKDNIKREFETKEWSKYLPSNFWTAKNLERVYGLAREKNAELFNKLKADVEKMDERELEKYQKINDAKDLANLRRLASDFGVKWEEKDWDEYSGQIKKQITDSQKLTIMKQRITAGLKKKHGIENLNLRITIDINKSRKAVLNRIAIPRGFVKRHILGWQESEKVSKKIREAECEILLSKEYEELSKQFFQSKDYDKMTRINGLYEKNKLIALMAVYLMGQLRILFKEHTKLDDITKTTVDFKISDKVTVKIPFSNYPSLVYTMSSKYVDNIGNYGFSNKDKDKPILGKIDVIEKQRMEFIKEVLGFEKYLFDDKII

SEQ ID NO: 4743 - protein, 736 aa, Artificial
  Synthetic
MNGIELKKEEAAFYFNQAELNLKAIEDNIFDKERRKTLLNNPQILAKMENFIFNFRDVTKNAKGEIDCLLLKLRELRNFYSHYVHKRDVRELSKGEKPILEKYYQFAIESTGSENVKLEIIENDAWLADAGVLFFLCIFLKKSQANKLISGISGFKRNDDTGQPRRNLFTYFSIREGYKVVPEMQKHFLLFSLVNHLSNQDDYIEKAHQPYDIGEGLFFHRIASTFLNISGILRNMKFYTYQSKRLVEQRGELKREKDIFAWEEPFQGNSYFEINGHKGVIGEDELKELCYAFLIGNQDANKVEGRITQFLEKFRNANSVQQVKDDEMLKPEYFPANYFAESGVGRIKDRVLNRLNKAIKSNKAKKGEIIAYDKMREVMAFINNSLPVDEKLKPKDYKRYLGMVRFWDREKDNIKREFETKEWSKYLPSNFWTAKNLERVYGLAREKNAELFNKLKADVEKMDERELEKYQKINDAKDLANLRRLASDFGVKWEEKDWDEYSGQIKKQITDSQKLTIMKQRITAGLKKKHGIENLNLRITIDINKSRKAVLNRIAIPRGFVKRHILGWQESEKVSKKIREAECEILLSKEYEELSKQFFQSKDYDKMTRINGLYEKNKLIALMAVYLMGQLRILFKEHTKLDDITKTTVDFKISDKVTVKIPFSNYPSLVYTMSSKYVDNIGNYGFSNKDKDKPILGKIDVIEKQRMEFIKEVLGFEKYLFDDKIIDKSKFADTAT

SEQ ID NO: 4744 - protein, 797 aa, Artificial
  Synthetic
MSGIELKKEEAAFYFNQAELNLKAIEVSIFDEGRRKTLLNNPKILAKVENFIFNSEDVTKNAKGEIDCLLSKLMELRNFYSHYVHKPDVKELSKGEKPILEKYYQFAIDATASADVKLEIIENDTWLTDAGVLLLLCMFLKKSQANKLIGGISGFKRNDPTGQPRRNLFTYYSVREGYKVVPEMQKHFLLFALVNHLSNQDDYIEKAQQPYDIGEGLFFHRIASTFLDISGILRNMKFYTYQSKRLKEQRGELKREKDSFEWIEPFQGNSYFSVDGQKGVIGEDELKELCYALLIGKQDANKVEGRITQFLKKFKNADDAQKVSDDEMLDRGNFPASYFAERRVGSIKDKILSSLEQAIKSYKTSGADVKAYNKMKEVMEFINNSLPVDEKLKRKDYKRYLGMVRLWGSERDNIKREFEAKGWSKYFTSGFWMAKNLERVYGLAREKNAELFNKLKTAVEKMDEREFVKYQQINDAKDLASLRQLANDFGVNWEEKDWEKYSGQIKKQITDSQKLTIMKQRITAGLKRKHGIENLNLRITIDSSKSRKAVLNRIAIPRGFVKKHILDWQGSEKVPKKIREAKCKILLSKEYEELSRQFYKVKDYDKMTQINSLYEKNKLIALMAVYLMEQLRIQLKEHTELRNLDKTTVDFRISDKVTEKIPFSQYPSLVYAMSREYADNVDNYKFSEEDKKKLDKIKKNLFLGKIDIIEKQRMEFIKEVLGFEEYLFDDKIIDRSKFADTATHISFGEIVGELIGKGWDKDKLTKLEYARNKALHGEIPEATSFNEAKQLINELKK

SEQ ID NO: 4745 - protein, 632 aa, Artificial
  Synthetic
MENIKLEKQKAAFYFNQAELNLKAIEGNIFDKGRRKTLFDNPKILSKVENFIFNFKDVTKNAKGEIDCLLSKLMELRNFYSHYVHKPDVKELSKGEKPLLERYYQIAIEATGSENVKLEIIENDKWLTDAGVLLFLCMFLKKSQANKLISGISGFKRNDTFGQPRRNLFNYFSVRERYKVVPDMQKHFLLFVLVNHLSEQDDYIEKAQQPYNIGEGLFFHRIASTFLNVSGILRNMEFYTYQSKRLKEQRGELKREKDIFTWEEPFQGNSYFEINGHKGVIGEDELKELCYALLSYNKSKYAVEQIEKFLKGFGEVKSEQEIRDSDILNESYFPTNYFAESNIGSIKEKILNRLGKTDDSYKKTGTKIKPYDMMKEVMEFINNSLPADEKLKRKDYRRYLKMVRIWDSEKDNIKREFESKEWSKYFSSNFWMAKNLERVYGLAREKNAELFNKLKAVVEKMDEREFEKYRQINSAEDLASLRRLANDYGVKWEEKDWQEYSGQIKKQISDRQKLTIMKQRITAELKKKHGIENLNLRITIDSNKSRKAVLNRIAVPRGFVKEHILGWQGSEKVSKKTREAKCKILLSKEYEELSKQFFQTRNYDKMTQVNSLYEKNKLIAFMAVYRAIEHPV

SEQ ID NO: 4746 - protein, 789 aa, Artificial
  Synthetic
MENIKLEKQKAAFYFNQAELNLKAIEGNIFDKGRRKTLFDNPKILSKVENFIFNFKDVTKNAKGEIDCLLSKLMELRNFYSHYVHKPDVKELSKGEKPLLERYYQIAIEATGSENVKLEIIENDKWLTDAGVLLFLCMFLKKSQANKLISGISGFKRNDTFGQPRRNLFNYFSVRERYKVVPDMQKHFLLFVLVNHLSEQDDYIEKAQQPYNIGEGLFFHRIASTFLNVSGILRNMEFYTYQSKRLKEQRGELKREKDIFTWEEPFQGNSYFEINGHKGVIGEDELKELCYALLSYNKSKYAVEQIEKFLKGFGEVKSEQEIRDSDILNESYFPTNYFAESNIGSIKEKILNRLGKTDDSYKKTGTKIKPYDMMKEVMEFINNSLPADEKLKRKDYRRYLKMVRIWDSEKDNIKREFESKEWSKYFSSNFWMAKNLERVYGLAREKNAELFNKLKAVVEKMDEREFEKYRQINSAEDLASLRRLANDYGVKWEEKDWQEYSGQIKKQISDRQKLTIMKQRITAELKKKHGIENLNLRITIDSNKSRKAVLNRIAVPRGFVKEHILGWQGSEKVSKKTREAKCKILLSKEYEELSKQFFQTRNYDKMTQVNSLYEKNKLIAFMAVYLMGQLNIRFDKPTRLNELEKAEVDFKISDKVTAKIPFSQYPSLVYAMSSKYADSVGSYKFENDEKNKPFLGKIDIIEKQRMEFIKEVLGFEEYLFEKKIIDKSKFADTATHISFREICDELIQKGWDENKLTNLKDARNAALHGEIPAETSFREAKPLINGLKK

SEQ ID NO: 4747 - protein, 789 aa, Artificial; identical to SEQ ID NO: 4746
  Synthetic

SEQ ID NO: 4748 - protein, 789 aa, Artificial; identical to SEQ ID NO: 4746
  Synthetic

SEQ ID NO: 4749 - protein, 789 aa, Artificial; identical to SEQ ID NO: 4746
  Synthetic

SEQ ID NO: 4750 - protein, 789 aa, Artificial; identical to SEQ ID NO: 4746
  Synthetic

SEQ ID NO: 4751 - protein, 744 aa, Artificial
  Synthetic
MSPDFIKLEKQEAAFYFNQTELNLKAIESNIFDKQQRVILLNNPQILAKVGDFIFNFRDVTKNAKGEIDCLLLKLRELRNFYSHYVYTDDVKILSNGERPLLEKYYQFAIEATGSENVKLEIIESNNRLTEAGVLFFLCMFLKKSQANKLISGISGFKRNDPTGQPRRNLFTYFSVREGYKVVPDMQKHFLLFVLVNHLSGQDDYIEKAQKPYDIGEGLFFHRIASTFLNISGILRNMEFYIYQSKRLKEQQGELKREKDIFPWIEPFQGNSYFEINGNKGIIGEDELKELCYALLVAGKDVRAVEGKITQFLEKFKNADNAQQVEKDEMLDRNNFPANYFAESNIGSIKEKILNRLGKTDDSYNKTGTKIKPYDMMKEVMEFINNSLPADEKLKRKDYRRYLKMVRIWDSEKDNIKREFESKEWSKYFSSDFWMAKNLERVYGLAREKNAELFNKLKAVVEKMDEREFEKYRLINSAEDLASLRRLAKDFGLKWEEKDWQEYSGQIKKQISDRQKLTIMKQRITAELKKKHGIENLNLRITIDSNKSRKAVLNRIAVPRGFVKEHILGWQGSEKVSKKTREAKCKILLSKEYEELSKQFFQTRNYDKMTQVNGLYEKNKLLAFMVVYLMERLNILLNKPTELNELEKAEVDFKISDKVMAKIPFSQYPSLVYAMSSKYADSVGSYKFENDEKNKPFLGKIDTIEKQRMEFIKEVLGFEEYLFEKKIIDKSEFADTATHISFDE

SEQ ID NO: 4752 - protein, 792 aa, Artificial
  Synthetic
MSPDFIKLEKQEAAFYFNQTELNLKAIESNIFDKQQRVILLNNPQILAKVGDFIFNFRDVTKNAKGEIDCLLLKLRELRNFYSHYVYTDDVKILSNGERPLLEKYYQFAIEATGSENVKLEIIESNNRLTEAGVLFFLCMFLKKSQANKLISGISGFKRNDPTGQPRRNLFTYFSVREGYKVVPDMQKHFLLFVLVNHLSGQDDYIEKAQKPYDIGEGLFFHRIASTFLNISGILRNMEFYIYQSKRLKEQQGELKREKDIFPWIEPFQGNSYFEINGNKGIIGEDELKELCYALLVAGKDVRAVEGKITQFLEKFKNADNAQQVEKDEMLDRNNFPANYFAESNIGSIKEKILNRLGKTDDSYNKTGTKIKPYDMMKEVMEFINNSLPADEKLKRKDYRRYLKMVRIWDSEKDNIKREFESKEWSKYFSSDFWMAKNLERVYGLAREKNAELFNKLKAVVEKMDEREFEKYRLINSAEDLASLRRLAKDFGLKWEEKDWQEYSGQIKKQISDRQKLTIMKQRITAELKKKHGIENLNLRITIDSNKSRKAVLNRIAVPRGFVKEHILGWQGSEKVSKKTREAKCKILLSKEYEELSKQFFQTRNYDKMTQVNGLYEKNKLLAFMVVYLMERLNILLNKPTELNELEKAEVDFKISDKVMAKIPFSQYPSLVYAMSSKYADSVGSYKFENDEKNKPFLGKIDTIEKQRMEFIKEVLGFEEYLFEKKIIDKSEFADTATHISFDEICNELIKKGWDKDKLTKLKDARNAALHGEIPAETSFREAKPLINGLKK

SEQ ID NO: 4753 - protein, 792 aa, Artificial
  Synthetic
MSPDFIKLEKQEAAFYFNQTELNLKAIESNILDKQQRMILLNNPRILAKVGNFIFNFRDVTKNAKGEIDCLLFKLEELRNFYSHYVHTDNVKELSNGEKPLLERYYQIAIQATRSEDVKFELFETRNENKITDAGVLFFLCMFLKKSQANKLISGISGFKRNDPTGQPRRNLFTYFSAREGYKALPDMQKHFLLFTLVNYLSNQDEYISELKQYGEIGQGAFFNRIASTFLNISGISGNTKFYSYQSKRIKEQRGELNSEKDSFEWIEPFQGNSYFEINGHKGVIGEDELKELCYALLVAKQDINAVEGKIMQFLKKFRNTGNLQQVKDDEMLEIEYFPASYFNESKKEDIKKEILGRLDKKIRSCSAKAEKAYDKMKEVMEFINNSLPAEEKLKRKDYRRYLKMVRFWSREKGNIEREFRTKEWSKYFSSDFWRKNNLEDVYKLATQKNAELFKNLKAAAEKMGETEFEKYQQINDVKDLASLRRLTQDFGLKWEEKDWEEYSEQIKKQITDRQKLTIMKQRVTAELKKKHGIENLNLRITIDSNKSRKAVLNRIAIPRGFVKKHILGWQGSEKISKNIREAECKILLSKKYEELSRQFFEAGNFDKLTQINGLYEKNKLTAFMSVYLMGRLNIQLNKHTELGNLKKTEVDFKISDKVTEKIPFSQYPSLVYAMSRKYVDNVDKYKFSHQDKKKPFLGKIDSIEKERIEFIKEVLDFEEYLFKNKVIDKSKFSDTATHISFKEICDEMGKKGCNRNKLTELNNARNAALHGEIPSETSFREAKPLINELKK

SEQ ID NO: 4754 - protein, 792 aa, Artificial; identical to SEQ ID NO: 4753
  Synthetic

SEQ ID NO: 4755 - protein, 792 aa, Artificial; identical to SEQ ID NO: 4753
  Synthetic

SEQ ID NO: 4756 - protein, 799 aa, Artificial
  Synthetic
MINIELKKEEAAFYFNQANLNISGLDEVIEKQLPHIGSKKENAKKAIDKIFDNITVLKKVENFVFYFKDVAKNERVELDALLLKLIDLRNFYSHYVHNDNVKILSDGEETLLEKYYQIAIEATGSKDVKLEIIDNEKKLTDAGILFLLCMFLKKSQANKLISSISGFKRNDKEWQPRRNLFTYYSLREGYKVVPDMEKHFLLFTLVNHLSTQDENIENTQPSDDIGRGLFFHRIASTFLNISGIFNNMEFYPYQSNRLKERRGDIAPDKDSFAWIEPFQGNSYFKINGYKGVIGENELKELCFAVLLHNKSKYAVEQIEKFLKCFKEVQSKQEIIECDILDECYFPANYLNQPETKSLKEKLLSRITGKINYSFDTAEKAFDKMKDVMEFINGCLPSDEKLKRKDYSRYLKMVRFWGGEKDNIKREFEGKKWTRFFPSELWHKRTLEDVYKFALKKNKKRLEELKVKIEGLNEDDLLKYQKVNNIKNLENLRLLAHDLDLSWREKDWGEYSGQIKKQISDNQKLTIMKQRVIAELKKKHGIENINLRISLDSNKSIQAVLNRIAIPKGFIKRHVLHLQENEKTSRKIREAKCKILLSKKYEYLSRKFLDEKNFDKLTQINGLYEKNRLIAFMVIYLLKKLGLELKNETKLIELKKTRVKYKISDKVAEDIPLSHYPSLVYAMSRKYVDNIDNYEFPDEYAKKAILDKVDIIENQRMEFIKQVLGFEKYLFDNNIIDKSKFTDVETHISFVKIHDELIEKGWDTEKLSKLKHARNKALHGEIPGGTSFEKAKLLINELKK

SEQ ID NO: 4757 - protein, 433 aa, Artificial
  Synthetic
MINIELKKEEAAFYFNQANLNISGLDEVIEKQLPHIGSKKENAKKAIDKIFDNITVLKKVENFVFYFKDVAKNERVELDALLLKLIDLRNFYSHYVHNDNVKILSDGEETLLEKYYQIAIEATGSKDVKLEIIDNEKKLTDAGILFLLCMFLKKSQANKLISSISGFKRNDKEWQPRRNLFTYYSLREGYKVVPDMEKHFLLFTLVNHLSTQDENIENTQPSDDIGRGLFFHRIASTFLNISGIFNNMEFYPYQSNRLKERRGDIAPDKDSFAWIEPFQGNSYFKINGYKGVIGENELKELCFAVLLHNKSKYAVEQIEKFLKCFKEVQSKQEIIECDILDECYFPANYLNQPETKSLKEKLLSRITGKINYSFDTAEKAFDKMKDVMEFINGCLPSDEKLKRKDYSRYLKMVRFWGGEKDNIKREFEGKKWT

SEQ ID NO: 4758 - protein, 444 aa, Artificial
  Synthetic
MINIELKKEEAAFYFNQANLNISGLDEVIEKQLPHIGSKKENAKKAIDKIFDNITVLKKVENFVFYFKDVAKNERVELDALLLKLIDLRNFYSHYVHNDNVKILSDGEETLLEKYYQIAIEATGSKDVKLEIIDNEKKLTDAGILFLLCMFLKKSQANKLISSISGFKRNDKEWQPRRNLFTYYSLREGYKVVPDMEKHFLLFTLVNHLSTQDENIENTQPSDDIGRGLFFHRIASTFLNISGIFNNMEFYPYQSNRLKERRGDIAPDKDSFAWIEPFQGNSYFKINGYKGVIGENELKELCFAVLLHNKSKYAVEQIEKFLKCFKEVQSKQEIIECDILDECYFPANYLNQPETKSLKEKLLSRITGKINYSFDTAEKAFDKMKDVMEFINGCLPSDEKLKRKDYSRYLKMVRFWGGEKDNIKREFEGKKWTRFFPSELWHKR

SEQ ID NO: 4759 - protein, 799 aa, Artificial
  Synthetic
MINIELKKEEAAFYFNQANLNISGLDEVIEKQLPHIGSKKENAKKAIDKIFDNITVLKKVENFVFYFKDVAKNERVELDALLLKLIDLRNFYSHYVHNDNVKILSDGEETLLEKYYQIAIEATGSKDVKLEIIDNEKKLTDAGILFLLCMFLKKSQANKLISSISGFKRNDKEWQPRRNLFTYYSLREGYKVVPDMEKHFLLFTLVNHLSTQDENIENTQPSDDIGRGLFFHRIASTFLNISGIFNNMEFYPYQSNRLKERRGDIAPDKDSFAWIEPFQGNSYFKINGYKGVIGENELKELCFAVLLHNKSKYAVEQIEKFLKCFKEVQSKQEIIECDILDECYFPANYLNQPETKSLKEKLLSRITGKINYSFDTAEKAFDKMKDVMEFINGCLPSDEKLKRKDYSRYLKMVRFWGGEKDNIKREFEGKKWTRFFPSELWHKRTLEDVYKFALKKNKKRLEELKVKIEGLNEDDLLKYQKVNNIKNLENLRLLAHDLDLSWREKDWGEYSGQIKKQISDNQKLTIMKQRVIAELKKKHGIENINLRISLDSNKSIQAVLNRIAIPKGFIKRHVLHLQENEKTSRKIREAKCKILLSKKYEYLSRKFLDEKNFDKLTQINGLYEKNRLIAFMVIYLLKQLGLELKNETKLIELKKTRVKYKISDKVAEDIPLSHYPSLVYAMSRKYVDNIDNYEFPDEYAKKAILDKVDIIENQRMEFIKQVLGFEKYLFDNNIIDKSKFTDVETHISFVKIHDELIEKGWDTEKLSKLKHARNKALHGEIPGGTSFEKAKLLINELKK

SEQ ID NO: 4760 - protein, 799 aa, Artificial; identical to SEQ ID NO: 4759
  Synthetic

SEQ ID NO: 4761 - protein, 799 aa, Artificial; identical to SEQ ID NO: 4759
  Synthetic

SEQ ID NO: 4762 - protein, 799 aa, Artificial; identical to SEQ ID NO: 4759
  Synthetic

SEQ ID NO: 4763 - protein, 799 aa, Artificial
  Synthetic
MNIIKLKKEEAAFYFNQTILNLSGLDEIIEKQIPHIISNKENAKKVIDKIFNNRLLLKSVENYIYNFKDVAKNARTEIEAILLKLVELRNFYSHYVHNDTVKILSNGEKPILEKYYQIAIEATGSKNVKLVIIENNNCLTDSGVLFLLCMFLKKSQANKLISSVSGFKRNDKEGQPRRNLFTYYSVREGYKVVPDMQKHFLLFALVNHLSEQDDHIEKQQQSDELGKGLFFHRIASTFLNESGIFNKMQFYTYQSNRLKEKRGELKHEKDTFTWIEPFQGNSYFTLNGHKGVISEDQLKELCYTILIEKQNVDSLEGKIIQFLKKFQNVSSKQQVDEDELLKREYFPANYFGRAGTGTLKEKILNRLDKRMDPTSKVTDKAYDKMIEVMEFINMCLPSDEKLRQKDYRRYLKMVRFWNKEKHNIKREFDSKKWTRFLPTELWNKRNLEEAYQLARKENKKKLEDMRNQVRSLKENDLEKYQQINYVNDLENLRLLSQELGVKWQEKDWVEYSGQIKKQISDNQKLTIMKQRITAELKKMHGIENLNLRISIDTNKSRQTVMNRIALPKGFVKNHIQQNSSEKISKRIREDYCKIELSGKYEELSRQFFDKKNFDKMTLINGLCEKNKLIAFMVIYLLERLGFELKEKTKLGELKQTRMTYKISDKVKEDIPLSYYPKLVYAMNRKYVDNIDSYAFAAYESKKAILDKVDIIEKQRMEFIKQVLCFEEYIFENRIIEKSKFNDEETHISFTQIHDELIKKGRDTEKLSKLKHARNKALHGEIPDGTSFEKAKLLINEIKK

SEQ ID NO: 4764 - protein, 799 aa, Artificial; identical to SEQ ID NO: 4763
  Synthetic

SEQ ID NO: 4765 - protein, 572 aa, Artificial
  Synthetic
MKFKNLRNDNEGIALAIGFNLAVANLEYFYNHIHGKKNVDISKIISANRTHNANEKLADFIWHEAKFKLFYKTPEKTLQNNLTIIIKRLNNLRNYYSHFCHSDEVLKIGKDEVDLITKLFNNALAFEKDYSEEIILFENNSFTKEGVIWFVALFLYKFQAKQLFPHISGFKKNTGLYKSKHKLFSFYCTDFKNTNVKNDDPDFEHFLQIIQYLNRNPFANENEDNFRKTNMFIHFVVKFFDDFNVFPEIEFLKKERYNNLNEDDTKNEISENNVYQYLINRNNIFFEWNIDNFNYKIEDNNQTKKLKGIIGYQTLVYLVYAAFLKPNYSIISDEVKKFYTTYNKLLEDINNFNNYLKDIEYVGEQNLPKVIRAKIEDTNDKVTLKQKVLNRIEFILFQLNNNQNGLNRNGKPLRPYDKIAIVTDYINSELTDSQKNENIKKSKTKFNAVKYKEIMSYIRYYKRDKETLIKILKNERWKFKSKIIKLLEDNSSLEELFLSVTDLKKGKYTDLKKEVENNKSNISEVAKELNIKKTKERKIDNSYLTGIKSNGIALPAEFIKRKLLKINKNIFN

SEQ ID NO: 4766 - protein, 572 aa, Artificial; identical to SEQ ID NO: 4765
  Synthetic

SEQ ID NO: 4767 - protein, 789 aa, Artificial
  Synthetic
MASAAPFVQNNSGYKRESRPPRTPTQKEVFTGGKVDYTELTVFFNIAYFRLAGVIHHLMGKPYEFEIDDKGVTKIIGKRAIEKVYNEESITEWQTDKKVLAGLNDYLFKGFKKAKNSSGYEMDEKDEKLVIFMVKKFKSIRNFHSHYYHDNTVLVFPKNEKETIIKLHNEAISALMATQPKEVEKYVESISKNPFFKEHDREFYMTREGKIFLLSFFLTRSEMARLLQQCKGFKRNDTAEFKIKQSVYRHFTHRDGAARQHYGQEENMLNSLEPNDKKDILNARQAFKIISYLNDVPPEANDTELFPLFLENKPVVLVEEFRTFCNAHSIFSEITIVPLVKTVKDAENDKLTKDITLDNWLVVKMNDYDIQITKTTFHKLILDSLRRNDSGKLVEAQLLKFVDERNYLYELVKTFKPKGALSENNKLTLTDELDEYYRFKLRSDFLQKTMGKWLEGKEESPKQPVPRNYRYITESEKFVNRIKLEPIEVNYYDFYFEADEKPRAADLFMKYAVQYLIDFEKVRDWYFMVEHFEFVEETKTVMEYGVPVVNKFMVNKRIISYANTIEESKRLSLTPDNQIVVGFYTDTENKTVPPKNKFLLGARALKNLLIALHQSNDINPFFDDIVTDLNQIRKGVQPDDLTTLKNYDIPASYKYAINNESIDIEAQKAKAQKRIETLVTELRTLLGNTAPKMSRADKNRQIMRCYKYFDWKYANSEFKFLRQDEYQQVSVYHYSLEKRRGKDLERGDLSFLLKGAIDHMPEVVKELLRASSHIDKLLESTIEKTINKL

SEQ ID NO: 4768 - protein, 350 aa, Artificial
  Synthetic
MASAAPFVQNNSGYKRESRPPRTPTQKEVFTGGKVDYTELTVFFNIAYFRLAGVIHHLMGKPYEFEIDDKGVTKIIGKRAIEKVYNEESITEWQTDKKVLAGLNDYLFKGFKKAKNSSGYEMDEKDEKLVIFMVKKFKSIRNFHSHYYHDNTVLVFPKNEKETIIKLHNEAISALMATQPKEVEKYVESISKNPFFKEHDREFYMTREGKIFLLSFFLTRSEMARLLQQCKGFKRNDTAEFKIKQSVYRHFTHRDGAARQHYGQEENMLNSLEPNDKKDILNARQAFKIISYLNDVPPEANDTELFPLFLENKPVVLVEEFRTFCNAHSIFSEITIVPLVKTVKMQKTTN

SEQ ID NO: 4769 - protein, 857 aa, Artificial
  Synthetic
MKKLKNPSNRNSLPSIIISKFDSSKIYEIKVKYEKLARLDRLEIGDMSLDENLNILFKKVNFNGIDLEILNPLLLDFDSYTISGKLQKNSTNKTILTLKKDGKIIKYNVLEKDNKYFKNGKEFVIPKDVKEEGKRLVNDKFLLTIEDKKREENSLPKKRKKETQRDILKDETIEIYKRISSNSNIKSEDIYRIKRYMLFRSDMMFFYTFIDNFFYCLYKNKNEQLWNTNFKEKENLGKFIEFTLNDTLKNPRNGILKSYSKDLKVVQEDFVKIKDIFEKIRHALAHFDFTFIDNLLSNNIEFDFNIKLLNIVIEDSQDLYYEAKKEFIEDEKMDILDEKDISIKKLYTFYSKIDIKKPAFNKLINSFLIKDGVENSKLKEYIKEKYNCHYFIDIHDNKEYKKIYNEHKKLISENQNLQLNSKENGQKIKINNDRLEELKGKMNELTKANSLKRLEFKLRLAFGFIKVEYNIFKDFKNNFSEDIKKDMNIDLEKIKSYLDTSYSNNQFFNYKVYNKKTKQKDIDKDIFDDIEKETLKELVENDSLLKIILLFYIFTPKELKGEFLGFIKKFYHDTKNIDKDTKDKEEPLEQIKQEVPLKLKILEKNLTILTIFNYSISLNIEYDKNNNSFYERGNKFKKIYKDLKISHNQEEFDKSLLAPLLKYYMNLYKLLNDFEIYLLLKYKNKDNLNKESLNKLINDEQLKHNDHYNFTTLLSEYFNFDPKKNKKYETLTILRNSISHQKIDNLIYNLDKNKILEQRVKIVELIKEQRDIKETLKFDPINDFTMKTVQLLKSLENQSEKRDKIEEILKQQDLSANDFYNIYKLKGVESIKKELFIRLGKTKIEEKIQEDIAKGSI

SEQ ID NO: 4770 - protein, 839 aa, Artificial
  Synthetic
LNSIEKIKKPSNRNSIPSIIISDYDENKIKEIKVKYLKLARLDKITIQDMEIRDNIVEFKKILLNGIEHTIKDNQKIEFDNYEITAYVRASKQRRDGKITQAKYVVTITDKYLRDNEKEKRFKSTERELPNDTLLMRYKQISGFDTLTSKDIYKIKRYIDFKNEMLFYFQFIEEFFSPLLPKGTNFYSLNIEQNKDKVVKYIVYRLNDDFKNQSLNQFIKKTDTIKYDFLKIQKILSDFRHALAHFDFDFIQKFFDDELDKNRFDISTISLIKTMLQEKEEKYYQEKNNYIEDSDTLTLFDEKESNFSKIHNFYIKISQKKPAFNKLINSFLSKDGVPNEELKSYLATKKIDFFEDIHSNKEYKKIYIKHKNLVVEKQKEESQEKPNGQKLKNYNDELQKLKDEMNKITKQNSLNRLEVKLRLAFGFIANEYNYNFKNFNDKFTLDVKKEQKIKVFKNSSNEKLKEYFESTFIEKRFFHFCVKFFNKKTKKEETKQKNIFNLIENETLEELVKESPLLQIITLLYLFIPKELQGEFVGFILKIYHHTKNITNDTKEDEKSIEDTQNSFSLKLKILAKNLRGLQLFNYSLSHNTLYNTKEHFFYEKGNRWQSVYKSLEISHNQDEFDIHLVIPVIKYYINLNKLIGDFEIYALLTYADKNSITEKLSDITKRDDLKFRGYYNFSTLLFKTFMINTNYEQNQKSTQYIKQTRNDIAHQNIENMLKAFENNEIFAQREEIVNYLQKEHKMQEILHYNPINDFTMKTVQYLKSLNIHSQKESKIADIHKKESLVPNDYYLIYKLKVIELLKQKVIEAIGETKDEEKIKNAIAKEEQIKKGYNK

SEQ ID NO: 4771 - protein, 839 aa, Artificial; identical to SEQ ID NO: 4770
  Synthetic

SEQ ID NO: 4772 - protein, 839 aa, Artificial; identical to SEQ ID NO: 4770
  Synthetic

SEQ ID NO: 4773 - protein, 835 aa, Artificial
  Synthetic
MEKIKKPSNRNSIPSIIISDYDANKIKEIKVKYLKLARLDKITIQDMEIVDNIVEFKKILLNGVEHTIIDNQKIEFDNYEITGCIKPSNKRRDGRISQAKYVVTITDKYLRENEKEKRFKSTERELPNNTLLSRYKQISGFDTLTSKDIYKIKRYIDFKNEMLFYFQFIEEFFNPLLPKGKNFYDLNIEQNKDKVAKFIVYRLNDDFKNKSLNSYITDTCMIINDFKKIQKILSDFRHALAHFDFDFIQKFFDDQLDKNKFDINTISLIETLLDQKEEKNYQEKNNYIDDNDILTIFDEKGSKFSKLHNFYTKISQKKPAFNKLINSFLSQDGVPNEEFKSYLVTKKLDFFEDIHSNKEYKKIYIQHKNLVIKKQKEESQEKPDGQKLKNYNDELQKLKDEMNTITKQNSLNRLEVKLRLAFGFIANEYNYNFKNFNDEFTNDVKNEQKIKAFKNSSNEKLKEYFESTFIEKRFFHFSVNFFNKKTKKEETKQKNIFNSIENETLEELVKESPLLQIITLLYLFIPRELQGEFVGFILKIYHHTKNITSDTKEDEISIEDAQNSFSLKFKILAKNLRGLQLFHYSLSHNTLYNNKQCFFYEKGNRWQSVYKSFQISHNQDEFDIHLVIPVIKYYINLNKLMGDFEIYALLKYADKNSITVKLSDITSRDDLKYNGHYNFATLLFKTFGIDTNYKQNKVSIQNIKKTRNNLAHQNIENMLKAFENSEIFAQREEIVNYLQTEHRMQEVLHYNPINDFTMKTVQYLKSLSVHSQKEGKIADIHKKESLVPNDYYLIYKLKAIELLKQKVIEVIGESEDEKKIKNAIAKEEQIKKGNN

SEQ ID NO: 4774 - protein, 332 aa, Artificial
  Synthetic
LQTLVQDNPLLQIITLLYLFIPKELQGDFIGFILHIYHQTKNITSDTKEDEISLEESQNSFALKLKVLAKSLRGLQLFNYSLSHDTLYNTKEHFFYEKGNRWKNIYKALGISHNTEEFDIHLVTPIIKYHINLYKLIGDFEIYALLTFTKKSRSHETLSVISKSDALKFKENYNFSTLLSKAFRIDVNNKNNPPYIQTLKQIRNDISHQNIEKMMTAFEQNDIFEQRKEIIIYLQTDHQEMQKLLHYNPVNDFTMKTVQYCIMLDKYKMGVADNDEKIENRADLIIKNLKKETPNDYYLIYKLKAIELLKQKMIEAIGETEQEKKIRKAIAK

SEQ ID NO: 4775 - protein, 849 aa, Artificial
  Synthetic
MSQLKNPSNKNSLPRIIISDFNEIKINEIKIKYHKLDRLDKIIVKEMEIINNKIFFKKILFNNQIKDINSENIELENYILAGEVKPSNTKIILNRDGKEKSFIVYDGFTFKYKPNDKRISETKTNAKYILTIKDKTRHRESSTQRDILKSSIIETYKQISGFENITSKDIYTIKRYIDFKNEMMFYYTFIDDFFFPITGKNKQDKKNNFYNYKIKENAKKFISLINYRINDDFKNKNGILYDYLSNKEEIIINDFIHIQTILKDVRHAIAHFNFDFIQKLFDNEQAFNSKFDGIEILNILFNQKQEKYFEAQTNYIEEETIKILDEKELSFKKLHSFYSQICQKKPAFNKLINSFIIQDGIENKELKDYISQKYNSKFDYYLDIHTCKIYKDIYNQHKKFVADKQFLENQKTDGQKIKKLNDQINQLKTKMNNLTKKNSLKRLEIKFRLAFGFIFTEYQTFKNFNERFIEDIKANKYSTKIELLDYGKIKEYISITHEEKRFFNYKTFNKKTNKNINKTIFQSLEKETFENLVKNDNLIKMMFLFQLLLPRELKGEFLGFILKIYHDLKNIDNDTKPDEKSLSELNISTALKLKILVKNIRQINLFNYTISNNTKYEEKEKRFYEEGNQWKDIYKKLYISHDFDIFDIHLIIPIIKYNINLYKLIGDFEVYLLLKYLERNTNYKTLDKLIEAEELKYKGYYNFTTLLSKAINIALNDKEYHNITHLRNNTSHQDIQNIISSFKNNKLLEQRENIIELISKESLKKKLHFDPINDFTMKTLQLLKSLEVHSDKSEKIENLLKKEPLLPNDVYLLYKLKGIEFIKKELISNIGITKYEEKIQEKIAKGVEK

SEQ ID NO: 4776 - protein, 822 aa, Artificial
  Synthetic
MVKNPANRHALPKVIISEVDNNNILEFKIKYEKLARLDKVEVKSMHFDNNKQVVFDEVVINGGLIEPTYEDKHKKLVVTAGEKSYSIVGQKVGGKPRLLEDRVSKTKVQLELTNYVEDKEGKKRVSKTERELIVADNIELYSQIVGREVKTTKEIYLIKRFLEYRSDLLFYYGFVDNFFKVAGNGKELWKIDFTNSDSLHLIEYFKFSINDNLKNDENYLKNYVSDNTKIENDLVKCQNNFNSLRHALMHFDYDFFEKLFNGEDVGFDFDIEFLNIMIDKVDKLNIDTKKEFIDDEEVTLFGEALSLKKLYGLFSHIAINRVAFNKLINSFIIEDGIENKELKDFFNNKKESQAYEIDIHSNAEYKALYVQHKKLVMATSAMTDGDEIAKKNQEISDLKEKMKVITKENSLARLEHKLRLAFGFIYTEYKDYKTFKKHFDQDIKGAKYKGLNVEKLKEYYETTLKNSKPKTDEKLEDVAKKIDKLSLKELIDDDTLLKFVLLLFIFMPQELKGDFLGFIKKYYHDKKHIDQDTKDKDTEIEELSTGLKLKVLDKNIRSLSILKHSFSFQVKYNRKDKNFYEDGNLHGKFYKKLSISHNQEEFNKSVYAPLFRYYSALYKLINDFEIYALAQHVENHETLADQVNKSQFIQKSYFNFRKLLDNTDSISQSSSYNTLIVMRNDISHLSYEPLFNYPLDERKSYKKKTQKGVKTFHVELLYISRAKIIELISLQTDMKKLLGYDAVNDFNMKVVHLRKRLSVYANKEESIRKMQADAKTPNDFYNIYKVKGVESINQHLLKVIGVTEAEKSIEKQINEGNKKHNT

SEQ ID NO: 4777 - protein, 832 aa, Artificial
  Synthetic
MIKNPSNRYALPKVIISKIDNQNILEFKIKYKKLSKLDIVKVKSMHYDDRAIIFDEVIVNDGLIDVEYRDNHKTIFVKVGNKSYSISGQKVGGKERLLENRVSKTKVQLELKDKATNRVSKTERELIVDDNIKIYSQIVGRDVKTTKDIYLIKRFLAYRSDLLFYYGFVNNFFHVANNRSEFWKIDFNDSNNSKLIEYFKFTINDHLKNDENYLKDYISDNEKLKNDLIKVKNSFEKIRHALMHFDYDFFVKLFNGEDVGLELDIEFLDIMIDKLDKLNIDTKKEFIDDEKITIFGEELSLAKLYRFYAHTAINRVAFNKLINSFIIENGVENQSLKEYFNQQAGGIAYEIDIHQNREYKNLYNEHKKLVSRVLSISDGQEIAILNQKIAKLKDQMKQITKANSIKRLEYKLRLALGFIYTEYENYEEFKNNFDTDIKNGRFTPKDNDGNKRAFDSRELEQLKGYYEATIQTQKPKTDEKIEEVSKKIDRLSLKSLIADDILLKFILLMFTFMPQELKGEFLGFIKKYYHDTKHIDQDTISDSDDTIETLSIGLKLKILDKNIRSLSILKHSLSFQTKYNKKDRNYYEDGNIHGKFFKKLGISHNQEEFNKSVYAPLFRYYSALYKLINDFEIYTLSLHIVGSETLTDQVNKSQFLSGRYFNFRKLLTQSYHINNNSTHSTIFNAVINMRNDISHLSYEPLFDCPLNGKKSYKRKIRNQFKTINIKPLVESRKIIIDFITLQTDMQKVLGYDAVNDFTMKIVQLRTRLKAYANKEQTIQKMITEAKTPNDFYNIYKVQGVEEINKYLLEVIGETQAEKEIREKIERGNIANF

SEQ ID NO: 4778 - protein, 809 aa, Artificial
  Synthetic
MIKNPSNRHSLPKVIISEVDHEKILEFKIKYEKLARLDRFEVKAMHYEGKEIVFDEVLVNGGLIEVEYQDDNKTLFVKVGEKSYSIRGKKVGGKQRLLEDRVSKTKVQLELSDGVVDNKGNLRKSRTERELIVADNIKLYSQIVGREVTTTKEIYLVKRFLAYRSDLLFYYSFVDNFFKVAGNEKELWKINFDDATSAQFMGYIPFMVNDNLKNDNAYLKDYVRNDVQIKDDLKKVQTIFSALRHTLLHFNYEFFEKLFNGEDVGFDFDIGFLNLLIENIDKLNIDAKKEFIDNEKIRLFGENLSLAKVYRLYSDICVNRVGFNKFINSMLIKDGVENQVLKAEFNRKFGGNAYTIDIHSNQEYKRIYNEHKKLVIKVSTLKDGQAIRRGNKKISELKEQMKSMTKKNSLARLECKMRLAFGFLYGEYNNYKAFKNNFDTNIKNSQFDVNDVEKSKAYFLSTYERRKPRTREKLEKVAKDIESLELKTVIANDTLLKFILLMFVFMPQELKGDFLGFVKKYYHDVHSIDDDTKEQEEDVVEAMSTSLKLKILGRNIRSLTLFKYALSSQVNYNSTDNIFYVEGNRYGKIYKKLGISHNQEEFDKTLVVPLLRYYSSLFKLMNDFEIYSLAKANPTAVSLQELVDDETSPYKQGNYFNFNKMLRDIYGLTSDEIKSGQVVFMRNKIAHFDTEVLLSKPLLGQTKMNLQRKDIVSFIEARGDIKELLGYDAINDFRMKVIHLRTKMRVYSDKLQTMMDLLRNAKTPNDFYNVYKVKGVESINKHLLEVLAQTAEERTVEKQIRDGNEKYDL

SEQ ID NO: 4779 - protein, 809 aa, Artificial; identical to SEQ ID NO: 4778
  Synthetic

SEQ ID NO: 4780 - protein, 847 aa, Artificial
  Synthetic
MMTKKPANRHALPKVIISEVDNTNILEFKIKYEKLARLDRVEVKAMHYEDGRIIFDEVVVNGGLIEVEYQDDHKTLFVQVGEKSYSISGQKVGGKQRLLEDRVSKTKVQLELSDGSSERVSRTERELIVADNIKLYSQIVGHEVKTTKEIYLAKRFLGYRSDLLFYYGFVDNFFRESKNLKYGKQPVELWEDKFQVNDKLTAYTKFMFNDDLQNSESYLKEYVKDNHKIKNDLESARDIFATFRHNLMHFNYSFFTRLFNGEDVKIKNLQTKKFESLSDVLRNVEFLNKVIQSIDKLNIDTRKEFIDKEKITLFNEELDLQQLYGFFAYTAINRVAFNKLINSFIIKDGIENEQLKEYFNQRVDGTAYEIDIHQNREYKELYKKHKNLVSKVSTLSDGKEIARGNTEISVLKEQMNKITKANSLKRLEHKLRLAFGFIYTEYGSYKAFVSRFNEDTKRKKIKNVEFEKIGVEKQKEYYESTFTSNNKDKLGELIQEYEKLSLNDLIENDTFLKVILLLFIFMPKEVKGDFLGFIKKYYHDTKHIEEDTKEKDEGFTNTLPIGLKLKIVERNIAKLSVLKHSLSLKVKYNRGQYEEDNTYRKVFKKLNISHNQEEFHKSMFSPLLRYYASLYKLINDFEIYTLSHYITDKYSTLNKVIASEQFHYRYGWNREEKKGELVKTDNYTFSTLLSKKYGHKNSQEISEMRNKISHFDEKILFKFPLEEVSSVPKGKGKYKKDEPIKSLKEKREEIVSLMEKQTDMQKVLGYDAINDFRMKTVQFQTKLKVYSNKEETIKKMIVEAKTPNDYYNIYKVKGVEGINEHLLNVIGETEAEKSIQEQIAEGNKVNV

SEQ ID NO: 4781 - protein, 806 aa, Artificial
  Synthetic
MTKKPSNRNSLPKVIINKVDESSILEFKIKYEKLARLDRFEVRSMRYDGDGRIIFDEVVANAGLLDVDYEDDNRTIVVKIENKAYNIYGKKVGGEKRLNGKISKAKVQLILTDSIRKNANDTHRHSLTERELINKNEVDLYSKIAEREISTTKDIYLVKRFLAYRSDLLLYYAFINHYVRVNGNKKEFWKTEIDDKIIDYFIYTINDTLKNKEGYLEKYIVDRDQIKKDLEKIKQIFSHLRHKLMHYDFRFFTDLFDGKDVDIKVDNSIQKISELLDIEFLNIVIDKLEKLNIDAKKEFIDDEKITLFGQEIELKKLYSLYAHTSINRVAFNKLINSFLIKDGVENKELKEYFNAHNQGKESYYIDIHQNQEYKKLYIEHKNLVAKLSATTDGKEIAKINRELADKKEQMKQITKANSLKRLEYKLRLAFGFIYTEYKDYERFKNSFDTDTKKKKFDAIDNAKIIEYFEATNKAKKIEKLEEILKGIDKLSLKTLIQDDILLKFLLLFFTFLPQEIKGEFLGFIKKYYHDITSLDEDTKDKDDEITELPRSLKLKIFSKNIRKLSILKHSLSYQIKYNKKESSYYEAGNVFNKMFKKQAISHNLEEFGKSIYLPMLKYYSALYKLINDFEIYALYKDMDTSETLSQQVDKQEYKRNEYFNFETLLRKKFGNDIEKVLVTYRNKIAHLDFNFLYDKPINKFISLYKSREKIVNYIKNHDIQAVLKYDAVNDFVMKVIQLRTKLKVYADKEQTIESMIQNTQNPNGFYNIYKVKAVENINRHLLKVIGYTESEKAVEEKIRAGNTSKS

SEQ ID NO: 4782 - protein, 840 aa, Artificial
  Synthetic
MLKHKRKNKNSLARVVLSNYDSNNIYEIKIKYEKLAKLDKINIIEMDYDADNNVMFKKVLFNNKEIDLSHKDKTKINIELDNKKYNISAKKQIGKTHLVVRNKQTSKISRIKKIQDTYYRGKDVFILDNNIEILDKKQTKDKFIVTLNDITNNKTTSTEAELIDDTKDIFKKISAKKDLKSSDIYKIKRFISIRSNFSFYYTFVDNYFKIFHAKKDKNKEELYKIKFKDEINIKPYLENILDNMKNKNGILYNYANDRKKVLNDLRNIQYVFKEFRHKLAHFDYNFLDNFFSNSVEEKYKQKVNEIKLLDILLDNIDSLNVVPKQNYIEDETISVFDAKDIKLKRLYTYYIKLTINYPGFKKLINSFFIQDGIENQELKEYINNKEKDTQVLKELDNKAYYMDISQYRKYKNIYNKHKELVSEKELSSDGKKINSLNQKINKLKIDMKNITKPNALNRLIYRLRVAFGFIYKEYATINNFNKSFLQDTKTKRFENISQQDIKSYLDISYQDKGKFFVKSKKTFKNKTTVKYTFEDLDLTLNEIITQDDIFVKVIFLFSIFMPKELNGDFFGFINMYYHKMKNISYDTKDIDMLDTISQNMKLKILEQNIKKTYVFKYYLDLDSSIYSKLVQNIKITEDIDSKKYLYAKIFKYYQHLYKLISDVEIYLLYKYNSKENLSITIDKDELKHRGYYNFQSLLIKNNINKDDAYWSIVNMRNNLSHQNIDELVGHFCKGCLRKSTTDIAELWLRKDILTITNEIINKIESFKDIKITLGYDCVNDFTQKVKQYKQKLKASNERLAKKIEEKQNQVVDEKNKEELEKNILNMKNIQKINRYILDIL

SEQ ID NO: 4783 - protein, 840 aa, Artificial; identical to SEQ ID NO: 4782
  Synthetic

SEQ ID NO: 4784 - protein, 840 aa, Artificial
  Synthetic
MLKHKRKNKNSLARVVLSNYDSNNIYEIKIKYEKLAKLDKINIIEMDYDADNNVMFKKVLFNNKEIDLSHKDKTKINIELDNKKYNISAKKQIGKTHLVVRDKQTSKISRIKKIQDTYYRGKDVFILDNNIEILDKKQTKDKFIVTLNDITNDKTTSTEAELIDDTKDIFKKISAKKDLKSSDIYKIKRFISIRSNFSFYYTFVDNYFKIFHAKKDKNKEELYKIKFKDEINIKPYLENILDNMKNKNGILYDYADDREKVLNDLKNIQYVFTEFRHKLAHFDYNFLDNFFSNSVTDQYKQKVNEIKLLDILLDNIDSLNVVPKQNYIEDETISVFDAKDIKLKRLYTYYIKLTINYPGFKKLINSFFIQDGIENQELKEYINNKEKDTQVLKELDNKAYYMDISQYRKYKNIYNKHKELVSEKELSSDGQKINSLNQKINKLKIEMKNITKPNALNRLIYRLRVAFGFIYKEYATINNFNKSFLQDTKIKRFENISQQDIKNYLDISYQDKGKFFVKSKKTFKNKTTIKYTFEDLDLTLNEIITQDDIFVKVIFLFSIFMPKELNGDFFGFINMYYHKMKNISYDTKDIDMLDTISQNMKLKILEQNIKKTYVFKYYLDLDSSIYSKLVQNIKITEDIDSKKYLYAKIFKYYQHLYKLISDVEIYLLYKYNSKENLSITIDKDELKHRGYYNFQSLLIKNNINKDDAYWSIVNMRNNLSHQNIDELVGHFCKGCLRKSTTDIAELWLRKDILTITNEIINKIESFKDIKITLGYDCVNDFTQKVKQYKQKLKASNERLAKKIEEKQNQVVDEKNKEELEKKILNMKNIQKINRYILDIL

SEQ ID NO: 4785 - protein, 840 aa, Artificial; identical to SEQ ID NO: 4784
  Synthetic

SEQ ID NO: 4786 - protein, 668 aa, Artificial
  Synthetic
LTEKKSIIFKNKSSVEIVKKDIFSQTPDNMIRNYKITLKISEKNPRVVEAEIEDLMNSTILKDGRRSARREKSMTERKLIEEKVAENYSLLANCPMEEVDSIKIYKIKRFLTYRSNMLLYFASINSFLCEGIKGKDNETEEIWHLKDNDVRKEKVKENFKNKLIQSTENYNSSLKNQIEEKEKLLRKESKKGAFYRTIIKKLQQERIKELSEKSLTEDCEKIIKLYSELRHPLMHYDYQYFENLFENKENSELTKNLNLDIFKSLPLVRKMKLNNKVNYLEDNDTLFVLQKTKKAKTLYQIYDALCEQKNGFNKFINDFFVSDGEENTVFKQIINEKFQSEMEFLEKRISESEKKNEKLKKKFDSMKAHFHNINSEDTKEAYFWDIHSSSNYKTKYNERKNLVNEYTELLGSSKEKKLLREEITQINRKLLKLKQEMEEITKKNSLFRLEYKMKIAFGFLFCEFDGNISKFKDEFDASNQEKIIQYHKNGEKYLTYFLKEEEKEKFNLEKMQKIIQKTEEEDWLLPETKNNLFKFYLLTYLLLPYELKGDFLGFVKKHYYDIKNVDFMDENQNNIQVSQTVEKQEDYFYHKIRLFEKNTKKYEIVKYSIVPNEKLKQYFEDLGIDIKYLTGSVESGEKWLGENLGIDIKYLTVEQKSEVSEEKIKKFL

SEQ ID NO: 4787 - protein, 897 aa, Artificial
  Synthetic
MENKGNNKKIDFDENYNILVAQIKEYFTKEIENYNNRIDNIIDKKELLKYSEKKEESEKNKKLEELNKLKSQKLKILTDEEIKADVIKIIKIFSDLRHSLMHYEYKYFENLFENKKNEELAELLNLNLFKNLTLLRQMKIENKTNYLEGREEFNIIGKNIKAKEVLGHYNLLAEQKNGFNNFINSFFVQDGTENLEFKKLIDEHFVNAKKRLERNIKKSKKLEKELEKMEQHYQRLNCAYVWDIHTSTTYKKLYNKRKSLIEEYNKQINEIKDKEVITAINVELLRIKKEMEEITKSNSLFRLKYKMQIAYAFLEIEFGGNIAKFKDEFDCSKMEEVQKYLKKGVKYLKYYKDKEAQKNYEFPFEEIFENKDTHNEEWLENTSENNLFKFYILTYLLLPMEFKGDFLGVVKKHYYDIKNVDFTDESEKELSQVQLDKMIGDSFFHKIRLFEKNTKRYEIIKYSILTSDEIKRYFRLLELDVPYFEYEKGTDEIGIFNKNIILTIFKYYQIIFRLYNDLEIHGLFNISSDLDKILRDLKSYGNKNINFREFLYVIKQNNNSSTEEEYRKIWENLEAKYLRLHLLTPEKEEIKTKTKEELEKLNEISNLRNGICHLNYKEIIEEILKTEISEKNKEATLNEKIRKVINFIKENELDKVELGFNFINDFFMKKEQFMFGQIKQVKEGNSDSITTERERKEKNNKKLKETYELNCDNLSEFYETSNNLRERANSSSLLEDSAFLKKIGLYKVKNNKVNSKVKDEEKRIENIKRKLLKDSSDIMGMYKAEVVKKLKEKLILIFKHDEEKRIYVTVYDTSKAVPENISKEILVKRNNSKEEYFFEDNNKKYVTEYYTLEITETNELKVIPAKKLEGKEFKTEKNKENKLMLNNHYCFNVKIIY

SEQ ID NO: 4788 - protein, 655 aa, Artificial
  Synthetic
MENKNKTKPNRGSIVRIIISNYDTKGIKEIKVRYRKQAQLDTFILQTTLDKGNNSILISEFRVKAREKNRYSFTYDGKEKFSAPSNSVVITKIDNAAPEKFKEIRKYKITLEIDEKCKTGNMITAAIEDLLEDDIAREGIRNPRRKASKTERKLIAESICHNYAQIAQCPVEEIDAVKIYKVKRFLSYRSNMLLFFALINDFLCKNLKNKKGEKINEIWKMENKGNNKKIDFDENYNILVAQIKEYFTKEIENYNNRIDNIIDKKELLKYSEKKEESEKNKKLEELNKLKSQKLKILTDEEIKADVIKIIKIFSDLRHSLMHYEYKYFENLFENKKNEELAELLNLNLFKNLTLLRQMKIENKTNYLEGREEFNIIGKNIKAKEVLGHYNLLAEQKNGFNNFINSFFVQDGTENLEFKKLIDEHFVNAKKRLERNIKKSKKLEKELEKMEQHYQRLNCAYVWDIHTSTTYKKLYNKRKSLIEEYNKQINEIKDKEVITAINVELLRIKKEMEEITKSNSLFRLKYKMQIAYAFLEIEFGGNIAKFKDEFDCSKMEEVQKYLKKGVKYLKYYKDKEAQKNYEFPFEEIFENKDTHNEEWLENTSENNLFKFYILTYLLLPMEFKGDFLGVVKKHYYDIKNVDFTDESEKELLFLVK

SEQ ID NO: 4789 - protein, 333 aa, Artificial
  Synthetic
MENKNKSNRGSIVRIIISNYDMKGIKELKVRYRKQAQLDTFILQTTLDKSNNSILISEFRVKVREKYRYSFTYDGKEKFSVPSNSVIVTKIDNAAPEKSKEIRKYKITLGIDEKCKTGSMITAAIEDLLEDDRVREGIRNPRRKVSKTERKLIAETICHNYAQIAQCPVEEIDAVKIYKVKRFLSYRSNMLLFFALINDFLCKNLKDKKGEKIREIWKIENKGNKNWIDYDRYYNILVAQIKEYFTKEIENYNNRIDNIISKKELLKYSEEKKESEKNKKLEELKRKGREYFKYLDELEILRREKVNTPKREEELIKKIEESSCPGQSFFQAV

SEQ ID NO: 4790 - protein, 389 aa, Artificial
  Synthetic
MEKDKTYKPKQNRSSIIRIILSNYDMIGIKELKILYQKQGGVDTFNLESSIDLDSRKVIIKSFKVKAKEIKRYSFSYDTGDNFSEDKNSVTITKVDNILNKEIRKYKITLSLKEKTTDVILAEVEDKLEESEKKVSGIRTNFRNRTSKTERKLLSQEVCKNYSEIARVSTEDIDSLKIYKIKRFLSYRSNLLMYFALINNFLCAPLKNEGITEIWKISKEDAPLSDERLEKITGHVFNTLSKEIENRVNQLQKRISKNNREIEELKISCNYKNNNKRKYNQLELLNKDLDKKISELSGYSSKENLKQDLKKVIEIFSNFRHALMHYDYMYFENLFENKACDNLKNLLDLNFFKYTKLIEEFKIENKTNYLDGEEKLSVLGKTKNIKNLY

SEQ ID NO: 4791 - protein, 548 aa, Artificial
  Synthetic
MLYSSTFIIESQIEEGVFILKNIKWKAKEKYRYELFIKEVNSTSVEIIKKDRFLNNEIVRGYILNFKVSSKNKDVVVEIEDILPLKSVQQGEKANIRRITSQTERKLLNEETQISYSKIANCSPKDIDSIKIYKIKRYLSYRSNMLLFFSLINDFLCEGLYDEKGKKINELWRITNKVDKDIIDERVNKIAKNLDDTLFIELKNYNNGIRKSIEKKNNSITDCKNKIVSCERKIEKLDEEKNRKKINQFKRDIANCNEKIKEYEESIALKEKEKLFNLGFEKIKADVYKILEIYTELRHKLSHYNYIYFENLFENREKDLKLAELLNLNIFNYLTLSKKLRIENKTNYLEENTKFSILGVSGSAKKYYSLYNTLCEQKNGFNNFINSFFVKDGVENSEFKEKVEAKLKEDIKYLESLETKNNLNKKIPRKNKELELLKTQYSELGIVYFWDIHNSLRYKKLYNKRKDNVKEYNQTLKGNRNKTTLRNCGRKLFSKKNEMEKITKRNSIVRLKYKLQIAYAFIMKEYQGDISRFKSDFDISKIEQIKKY

SEQ ID NO: 4792 - protein, 343 aa, Artificial
  Synthetic
MEGGTKIKANRSSIIRIIISNYDSNGIKEIKVRYNKQAQLDTFLIDSKLENGIFTLKDVKWKAKEKNRYDMIIGELIDNTVKITKIDKFSNKAIREYIIKFSVSPKNKDVVVVDIKDCMEHNLTIKGERSNTRRDTSQTERKLLSKETQISYSKIACCSPENIDSLKIYKIKRYLSYRSNMLLFFSLINDFICEGIKEEKIVELYKITSKVDKNIIEERVTKIAQYLRENLSNELENYNNGIEKTISKKSNSINDCNNRIESCKKKINKLDKIKNKKQIRNLERIIQDSENKIKEYSKIIAEKEKERLVALAEDKIKEDVYKILELYSDLRHKLAHYNYAYFE

SEQ ID NO: 4793 - protein, 593 aa, Artificial
  Synthetic
MNKKQNKSNKNSIIRIIASNYDDKQIKELKVLYTKQGGVDNITIEDMRLDIESERIQFTTAKSPSTQVDIEVQTEGSMLIQRRQRYTEAVVILRKYKVWGECKKTNDGGTQVKLFVEDLMAEDERNTPINKRRIQSSTERKLLGSEVKSNYSLILKCTPDEVDSRSIYKAKRFLSYRSNMILFFNFINDFMIKGLPEPEIEKGQIKELWQIVSSTKTDPERFNTIIESIAEHIDAHICEFFENHNNYADRMNEKNSEKKGFRPEIIRFDSIDKDSIVEDVKNIVIILSDFRHKLAHYEFEYFDRLYTGEGVNVTHNKSAIALNKLLNLNIFKELSKITEFKEDKSTTYLDDDDTVRILGKSKNAKKFYTMYSKICSRKNGFNQFINSFFTVDGDEDPVFKAAINNEFESRIEFLKTTLKSGKINDKSIKKRTRTNMEYELKELEQIKTYTGSAYAWDIHLCPEYKTLYNQRKNLIEKQSALISSGNSKVHRKEITEINKKLLSLKQKMERITKLNSKCRLRYKLQVAYGFLYTEFKMNLKQFGDKFDMSRDELIKGFRSKGEDYLKTRKNDVEFDLEKLRKKVNDIKQANMDL

SEQ ID NO: 4794 - protein, 796 aa, Artificial
  Synthetic
VEKDKKGEKIDISQEMIEEDLRKILILFSRLRHSMVHYDYEFYQALYSGKDFVISDKNNLENRMISQLLDLNIFKELSKVKLIKDKAISNYLDKNTTIHVLGQDIKAIRLLDIYRDICGSKNGFNKFINTMITISGEEDREYKEKVIEHFNKKMENLSTYLEKLEKQDNAKRNNKRVYNLLKQKLIEQQKLKEWFGGPYVYDIHSSKRYKELYIERKKLVDRHSKLFEEGLDEKNKKELTKINDELSKLNSEMKEMTKLNSKYRLQYKLQLAFGFILEEFDLNIDTFINNFDKDKDLIISNFMKKRDIYLNRVLDRGDNRLKNIIKEYKFRDTEDIFCNDRDNNLVKLYILMYILLPVEIRGDFLGFVKKNYYDMKHVDFIDKKDKEDKDTFFHDLRLFEKNIRKLEITDYSLSSGFLSKEHKVDIEKKINDFINRNGAMKLPEDITIEEFNKSLILPIMKNYQINFKLLNDIEISALFKIAKDRSITFKQAIDEIKNEDIKKNSKKNDKNNHKDKNINFTQLMKRALHEKIPYKAGMYQIRNNISHIDMEQLYIDPLNSYMNSNKNNITISEQIEKIIDVCVTGGVTGKELNNNIINDYYMKKEKLVFNLKLRKQNDIVSIESQEKNKREEFVFKKYGLDYKDGEINIIEVIQKVNSLQEELRNIKETSKEKLKNKETLFRDISLINGTIRKNINFKIKEMVLDIVRMDEIRHINIHIYYKGENYTRSNIIKFKYAIDGENKKYYLKQHEINDINLELKDKFVTLICNMDKHPNKNKQTINLESNYIQNVKFIIP

SEQ ID NO: 4795 - protein, 353 aa, Artificial
  Synthetic
MDSGNKKKLKPNKSSIVRIIISNFDDKQIKEIKVLYSKQGGVDVIRLNGTEPDEKGRIKFNFKSASNRLEDEQTYSLGENDGQTFFVTTNEDETELCVTKRSKFTNEIIKEYRLFGEYVATNSNEKKVIVSVSDDIDYSGEKYQNSQRKNKRTINQSTNRMLLDLDVINNYRQIGSESDKIDKNVIIDSKEIYKINKFLNYRSDMIIYYQIINNFLMQGSAKRDDFENEIWKYVKSTDSKTKKKFLNELRVEYLPEDCRKRLKELKTLNFIEEGRNIILAGSELLFTFLSLRAERKSTIITTNLSFDRWNEIFNDPVLTAALIDRLTHKSYVINMNGDSYRIKETREWLEETN

SEQ ID NO: 4796 - protein, 409 aa, Artificial
  Synthetic
MIVAETPENELDRLKALFELDILDTPLEADFDQLTELAASICGSPIALVSLLDDKRQWFKSHFGLDASETPRDYAFCAHAINQDEVFEICDSRKDERFHDNPLVTGDPRVIFYAGAPLVTGDGHKLGTVCVIDNEPRSLTDLQKKQLSILSRQVMALIESRQAVRLKNEAFNKLMSLTKNINEQNKELSQFTTRASHDIQGPIRQIKQLARFCQKSAREDSTEFIDDDCEKIISRCDDLSHFISSIFDLTGSSVVVENKREINLKKLVLLAISNNESLIDQYKVNVTYGVDVSSPFLSEPVRVLQILNNLISNAVKYSNPEKENKTVDVSVSEKNEVIVIKVVDNGLGIPKEFQSRLFDQFERFHTNSASGTGLGTSIIQKHVKMLLGGITFESDQNGTAFTVTLPFSS

SEQ ID NO: 4797 - protein, 585 aa, Artificial
  Synthetic
MRKLRAVFYARVSTEEEKQLNALEKQIQENRDIIKEQGWELVGEYIDEGKSGTTTKRRSDYKRLLDDMEGGSFDIVVCKDQDRLQRNTLDWYLFVDNLVRNNLKLYMYLDSKFFTPSEDALITGIKAIIAEEYSRNLSKKLNNSNKRRIEKALNGEELSAMGNGKSLGYAIERSEGGKKSKWVQVPEEIEVCKIVWDLYEKYDSIRKVRDEINNMGYRNSVGKPFTSESIARILKNEKAKGIIVLGKYHHDFDLKKIVRMPEEDLVRVPAPELAYVSEERFDRVNARLKAKSNNGRGRNVGRDPLSGKIFCGKCGSVLWRRESSQRNKAGEKKTYYHWACSAKYAKGDIVCEGTGTTTVAIRNVYKELTSEIEVDRKALRSYFVKWLNQLKTSLSDTSGNAKVEKELEKLERQRAKLLEAYLEEIISKEDYKSKYADIESKIEEKKKLLAPVEDNEDIKEIERILANLDEELDEFIKTLDVEENKIDFLIEHTKKITVLENKDLVIELDLVAGAIIAGKKFLLYVHDSMPFPHGRICHEGHREPGRPQRRFFHRLCGYQHGGNRERYPLWYPCDFQGEADTLHGA

SEQ ID NO: 4798 - protein, 895 aa, Artificial
  Synthetic
MKKNSNDKTNAKRMGIKSFIKNGDERFITTSIKNEFPVELKLDVIKKTCEPAHEPVSFDYDPKKIDFEKPVLKEKLTSGQSGQKLSTRLFIQKDRDICGIRRKYLEKIFNSNFIEEKKDSNLPMQIVAKVLSTEKVFSNALNKIISQFLSMPRGGVTDNHGEYEIIGNIINHKSLQELNKEKKTKRIKKYLQSVIKNQSYLYNKQFLLSLDESKGSRNDIDENELYDYIRFLAILRNGIAHVFYEKNEPETAKESLFRLVDFIKNDKKLEGAFAKIKIQVNTLYKCRKEEYIKKSGKNFEIIRKIYQNDKPDEKVKDWIRYDFDKSYKYIGLSVAKLGNYTSWAKDIDNLRDKSNPDSGYAGIMHRLNEFSVYLKVKALSTEEKDKYLKNLISKENCEEKDKYYKNIAQFFCSSDLKFANVLQMVKEIKKNKGCTSEDKNCKLCVDERKFNDLSVIVYFISCFLDNKDQNIFLSDLINRFGALSDLLRIQNKILGAGNKYNENYSFLKNERYVTEIKMELETIFALVKVSYKKEDKAFNRLLEDGLVMFGFSKDEAGMKVAGLKEIKEKKEGHYKNKSRSFLINSIVNSRKFAYLAKSIDPQKVPAIIKNEHIVRYILGRINKTNPGQIGRYWRYIMSQNHAGTDKVDDLTNEIIKINIKNILNDAGGWQKSKLNDNNNKKKLKYQQLIGLYLTVAYIFVKNMLECNARYFSAFAQIEKDYLIYTNSDEFYYIDKNKKNLVTERYLKLVKDIIEKNKNTVRKDKIFRKKRQRKHLADISKSIIEFEKLPCCIFTLLRNITEHLNVASNIDIIEGYGKRAGKYHKNAPASYFIFYHYIIQKILADKICTRNLLNIINTYGEPSISFIKIIYVPFAYNLPRYLNLTDARIFCNMDDK

SEQ ID NO: 4799 - protein, 895 aa, Artificial; identical to SEQ ID NO: 4798
  Synthetic

SEQ ID NO: 4800 - protein, 895 aa, Artificial; identical to SEQ ID NO: 4798
  Synthetic

SEQ ID NO: 4801 - protein, 895 aa, Artificial; identical to SEQ ID NO: 4798
  Synthetic

SEQ ID NO: 4802 - protein, 895 aa, Artificial; identical to SEQ ID NO: 4798
  Synthetic

SEQ ID NO: 4803 - protein, 895 aa, Artificial; identical to SEQ ID NO: 4798
  Synthetic

SEQ ID NO: 4804 - protein, 895 aa, Artificial; identical to SEQ ID NO: 4798
  Synthetic

SEQ ID NO: 4805 - protein, 895 aa, Artificial; identical to SEQ ID NO: 4798
  Synthetic

SEQ ID NO: 4806 - protein, 895 aa, Artificial; identical to SEQ ID NO: 4798
  Synthetic

SEQ ID NO: 4807 - protein, 895 aa, Artificial; identical to SEQ ID NO: 4798
  Synthetic

SEQ ID NO: 4808 - protein, 895 aa, Artificial; identical to SEQ ID NO: 4798
  Synthetic

SEQ ID NO: 4809 - protein, 444 aa, Artificial
  Synthetic
MAKKNKMKPRELREAQKKARQLKAAEINNNATPTIAAMPAAEVIAPAAEKKKSSVKAAGMKSILVSKNKMYITSFGKGNSAVLEYEVDNNDYNQTQLSSKNSSNIELRGVNEVNITFSSKHGFESGVEINTSNPTHRSGESSSVRGDMLGLKSELEKRFFGKTFDDNIHIQLIYNILDIEKILAVYVTNIVYALNNMLGIKDSESYDDFIGYLSARNTYKVFTHPDKSNLSDKVKGNIKKSFSTFNDLLKTKRLGYFGLEEPKTKDTRVSQAYKKRVYHMLAIVGQIRQSVFHDKSSKLDEDLYSFIDIIDPEYRETLDYLVDERFDSINKGFIQGNKVNISLLIDMMKGYEADDIIRLYYDFIVLKSQKNLGFSIKKLREKMLDEYGFRFKDKQYDSVRSKMYKLMDFLLFCNYYRNDVVAGEALVRKLRFSMTDDEKRGDIC

SEQ ID NO: 4810 - protein, 534 aa, Artificial
  Synthetic
MAKKNKMKPRELREAQKKARQLKAAEINNNAAPAIAAMPAAEVIAPAAEKKKSSVKAAGMKSILVSKNKMYITSFGKGNSAVLEYEVDKVDNNNYNKTQLSSESSSNIELCGVTKVNITFSSKHGLESGVEISTSNPTHRSGESSPVRWDMLGLKSELEKRFFGKTFDDNIHIQLIYNILDIEKILAVYVTNIVYALNNMLGVKGSESHDDFIGYLSTNNTYDVFIDPDNSSLSDDKKANVRKSLSKFNVLLKTKRLGYFGLEEPKTKDTRASQAYKKRVYHMLAIVGQIRQCVFHDKSGAKRFDLYSFINNIYPEYRDTLDYLVEERLKSINKDFIEGNKVNISLLIDMMKGYEADDIIRLYYDFIVLKSQKNLGFSIKKLREKMLDEYGFRFKDKQYDSVRSKMYKLMDFLLFCNYYRNDVAAGEALVRKLRFSMTDDEKEGIYADEAAKLWGKFRNDFENIADHMNGDVIKELGKADMDFDEKILDSEKKNASDLLYFSKMIYMLTYFLDGKEINDLLTTLISKFDNIKEF

SEQ ID NO: 4811 - protein, 534 aa, Artificial; identical to SEQ ID NO: 4810
  Synthetic

SEQ ID NO: 4812 - protein, 534 aa, Artificial; identical to SEQ ID NO: 4810
  Synthetic

SEQ ID NO: 4813 - protein, 534 aa, Artificial; identical to SEQ ID NO: 4810
  Synthetic

SEQ ID NO: 4814 - protein, 534 aa, Artificial; identical to SEQ ID NO: 4810
  Synthetic

SEQ ID NO: 4815 - protein, 534 aa, Artificial; identical to SEQ ID NO: 4810
  Synthetic

SEQ ID NO: 4816 - protein, 534 aa, Artificial; identical to SEQ ID NO: 4810
  Synthetic

SEQ ID NO: 4817 - protein, 577 aa, Artificial
  Synthetic
MAKKNKMKPRELREAQKKARQFKAAEINNNAAPAIAAMPAAEVIAPVAEKKKSSVKAAGMKSILVSENKMYITSFGKGNSAVLEYEVDNNDYNKTQLSSKDNSNIELGDVDEVNITFSSKHGFGSGVEINTSNPTHRSGESSPVRWDMLGLKSELEKRFFGKTFDDNIHIQLIYNILDIEKILAVYVTNIVYALNNMLGVKGSESHDDFIGYLSTNNIYDVFIDPDNSSLSDDKKANVRKSLSKFNVLLKTKRLGYFGLEEPKTKDNRVSEAYKKRVYHMLAIVGQIRQCVFHDKSGAKRFDLYSFINNIDPEYRDTLDYLVDERFDSINKGFVQGNKVNISLLIDMMKGYEADDIIRLYYDFIVLKSQKNLGFSIKKLREKMLDEYGYRFKDKQYDSVRSKMYKLMDFLLFCNYYRNDVVAGEALVRKLRFSMTDDEKEGIYADEAEKLWGKFRNDFENIADHMNGDVIKELGKADMDFDEKILDSEKKNASDLLYFSKMIYMLTYFLDGKEINDLLTTLISKFDNIKEFLKIMKSSAVDVECELTAGYKLFNDSQRITNELFIVKNIASMRKPAA

SEQ ID NO: 4818 - protein, 808 aa, Artificial
  Synthetic
MAKKNKMKPRELREAQKKARQFKAAEINNNAVPAIAAMPAAEAAAPAAEKKKSSVKAAGMKSILVSENKMYITSFGKGNSAVLEYEVDNNDYNKTQLSSEDSSNIELCGVNEVNITFSSKHGFESGVEINTSNPTHRSGESSPVRGDMLGLKSELEKRFFGKTFDDNIHIQLIYNILDIEKILAVYVTNIVYALNNMLGVKGSESHDDFIGYLSTNNIYDVFIDPDNSSLSDDKKANVRKSLSKFNALLKTKRLGYFGLEEPKTKDTRASEAYKKRVYHMLAIVGQIRQCVFHDKSGAKRFDLYSFINNIDPEYRDTLDYLVDERFDSINKGFIQGNKVNISLLIDMMKGYEADDIIRLYYDFIVLKSQKNLGFSIKKLREKMLEEYGYRFKDKQYDSVRSKMYKLMDFLLFCNYYRNDVVAGEALVRKLRFSMTDDEKEGIYADEAAKLWGKFRNDFENIADHMNGDVIKELGKADMDFDEKILDSEKKNASDLLYFSKMIYMLTYFLDGKEINDLLTTLISKFDNIKEFLKIMKSSAVDVECELTAGYKLFNDSQRITNELFIVKNIASMRKPAASAKLTMFRDALTILGIDDKITDDRISEILKLKEKGKGIHGLRNFITNNVIESSRFVYLIKYANAQKIREVAKNEKVVMFVLGGIPDTQIERYYKSCVEFPDMNSSLGVKRSELARMIKNISFDDFKNVKQQAKGRENVAKERAKAVIGLYLTVMYLLVKNLVNVNARYVIAIHCLERDFGLYKEIIPELASKNLKNDYRILSQTLCELCDKSPNLFCASALKSILIMQTAA

SEQ ID NO: 4819 - protein, 581 aa, Artificial
  Synthetic
MAKKNKMKPRELREAQKKARQFKAAEINNNAVPAIAAMPAAEAAAPAAEKKKSSVKAAGMKSILVSENKMYITSFGKGNSAVLEYEVDNNDYNKTQLSSEDSSNIELCGVNEVNITFSSKHGFESGVEINTSNPTHRSGESSPVRGDMLGLKSELEKRFFGKTFDDNIHIQLIYNILDIEKILAVYVTNIVYALNNMLGVKGSESHDDFIGYLSTNNIYDVFIDPDNSSLSDDKKANVRKSLSKFNALLKTKRLGYFGLEEPKTKDTRASEAYKKRVYHMLAIVGQIRQCVFHDKSGAKRFDLYSFINNIDPEYRDTLDYLVDERFDSINKGFIQGNKVNISLLIDMMKGYEADDIIRLYYDFIVLKSQKNLGFSIKKLREKMLEEYGYRFKDKQYDSVRSKMYKLMDFLLFCNYYRNDVVAGEALVRKLRFSMTDDEKEGIYADEAAKLWGKFRNDFENIADHMNGDVIKELGKADMDFDEKILDSEKKNASDLLYFSKMIYMLTYFLDGKEINDLLTTLISKFDNIKEFLKIMKSSAVNVECELTAGYKLFNDSQRITNELFIVKNIASMRKPAAYDVP

SEQ ID NO: 4820 - protein, 507 aa, Artificial
  Synthetic
MAKKNKMKPRELREAQKKARQFKAAEINNNAAPAIAAMPAAQVIAPVAEKKKSSVKAAGMKSILVSENKMYITSFGKGNSAVLEYEVDNNDYNKTQLSSKDNSNIELCGVNEVNITFSSKHGFESGVEINTSNPTHRSGESSPVRWDMLGLKSELEKRFFGKTFDDNIHIQLIYNILDIEKILAVYVTNIVYALNNMLGVKGSESHDDFIGYLSTNNTYDVFIDPDNSSLSDDKKANVRKSLSKFNVLLKTKRLGYFGLEEPKTKDNRVSEAYKKRVYHMLAIVGQIRQCVFHDKSGAKRFDLYSFINNIDPEYRDTLDYLVEERLKSINKDFIQGNKVNISLLIDMMKGYEADDIIRLYYDFIVLKSQKNLGFSIKKLREKMLEEYGFRFKDKQYDSVRSKMYKLMDFLLFCNYYRNDIAAGEALVRKLRFSMTDDEKEGLYADEAAKLWGKFRNDFENIADHMNGDVIKELGKADMDFDEKILDSEKKNASDLLYFSKMIYMLTL

SEQ ID NO: 4821 - protein, 507 aa, Artificial; identical to SEQ ID NO: 4820
  Synthetic

SEQ ID NO: 4822 - protein, 871 aa, Artificial
  Synthetic
MAKKNKMKPRELREAQKKARQLKAAEINNNAIPAIAAMPAAEVIAPAEKKKSSVKAAGMKSILVSKNKMYITSFGKGNSAVLEYEVDNNDYNKTQLSSKDNSNIELGDVNEVNITFSSKHGFGSGMKINTSNPTHRSGESSPVRWDMLGLKSELEKRFFGKTFDDNIHIQLIYNILDIEKILAVYVTNIVYALNNMLGVKGSESHDDFIGYLSTNNIYDVFIDPDNSSLSDDKKANVRKSLSKFNVLLKTKRLGYFGLEEPKTKDNRVSEAYKKRVYHMLAIVGQIRQCVFHDKSGAKRFDLYSFINNIDPEYRDTLDYLVEERLKSINKDFIQGNKVNISLLIDMMKGYEADDIIRLYYDFIVLKSQKNLGFSIKKLREKMLEEYGFRFKDKQYDSVRSKMYKLMDFLLFCNYYRNDVVAGEALVRKLRFSMTDDEKEGIYADEAAKLWGKFRNDFENIADHMNGDVIKELGKADMDFDEKILDSEKKNASDLLYFSKMIYMLTYFLDGKEINDLLTTLISKFDNIKEFLKIMKSSAVDVECELTAGYKLFNDSQRITNELFIVKNIASMRKPAASAKLTMFRDALTILGIDDNITDDRISEILKLKEKGKGIHGLRNFITNNVIESSRFVYLIKYANAQKIREVAKNEKVVMFVLGGIPDTQIERYYKSCVEFPDMNSSLEAKRSELARMIKNISFDDFKNVKQQAKGRENVAKERAKAVIGLYLTVMYLLVKNLVNVNARYVIAIHCLERDFGLYKEIIPELASKNLKNDYRILSQTLCELCDDRDESPNLFLKKNKRLRKCVEVDINNADSSMTRKYRNCIAHLTVVRELKEYIGDIRTVDSYFSIYHYVMQRCITKREMTQSKKRK

SEQ ID NO: 4823 - protein, 686 aa, Artificial
  Synthetic
VLSGIFVNAFSSKHGFESGVEINTSNPTHRSGESSPVRGDMLGLKSELEKRFFGKTFDDNIHIQLIYNILDIEKILAVYVTNIVYALNNMLGVKGSESHDDFIGYLSTNNTYDVFIDPDNSSLSDDKKANVRKSLSKFNVLLKTKRLGYFGLEEPKTKDNRVSEAYKKRVYHMLAIVGQIRQCVFHDKSGAKRFDLYSFINNIDPEYRDTLDYLVEERLKSINKDFIQGNKVNISLLIDMMKGYEADDIIRLYYDFIVLKSQKNLGFSIKKLREKMLEEYGFRFKDKQYDSVRSKMYKLMDFLLFCNYYRNDIAAGEALVRKLRFSMTDDEKEGLYADEAAKLWGKFRNDFENIADHMNGDVIKELGKADMDFDEKILDSEKKNASDLLYFSKMIYMLTYFLDGKEINDLLTTLISKFDNIKEFLKIMKSSAVNVECELTAGYKLFNDSQRITNELFIVKNIASMRKPAASAKLTMFRDALTILGIDDKITDDRISEILKLKEKGKGIHGLRNFITNNVIESSRFVYLIKYANAQKIREVAENEKVVMFVLGGIPDTQIERYYKSCVEFPDMNSSLEAKRSELARMIKNIRFDDFKNVKQQAKGRENVAKERAKAVIGLYLTVMYLLVKNLVNVNARYVIAIHCLERDFGLYKEIIPELASKNLKNDYRILSQTLCELCDDRDESP

SEQ ID NO: 4824 - protein, 699 aa, Artificial
  Synthetic
VLSGIFVNAFSSKHGFESGVEINTSNPTHRSGESSPVRGDMLGLKSELEKRFFGKTFDDNIHIQLIYNILDIEKILAVYVTNIVYALNNMLGVKGSESHDDFIGYLSTNNIYDVFIDPDNSSLSDDKKANVRKSLSKFNVLLKTKRLGYFGLEEPKTKDNRVSEAYKKRVYHMLAIVGQIRQCVFHDKSGAKRFDLYSFINNIDPEYRDTLDYLVEERLKSINKDFIQGNKVNISLLIDMMKGYEADDIIRLYYDFIVLKSQKNLGFSIKKLREKMLEEYGFRFKDKQYDSVRSKMYKLMDFLLFCNYYRNDVVAGEALVRKLRFSMTDDEKEGIYADEAAKLWGKFRNDFENIADHMNGDVIKELGKADMDFDEKILDSEKKNASDLLYFSKMIYMLTYFLDGKEINDLLTTLISKFDNIKEFLKIMKSSAVDVECELTAGYKLFNDSQRITNELFIVKNIASMRKPAASAKLTMFRDALTILGIDDNITDDRISEILKLKEKGKGIHGLRNFITNNVIESSRFVYLIKYANAQKIREVAKNEKVVMFVLGGIPDTQIERYYKSCVEFPDMNSSLEAKRSELARMIKNISFDDFKNVKQQAKGRENVAKERAKAVIGLYLTVMYLLVKNLVNVNARYVIAIHCLERDFGLYKEIIPELASKNLKNDYRILSQTLCELCDDRDESPNLFLKKNKRLRKC

SEQ ID NO: 4825 - protein, 600 aa, Artificial
  Synthetic
VIFMAKKNKMKPRELREAQKKARQLKAAEINNNAAPAIAAMPAAEVIAPAAEKKKSSVKAAGMKSILVSENKMYITSFGKGNSAVLEYEVDNNDYNQTQLSSKDNSNIQLGGVNEVNITFSSKHGFESGVEINTSNPTHRSGESSPVRGDMLGLKSELEKRFFGKTFDDNIHIQLIYNILDIEKILAVYVTNIVYALNNMLGVKGSESHDDFIGYLSTNNIYDVFIDPDNSSLSDDKKANVRKSLSKFNALLKTKRLGYFGLEEPKTKDNRVSQAYKKRVYHMLAIVGQIRQCVFHDKSGAKRFDLYSFINNIDPEYRDTLDYLVEERLKSINKDFIEDNKVNISLLIDMMKGYEADDIIRLYYDFIVLKSQKNLGFSIKKLREKMLDEYGFRFKDKQYDSVRSKMYKLMDFLLFCNYYRNDIAAGESLVRKLRFSMTDDEKEGIYADEAAKLWGKFRNDFENIADHMNGDVIKELGKADMDFDEKILDSEKKNASDLLYFSKMIYMLTYFLDGKEINDLLTTLISKFDNIKEFLKIMKSSAVDVECELTAGYKLFNDSQRITNELFIVKNIASMRKPAASAKLTMFRDALTILGIDDKI

SEQ ID NO: 4826 - protein, 803 aa, Artificial
  Synthetic
VIFMAKKNKMKPRELREAQKKARQLKAAEINNNAAPAIAAMPAAEVIAPAAEKKKSSVKAAGMKSILVSENKMYITSFGKGNSAVLEYEVDNNDYNQTQLSSKDNSNIQLGGVNEVNITFSSKHGFESGVEINTSNPTHRSGESSPVRGDMLGLKSELEKRFFGKTFDDNIHIQLIYNILDIEKILAVYVTNIVYALNNMLGVKGSESHDDFIGYLSTNNIYDVFIDPDNSSLSDDKKANVRKSLSKFNALLKTKRLGYFGLEEPKTKDNRVSQAYKKRVYHMLAIVGQIRQCVFHDKSGAKRFDLYSFINNIDPEYRDTLDYLVEERLKSINKDFIEDNKVNISLLIDMMKGYEADDIIRLYYDFIVLKSQKNLGFSIKKLREKMLDEYGFRFKDKQYDSVRSKMYKLMDFLLFCNYYRNDIAAGESLVRKLRFSMTDDEKEGIYADEAAKLWGKFRNDFENIADHMNGDVIKELGKADMDFDEKILDSEKKNASDLLYFSKMIYMLTYFLDGKEINDLLTTLISKFDNIKEFLKIMKSSAVDVECELTAGYKLFNDSQRITNELFIVKNIASMRKPAASAKLTMFRDALTILGIDDKITDDRISGILKLKEKGKGIHGLRNFITNNVIESSRFVYLIKYANAQKIREVAKNEKVVMFVLGGIPDTQIERYYKSCVEFPDMNSSLGVKRSELARMIKNISFDDFKNVKQQAKGRENVAKERAKAVIGLYLTVMYLLVKNLVNVNARYVIAIHCLERDFGLYKEIIPELASKNLKNDYRILSQTLCELCDKSPNLFLKKNERL

SEQ ID NO: 4827 - protein, 784 aa, Artificial
  Synthetic
VIFMAKKNKMKPRELREAQKKARQLKAAEINNNAAPAIAAMPAAEAAEKKKSSVKAAGMKSILVSENKMYITSFGKGNSAVLEYEVDNNDYNQTQLSSKGSSNIELHGVNEVNITFSSKHGFESGVEINTSNPTHRSGESSPVRWDMLGLKSELEKRFFGKTFDDNIHIQLIYNILDIEKILAVYVTNIVYALNNMLGVKGSESHDDFIGYLSTNNTYDVFIDPDNSSLSDDKKANVRKSLSKFNVLLKTKRLGYFGLEEPKTKDTRVSQAYKKRVYHMLAIVGQIRQCVFHDKSGAKRFDLYSFINNIDPEYRETLDYLVDERFDSINKGFIEGNKINISLLIDMMKGYEADDIIRLYYDFIVLKSQKNLGFSIKKLREKMLDEYGFRFKDKQYDPVRSKMYKLMDFLLFCNHYRNDVAAGEALVRKLRFSMTDDEKEGIYADEAAKLWGKFRNDFENIADHMNGDVIKELGKADMDFDEKILDSEKKNASDLLYFSKMIYMLTYFLDGKEINDLLTTLISKFDNIKEFLKIMKSSAVDVECELTAGYKLFNDSQRITNELFIVKNIASMRKPAASAKLTMFRDALTILGIDDNITDDRISEILKLKEKGKGIHGLRNFITNNVIESSRFVYLIKYANAQKIREVAKNEKVVMFVLGGIPDTQIERYYKSCVEFPDMNSSLEAKRSELARMIKNISFDDFKNVKQQAKGRENVAKERAKAVIGLYLTVMYLLVKNLVNVNARYVIAIHCLERDFGLYKEIIPELASKNLKNDYRILSQTLCEL

SEQ ID NO: 4828 - protein, 796 aa, Artificial
  Synthetic
MAKKNKMKPRELREAQKKARQLKAAEINNNAAPAIAAMPAAEAAAPAAEKKKSSVKAAGMKSILVSENKMYITSFGKGNSAVLEYEVDNNDYNQTQLSSKGSSNIELHGVNEVNITFSSKHGFESGVEINTSNPTHRSGESSPVRWDMLGLKSELEKRFFGKTFDDNIHIQLIYNILDIEKILAVYVTNIVYALNNMLGVKGSESHDDFIGYLSTNNTYDVFIDPDNSSLSDDKKANVRKSLSKFNVLLKTKRLGYFGLEEPKTKDTRVSQAYKKRVYHMLAIVGQIRQCVFHDKSGAKRFDLYSFINNIDPEYRETLDYLVDERFDSINKGFIEGNKINISLLIDMMKGYEADDIIRLYYDFIVLKSQKNLGFSIKKLREKMLDEYGFRFKDKQYDPVRSKMYKLMDFLLFCNHYRNDVAAGEALVRKLRFSMTDDEKEGIYADEAAKLWGKFRNDFENIADHMNGDVIKELGKADMDFDEKILDSEKKNASDLLYFSKMIYMLTYFLDGKEINDLLTTLISKFDNIKEFLKIMKSSAVDVECELTAGYKLFNDSQRITNELFIVKNIASMRKPAASAKLTMFRDALTILGIDDNITDDRISEILKLKEKGKGIHGLRNFITNNVIESSRFVYLIKYANAQKIREVAKNEKVVMFVLGGIPDTQIERYYKSCVEFPDMNSSLEAKRSELARMIKNISFDDFKNVKQQAKGRENVAKERAKAVIGLYLTVMYLLVKNLVNVNARYVIAIHCLERDFGLYKEIIPELASKNLKNDYRILSQTLVNFVMIVMSRRICS

SEQ ID NO: 4829 - protein, 841 aa, Artificial
  Synthetic
VIFMAKKNKMKPRELREAQKKARQLKAAEINNNAVPAIAAMPAAEVIAPAAEKKKSSVKAAGMKSILVSENKMYITSFGKGNSAVLEYEVDKVDNNNYNKTQLSSNDNSNIELRGVTKVNITFSSKHGLESGVEINTSNPTHRSGESSPVRWDMLGLKSELEKRFFGKTFDDNIHIQLIYNILDIEKILAVYVTNIVYALNNMLGVKGSESHDDFIGYLSTNNIYDVFIDPDNSSLSDDKKANVRKSLSKFNALLKTKRLGYFGLEEPKTKDNRVSQAYKKRVYHMLAIVGQIRQCVFHDKSGAKRFDLYSFINNIDPEYRDTLDYLVDERFDSINKGFIEGNKINISLLIDMMKGYEADDIIRLYYDFIVLKSQKNLGFSIKKLREKMLDEYGFRFKDKQYDSVRSKMYKLMDFLLFCNYYRNDVVAGEALVRKLRFSMTDDEKEGIYADEAAKLWGKFRNDFENIADHMNGDVIKELGKADMDFDEKILDSEKKNASDLLYFSKMIYMLTYFLDGKEINDLLTTLISKFDNIKEFLKIMKSSAVDVECELTAGYKLFNDSQRITNELFIVKNIASMRKPAASAKLTMFRDALTILGIDDKITDDRISEILKLKEKGKGIHGLRNFITNNVIESSRFVYLIKYANAQKIREVAKNEKVVMFVLGGIPDTQIERYYKSCVEFPDMNSSLEVKRSELARMIKNISFDDFKNVKQQAKGRENVAKERAKAVIGLYLTVMYLLVKNLVNVNARYVIAIHCLERDFGLYKEIIPELASKNLKNDYRILSQTLCELCDERDKSPNLFLKKNERLRKCVEVDINNADSIMTRKYRNCIAHLTVVREL

SEQ ID NO: 4830 - protein, 668 aa, Artificial
  Synthetic
MAKKNKMKPRELREAQKKARQFKAAEINNNAAPAIAAMPAAEAAAPAAEKKKSSVKAAGMKSILVSENKMYITSFGKGNSAVLEYEVDNNDYNKTQLSSKDNSNIELCDVNEVNITFSSKHGFESGVEINTSNPTHRSGESSPVRWDMLGLKSELEKRFFGKTFDDNIHIQLIYNILDIEKILAVYITNIVYALNNMLGVKGSESHDDFIGYLSTNNIYDVFIDPDNSSLSDDKKANVRKSLSKFNALLKTKRLGYFGLEEPKTKDNRVSEAYKKRVYHMLAIVGQIRQCVFHDLSEHSEYDLYSFIDNSKKVYRECRETLDYLVDERFDSINKGFIQGNKVNISLLIDMMKGYEADDIIRLYYDFIVLKSQKNLGFSIKKLREKMLEEYGFRFKDKQYDSVRSKMYKLMDFLLFCNYYRNDVVAGEALVRKLRFSMTDDEKEGIYADEAEKLWGKFRNDFENIADHMNGDVIKELGKADMDFDEKILDSEKKNASDLLYFSKMIYMLTYFLDGKEINDLLTTLISKFDNIKEFLKIMKSSAVDVECELTAGYKLFNDSQRITNELFIVKNIASMRKPAASAKLTMFRDALTILGIDDKITDDRISEILKLKEKGKGIHGLRNFVTNNVIESSRFVYLIKYANAQKIREVAKNEKVVMFVLGGILTRR

SEQ ID NO: 4831 - protein, 828 aa, Artificial
  Synthetic
MAKKNKMKPRELREAQKKARQFKAAEINNNAAPAIAAMPAAEVIAPVAEKKKSSVKAAGMKSILVSENKMYITSFGKGNSAVLEYEVDNNDYNKTQLSSKDNSNIELCGVNEVNITFSSKHGFESGVEINTSNPTHRSGESSPVRWDMLGLKSELEKRFFGKTFDDNIHIQLIYNILDIEKILAVYVTNIVYALNNMLGEGDESNYDFMGYLSTFNTYKVFTNPNGSTLSDDKKENIRKSLSKFNALLKTKRLGYFGLEEPKTKDTRVLEAYKKRVYHMLAIVGQIRQCVFHDLSEHSEYDLYSFIDNSKKVYRECRETLDYLVDERFDSINKGFIQGNKVNISLLIDMMKGYEADDIIRLYYDFIVLKSQKNLGFSIKKLREKILDEYGFRFKDKQYDSVRSKMYKLMDFLLFCNYYRNDIAAGESLVRKLRFSMTDDEKEGIYADEAAKLWGKFRNDFENIADHMNGDVIKELGKADMDFDEKILDSEKKNASDLLYFSKMIYMLTYFLDGKEINDLLTTLISKFDNIKEFLKIMKSSAIDVECELTAGYKLFNDSQRITNELFIVKNIASMRKPAASAKLTMFRDALTILGIDDKITDDRISEILKLKEKGKGIHGLRNFITNNVIESSRFVYLIKYANAQKIREVAKNEKVVMFVLGGIPDTQIERYYKSCVEFPDMNSSLEAKRSELARMIKNIRFDDFKNVKQQAKGRENVAKERAKAVIGLYLTVMYLLVKNLVNVNARYVIAIHCLERDFGLYKEIIPELASKNLKNDYRILSQTLCELCDNGDESPNLFLKKNKRLRKCVEVDINNADNFVSATQGNLF

SEQ ID NO: 4832 - protein, 571 aa, Artificial
  Synthetic
VIFMAKKNKMKPRELREAQKKARQLKAAEINNNAVPAIAAMPAAEAAAPAAEKKKSSVKAAGMKSILVSENKMYITSFGKGNSAVLEYEVDNNDYNKTQLSSKDNSNIELCDVDEVNITFSSKHGFESGVEINTSNPTHRSGESSPVRWDMLGLKSELEKRFFGKTFDDNIHIQLIYNILDIEKILAVYVTNIVYALNNMLGEGDESNYDFMGYLSTFNTYKVFTNPNGSTLSDDKKENIRKSLSKFNALLKTKRLGYFGLEEPKTKDTRVLEAYKKRVYHMLAIVGQIRQCVFHDLSEHSEYDLYSFIDNSKKVYRECRETLDYLVDERFDSINKGFIQGNKVNISLLIDMMKGYEADDIIRLYYDFIVLKSQKNLGFSIKKLREKMLEEYGFRFKDKQYDSVRSKMYKLMDFLLFCNYYRNDVVAGEALVRKLRFSMTDDEKEGIYADEAEKLWGKFRNDFENIADHMNGDVIKELGKADMDFDEKILDSEKKNASDLLYFSKMIYMLTYFLDGKEINDLLTTLISKFDNIKEFLKIMKSSAVDVECELTAGYKLFNDSQRITNELFIV

SEQ ID NO: 4833 - protein, 432 aa, Artificial
  Synthetic
MAKKNKMKPRELREAQKKARQLKAAEINNNAVPAIAAMPAAEAAAPAAEKKKSSVKAAGMKSILVSENKMYITSFGKGNSAVLEYEVDNNDYNKTQLSSKDNSNIELCDVGKVNITFSSRRGFESGVEINTSNPTHRSGESSSVRGDMLGLKSELEKRFFGKNFDDNIHIQLIYNILDIEKILAVYVTNIVYALNNMLGEGDESNYDFMGYLSTFNTYKVFTNPNGSTLSDDKKENIRKSLSKFNALLKTKRLGYFGLEEPKTKDTRASEAYKKRVYHMLAIVGQIRQCVFHDKSGAKRFDLYSFINNIDPEYRETLDYLVDERFDSINKGFIQGNKVNISLLIDMMKGYEADDIIRLYYDFIVLKSQKNLGFSIKKLREKMLDEYGFRFKDKQYDSVRSKMYKLMDFLLFCNYYRNDIAAGESLVRKLVFQ

SEQ ID NO: 4834 - protein, 796 aa, Artificial
  Synthetic
VIFMAKKNKMKPRELREAQKKARQLKAAEINNNAAPAIAAMPAAEAAAPAAEKKKSSVKAAGMKSILVSENKMYITSFGKGNSAVLEYEVDNNDYNKTQLSSKDNSNIELCDVGKVNITFSSRRGFESGVEINTSNPTHRSGESSSVRGDMLGLKSELEKRFFGKNFDDNIHIQLIYNILDIEKILAVYVTNIVYALNNMLGEGDESNYDFMGYLSTFNTYKVFTNPNGSTLSDDKKENIRKSLSKFNALLKTKRLGYFGLEEPKTKDTRASEAYKKRVYHMLAIVGQIRQCVFHDKSGAKRFDLYSFINNIDPEYRETLDYLVDERFDSINKGFIQGNKVNISLLIDMMKGYEADDIIRLYYDFIVLKSQKNLGFSIKKLREKMLDEYGFRFKDKQYDSVRSKMYKLMDFLLFCNYYRNDIAAGESLVRKLRFSMTDDEKEGIYADEAAKLWGKFRNDFENIADHMNGDVIKELGKADMDFDEKILDSEKKNASDLLYFSKMIYMLTYFLDGKEINDLLTTLISKFDNIKEFLKIMKSSAVDVECELTAGYKLFNDSQRITNELFIVKNIASMRKPAASAKLTMFRDALTILGIDDKITDDRISEILKLKEKGKGIHGLRNFITNNVIESSRFVYLIKYANAQKIREVAKNEKVVMFVLGGIPDTQIERYYKSCVEFPDMNSSLKVKRSELARMIKNIRFDDFKNVKQQAKGRENVAKERAKAVIGLYLTVMYLLVKNLVNVNARYVIAIHCLERDFGLYKEIIPELASKNLKNDYRILSQTLCELCDKSPNLFL

SEQ ID NO: 4835 - protein, 451 aa, Artificial
  Synthetic
VIFMAKKNKMKPRELREAQKKARQLKAAEINNNAVPAIAAMPAAEAAAPAAEKKKSSVKAAGMKSILVSENKMYITSFGKGNSAVLEYEVDNNDYNKTQLSSKDNSNIELCDVGKVNITFSSRRGFESGVEINTSNPTHRSGESSSVRGDMLGLKSELEKRFFGKNFDDNIHIQLIYNILDIEKILAVYVTNIVYALNNMLGEGDESNYDFMGYLSTFNTYKVFTNPNGSTLSDDKKENIRKSLSKFNALLKTKRLGYFGLEEPKTKDTRASEAYKKRVYHMLAIVGQIRQCVFHDKSGAKRFDLYSFINNIDPEYRETLDYLVDERFDSINKGFIQGNKVNISLLIDMMKGYEADDIIRLYYDFIVLKSQKNLGFSIKKLREKMLDEYGFRFKDKQYDSVRSKMYKLMDFLLFCNYYRNDIAAGESLVRKLRFSMTNDEKEGIYADEAAK

SEQ ID NO: 4836 - protein, 447 aa, Artificial
  Synthetic
MAKKNKMKPRELREAQKKARQLKAAEINNNAAPAIAAMPAAEVIAPAAEKKKSSVKAAGMKSILVSENKMYITSFGKGNSAVLEYEVDNNDYNKTQLSSKDNSNIELCGVNEVNITFSSKHGFESGVEINTSNPTHRSGESSPVRWDMLGLKSELEKRFFGKTFDDNIHIQLIYNILDIEKILAVYVTNIVYALNNMLGEGDESNYDFMGYLSTFNTYKVFTNPNGSTLSDDKKENIRKSLSKFNALLKTKRLGYFGLEEPKTKDTRASEAYKKRVYHMLAIVGQIRQCVFHDKSGAKRFDLYSFINNIDPEYRDTLDYLVDERFDSINKGFIQGNKVNISLLIDMMKGYEVDDIIRLYYDFIVLKSQKNLGFSIKKLREKMLDEYGFRFKDKQYDSVRSKMYKLMDFLLFCNYYRNDVVAGETLVRKLRFSMTDDEKEGIYADEAS

SEQ ID NO: 4837 - protein, 447 aa, Artificial; identical to SEQ ID NO: 4836
  Synthetic

SEQ ID NO: 4838 - protein, 447 aa, Artificial; identical to SEQ ID NO: 4836
  Synthetic

SEQ ID NO: 4839 - protein, 447 aa, Artificial
  Synthetic
MAKKNKMKPRELREAQKKARQLKAAEINNNAVPAIAAMPAAEVIAPAAEKKKSSVKAAGMKSILVSENKMYITSFGKGNSAVLEYEVDNNDYNQTQLSSKDNSNIELGGVNEVNITFSSKHGFESGVEINTSNPTHRSGESSPVRWDMLGLKSELEKRFFGKTFDDNIHIQLIYNILDIEKILAVYVTNIVYALNNMLGEGDESNYDFMGYLSTFNTYKVFTNPNGSTLSDDKKENIRKSLSKFNALLKTKRLGYFGLEEPKTKDTRASEAYKKRVYHMLAIVGQIRQCVFHDKSGAKRFDLYSFINNIDPEYRDTLDYLVDERFDSINKGFIQGNKVNISLLIDMMKGYEVDDIIRLYYDFIVLKSQKNLGFSIKKLREKMLDEYGFRFKDKQYDSVRSKMYKLMDFLLFCNYYRNDVVAGETLVRKLRFSMTDDEKEGIYADEAS

SEQ ID NO: 4840 - protein, 377 aa, Artificial
  Synthetic
MAKKNKMKPRELREAQKKARQLKAAEINNNAAPAIAAMPAAEVIAPAAEKKKSSVKAAGMKSILVSKNKMYITSFGKGNSAVLEYEVDKVDNNNYNKTQLSSKDNSNIELGDVNEVNITFSSKHGFESGVEINTSNPTHRSGESSPVRWDMLGLKSELEKRFFGKTFDDNIHIQLIYNILDIEKILAVYVTNIVYALNNMLGEGEDSNYDFMGYLSTFNTYKVFTNPNGSTLSDDKKKNIRKSLSKFNALLKTKRLGYFGLEEPKTKDTRASEAYKKRVYHMLAIVGQIRQCVFHDKSGAKRFDLYSFINNIDPEYRDTLDYLVDERFDSINKGFIQGNKVNISLLIDMMKGYEADDIIRLYYDFIVLKSQKNLGFS

SEQ ID NO: 4841 - protein, 383 aa, Artificial
  Synthetic
MAKKNKMKPRELREAQKKARQLKAAEINNNAVPAIAAMPAAEVIAPAAEKKKSSVKAAGMKSILVSENKMYITSFGKGNSAVLEYEVDKVDNNNYNKTQLSSKDNSNIELGDVNEVNITFSSKRGNESGVEINTSNPTHRSGESSPVRWDMLGLKSELEKRFFGKTFDDNIHIQLIYNILDIEKILAVYVTNIVYALNNMLGIKKSESYDDFMGYLSARNTYEVFTHPDKSNLSDKAKGNIKKSFSTFNDLLKTKRLGYFGLEEPKTKDTRVSQAYKKRVYHMLAIVGQIRQSVFHDKSSKLDEDLYSFIDIIDPEYRETLDYLVDERFDSINKGFIQGNKVNISLLIDMMKGYEADDIIRLYYDFIVLKSQKNLGFFYQKAS

SEQ ID NO: 4842 - protein, 383 aa, Artificial; identical to SEQ ID NO: 4841
  Synthetic

SEQ ID NO: 4843 - protein, 383 aa, Artificial; identical to SEQ ID NO: 4841
  Synthetic

SEQ ID NO: 4844 - protein, 383 aa, Artificial; identical to SEQ ID NO: 4841
  Synthetic

SEQ ID NO: 4845 - protein, 651 aa, Artificial
  Synthetic
MAKKNKMKPRELREAQKKARQLKAAEIKNNAVPAIAAMPAAEAAAPAVEKKKSSVKAAGMKSILVSENKMYITSFGKGNSAVLEYEVDKVDNNNYNKTQLSSKDNSNIELGDVNEVNITFSSKHGFESGVEINTSNPTHRSGESSPVRWDMLGLKSELEKRFFGKTFDDNIHIQLIYNILDIEKILAVYVTNIVYALNNMLGIKDSESYDDFMGYLSARNTYEVFTHPDKSNLSDKVKGNINKVKCNIKKSFSTFNDLLKTKRLGYFGLEEPKTKDTRVSQAYKKRVYHMLAIVGQIRQSVFHDKSSKLDEDLYSFIDIIDSEYRETLDYLVDERFDSINKGFIQGNKVNISLLIDMMKGYEADDIIRLYYDFIVLKSQKNLGFSIKKLREKILDEYGFRFKDKQYDSVRSKMYKLMDFLLFCNYYRNDIAAGESLVRKLRFSMTDDEKEGIYADEAAKLWGKFRNDFENIADHMNGDVIKELGKADMDFDEKILDSEKKNASDLLYFSKMIYMLTYFLDGKEINDLLTTLISKFDNIKEFLKIMKSSAVNVECELTAGYKLFNDSQRITNELFIVKNIASMRKPAASAKLTMFRDALTILGIDDNITDDRISEILGHTWSEEFHNKQCYRVLSVCIPYQVCERSEDKRSG

SEQ ID NO: 4846 - protein, 327 aa, Artificial
  Synthetic
MAKKNKMKPRELREAQKKARQLKAAEINNNAAPAIAAMPAAEAAAPAAEKKKSSVKAAGMKSIFVSENKMYITSFGKGNSAVLEYEVDKVDNDNYNKTQLSSEDSSNIELCGVNEVNITFSSKHGFGSGVEINTSNPTHRSGESSPVRWDMLGLKSELEKRFFGKTFDDNIHIQLIYNILDIEKILAVYVTNIVYALNNMLGIKKSESYDDFMGYLSARNTYEVFTHPDKSNLSDKAKGNIKKSFSTFNDLLKTKRLGYFGLEEPKTKDTRVSQAYKKRVYHMLAIVGQIRQSVFHDKSSKLDEDLYSFIDIIDSEYRETLDYLVDE

SEQ ID NO: 4847 - protein, 859 aa, Artificial
  Synthetic
MAKKNKMKPRELREAQKKARQLKAAEINNNAAPAIAAMPAAQVIAPAAEKKKSSVKAAGMKSILVSENKMYITSFGKGNSAVLEYEVDKVDNNNYNKTQLSSKDNSNIELGDVNEVNITFSSKHGFESGVEINTSNPTHRSGESSSVRGDMLGLKSELEKRFFGKTFDDNIHIQLIYNILDIEKILAVYVTNIVYALNNMLGVKGSESYDDFMGYLSAQNTYYIFTHPDKSNLSDKVKGNIKKSLSKFNDLLKTKRLGYFGLEEPKTKDKRVSEAYKKRVYHMLAIVGQIRQSVFHDKSNELDEYLYSFIDIIDSEYRDTLDYLVDERFDSINKGFVQGNKVNISLLIDMMKGYEADDIIRLYYDFIVLKSQKNLGFSIKKLREKMLDEYGFRFKDKQYDSVRSKMYKLMDFLLFCNYYRNDIAAGEALVRKLRFSMTDDEKEGLYADEAAKLWGKFRNDFENIADHMNGDVIKELGKADMDFDEKILDSEKKNASDLLYFSKMIYMLTYFLDGKEINDLLTTLISKFDNIKEFLKIMKSSAVNVECELTAGYKLFNDSQRITNELFIVKNIASMRKPAASAKLTMFRDALTILGIDDNITDDRISEILKLKEKGKGIHGLRNFITNNVIESSRFVYLIKYANAQKIREVAKNEKVVMFVLGGIPDTQIERYYKSCVEFPDMNSSLEVKRSELARMIKNIRFDDFKNVKQQAKGRENVAKERAKAVIGLYLTVMYLLVKNLVNVNARYVIAIHCLERDFGLYKEIIPELASKNLKNDYRILSQTLCELCDNRDESPNLFLKKNKRLRKCVEVDINNADSSMTRKYRNCIAHLTVVRELKEYIGDIRTVDSYFSIYHYVM

SEQ ID NO: 4848 - protein, 859 aa, Artificial; identical to SEQ ID NO: 4847
  Synthetic

SEQ ID NO: 4849 - protein, 390 aa, Artificial
  Synthetic
MAKKNKMKPRELREAQKKARQLKAAEINNNAAPAIAAMPAAQVIAPAAEKKKSSVKAAGMKSILVSENKMYITSFGKGNSAVLEYEVDKVDNNNYNKTQLSSKDNSNIELGDVNEVNITFSSKHGFESGVEINTSNPTHRSGESSSVRGDMLGLKSELEKRFFGKTFDDNIHIQLIYNILDIEKILAVYVTNIVYALNNMLGVKGSESYDDFMGYLSAQNTYYIFTHPDKSNLSDKVKGNIKKSLSKFNDLLKTKRLGYFGLEEPKTKDKRVSEAYKKRVYHMLAIVGQIRQSVFHDKSNELDEYLYSFIDIIDSEYRDTLDYLVDERFDSINKGFVQGNKVNISLLIDMMKGYEADDIIRLYYDFIVLKSQKNLGFSIKKLREKMGVLF

SEQ ID NO: 4850 - protein, 383 aa, Artificial
  Synthetic
MAKKNKMKPRELREAQKKARQLKAAEINNNAAPAIAAMPAAEVIAPVAEKKKSSVKAAGMKSILVSENKMYITSFGKGNSAVLEYEVDNNDYNKTQLSSKDNSNIELGDVNEVNITFSSKHGFGSGVEINTSNPTHRSGESSSVRGDMLGLKSELEKRFFGKTFDDNIHIQLIYNILDIEKILAVYVTNIVYALNNMLGVKGSESYDDFMGYLSAQNTYYIFTHPDKSNLSDKVKGNIKKSLSKFNDLLKTKRLGYFGLEEPKTKDKRVSEAYKKRVYHMLAIVGQIRQSVFHDKSNELDEYLYSFIDIIDSEYRDTLDYLVDERFDSINKGFVQGNKVNISLLIDMMKGYEADDIIRLYYDFIVLKSQKNLGFSIKKLREKM

SEQ ID NO: 4851 - protein, 899 aa, Artificial
  Synthetic
VIFMAKKNKMKPRELREAQKKARQLKAAEINNNAVPAIAAMPAAEVIAPAAEKKKSSVKAAGMKSILVSKNKMYIISFGKGNSAVLEYEVDKVDDNDYNKTQLSSKDNSNIELGDVNEVNITFSSKHGFGSGVEINTSNPTHRSGESSPVRWDMLGLKSELEKRFFGKTFDDNIHIQLIYNILDIEKILAVYVTNIVYALNNMLGVKGSESYDDFMGYLSAQNTYYIFTHPDKSNLSDKVKGNIKKSLSKFNDLLKTKRLGYFGLEEPKTKDKRVSEAYKKRVYHMLAIVGQIRQSVFHDKSNELDEYLYSFIDIIDSEYRDTLDYLVDERFDSINKGFVQGNKVNISLLIDMMKGYEADDIIRLYYDFIVLKSQKNLGFSIKKLREKMLDEYGFRFKDKQYDSVRSKMYKLMDFLLFCNYYRNDVVAGEALVRKLRFSMTDDEKEGIYADEAEKLWVKFRNDFENIADHMNGDVIKELGKADMDFDEKILDSEKKNASDLLYFSKMIYMLTYFLDGKEINDLLTTLISKFDNIKEFLKIMKSSAVDVECELTAGYKLFNDSQRITNELFIVKNIASMRKPAASAKLTMFRDALTILGIDDNITDDRISEILKLKEKGKGIHGLRNFITNNVIESSRFVYLIKYANAQKIREVAKNEKVVMFVLGGIPDTQIERYYKSCVEFPDMNSSLEAKRSELARMIKNISFDDFKNVKQQAKGRENVAKERAKAVIGLYLTVMYLLVKNLVNVNARYVIAIHCLERDFGLYKEIIPELASKNLKNDYRILSQTLCELCDDRDKSPNLFLKKNKRLRKCVEVDINNADSSMTRKYRNCIAHLTVVRELKEYIGDIRTVDSYFSIYHYVMQRCITKREDDTKQEDKIKYEDDLLKNHGYTKDFVKAL

SEQ ID NO: 4852 - protein, 899 aa, Artificial; identical to SEQ ID NO: 4851
  Synthetic

SEQ ID NO: 4853 - protein, 856 aa, Artificial
  Synthetic
MAKKNKMKPRELREAQKKARQLKAAEINNNAAPAIAAMPAAQVIAPAAEKKKSSVKAAGMKSILVSENKMYITSFGKGNSAVLEYEVDKVDNNNYNKTQLSSKDNSNIELGDVNEVNITFSSKHGFESGVEINTSNPTHRSGESSPVRWDMLGLKSELEKRFFGKTFDDNIHIQLIYNILDIEKILAVYVTNIVYALNNMLGIKGSESYDDFMGYLSARNTYEVFTHPDKSNLSDKVKGNIKKSLSKFNDLLKTKRLGYFGLEEPKTKDTRVSQAYKKRVYHMLAIVGQIRQSVFHDKSSKLDEDLYSFIDIIDSEYRETLDYLVDERFDSINKGFIQGNKVNISLLIDMMKGYEADDIIRLYYDFIVLKSQKNLGFSIKKLREKMLDEYGFRFKDKQYDSVRSKMYKLMDFLLFCNYYRNDVVAGEALVRKLRFSMTDDEKEGIYADEASKLWGKFRNDFENIADHMNGDVIKELGKADMDFDEKILDSEKKNASDLLYFSKMIYMLTYFLDGKEINDLLTTLISKFDNIKEFLKIMKSSAVDVECELTAGYKLFNDSQRITNELFIVKNIASMRKPASSAKLTMFRDALTILGIDDNITDDRISEILKLKEKGKGIHGLRNFITNNVIESSRFVYLIKYANAQKIRKVAKNEKVVMFVLGGIPDTQIERYYKSCVEFPDMNSSLEVKRSELARMIKNISFDDFKNVKQQAKGRENVAKERAKAVIGLYLTVMYLLVKNLVNVNARYVIAIHCLERDFGLYKEIIPELASKNLKNDYRILSQTLCELCDKSPNLFLKKNRRLRKCVEVDINNADSSMTRKYRNCIAHLTVVRELKEYIGDIRTVDSYFSIYHYVM

SEQ ID NO: 4854 - protein, 856 aa, Artificial; identical to SEQ ID NO: 4853
  Synthetic

SEQ ID NO: 4855 - protein, 604 aa, Artificial
  Synthetic
VIFMAKKNKMKPRELREAQKKARQLKAAEINNNAAPAIAAMPAAQVIAPAAEKKKSSVKAAGMKSILVSENKMYITSFGKGNSAVLEYEVDKVDNNNYNKTQLSSKDNSNIELGDVNEVNITFSSKHGFESGVEINTSNPTHRSGESSPVRWDMLGLKSELEKRFFGKTFDDNIHIQLIYNILDIEKILAVYVTNIVYALNNMLGIKGSESYDDFMGYLSARNTYEVFTHPDKSNLSDKVKGNIKKSLSKFNDLLKTKRLGYFGLEEPKTKDTRVSQAYKKRVYHMLAIVGQIRQSVFHDKSSKLDEDLYSFIDIIDSEYRETLDYLVDERFDSINKGFIQGNKVNISLLIDMMKGYEADDIIRLYYDFIVLKSQKNLGFSIKKLREKMLDEYGFRFKDKQYDSVRSKMYKLMDFLLFCNYYRNDVVAGEALVRKLRFSMTDDEKEWIYADEAEKLWGKFRNDFENIADHMNGDVIKELGKADMDFDEKILDSEKKNASDLLYFSKMIYMLTYFLDGKEINDLLTTLISKFDNIKEFLKIMKSSAVDVECELTAGYKLFNDSQRITNELFIVKNIASMRKPAASAKLTMFRDALTILGIDDKIT

SEQ ID NO: 4856 - protein, 818 aa, Artificial
  Synthetic
MAKKNKMKPRELREAQKKARQLKAAEINNNAAPAIAAMPAAQVIAPAAEKKKSSVKAAGMKSILVSENKMYITSFGKGNSAVLEYEVDKVDNNNYNKTQLSSKDNSNIELGDVNEVNITFSSKHGFESGVEINTSNPTHRSGESSPVRWDMLGLKSELEKRFFGKTFDDNIHIQLIYNILDIEKILAVYVTNIVYALNNMLGIKGSESYDDFMGYLSARNTYEVFTHPDKSNLSDKVKGNIKKSLSKFNDLLKTKRLGYFGLEEPKTKDTRVSQAYKKRVYHMLAIVGQIRQSVFHDKSSKLDEDLYSFIDIIDSEYRETLDYLVDERFDSINKGFIQGNKVNISLLIDMMKGYEADDIIRLYYDFIVLKSQKNLGFSIKKLREKMLDEYGFRFKDKQYDSVRSKMYKLMDFLLFCNYYRNDVVAGEALVRKLRFSMTDDEKEWIYADEAEKLWGKFRNDFENIADHMNGDVIKELGKADMDFDEKILDSEKKNASDLLYFSKMIYMLTYFLDGKEINDLLTTLISKFDNIKEFLKIMKSSAVDVECELTASYKLFNDSQRITNELFIVKNIASMRKPAASAKLTMFRDALTILGIDDKITDDRISEILKLKEKGKGIHGLRNFITNNVIESSRFVYLIKYANAQKIREVAENEKVVMFVLGGIPDTQIERYYKSCVEFPDMNSSLEVKRSELARMIKNISFDDFKNVKQQAKGRENVAKERAKAVIGLYLTVMYLLVKNLVNVNARYVIAIHCLERDFGLYKEIIPELASKNLKNDYRILSQTLCELCDDRDESPNLFLKKNKRLRKCVISIMQTAA

SEQ ID NO: 4857 - protein, 710 aa, Artificial
  Synthetic
MAKKNKMKPRELREAQKKARQLKAAEINNNAAPAIAAMPAAEVIAPAAEKKKSSVKAAGMKSILVSKNKMYITSFGKGNSAVLEYEVDKVDNNNYNKTQLSSKDNSNIELGDVNEVNITFSSKRGNESGVEINTSNPTHRSGESSPVRWDMLGLKSELEKRFFGKTFDDNIHIQLIYNILDIEKILAVYVTNIVYALNNMLGIKDSESYDDFMGYLSAKNTYEVFTHPDKSNLSDKVKGNIKKSFSTFNDLLKTKRLGYFGLEEPKTKDTRVSQAYKKRVYHMLAIVGQIRQSVFHDKSSKLDEDLYSFIDIIDSEYRETLDYLVDERFDSINKGFIQGNKVNISLLIDMMKGYEADDIIRLYYDFIVLKSKKNLGFSIKKLREKMLDEYGFRFKDKQYDSVRSKMYKLMDFLLFCNYYRNDVIAGEALVRKLRFSMTDDEKEGIYADEAAKLWGKFRNDFENIADHMNGDVIKELGKADMDFDEKILDSEKKNASNLLYFSKMIYMLTYFLDGKEINDLLTTLISKFDNIKEFLKIMKSSAVDVECELTAGYKLFNDSQRITNELFIVKNIASMRKPAASAKLTMFRDALTILGIDDNITDDRISEILKLKEKGKGIHGLRNFVTNNVIESSRFVYLIKYANAQKIREVAKNEKVVMFVLGGIPDTQIERYYKSCVEVPDVNSSLEAKRSELARMIKNISFDDFKNVKQ

SEQ ID NO: 4858 - protein, 887 aa, Artificial
  Synthetic
VIFMAKKNKMKPRELREAQKKARQLKAAEINNNAVPAIAAMPAAEVIAPAAEKKKSSVKAAGMKSILVSENKMYITSFGKGNSAVLEYEVDKVDNNDYNQTQLSSKDNSNIELGDVNEVNITFSSKHGFESGVEINTSNPTHRSGESSPVRWDMLGLKSELEKRFFGKTFDDNIHIQLIYNILDIEKILAVYVTNIVYALNNMLGIKDSESYDDFMGYLSARNTYEVFTHPDKSNLSDKVKGNIKKSFSTFNDLLKTKRLGYFGLEEPKTKDTRVSQAYKKRVYHMLAIVGQIRQSVFHDKSSKLHEDLYSFIDIIDSEYRETLDYLVDERFDSINKGFIQGNKVNISLLIDMMKGYEADDIIRLYYDFIVLKSQKNLGFSIKKLREKMLDEYGFRFKDKQYDSVRSKMYKLMDFLLFCNYYRNDIAAGESLVRKLRFSMTDDEKEGIYADEAAKLWGKFRNDFENIADHMNGDAIKELGKADMDFDEKILDIEKKNASDLLYFSKMIYMLTYFLDGKEINDLLTTLISKFDNIKEFLKIMKSSAVNVECELTAGYKLFNDSQRITNELFIVKNIASMRKPAASAKLTMFRDALTILGIDDKITDDRISEILKLKEKGKGIHGLRNFITNNVIESSRFVYLIKYANAQKIREVAENEKVVMFVLGGIPDTQIERYYKSCVEFPDMNSSLEVKRSELARMIKNISFDDFKNVKQQAKGRENVAKERAKAVIGLYLTVMYLLVKNLVNVNARYVIAIHCLERDFGLYKEIIPELASKNLKNDYRILSQTLCELCDKSPNLFLKKNRRLRKCVEVDINNADSSMTRKYRNCIAHLTVVRELKEYIGDIRTVDSYFSIYHYVMQRCITKRENDTKQEEKIKYEDDLLKNHG

SEQ ID NO: 4859 - protein, 610 aa, Artificial
  Synthetic
VIFMAKKNKMKPRELREAQKKARQLKAAEINNNAVPAIAAMPAAEVIAPAAEKKKSSVKAAGMKSILVSENKMYITSFGKGNSAVLEYEVDNNDYSKTQLSSKDNSNIELGDVNEVNITFSSKHGFESGVEINTSNPTHRSGESSPVRGDMLGLKSELEKRFFGKTFDDNIHIQLIYNILDIEKILAVYVTNIVYALNNMLGVKGSESYDDFMGYLSAQNTYYIFTHPDKSNLSDKVKGNIKKSLSKFNDLLKTKRLGYFGLEEPKTKDKRVSEAYKKRVYHMLAIVGQIRQSVFHDKSSKLHEDLYSFIDIIDSEYRETLDYLVDERFDSINKGFIQGNKVNISLLIDMMKGYEADDIIRLYYDFIVLKSQKNLGFSIKKLREKMLDEYGFRFKDKQYDSVRSKMYKLMDFLLFCNYYRNDVVAGEALVRKLRFSMTDDEKEGIYADEAEKLWGKFRNDFENIADHMNGDVIKELGKADMDFDEKILDSEKKNASDLLYFSKMIYMLTYFLDGKEINDLLTTLISKFDNIKEFLKIMKSSAVDVECELTAGYKLFNDSQRITNELFIVKNIASMRKPAASAKLTMFRDALTILGIDDKITDDRISEILK

SEQ ID NO: 4860 - protein, 571 aa, Artificial
  Synthetic
VIFMAKKNKMKPRELREAQKKARQLKAAEINNNAVPAIAAMPAAEVIAPAAEKKKSSVKAAGMKSILVSENKMYITSFGKGNSAVLEYEVDNNDYSKTQLSSKDNSNIELGDVNEVNITFSSKHGFESGVEINTSNPTHRSGESSPVRGDMLGLKSELEKRFFGKTFDDNIHIQLIYNILDIEKILAVYVTNIVYALNNMLGVKGSESYDDFMGYLSAQNTYYIFTHPDKSNLSDKVKGNIKKSLSKFNDLLKTKRLGYFGLEEPKTKDKRVSEAYKKRVYHMLAIVGQIRQSVFHDKSSKLHEDLYSFIDIIDSEYRETLDYLVDERFDSINKGFIQGNKVNISLLIDMMKGYEADDIIRLYYDFIVLKSQKNLGFSIKKLREKMLDEYGFRFKDKQYDSVRSKMYKLMDFLLFCNYYRNDVVAGEALVRKLRFSMTDDEKEGIYADEAEKLWGKFRNDFENIADHMNGDVIKELGKADMDFDEKILDSEKKNASDLLYFSKMIYMLTYFLDGKEINDLLTTLISKFDNIKEFLKIMKSSAVDVECELTAGYKLFNDSQRITNELFIVKN

SEQ ID NO: 4861 - protein, 543 aa, Artificial
  Synthetic
VLSGIFVNAFSSKHGFESGVEINTSNPTHRSGESSSVRGDMLGLKSELEKRFFGKTFDDNIHIQLIYNILDIEKILAVYVTNIVYALNNMLGVKGSESYDDFMGYLSAQNTYYIFTHPDKSNLSDKVKGNIKKSLSKFNDLLKTKRLGYFGLEEPKTKDKRVSEAYKKRVYHMLAIVGQIRQSVFHDKSNELDEYLYSFIDIIDSEYRDTLDYLVDERFDSINKGFVQGNKVNISLLIDMMKGYEADDIIRLYYDFIVLKSQKNLGFSIKKLREKMLDEYGFRFKDKQYDSVRSKMYKLMDFLLFCNYYRNDVVAGEALVRKLRFSMTDDEKEGIYADEAEKLWGKFRNDFENIADHMNGDVIKELGKADMDFDEKILDSEKKNASDLLYFSKMIYMLTYFLDGKEINDLLTTLISKFDNIKEFLKIMKSSAVDVECELTAGYKLFNDSQRITNELFIVKNIASMRKPAASAKLTMFRDALTILGIDDKITDDRISEILKLKEKGKGIHGLRNFITNNVIESSRFVYLIKYANAQKIREVAKN

SEQ ID NO: 4862 - protein, 437 aa, Artificial
  Synthetic
VLSGIFVNAFSSKHGFESGVEINTSNPTHRSGESSSVRGDMLGLKSELEKRFFGKTFDDNIHIQLIYNILDIEKILAVYVTNIVYALNNMLGVKGSESYDDFMGYLSAQNTYYIFTHPDKSNLSDKVKGNIKKSLSKFNDLLKTKRLGYFGLEEPKTKDKRVSEAYKKRVYHMLAIVGQIRQSVFHDKSNELDEYLYSFIDIIDSEYRDTLDYLVDERFDSINKGFVQGNKVNISLLIDMMKGYEADDIIRLYYDFIVLKSQKNLGFSIKKLREKMLDEYGFRFKDKQYDSVRSKMYKLMDFLLFCNYYRNDVVAGEALVRKLRFSMTDDEKEGIYADEAEKLWGKFRNDFENIADHMNGDVIKELGKADMDFDEKILDSEKKNASDLLYFSKMIYMLTYFLDGKEINDLLTTLISKFDNIKEFLKIMKSSAVDVEC

SEQ ID NO: 4863 - protein, 836 aa, Artificial
  Synthetic
MAKKNKMKPRELREAQKKARQLKAAEINNNAVPAIAAMPAAEVIAPAAEKKKSSVKAAGMKSILVSENKMYITSFGKGNSAVLEYEVDNNDYNQTQLSSDGSSNIELRGVNEVNITFSSKHGFESGVEINTSNPTHRSGESSPVRGDMLGLKSELEKRFFGKTFDDNIHIQLIYNILDIEKILAVYVTNIVYALNNMLGVKGSESYDDFMGYLSAQNTYYIFTHPDKSNLSDKVKGNIKKSLSKFNDLLKTKRLGYFGLEEPKTKDKRVSEAYKKRVYHMLAIVGQIRQSVFHDKSNELDEYLYSFIDIIDSEYRDTLDYLVDERFDSINKGFVQGNKVNISLLIDMMKGYEADDIIRLYYDFIVLKSQKNLGFSIKKLREKMLDEYGFRFKDKQYDSVRSKMYKLMDFLLFCNYYRNDVVAGEALVRKLRFSMTDDEKEGIYADEAEKLWGKFRNDFENIADHMNGDVIKELGKADMDFDEKILDSEKKNASDLLYFSKMIYMLTYFLDGKEINDLLTTLISKFDNIKEFLKIMKSSAVDVECELTAGYKLFNDSQRITNELFIVKNIASMRKPAASAKLTMFRDALTILGIDDKITDDRISEILKLKEKGKGIHGLRNFITNNVIESSRFVYLIKYANAQKIREVAKNEKVVMFVLGGIPDTQIERYYKSCVEFPDMNSSLEAKRSELARMIKNISFDDFKNVKQQAKGRENVAKERAKAVIGLYLTVMYLLVKNLVNVNARYVIAIHCLERDFGLYKEIIPELASKNLKNDYRILSQTLCELCDDRDELPNLFLKKNERLRKCVEVDINNADNFVSATEGNLFDFFAHFSVTY

SEQ ID NO: 4864 - protein, 538 aa, Artificial
  Synthetic
VIFMAKKNKMKPRELREAQKKARQLKAAEINNNAVPAIAAMPAAEVIAPAAEKKKSSVKAAGMKSILVSENKMYITSFGKGNSAVLEYEVDNNDYNQTQLSSDGSSNIELRGVNEVNITFSSKHGFESGVEINTSNPTHRSGESSPVRGDMLGLKSELEKRFFGKTFDDNIHIQLIYNILDIEKILAVYVTNIVYALNNMLGVKGSESYDDFMGYLSAQNTYYIFTHPDKSNLSDKVKGNIKKSLSKFNDLLKTKRLGYFGLEEPKTKDKRVSEAYKKRVYHMLAIVGQIRQSVFHDKSNELDEYLYSFIDIIDSEYRDTLDYLVDERFDSINKGFVQGNKVNISLLIDMMKGYEADDIIRLYYDFIVLKSQKNLGFSIKKLREKMLDEYGFRFKDKQYDSVRSKMYKLMDFLLFCNYYRNDVVAGEALVRKLRFSMTDDEKEGIYADEAEKLWGKFRNDFENIADHMNGDVIKELGKADMDFDEKILDSEKKNASDLLYFSKMIYMLTYFLDGKEINDLLTTLISKFDNIKEFLKIM

SEQ ID NO: 4865 - protein, 404 aa, Artificial
  Synthetic
VIFMAKKNKMKPRELREAQKKARQLKAAEINNNAAPAIAAMPAVEVIAPAAEKKKSSVKAAGMKSILVSENKMYITSFGKGNSAVLEYEVDKVDNNDYNKTQLSSKNSSNIELRGVNEVNITFSSKHGFESGVEINTSNPTHRSGESSPVRWDMLGLKSELEKRFFGKTFDDNIHIQLIYNILDIEKILAVYVTNIVYALNNMLGIKDSESYDDFMGYLSAKNTYEVFTHPDKSDLSDKVKGNIKKSFSTFNDLLKTKRLGYFGLEEPKTKDTRVSQAYKKRVYHMLAIVGQIRQSVFHDKSSKLDEDLYSFIDIIDPEYRETLDYLVDERFDSINKGFIQGNKVNISLLIDMMKGYEADDIIRLYYDFIVLKSQKNLGFSIKKLREKMLDEYGFRFKDKQYDS

SEQ ID NO: 4866 - protein, 638 aa, Artificial
  Synthetic
VIFMAKKNKMKPRELREAQKKARQLKAAEINNNAAPAIAAMSAAEVIAPAAEKKKSSVKAAGMKSILVSENKMYITSFGKGNSAVLEYEVDNNDYNKTQLSSKDNSNIELGDVNEVNITFSSKHGFGSGVEINTSNPTHRSGESSPVRWDMLGLKSELEKRFFGKTFDDNIHIQLIYNILDIEKILAVYVTNIVYALNNMLGVKGSESYDDFMGYLSAKNTYEVFTHPDKSNLSDKVKGNIKKSFSTFNDLLKTKRLGYFGLEEPKTKDTRVSQAYKKRVYHMLAIVGQIRQSVFHDKSSKLHEDLYSFIDIIDSEYRETLDYLVEERLKSINKDFIEGNKVNISLLIDMMKGYEADDIIRLYYDFIVLKSQKNLGFSIKKLREKMLDEYGFRFKDKQYDPVRSKMYKLMDFLLFCNYYRNDVVTGEALVRKLRFSMTDDEKEGIYADEASKLWGKFRNDFENIADHMNGDVIKELGKADMDFDEKILDSEKKNASDLLYFSKMIYMLTYFLDGKEINDLLTTLISKFDNIKEFLKIMKSSAVDVECELTAGYKLFNDSQRITNELFIVKNIASMRKPAASAKLTMFRDALTILGIDDNITDDRISEILKLKEKGKGIHGLRNFITNNVIESSRFVYL

SEQ ID NO: 4867 - protein, 546 aa, Artificial
  Synthetic
VIFMAKKNKMKPRELREAQKKARQLKAAEINNNAAPAIAAMSAAEVIAPAAEKKKSSVKAAGMKSILVSENKMYITSFGKGNSAVLEYEVDNNDYNKTQLSSKDNSNIELGDVNEVNITFSSKHGFGSGVEINTSNPTHRSGESSPVRWDMLGLKSELEKRFFGKTFDDNIHIQLIYNILDIEKILAVYVTNIVYALNNMLGVKGSESYDDFMGYLSAKNTYEVFTHPDKSNLSDKVKGNIKKSFSTFNDLLKTKRLGYFGLEEPKTKDTRVSQAYKKRVYHMLAIVGQIRQSVFHDKSSKLHEDLYSFIDIIDSEYRETLDYLVEERLKSINKDFIEGNKVNISLLIDMMKGYEADDIIRLYYDFIVLKSQKNLGFSIKKLREKMLDEYGFRFKDKQYDPVRSKMYKLMDFLLFCNYYRNDVVTGEALVRKLRFSMTDDEKEGIYADEASKLWGKFRNDFENIADHMNGDVIKELGKADMDFDEKILDSEKKNASDLLYFSKMIYMLTYFLDGKEINDLLTTLISKFDNIKEFLKIMKSSAVDVE

SEQ ID NO: 4868 - protein, 539 aa, Artificial
  Synthetic
VIFMAKKNKMKPRELREAQKKARQLKAAEINNNAAPAIAAMSAAEVIAPAAEKKKSSVKAAGMKSILVSENKMYITSFGKGNSAVLEYEVDNNDYNKTQLSSKDNSNIELGDVNEVNITFSSKHGFGSGVEINTSNPTHRSGESSPVRWDMLGLKSELEKRFFGKTFDDNIHIQLIYNILDIEKILAVYVTNIVYALNNMLGVKGSESYDDFMGYLSAKNTYEVFTHPDKSNLSDKVKGNIKKSFSTFNDLLKTKRLGYFGLEEPKTKDTRVSQAYKKRVYHMLAIVGQIRQSVFHDKSSKLHEDLYSFIDIIDSEYRETLDYLVEERLKSINKDFIEGNKVNISLLIDMMKGYEADDIIRLYYDFIVLKSQKNLGFSIKKLREKMLDEYGFRFKDKQYDPVRSKMYKLMDFLLFCNYYRNDVVTGEALVRKLRFSMTDDEKEGIYADEAPKLWGKFRNDFENIADHMNGDVIKELGKADMDFDEKILDSEKKNASDLLYFSKMIYMLTYFLDGKEINDLLTTLISKFDNIKEFLKIMK

SEQ ID NO: 4869 - protein, 549 aa, Artificial
  Synthetic
MAKKNKMKPRELREAQKKARQLKAAEINNNAAPAIAAMSAAEVIAPAAEKKKSSVKAAGMKSILVSENKMYITSFGKGNSAVLEYEVDNNDYNKTQLSSKDNSNIELGDVNEVNITFSSKHGFGSGVEINTSNPTHRSGESSPVRWDMLGLKSELEKRFFGKTFDDNIHIQLIYNILDIEKILAVYVTNIVYALNNMLGVKGSESYDDFMGYLSAKNTYEVFTHPDKSNLSDKVKGNIKKSFSTFNDLLKTKRLGYFGLEEPKTKDTRVSQAYKKRVYHMLAIVGQIRQSVFHDKSSKLHEDLYSFIDIIDSEYRETLDYLVEERLKSINKDFIEGNKVNISLLIDMMKGYEADDIIRLYYDFIVLKSQKNLGFSIKKLREKMLDEYGFRFKDKQYDPVRSKMYKLMDFLLFCNYYRNDVVTGEALVRKLRFSMTDDEKEGIYADEASKLWGKFRNDFENIADHMNGDVIKELGKADMDFDEKILDSEKKNASDLLYFSKMIYMLTYFLDGKEINDLLTTLISKFDNIKEFLKIMKNASKERLMLIKLK

SEQ ID NO: 4870 - protein, 795 aa, Artificial
  Synthetic
VIFMAKKNKMKPRELREAQKKARQLKAVEINNNAVPEIAAMPAAEVIAPVAEKKKSSVKAAGMKSILVSENKMYITSFGKGNSAVLEYEVDNNDYNKTQLSSKNSSNIELRGVNEVNITFSSKHGFESGVEINTSNPTHRSGESSPVRWDMLGLKSELEKRFFGKTFDDNIHIQLIYNILDIEKILAVYVTNIVYALNNMLGIKGSESYDDFMGYLSARNTYEVFTHPDKSSLSDDKKANVRKSLSKFNVLLKTKRLGYFGLEEPKTKDTRVSQAYKKRVYHMLAIVGQIRQSVFHDKSSKLDEDLYSFIDIIDSEYRETLDYLVDERFDSINKGFIQGNKVNISLLIDMMKGYEADDIIRLYYDFIVLKSQKNLGFSIKKLREKMLEEYGYRFKDKQYDSVRSKMYKLMDFLLFCNYYRNDVVAGEALVRKLRFSMTDDEKEGIYADEAEKLWGKFRNDFENIADHMNGDVIKELGKADMDFDEKILDSEKKNASDLLYFSKMIYMLTYFLDGKEINDLLTTLISKFDNIKEFLKIMKSSAVDVECELTAGYKLFNDSQRITNELFIVKNIASMRKPAASAKLTMFRDALTILGIDDKITDDRISEILKLKEKGKGIHGLRNFITNNVIESSRFVYLIKYANAQKIREVAENEKVVMFVLGGIPDTQIERYYKSCVEFPDMNSSLEAKRSELARMIKNISFDNFKNVKQQAKGRENVAKERAKAVIGLYLTVMYLLVKNLVNVNARYVIAIHCLERDFGLYKEIIPELASKNLKNDYRILSQTLCELCDDRDES

SEQ ID NO: 4871 - protein, 611 aa, Artificial
  Synthetic
VIFMAKKNKMKPRELREAQKKARQLKAVEINNNAVPEIAAMPAAEVIAPVAEKKKSSVKAAGMKSILVSENKMYITSFGKGNSAVLEYEVDNNDYNKTQLSSKNSSNIELRGVNEVNITFSSKHGFESGVEINTSNPTHRSGESSPVRWDMLGLKSELEKRFFGKTFDDNIHIQLIYNILDIEKILAVYVTNIVYALNNMLGIKGSESYDDFMGYLSARNTYEVFTHPDKSSLSDDKKANVRKSLSKFNVLLKTKRLGYFGLEEPKTKDTRVSQAYKKRVYHMLAIVGQIRQSVFHDKSSKLDEDLYSFIDIIDSEYRETLDYLVDERFDSINKGFIQGNKVNISLLIDMMKGYEADDIIRLYYDFIVLKSQKNLGFSIKKLREKMLEEYGYRFKDKQYDSVRSKMYKLMDFLLFCNYYRNDVVAGEALVRKLRFSMTDDEKEGIYADEAEKLWGKFRNDFENIADHMNGDVIKELGKADMDFDEKILDSEKKNASDLLYFSKMIYMLTYFLDGKEINDLLTTLISKFDNIKEFLKIMKSSAVDVECELTAGYKLFNDSQRITNELFIVKNIASMRKPAASAKLTMFRDALTILGIDDKITDDRISGILKF

SEQ ID NO: 4872 - protein, 811 aa, Artificial
  Synthetic
MAKKNKMKPRELREAQKKARQLKAVEINNNAVPEIAAMPAAEVIAPVAEKKKSSVKAAGMKSILVSENKMYITSFGKGNSAVLEYEVDNNDYNKTQLSSKNSSNIELRGVNEVNITFSSKHGFESGVEINTSNPTHRSGESSPVRWDMLGLKSELEKRFFGKTFDDNIHIQLIYNILDIEKILAVYVTNIVYALNNMLGIKGSESYDDFMGYLSARNTYEVFTHPDKSSLSDDKKANVRKSLSKFNVLLKTKRLGYFGLEEPKTKDTRVSQAYKKRVYHMLAIVGQIRQSVFHDKSSKLHEDLYSFIDIIDSEYRETLDYLVDERFDSINKGFIQGNKVNISLLIDMMKDDYEADDIIRLYYDFIVLKSQKNLGFSIKKLREKMLDEYGFRFKDKQYDSVRSKMYKLMDFLLFCNYYRNDVIAGEALVRKLRFSMTDDEKEGIYADEAAKLWGKFRNDFENIADHMNGDVIKELGKADMDFDEKILDSEKKNASDLLYFSKMIYMLTYFLDGKEINDLLTTLISKFDNIKEFLKIMKSSAVDVECELTAGYKLFNDSQRITNELFIVKNIASMRKPAASAKLTMFRDALTILGIDDNITDDRISEILKLKEKGKGIHGLRNFITNNVIESSRFVYLIKYANAQKIREVAKNEKVVMFVLGGIPDTQIERYYKSCVEFPDMNSSLEAKRSELARMIKNISFDDFKNVKQQAKGRENVAKERAKAVIGLYLTVMYLLVKNLVNVNARYVIAIHCLERDFGLYKEIIPELASKNLKNDYRILSQTLCELCDNGDESPNLFLKKNKLPTRSLPGY

SEQ ID NO: 4873 - protein, 834 aa, Artificial
  Synthetic
VIFMAKKNKMKPRELREAQKKARQLKAAEINNNAAPAIAAMPAAEVIAPVAGKKKSSVKAAGMKSILVSENKMYITSFGKGNSAVLEYEVDKVDNNDYNQTQLSSKGSSNIELCGVNEVNITFSSKHGFESGVEINTSNPTHRSGESSPVRWDMLGLKSELEKRFFGKTFDDNIHIQLIYNILDIEKILAVYVTNIVYALNNMLGIKKSESYDDFMGYLSARNTYEVFTHPDKSNLSDKAKGNIKKSFSTFNDLLKTKRLGYFGLEEPKTKDTRVSQAYKKRVYHMLAIVGQIRQSVFHDKSSKLDEDLYSFIDIIDSEYRETLDYLVEERLKSINKDFIEGNKVNISLLIDMMKGFEADDIIRLYYDFIVLKSQKNLGFSIKKLREKMLEEYGYRFKDKQYDSVCSKMYKLMDFLLFCNYYRNDVVAGEALVRKLRFSMTDDEKEGIYADEAAKLWGKFRNDFENIADHMNGDVIKELGKADMDFDEKILDSEKKNASDLLYFSKMIYMLTYFLDGKEINDLLTTLISKFDNIKEFLKIMKSSAVDVECELTAGYKLFNDSQRITNELFIVKNIASMRKPAASAKLTMFRDALTILGIDDKITDDRISEILKLKEKGKGIHGLRNFITNNVIESSRFVYLIKYANAQKIREVAKNEKVVMFVLGGIPDTQIERYYKSCVEFPDMNSSLEVKRSELARMIKNISFDDFKNVKQQAKGRENVAKERAKAVIGLYLTVMYLLVKNLVNVNARYVIAIHCLERDFGLYKEIIPELASKNLKNDYRILSQTLCELCDDRDKSSNLFLKKNKRLRKCVEVDINNADSSMTRKYRNCIAH

SEQ ID NO: 4874 - protein, 620 aa, Artificial
  Synthetic
VIFMAKKNKMKPRELREAQKKARQLKAAEINNNAVPAIAAMPAAEAAAPAAEKKKSSVKAAGMKSILVSENKMYITSFGKGNSAVLEYEVDKVDDNDYNKTQLSSKGSSNIELHGVNEVNITFSSKHGFESGVEINTSNPTHRSGESSPVRGDMLGLKSELEKRFFGKTFDDNIHIQLIYNILDIEKILAVYVTNIVYALNNMLGIKGSESYDDFMGYLSARNTYEVFTNPNGSTLSDDKKENIRKSLSKFNALLKTKRLGYFGLEEPKTKDTRVSQAYKKRVYHMLAIVGQIRQSVFHDKSSKLDEDLYSFIDIIDSEYRETLDYLVDERFDSINKGFIQGNKVNISLLIDMMKDDYEADDIIRLYYDFIVLKSQKNLGFSIKKLREKMLDEYGFRFKDKQYDSVRSKMYKLMDFLLFCNYYRNDVVAGEALVRKLRFSMTDDEKEGTYADEAEKLWGKFRNDFENIADHMNGDAIKELGKADMDFDEKILDSEKKNASDLLYFSKMIYMLTYFLDGKEINDLLTTLISKFDNIKEFLKIMKSSAVDVECELTAGYKLFNDSQRITNELFIVKNIASMRKPAASAKLTMFRDALTILGIDDNITDDRISEILKLKEKGK

SEQ ID NO: 4875 - protein, 713 aa, Artificial
  Synthetic
MAKKNKMKPRELREAQKKARQLKAAEINNNAAPAIAAMPAAEVIAPAAEKKKSSVKAAGMKSILVSENKMYITSFGKGNSAVLEYEVDNNDYNKTQLSSKDNSNIELGNVNEVNITFSSRRGFESGVEINTSNPTHRSGESSSVRGDMLGLKSELEKRFFGKTFDDNIHIQLIYNILDIEKILAVYVTNIVYALNNMLGVKGSESYDDFMGYLSAQNTYYIFTHPDKSNLSDKVKGNIKKSLSKFNDLLKTKRLGYFGLEEPKTKDTRVSQAYKKRVYHMLAIVGQIRQCVFHDKSGAKRFDIYSFINNIDPEYRETLDYLVDERFDSINKGFIQGNKVNISLLIDMMKDYEADDIIRLYYDFIVLKSQKNLGFSIKKLREKMLDEYGFRFKDKQYDSVRSKMYKLMDFLLFCNYYRNDVVAGETLVRKLRFSMTDDEKEGIYADEAAKLWGKFRNDFENIADHMNGDVIKELGKADMDFDEKILDSEKKNASDLLYFSKMIYMLTYFLDGKEINDLLTTLISKFDNIKEFLKIMKSSAVDVECELTEGYKLFNDSQRITNELFIVKNIASMRKPAASAKLTMFRDALTILGIDDKITDDRISEILKLKEKGKGIHGLRNFITNNVIESSRFVYLIKYANAQKIREVAKNEKVVMFVLGGIPDTQIERYYKSCVEFPDMNSSLEAKRSELARMIKNIRFQKCETAGKGQRKRG

SEQ ID NO: 4876 - protein, 572 aa, Artificial
  Synthetic
MAKKNKMKPRELREAQKKARQLKAAEINNNAAPAIAAMPAAEVIAPVAEKKKSSVKAAGMKSILVSENKMYITSFGKGNSAVLEYEVDNNDYNKTQLSSKDNSNIELGDVNEVNITFSSKHGFGSGVEINTSNPTHRSGESSPVRGDMLGLKSELEKRFFGKTFDDNIHIQLIYNILDIEKILAVYVTNIVYALNNMLGIKDSESYDDFMGYLSARNTYEVFTHPDKSNLSDKVKGNIKKSLSKFNDLLKTKRLGYFGLEEPKTKDTRASEAYKKRVYHMLAIVGQIRQCVFHDKSGAKRFDLYSFINNIDPEYRDTLDYLVEERLKSINKDFIEGNKVNISLLIDMMKGYEADDIIRLYYDFIVLKSQKNLGFSIKKLREKMLEEYGFRFKDKQYDSVRSKMYKLMDFLLFCNYYRNDVAAGEALVRKLRFSMTDDEKEGIYADEAAKLWGKFRNDFENIADHMNGDVIKELGKADMDFDEKILDSEKKNASDLLYFSKMIYMLTYFLDGKEINDLLTTLISKFDNIKEFLKIMKSSAVDVECELTAGYKLFNDSQRITNELFIVKNIASM

SEQ ID NO: 4877 - protein, 643 aa, Artificial
  Synthetic
MAKKNKMKPRELREAQKKARQLKAAEINNNAAPAIAAMPAAEVIAPVAEKKKSSVKAAGMKSILVSENKMYITSFGKGNSAVLEYEVDNNDYNKTQLSSKDNSNIELGDVNEVNITFSSKHGFGSGVEINTSNPTHRSGESSPVRGDMLGLKSELEKRFFGKTFDDNIHIQLIYNILDIEKILAVYVTNIVYALNNMLGIKDSESYDDFMGYLSARNTYEVFTHPDKSNLSDKVKGNIKKSLSKFNDLLKTKRLGYFGLEEPKTKDTRASEAYKKRVYHMLAIVGQIRQCVFHDKSGAKRFDLYSFINNIDPEYRDTLDYLVEERLKSINKDFIEGNKVNISLLIDMMKGYEADDIIRLYYDFIVLKSQKNLGFSIKKLREKMLEEYGFRFKDKQYDSVRSKMYKLMDFLLFCNYYRNDVAAGEALVRKLRFSMTDDEKEGIYADEAAKLWGKFRNDFENIADHMNGDVIKELGKADMDFDEKILDSEKKNASDLLYFSKMIYMLTYFLDGKEINDLLTTLISKFDNIKEFLKIMKSSAVDVECELTAGYKLFNDSQRITNELFIVKNIASMRKPAASAKLTMFRDALTILGIDDNITDDRISEILKLKEKGKGIHGLRNFITNNVIESSRFVYLIKYANAQK

SEQ ID NO: 4878 - protein, 598 aa, Artificial
  Synthetic
MAKKNKMKPRELREAQKKARQLKAAEINNNAAPAIAAMPAAEVIAPVAEKKKSSVKAAGMKSILVSENKMYITSFGKGNSAVLEYEVDNNDYNKTQLSSKDNSNIELGDVNEVNITFSSKHGFGSGVEINTSNPTHRSGESSPVRGDMLGLKSELEKRFFGKTFDDNIHIQLIYNILDIEKILAVYVTNIVYALNNMLGIKDSESYDDFMGYLSARNTYEVFTHPDKSNLSDKVKGNIKKSLSKFNDLLKTKRLGYFGLEEPKTKDTRASEAYKKRVYHMLAIVGQIRQCVFHDKSGAKRFDLYSFIKNIDPEYRDTLDYLVEERLKSINKDFIEGNKVNISLLIDMMKGYEADDIIRLYYDFIVLKSQKNLGFSIKKLREKMLEEYGFRFKDKQYDSVRSKMYKLMDFLLFCNYYRNDVAAGEALVRKLRFSMTDDEKEGIYADEAAKLWGKFRNDFENIADHMNGDVIKELGKADMDFDEKILDSEKKNASDLLYFSKMIYMLTYFLDGKEINDLLTTLISKFDNIKEFLKIMKSSAVDVECELTAGYKLFNDSQRITNELFIVKNIASMRKPAASAKLTMFRDALTILGIDDNIT

SEQ ID NO: 4879 - protein, 882 aa, Artificial
  Synthetic
VIFMAKKNKMKPRELREAQKKARQLKAAEIKNNAVPAIAAMPAAEAAAPAVEKKKSSVKAAGMKSILVSENKMYITSFGKGNSAVLEYEVDKVDNNNYNKTQLSSKDNSNIELGDVNEVNITFSSKRGNESGVEINTSNPTHRSGESSPVRWDMLGLKSELEKRFFGKTFDDNIHIQLIYNILDIEKILAVYVTNIVYALNNMLGIKGSESYDDFMGYLSARNTYEVFTHPDKSNLSDKVKGNIKKSLSKFNDLLKTKRLGYFGLEEPKTKDTRVSQAYKKRVYHMLAIVGQIRQCVFHDKSGAKRFDLYSFINNIDPEYRDTLDYLVEERLKSINKDFIEGNKVNISLLIDMMKGYEADDIIRLYYDFIVLKSQKNLGFSIKKLREKMLEEYGYRFKDKQYDSVRSKMYKLMDFLLFCNYYRNDVVAGEALVRKLRFSMTDDEKEGIYADEASKLWGKFRNDFENIADHMNGDVIKELGKADMDFDEKILDSEKKNASDLLYFSKMIYMLTYFLDGKEINDLLTTLISKFDNIKEFLKIMKSSAVDVECALTAGYKLFNDSQRITNELFIVKNIASMRKPAASAKLTMFRDALTILGIDDKITDDRISEILKLKEKGKGIHGLRNFITNNVIESSRFVYLIKYANAQKIREVAKNEKVVMFVLGGIPDTQIERYYKSCVEFPDMNSSLEAKRSELARMIKNIRFDDFKNVKQQAKGRENVAKERAKAVIGLYLTVMYLLVKNLVNVNARYVIAIHCLERDFGLYKEIIPELASKNLKNDYRILSQTLCELCDDRDESPNLFLKKNKRLRKCVEVDINNADSSMTRKYRNCIAHLTVVRELKEYIGDIRTVDSYFSIYHYVMQRCITKREDDTKQEEKIKYE

SEQ ID NO: 4880 - protein, 872 aa, Artificial
  Synthetic
VIFMAKKNKMKPRELREAQKKARQLKAAEIKNNAVPAIAAMPAAEAAAPAVEKKKSSVKAAGMKSILVSENKMYITSFGKGNSAVLEYEVDKVDNNNYNKTQLSSKDNSNIELGDVNEVNITFSSKRGNESGVEINTSNPTHRSGESSPVRWDMLGLKSELEKRFFGKTFDDNIHIQLIYNILDIEKILAVYVTNIVYALNNMLGIKGSESYDDFMGYLSARNTYEVFTHPDKSNLSDKVKGNIKKSLSKFNDLLKTKRLGYFGLEEPKTKDTRVSQAYKKRVYHMLAIVGQIRQCVFHDKSGAKRFDLYSFINNIDPEYRDTLDYLVEERLKSINKDFIEGNKVNISLLIDMMKGYEADDIIRLYYDFIVLKSQKNLGFSIKKLREKMLEEYGYRFKDKQYDSVRSKMYKLMDFLLFCNYYRNDVVAGEALVRKLRFSMTDDEKEGIYADEASKLWGKFRNDFENIADHMNGDVIKELGKADMDFDEKILDSEKKNASDLLYFSKMIYMLTYFLDGKEINDLLTTLISKFDNIKEFLKIMKSSAVDVECELTAGYKLFNDSQRITNELFIVKNIASMRKPAASAKLTMFRDALTILGIDDKITDDRISEILKLKEKGKGIHGLRNFITNNVIESSRFVYLIKYANAQKIREVAKNEKVVMFVLGGIPDTQIERYYKSCVEFPDMNSSLEAKRSELARMIKNIRFDDFKNVKQQAKGRENVAKERAKAVIGLYLTVMYLLVKNLVNVNARYVIAIHCLERDFGLYKEIIPELASKNLKNDYRILSQTLCELCDDRDESPNLFLKKNKRLRKCVEVDINNADSSMTRKYRNCIAHLTVVRELKEYIGDIRTVDSYFSIYHYVMQRCITKREDD

SEQ ID NO: 4881 - protein, 889 aa, Artificial
  Synthetic
VIFMAKKNKMKPRELREAQKKARQLKAAEIKNNAVPAIAAMPAAEAAAPAVEKKKSSVKAAGMKSILVSENKMYITSFGKGNSAVLEYEVDKVDNNNYNKTQLSSKDNSNIELGDVNEVNITFSSKRGNESGVEINTSNPTHRSGESSPVRWDMLGLKSELEKRFFGKTFDDNIHIQLIYNILDIEKILAVYVTNIVYALNNMLGIKGSESYDDFMGYLSARNTYEVFTHPDKSNLSDKVKGNIKKSLSKFNDLLKTKRLGYFGLEEPKTKDTRVSQAYKKRVYHMLAIVGQIRQCVFHDKSGAKRFDLYSFINNIDPEYRDTLDYLVEERLKSINKDFIEGNKVNISLLIDMMKGYEADDIIRLYYDFIVLKSQKNLGFSIKKLREKMLEEYGYRFKDKQYDSVRSKMYKLMDFLLFCNYYRNDVVAGEALVRKLRFSMTDDEKEGIYADEASKLWGKFRNDFENIADHMNGDVIKELGKADMDFDEKILDSEKKNASDLLYFSKMIYMLTYFLDGKEINDLLTTLISKFDNIKEFLKIMKSSAVDVECELTAGYKLFNDSQRITNELFIVKNIASMRKPAASAKLTMFRDALTILGIDDKITDDRISEILKLKEKGKGIHGLRNFITNNVIESSRFVYLIKYANAQKIREVAKNEKVVMFVLGGIPDTQIERYYKSCVEFPDMNSSLEAKRSELARMIKNIRFDDFKNVKQQAKGRENVAKERAKAVIGLYLTVMYLLVKNLVNVNARYVIAIHCLERDFGLYKEIIPELASKNLKNDYRILSQTLCELCDDRDESPNLFLKKNKRLRKCVEVDINNADSSMTRKYRNCIAHLTVVRELKEYIGDIRTVDSYFSIYHYVMQRCITKREDDTKQEEKIKYEDDLLKNH

SEQ ID NO: 4882 - protein, 550 aa, Artificial
  Synthetic
MAKKNKMKPRELREAQKKARQLKAAEINNNAAPAIAAMPAAEAIAPAAEKKKSSVKAAGMKSIFVSENKMYITSFGKGNSAVLEYEVDKVDNNVYNQTQLSSEDSSNIELCGVTKVNITFSSKHGLESGVEISTSNPTHRSGESSPVRWDMLGLKSELEKRFFGKTFDDNIHIQLIYNILDIEKILAVYVTNIVYALNNMLGIKDSESYDDFMGYLSARNTYKVFTHPDKSNLSDKVKGNIKKSFSTFNDLLKTKRLGYFGLEEPKTKDTRVSEAYKKRVYHMLAIVGQIRQCVFHDLSEHSEYDLYSFIDNSKKVYRECRETLNYLVDERFDSINKGFIQGNKVNISLLIDMMKDDYEADDIIHLYYDFIVLKSQKNLGFSIKKLREKMLDEYGFRFKDKQYDSVRSKMYKLMDFLLFCNYYRNDVVAGEALVRKLRFSMTDDEKEGIYADEAEKLWGKFRNDFENIADHMNGDVIKELGKADMDFDEKIIDSEKKNASDLLYFSKMIYMLTYFLDGKEINDLLTTLISKFDNIKEFLKIMKSSAVDVE

SEQ ID NO: 4883 - protein, 550 aa, Artificial; identical to SEQ ID NO: 4882
  Synthetic

SEQ ID NO: 4884 - protein, 550 aa, Artificial; identical to SEQ ID NO: 4882
  Synthetic

SEQ ID NO: 4885 - protein, 565 aa, Artificial
  Synthetic
VIFMAKKNKMKPRELREAQKKARQLKAAEINNNAAPAIAAMPAAQVIAPAAEKKKSSVKAAGMKSILVSENKMYITSFGKGNSAVLEYEVDKVDNNNYNKTQLSSKDNSNIELGDVNEVNITFSSKHGFESGVEINTSNPTHRSGESSPVRWDMLGLKSELEKRFFGKTFDDNIHIQLIYNILDIEKILAVYVTNIVYALNNMLGIKGSESYDDFMGYLSARNTYEVFTHPDKSNLSDKVKGNIKKSFSTFNDLLKTKRLGYFGLEEPKTKDTRVSEAYKKRVYHMLAIVGQIRQCVFHDLSEHSEYDLYSFIDNSKKVYRECRETLNYLVDERFDSINKGFIQGNKVNISLLIDMMKDDYEADDIIHLYYDFIVLKSQKNLGFSIKKLREKMLDEYGFRFKDKQYDSVRSKMYKLMDFLLFCNYYRNDVVAGEALVRKLRFSMTDDEKEGIYADEAEKLWGKFRNDFENIADHMNGDVIKELGKADMDFDEKILDSEKKNASDLLYFSKMIYMLTYFLDGKEINDLLTTLISKFDNIKEFLKIMKSSAVDVECELTAGYRLFND

SEQ ID NO: 4886 - protein, 825 aa, Artificial
  Synthetic
MAKKNKMKPRELREAQKKARQLKAAEINNNAVPAIAAMPAAEVIAPVAGKKKSSVKAAGMKSILVSENKMYITSFGKGNSAVLEYEVDKVDDNDYNKTQLSSKGSSNIELHGVNEVNITFSSKHGFESGVEINTSNPTHRSGESSPVRGDMLGLKSELEKRFFGKTFDDNIHIQLIYNILDIEKILAVYVTNIVYALNNMLGIKDSESYDDFMGYLSAKNTYEVFTHPDKSNLSDKAKGNIKKSFSTFNDLLKTKRLGYFGLEEPKTKDTRVSQAYKKRVYHMLAIVGQIRQCVFHDLSEHSEYDLYSFIDNSKKVYRECRETLDYLVDERFDSINKGFIQGNKVNISLLIDMMKGYEADDIIRLYYDFIVLKSQKNLGFSIKKLREKMLDEYGFRFKDKQYDSVRSKMYKLMDFLLFCNYYRNDVVAGEALVRKLRFSMTDDEKEGTYADEAEKLWGKFRNDFENIADHMNGDAIKELGKADMDFDEKILDSEKKNASDLLYFSKMIYMLTYFLDGKEINDLLTTLISKFDNIKEFLKIMKSSAVDVECELTAGYKLFNDSQRITNELFIVKNIASMRKPAASAKLTMFRDALTILGIDDNITDDRISEILKLKEKGKGIHGLRNFITNNVIESSRFVYLIKYANAQKIREVAKNEKVVMFVLGGIPDTQIERYYKSCVEFPDMNSSLEAKRSELARMIKNISFDDFKNVKQQAKGRENVAKERAKAVIGLYLTVMYLLVKNLVNVNARYVIAIHCLERDFGLYKEIIPELASKNLKNDYRILSQTLCELCDKSPNLFLKKNERLRKCSLRAIFFSISIMQTAA

SEQ ID NO: 4887 - protein, 596 aa, Artificial
  Synthetic
MAKKNKMKPRELREAQKKARQLKAAEINNNAVPAIAAMPAAEVIAPVAGKKKSSVKAAGMKSILVSENKMYITSFGKGNSAVLEYEVDKVDDNDYNKTQLSSKGSSNIELHGVNEVNITFSSKHGFESGVEINTSNPTHRSGESSPVRGDMLGLKSELEKRFFGKTFDDNIHIQLIYNILDIEKILAVYVTNIVYALNNMLGIKDSESYDDFMGYLSAKNTYEVFTHPDKSNLSDKAKGNIKKSFSTFNDLLKTKRLGYFGLEEPKTKDTRVSQAYKKRVYHMLAIVGQIRQCVFHDLSEHSEYDLYSFIDNSKKVYRECRETLDYLVDERFDSINKGFIQGNKVNISLLIDMMKGYEADDIIRLYYDFIVLKSQKNLGFSIKKLREKMLDEYGFRFKDKQYDSVRSKMYKLMDFLLFCNYYRNDVVAGEALVRKLRFSMTDDEKEGIYADEAAKLWGKFRNDFENIADHMNGDVIKELGKADMDFDEKILDSEKKNASDLLYFSKMIYMLTYFLDGKEINDLLTTLISKFDNIKEFLKIMKSSAVDVECELTAGYKLFNDSQRITNELFIVKNIASMRKPAASARLTMFRDALTI

SEQ ID NO: 4888 - protein, 457 aa, Artificial
  Synthetic
MAKKNKMKPRELREAQKKARQLKAAEINNNAAPAIAAMPAAEVIAPAAEKKKSSVKAAGMKSILVSENKMYITSFGKGNSAVLEYEVDNNDYNKTQLSSKDNSNIELGDVDEVNITFSSKHGFGSGVEINTSNPTHRSGESSPVRWDMLGLKSELEKRFFGKTFDDNIHIQFIYNILDIEKILAVYVTNIVYALNNMLGIKDSESYDDFIGYLSARNTYKVFTHPDKSNLSDKAKGNIKKSFSTFNDLLKTKRLGYFGLEEPKTKDTRVLEAYKKRVYYMLAIVGQIRQCVFHDLSEHSEYDLYSFIDNSKKVYRECRETLDYLVDERFDSINKGFIQGNKVNISLLIDMMKGYEADDIIRLYYDFIVLKSQKNLGFSIKKLREKMLDEYGFRFKDKQYDSVRSKMYKLMDFLLFCNYYRNDVVAGEALVRKLRFSMTDDEKEGIYADEAAKLWVKF

SEQ ID NO: 4889 - protein, 755 aa, Artificial
  Synthetic
MAKKNKMKPRELREAQKKARQLKAAEINNNAAPAIAAMPAAEVIAPAAEKKKSSVKAAGMKSILVSENKMYITSFGKGNSAVLEYEVDNNDYNKTQLSSKDNSNIELGDVDEVNITFSSKHGFGSGVEINTSNPTHRSGESSPVRWDMLGLKSELEKRFFGKTFDDNIHIQFIYNILDIEKILAVYVTNIVYALNNMLGIKDSESYDDFIGYLSARNTYKVFTHPDKSNLSDKAKGNIKKSFSTFNDLLKTKRLGYFGLEEPKTKDTRVLEAYKKRVYYMLAIVGQIRQCVFHDLSEHSEYDLYSFIDNSKKVYRECRETLDYLVDERFDSINKGFIQGNKVNISLLIDMMKGYEADDIIRLYYDFIVLKSQKNLGFSIKKLREKMLDEYGFRFKDKQYDSVRSKMYKLMDFLLFCNYYRNDVVAGEALVRKLRFSMTDDEKEGIYADEAAKLWVKFRNDFENIADHMNGDVIKELGKADMDFDEKILDSEKKNASDLLYFSKMIYMLTYFLDGKEINDLLTTLISKFDNIKEFLKIMKSSAVDVECELTAGYKLFNDSQRITNELFIVKNIASMRKPAASAKLTMFRDALTILGIDDKITDDRISEILKLKEKGKGIHGLRNFITNNVIESSRFVYLIKYANAQKIREVAKNEKVVMFVLGGIPDTQIERYYKSCVEFPDMNSSLEVKRSELARMIKNISFDDFKNVKQQAKGRENVAKERAKAVIGLYLTVMYLLVKNLVNVNARYVIAIHCL

SEQ ID NO: 4890 - protein, 857 aa, Artificial
  Synthetic
VIFMAKKNKMKPRELREAQKKARQLKAAEINNNAVPAIAAMPAAEVIAPAAEKKKSSVKAAGMKSILVSENKMYITSFGKGNSAVLEYEVDNNDYNKTQLSSKDNSNIELGNVNEVNITFSSRRGFESGVEINTSNPTHRSGESSSVRGDMLGLKSELEKRFFGKTFDDNIHIQLIYNILDIEKILAVYVTNIVYALNNMLGVKGSESYDDFMGYLSAQNTYYIFTHPDKSNLSDKVKGNIKKSLSKFNDLLKTKRLGYFGLEEPKTKDKRVSEAYKKRVYHMLAIVGQIRQCVFHDLSEHSEYDLYSFIDNSKKVYRECRETLDYLVDERFDSINKGFIQGNKVNISLLIDMMKDYEADDIIRLYYDFIVLKSQKNLGFSIKKLREKMLDEYGFRFKDKQYDSVRSKMYKLMDFLLFCNYYRNDVVAGEALVRKLRFSMTDDEKEGIYADEAAKLWGKFRNDFENIADHMNGDVIKELGKADMDFDEKILDSEKKNASDLLYFSKMIYMLTYFLDGKEINDLLTTLISKFDNIKEFLKIMKSSAVNVECELTAGYKLFNDSQRITNELFIVKNIASMRKPAASAKLTMFRDALTILGIDDKITDDRISEILKLKEKGKGIHGLRNFITNNVIESSRFVYLIKYANAQKIREVAKNEKVVMFVLGGIPDTQIERYYKSCVEFPDMNSSLEVKRSELARMIKNISFDDFKNVKQQAKGRENVAKERAKAVIGLYLTVMYLLVKNLVNVNARYVIAIHCLERDFGLYKEIIPELASKNLKNDYRILSQTLCELCDNRDESPNLFLKKNKRLRKCVEVDINNADSSMTRKYRNCIAHLTVVRELKEYIGDIRTVDSYFSI

SEQ ID NO: 4891 - protein, 897 aa, Artificial
  Synthetic
MAKKNKMKPRELREAQKKARQLKAAEINNNAVPAIAAMPAAEAAAPAAEKKKSSVKAAGMKSILVSENKMYITSFGKGNSAVLEYEVDNNDYNKTQLSSKDNSNIELCDVDEVNITFSSKHGFESGVKINTSNPTHRSGESSSVRGDMLGLKSELEKRFFGKTFDDNIHIQLIYNILDIEKILAVYVTNIVYALNNMLGLENESNNDFMGYLSAKNTYDVFTDPDESDLSKNIKGNIKKSLSKFNDLLKTKRLGYFGLEEPKTKDKRVSEAYKKRVYHMLAIVGQIRQSVFHDKSNELDEYLYSFIDIIDSEYRETLDYLIDERFDSINKGFIQGNKVNISLLIDMMKGYEADDIIRLYYDFIVLKSQKNLGFSIKKLREKMLDEYGFRFKDKQYDSVRSKMYKLMDFLLFCNYYRNDVVAGEALVRKLRFSMTDDEKEGIYADEAEKLWGKFRNDFENIADHMNGDVIKELGKADMDFDEKILDSEKKNASDLLYFSKMIYMLTYFLDGKEINDLLTTLISKFDNIKEFLKIMKSSAVDVECELTAGYKLFNDSQRITNELFIVKNIASMRKPAASAKLTMFRDALTILGIDDKITDDRISEILKLKEKGKGIHGLRNFITNNVIESSRFVYLIKYANAQKIREVAKNEKVVMFVLGGIPDTQIERYYKSCVESPDMNSSLEAKRRENVAKERAKAVIGLYLTVTYLLVKNLVNVNARYVIAIHCLERDFGLYKEIIPELASKNLKNDYRILSQTLCELCDDRDESPNLFLKKNKRLRKCVEVDINNADSSMTRKYRNCIAHLTVVRELKEYIGDIRTVDSYFSIYHYVMQRCITKREDDTKQEEKIKYEDDLLKNHGYTKDFVKALNSSFGYNIPRFKNLSIEQLFDRNEYLTEK

SEQ ID NO: 4892 - protein, 897 aa, Artificial; identical to SEQ ID NO: 4891
  Synthetic

SEQ ID NO: 4893 - protein, 329 aa, Artificial
  Synthetic
MAKKNKMKPRERREAQKKARQLKAAEINNNAVPAIAAMPAAEAAAPAAEKKKSSVKAAGMKSILVSENKMYITSFGKGNSAVLEYEVDNNDYNKTQLSSKDNSNIELCDVDEVNITFSSKHGFESGVKINTSNPTHRSGESSSVRGDMLGLKSELEKRFFGKTFDDNIHIQLIYNILDIEKILAVYVTNIVYALNNMLGLENESNNDFMGYLSAKNTYDVFTDPDESDLSKNIKGNIKKSLSKFNDLLKTKRLGYFGLEEPKTKDKRVSEAYKKRVYHMLAIVGQIRQSVFHDKSNELDEYLYSFIDIIDSEYRETLDYLLSLIHISEP

SEQ ID NO: 4894 - protein, 854 aa, Artificial
  Synthetic
MAKKNKMKPRELREAQKKARQLKAAEIKNNAVPAIAAMPAAEAAAPAVEKKKSSVKAAGMKSILVSENKMYITSFGKGNSAVLEYEVDNNDYNKTQLSSEDNSNIELCDVDEVNITFSSKHGFESGVEINTSNPTHRSGESSPVRGDMLGLKSELEKRFFGKTFDDNIHIQLIYNILDIEKILAVYVTNIVYALNNMLGEGGDESHDDFMGYLSAKNTYDVFTDPDESDLSKNIKGNIKKSLSKFNDLLKTKRLGYFGLEEPKTKDKRASEAYKKRVYHMLAIVGQIRQSVFHDKSNELDEYLYSFIDIIDSEYRDTLDYLVDERFDSINKGFIQGNKVNISLLIDMMKGYEADDIIRLYYDFIVLKSQKNLGFSIKKLREKMLDEYGFRFKDKQYDSVRSKMYKLMDFLLFCNYYRKDVGAGEALVRKLRFSMTDEEKEGIYAYEAAKLWGKFRNDFENIADHMNGDVIKELGKADMDFDEKILDSEKKNASDLLYFSKMIYMLTYFLDGKEINDFLTTLISKFDNIKEFLKIMKSSAVDVECKLTAGYKLFNDSQRITNELFIVKNIASMRKPAASAKLTMFRDALTILGIDDKITDDRISEILKLKEKGKGIHGLRNFITNNVIESSRFVYLIKYANAQKIREVAENEKVVMFVLGGIPDTQIERYYKSCVEFPDMNSSLEAKRSELARMIKNISFDDFKNVKQQAKGRENVAKERAKAVIGLYLTVMYLLVKNLVNVNARYVIAIHCLERDFGLYKEIIPELASKNLKNDYRILSQTLCELCDDCDESPNLFLKKNKRLRKCVEVDINNADSSMTRKYRNCIAHLTVVRELKEYIGDIRTVDSYFSIYHY

SEQ ID NO: 4895 - protein, 871 aa, Artificial
  Synthetic
VIFMAKKNKMKPRELREAQKKARQLKAAEINNNAVPAIAAMPAAEAAAPAAEKKKSSVKAAGMKSILVSENKMYITSFGKGNSAVLEYEVDNNDYNKTQLSSKDNSNIELCDVDEVNITFSSKHGFESGVKINTSNPTHRSGESSSVRGDMLGLKSELEKRFFGKTFDDNIHIQLIYNILDIEKILAVYVTNIVYALNNMLGLENESNNDFMGYLSAKNTYDVFTDPDESDLSKNIKGNIKKSLSKFNDLLKTKRLGYFGLEEPKTKDKRVSEAYKKRVYHMLAIVGQIRQSVFHDKSNELDEYLYSFIDIIDSEYRETLDYLIDERFDSINKGFIQGNKVNISLLIDMMKDDYEADDIIRLYYDFIVLKSQKNLGFSIKKLREKMLDEYGFRFKDKQYDSVRSKMYKLMDFLLFCNYYRNDVIAGEALVRKLRFSMTDDEKEGIYADEAAKLWGKFRNDFENIADHMNGDVIKELGKADMDFDEKILDSEKKNASDLLYFSKMIYMLTYFLDGKEINDLLTTLISKFDNIKEFLKIMKSSAVNVECELTAGYKLFNDSQRITNELFIVKNIASMRKPAASAKLTMFRDALTILGIDDKITDDRISEILKLKEKGKGIHGLRNFITNNVIESSRFVYLIKYANAQKIREVAENEKVVMFVLGGIPDTQIERYYKSCVEFPDMNSSLEVKRSELARMIKNIRFDDFKNVKQQAKGRENVAKERAKAVIGLYLTVMYLLVKNLVNVNARYVIAIHCLERDFGLYKEIIPELASKNLKNDYRILSQTLCELCDNGDESPNLFLKKNRRLRKCVEVDINNADSSMTRKYRNCIAHLTVVRELKEYIGDIRTVDSYFSIYHYVMQRCITKREDDTK

SEQ ID NO: 4896 - protein, 854 aa, Artificial
  Synthetic
MAKKNKMKPRELREAQKKARQLKAAEINNNAVPAIAAMPAAEAAAPAAEKKKSSVKAAGMKSILVSENKMYITSFGKGNSAVLEYEVDNNDYNKTQLSSKDNSNIELCDVDEVNITFSSKHGFESGVKINTSNPTHRSGESSSVRGDMLGLKSELEKRFFGKTFDDNIHIQLIYNILDIEKILAVYVTNIVYALNNMLGLENESNNDFMGYLSAKNTYDLSKNIKGNIKKSLSKFNDLLKTKRLGYFGLEEPKTKDKRVSEAYKKRVYHMLAIVGQIRQSVFHDKSNELDEYLYSFIDIIDSEYRETLDYLIDERFDSINKGFIQGNKVNISLLIDMMKDDYEADDIIRLYYDFIVLKSQKNLGFSIKKLREKMLDEYGFRFKDKQYDSVRSKMYKLMDFLLFCNYYRNDVIAGEALVRKLRFSMTDDEKEGIYADEAAKLWGKFRNDFENIADHMNGDVIKELGKADMDFDEKILDSEKKNASDLLYFSKMIYMLTYFLDGKEINDLLTTLISKFDNIKEFLKIMKSSAVNVECELTAGYKLFNDSQRITNELFIVKNIASMRKPAASAKLTMFRDALTILGIDDKITDDRISEILKLKEKGKGIHGLRNFITNNVIESSRFVYLIKYANAQKIREVAENEKVVMFVLGGIPDTQIERYYKSCVEFPDMNSSLEVKRSELARMIKNIRFDDFKNVKQQAKGRENVAKERAKAVIGLYLTVMYLLVKNLVNVNARYVIAIHCLERDFGLYKEIIPELASKNLKNDYRILSQTLCELCDNGDESPNLFLKKNRRLRKCVEVDINNADSSMTRKYRNCIAHLTVVRELKEYIGDIRTVDSYFSIYHYAALYHEKGR

SEQ ID NO: 4897 - protein, 598 aa, Artificial
  Synthetic
MAKKNKMKPRELREAQKKARQLKVAEINNNAVPAIAAMPAAQVIAPAAEKKKSSVKAAGMKSILVSENKMYITSFGKGNSAVLEYEVDNNDYNKTQLSSEGNSNIELGDVNEVNITFSSKRGFESGVEINTSNPTHRSGESSPVRGDMLGLKSELEKRFFGKTFDDNIHIQLIYNILDIEKILAVYVTNIVYALNNMLGEGDDESHDDFMGYLSAKNTYDVFTDPDESDLSKNIKGNIKKSFSTFNDLLKTKRLGYFGLEEPKTKDTRVSQAYKKRVYHMLAIVGQIRQSVFHDKSSKLDEDLYSFIDIIDSEYRDTLDYLVDERFDSINKGFIQGNKVNISLLIDMMKDDYEADDIIRLYYDFIVLKSQKNLGFSIKKLREKMLEEYGFRFKDKQYDSVRSKMYKIMDFLLFCNYYRNDVVAGEALVRKLRFSMTDDEKEGIYADEAAKLWGKFRNDFENIADHMNGDVIKELGKADMDFDEKILDSEKKNASDLLYFSKMIYMLTYFLDGKEINDLLTTLISKFDNIKEFLKIMKSSAVDVECELTAGYKLFNDSQRITNELFIVKNIASMRKPAASAKLTMFRDALTILGIDDGR

SEQ ID NO: 4898 - protein, 699 aa, Artificial
  Synthetic
VIFMAKKNKMKPRELREAQKKARQLKVAEINNNAVPAIAAMPAAQVIAPAAEKKKSSVKAAGMKSILVSENKMYITSFGKGNSAVLEYEVDNNDYNKTQLSSEGNSNIELGDVNEVNITFSSKRGFESGVEINTSNPTHRSGESSPVRGDMLGLKSELEKRFFGKTFDDNIHIQLIYNILDIEKILAVYVTNIVYALNNMLGEGDDESHDDFMGYLSAKNTYDVFTDPDESDLSKNIKGNIKKSFSTFNDLLKTKRLGYFGLEEPKTKDTRVSQAYKKRVYHMLAIVGQIRQSVFHDKSSKLDEDLYSFIDIIDSEYRDTLDYLVDERFDSINKGFIQGNKVNISLLIDMMKDDYEADDIIRLYYDFIVLKSQKNLGFSIKKLREKMLEEYGFRFKDKQYDSVRSKMYKIMDFLLFCNYYRNDVVAGEALVRKLRFSMTDDEKEGIYADEAAKLWGKFRNDFENIADHMNGDVIKELGKADMDFDEKILDSEKKNASDLLYFSKMIYMLTYFLDGKEINDLLTTLISKFDNIKEFLKIMKSSAVDVECELTAGYKLFNDSQRITNELFIVKNIASMRKPAASAKLTMFRDALTILGIDDNITDDRISEILKLKEKGKGIHGLRNFITNNVIESSRFVYLIKYANAQKIREVAKNEKVVMFVLGGIPDTQIERYYKSCVEVPDMNSSLEAKRSELARMIK

SEQ ID NO: 4899 - protein, 739 aa, Artificial
  Synthetic
VIFMAKKNKMKPRELREAQKKARQLKAAEINNNAAPAIAAMPAAEVIAPAAEKKKSSVKAAGMKSILVSKNKMYITSFGKGNSAVLEYEVDNNDYNQTQLSSKNSSNIELHGVNEVNITFSSKHGFESGVEINTSNPTHRSGESSPVRGDMLGLKSELEKRFFGKTFDDNIHIQLIYNILDIEKILAVYVTNIVYALNNMLGEGDDESHDDFMGYLSAKNTYDVFTDPDESDLSKNIKGNIKKSLSKFNDLLKTKRLGYFGLEEPKTKDTNALEAYKKRVYHMLAIVGQIRQSVFHDKSSKLDEDLYSFIDIIDSEYRETLDYLVDERFDSINKGFIQGNKVNISLLIDMMKGYEADDIIRLYYDFIVLKSQKNLGFSIKKLREKMLEEYGYRFKDKQYDSVRSKMYKLMDFLLFCNYYRNDVVAGEALVRKLRFSMTDDEKEGIYADEASKLWGKFRNDFENIADHMNGDVIKELGKADMDFDEKILDSEKKNASDLLYFSKMIYMLTYFLDGKEINDLLTTLISKFDNIKEFLKIMKSSAVNVECELTTGYKLFNDSQRITNELFIVKNIASMRKPAASAKLTMFRDALTILGIDDKITDDRISEILKLKEKGKGIHGLRNFITNNVIESSRFVYLIKYANAQKIREVAENEKVVMFVLGGIPDTQIERYYKSCVEFPDMNSSLKAKRSELARMIKNIRFDDFKNVKQQAKGRENVAKERAKAVIGLYLTVMYLLVK

SEQ ID NO: 4900 - protein, 387 aa, Artificial
  Synthetic
VIFMAKKNKMKPRELREAQKKARQLKAAEINNNAVPAIAAMPAAEVIAPAAEKKKSSVKAAGMKSILVSENKMYITSFGKGNSAVLEYEVDKVDNDDYNKTQLSSKGSSNIELHGVNEVNITFSSKHGFESGVEISTSNPTHRSGESSPVRWDMLGLKSELEKRFFCKTFDDNIHIQLIYNILDIEKILAVYVTNIVYALNNMLGVKGSESHDDFIGYLSTNNIYDVFIDPDNSSLSDDKKANVRKSLSKFNVLLKTKRLGYFGLEEPKTKDTRASEAYKKRVYHMLAIVGQIRQCVFHDKSGAKRFDLYSFINNIDSEYRETLDYLVDERFDSINKGFIEGNKINISLLIDMMKGYEADDIIRLYYDFIVLKSQKNLGFSIKKLRE

SEQ ID NO: 4901 - protein, 371 aa, Artificial
  Synthetic
  misc_feature (365)..(368): Xaa can be any naturally occurring amino acid
MAKKNKMKPRELREAQKKARQLKVAEINNNAAPAIAAMPAVEVIAPAAEKKKSSVKAAGMKSILVSENKMYITSFGKGNSAVLEYEVDNNDYNKTQLSSKDNSNIELGNVNEVNITFSSRRGFESGVEINTSNPTHRSGESSSVRGDMLGLKSELEKRFFGKTFDDNIHIQLIYNILDIEKILAVYVTNIVYALNNMLGIKGSESYDDFMGYLSARNTYEVFTNPNGSTLSDDKKENIRKSLSKFNALLKTKRLGYFGLEEPKTKDTRVSQAYKKRVYHMLAIVGQIRQSVFHDKSSKLDEDLYSFIDIIDSEYRETLDYLVDERFDSINKGFVQGNKVNISLLIDMMKDDYEADDIIRLYYDFXXXXHCA

SEQ ID NO: 4902 - protein, 568 aa, Artificial
  Synthetic
MPAAEVIAPAAEKKKSSVKAAGMKSILVSENKMYITSFGKGNSAVLEYEVDNNDYNQTQLSSEDSSNIELCGVTKVNITFSSKHGLESGVEINTSNPTHRSGESSPVRWDMLGLKSELEKRFFGKTFDDNIHIQLIYNILDIEKILAVYVTNIVYALNNMLGIKKSESYDDFMGYLSARNTYEVFTHPDKSNLSDKAKGNIKKSFSTFNDLLKTKRLGYFGLEEPKTKDTRVSQAYKKRVYHMLAIVGQIRQCVFHDKSGAKKFDLYSFINNIDSEYRETLDYLVDERFDSINKGFIQGNKVNISLLIDMMKGYKADDIIRLYYDFIVLKSQKNLGFSIKKLREKMLDEYGFRFKDKQYDSVRSKMYKLMDFLLFCNYYRNDVIAGEDLVRKLRFSMTDDEKEGIYADEAEKLWGKFRNDFENIADHMNGDVIKELGQADMDFDEKILDSEKKNASDLLYFSKMIYMLTYFLDGKEINDLLTTLISKFDNIKEFLKIMKSSAVDVECELTAGYKLFNDSQRITNELFIVKNIASMRKPAASAKLTMFRDALTILGIDDKITDDRISEI

SEQ ID NO: 4903 - protein, 360 aa, Artificial
  Synthetic
MAKKNKMKPRELREAQKKARQLKAAEINNNAAPAIAAMPAAEVIAPAAEKKKSSVKAAGMKSIFVSENKMYITSFGKGNSAVLEYEVDNNDYNQTQLSSEDSSNIELCGVTKVNITFSSKHGLESGVEINTSNPTHRSGESSPVRWDMLGLKSELEKRFFGKTFDDNIHIQLIYNILDIEKMLAVYVTNIVYALNNMLGIKKSESYDDFMGYLSARNTYEVFTHPDKSNLSDKVKGNIKKSFSTFNDLLKTKRLGYFGLEEPKTKDTRVLEAYKKRVYHMLAIVGQIRQCVFHDKSGAKRFDLYSFINNIDPEYRETLDYLVDERFDSINKDFIEGNKVNISLLIDMMKGYEADDIIRLY

SEQ ID NO: 4904 - protein, 567 aa, Artificial
  Synthetic
MAKKNKMKPRELREAQKKARQLKAAEINNNAAPAIAAMPAAEVIAPAAEKKKSSVKAAGMKSILVSENKMYITSFGKGNSAVLEYEVDNNDYNQTQLSSKDNSNIQLGGVNEVNITFSSKHGFESGVEINTSNPTHRSGESSPVRGDMLGLKSELEKRFFGKTFDDNIHIQLIYNILDIEKILAVYVTNIVYALNNMLGVKGSESHDDFIGYLSTNNIYDVFIDPDNSSLSDDKKANVRKSLSKFNALLKTKRLGYFGLEEPKTKDNRVSQAYKKRVYHMLAIVGQIRQCVFHDKSGAKRFDLYSFINNIDPEYRDTLDYLVEERLKSINKDFIEDNKVNISLLIDMMKGYEADDIIRLYYDFIVLKSQKNLGFSIKKLREKMLDEYGFKRTAWVLANTLHELKWDGRFSYANKHWAEKIYIPTDLNHNSDFVVRSHPAVLDGFVSFYRKAVQALNLFGAEHCVGDRAEQDFTGKVLVLSPDTLKESCWSQENQLWYAHDGFGCSPHAIGRSVRCTCLGDGEMTRWNRDEFIGVLDEQFLPEWAQEKLAELTAPRQEETTTGEMKLE

SEQ ID NO: 4905 - protein, 487 aa, Artificial
  Synthetic
MMKKEGIYADEAAKLWGKFRNDFENIADHMNGEAIKELGKADMDFDEKILDSEKKNASDLLYFSKMIYMLTYFLDGKEINDLLTTLISKFDNIKEFLKIMKSSAVDVECELTAGYKLFNDSQRITNELFIVKNIASMRKPAASAKLTMFRDALTILGIDDNITDDRISEILKLKEKGKGIHGLRNFITNNVIESSRFVYLIKYANAQKIREVAENEKVVMFVLGGIPDTQIERYYKSCVEFPDMNSSLEAKRSELARMIKNISFDDFKNVKQQAKGRENVAKERAKAVIGLYLTVMYLLVKNLVNVNARYVIAIHCLERDFGLYKEIIPELASKNLKNDYRILSQTLCELCDDRDESPNLFLKKNKRLRKCVEVDINNADSSMTRKYRNCIAHLTVVRELKEYIGDIRTVDSYFSIYHYVMQRCITKREDDTKQEDKIKYEDDLLKNHGYTKDFVKALNSPFGYNIPRFKNLSIEQLFDRNEYLTEK

SEQ ID NO: 4906 - protein, 487 aa, Artificial
  Synthetic
MMKKEGIYADEAAKLWGKFRNDFENIADHMNGEAIKELGKADMDFDEKILDSEKKNASDLLYFSKMIYMLTYFLDGKEINDLLTTLISKFDNIKEFLKIMKSSAVDVECELTAGYKLFNDSQRITNELFIVKNIASMRKPAASAKLTMFRDALTILGIDDNITDDRISEILKLKEKGKGIHGLRNFITNNVIESSRFVYLIKYANAQKIREVAKNEKVVMFVLGGIPDTQIERYYKSCVEFPDMNSSLEAKRSELARMIKNIGFDDFKNVKQQAKGRENVAKERAKAVIGLYLTVMYLLVKNLVNVNARYVIAIHCLERDFGLYKEIIPELASKNLKNDYRILSQTLCELCDDRDESPNLFLKKNKRLRKCVEVDINNADSSMTRKYRNCIAHLTVVRELKEYIGDIRTVDSYFSIYHYVMQRCITKREDDTKQEDKIKYEDDLLKNHGYTKDFVKALNSPFGYNIPRFKNLSIEQLFDRNEYLTEK

SEQ ID NO: 4907 - protein, 796 aa, Artificial
  Synthetic
VEINTSNPTHRSGESSSVRGDMLGLKSELEKRFFGKTFDDNIHIQLIYNILDIEKILAVYVTNIVYALNNMLGIKDSESYDDFIGYLSARNTYKVFTHPDKSNLSDKVKGNIKKSFSTFNDLLKTKRLGYFGLEEPKTKDTRVSQAYKKRVYHMLAIVGQIRQSVFHDKSSKLDEDLYSFIDIIDPEYRETLDYLVDERFDSINKGFIQGNKVNISLLIDMMKGYEADDIIRLYYDFIVLKSQKNLGFSIKKLREKMLDEYGFRFKDKQYDSVRSKMYKLMDFLLFCNYYRNDVVAGEALVRKLRFSMTDDEKEGIYADEAAKLWGKFRNDFENIADHMNGEAIKELGKADMDFDEKILDSEKKNASDLLYFSKMIYMLTYFLDGKEINDLLTTLISKFDNIKEFLKIMKSSAVDVECELTAGYKLFNDSQRITNELFIVKNIASMRKPAASAKLTMFRDALTILGIDDNITDDRISEILKLKEKGKGIHGLRNFITNNVIESSRFVYLIKYANAQKIREVAKNEKVVMFVLGGIPDTQIERYYKSCVEFPDMNSSLEAKRSELARMIKNIGFDDFKNVKQQAKGRENVAKERAKAVIGLYLTVMYLLVKNLVNVNARYVIAIHCLERDFGLYKEIIPELASKNLKNDYRILSQTLCELCDDRDESPNLFLKKNKRLRKCVEVDINNADSSMTRKYRNCIAHLTVVRELKEYIGDIRTVDSYFSIYHYVMQRCITKREDDTKQEDKIKYEDDLLKNHGYTKDFVKALNSPFGYNIPRFKNLSIEQLFDRNEYLTEK

SEQ ID NO: 4908 - protein, 458 aa, Artificial
  Synthetic
MNGDVIKELGKADMDFDEKILDSEKKNASDLLYFSKMIYMLTYFLDGKEINDLLTTLISKFDNIKEFLKIMKSSAVDVECELTAGYKLFNDSQRITNELFIVKNIASMRKPAASAKLTMFRDALTILGIDDKITDDRISEILKLKEKGKGIHGLRNFITNNVIESSRFVYLIKYANAQKIREVAENEKVVMFVLGGIPDTQIERYYKSCVEVPDMNSSLEAKRSELARMIKNISFDDFKNVKQQAKGRENVAKERAKAVIGLYLTVMYLLVKNLVNVNARYVIAIHCLERDFGLYKEIIPELASKNLKNDYRILSQTLCELCDDRDKSPNLFLKKNKRLRKCVEVDINNADSIMTRKYRNCIAHLTVVRELKEYIGDIRTVDSYFSIYHYVMQRCITKREDDTKQEEKIKYEDDLLKNHGYTKDFVKALNSPFGYNIPRFKNLSIEQLFDRNEYLTEK

SEQ ID NO: 4909 - protein, 458 aa, Artificial; identical to SEQ ID NO: 4908
  Synthetic

SEQ ID NO: 4910 - protein, 458 aa, Artificial; identical to SEQ ID NO: 4908
  Synthetic

SEQ ID NO: 4911 - protein, 458 aa, Artificial; identical to SEQ ID NO: 4908
  Synthetic

SEQ ID NO: 4912 - protein, 458 aa, Artificial; identical to SEQ ID NO: 4908
  Synthetic

SEQ ID NO: 4913 - protein, 458 aa, Artificial; identical to SEQ ID NO: 4908
  Synthetic

SEQ ID NO: 4914 - protein, 572 aa, Artificial
  Synthetic
MRLMISYAFIMISLCLNLRKISVFSIKKLREKMLDEYGFRFKDKQYDSVRSKMYKLMDFLLFCNYYRNDVAAGEALVRKLRFSMTDDEKEGIYADEAAKLWGKFRNDFENIADHMNGDVIKELGKADMDFDEKILDSEKKNASDLLYFSKMIYMLTYFLDGKEINDLLTTLISKFDNIKEFLKIMKSSAVDVECELTAGYKLFNDSQRITNELFIVKNIASMRKPAASAKLTMFRDALTILGIDDNITDDRISEILKLKEKGKGIHGLRNFITNNVIESSRFVYLIKYANAQKIREVAKNEKVVMFVLGGIPDTQIERYYKSCVEFPDMNSSLEAKRSELARMIKNISFDDFKNVKQQAKGRENVAKERAKAVIGLYLTVMYLLVKNLVNVNARYVIAIHCLERDFGLYKEIIPELASKNLKNDYRILSQTLCELCDERDKSPNLFLKKNERLRKCVEVDINNADSSMTRKYRNCIAHLTVVRELKEYIGDIRTVDSYFSIYHYVMQRCITKREDDKKQEEKIKYEDDLLKNHGYTKDFVKALNSPFGYNIPRFKNLSIEQLFDRNEYLTEK

SEQ ID NO: 4915 - protein, 572 aa, Artificial; identical to SEQ ID NO: 4914
  Synthetic

SEQ ID NO: 4916 - protein, 572 aa, Artificial
  Synthetic
MRLMISYAFIMISLCLNLRKISVFSIKKLREKMLDEYGFRFKDKQYDSVRSKMYKLMDFLLFCNYYRNDVAAGEALVRKLRFSMTDDEKEGIYADEAAKLWGKFRNDFENIADHMNGDVIKELGKADMDFDEKILDSEKKNASDLLYFSKMIYMLTYFLDGKEINDLLTTLISKFDNIKEFLKIMKSSAVDVECELTAGYKLFNDSQRITNELFIVKNIASMRKPAASAKLTMFRDALTILGIDDNITDDRISEILKLKEKGKGIHGLRNFITNNVIESSRFVYLIKYANAQKIREVAKNEKVVMFVLGGIPDTQIERYYKSCVEFPDMNSSLEAKRSELARMIKNISFDDFKNVKQQAKGRENVAKERAKAVIGLYLTVMYLLVKNLVNVNARYVIAIHCLERDFGLYKEIIPELASKNLKNDYRILSQTLCELCDERDKSPNLFLKKNERLRKCVEVDINNADSIMTRKYRNCIAHLTVVRELKEYIGDIRTVDSYFSIYHYVMQRCITKREDDTKQEEKIKYEDDLLKNHGYTKDFVKALNSPFGYNIPRFKNLSIEQLFDRNEYLTEK

SEQ ID NO: 4917 - protein, 572 aa, Artificial; identical to SEQ ID NO: 4916
  Synthetic

SEQ ID NO: 4918 - protein, 340 aa, Artificial
  Synthetic
MFRDALTILGIDDKITDDRISEILKLKEKGKGIHGLRNFITNNVIESSRFVYLIKYANAQKIREVAENEKVVMFVLGGIPDTQIERYYKSCVEFPDMNSSLEAKRSELARMIKNISFDDFKNVKQQAKGRENVAKERAKAVIGLYLTVMYLLVKNLVNVNARYVIAIHCLERDFGLYKEIIPELASKNLKNDYRILSQTLCELCDDRDESPNLFLKKNKRLRKCVEVDINNADSSMTRKYRNCIAHLTVVRELKEYIGDIRTVDSYFSIYHYVMQRCITKREDDTKQEEKTKYEDDLLKNHGYTKDFVKALNSPFGYNIPRFKNLSIEQLFDRNEYLTEK

SEQ ID NO: 4919 - protein, 340 aa, Artificial; identical to SEQ ID NO: 4918
  Synthetic

SEQ ID NO: 4920 - protein, 795 aa, Artificial
  Synthetic
VEINTSNPTHRSGESSPVRGDMLGLKSELEKRFFGKNFDDNIHIQLIYNILDIEKILAVYVTNIVYALNNMLGEGDESNYDFMGYLSTFNTYKVFTNPNGSTLSDDKKENIRKSLSKFNALLKTKRLGYFGLEEPKTKDKRVSEAYKKRVYHMLAIVGQIRQSVFHDKSNELDEYLYSFIDIIDSEYRDTLDYLVDERFDSINKGFVQGNKVNISLLIDMMKGYEADDIIRLYYDFIVLKSQKNLGFSIKKLREKMLDEYGFRFKDKQYDSVRSKMYKLMDFLLFCNYYRNDIAAGEALVRKLRFSMTDDEKEGIYADEAEKLWGKFRNDFENIADHMNGDVIKELGKADMDFDEKILDSEKKNASDLLYFSKMIYMLTYFLDGKEINDLLTTLISKFDNIKEFLKIMKSSAVDVECELTAGYKLFNDSQRITNELFIVKNIASMRKPAASAKLTMFRDALTILGIDDKITDDRISEILKLKEKGKGIHGLRNFITNNVIESSRFVYLIKYANAQKIREVAENEKVVMFVLGGIPDTQIERYYKSCVEFPDMNSSLEAKRSELARMIKNISFDDFKNVKQQAKGRENVAKERAKAVIGLYLTVMYLLVKNLVNVNARYVIAIHCLERDFGLYKEIIPELASKNLKNDYRILSQTLCELCDDRDESPNLFLKKNRRLRKCVEVDINNADSSMTRKYRNCIAHLTVVRELKEYIGDIRTVDSYFSIYHYVMQRCITKREDDTKQEDKIKYEDDLLKNHGYTKDFVKALNSPFGYNIPRFKNLSIEQLFDRNEYLTEK

SEQ ID NO: 4921 - protein, 340 aa, Artificial
  Synthetic
MFRDALTILGIDDKITDDRISEILKLKEKGKGIHGLRNFITNNVIESSRFVYLIKYANAQKIREVAKNEKVVMFVLGGIPDTQIERYYKSCVEFPDMNSSLEVKRSELARMIKNIRFDDFKNVKQQAKGRENVAKERAKAVIGLYLTVMYLLVKNLVNVNARYVIAIHCLERDFGLYKEIIPELASKNLKNDYRILSQTLCELCDDRDESPNLFLKKNKRLRKCVEVDINNADSSMTRKYRNCIAHLTVVRELKKYIGDIRTVDSYFSIYHYVMQRCITKREDDTKQEEKIKYEDDLLKNHGYTKDFVKALNSPFGYNIPRFKNLSIEQLFDRNEYLTEK

SEQ ID NO: 4922 - protein, 866 aa, Artificial
  Synthetic
MKSILVSENKMYITSFGKGNSAVLEYEVDKVDNNNYNKTQLSSKDNSNIELGDVNEVNITFSSKRGNESGVEINTSNPTHRSGESSPVRWDMLGLKSELEKRFFGKTFDDNIHIQLIYNILDIEKILAVYVTNIVYALNNMLGIKGSESYDDFMGYLSARNTYEVFTHPDKSNLSDKVKGNIKKSLSKFNDLLKTKRLGYFGLEEPKTKDTRVSQAYKKRVYHMLAIVGQIRQCVFHDKSGAKRFDLYSFINNIDPEYRDTLDYLVEERLKSINKDFIEGNKVNISLLIDMMKGYEADDIIRLYYDFIVLKSQKNLGFSIKKLREKMLEEYGYRFKDKQYDSVRSKMYKLMDFLLFCNYYRNDVVAGEALVRKLRFSMTDDEKEGIYADEASKLWGKFRNDFENIADHMNGDVIKELGKADMDFDEKILDSEKKNASDLLYFSKMIYMLTYFLDGKEINDLLTTLISKFDNIKEFLKIMKSSAVDVECELTAGYKLFNDSQRITNELFIVKNIASMRKPAASAKLTMFRDALTILGIDDKITDDRISEILKLKEKGKGIHGLRNFITNNVIESSRFVYLIKYANAQKIREVAKNEKVVMFVLGGIPDTQIERYYKSCVEFPDMNSSLEAKRSELARMIKNIRFDDFKNVKQQAKGRENVAKERAKAVIGLYLTVMYLLVKNLVNVNARYVIAIHCLERDFGLYKEIIPELASKNLKNDYRILSQTLCELCDDRDESPNLFLKKNKRLRKCVEVDINNADSSMTRKYRNCIAHLTVVRELKEYIGDIRTVDSYFSIYHYVMQRCITKREDDTKQEEKIKYEDDLLKNHGYTKDFVKALNSPFGYNIPRFKNLSIEQLFDRNEYLTEK

SEQ ID NO: 4923 - protein, 796 aa, Artificial
  Synthetic
VEINTSNPTHRSGESSSVRGDMLGLKSELEKRFFGKTFDDNIHIQLIYNILDIEKILAVYVTNIVYALNNMLGVKGSESYDDFMGYLSAQNTYYIFTHPDKSNLSDKVKGNIKKSLSKFNDLLKTKRLGYFGLEEPKTKDTRVSQAYKKRVYHMLAIVGQIRQCVFHDKSGAKRFDIYSFINNIDPEYRETLDYLVDERFDSINKGFIQGNKVNISLLIDMMKDYEADDIIRLYYDFIVLKSQKNLGFSIKKLREKMLDEYGFRFKDKQYDSVRSKMYKLMDFLLFCNYYRNDVVAGETLVRKLRFSMTDDEKEGIYADEAAKLWGKFRNDFENIADHMNGDVIKELGKADMDFDEKILDSEKKNASDLLYFSKMIYMLTYFLDGKEINDLLTTLISKFDNIKEFLKIMKSSAVDVECELTEGYKLFNDSQRITNELFIVKNIASMRKPAASAKLTMFRDALTILGIDDKITDDRISEILKLKEKGKGIHGLRNFITNNVIESSRFVYLIKYANAQKIREVAENEKVVMFVLGGIPDTQIERYYKSCVEFPDMNSSLEAKRSELARMIKNIRFDDFKNVKQQAKGRENVAKERAKAVIGLYLTVMYLLVKNLVNVNARYVIAIHCLERDFGLYKEIIPELASKNLKNDYRILSQTLCELCDDRDESPNLFLKKNKRLRKCVEVDINNADSNMTRKYRNCIAHLTVVRELKEYIGDIRTVDSYFSIYHYVMQRCITKREDDTKQEEKIKYEDDLLKNHGYTKDFVKALNSPFGYNIPRFKNLSIEQLFDRNEYLTEK

SEQ ID NO: 4924 - protein, 576 aa, Artificial
  Synthetic
MMKDYEADDIIRLYYDFIVLKSQKNLGFSIKKLREKMLDEYGFRFKDKQYDSVRSKMYKLMDFLLFCNYYRNDVVAGETLVRKLRFSMTDDEKEGIYADEAAKLWGKFRNDFENIADHMNGDVIKELGKADMDFDEKILDSEKKNASDLLYFSKMIYMLTYFLDGKEINDLLTTLISKFDNIKEFLKIMKSSAVDVECELTEGYKLFNDSQRITNELFIVKNIASMRKPAASAKLTMFRDALTILGIDDKITDDRISEILKLKEKGKGIHGLRNFITNNVIESSRFVYLIKYANAQKIREVAKNEKVVMFVLGGIPDTQIERYYKSCVEFPDMNSSLEAKRSELARMIKNIRFDDFKNVKQQAKGRENVAKERAKAVIGLYLTVMYLLVKNLVNVNARYVIAIHCLERDFGLYKEIIPELASKNLKNDYRILSQTLCELCDDRDESPNLFLKKNKRLRKCVEVDINNADSSMTRKYRNCIAHLTVVRELKEYIGDIRTVDSYFSIYHYVMQRCITKREDDTKQEEKIKYEDVLLKNHGYTKDFVKALNSPFGYNIPRFKNLSIEQLFDRNEYLTEK

SEQ ID NO: 4925 - protein, 796 aa, Artificial
  Synthetic
VEINTSNPTHRSGESSPVRGDMLGLKSELEKRFFGKTFDDNIHIQLIYNILDIEKILAVYVTNIVYALNNMLGEGDESNYDFMGYLSTFNTYKVFTNPNGSTLSDDKKENIRKSLSKFNALLKTKRLGYFGLEEPKTKDNRVSEAYKKRVYHMLAIVGQIRQCVFHDKSGAKRFDLYSFINNIDPEYRETLDYLVDERFDSINKGFIQGNKVNISLLIDMMKDDYEADDIIRLYYDFIVLKSQKNLGFSIKKLREKMLEEYGFRFKDKQYDSVRSKMYKLMDFLLFCNYYRNDVVAGEALVRKLRFSMTDDEKEGIYADEAAKLWGKFRNDFENIADHMNGDVIKELGQADMDFDEKILDSEKKNASDLLYFSKMIYMLTYFLDDKEINDLLTTLISKFDNIKEFLKIMKSSAVDVECELTAGYKLFNDSQRITNELFIVKNIASMRKPAASAKLTMFRDALTILGIDDKITDDRISEILKLKEKGKGIHGLRNFITNNVIESSRFVYLIKYANAQKIREVAENEKVVMFVLGGIPDTQIERYYKSCVEFPDMNSSLEAKRSELARMIKNIRFDDFKNVKQQAKGRENVAKERAKAVIGLYLTVMYLLVKNLVNVNARYVIAIHCLERDFGLYKEIIPELASKNLKNDYRILSQTLCELCDDRDESPNLFLKKNKRLRKCVEVDINNADSNMTRKYRNCIAHLTVVRELKEYIGDIRTVDSYFSIYHYVMQRCITKRENDTKQEEKIKYEDDLLKNHGYTKDFVKALNSPFGYNIPRFKNLSIEQLFDRNEYLTEK

SEQ ID NO: 4926 - protein, 796 aa, Artificial; identical to SEQ ID NO: 4925
  Synthetic

SEQ ID NO: 4927 - protein, 796 aa, Artificial; identical to SEQ ID NO: 4925
  Synthetic

SEQ ID NO: 4928 - protein, 796 aa, Artificial; identical to SEQ ID NO: 4925
  Synthetic

SEQ ID NO: 4929 - protein, 796 aa, Artificial
  Synthetic
VEINTSNPTHRSGESSPVRGDMLGLKSELEKRFFGKTFDDNIHIQLIYNILDIEKILAVYVTNIVYALNNMLGEGDESNYDFMGYLSTFNTYKVFTNPNGSTLSDDKKENIRKSLSKFNALLKTKRLGYFGLEEPKTKDNRVSEAYKKRVYHMLAIVGQIRQCVFHDKSGAKRFDLYSFINNIDPEYRETLDYLVDERFDSINKGFIQGNKVNISLLIDMMKDDYEADDIIRLYYDFIVLKSQKNLGFSIKKLREKMLEEYGFRFKDKQYDSVRSKMYKLMDFLLFCNYYRNDVVAGEALVRKLRFSMTDDEKEGIYADEAAKLWGKFRNDFENIADHMNGDVIKELGQADMDFDEKILDSEKKNASDLLYFSKMIYMLTYFLDDKEINDLLTTLISKFDNIKEFLKIMKSSAVDVECELTAGYKLFNDSQRITNELFIVKNIASMRKPAASAKLTMFRDALTILGIDDKITDDRISEILKLKEKGKGIHGLRNFITNNVIESSRFVYLIKYANAQKIREVAENEKVVMFVLGGIPDTQIERYYKSCVEFPDMNSSLEAKRSELARMIKNIRFDDFKNVKQQAKGRENVAKERAKAVIGLYLTVMYLLVKNLVNVNARYVIAIHCLERDFGLYKEIIPELASKNLKNDYRILSQTLCELCDDRDESPNLFLKKNKRLRKCVEVDINNADSSMTRKYRNCIAHITVVRELKEYIGDIRTVDSYFSIYHYVMQRCITKREDDTKQEEKIKYEDDLLKNHGYTKDFVKALNSPFGYNIPRFKNLSIEQLFDRNEYLTEK

SEQ ID NO: 4930 - protein, 644 aa, Artificial
  Synthetic
MLAIVGQIRQCVFHDKSGAKRFDLYSFINNIDPEYRETLDYLVDERFDSINKGFIQGNKVNISLLIDMMKDDYEADDIIRLYYDFIVLKSQKNLGFSIKKLREKMLEEYGFRFKDKQYDSVRSKMYKLMDFLLFCNYYRNDVVAGEALVRKLRFSMTDDEKEGIYADEAAKLWGKFRNDFENIADHMNGDVIKELGQADMDFDEKILDSEKKNASDLLYFSKMIYMLTYFLDDKEINDLLTTLISKFDNIKEFLKIMKSSAVDVECELTAGYKLFNDSQRITNELFIVKNIASMRKPAASAKLTMFRDALTILGIDDKITDDRISEILKLKEKGKGIHGLRNFITNNVIESSRFVYLIKYANAQKIREVAENEKVVMFVLGGIPDTQIERYYKSCVEFPDMNSSLEAKRSELARMIKNIRFDDFKNVKQQAKGRENVAKERAKAVIGLYLTVMYLLVKNLVNVNARYVIAIHCLERDFGLYKEIIPELASKNLKNDYRILSQTLCELCDDRDESPNLFLKKNKRLRKCVEVDINNADSNMTRKYRNCIAHLTVVRELKEYIGDIRTVDSYFSIYHYVMQRCITKRENDTKQEEKIKYEDDLLKNHGYTKDFVKALNSPFGYNIPRFKNLSIEQLFDRNEYLTEK

SEQ ID NO: 4931 - protein, 796 aa, Artificial
  Synthetic
VEINTSNPTHRSGESSPVRGDMLGLKSELEKRFFGKTFDDNIHIQLIYNILDIEKILAVYVTNIVYALNNMLGVKGSESHDDFIGYLSTNNTYDVFIDPDNSSLSDDKKANVRKSLSKFNVLLKTKRLGYFGLEEPKTKDNRVSEAYKKRVYHMLAIVGQIRQCVFHDKSGAKRFDLYSFINNIDPEYRDTLDYLVEERLKSINKDFIQGNKVNISLLIDMMKGYEADDIIRLYYDFIVLKSQKNLGFSIKKLREKMLEEYGFRFKDKQYDSVRSKMYKLMDFLLFCNYYRNDIAAGEALVRKLRFSMTDDEKEGLYADEAAKLWGKFRNDFENIADHMNGDVIKELGKADMDFDEKILDSEKKNASDLLYFSKMIYMLTYFLDGKEINDLLTTLISKFDNIKEFLKIMKSSAVNVECELTAGYKLFNDSQRITNELFIVKNIASMRKPAASAKLTMFRDALTILGIDDKITDDRISEILKLKEKGKGIHGLRNFITNNVIESSRFVYLIKYANAQKIREVAENEKVVMFVLGGIPDTQIERYYKSCVEFPDMNSSLEAKRSELARMIKNIRFDDFKNVKQQAKGRENVAKERAKAVIGLYLTVMYLLVKNLVNVNARYVIAIHCLERDFGLYKEIIPELASKNLKNDYRILSQTLCELCDDRDESPNLFLKKNKRLRKCVEVDINNADSNMTRKYRNCIAHLTVVRELKEYIGDIRTVDSYFSIYHYVMQRCITKREDDTKQEEKIKYEDDLLKNHGYTKDFVKALNSPFGYNIPRFKNLSIEQLFDRNEYLTEK

SEQ ID NO: 4932 - protein, 796 aa, Artificial; identical to SEQ ID NO: 4931
  Synthetic

SEQ ID NO: 4933 - protein, 796 aa, Artificial; identical to SEQ ID NO: 4931
  Synthetic

SEQ ID NO: 4934 - protein, 796 aa, Artificial; identical to SEQ ID NO: 4931
  Synthetic

SEQ ID NO: 4935 - protein, 796 aa, Artificial; identical to SEQ ID NO: 4931
  Synthetic

SEQ ID NO: 4936 - protein, 796 aa, Artificial; identical to SEQ ID NO: 4931
  Synthetic

SEQ ID NO: 4937 - protein, 796 aa, Artificial; identical to SEQ ID NO: 4931
  Synthetic

SEQ ID NO: 4938 - protein, 796 aa, Artificial; identical to SEQ ID NO: 4931
  Synthetic

SEQ ID NO: 4939 - protein, 796 aa, Artificial; identical to SEQ ID NO: 4931
  Synthetic

SEQ ID NO: 4940 - protein, 796 aa, Artificial; identical to SEQ ID NO: 4931
  Synthetic

SEQ ID NO: 4941 - protein, 796 aa, Artificial; identical to SEQ ID NO: 4931
  Synthetic

SEQ ID NO: 4942 - protein, 796 aa, Artificial; identical to SEQ ID NO: 4931
  Synthetic

SEQ ID NO: 4943 - protein, 796 aa, Artificial; identical to SEQ ID NO: 4931
  Synthetic

SEQ ID NO: 4944 - protein, 796 aa, Artificial; identical to SEQ ID NO: 4931
  Synthetic

SEQ ID NO: 4945 - protein, 796 aa, Artificial; identical to SEQ ID NO: 4931
  Synthetic

SEQ ID NO: 4946 - protein, 796 aa, Artificial; identical to SEQ ID NO: 4931
  Synthetic

SEQ ID NO: 4947 - protein, 796 aa, Artificial; identical to SEQ ID NO: 4931
  Synthetic

SEQ ID NO: 4948 - protein, 796 aa, Artificial; identical to SEQ ID NO: 4931
  Synthetic

SEQ ID NO: 4949 - protein, 796 aa, Artificial; identical to SEQ ID NO: 4931
  Synthetic

SEQ ID NO: 4950 - protein, 796 aa, Artificial; identical to SEQ ID NO: 4931
  Synthetic

SEQ ID NO: 4951 - protein, 796 aa, Artificial; identical to SEQ ID NO: 4931
  Synthetic

SEQ ID NO: 4952 - protein, 796 aa, Artificial; identical to SEQ ID NO: 4931
  Synthetic

SEQ ID NO: 4953 - protein, 796 aa, Artificial; identical to SEQ ID NO: 4931
  Synthetic

SEQ ID NO: 4954 - protein, 796 aa, Artificial; identical to SEQ ID NO: 4931
  Synthetic

SEQ ID NO: 4955 - protein, 796 aa, Artificial; identical to SEQ ID NO: 4931
  Synthetic

SEQ ID NO: 4956 - protein, 796 aa, Artificial; identical to SEQ ID NO: 4931
  Synthetic

SEQ ID NO: 4957 - protein, 796 aa, Artificial; identical to SEQ ID NO: 4931
  Synthetic

SEQ ID NO: 4958 - protein, 796 aa, Artificial; identical to SEQ ID NO: 4931
  Synthetic

SEQ ID NO: 4959 - protein, 796 aa, Artificial; identical to SEQ ID NO: 4931
  Synthetic

SEQ ID NO: 4960 - protein, 796 aa, Artificial; identical to SEQ ID NO: 4931
  Synthetic

SEQ ID NO: 4961 - protein, 796 aa, Artificial; identical to SEQ ID NO: 4931
  Synthetic

SEQ ID NO: 4962 - protein, 796 aa, Artificial; identical to SEQ ID NO: 4931
  Synthetic

SEQ ID NO: 4963 - protein, 796 aa, Artificial; identical to SEQ ID NO: 4931
  Synthetic

SEQ ID NO: 4964 - protein, 796 aa, Artificial; identical to SEQ ID NO: 4931
  Synthetic

SEQ ID NO: 4965 - protein, 796 aa, Artificial; identical to SEQ ID NO: 4931
  Synthetic

SEQ ID NO: 4966 - protein, 796 aa, Artificial; identical to SEQ ID NO: 4931
  Synthetic

SEQ ID NO: 4967 - protein, 796 aa, Artificial; identical to SEQ ID NO: 4931
  Synthetic

SEQ ID NO: 4968 - protein, 796 aa, Artificial; identical to SEQ ID NO: 4931
  Synthetic

SEQ ID NO: 4969 - protein, 796 aa, Artificial; identical to SEQ ID NO: 4931
  Synthetic

SEQ ID NO: 4970 - protein, 796 aa, Artificial; identical to SEQ ID NO: 4931
  Synthetic

SEQ ID NO: 4971 - protein, 796 aa, Artificial; identical to SEQ ID NO: 4931
  Synthetic

SEQ ID NO: 4972 - protein, 796 aa, Artificial; identical to SEQ ID NO: 4931
  Synthetic

SEQ ID NO: 4973 - protein, 796 aa, Artificial; identical to SEQ ID NO: 4931
  Synthetic

SEQ ID NO: 4974 - protein, 796 aa, Artificial; identical to SEQ ID NO: 4931
  Synthetic

SEQ ID NO: 4975 - protein, 796 aa, Artificial; identical to SEQ ID NO: 4931
  Synthetic

SEQ ID NO: 4976 - protein, 796 aa, Artificial; identical to SEQ ID NO: 4931
  Synthetic

SEQ ID NO: 4977 - protein, 796 aa, Artificial; identical to SEQ ID NO: 4931
  Synthetic

SEQ ID NO: 4978 - protein, 796 aa, Artificial; identical to SEQ ID NO: 4931
  Synthetic

SEQ ID NO: 4979 - protein, 796 aa, Artificial; identical to SEQ ID NO: 4931
  Synthetic

SEQ ID NO: 4980 - protein, 796 aa, Artificial; identical to SEQ ID NO: 4931
  Synthetic

SEQ ID NO: 4981 - protein, 796 aa, Artificial; identical to SEQ ID NO: 4931
  Synthetic

SEQ ID NO: 4982 - protein, 796 aa, Artificial; identical to SEQ ID NO: 4931
  Synthetic

SEQ ID NO: 4983 - protein, 796 aa, Artificial; identical to SEQ ID NO: 4931
  Synthetic

SEQ ID NO: 4984 - protein, 796 aa, Artificial; identical to SEQ ID NO: 4931
  Synthetic

SEQ ID NO: 4985 - protein, 796 aa, Artificial; identical to SEQ ID NO: 4931
  Synthetic

SEQ ID NO: 4986 - protein, 796 aa, Artificial; identical to SEQ ID NO: 4931
  Synthetic

SEQ ID NO: 4987 - protein, 796 aa, Artificial; identical to SEQ ID NO: 4931
  Synthetic

SEQ ID NO: 4988 - protein, 796 aa, Artificial; identical to SEQ ID NO: 4931
  Synthetic

SEQ ID NO: 4989 - protein, 796 aa, Artificial
  Synthetic
VEINTSNPTHRSGESSPVRGDMLGLKSELEKRFFGKTFDDNIHIQLIYNILDIEKILAVYVTNIVYALNNMLGVKGSESHDDFIGYLSTNNTYDVFIDPDNSSLSDDKKANVRKSLSKFNVLLKTKRLGYFGLEEPKTKDNRVSEAYKKRVYHMLAIVGQIRQCVFHDKSGAKRFDLYSFINNIDPEYRDTLDYLVEERLKSINKDFIQGNKVNISLLIDMMKGYEADDIIRLYYDFIVLKSQKNLGFSIKKLREKMLEEYGFRFKDKQYDSVRSKMYKLMDFLLFCNYYRNDIAAGEALVRKLRFSMTDDEKEGLYADEAAKLWGKFRNDFENIADHMNGDVIKELGKADMDFDEKILDSEKKNASDLLYFSKMIYMLTYFLDGKEINDLLTTLISKFDNIKEFLKIMKSSAVNVECELTAGYKLFNDSQRITNELFIVKNIASMRKPAASAKLTMFRDALTILGIDDKITDDRISEILKLKEKGKGIHGLRNFITNNVIESSRFVYLIKYANAQKIREVAENEKVVMFVLGGIPDTQIERYYKSCVEFPDMNSSLEAKRSELARMIKNIRFDDFKNVKQQAKGRENVAKERAKVVIGLYLTVMYLLVKNLVNVNARYVIAIHCLERDFGLYKEIIPELASKNLKNDYRILSQTLCELCDDRDESPNLFLKKNKRLRKCVEVDINNADSNMTRKYRNCIAHLTVVRELKEYIGDIRTVDSYFSIYHYVMQRCITKREDDTKQEEKIKYEDDLLKNHGYTKDFVKALNSPFGYNIPRFKNLSIEQLFDRNEYLTEK

SEQ ID NO: 4990 - protein, 796 aa, Artificial; identical to SEQ ID NO: 4989
  Synthetic

SEQ ID NO: 4991 - protein, 796 aa, Artificial
  Synthetic
VEINTSNPTHRSGESSPVRGDMLGLKSELEKRFFGKTFDDNIHIQLIYNILDIEKILAVYVTNIVYALNNMLGVKGSESHDDFIGYLSTNNTYDVFIDPDNSSLSDDKKANVRKSLSKFNVLLKTKRLGYFGLEEPKTKDNRVSEAYKKRVYHMLAIVGQIRQCVFHDKSGAKRFDLYSFINNIDPEYRDTLDYLVEERLKSINKDFIQGNKVNISLLIDMMKGYEADDIIRLYYDFIVLKSQKNLGFSIKKLREKMLEEYGFRFKDKQYDSVRSKMYKLMDFLLFCNYYRNDIAAGEALVRKLRFSMTDDEKEGLYADEAAKLWGKFRNDFENIADHMNGDVIKELGKADMDFDEKILDSEKKNASDLLYFSKMIYMLTYFLDGKEINDLLTTLISKFDNIKEFLKIMKSSAVNVECELTAGYKLFNDSQRITNELFIVKNIASMRKPAASAKLTMFRDALTILGIDDKITDDRISEILKLKEKGKGIHGLRNFITNNVIESSRFVYLIKYANAQKIREVAENEKVVMFVLGGIPDTQIERYYKSCVEFPDMNSSLEAKRSELARMIKNIRFDDFKNVKQQAKGRENVAKERAKAVIGLYLTVMYLLVKNLVNVNARYVIAIHCLERDFGLYKEIIPELASKNLKNDYRILSQTLCELCDDRDESPNLFLKKNKRLRKCVEVDINNADSNMTRKYRNCIAHLTVVRELKEYIGDIRTVDSYFSIYHYVMQRCITKREDDTKQEEKIKYEDDLLKNHGYTKDFVKALNSPFGYNIPRFKNLAIEQLFDRNEYLTEK

SEQ ID NO: 4992 - protein, 796 aa, Artificial
  Synthetic
VEINTSNPTHRSGESSPVRGDMLGLKSELEKRFFGKTFDDNIHIQLIYNILDIEKILAVYVTNIVYALNNMLGVKGSESHDDFIGYLSTNNTYDVFIDPDNSSLSDDKKANVRKSLSKFNVLLKTKRLGYFGLEEPKTKDNRVSEAYKKRVYHMLAIVGQIRQCVFHDKSGAKRFDLYSFINNIDPEYRDTLDYLVEERLKSINKDFIQGNKVNISLLIDMMKGYEADDIIRLYYDFIVLKSQKNLGFSIKKLREKMLEEYGFRFKDKQYDSVRSKMYKLMDFLLFCNYYRNDIAAGEALVRKLRFSMTDDEKEGLYADEAAKLWGKFRNDFENIADHMNGDVIKELGKADMDFDEKILDSEKKNASDLLYFSKMIYMLTYFLDGKEINDLLTTLISKFDNIKEFLKIMKSSAVNVECELTAGYKLFNDSQRITNELFIVKNIASMRKPAASAKLTMFRDALTILGIDDKITDDRISEILKLKEKGKGIHGLRNFITNNVIESSRFVYLIKYANAQKIREVAENEKVVMFVLGGIPDTQIERYYKSCVEFPDMNSSLEAKRSELARMIKNIRFDDFKNVKQQAKGRENVAKERAKAVIGLYLTVMYLLVKNLVNVNARYVIAIHCLERDFGLYKEIIPELASKNLKNDYRILSQTLCELCDDRDESPNLFLKKNKRLRKCVEVDINNADSNMTRKYRNCIAHLTVVRELKEYIGDIRTVDSYFSIYHYVMQRCITKRENDTKQEEKIKYEDDLLKNHGYTKDFVKALNSPFGYNIPRFKNLSIEQLFDRNEYLTEK

SEQ ID NO: 4993 - protein, 796 aa, Artificial; identical to SEQ ID NO: 4992
  Synthetic

SEQ ID NO: 4994 - protein, 796 aa, Artificial; identical to SEQ ID NO: 4992
  Synthetic

SEQ ID NO: 4995 - protein, 796 aa, Artificial
  Synthetic
VEINTSNPTHRSGESSPVRGDMLGLKSELEKRFFGKTFDDNIHIQLIYNILDIEKILAVYVTNIVYALNNMLGVKGSESHDDFIGYLSTNNTYDVFIDPDNSSLSDDKKANVRKSLSKFNVLLKTKRLGYFGLEEPKTKDNRVSEAYKKRVYHMLAIVGQIRQCVFHDKSGAKRFDLYSFINNIDPEYRDTLDYLVEERLKSINKDFIQGNKVNISLLIDMMKGYEADDIIRLYYDFIVLKSQKNLGFYIKKLREKMLEEYGFRFKDKQYDSVRSKMYKLMDFLLFCNYYRNDIAAGEALVRKLRFSMTDDEKEGLYADEAAKLWGKFRNDFENIADHMNGDVIKELGKADMDFDEKILDSEKKNASDLLYFSKMIYMLTYFLDGKEINDLLTTLISKFDNIKEFLKIMKSSAVNVECELTAGYKLFNDSQRITNELFIVKNIASMRKPAASAKLTMFRDALTILGIDDKITDDRISEILKLKEKGKGIHGLRNFITNNVIESSRFVYLIKYANAQKIREVAENEKVVMFVLGGIPDTQIERYYKSCVEFPDMNSSLEAKRSELARMIKNIRFDDFKNVKQQAKGRENVAKERAKAVIGLYLTVMYLLVKNLVNVNARYVIAIHCLERDFGLYKEIIPELASKNLKNDYRILSQTLCELCDDRDESPNLFLKKNKRLRKCVEVDINNADSNMTRKYRNCIAHLTVVRELKEYIGDIRTVDSYFSIYHYVMQRCITKREDDTKQEEKIKYEDDLLKNHGYTKDFVKALNSPFGYNIPRFKNLSIEQLFDRNEYLTEK

SEQ ID NO: 4996 - protein, 815 aa, Artificial
  Synthetic
VLSGIFVNAFSSKHGFESGVEINTSNPTHRSGESSPVRGDMLGLKSELEKRFFGKTFDDNIHIQLIYNILDIEKILAVYVTNIVYALNNMLGVKGSESHDDFIGYLSTNNTYDVFIDPDNSSLSDDKKANVRKSLSKFNVLLKTKRLGYFGLEEPKTKDNRVSEAYKKRVYHMLAIVGQIRQCVFHDKSGAKRFDLYSFINNIDPEYRDTLDYLVEERLKSINKDFIQGNKVNISLLIDMMKGYEADDIIRLYYDFIVLKSQKNLGFSIKKLREKMLEEYGFRFKDKQYDSVRSKMYKLMDFLLFCNYYRNDIAAGEALVRKLRFSMTDDEKEGLYADEAAKLWGKFRNDFENIADHMNGDVIKELGKADMDFDEKILDSEKKNASDLLYFSKMIYMLTYFLDGKEINDLLTTLISKFDNIKEFLKIMKSSAVNVECELTAGYKLFNDSQRITNELFIVKNIASMRKPAASAKLTMFRDALTILGIDDKITDDRISEILKLKEKGKGIHGLRNFITNNVIESSRFVYLIKYANAQKIREVAENEKVVMFVLGGIPDTQIERYYKSCVEFPDMNSSLEAKRSELARMIKNIRFDDFKNVKQQAKGRENVAKERAKAVIGLYLTVMYLLVKNLVNVNARYVIAIHCLERDFGLYKEIIPELASKNLKNDYRILSQTLCELCDDRDESPNLFLKKNKRLRKCVEVDINNADSNMTRKYRNCIAHLTVVRELKEYIGDIRTVDSYFSIYHYVMQRCITKREDDTKQEEKIKYEDDLLKNHGYTKDFVKALNSPFGYNIPRFKNLSIEQLFDRNEYLTEK

SEQ ID NO: 4997 - protein, 775 aa, Artificial
  Synthetic
MLGLKSELEKRFFGKTFDDNIHIQLIYNILDIEKILAVYVTNIVYALNNMLGVKGSESHDDFIGYLSTNNTYDVFIDPDNSSLSDDKKANVRKSLSKFNVLLKTKRLGYFGLEEPKTKDNRVSEAYKKRVYHMLAIVGQIRQCVFHDKSGAKRFDLYSFINNIDPEYRDTLDYLVEERLKSINKDFIQGNKVNISLLIDMMKGYEADDIIRLYYDFIVLKSQKNLGFSIKKLREKMLEEYGFRFKDKQYDSVRSKMYKLMDFLLFCNYYRNDIAAGEALVRKLRFSMTDDEKEGLYADEAAKLWGKFRNDFENIADHMNGDVIKELGKADMDFDEKILDSEKKNASDLLYFSKMIYMLTYFLDGKEINDLLTTLISKFDNIKEFLKIMKSSAVNVECELTAGYKLFNDSQRITNELFIVKNIASMRKPAASAKLTMFRDALTILGIDDKITDDRISEILKLKEKGKGIHGLRNFITNNVIESSRFVYLIKYANAQKIREVAENEKVVMFVLGGIPDTQIERYYKSCVEFPDMNSSLEAKRSELARMIKNIRFDDFKNVKQQAKGRENVAKERAKAVIGLYLTVMYLLVKNLVNVNARYVIAIHCLERDFGLYKEIIPELASKNLKNDYRILSQTLCELCDDRDESPNLFLKKNKRLRKCVEVDINNADSNMTRKYRNCIAHLTVVRELKEYIGDIRTVDSYFSIYHYVMQRCITKREDDTKQEEKIKYEDDLLKNHGYTKDFVKALNSPFGYNIPRFKNLSIEQLFDRNEYLTEK

SEQ ID NO: 4998 - protein, 796 aa, Artificial
  Synthetic
VEINTSNPTHRSGESSPVRGDMLGLKSELEKRFFGKTFDDNIHIQLIYNILDIEKILAVYVTNIVYALNNMLGVKGSESHDDFIGYLSTNNTYDVFIDPDNSSLSDDKKANVRKSLSKFNVLLKTKRLGYFGLEEPKTKDNRVSEAYKKRVYHMLAIVGQIRQCVFHDKSGAKRFDLYSFINNIDPEYRDTLDYLVEERLKSINKDFIQGNKVNISLLIDMMKGYEADDIIRLYYDFIVLKSQKNLGFSIKKLREKMLEEYGFRFKDKQYDSVRSKMYKLMDFLLFCNYYRNDIAAGEALVRKLRFSMTDDEKEGIYADEAAKLWGKFRNDFENIADHMNGDAIKELGKADMDFDEKILDSEKKNASDLLYFSKMIYMLTYFLDGKEINDLLTTLISKFDNIKEFLKIMKSSAVDVECELTAGYKLFNDSQRITNELFIVKNIASMRKPAASAKLTMFRDALTILGIDDNITDDRISEILKLKEKGKGIHGLRNFITNNVIESSRFVYLIKYANAQKIREVAKNEKVVMFVLGGIPDTQIERYYKSCVEFPDMNSSLEAKRSELARMIKNIRFDDFKNVKQQAKGRENVAKERAKAVIGLYLTVMYLLVKNLVNVNARYVIAIHCLERDFGLYKEIIPELASKNLKNDYRILSQTLCELCDDRDKSPNLFLKKNKRLRKCVEVDINNADSNMTRKYRNCIAHLTVVRELKEYIGDIRTVDSYFSIYHYVMQRCITKREDDTKQEEKIKYEDDLLKNHGYTKDFVKALNSPFGYNIPRFKNLSIEQLFDRNEYLTEK

SEQ ID NO: 4999 - protein, 796 aa, Artificial; identical to SEQ ID NO: 4998
  Synthetic

SEQ ID NO: 5000 - protein, 796 aa, Artificial
  Synthetic
VEINTSNPTHRSGESSPVRGDMLGLKSELEKRFFGKTFDDNIHIQLIYNILDIEKILAVYVTNIVYALNNMLGVKGSESHDDFIGYLSTNNIYDVFIDPDNSSLSDDKKANVRKSLSKFNVLLKTKRLGYFGLEEPKTKDNRVSEAYKKRVYHMLAIVGQIRQCVFHDKSGAKRFDLYSFINNIDPEYRDTLDYLVEERLKSINKDFIQGNKVNISLLIDMMKGYEADDIIRLYYDFIVLKSQKNLGFSIKKLREKMLEEYGFRFKDKQYDSVRSKMYKLMDFLLFCNYYRNDVVAGEALVRKLRFSMTDDEKEGIYADEAAKLWGKFRNDFENIADHMNGDVIKELGKADMDFDEKILDSEKKNASDLLYFSKMIYMLTYFLDGKEINDLLTTLISKFDNIKEFLKIMKSSAVDVECELTAGYKLFNDSQRITNELFIVKNIASMRKPAASAKLTMFRDALTILGIDDNITDDRISEILKLKEKGKGIHGLRNFITNNVIESSRFVYLIKYANAQKIREVAKNEKVVMFVLGGIPDTQIERYYKSCVEFPDMNSSLEAKRSELARMIKNISFDDFKNVKQQAKGRENVAKERAKAVIGLYLTVMYLLVKNLVNVNARYVIAIHCLERDFGLYKEIIPELASKNLKNDYRILSQTLCELCDDRDESPNLFLKKNKRLRKCVEVDINNADSSMTRKYRNCIAHLTVVRELKEYIGDIRTVDSYFSIYHYVMQRCITKRENDTKQEEKIKYEDDLLKNHGYTKDFVKALNSPFGYNIPRFKNLSIEQLFDRNEYLTEK

SEQ ID NO: 5001 - protein, 796 aa, Artificial
  Synthetic
VEINTSNPTHRSGESSPVRGDMLGLKSELEKRFFGKTFDDNIHIQLIYNILDIEKILAVYVTNIVYALNNMLGVKGSESHDDFIGYLSTNNTYDVFIDPDNSSLSDDKKENIRKSLSKFNALLKTKRLGYFGLEEPKTKDTRASEAYKKRVYHMLAIVGQIRQCVFHDKSGAKRFDLYSFINNIDPEYRDTLDYLVEERLKSINKDFIQGNKVNISLLIDMMKGYEADDIIRLYYDFIVLKSQKNLGFSIKKLREKMLEEYGFRFKDKQYDSVRSKMYKLMDFLLFCNYYRNDVVAGEALVRKLRFSMTDDEKEGIYADEAAKLWGKFRNDFENIADHMNGDVIKELGKADMDFDEKILDSEKKNASDLLYFSKMIYMLTYFLDGKEINDLLTTLISKFDNIKEFLKIMKSSAVNVECELTAGYKLFNDSQRITNELFIVKNIASMRKPAASAKLTMFRDALTILGIDDKITDDRISEILKLKEKGKGIHGLRNFITNNVIESSRFVYLIKYANAQKIREVAKNEKVVMFVLGGIPDTQIERYYKSCVEFPDMNSSLEAKRSELARMIKNIRFDDFKNVKQQAKGRENVAKERAKAVIGLYLTVMYLLVKNLVNVNARYVIAIHCLERDFGLYKEIIPELASKNLKNDYRILSQTLCELCDDRDESPNLFLKKNRRLRKCVEVDINNADSSMTRKYRNCIAHITVVRELKEYIGDIRTVDSYFSIYHYVMQRCITKREDDTKQEEKIKYEDDLLKNHGYTKDFVKALNSPFGYNIPRFKNLSIEQLFDRNEYLTEK

SEQ ID NO: 5002 - protein, 796 aa, Artificial
  Synthetic
VEINTSNPTHRSGESSPVRGDMLGLKSELEKRFFGKTFDDNIHIQLIYNILDIEKILAVYVTNIVYALNNMLGVKGSESHDDFIGYLSTNNTYDVFIDPDNSSLSDDKKANVRKSLSKFNVLLKTKRLGYFGLEEPKTKDNRVSEAYKKRVYHMLAIVGQIRQCVFHDKSGAKRFDLYSFINNIDPEYRDTLDYLVEERLKSINKDFIQGNKVNISLLIDMMKGYEADDIIRLYYDFIVLKSQKNLGFSIKKLREKMLEEYGFRFKDKQYDSVRSKMYKLMDFLLFCNYYRNDIAAGEALVRKLRFSMTDDEKEGLYADEAAKLWGKFRNDFENIADHMNGDVIKELGKADMDFDEKILDSEKKNASDLLYFSKMIYMLTYFLDGKEINDLLTTLISKFDNIKEFLKIMKSSAVNVECELTAGYKLFNDSQRITNELFIVKNIASMRKPAASAKLTMFRDALTILGIDDNITDDRISEILKLKEKGKGIHGLRNFITNNVIESSRFVYLIKYANAQKIREVAENEKVVMFVLGGIPDTQIERYYKSCVEVPDMNSSLEAKRSELARMIKNISFDDFKNVKQQAKGRENVAKERAKAVIGLYLTVMYLLVKNLVNVNARYVIAIHCLERDFGLYKEIIPELASKNLKNDYRILSQTLCELCDERDKSPNLFLKKNERLRKCVEVGINNADSIMTRKYRNCIAHLTVVRELKEYIGDIRTVDSYFSIYHYVMQRCITKREDDTKQEEKIKYEDDLLKNHGYTKDFVKALNSPFGYNIPRFKNLSIEQLFDRNEYLTEK

SEQ ID NO: 5003 - protein, 796 aa, Artificial; identical to SEQ ID NO: 5002
  Synthetic

SEQ ID NO: 5004 - protein, 796 aa, Artificial; identical to SEQ ID NO: 5002
  Synthetic

SEQ ID NO: 5005 - protein, 796 aa, Artificial; identical to SEQ ID NO: 5002
  Synthetic

SEQ ID NO: 5006 - protein, 796 aa, Artificial; identical to SEQ ID NO: 5002
  Synthetic

SEQ ID NO: 5007 - protein, 796 aa, Artificial; identical to SEQ ID NO: 5002
  Synthetic

SEQ ID NO: 5008 - protein, 793 aa, Artificial
  Synthetic
VEINTSNPTHRSGESSPVRGDMLGLKSELEKRFFGKTFDDNIHIQLIYNILDIEKILAVYVTNIVYALNNMLGVKGSESHDDFIGYLSTNNTYDVFIDPDNSSLSDDKKANVRKSLSKFNVLLKTKRLGYFGLEEPKTKDNRVSEAYKKRVYHMLAIVGQIRQCVFHDKSGAKRFDLYSFINNIDPEYRDTLDYLVEERLKSINKDFIQGNKVNISLLIDMMKGYEADDIIRLYYDFIVLKSQKNLGFSIKKLREKMLEEYGFRFKDKQYDSVRSKMYKLMDFLLFCNYYRNDIAAGEALVRKLRFSMTDDEKEGLYADEAAKLWGKFRNDFENIADHMNGDVIKELGKADMDFDEKILDSEKKNASDLLYFSKMIYMLTYFLDGKEINDLLTTLISKFDNIKEFLKIMKSSAVNVECELTAGYKLFNDSQRITNELFIVKNIASMRKPAASAKLTMFRDALTILGIDDKITDDRISEILKLKEKGKGIHGLRNFITNNVIESSRFVYLIKYANAQKIRKVAENEKVVMFVLGGIPDTQIERYYKSCVEFPDMNSSLEVKRSELARMIKNISFDDFKNVKQQAKGRENVAKERAKAVIGLYLTVMYLLVKNLVNVNARYVIAIHCLERDFGLYKEIIPELASKNLKNDYRILSQTLCELCDKSPNLFLKKNERLRKCVEVDINNADSSMTRKYRNCIAHLTVVRELKEYIGDIRTVDSYFSIYHYVMQRCITKREDDKKQEEKIKFEDDLLKNHGYTKDFVKALNSPFGYNIPRFKNLSIEQLFDRNEYLTEK

SEQ ID NO: 5009 - protein, 793 aa, Artificial; identical to SEQ ID NO: 5008
  Synthetic

SEQ ID NO: 5010 - protein, 793 aa, Artificial; identical to SEQ ID NO: 5008
  Synthetic

SEQ ID NO: 5011 - protein, 793 aa, Artificial; identical to SEQ ID NO: 5008
  Synthetic

SEQ ID NO: 5012 - protein, 793 aa, Artificial; identical to SEQ ID NO: 5008
  Synthetic

SEQ ID NO: 5013 - protein, 793 aa, Artificial; identical to SEQ ID NO: 5008
  Synthetic

SEQ ID NO: 5014 - protein, 793 aa, Artificial; identical to SEQ ID NO: 5008
  Synthetic

SEQ ID NO: 5015 - protein, 793 aa, Artificial; identical to SEQ ID NO: 5008
  Synthetic

SEQ ID NO: 5016 - protein, 793 aa, Artificial; identical to SEQ ID NO: 5008
  Synthetic

SEQ ID NO: 5017 - protein, 793 aa, Artificial; identical to SEQ ID NO: 5008
  Synthetic

SEQ ID NO: 5018 - protein, 793 aa, Artificial; identical to SEQ ID NO: 5008
  Synthetic

SEQ ID NO: 5019 - protein, 793 aa, Artificial; identical to SEQ ID NO: 5008
  Synthetic

SEQ ID NO: 5020 - protein, 793 aa, Artificial; identical to SEQ ID NO: 5008
  Synthetic

SEQ ID NO: 5021 - protein, 793 aa, Artificial; identical to SEQ ID NO: 5008
  Synthetic

SEQ ID NO: 5022 - protein, 793 aa, Artificial; identical to SEQ ID NO: 5008
  Synthetic

SEQ ID NO: 5023 - protein, 793 aa, Artificial; identical to SEQ ID NO: 5008
  Synthetic

SEQ ID NO: 5024 - protein, 793 aa, Artificial
  Synthetic
VEINTSNPTHRSGESSPVRGDMLGLKSELEKRFFGKTFDDNIHIQLIYNILDIEKILAVYVTNIVYALNNMLGVKGSESHDDFIGYLSTNNTYDVFIDPDNSSLSDDKKANVRKSLSKFNVLLKTKRLGYFGLEEPKTKDNRVSEAYKKRVYHMLAIVGQIRQCVFHDKSGAKRFDLYSFINNIDPEYRDTLDYLVEERLKSINKDFIQGNKVNISLLIDMMKGYEADDIIRLYYDFIVLKSQKNLGFSIKKLREKMLEEYGFRFKDKQYDSVRSKMYKLMDFLLFCNYYRNDIAAGEALVRKLRFSMTDDEKEGLYADEAAKLWGKFRNDFENIADHMNGDVIKELGKADMDFDEKILDSEKKNASDLLYFSKMIYMLTYFLDGKEINDLLTTLISKFDNIKEFLKIMKSSAVNVECELTAGYKLFNDSQRITNELFIVKNIASMRKPAASAKLTMFRDALTILGIDDKITDDRISEILKLKEKGKGIHGLRNFITNNVIESSRFVYLIKYANAQKIRKVAENEKVVMFVLAGIPDTQIERYYKSCVEFPDMNSSLEVKRSELARMIKNISFDDFKNVKQQAKGRENVAKERAKAVIGLYLTVMYLLVKNLVNVNARYVIAIHCLERDFGLYKEIIPELASKNLKNDYRILSQTLCELCDKSPNLFLKKNERLRKCVEVDINNADSSMTRKYRNCIAHLTVVRELKEYIGDIRTVDSYFSIYHYVMQRCITKREDDKKQEEKIKFEDDLLKNHGYTKDFVKALNSPFGYNIPRFKNLSIEQLFDRNEYLTEK

SEQ ID NO: 5025 - protein, 793 aa, Artificial; identical to SEQ ID NO: 5024
  Synthetic

SEQ ID NO: 5026 - protein, 573 aa, Artificial
  Synthetic
MMKGYEADDIIRLYYDFIVLKSQKNLGFSIKKLREKMLEEYGFRFKDKQYDSVRSKMYKLMDFLLFCNYYRNDIAAGEALVRKLRFSMTDDEKEGLYADEAAKLWGKFRNDFENIADHMNGDVIKELGKADMDFDEKILDSEKKNASDLLYFSKMIYMLTYFLDGKEINDLLTTLISKFDNIKEFLKIMKSSAVNVECELTAGYKLFNDSQRITNELFIVKNIASMRKPAASAKLTMFRDALTILGIDDKITDDRISEILKLKEKGKGIHGLRNFITNNVIESSRFVYLIKYANAQKIRKVAENEKVVMFVLGGIPDTQIERYYKSCVEFPDMNSSLEVKRSELARMIKNISFDDFKNVKQQAKGRENVAKERAKAVIGLYLTVMYLLVKNLVNVNARYVIAIHCLERDFGLYKEIIPELASKNLKNDYRILSQTLCELCDKSPNLFLKKNERLRKCVEVDINNADSSMTRKYRNCIAHLTVVRELKEYIGDIRTVDSYFSIYHYVMQRCITKREDDKKQEEKIKFEDDLLKNHGYTKDFVKALNSPFGYNIPRFKNLSIEQLFDRNEYLTEK

SEQ ID NO: 5027 - protein, 573 aa, Artificial; identical to SEQ ID NO: 5026
  Synthetic

SEQ ID NO: 5028 - protein, 573 aa, Artificial; identical to SEQ ID NO: 5026
  Synthetic

SEQ ID NO: 5029 - protein, 573 aa, Artificial; identical to SEQ ID NO: 5026
  Synthetic

SEQ ID NO: 5030 - protein, 573 aa, Artificial; identical to SEQ ID NO: 5026
  Synthetic

SEQ ID NO: 5031 - protein, 573 aa, Artificial; identical to SEQ ID NO: 5026
  Synthetic

SEQ ID NO: 5032 - protein, 455 aa, Artificial
  Synthetic
MNGDVIKELGKADMDFDEKILDSEKKNASDLLYFSKMIYMLTYFLDGKEINDLLTTLISKFDNIKEFLKIMKSSAVNVECELTAGYKLFNDSQRITNELFIVKNIASMRKPAASAKLTMFRDALTILGIDDKITDDRISEILKLKEKGKGIHGLRNFITNNVIESSRFVYLIKYANAQKIRKVAENEKVVMFVLGGIPDTQIERYYKSCVEFPDMNSSLEVKRSELARMIKNISFDDFKNVKQQAKGRENVAKERAKAVIGLYLTVMYLLVKNLVNVNARYVIAIHCLERDFGLYKEIIPELASKNLKNDYRILSQTLCELCDKSPNLFLKKNERLRKCVEVDINNADSSMTRKYRNCIAHLTVVRELKEYIGDIRTVDSYFSIYHYVMQRCITKREDDKKQEEKIKFEDDLLKNHGYTKDFVKALNSPFGYNIPRFKNLSIEQLFDRNEYLTEK

SEQ ID NO: 5033 - protein, 516 aa, Artificial
  Synthetic
MDFLLFCNYYRNDVIAGEALVRKLRFSMTDDEKEGIYADEAAKLWGKFRNDFENIADHMNGDVIKELGKADMDFDEKILDSEKKNASDLLYFSKMIYMLTYFLDGKEINDLLTTLISKFDNIKEFLKIMKSSAVNVECELTAGYKLFNDSQRITNELFIVKNIASMRKPAASAKLTMFRDALTILGIDDNITDDRISEILKLKEKGKGIHGLRNFITNNVIESSRFVYLIKYANAQKIRKVAENEKVVMFVLGGIPDTQIERYYKSCVEFPDMNSSLEAKRSELARMIKNIRFDDFKNVKQQAKGRENVAKERAKAVIGLYLTVMYLLVKNLVNVNARYVIAIHCLERDFGLYKEIIPELASKNLKNDYRILSQTLCELCDDRDESPNLFLKKNKRLRKCVEVDINNADSSMTRKYRNCIAHLTVVRELKEYIGDIRTVDSYFSIYHYVMQRCITKREDDKKQEEKIKYEDDLLKNHGYTKDFVKALNSPFGYNIPRFKNLSIEQLFDRNEYLTEK

SEQ ID NO: 5034 - protein, 488 aa, Artificial
  Synthetic
VLHFGVGIYADEAAKLWGKFRNDFENIADHMNGDVIKELGKADMDFDEKILDSEKKNASDLLYFSKMIYMLTYFLDGKEINDLLTTLISKFDNIKEFLKIMKSSAVDVECELTAGYKLFNDSQRITNELFIVKNIASMRKPAASAKLTMFRDALTILGIDDNITDDRISEILKLKEKGKGIHGLRNFITNNVIESSRFVYLIKYANAQKIREVAKNEKVVMFVLGGIPDTQIERYYKSCVEFPDMNSSLEAKRSELARMIKNISFDDFKNVKQQAKGRENVAKERAKAVIGLYLTVMYLLVKNLVNVNARYVIAIHCLERDFGLYKEIIPELASKNLKNDYRILSQTLCELCDDRDESPNLFLKKNKRLRKCVEVDINNADSSMTRKYRNCIAHLTVVRELKEYIGDIRTVDSYFSIYHYVMQRCITKRENDTKQEEKIKYEDDLLKNHGYTKDFVKALNSPFGYNIPRFKNLSIEQLFDRNEYLTEK

SEQ ID NO: 5035 - protein, 796 aa, Artificial
  Synthetic
VEINTSNPTHRSGESSPVRGDMLGLKSELEKRFFGKTFDDNIHIQLIYNILDIEKILAVYVTNIVYALNNMLGVKGSESHDDFIGYLSTNNTYDVFIDPDNSSLSDDKKANVRKSLSKFNVLLKTKRLGYFGLEEPKTKDTRVSQAYKKRVYHMLAIVGQIRQSVFHDKSSKLHEDLYSFIDIIDSEYRETLDYLVEERLKSINKDFIEGNKVNISLLIDMMKGYEADDIIRLYYDFIVLKSQKNLGFSIKKLREKMLDEYGFRFKDKQYDSVRSKMYKLMDFLLFCNYYRNDVVAGEALVRKLRFSMTDDEKEGIYADEAAKLWGKFRNDFENIADHMNGDVIKELGKADMDFDEKILDSEKKNASDLLYFSKMIYMLTYFLDGKEINDLLTTLISKFDNIKEFLKIMKSSAVDVECELTAGYKLFNDSQRITNELFIVKNIASMRKPAASAKLTMFRDALTILGIDDNITDDRISEILKLKEKGKGIHGLRNFITNNVIESSRFVYLIKYANAQKIREVAKNEKVVMFVLGGIPDTQIERYYKSCVEFPDMNSSLEAKRSELARMIKNISFDDFKNVKQQAKGRENVAKERAKAVIGLYLTVMYLLVKNLVNVNARYVIAIHCLERDFGLYKEIIPELASKNLKNDYRILSQTLCELCDDRDESPNLFLKKNKRLRKCVEVDINNADSSMTRKYRNCIAHLTVVRELKEYIGDIRTVDSYFSIYHYVMQRCITKRENDTKQEEKIKYEDDLLKNHGYTKDFVKALNSPFGYNIPRFKNLSIEQLFDRNEYLTEK

SEQ ID NO: 5036 - protein, 796 aa, Artificial; identical to SEQ ID NO: 5035
  Synthetic

SEQ ID NO: 5037 - protein, 796 aa, Artificial; identical to SEQ ID NO: 5035
  Synthetic

SEQ ID NO: 5038 - protein, 782 aa, Artificial
  Synthetic
MLGLKSELEKRFFGKTFDDNIHIQLIYNILDIEKILAVYITNIVYALNNMLGVKGSESHDDFIGYLSARNTYEVFTHPDKSNLSDKVKGNINKVKGNIKKSLSKFNDLLKTKRLGYFGLEEPKTKDKRVSEAYKKRVYHMLAIVGQIRQSVFHDKSNELDEYLYSFIDIIDSEYRDTLDYLVDERFDSINKGFVQGNKVNISLLIDMMKGYEADDIIRLYYDFIVLKSQKNLGFSIKKLREKMLDEYGFRFKDKQYDSVRSKMYKLMDFLLFCNYYRNDVVAGEVLVRKLRFSMTDDEKEGIYADEAAKLWGKFRNDFENIADHMNGDVIKELGKADMDFDEKIIDSEKKNASDLLYFSKMIYMLTYFLDGKEINDLLTTLISKFDNIKEFLKIMKSSAVDVECELTAGYKLFNDRQRITNELFIVKNIASMRKPAASAKLTMFRDALTILGIDDNITDDRISEILKLKEKGKGIHGLRNFITNNVIESSRFVYLIKYANAQKIREVAKNEKVVMFVLGGIPDTQIERYYKSCVEFPDMNSSLEAKRSELARMIKNIRFDDFKNVKQQAKGRENVAKERAKAVIGLYLTVMYLLVKNLVNVNARYVIAIHCLERDFGLYKEIIPELASKNLKNDYRILSQTLCELCDNGDESPNLFLKKNKRLRKCVEVDINNADSNMTRKYRNCIAHLTVVRELKEYIGDIRTVDSYFSIYHYVMQRCITKRENDTKQEEKIKYEDDLLKNHGYTKDFVKALNSPFGYNIPRFKNLSIEQLFDRNEYLTEK

SEQ ID NO: 5039 - protein, 803 aa, Artificial
  Synthetic
VEINTSNPTHRSGESSPVRGDMLGLKSELEKRFFGKTFDDNIHIQLIYNILDIEKILAVYVTNIVYALNNMLGIKDSESYDDFMGYLSARNTYEVFTHPDKSNLSDKVKGNINKVKGNIKKSLSKFNDLLKTKRLGYFGLEEPKTKDKRVSEAYKKRVYHMLAIVGQIRQSVFHDKSNELDEYLYSFIDIIDSEYRDTLDYLVDERFDSINKGFVQGNKVNISLLIDMMKGYEADDIIRLYYDFIVLKSQKNLGFSIKKLREKMLDEYGFRFKDKQYDSVRSKMYKLMDFLLFCNYYRNDVVAGEVLVRKLRFSMTDDEKEGIYADEAAKLWGKFRNDFENIADHMNGDVIKELGKADMDFDEKIIDSEKKNASDLLYFSKMIYMLTYFLDGKEINDLLTTLISKFDNIKEFLKIMKSSAVDVECELTAGYKLFNDSQRITNELFIVKNIASMRKPAASAKLTMFRDALTILGIDDNITDDRISEILKLKEKGKGIHGLRNFITNNVIESSRFVYLIKYANAQKIREVAKNEKVVMFVLGGIPDTQIERYYKSCVEFPDMNSSLEAKRSELARMIKNIRFDDFKNVKQQAKGRENVAKERAKAVIGLYLTVMYLLVKNLVNVNARYVIAIHCLERDFGLYKEIIPELASKNLKNDYRILSQTLCELCDNGDESPNLFLKKNKRLRKCVEVDINNADSNMTRKYRNCIAHLTVVRELKEYIGDIRTVDSYFSIYHYVMQRCITKRENDTKQEEKIKYEDDLLKNHGYTKDFVKALNSPFGYNIPRFKNLSIEQLFDRNEYLTEK

SEQ ID NO: 5040 - protein, 558 aa, Artificial
  Synthetic
VLKSQKNLGFSIKKLREKILDEYGFRFKDKQYDSVRSKMYKLMDFLLFCNYYRNDIAAGESLVRKLRFSMTDDEKEGIYADEAAKLWGKFRNDFENIADHMNGDVIKELGKADMDFDEKILDSEKKNASDLLYFSKMIYMLTYFLDGKEINDLLTTLISKFDNIKEFLKIMKSSAIDVECELTAGYKLFNDSQRITNELFIVKNIASMRKPAASAKLTMFRDALTILGIDDKITDDRISEILKLKEKGKGIHGLRNFITNNVIESSRFVYLIKYANAQKIREVAKNEKVVMFVLGGIPDTQIERYYKSCVEFPDMNSSLEAKRSELARMIKNIRFDDFKNVKQQAKGRENVAKERAKAVIGLYLTVMYLLVKNLVNVNARYVIAIHCLERDFGLYKEIIPELASKNLKNDYRILSQTLCELCDNGDESPNLFLKKNKRLRKCVEVDINNADSSMTRKYRNCIAHLTVVRELKEYIGDIRTVDSYFSIYHYVMQRCITKREDDTKQEEKIKYEDDLLKNHGYTKDFVKALNSPFGYNIPRFKNLSIEQLFDRNEYLTEK

SEQ ID NO: 5041 - protein, 419 aa, Artificial
  Synthetic
MLTYFLDGKEINDLLTTLISKFDNIKEFLKIMKSSAVDVECELTAGYKLFNDSQRITNELFIVKNIASMRKPAASAKLTMFRDALTILGIDDKITDDRISEILKLKEKGKGIHGLRNFITNNVIESSRFVYLIKYANAQKIREVAKNEKVVMFVLGGIPDTQIERYYKSCVEFPDMNSSLEAKRSELARMIKNIRFDDFKNVKQQAKGRENVAKERAKAVIGLYLTVMYLLVKNLVNVNARYVIAIHCLERDFGLYKEIIPELASKNLKNDYRILSQTLCELCDNGDESPNLFLKKNKRLRKCVEVDINNADSNMTRKYRNCIAHLTVVRELKEYIGDIRTVDSYFSIYHYVMQRCITKREDDTKQEEKIKYEDDLLKNHGYTKDFVKALNSPFGYNIPRFKNLSIEQLFDRNEYLTEK

SEQ ID NO: 5042 - protein, 643 aa, Artificial
  Synthetic
MLAIVGQIRQCVFHDKSGAKRFDLYSFINNIYPEYRETLDYLVDERFDSINKGFIQGNKVNISLLIDMMKGYEADDIIRLYYDFIVLKSQKNLGFSIKKLREKMLDEYGFRFKDKQYDSVRSKMYKLMDFLLFCNYYRNDVAAGEALVRKLRFSMTDDEKEGIYAGEAAKLWGKFRNDFENIADHMNGDVIKELGKADMDFDEKILDSEKKNASDLLYFSKMIYMLTYFLDGKEINDLLTTLISKFDNIKEFLKIMKSSAVDVECELTAGYKLFNDSQRITNELFIVKNIASMRKPAASAKLTMFRDALTILGIDDNITDDRISEILKLKEKGKGIHGLRNFITNNVIESSRFVYLIKYANAQKIREVAKNEKVVMFVLGGIPDTQIERYYKSCVEVPDMNSSLEAKRSELARMIKNIRFDDFKNVKQQAKGRENVAKERAKAVIGLYLTVMYLLVKNLVNVNARYVIAIHCLERDFGLYKEIIPELASKNLKNDYRILSQTLCELCDDRDKSPNLFLKKNKRLRKCVEVDINNADSSMTRKYRNCIAHLTVVRELKEYIGDIRTVDSYFSIYHYVMQRCITKRENDTKQEDKIKYEDDLLKNHGYTKDFVKALNSPFGYNIPRFKNLSIEQLFDRNEYLTEK

SEQ ID NO: 5043 - protein, 643 aa, Artificial
  Synthetic
MLAIVGQIRQCVFHDKSGAKRFDLYSFINNIDPEYRETLDYLVDERFDSINKGFIEGNKINISLLIDMMKGYEADDIIRLYYDFIVLKSQKNLGFSIKKLREKMLDEYGFRFKDKQYDPVRSKMYKLMDFLLFCNHYRNDVAAGEALVRKLRFSMTDDEKEGIYADEAAKLWGKFRNDFENIADHMNGDVIKELGKADMDFDEKILDSEKKNASDLLYFSKMIYMLTYFLDGKEINDLLTTLISKFDNIKEFLKIMKSSAVDVECELTAGYKLFNDSQRITNELFIVKNIASMRKPAASAKLTMFRDALTILGIDDNITDDRISEILKLKEKGKGIHGLRNFITNNVIESSRFVYLIKYANAQKIREVAKNEKVVMFVLGGIPDTQIERYYKSCVEFPDMNSSLEAKRSELARMIKNISFDDFKNVKQQAKGRENVAKERAKAVIGLYLTVMYLLVKNLVNVNARYVIAIHCLERDFGLYKEIIPELASKNLKNDYRILSQTLCELCDDRDESPNLFLKKNKRLRKCVEVDINNADSSMTRKYRNCIAHLTVVRELKEYIGDIRTVDSYFSIYHYVMQRCITKRENDTKQEEKIKYEDDLLKNHGYTKDFVKALNSPFGYNIPRFKNLSIEQLFDRNEYLTEK

SEQ ID NO: 5044 - protein, 796 aa, Artificial
  Synthetic
VEINTSNPTHRSGESSPVRWDMLGLKSELEKRFFGKTFDDNIHIQLIYNILDIEKILAVYVTNIVYALNNMLGEGDDESHDDFMGYLSAQNTYYIFTHPDKSNLSDKVKGNIKKSLSKFNDLLKTKRLGYFGLEEPKTKDKRVSEAYKKRVYHMLAIVGQIRQSVFHDKSNELDEYLYSFIDIIDSEYRDTLDYLVDERFDSINKGFVQGNKVNISLLIDMMKGYEADDIIRLYYDFIVLKSQKNLGFSIKKLREKMLDEYGFRFKDKQYDSVRSKMYKLMDFLLFCNYYRNDVVAGEVLVRKLRFSMTDDEKEWIYADEAEKLWGKFRNDFENIADHMNGDVIKELGKADMDFDEKILDSEKKNASDLLYFSKMIYMLTYFLDGKEINDLLTTLISKFDNIKEFLKIMKSSAVDVECELTAGYKLFNDSQRITNELFIVKNIASMRKPAASAKLTMFRDALTILGIDDKITDDRISEILKLKEKGKGIHGLRNFITNNVIESSRFVYLIKYANAQKIREVAENEKVVMFVLGGIPDTQIERYYKSCVEFPDMNSSLEVKRSELARMIKNISFDDFKNVKQQAKGRENVAKERAKAVIGLYLTVMYLLVKNLVNVNARYVIAIHCLERDFGLYKEIIPELASKNLKNDYRILSQTLCELCDDRDESPNLFLKKNKRLRKCVEVDINNADSSMTRKYRNCIAHLTVVRELKEYIGDIRTVDSYFSIYHYVMQRCITKREDDKKQEEKIKYEDDLLKNHGYTKDFVKALNSPFGYNIPRFKNLSIEQLFDRNEYLTEK

SEQ ID NO: 5045 - protein, 796 aa, Artificial
  Synthetic
VEINTSNPTHRSGESSSVRGDMLGLKSELEKRFFGKTFDDNIHIQLIYNILDIEKILAVYVTNIVYALNNMLGVKGSESYDDFMGYLSAQNTYYIFTHPDKSNLSDKVKGNIKKSLSKFNDLLKTKRLGYFGLEEPKTKDKRVSEAYKKRVYHMLAIVGQIRQSVFHDKSNELDEYLYSFIDIIDSEYRDTLDYLVDERFDSINKGFVQGNKVNISLLIDMMKGYEADDIIRLYYDFIVLKSQKNLGFSIKKLREKMLDEYGFRFKDKQYDSVRSKMYKLMDFLLFCNYYRNDVVAGEALVRKLRFSMTDDEKEGIYADEAEKLWGKFRNDFENIADHMNGDVIKELGKADMDFDEKILDSEKKNASDLLYFSKMIYMLTYFLDGKEINDLLTTLISKFDNIKEFLKIMKSSAVDVECELTAGYKLFNDSQRITNELFIVKNIASMRKPASSAKLTMFRDALTILGIDDNITDDRISEILKLKEKGKGIHGLRNFITNNVIESSRFVYLIKYANAQKIREVAKNEKVVMFVLGGIPDTQIERYYKSCVEFPDMNSSMGAKRRELAKMIKSISFEDFKDVKQQAKGRENVAKERAKAVIGLYLTVMYLLVKNLVNVNARYVIAIHCLERDFGLYKEIIPELASKNLKNDYRILSQTLCELCDNGDESPNLFLKKNKRLRKCVEVDINNADSNMTRKYRNCIAHLTVVRELNKYIKDIRTVDSYFSIYHYVMQRCITKRENDTKQEEKINYEDDLLKNHGYTKDFVKALNSPFGYNIPRFKNLSIEQLFDRNEYLTEK

SEQ ID NO: 5046 - protein, 796 aa, Artificial
  Synthetic
VEINTSNPTHRSGESSSVRGDMLGLKSELEKRFFGKTFDDNIHIQLIYNILDIEKILAVYVTNIVYALNNMLGVKGSESYDDFMGYLSAQNTYYIFTHPDKSNLSDKVKGNIKKSLSKFNDLLKTKRLGYFGLEEPKTKDKRVSEAYKKRVYHMLAIVGQIRQSVFHDKSNELDEYLYSFIDIIDSEYRDTLDYLVDERFDSINKGFVQGNKVNISLLIDMMKGYEADDIIRLYYDFIVLKSQKNLGFSIKKLREKMLDEYGFRFKDKQYDSVRSKMYKLMDFLLFCNYYRNDVVAGEALVRKLRFSMTDDEKEGIYADEAEKLWGKFRNDFENIADHMNGDVIKELGKADMDFDEKILDSEKKNASDLLYFSKMIYMLTYFLDGKEINDLLTTLISKFDNIKEFLKIMKSSAVDVECELTAGYKLFNDSQRITNELFIVKNIASMRKPAASAKLTMFRDALTILGIDDKITDDRISEILKLKEKGKGIHGLRNFITNNVIESSRFVYLIKYANAQKIREVAKNEKVVMFVLGGIPDTQIERYYKSCVEFPDMNSSLEAKCSELARMIKNISFDDFKNVKQQAKGRENVAKERAKAVIGLYLTVMYLLVKNLVNVNARYVIAIHCLERDFGLYKEIIPELASKNLKNDYRILSQTLCELCDDRDESPNLFLKKNKRLRKCVEVDINNADSSMTRKYRNCIAHLTVVRELKEYIGDIRTVDSYFSIYHYVMQRCITKREDDTKQEEKIKYEDDLLKNHGYTKDFVKALNSPFGYNIPRFKNLSIEQLFDRNEYLTEK

SEQ ID NO: 5047 - protein, 574 aa, Artificial
  Synthetic
VEINTSNPTHRSGESSSVRGDMLGLKSELEKRFFGKTFDDNIHIQLIYNILDIEKILAVYVTNIVYALNNMLGVKGSESYDDFMGYLSAQNTYYIFTHPDKSNLSDKVKGNIKKSLSKFNDLLKTKRLGYFGLEEPKTKDKRVSEAYKKRVYHMLAIVGQIRQSVFHDKSNELDEYLYSFIDIIDSEYRDTLDYLVDERFDSINKGFVQGNKVNISLLIDMMKGYEADDIIRLYYDFIVLKSQKNLGFSIKKLREKMLDEYGFRFKDKQYDSVRSKMYKLMDFLLFCNYYRNDVVAGEALVRKLRFSMTDDEKEGIYADEAEKLWGKFRNDFENIADHMNGDVIKELGKADMDFDEKILDSEKKNASDLLYFSKMIYMLTYFLDGKEINDLLTTLISKFDNIKEFLKIMKSSAVDVECELTAGYKLFNDSQRITNELFIVKNIASMRKPAASAKLTMFRDALTILGIDDKITDDRISEILKLKEKGKGIHGLRNFITNNVIESSRFVYLIKYANAQKIREVAKNEKVVMFVLGGIPDTQIERYYKSCVEFPDMNSSLEAKCSELARMIKNISFD

SEQ ID NO: 5048 - protein, 792 aa, Artificial
  Synthetic
VEINTSNPTHRSGESSPVRWDMLGLKSELEKRFFGKTFDDNIHIQLIYNILDIEKILAVYVTNIVYALNNMLGIKDSESYDDFMGYLSARNTYEVFTHPDKSNLSDKVKGNIKKSLSKFNVLLKTKRLGYFGLEEPKTKDTNALEAYKKRVYHMLAIVGQIRQSVFHDKSSKLDEDLYSFIDIIDSEYRETLDYLVDERFDSINKGFIQGNKVNISLLIDMMKDDYEADDIIRLYYDFIVLKSQKNLGFSIKKLREKMLDEYGFRFKDKQYDSVRSKMYKLMDFLLFCNYYRNDVVAGEALVRKLRFSMTDDEKEGIYADEAEKLWGKFRNDFENIADHMNGDVIKELGKADMDFDEKILDSEKKNASDLLYFSKMIYMLTYFLDGKEINDLLTTLISKFDNIKEFLKIMKSSAVDVECELTAGYKLFNDSQRITNELFIVKNIASMRKPAASAKLTMFRDALTILGIDDNITDDRISEILKLKEKGKGIHGLRNFITNNVIESSRFVYLIKYANAQKIREVAENEKVVMFVLGGIPDTQIERYYKSCVEFPDMNSSLEAKRSELARMIKNISFDDFKNVKQQAKGRENVAKERAKAVIGLYLTVMYLLVKNLVNVNARYVIAIHCLERDFGLYKEIIPELASKNLKNDYRILSQTLCELCDDRDESPNLFLKKNKRLRKCVEVDINNADSSMTRKYRNCIAHLTVVRELKEYIGDIRTVDSYFSIYHYVMQRCITKRGDDTKQEEKIKYEDDLLKNHGYTKDFVKALNSPFGYNIPRFKNLSIEQLFDRNE

SEQ ID NO: 5049 - protein, 889 aa, Artificial
  Synthetic
MPAAEAAAPAAEKKKSSVKAAGMKSILVSKNKMYITSFGKGNSAVLEYEVDKVDNDNYNKTQLSSKDNSNIELGDVDEVNITFSSKHGFESGVEINTSNPTHRSGESSPVRWDMLGLKSELEKRFFGKTFDDNIHIQLIYNILDIEKILAVYVTNIVYALNNMLGIKKSESYDDFMGYLSARNTYEVFTHPDKSNLSDKVKGNIKKSLSKFNVLLKTKRLGYFGLEEPKTKDTNALEAYKKRVYHMLAIVGQIRQSVFHDKSSKLHEDLYSFIDIIDSEYRETLDYLVDERFDSINKGFIQGNKVNISLLIDMMKDDYEADDIIRLYYDFIVLKSQKNLGFSIKKLREKMLDEYGFRFKDKQYDSVRSKMYKLMDFLLFCNYYRNDVVAGEALVRKLRFSMTDDEKEGIYADEAEKLWGKFRNDFENIADHMNGDVIKELGKADMDFDEKILDSEKKNASDLLYFSKMIYMLTYFLDGKEINDLLTTLISKFDNIKEFLKIMKSSAVNVECELTAGYKLFNDSQRITNELFIVKNIASMRKPAASAKLTMFRDALTILGIDDKITDDRISEILKLKEKGKGIHGLRNFITNNVIESSRFVYLIKYANAQKIREVAKNEKVVMFVLGGIPDTQIERYYKSCVEFPDMNSSLEAKRSELARMIKNISFDDFKNVKQQAKGRENVAKERAKAVIGLYLTVMYLLVKNLVNVNARYVIAIHCLERDFGLYKEIIPELASKNLKNDYRILSQTLCELCDDRDESPNLFLKKNRRLRKCVEVDINNADSSMTRKYRNCIAHLTVVRELKEYIGDIRTVDSYFSIYHYVMQRCITKREDDTKQEDKIKYEDDLLKNHGYTKDFVKALNSPFGYNIPRFKNLSIEQLFDRNEYLTEK

SEQ ID NO: 5050 - protein, 889 aa, Artificial; identical to SEQ ID NO: 5049
  Synthetic

SEQ ID NO: 5051 - protein, 889 aa, Artificial; identical to SEQ ID NO: 5049
  Synthetic

SEQ ID NO: 5052 - protein, 889 aa, Artificial; identical to SEQ ID NO: 5049
  Synthetic

SEQ ID NO: 5053 - protein, 889 aa, Artificial; identical to SEQ ID NO: 5049
  Synthetic

SEQ ID NO: 5054 - protein, 889 aa, Artificial; identical to SEQ ID NO: 5049
  Synthetic

SEQ ID NO: 5055 - protein, 385 aa, Artificial
  Synthetic
MKSSAVNVECELTAGYKLFNDSQRITNELFIVKNIASMRKPAASAKLTMFRDALTILGIDDNITDDRISEILKLKEKGKGIHGLRNFITNNVIESSRFVYLIKYANAQKIREVAKNEKVVMFVLGGIPDTQIERYYKSCVEFPDMNSSLEAKRSELARMIKNISFDDFKNVKQQAKGRENVAKERAKAVIGLYLTVMYLLVKNLVNVNARYVIAIHCLERDFGLYKEIIPELASKNLKNDYRTLSQTLCGLCDKSPNLFLKKNERLRKCVEVDINNADSSMTRKYRNCIAHLTVVRELKEYIGDIRTVDSYFSIYHYVMQRCITKRENDTKQEDKIKYEDDLLKNHGYTKDFVKALNSPFGYNIPRFKNLSIEQLFDRNEYLTEK

SEQ ID NO: 5056 - protein, 385 aa, Artificial; identical to SEQ ID NO: 5055
  Synthetic

SEQ ID NO: 5057 - protein, 385 aa, Artificial; identical to SEQ ID NO: 5055
  Synthetic

SEQ ID NO: 5058 - protein, 385 aa, Artificial; identical to SEQ ID NO: 5055
  Synthetic

SEQ ID NO: 5059 - protein, 385 aa, Artificial; identical to SEQ ID NO: 5055
  Synthetic

SEQ ID NO: 5060 - protein, 385 aa, Artificial
  Synthetic
MKSSAVNVECELTAGYKLFNDSQRITNELFIVKNIASMRKPAASAKLTMFRDALTILGIDDNITDDRISEILKLKEKGKGIHGLRNFITNNVIESSRFVYLIKYANAQKIREVAKNEKVVMFVLGGIPDTQIERYYKSCVEFPDMNSSLEAKRSELARMIKNISFDDFKNVKQQAKGRENVAKERAKAVIGLYLTVMYLLVKNLVNVNARYVIAIHCLERDFGLYREIIPELASKNLKNDYRTLSQTLCGLCDKSPNLFLKKNERLRKCVEVDINNADSSMTRKYRNCIAHLTVVRELKEYIGDIRTVDSYFSIYHYVMQRCITKRENDTKQEDKIKYEDDLLKNHGYTKDFVKALNSPFGYNIPRFKNLSIEQLFDRNEYLTEK

SEQ ID NO: 5061 - protein, 385 aa, Artificial
  Synthetic
MKSSAVNVECELTAGYKLFNDSQRITNELFIVKNIASMRKPAASAKLTMFRDALTILGIDDNITDDRISEILKLKEKGKGIHGLRNFITNNVIESSRFVYLIKYANAQKIREVAKNEKVVMFVLWGIPDTQIERYYKSCVEFPDMNSSLEAKRSELARMIKNISFDDFKNVKQQAKGRENVAKERAKAVIGLYLTVMYLLVKNLVNVNARYVIAIHCLERDFGLYKEIIPELASKNLKNDYRTLSQTLCGLCDKSPNLFLKKNERLRKCVEVDINNADSSMTRKYRNCIAHLTVVRELKEYIGDIRTVDSYFSIYHYVMQRCITKRENDTKQEDKIKYEDDLLKNHGYTKDFVKALNSPFGYNIPRFKNLSIEQLFDRNEYLTEK

SEQ ID NO: 5062 - protein, 669 aa, Artificial
  Synthetic
MRLQVQPLCEEPKTKDNRVSEAYKKRVYHMLAIVGQIRQSVFHDKSSKLHEDLYSFIDIIDSEYRETLDYLVDERFDSINKGFIQGNKVNISLLIDMMKGYEADDIIRLYYDFIVIKSQKNLGFSIKKLREKMLDEYGFRFKDKQYDSVRSKMYKLMDFLLFCNYYRNDVVAGEALVRKLRFSMTDDEKEGIYADEAEKLWGKFRNDFENIADHMNGDVIKELGKADMDFDEKILDSEKKNASDLLYFSKMIYMLTYFLDGKEINDLLTTLISKFDNIKEFLKIMKSSAVNVECELTAGYKLFNDSQRITNELFIVKNIASMRKPAASAKLTMFRDALTILGIDDKITDDRISEILKLKEKGKGIHGLRNFITNNVIESSRFVYLIKYANAQKIREVAKNEKVVMFVLGGIPDTQIERYYKSCVEFPDMNSSLEAKRSELARMIKNISFDDFKNVKQQAKGRENVAKERAKAVIGLYLTVMYLLVKNLVNVNARYVIAIHCLERDFGLYKEIIPELASKNLKNDYRILSQTLCELCDKSPNLFLKKNKRLRKCVEVDINNADSSMTRKYRNCIAHLTVVRELKEYIGDIRTVDSYFSIYHYVMQRCITKRENDTKQEDKIKYEDDLLKNHGYTKDFVKALNSPFGYNIPRFKNLSIEQLFDRNEYLTEK

SEQ ID NO: 5063 - protein, 793 aa, Artificial
  Synthetic
VEINTSNPTHRSGESSPVRWDMLGLKSELEKRFFGKTFDDNIHIQLIYNILDIEKILAVYVTNIVYALNNMLGIKDSESYDDFMGYLSAKNTYEVFTHPDKSDLSDKVKGNIKKSFSTFNDLLKTKRLGYFGLEEPKTKDTRVSQAYKKRVYHMLAIVGQIRQCVFHDKSGAKRFDLYSFINNIDPEYRDTLDYLVDERFDSINKGFIQGNKVNISLLIDMMKGYEADDIIRFYYDFIVLKSQKNLGFSIKKLREKMLDEYGFRFKDKQYDSVRSKMYKLMDFLLFCNYYRNDVAAGEALVRKLRFSMTDDEKEGIYADEAAKLWGKFRNDFENIAGHMNGDVIKELGKADMDFDEKTLDSEKKNASDLLYFSKMIYMLTYFLDGKEINDLLTTLISKFDNIKEFLKIMKSSAVDVECELTAGYKLFNDSQRITNELFIVKNIASMRKPAASAKLTMFRDALTILGIDDNITDDRISEILKLKEKGKGIHGLRNFITNNVIESSRFVYLIKYANAQKIREVAKNEKVVMFVLGGIPDTQIERYYKSCVEFPDMNSSLEAKRSELARMIKNISFDDFKNVKQQAKGRENVAKERAKAVIGLYLTVMYLLVKNLVNVNARYVIAIHCLERDFGLYKEIIPELASKNLKNDYRILSQTLCELCDKSPNLFLKKNERLRKCVEVDINNADSIMTRKYRNCIAHLTVVRELKEYIGDIRTVDSYFSIYHYVMQRCITKRENDTKQEDKIKYEDDLLKNHGYTKDFVKALNSPFGYNIPRFKNLSIEQLFDRNEYLTEK

SEQ ID NO: 5064 - protein, 791 aa, Artificial
  Synthetic
VEINTSNPTHRSGESSPVRWDMLGLKSELEKRFFGKTFDDNIHIQLIYNILDIEKILAVYVTNIVYALNNMLGIKDSESYDDFMGYLSAKNTYEVFTHPDKSDLSDKVKGNIKKSFSTFNDLLKTKRLGYFGLEEPKTKDTRVSQAYKKRVYHMLAIVGQIRQCVFHDKSGAKRFDLYSFINNIDPEYRDTLDYLVDERFDSINKGFIQGNKVNISLLIDMMKGYEADDIIRFYYDFIVLKSQKNLGFSIKKLREKMLDEYGFRFKDKQSVRSKMYKLMDFLLFCNYYRNDVAAGEALVRKLRFSMTDDEKEGIYADEAAKLWGKFRNDFENIAGHMNGDVIKELGKADMDFDEKTLDSEKKNASDLLYFSKMIYMLTYFLDGKEINDLLTTLISKFDNIKEFLKIMKSSAVDVECELTAGYKLFNDSQRITNELFIVKNIASMRKPAASAKLTMFRDALTILGIDDNITDDRISEILKLKEKGKGIHGLRNFITNNVIESSRFVYLIKYANAQKIREVAKNEKVVMFVLGGIPDTQIERYYKSCVEFPDMNSSLEAKRSELARMIKNISFDDFKNVKQQAKGRENVAKERAKAVIGLYLTVMYLLVKNLVNVNARYVIAIHCLERDFGLYKEIIPELASKNLKNDYRILSQTLCELCDKSPNLFLKKNERLRKCVEVDINNADSIMTRKYRNCIAHLTVVRELKEYIGDIRTVDSYFSIYHYVMQRCITKRENDTKQEDKIKYEDDLLKNHGYTKDFVKALNSPFGYNIPRFKNLSIEQLFDRNEYLIEK

SEQ ID NO: 5065 - protein, 486 aa, Artificial
  Synthetic
MTDDEKEGIYADEAAKLWGKFRNDFENIADHMNGDVIKELGKADMDFDEKILDSEKKNASDLLYFSKMIYMLTYFLDGKEINDLLTTLISKFDNIKEFLKIMKSSAVDVECELTAGYKLFNDSQRITNELFIVKNIASMRKPAASAKLTMFRDALTILGIDDKITDDRISEILKLKEKGKGIHGLRNFITNNVIESSRFVYLIKYANAQKIREVAKNEKVVMFVLGGIPDTQIERYYKSCVEFPDMNSSLGVKRSELARMIKNISFDDFKNVKQQSKGRENVAKERAKAVIGLYLTVMYLLVKNLVNVNARYVIAIHCLERDFGLYKEIIPELASKNLKNDYRILSQTLCELCDKSPNLFLKKNERLRKCVEVDINNADSSMTRKYRNCIAHLTVVRELKEYIGDICTVDSYFSIYHYVMQRCITKRENDTKQEEKIKYEDDLLKNHGYTKDFVKALNSPFGYNIPRFKNLSIEQLFDRNEYLTEK

SEQ ID NO: 5066 - protein, 881 aa, Artificial
  Synthetic
MPAAEAAAPAAEKKKSSVKAAGMKSILVSENKMYITSFGKGNSAVLEYEVDNNDYNKTQLSSKDNSNIELCDVGKVNITFSSRRGFESGVEINTSNPTHRSGESSSVRGDMLGLKSELEKRFFGKNFDDNIHIQLIYNILDIEKILAVYVTNIVYALNNMLGEGDESNYDFMGYLSTFNTYKVFTNPNGSTLSDDKKENIRKSLSKFNALLKTKRLGYFGLEEPKTKDTRASEAYKKRVYHMLAIVGQIRQCVFHDKSGAKRFDLYSFINNIDPEYRETLDYLVDERFDSINKGFIQGNKVNISLLIDMMKGYEADDIIRLYYDFIVLKSQKNLGFSIKKLREKMLDEYGFRFKDKQYDSVRSKMYKLMDFLLFCNYYRNDIAAGESLVRKLRFSMTDDEKEGIYADEAAKLWGKFRNDFENIADHMNGDVIKELGKADMDFDEKILDSEKKNASDLLYFSKMIYMLTYFLDGKEINDLLTTLISKFDNIKEFLKIMKSSAVDVECELTAGYKLFNDSQRITNELFIVKNIASMRKPAASAKLTMFRDALTILGIDDKITDDRISEILKLKEKGKGIHGLRNFITNNVIESSRFVYLIKYANAQKIREVAKNEKVVMFVLGGIPDTQIERYYKSCVEFPDMNSSLGVKRSELARMIKNISFDDFKNVKQQSKGRENVAKERAKAVIGLYLTVMYLLVKNLVNVNARYVIAIHCLERDFGLYKEIIPELASKNLKNDYRILSQTLCELCDKSPNLFLKKNERLRKCVEVDINNADSSMTRKYRNCIAHLTVVRELKEYIGDICTVDSYFSIYHYVMQRCITKRENDTKQEEKIKYEDDLLKNHGYTKDFVKALNSPFGYNIPRFKNLSIEQLFDRNEYLTEK

SEQ ID NO: 5067 - protein, 348 aa, Artificial
  Synthetic
MRKPAASAKLTMFRDALTILGIDDNITDDRISEILKLKEKGKGIHGLRNFITNNVIESSRFVYLIKYANAQKIREVAKNEKVVMFVLGGIPDTQIERYYKSCVEFPDMNSSLGVKRSELARMIKNISFDDFKNVKQQAKGRENVAKERAKAVIGLYLTVMYLLVKNLVNVNARYVIAIHCLERDFGLYKEIIPELASKNLKNDYRILSQTLCELCDKSPNLFLKKNERLRKCVEVDINNADSSMTRKYRNCIAHLTVVRELKEYIGDICTVDSYFSIYHYVMQRCITKRENDTKQEEKIKYEDDLLKNHGYTKDFVKALNSPFGYNIPRFKNLSIEQLFDRNEYLTEK

SEQ ID NO: 5068 - protein, 348 aa, Artificial; identical to SEQ ID NO: 5067
  Synthetic

SEQ ID NO: 5069 - protein, 348 aa, Artificial; identical to SEQ ID NO: 5067
  Synthetic

SEQ ID NO: 5070 - protein, 885 aa, Artificial
  Synthetic
MPAVEVIAPAAEKKKSSVKAAGMKSILVSENKMYITSFGKGNSAVLEYEVDNNDYNKTQLSSKDNSNIELGNVNEVNITFSSRRGFESGVEINTSNPTHRSGESSSVRGDMLGLKSELEKRFFGKTFDDNIHIQLIYNILDIEKILAVYVTNIVYALNNMLGEGGDESHDDFMGYLSAKNTYDVFTNPNGSTLSDDKKENIRKSLRKFNDLLKTKRLGYFGLEEPKTKDTRVSQAYKKRVYHMLAIVGQIRQCVFHDLSEHSEYDLYSFIDNSKKVYRECRETLDYLVDERFDSINKGFIQGNKVNISLLIDMMKGYEADDIIRLYYDFIVLKSQKNLGFSIKKLREKMLDEYGFRFKDKQYDSVRSKMYKLMDFLLFCNYYRNDVVAGEALVRKLRFSMTDDEKEGIYADEAAKLWGKFRNDFENIADHMNGDVIKELGKADMDFDEKILDSEKKNASDLLYFSKMIYMLTYFLDGKEINDLLTTLISKFDNIKEFLKIMKSSAVDVECELTAGYKLFNDSQRITNELFIVKNIASMRKPAASARLTMFRDALTILGIDDKITDDRISEILKLKEKGKGIHGLRNFITNNVIESSRFVYLIKYANAQKIREVAKNEKVVMFVLGGIPDTQIERYYKSCVEFPDMNSSLEAKRSELARMIKNISFDDFKNVKQQAKGRENVAKERAKAVIGLYLTVMYLLVKNLVNVNARYVIAIHCLERDFGLYKEIIPELASKNLKNDYRILSQTLCELCDKSPNLFLKKNERLRKCVEVDINNADSSMTRKYRNCIAHLTVVRELKEYIGDIRTVDSYFSIYHYVMQRCITKRENDTKQEDKIKYEDDLLKNHGYTKDFVKALNSPFGYNIPRFKNLSIEQLFDRNEYLTEK

SEQ ID NO: 5071 - protein, 723 aa, Artificial
  Synthetic
MLGVKGSESYDDFMGYLSAQNTYYIFTHPDKSNLSDKVKGNIKKSLSKFNDLLKTKRLGYFGLEEPKTKDKRVSEAYKKRVYHMLAIVGQIRQSVFHDKSNELDEYLYSFIDIIDSEYRDTLDYLVDERFDSINKGFVQGNKVNISLLIDMMKGYEADDIIRLYYDFIVLKSQKNLGFSIKKLREKMLDEYGFRFKDKQYDSVRSKMYKLMDFLLFCNYYRNDVVAGEALVRKLRFSMTDDEKEGIYADEAAKLWGKFRNDFENIADHMNGDVIKELGKADMDFDEKILDSEKKNASDLLYFSKMIYMLTYFLDGKEINDLLTTLISKFDNIKEFLKIMESSAVDVECELTAGYKLFNDSQRITNELFIVKNIASMRKPAASAKLTMFRDALTILGIDDKITDDRISEILKLKEKGKGIHGLRNFITNNVIESSRFVYLIKYANAQKIREVAKNEKVVMFVLGGIPDTQIERYYKSCVEFPDMNSSLEAKRSELARMIKNISFDDFKNVKQQAKGRENVAKERAKAVIGLYLTVMYLLVKNLVNVNARYVIAIHCLERDFGLYKEIIPELASKNLKNDYRILSQTLCELCDKSPNLFLKKNERLRKCVEVDINNADSSMTRKYRNCIAHLTVVRELKEYIGDIRTVDSYFSIYHYVMQRCITKRENDTKQEDKIKYEDDLLKNHGYTKDFVKALNSPFGYNIPRFKNLSIEQLFDRNEYLTEK

SEQ ID NO: 5072 - protein, 626 aa, Artificial
  Synthetic
MTCQNTQSMTFTALLTIAKKCTESAENLVDERFDSINKGFIQGNKVNISLLIDMMKGYEADDIIRLYYDFIVLKSQKNLGFSIKKLREKMLDEYGFRFKDKQYDSVRSKMYKLMDFLLFCNYYRNDVVAGEALVRKLRFSMTDDEKEGIYADEAAKLWVKFRNDFENIADHMNGDVIKELGKADMDFDEKILDSEKKNASDLLYFSKMIYMLTYFLDGKEINDLLTTLISKFDNIKEFLKIMKSSAVDVECELTAGYKLFNDSQRITNELFIVKNIASMRKPAASAKLTMFRDALTILGIDDNITDDRISEILKLKEKGKGIHGLRNFITNNVIESSRFVYLIKYANAQKIREVAENEKVVMFVLGGIPDTQIERYYKSCVEFPDMNSSLEVKRSELARMIKNISFDDFKNVKQQAKGRENVAKERAKAVIGLYLTVMYLLVKNLVNVNARYVIAIHCLERDFGLYKEIIPELASKNLKNDYRILSQTLCELCDKSPNLFLKKNERLRKCVEVDINNADSSMTRKYRNCIAHLTVVRELKEYIGDIRTVDSYFSIYHYVMQRCITKREDDTKQEEKIKYEDDLLKNHGYTKDFVKALNSPFGYNIPRFKNLSIEQLFDRNEYLTEK

SEQ ID NO: 5073 - protein, 333 aa, Artificial
  Synthetic
  misc_feature (5)..(37): Xaa can be any naturally occurring amino acid
LRNFXXXXXXXXXXXXXXXXXXXXXXXXXXXXXXXXXIESSRFVYLIKYANAQKIREVAKNEKVVMFVLGGIPDTQIERYYKSCVEFPDMNSSLEAKCSELARMIKNISFDDFKNVKQQAKGRENVAKERAKAVIGLYLTVMYLLVKNLVNVNARYVIAIHCLERDFGLYKEIIPELASKNLKNDYRILSQTLCELCDDRDESPNLFLKKNKRLRKCVEVDINNADSSMTRKYRNCIAHLTVVRELKEYIGDIRTVDSYFSIYHYVMQRCITKREDDTKQEEKIKYEDDLLKNHGYTKDFVKALNSPFGYNIPRFKNLSIEQLFDRNEYLTEK

SEQ ID NO: 5074 - protein, 799 aa, Artificial
  Synthetic
VEINTSNPTHRSGESSPVRWDMLGLKSELEKRFFGKTFDDNIHIQLIYNILDIEKILAVYVTNIVYALNNMLGVKGSESHDDFIGYLSAKNTYEVFTHPDKSNLSDKVKGNIKKSFSTFNDLLKTKRLGYFGLEEPKTKDNRVSEAYKKRVYHMLAIVGQIRQCVFHDLSEHLEYDLYSFIDNSKKVYRECRETLDYLVDERFDSINKGFIQGNKVNISLLIDMMKGYEADDIIRLYYDFIVLKSQKNLGFSIKKLREKMLDEYGFRFKDKQYDSVRSKMYKLMDFLLFCNYYRNDVIAGEALVRKLRFSMTDDEKEGIYADEAAKLWGKFKNDFENIADHMNGDVIKELGKADMDFDEKILDSEKKNASDLLYFSKMIYMLTYFLDGKEINDLLTTLISKFDNIKEFLKIMKSSAVDVECELTAGYKLFNDSQRITNELFIVKNIASMRKPAASAKLTMFRDALTILGIDDNITDDRISEILKLKEKGKGIHGLRNFITNNVIESSRFVYLIKYANAQKIREVAKNEKVVMFVLGGIPDTQIERYYKSCVEFPDMNSSLEAKRSELARMIKNIRFDDFKNVKQQAKGRENVAKERAKAVIGLYLTVMYLLVKNLVNVNARYVIAIHCLERDFGLYKEIIPELASKNLKNDYRILSQTLCELCDYRDKSPNLFLKKNKRLRKCVEVDINNADSSMTRKYRNCIAHLTVVRELKEYIGDIRTVDSYFSIYHYVMQRCITKREDDTKQEDKIKYEDNLLKNHGYTKDFVKALNSPFGYNIPRFKNLSIEQLFDRNEYLTEK

SEQ ID NO: 5075 - protein, 792 aa, Artificial
  Synthetic
VEINTSNPTHRSGESSPVRGDMLGLKSELEKRFFGKTFDDNIHIQLIYNILDIEKILAVYVTNIVYALNNMLGEGDESNYDFMGYLSTFNTYKVFTNPNGSTLSDDKKENIRKSLSKFNALLKTKRLGYFGLEEPKTKDKRVSEAYKKRVYHMLAIVGQIRQSVFHDKSNELDEYLYSFIDIIDSEYRDTLDYLVDERFDSINKGFVQGNKVNISLLIDMMKGYEADDIIRLYYDFIVLKSQKNLGFSIKKLREKMLDEYGFRFKDKQYDSVRSKMYKLMDFLLFCNYYRNDVAAGEALVRKLRFSMTDGEKEGIYADEAEKLWGKFRNDFENIADHMNGDVIKELGKADMDFDEKILDSEKKNASDLLYFSKMIYMLTYFLDGKEINDLLTTLISKFDNIKEFLKIMKSSAVDVECELTAGYKLFNDSQRITNELFIVKNIASMRKPAASAKLTMFRDALTILGIDDNITDDRISEILKLKEKGKGIHGLRNFITNNVIESSRFVYLIKYANAQKIREVAKNEKVVMFVLGGIPDTQIERYYKSCVEFPDMNSSLEVKRSELARMIKNISFDDFKNVKQQAKGRENVAKERAKAVIGLYLTVMYLLVKNLVNVNARYVIAIHCLERDFGLYKEIIPELASKNLKNDYRILSQTLCELCDKSPNLFLKKNRRLRKCVEVDINNADSSMTRKYRNCIAHLTVVRELKEYIGDIRTVDSYFSIYHYVMQRCITKRGDDTKQEEKIKYEDDLLKNHGYTKDFVKALNSPFGYNIPRFKNLSIEQLFDRNEYLTEK

SEQ ID NO: 5076 - protein, 792 aa, Artificial; identical to SEQ ID NO: 5075
  Synthetic

SEQ ID NO: 5077 - protein, 570 aa, Artificial
  Synthetic
  misc_feature (11)..(14): Xaa can be any naturally occurring amino acid
MISYAFITISXXXXIVLKSQKNLGFSIKKLREKMLDEYGFRFKDKQYDSVRSKMYKLMDFLLFCNYYRNDVVAGEALVRKLRFSMTDDEKEGIYADEAAKLWGKFRNDFENIADHMNGDVIKELGKADMDFDEKILDSEKKNASDLLYFSKMIYMLTYFLDGKEINDLLTTLISKFDNIKEFLKIMKSSAVDVECELTAGYKLFNDSQRITNELFIVKNIASMRKPAASAKLTMFRDALTILGIDDNITDDRISEILKLKEKGKGIHGLRNFITNNVIESSRFVYLIKYANAQKIREVAKNEKVVMFVLGGIPDTQIERYYKSCVEFPDMNSSLEVKRSELARMIKNICFDDFKNVKQQAKGRENVAKERAKAVIGLYLTVMYLLVKNLVNVNARYVIAIHCLERDFGLYKEIVSELASKNLKNDYRILSQTLCELCDKSPNLFLKKNERLRKCVEVDINNADSSMTRKYRNCIAHLTVVRELKEYIGDIRAVDSYFSIYHYVMQRCITKRGNDTKQEDKIKYEDDLLKNHGYTKDFVKALNSPFGYNIPRFKNLSIEQLFDRNEYLTEK

SEQ ID NO: 5078 - protein, 860 aa, Artificial
  Synthetic
MKSILVSKNKMYITSFGKGNSAVLEYEVDNNDYNKTQLSSKDNSNIELRGVTKVNITFSSKHGLESGVEINTSNPTHRSGESSPVRWDMLGLKSELEKRFFGKTFDDNIHIQLIYNILDIEKILAVYVTNIVYALNNMLGVKGSESHDDFIGYLSTNNTYDVFIDPDNSSLSDDKKANVRKSLSKFNALLKTKRLGYFGLEEPKTKDNRVSEAYKKRVYHMLAIVGQIRQCVFHDKSGAKRFDLYSFINNIDPEYRETLDYLVDERFDSINKDFIQGNKVNISLLIDMMKGYEADDIIRLYYDFIVLKSQKNLGFSIKKLREKMLDEYGFRFKDKQYDSVRSKMYKLMDFLLFCNYYRNDVVAGEALVRKLRFSMTDDEKEGIYADEAAKLWGKFRNDFENIADHMNGDVIKELGKADMDFDEKILDSEKKNASDILYFSKMIYMLTYFLDGKEINDLLTTLISKFDNIKEFLKIMKSSAVDVECELTAGYKLFNDSQRITNELFIVKNIASMRKPAASAKLTMFRDALTILGIDDNITDDRISEILKLKEKGKGIHGLRNFITNNVIESSRFVYLIKYANAQKIREVAKNEKVVMFVLGGIPDTQIERYYKSCVEFPDMNSSLEVKRSELARMIKNISFDDFKNVKQQAKGRENVAKERAKAVIGLYLTVMYLLVKNLVNVNARYVIAIHCLERDFGLYKEIIPELASKNLKNDYRILSQTLCDDRDESPNLFLKKNKRLRKCVEVDINNADSSMTRKYRNCIAHLTVVRELKEYIGDIRTVDTYFSIYHYVMQRCITKREDDTKQEEKIKYEDDLLKNHGYTKDFVKALNSPFGYNIPRFKNLSIEQLFDRNEYLTEK

SEQ ID NO: 5079 - protein, 812 aa, Artificial
  Synthetic
VEINTSNPTHRSGESSPVRGDMLGLKSELEKRFFGKTFDDNIHIQLIYNILDIEKILAVYVTNIVYALNNMLGVKGSESHDDFIGYLSTNNTYDVFIDPDNSSLSDDKKANVRKSLSKFNVLLKTKRLGYFGLEEPKTKDNRVSEAYKKRVYHMLAIVGQIRQCVFHDKSGAKRFDLYSFINNIDPEYRDTLDYLVEERLKSINKDFIQGNKVNISLLIDMMKGYEADDIIRLYYDFIVLKSQKNLGFSIKKLREKMLDEYGFRFKDKQYDSVRSKMYKLMDFLLFCNYYRNDVVAGEALVRKLRFSMTDDEKEGIYADEAAKLWGKFRNDFENIADHMNGEAIKELGKADMDFDEKILDSEKKNASDLLYFSKMIYMLTYFLDGKEINDLLTTLISKFDNIKEFLKIMKSSAVDVECELTAGYKLFNDSQRITNELFIVKNIASMRKPAASAKLTMFRDALTILGIDDNITDDRISEILKLKEKGKGIHGLRNFITNNVIESSRFVYLIKYANAQKIREVAKNEKVVMFVLGGIPDTQIERYYKSCVEFPDMNSSLEAKRSELARMIKNIGFDDFKNVKQQAKGRENVAKERAKAVIGLYLTVMYLLVKNLVNVNARYVIAIHCLERDFGLYKEIIPELASKNLKNDYRILSQTLCELCDDRDESPNLFLKKNKRLRKCVEVDINNADSSMTRKYRNCIAHLTVVRELKEYIGENASALKKADTWSSDVYSATNETGFCIQPAGLLLERENKTALVNANSSTAYWLYDGTQKQLDKVVMFANSNNDIALKNAVKPEGKDYYNAFSIRCIKE

SEQ ID NO: 5080 - protein, 690 aa, Artificial
  Synthetic
VEINTSNPTHRSGESSPVRGDMLGLKSELEKRFFGKTFDDNIHIQLIYNILDIEKILAVYVTNIVYALNNMLGVKGSESHDDFIGYLSTNNTYDVFIDPDNSSLSDDKKANVRKSLSKFNVLLKTKRLGYFGLEEPKTKDNRVSEAYKKRVYHMLAIVGQIRQCVFHDKSGAKRFDLYSFINNIDPEYRDTLDYLVEERLKSINKDFIQGNKVNISLLIDMMKGYEADDIIRLYYDFIVLKSQKNLGFSIKKLREKMLEEYGFRFKDKQYDSVRSKMYKLMDFLLFCNYYRNDIAAGEALVRKLRFSMTDDEKEGLYADEAAKLWGKFRNDFENIADHMNGDVIKELGKADMDFDEKILDSEKKNASDLLYFSKMIYMLTYFLDGKEINDLLTTLISKFDNIKEFLKIMKSSAVNVECELTAGYKLFNDSQRITNELFIVKNIASMRKPAASAKLTMFRDALTILGIDDKITDDRISEILKLKEKGKGIHGLRNFITNNVIESSRFVYLIKYANAQKIREVAENEKVVMFVLGGIPDTQIERYYKSCVEFPDMNSSLEAKRSELARMIKNIRFDDFKNVKQQAKGRENVAKERAKAVIGLYLTVMYLLVKNLVNVNARYVIAIHCLERDFGLYKEIIPELASKNLKNDYRILSQTLCELCDDRDESPNLFLKKNTCVPVRATDSESAGIS

SEQ ID NO: 5081 - protein, 338 aa, Artificial
  Synthetic
VEINTSNPTHRSGESSPVRGDMLGLKSELEKRFFGKTFDDNIHIQLIYNILDIEKILAVYVTNIVYALNNMLGVKGSESHDDFIGYLSTNNTYDVFIDPDNSSLSDDKKANVRKSLSKFNVLLKTKRLGYFGLEEPKTKDNRVSEAYKKRVYHMLAIVGQIRQCVFHDKSGAKRFDLYSFINNIDPEYRDTLDYLVEERLKSINKDFIQGNKVNISLLIDMMKGYEADDIIRLYYDFIVLKSQKNLGFSIKKLREKMLEEYGFRFKDKQYDSVRSKMYKLMDFLLFCNYYRNDIAAGEALVRKLRFSMTDDEKEGYMLMKRQSFGANSGMILKISPTT

SEQ ID NO: 5082 - protein, 524 aa, Artificial
  Synthetic
VLSGIFVNAFSSKHGFESGVEINTSNPTHRSGESSPVRGDMLGLKSELEKRFFGKTFDDNIHIQLIYNILDIEKILAVYVTNIVYALNNMLGVKGSESHDDFIGYLSTNNTYDVFIDPDNSSLSDDKKANVRKSLSKFNVLLKTKRLGYFGLEEPKTKDNRVSEAYKKRVYHMLAIVGQIRQCVFHDKSGAKRFDLYSFINNIDPEYRDTLDYLVEERLKSINKDFIQGNKVNISLLIDMMKGYEADDIIRLYYDFIVLKSQKNLGFSIKKLREKMLEEYGFRFKDKQYDSVRSKMYKLMDFLLFCNYYRNDIAAGEALVRKLRFSMTDDEKEGIYADEAEKLWVKFRNDFENIADHMNGDVIKELGKADMDFDEKILDSEKKNASDLLYFSKMIYMLTYFLDGKEINDILTTLISKFDNIKEFLKIMKSSAVDVECELTAGYKLFNDSQRITNELFIVKNIASMRKPAASAKLTMFRDALTILGIDDNITDDRISEILKLKEKGKGIHGRYTFWQSAVFFKGA

SEQ ID NO: 5083 - protein, 794 aa, Artificial
  Synthetic
VLSGIFVNAFSSKHGFESGVEINTSNPTHRSGESSPVRGDMLGLKSELEKRFFGKTFDDNIHIQLIYNILDIEKILAVYVTNIVYALNNMLGEGDESNYDFMGYLSTFNTYKVFTNPNGSTLSDDKKENIRKSLSKFNALLKTKRLGYFGLEEPKTKDNRVSEAYKKRVYHMLAIVGQIRQCVFHDKSGAKRFDLYSFINNIDPEYRETLDYLVDERFDSINKGFIQGNKVNISLLSDMMKDDYEADDIIRLYYDFIVLKSQKNLGFSIKKLREKMLEEYGFRFKDKQYDSVRSKMYKLMDFLLFCNYYRNDVVAGEALVRKLRFSMTDDEKEGIYADEAAKLWGKFRNDFENIADHMNGDVIKELGQADMDFDEKILDSEKKNASDLLYFSKMIYMLTYFLDDKEINDLLTTLISKFDNIKEFLKIMKSSAVDVECELTAGYKLFNDGQRITNELFIVKNIASMRKPAASAKLTMFRDALTILGIDDKITDDRISEILKLKEKGKGIHGLRNFITNNVIESSRFVYLIKYANAQKIREVAENEKVVMFVLGGIPDTQIERYYKSCVEFPDMNSSVEAKRSELARMIKNIRFDDFKNVKQQAKGRENVAKERAKAVIGLYLTVMYLLVKNLVNVNARYVIAIHCLERDFGLYKEIIPELASKNLKNDYRILSQTLCELCDDRDESPNLFLKKNKRLRKCVEVDINNADSNMTRKYRNCIAHLTVVRELKEYIGDIRTVDSYFSIYHYVMQRCITKRENDTKQEEKVKSEDDLLKNHGYTIDYATAIKSPFGYKI

SEQ ID NO: 5084 - protein, 312 aa, Artificial
  Synthetic
  misc_feature (148)..(184): Xaa can be any naturally occurring amino acid
  misc_feature (253)..(295): Xaa can be any naturally occurring amino acid
MLAIVGQIRQSVFHDKSNELDEYLYSFIDIIDSEYRDTLDYLVDERFDSINKGFVQGNKVNISLLIDMMKGYEADDIIRLYYDFIVLKSQKNLGFSIKKLREKMLDEYGFRFKDKQYDSVRSKMYKLMDFLLFCNYYRNDVVAGEALXXXXXXXXXXXXXXXXXXXXXXXXXXXXXXXXXXXXXMTDDEKEGIYADEAEKLWGKFRNDFENIADHMNGDVIKELGKADMDFDEKILDSEKKNASDLLYFSKMXXXXXXXXXXXXXXXXXXXXXXXXXXXXXXXXXXXXXXXXXXXTIFLQRLSASLITSRSF

SEQ ID NO: 5085 - protein, 344 aa, Artificial
  Synthetic
MNGDVIKELGKADMDFDEKILDSEKKNASDLLYFSKMIYMLTYFLDGKEINDLLTTLISKFDNIKEFLKIMKSSAVDVECELTAGYKLFNDSQRITNELFIVKNIASMRKPAASAKLTMFRDALTILGIDDKITDDRISEILKLKEKGKGIHGLRNFITNNVIESSRFVYLIKYANAQKIREVAENEKVVMFVLGGILDTQIERYYKSCVEVPDMNSSLEAKRSELARMIKNISFDDFKNVKQQGPRRVGRTAHRRDGRNARRKTLRGFDAPHPRRRDGQRNLDPDSDTELHDVSVHGRRRRQEFRHRQIRPDDLRGHRQGRNESLLLRHRRPSGLDFDGRKIL

SEQ ID NO: 5086 - protein, 898 aa, Artificial
  Synthetic
MGKGNHKSIAKASGLKSTFINGNEVTMTSFGKGNSAVLEKKIIDSEVEDLNPDKAFTVEENNVQKGKLRIKSNRMSDPATADNPVHVSPEKVGKSIKGQDIIGCKDVLEQRYFGQTFDDNIHIQLIYNILDIEKILAVHVTNATFAVNNIMRIEDTENEDFIGNLSSCNTYDSFRNYESDTNLSPNVKANLKRSNEFFDIIKKDTRLGYFGPAFYEKKGKNFVRKPDKSIYHVLALIGNLRQFVVHDTTIITGKEKSRSWLYNIDKQIGPEFIQTMTELYNAAVQNIDRDFIETNKVDIRIIHDAFYLIYGSSDWQKIAEEYYRFSIEKSYKNIGFSVKKLREEIISTYAVKFENHKYDSVRHKLNKIIDFLIFTSYSTDDISQKVSVLRTCMNDEEKEERFYKPEAKNIWDKFRDIFNEFIPERINGKAVSELKKEHFSHREINIDSLKISRKNPDSFSKLIYLLTLFLDGKEINDLLTTLINKFDNISSFISIMKEMNISCDFTDEYRFFNKSKYICSELRLINSFARMTSPVSLAKREMYREAVEILGTAGMNEDEKESLLDKVLCIDGNGKYISSKTDRNRDVNLRNFIANNVIESSRFKYLIRYNNAKKTRVLASNKTVVRFLLERIDELNEKQIDRYYETCSSDKTLKNKKDKIDFLTELIIKIDCSQFLKVKNRVRAGTAEAQEKERLKAVVGLYLTIMYIITKNMVYVNSRYVTAFHCLERDRVLLNAEKGDYCALTSLFLASENNAKYALGRNKRASIYIKHNCGTITKDFLVNYRNAIAHLSVVRNMESYISDIKYVDNYFALYHYTMQRWLFDQKAVTDQSPVFLKKYNNNLNEYHTYCKDFVKALNVPFAYNLARYKNLSIAELFDMNDTKTESSAKFGNEAIPVE

SEQ ID NO: 5087 - protein, 898 aa, Artificial; identical to SEQ ID NO: 5086
  Synthetic

SEQ ID NO: 5088 - protein, 898 aa, Artificial; identical to SEQ ID NO: 5086
  Synthetic

SEQ ID NO: 5089 - protein, 898 aa, Artificial; identical to SEQ ID NO: 5086
  Synthetic

SEQ ID NO: 5090 - protein, 547 aa, Artificial
  Synthetic
MAKKKKAKQRREEQEAARMNKIQSAVKAKAETAPAVSSAFVEKRKDKQSKKTFAKASGLKSTLAVDNSAVMTVFGRGNEAKLDHRINADLQSESLHPQAALKNVHAPNKQKIHFIGRMQDMNLTADHPLHSHDGERAVGADLLCAKDKLEQLYFGRTFNDNIHIQLIYQILDIQKILALHANNIIFALDNLLHKKNDELSDDFVGMGRMRATIGYDAFRNSTNQKVQETYREFQEFVRRKELLYFGSAFYNGDTRRDEKVIYHILSLAASVRQFCFHNDYTSDDGKGFIKADWMYRLEEALPAEYKDTLDALYLEGVEGLDQSFLKNNTVNIQILCSIFNHDDPNKIAEEYYGFLMTKEYKNMGFSIKKLRECMLELPELSGYKEDQYNSVRSKLYKLFDFIIAHYFRKHPEKGEEMVDCLRLCMTEDEKDSHYEGTAKKLVRELAYDMQEAAEQANGSNITQMQKNEQQGKTKGMFAIRDEIRVSRKPVSYFSKVIYVMTLLLDGKEINDLLTTLINKFENIVSFEDVLRQLNVDCTFKPEFAFFG

SEQ ID NO: 5091 - protein, 730 aa, Artificial
  Synthetic
MAKKKKAKQRREEQEAARMNKIQSAVKAKAETAPAVSSAFVEKRKDKQSKKTFAKASGLKSTLAVDNSAVMTVFGRGNEAKLDHRINADLQSESLHPQAALKNVHAPNKQKIHFIGRMQDMNLTADHPLHSHDGERAVGADLLCAKDKLEQLYFGRTFNDNIHIQLIYQILDIQKILALHANNIIFALDNLLHKKNDELSDDFVGMGRMRATIGYDAFRNSTNQKVQETYREFQEFVRRKELLYFGSAFYNGDTRRDEKVIYHILSLAASVRQFCFHNDYTSDDGKGFIKADWMYRLEEALPAEYKDTLDALYLEGVEGLDQSFLKNNTVNIQILCSIFNHDDPNKIAEEYYGFLMTKEYKNMGFSIKKLRECMLELPELSGYKEDQYNSVRSKLYKLFDFIIAHYFRKHPEKGEEMVDCLRLCMTEDEKDSHYEGTAKKLVRELAYDMQEAAEQANGSNITQMQKNEQQGKTKGMFAIRDEIRVSRKPVSYFSKVIYVMTLLLDGKEINDLLTTLINKFENIVSFEDVLRQLNVDCTFKPEFAFFGYDRCRNISGELRLINSFARMQKPSAKAKHVMYRDALRILGLDNGMSEEALDQEVRRILQIGADGKPIKNANKGFRNFIASNVIESSRFRYLVRYNNPHKTRMIAQNEAIVRFVLSEIPDEQIRRYYDVCRDPKLPRSSSREAQVDILTGIITDVNYRIFEDVPQSKKINKDRPDANDRMTLKK

SEQ ID NO: 5092 - protein, 594 aa, Artificial
  Synthetic
MAKKKKAKQRREEQEAARMNKIQSAVKAKAETAPAVSSAFVEKRKDKQSKKTFAKASGLKSTLAVDNSAVMTVFGRGNEAKLDHRINADLQSESLHPQAALKNVHAPNKQKIHFIGRMQDMNLTADHPLHSHDGERAVGADLLCAKDKLEQLYFGRTFNDNIHIQLIYQILDIQKILALHANNIIFALDNLLHKKNDELSDDFVGMGRMRATIGYDAFRNSTNQKVQETYREFQEFVRRKELLYFGSAFYNGDTRRDEKVIYHILSLAASVRQFCFHNDYTSDDGKGFIKADWMYRLEEALPAEYKDTLDALYLEGVEGLDQSFLKNNTVNIQILCSIFNHDDPNKIAEEYYGFLMTKEYKNMGFSIKKLRECMLELPELSGYKEDQYNSVRSKLYKLFDFIIAHYFRKHPEKGEEMVDCLRLCMTEDEKDSHYEGTAKKLVRELAYDMQEAAEQANGSNITQMQKNEQQGKTKGMFAIRDEIRVSRKPVSYFSKVIYVMTLLLDGKEINDLLTTLINKFENIVSFEDVLRQLNVDCTFKPEFAFFGYDRCRNISGELRLINSFARMQKPSAKAKHVMYRDALRILGLDNGMSE

SEQ ID NO: 5093 - protein, 877 aa, Artificial
  Synthetic
MKKQKSKKTVSKTSGLKEALSVQGTVIMTSFGKGNMANLSYKIPSSQKPQNLNSSAGLKNVEVSGKKIKFQGRHPKIATTDNPLFKPQPGMDLLCLKDKLEMHYFGKTFDDNIHIQLIYQILDIEKILAVHVNNIVFTLDNVLHPQKEELTEDFIGAGGWRINLDYQTLRGQTNKYDRFKNYIKRKELLYFGEAFYHENERRYEEDIFAILTLLSALRQFCFHSDLSSDESDHVNSFWLYQLEDQLSDEFKETLSILWEEVTERIDSEFLKTNTVNLHILCHVFPKESKETIVRAYYEFLIKKSFKNMGFSIKKLREIMLEQSDLKSFKEDKYNSVRAKLYKLFDFIITYYYDHHAFEKEALVSSLRSSLTEENKEEIYIKTARTLASALGADFKKAAADVNAKNIRDYQKKANDYRISFEDIKIGNTGIGYFSELIYMLTLLLDGKEINDLLTTLINKFDNIISFIDILKKLNLEFKFKPEYADFFNMTNCRYTLEELRVINSIARMQKPSADARKIMYRDALRILGMDNRPDEEIDRELERTMPVGADGKFIKGKQGFRNFIASNVIESSRFHYLVRYNNPHKTRTLVKNPNVVKFVLEGIPETQIKRYFDVCKGQEIPPTSDKSAQIDVLARIISSVDYKIFEDVPQSAKINKDDPSRNFSDALKKQRYQAIVSLYLTVMYLITKNLVYVNSRYVIAFHCLERDAFLHGVTLPKMNKKIVYSQLTTHLLTDKNYTTYGHLKNQKGHRKWYVLVKNNLQNSDITAVSSFRNIVAHISVVRNSNEYISGIGELHSYFELYHYLVQSMIAKNNWYDTSHQPKTAEYLNNLKKHHTYCKDFVKAYCIPFGYVVPRYKNLTINELFDRNNPNPEPKEEV

SEQ ID NO: 5094 - protein, 350 aa, Artificial
  Synthetic
MYRDALRILGLDNGMSEEALDQEVRRILQIGADGKPIKNANKGFRNFIASNVIESSRFRYLVRYNNPHKTRMIAQNEAIVRFVLSEIPDEQIRRYYDVCRDPKLPRSSSREAQVDILTGIITDVNYRIFEDVPQSKKINKDRPDANDRMTLKKQRYQAIVSLYLTVMYLVTKNLVYVNSRYVMAFHALERDAYLYGITNIKGDYRKLTDNLLADENYKKFGHFKNKKWRGIAEQNLRNSDVPVIKSFRNMAAHISVIRNIDLYIGDIQKVDSYFALYHFLMQKLIQRVVPENTKGLSDQTKKYYDALEQYNTYCKDFVKAYCTPFAYVTPRYKNLTIDGLFDRNRPGEDK

SEQ ID NO: 5095 - protein, 315 aa, Artificial
  Synthetic
MGKKIHARDLREQRKTDRTEKFADQNKKREAERAVQKKDAAVSVKSVSSVSSKKDNVTKSMAKAAGVKSVFAVGNTVYMTSFGRGNDAVLEQKIVDTSHEPLNIDDPAYQLNVVTMNGYSVTGHRGETVSAVTDNPLRRFNGGKKDEPEQSVPTDMLCLKPTLEKKFFGKEFNDNIHIQLIYNILDIEKILAVYSTNAVYALNNTIADENNENWDLFANFSTDNTYDELNAIATYKKSADDVSTDDEKRREAEKKKREAKIAEKILADYEKFRKNNRLAYFADAFYVDKNKSKSKPKDKAKGIQREKKKFILYLL

SEQ ID NO: 5096 - protein, 315 aa, Artificial; identical to SEQ ID NO: 5095
  Synthetic

SEQ ID NO: 5097 - protein, 315 aa, Artificial; identical to SEQ ID NO: 5095
  Synthetic

SEQ ID NO: 5098 - protein, 315 aa, Artificial; identical to SEQ ID NO: 5095
  Synthetic

SEQ ID NO: 5099 - protein, 315 aa, Artificial; identical to SEQ ID NO: 5095
  Synthetic

SEQ ID NO: 5100 - protein, 315 aa, Artificial; identical to SEQ ID NO: 5095
  Synthetic

SEQ ID NO: 5101 - protein, 315 aa, Artificial; identical to SEQ ID NO: 5095
  Synthetic

SEQ ID NO: 5102 - protein, 315 aa, Artificial; identical to SEQ ID NO: 5095
  Synthetic

SEQ ID NO: 5103 - protein, 315 aa, Artificial; identical to SEQ ID NO: 5095
  Synthetic

SEQ ID NO: 5104 - protein, 315 aa, Artificial; identical to SEQ ID NO: 5095
  Synthetic

SEQ ID NO: 5105 - protein, 315 aa, Artificial; identical to SEQ ID NO: 5095
  Synthetic

SEQ ID NO: 5106 - protein, 315 aa, Artificial; identical to SEQ ID NO: 5095
  Synthetic

SEQ ID NO: 5107 - protein, 315 aa, Artificial; identical to SEQ ID NO: 5095
  Synthetic

SEQ ID NO: 5108 - protein, 315 aa, Artificial; identical to SEQ ID NO: 5095
  Synthetic

SEQ ID NO: 5109 - protein, 315 aa, Artificial; identical to SEQ ID NO: 5095
  Synthetic

SEQ ID NO: 5110 - protein, 315 aa, Artificial; identical to SEQ ID NO: 5095
  Synthetic

SEQ ID NO: 5111 - protein, 315 aa, Artificial; identical to SEQ ID NO: 5095
  Synthetic

SEQ ID NO: 5112 - protein, 315 aa, Artificial; identical to SEQ ID NO: 5095
  Synthetic

SEQ ID NO: 5113 - protein, 315 aa, Artificial; identical to SEQ ID NO: 5095
  Synthetic

SEQ ID NO: 5114 - protein, 315 aa, Artificial; identical to SEQ ID NO: 5095
  Synthetic

SEQ ID NO: 5115 - protein, 315 aa, Artificial
  Synthetic
MGKKIHARDLREQRKTDRTEKFADQNKKREAERAVQKKDAAVSVKSVSSVSSKKDNVTKSMAKAAGVKSVFAVGNTVYMTSFGRGNDAVLEQKIVDTSHEPLNIDDPAYQLNVVTMNGYSVTGHRGETVSAVTDNPLRRFNGGKKDEPEQSVPTDMLCLKPTLEKKIFGKEFNDNIHIQLIYNILDIEKILAVYSTNAVYALNNTIADENNENWDLFANFSTDNTYDELNAIATYKKSADDVSTDDEKRREAEKKKREAKIAEKILADYEKFRKNNRLAYFADAFYVDKNKSKSKPKDKAKGIQREKKKFILYLL

SEQ ID NO: 5116 - protein, 544 aa, Artificial
  Synthetic
  misc_feature (2)..(28): Xaa can be any naturally occurring amino acid
  misc_feature (517)..(532): Xaa can be any naturally occurring amino acid
MXXXXXXXXXXXXXXXXXXXXXXXXXXXPVMGKKIHARDLREQRKTDRTVKFADQNKKREAERAVQKKDAAVSVKSVPSVSSKKDNVTKSMAKAAGVKSVFAVGNTVYMTSFGRGNDAVLEQKIVDTSHEPLNIDDPAYQLNVVTMNGYSVIGHRGETVSAVTDNPLRRFNGGKKDEPEQSVPTDMLCLKPTLEKKFFGKEFDDNIHIQLIYNILDIEKILAVYSTNAIYALNNTIADENDENWDLFANFSTDNTYYELRNAAAYKESADDESTDDEKRREAEKKKREAKKAEKILADYEKFRKNNRLAYFADAFYVDKNKSKSKSKDKAEGIQRGKKEIYSILALIAKLRHWCVHSEDGRAEFWLYKLDELKDDFKNVLDVVYNRPVEEINNRFIENNKVNIQILDSVYENTDIAELTRSYYEFLITKKYKNMGFSIKKLREIILEGTEYNDNKYDTVRNKLYQIVDFILYRGYINENSERAEVLVNALRSTLNEDDKTKLYSSEAAFLKKKYMKXXXXXXXXXXXXXXXXIYENYQKISRFA

SEQ ID NO: 5117 - protein, 710 aa, Artificial
  Synthetic
MLCLKPTLEKKFFGKEFNDNIHIQLIYNILDIEKILAVYSTNAIYALNNMSADENIENSDFFMKRTTDETFDDFEKKKESTNSREKADFDAFEKFIGNYRLAYFADAFYVDKNKSKSKPKDKAKGIQRGEKEIYSILALIAKLRHWCVHSEEGRAEFWLYKLDELKSDFKNVLDVVYNRPVEKINNRFIENNKVNIQILGSVYKNTDIAELVRSYYEFLITKKYKNMGFSIKKLRESMLEGKGYADKEYDSVRNKLYQMTDFILYTGYINEDSDRADDLVNTLRSSLKEDDKTTVYCKEADYLWKKYRESIREVAASLDVKNINELKNNAFTIPDNELRKCFISYADSVSEFTKLIYLLTRFLSGKEINDLVTTLINKFDNIRSFLEVMDELGLERTFTDEYSFFEGSTKYLAELVELNSFVKSCSFDINAKRTMYRDALDILGIESGKTEEDIEKMIDNIVQFDANGKKLPNKNHGLRNFIASNVIDSNRFEYLVRYGNPKKIRETAKCKPAVRFVLNEIPDAQIERYYKACYPDEKSLCFANMQRDKLAGVIANIKFDDFSDAGSYQKANATSTKITSEAEIKRKNQAIIRLYLTVMYIMLKNLVNVNARYVIAFHCVERDTKLYAESGLEVGNIEKNKTNLTMAVMGVKLENGIIKTEFDKSLAENAANRYFRNARWYKLILDNLKKSERAVVRYFVIIYLKSADLP

SEQ ID NO: 5118 - protein, 710 aa, Artificial
  Synthetic
MLCLKPTLEKKFFGKEFNDNIHIQLIYNILDIEKILAVYSTNAIYALNNMSADENIENSDFFMKRTTDETFDDVEKKKESTNSREKADFDAFEKFIGNYRLAYFADAFYVDKNKSKSKPKDKAKGIQRGEKEIYSILALIAKLRHWCVHSEEGRAEFWLYKLDELKSDFKNVLDVVYNRPVEKINNRFIENNKVNIQILGSVYKNTDIAELVRSYYEFLITKKYKNMGFSIKKLRESMLEGKGYADKEYDSVRNKLYQMTDFILYTGYINEDSDRADDLVNTLRSSLKEDDKTTVYCKEADYLWKKYRESIREVAASLDVKNINELKNNAFTIPDNELRKCFISYADSVSEFTKLIYLLTRFLSGKEINDLVTTLINKFDNIRSFLEVMDELGLERTFTDEYSFFEGSTKYLAELVELNSFVKSCSFDINAKRTMYRDALDILGIESGKTEEDIEKMIDNIVQFDANGKKLPNKNHGLRNFIASNVIDSNRFEYLVRYGNPKKIRETAKCKPAVRFVLNEIPDAQIERYYKACYPDEKSLCFANMQRDKLAGVIANIKFDDFSDAGSYQKANATSTKITSEAEIKRKNQAIIRLYLTVMYIMLKNLVNVNARYVIAFHCVERDTKLYAESGLEVGNIEKNKTNLTMAVMGVKLENGIIKTEFDKSLAENAANRYFRNARWYKLILDNLKKSERAVVRYFVIIYLKSADLP

SEQ ID NO: 5119 - protein, 324 aa, Artificial
  Synthetic
LIHALNNMSADENIENSDFFMKRTTDETFDDFEKKKESTNSREKADFDAFEKFIGNYRLAYFADAFYVDKNKSKSKPKDKAKGIQRGEKEIYSILALIAKLRHWCVHSEEGRAEFWLYKLDELKSDFKNVLDVVYNRPVEKINNRFIENNKVNIQILGSVYKNTDIAELVRSYYEFLITKKYKNMGFSIKKLRESMLEGKGYADKEYDSVRNKLYQMTDFILYTGYINEDSDRADDLVNTLRSSLKEDDKTTVYCKEADYLWKKYRESIREVAASLDVKNINELKNNAFTIPDNELRKCFISYADSVSEFTKLIYLLTRFLSGK

SEQ ID NO: 5120 - protein, 879 aa, Artificial
  Synthetic
LEHIALCAGVAVVFLALSLFDNYRTCAITEKYTACSVRIVYLTCQTLAGYNQHRLVGIVCKEVSCNVNRCYKACAGSIYIHAGTGLCADQILYKAGCVRIIEVGRAGRNYDAVDTSHEPLNIDDPAYQLNVVTMNGYSVTGHRGETVSAVTDNPLRRFNGGKKDEPEQSVPTDMLCLKPTLEKKFFGKEFDDNIHIQLIYNILDIEKILAVYSTNAIYALNNMSADENIENSDFFMKRTTDETFDDFEKKKESTNSREKADFDAFEKFIGNYRLAYFADAFYVNKKNPKGKARNVLREDKELYSVLTLIGKLRHWCVHSEEGRAEFWLYKLDELKDDFKNVLDVVYNRPVEEINNRFIENNKVNIQILGSVYKNTDIAELVRSYYEFLITKKYKNMGFSIKKLRESMLEGKGYADKEYDSVRNKLYQMTDFILYTGYINEDSDRADDLVNTLRSSLKEDDKTTVYCKEADYLWKKYRESIREVADALDGDNIKRLSKSNIEIQEDKLRKCFISYADSVSEFTKLIYLLTRFLSGKEINDLVTTLINKFDNIRSFLEIMDELGLDRTFTAEYSFFEDSTKYLAELVELNSFVKSCSFDINAKRTMYRDALDILGIKSGKTEEDIEKMIDNILQIDANGDKKLKKNNGLRNFIASNVIDSNRFKYLVRYGNPKKIRETAKCKPAVRFVLNEIPDAQIERYYEACCPENTALCSANKKREKLADMIAEIEFENFSDAGNYQKANVTSKTHEAEIKRKNQSIIRLYLTVMYIMLKNLVNVNARYVIAFHCVERDTKLYAESGLEVGNIEKNKTNLTMAVMGVKLENGIIKTEFDKSFAENAANRYLRNARWYKLILDNLKKSERAVVNEFRNTVCHLNAIRNI

SEQ ID NO: 5121 - protein, 844 aa, Artificial
  Synthetic
MGKKVHARDLRNQKVLEQKAKYAKQNIEREAQKAVQKNEVSSTAKSANAVLSENNKTGKSKAKAAGVKSVFAVGNTVYMTSFGRGNDAVLEQKIIDTSHQPLNVDDPAYKLTDVTVTSYFVEGHRGETVSAVTDNPLCRFNGKKHRDENQGEPVQSVPTDMLCLKSSLEKKFFGKEFNDNIHIQLIYNILDIEKILAVYSTNAIYALNNMSADKNVENSDFFMKRTTDETFDDFEKKKESTNSREKADFDAFEKFIGNYRLAYFADAFYVNKKNPKGKVRNVLREDKELYSVLTLIGKLRHWCVHSEEGRAEFWLYRLDELKSDFKNVLDSVYNRPVEEINDDFVERNKVNIQILHSIYENTDIAELVRSYYEFLITKKYKNMGFSIKKLRESMLEGKGYADKEYDSVRNKLYQMTDFILYTGYINEDSDRANDLVNTLRSSLKEDDKTTVYCKEADYLWEKYRKSIKEVADALDGDNIKRLSKSNIEIQEDELRKCFIGYADSVSEFTKLIYLMTRFLSGKEINDLVTTLINKFDNIRSFLEVMDELGLERTFTDEYRFFEGSTKYLAELVELNSFVKSCSFDINAKRTMYRDALDILGIKSGKTEEDIEKMIDNILQIDANGDKKLKKNNGLRNFIASNVIDSNRFKYLVRYGNPKKIRETAKCKPAVRFVLNEIPDAQIERYYEACCPENTALCSANKRREKLADMIAEIEFENFSDAGNYQKANVTSKTHEAEIKRKNQSIIRLYLTVMYIMLKNLVNVNDRYVIAFHCVERDTKLYVESGLEVGNIEKNKTNLTMAVMGVKLENGIIKTEFDKSLAENAANRYLRNARWYKLILDNLKK

SEQ ID NO: 5122 - protein, 817 aa, Artificial
  Synthetic
MGKKIHARDLREQRKTDRTEKFADQNKKREAERAVQKKDAAVSVKSVSSVSSKKDNVTKSMAKAAGVKSVFAVGNTVYMTSFGRGNDAVLEQKIVDTSHEPLNIDDPAYQLNVVTMNGYSVTGHRGETVSAVTDNPLRRFNGGKKDEPEQSVPTDMLCLKPTLEKKFFGKEFNDNIHIQLIYNILDIEKILAVYSTNAIYALNNMSADENIENSDFFMKRTTDETFDDFEKKKESTNSREKADFDAFEKFIGNYRLAYFADAFYVNKKNPKGKARNVLREDKELYSVLTLIGKLRHWCVHSEEGRAEFWLYKLDELKDDFKNVLDVVYNRPVEEINNRFIENNKVNIQILGSVYKNTDIAELVRSYYEFLITKKYKNMGFSIKKLRESMLEGKGYADKEYDSVRNKLYQMTDFILYTGYINEDSDRADDLVNTLRSSLKEDDKTTVYCKEADYLWKKYRESIREVADALDGDNIKRLSKSNIEIQEDKLRKCFISYADSVSEFTKLIYLLTRFLSGKEINDLVTTLINKFDNIRSFLEIMDELGLDRTFTAEYSFFEGSTKYLAELVELNSFVKSCSFDINAKRTMYRDALDILGIKSGKTEEDIEKMIDNILQIDANGDKKLKKNNGLRNFIASNVIDSNRFKYLVRYGNPKKIRETAKCKPAVRFVLNEIPDAQIERYYEACCPKNTALCSANKRREKLADMIAEIEFENFSDAGNYQKANVTSRTSEAEIKRKNQAIIRLYLTVMYIMLKNLVNVNARYVIAFHCVERDTKLYAESGLEVGNIEKNKRHIVKNKLLNKHKADLVCRRQINDTGK

SEQ ID NO: 5123 - protein, 880 aa, Artificial
  Synthetic
MGKKIHARDLRERRKTDRTEKFADQNKKREAERAVQKKDAAVSVKSVSSVSSKKDNVTKSMAKAAGVKSVFAVGNTVYMTSFGRGNDAVLEQKIVDTSHEPLNIDDPAYQLNVVTMNGYSVTGHRGETVSAVTDNPLRRFNGGKKDEPEQSVPTDMLCLKPTLEKKFFGKEFDDNIHIQLIYNILDIEKILAVYSTNAIYALNNMSADENIESSDFFMKRTTDETFDDFEKKKESTNSREKADFDAFEKFIGNYRLAYFADAFYVNKKNPKGKARNVLREDKELYSVLTLIGKLRHWCVHSEEGRAEFWLYKLDELKDDFKNVLDVVYNRPVEEINNRFIENNKVNIQILGSVYKNTDIAELVRSYYEFLITKKYKNMGFSIKKLRESMLEGKGYADKEYDSVRNKLYQMTDFILYTGYINEDSDRADDLVNTLRSSLKEDDKTTVYCKEADYLWKKYRESIREVADALDGDNIKRLSKSNIEIQEDKLRKCFISYADSVSEFTKLIYLLTRFLSGKEINDLVTTLINKFDNIRSFLEIMDELGLDRTFTAEYSFFEGSTKYLAELVELNSFVKSCSFDINAKRTMYRDALDILGIKSGKTEEDIEKMIDNILQIDANGDKKLKKNNGLRNFIASNVIDSNRFKYLVRYGNPKKIRETAKCKPAVRFVLNEIPDAQIERYYEACCPKNTALCSANKRREKLADMIAEIEFENFSDAGNYQKANVTSRTSEAEIKRKNQAIIRLYLTVMYIMLKNLVNVNARYVIAFHCVERDTKLYAESGLEVGNIEKNKTNLTMAVMGVKIENGIIKTEFDKSLAENAANRYLRNARWYKLILDNLKKSERAVVNEFRNTVCHLNAIRNININSDGIKEVENYVALYHY

SEQ ID NO: 5124 - protein, 757 aa, Artificial
  Synthetic
MGKKIHARDLREQRKTDRTEKFADQNKKREAERAVQKKDAAVSVKSVSSVSSKKDNATKSMAKAAGVKSVFAVGNTVYMTSFGRGNDAVLEQKIVDTSHEPLNIDDPAYQLNVVTMNGYSVTGHRGETVSAVTDNPLRRFNGGKKDEPEQSVPTDMLCLKPTLEKKFFGKEFDDNIHIQLIYNILDIEKILAVYSTNAIYALNNMSADENIENSDFFMKRTTDETFDDFEKKKESTNSREKADFDAFEKFIANYRLAYFADAFYVNKKNPKGKARNVLREDKELYSVLTLIGKLRHWCVHSEEGRAEFWLYKLDELKDDFKNVLDVVYNRPVEEINNRFIENNKVNIQILGSVYKNTDIAELVRSYYEFLITKKYKNMGFSIKKLRESMLEGKGYADKEYDSVRNKLYQMTDFILYTGYINEDSDRADDLVNTLRSSLKEDDKTTVYCKEADYLWKKYCESIREVAEALDGDNIKRLSKSNIEIRDNELRKCFISYADSVSEFTKLIYLLTRFLSGKEINDLVTTLINKFDNIRSFLEIMDELGLDRTFTAEYSFFEDSTKYLAELVELNSFVKSCSFDINAKRTMYRDALDILGIKSGKTEEDIEKMIDNILQIDANGDKKLKKNNGLRNFIASNVIDSNRFKYLVRYGNPKKIRETAKCKPAVRFVLNEIPDAQIERYYEACCPKNTALCSANKRREKLADMIAEIKFENFSDAGNYQKANVTSKTHEAEIKRKNQAIIRLYLTCLLYTSPSPRD

SEQ ID NO: 5125 - protein, 666 aa, Artificial
  Synthetic
LYKLDELKDDFKNVLDVVYNRPVEEINNRFIENNKVNIQILGSVHEDTDIAELTRSYYEFLITKKYKNMGFSIKKLREIILEGTEYNDNKYDTVRNKLYQIVDFILYRGYINENSERAEVLVNALRSTLNEDDKTKLYSSEAAFLKKKYMKIIRKAADSLDVKKLKDLKKKAFTIPDNELRKCFISYADSVSEFTKLIYLLTRFLSGKEINDLVTTLINKFDNIRSFLEIMDELGLERTFTDEYRFFEGSTKYLAELVELNSFVKSCSFDMSAKRTMYRDALDILGIESDKTEEDIEKMIDNILQVDANGKKLPNKNHGLRNFIASNVIDSNRFEYLVRYGNPKKIRETAKCEPAVRFVLNEIPDAQIERYYKAYYPDEKSLCLANMQRDKLAGVIADIKFDDFSDAGSYQKANATSTRRTSEAEIKRKNQAIIRLYLTVMYIMLKNLVNVNARYVIAFHCLERDAKLYSESVLKVGNTNEESRLQTGNTNEEKNKVKLTNLTNLTMAVMGVKLENGTIKTEFDKSLAENAANRYLRNARWYKLILDNLKKSERAVVTEFRNTVCHLNAIRNININIKEVKEVENYFALYHYLIQKHLENRFADKKVERDTGDFISKLEEHKTYCKDFVKAYCTPFGYNLVRYKNLTIDGLFDKNYPGKDDSDKQK

SEQ ID NO: 5126 - protein, 666 aa, Artificial; identical to SEQ ID NO: 5125
  Synthetic

SEQ ID NO: 5127 - protein, 666 aa, Artificial; identical to SEQ ID NO: 5125
  Synthetic

SEQ ID NO: 5128 - protein, 666 aa, Artificial; identical to SEQ ID NO: 5125
  Synthetic

SEQ ID NO: 5129 - protein, 666 aa, Artificial; identical to SEQ ID NO: 5125
  Synthetic

SEQ ID NO: 5130 - protein, 666 aa, Artificial; identical to SEQ ID NO: 5125
  Synthetic

SEQ ID NO: 5131 - protein, 666 aa, Artificial; identical to SEQ ID NO: 5125
  Synthetic

SEQ ID NO: 5132 - protein, 666 aa, Artificial; identical to SEQ ID NO: 5125
  Synthetic

SEQ ID NO: 5133 - protein, 666 aa, Artificial; identical to SEQ ID NO: 5125
  Synthetic

SEQ ID NO: 5134 - protein, 666 aa, Artificial; identical to SEQ ID NO: 5125
  Synthetic

SEQ ID NO: 5135 - protein, 666 aa, Artificial; identical to SEQ ID NO: 5125
  Synthetic

SEQ ID NO: 5136 - protein, 666 aa, Artificial; identical to SEQ ID NO: 5125
  Synthetic

SEQ ID NO: 5137 - protein, 666 aa, Artificial; identical to SEQ ID NO: 5125
  Synthetic

SEQ ID NO: 5138 - protein, 666 aa, Artificial; identical to SEQ ID NO: 5125
  Synthetic

SEQ ID NO: 5139 - protein, 666 aa, Artificial; identical to SEQ ID NO: 5125
  Synthetic

SEQ ID NO: 5140 - protein, 666 aa, Artificial; identical to SEQ ID NO: 5125
  Synthetic

SEQ ID NO: 5141 - protein, 666 aa, Artificial; identical to SEQ ID NO: 5125
  Synthetic

SEQ ID NO: 5142 - protein, 666 aa, Artificial; identical to SEQ ID NO: 5125
  Synthetic

SEQ ID NO: 5143 - protein, 666 aa, Artificial; identical to SEQ ID NO: 5125
  Synthetic

SEQ ID NO: 5144 - protein, 661 aa, Artificial
  Synthetic
LYKLDELKDDFKNVLDVVYNRPVEEINNRFIENNKVNIQILGSVHEDTDIAELTRSYYEFLITKKYKNMGFSIKKLREIILEGTEYNDNKYDTVRNKLYQIVDFILYRGYINENSERAEVLVNALRSTLNEDDKTKLYSSEAAFLKKKYMKIIRKAADSLDVKKLKDLKKKAFTIPDNELRKCFISYADSVSEFTKLIYLLTRFLSGKEINDLVTTLINKFDNIRSFLEIMDELGLERTFTDEYRFFEGSTKYLAELVELNSFVKSCSFDMSAKRTMYRDALDILGIESDKTEEDIEKMIDNILQVDANGKKLPNKNHGLRNFIASNVIDSNRFEYLVRYGNPKKIRETAKCEPAVRFVLNEIPDAQIERYYKAYYPDEKSLCLANMQRDKLAGVIADISDAGSYQKANATSTRRTSEAEIKRKNQAIIRLYLTVMYIMLKNLVNVNARYVIAFHCLERDAKLYSESVLKVGNTNEESRLQTGNTNEEKNKVKLTNLTNLTMAVMGVKLENGTIKTEFDKSLAENAANRYLRNARWYKLILDNLKKSERAVVTEFRNTVCHLNAIRNININIKEVKEVENYFALYHYLIQKHLENRFADKKVERDTGDFISKLEEHKTYCKDFVKAYCTPFGYNLVRYKNLTIDGLFDKNYPGKDDSDKQK

SEQ ID NO: 5145 - protein, 894 aa, Artificial
  Synthetic
LAKAAGLKSTFVISPQEKELAMTAFGRGNDALLQKRIVDGVVRDVAGEKQQFQVQRQDESRFRLQNSRLADRTVTADDPLHRAETPRRQPLGAGMDQLRRKAILEQKYFGRTFDDNIHIQLIYNILDIHKMLAVPANHIVHTLNLLGGYGETDFMGMLPAGLPYDKLRVVKKKNGDTVDIKADIAAYAKRPQLAYLGAAFYDVTPGKSKRDAARGRVKREQDVYTILSLMSLLRQFCAHDSVRIWGQNTPAALYHLQALPQDMKDLLDDSWRRALGGVNDHFLDTNKVNLLTLFEYYGAETKQARVALTQDFYRFVVLKEQKNMGFSLRRLREELLKLPDAAYLTGQEYDSVRQKLYMLLDFLLCRLYAQERADRCEELVSALRCALSDEEKDTVYQAEAAALWQALGDTLRRELLPLLKGKKLQDKDKKKPDELGLSRDVLDGVLFRPAQQGNRANADYFCRLMHLSTWFMDGKEINTLLTTLISKFENIDSLRNVLESMGLACSFVPAYAMFDHSRYIAGQLRVVNNIARMRKPAIGAKREMYRAAVVLLGVDSPEAAAAITDDLLQIDPETGKVRPRGDSARDTGLRNFIANNVVESRRFTYLLRYMTPEQARVLAQNEKLIAFVLSTVPDTQLERYCRTCGREDITDRPAQIRYLTAQIMGVRYESFTDVEQRGRGDNPKKERYKALIGLYLTVLYLAVKNMVNCNARYVIAFYCRDRDTALYQKEVCWYDLEEDKKSGKQRQVEDYTALTRYFVSQGYLNRHACGYLRSNMNGIGNGLLTAYRNAVDHLNVIPPLGSLCRDIGRVDSYFALYHYAVQQYLNGRYYRKTPREQELFAAMAQHRTWCSDLVKALNTPFGYNLARYKNLSIDGLFDREGDHVVREDGEKPAE

SEQ ID NO: 5146 - protein, 894 aa, Artificial; identical to SEQ ID NO: 5145
  Synthetic

SEQ ID NO: 5147 - protein, 454 aa, Artificial
  Synthetic
LKRMLLCAIIQASTKRDRKGGVRMEREVKKPPKKSLAKAAGLKSTFVISPQEKELAMTAFGRGNDALLQKRIVDGVVRDVAGEKQQFQVQRQDESRFRLQNSRLADRTVTADDPLHRAEAPHRQPLGAGMDQLRRKAVLEQKYFGRTFDDNIHIQLIYNILDIHKMLAVPANHIVHTLNLLGGYGETDFVGMLPAGLPYDKLWTPKAGDTSRNVKRDVKADIAAYAKRPQLAYLGAAFYDVTPGKSKRDAARGRVKREQDVYTILSLMSLLRQFCAHDSVRIWGQNTPAALYHLQALPQDMKDLLDDGWRRALGGVNDHFLDTNKVNLLTLFEYYGAETKQERVALTQDFYRFVVLKEQKNMGFSLRRLREELLKLPDAAYLTGQEYDSVRQKLYMLLDFLLCRLYAQERADRCEELVSALRCALSDEEKDAVYQAEAAALWQALGDTLRRELL

SEQ ID NO: 5148 - protein, 895 aa, Artificial
  Synthetic
MLPFFRPQRRTTVMTAFGQGSTAILEKQIVDRAISDLQPVQQFQVEPASAAKYRLKNSRVRFPDVTADDPLYRRKDGGFVPGMDALRRKNVLEQRFFGRSFADNIHIQMIYSILDIHKILAAASGHIVHLLNIVKGDADRDFLGMLAAHVSYDKLNEKAEKSIADFCKSPRLIYYSAAFYETLDNGKSERRSNEDIFNILALMTCLRNFSSHHSIAIKVRDYSAAGLYNLRRLGTDMKKMLDTFYTEAFRQLNRSFQDHNTTNLTCLFDILNISDSARQKQLAEEFYRYVVFKEQKNLGFSVRKLREEMLLLPDAAVIADKRYDTCRSKLYNLMDFLILRVYRTGRADRCDKLTEALRAALTDEEKAAVYHEEALSLWNEMRTLILDGLLPQMTPENLSRLSGQKRKGELSLDGAMLKECLYEPGPVPEDAAPEEANAEYFCRMIYLATLFMDGKEINTLLTTLISKFENIAAFLQTMEQMNIEAELGPEYAIFTRSRAVAEQLRVINSFALMKKPQVNAKQQLYRAAVTLLGTEDPDGVTDEMLRIDPVTGKMLPLNRRHHGDTGLRNFIANNVVESRRFQYLIRYSDPAQLHQLASNKKLVRFVLSGIPDTQINRYYETCGQTRPAGRAAKVEFLTGMIAAIRFDQFRDVNQKERGANTQKERYKAMLGLYQTVLYLAVKNLVNINARYVMAFHCVERDMFLYDGELTDPKGSNVPAFLAVNGRDGVQPQYLLLTQLFIQRGYLKRSACEQIQHNMTNISDRLLREYRNAVAHLNVIAHLADYSADMREITSYYGLYHYLMQRHLFKRHAWQVRRPERPTEEEEKRIEQEQKQLAWERALFDKTLQYHSYNKDLVKALNAPFGYNLARYKNLSIEQLFSKDAAPATEIKANRA

SEQ ID NO: 5149 - protein, 629 aa, Artificial
  Synthetic
MAKKLNAKEKRLLSQQAQKDKYKKMEEERQAAEQARLAEEARQKAETERKKKEALEKEAREKLEKELLEKNPSLKKVKKSKAKAAGLKSTFAIGNELLMTSFGKGNEAVPEHYIFENGMISMQNPPAFDVENRGTSFSIAGKNAMNAIADDPRRTSKKVIGEDLIGAKSALEKRYFGKTFEDNIHIQLIYNILDIEKILSKHINNIVFSINNIRGIADPERDDLIGYMSLRDSYEYFMDEKNEKRKVLRESYRKLFKSSRLSYFGSAFYVEKQSTQKKKSGQKNFELRNEKDCYYMLALLGELRQVLAHSSAQKQGKEQTEARSSVYNLRTVGNNDMRKILNSLYAERVDALNENFMNYAKKDLTILFGIMDASSYEKKAEIARDFYDFTVRKSYKNIGFSIKKIRERMMDCFFANVKEITPDSPDFQSVRQKFYKILDFLLFTYYKDNKEETKKIIAALRASLTELEKELFYQKQANILWNKMQMVVTEQIYPRTKGSAIQNLIADPEISADMLKGVMITPESVDYFSKMIYLLTLFIDGKEINDLLTTMINKFENIASFVSVLKDRGLPCNFRNDYSVFNNALKISAELREINSFARMEKATPGAKKQMFLDAAIILGSNESAEELS

SEQ ID NO: 5150 - protein, 721 aa, Artificial
  Synthetic
VKKIPQLAYFGSAFYNTPEDTSAKITKTKIKSNEEIYYTFMLLSTARNFSAHYLDRNRAKSSDAEDFDGTSVIMYNLDNEELYKKLYNKKVHMALTGMKKVLDANFNKKVEHLNNSFIKNSAKDFVILCEVLGIKSRDEKTKFVKDYYDFVVRKNYKHLGFSVKELRELLFANHDSNKYIKEFDKISNKKFDSVRSRLNRLADYIIYDYYNKNNAKVSDLVKYLRAAADDEQKKKIYLNESINLVKSGILERIKKILPKLNGKIIGNMQPDSTITASMLHNTGKDWHPISENAHYFTKWIYTLTLFMDGKEINDLVTTLINKFDNIASFIEVLKSQSVCTHFSEERKMFIDSAEICSELSAMNSFARMEAPGASSKRAMFVEAARILGDNRSKEELEEYFDTLFDKSASKKEKGFRNFIRNNVVDSNRFKYLTRYTDTSSVKAFSNNKALVKFAIKDIPQEQILRYYNSCFGASERYYNDGMSDKLVEAIGKINLMQFNGVIQQADRNMLPEEKKKANAQKEKYKSIIRLYLTVCYLFFKNLVYVNSRYYSAFYNLEKDRSLFEINGELKPTGKFDEGHYTGLVKLFIDNGWINPRASAYLTVNLANSDETAIRTFRNTAEHLEALRNADKYLNDLKQFDSYFEIYHYITQRNIKEKCEMLKEQTVKYNNDLLKYHGYSKDFVKALCVPFGYNLPRFKNLSIDALFDKNDKREKLKKGFED

SEQ ID NO: 5151 - protein, 886 aa, Artificial
  Synthetic
MEGINMGRKVHFAKAAGLKSAFAIGNDKVIVTSFGKGNDAILEKTIENDKVINIEQNIDIELMKRDFNVKRRGDHGRPIITNNPGNREKIGKDMIDRKDQLEMRYFGRTFDDNIHIQLIYNIMDIEKILSIHVNNALYALNNVLNRGSGDFNDTIGMMLAKPYDVFRNSEKYANFNENIKKPQLSYFGGAFFETGFNTKAQKRKTEKKSEKDIYYIISLLGFIRQAAVHGYDWNKTDEAAVALYTLDESFDKLYKNTKFRQEARRALDNLYDTRIDALNSQFLENASKDLTIIFKIYSVTDRSSKIKLIRQYYDFVVKKEYKYLGFSIKQLREMIADDNSIIKSKNYDTMRARLNRLIDFVIYINYIENPEKAKKLVENLRSHIGDDEKSRIYASEAKQLWQLLKGPVMDGILPQMNGKTISSMRADTVISETSVERMKNKTWEPIGKSAHYFIKLVYLLTLFLDGKEINDLVTTLINKMDNISSFNKLLENIDSKPPYEEEYVIFADSVIIADDLRVLNSFARMEKPDASAKRIMFVEAAQMLGDKGTEQELTKYFDDLMDRNSSKEQKGFRNFIRNNVIESSRFKYLVRYCSVEDVIKFSKNKALIKFVLKEIPENQILRYYNSCTGNECREFSSEMTLKLAELIENMSFEQFENVRQNARRNSSEETDKLQKQNIIRLYLTVCYIFFKNLIYVNSRYFLAFYCLERDLRLWDIFENEQSYLMLTEKFMELGKVRKTAKKSKVKNSGEPSYEDAKHIPYNYIAANLRNADNVAIRKFRNITDHIITVQEAGLYLQDIKNPESYYQIYHYIAQRNLCDKLKNSNITEKTKEYFALVKNHGSYCKDFVKALCVPFGYNLPRFKNLSIDGLFDMNDKRENRDTTTEG

SEQ ID NO: 5152 - protein, 886 aa, Artificial
  Synthetic
MEGINMGRKVHFAKAAGLKSAFAIGNDKVIVTSFGKGNDAILEKTIENDKVINIEQNIDIELMKRDFNVKRRGDHGRPIITNNPGNREKIGKDMIDRKDQLEMRYFGRTFDDNIHIQLIYNIMDIEKILSIHVNNALYALNNVLNRGSGDFNDTIGMMLAKPYDVFRNSEKYANFNENIKKPQLSYFGGAFFETGFNTKAQKRKTEKKSEKDIYYIISLLGFIRQAAVHGYDWNKTDEAAVALYTLDESFDKLYKNTKFRQEARRALDNLYDTRIDALNSQFLENASKDLTIIFKIYSVTDRSSKIKLIRQYYDFVVKKEYKYLGFSIKQLREMIADDNSIIKSKNYDTMRARLNRLIDFVIYINYIENPEKAKKLVENLRSHIGDDEKSRIYASEAKQLWQLLKGPVMDGILPQMNGKTISSMRADTVISETSVERMKNKTWEPIGKSAHYFIKLVYLLTLFLDGKEINDLVTTLINKMDNISSFNKLLENIDSKPPYEEEYVIFADSGIMAGELRGLNSFARMEKPDASAKRIMFVEAAQMLGDKGTEQELTKYFDDLMDRNSSKEQKGFRNFIRNNVIESSRFKYLVRYCSVEDVIKFSKNKALIKFVLKEIPENQILRYYNSCTGNECREFSSEMTLKLAELIENMSFEQFENVRQNARRNSSEETDKLQKQNIIRLYLTVCYIFFKNLIYVNSRYFLAFYCLERDLRLWDIFENEQSYLMLTEKFMELGKVRKTAKKSKVKNSGEPSYEDAKHIPYNYIAANLRNADNVAIRKFRNITDHIITVQEAGLYLQDIKNPESYYQIYHYIAQRNLCDKLKNSNITEKTKEYFALVKNHGSYCKDFVKALCVPFGYNLPRFKNLSIDGLFDMNDKRENRDTTTEG

SEQ ID NO: 5153 - protein, 886 aa, Artificial; identical to SEQ ID NO: 5152
  Synthetic

SEQ ID NO: 5154 - protein, 636 aa, Artificial
  Synthetic
MENKENIGKVENQNQKKRSGAKASGLKSTFALGENRVLMTSFGKGNEAIPEKLIVDGAVTDYEKNLEVTPLKKDFKVKGKHFNNPIVASDPYRRTKVGKDVIDRKEVLEQKYYGRTFDDNIHIQLIYNIMDVEKILSVHINNILYGLNNVLNRNSDDASDIIGMMRAKPYNDFCVANDKYEQFKGNLENSQLSYYGTAFYKTGFDIKAKKERVLKRDEKDIYYILSLLSTVRQFLAHKSDDNRNSKEDNYQVALYTFDEEFDDLYKEKNIVFRKDARKVLDGLYDSRVISLNESFLKNAKKDLTILFKAYGIENRGDKMKIIREYYDFLIRKSYKNLGFSLKLLRECIISENKWIADKKYDTMRSRLNRLFDFVTYKYYEDNQTRATVLVEKLRAHSVQKEKDRIYADEALVLWNGVKSIICNKIKEELNGKNLATMRIDPAIGETSIERLTVLAWKPIGTNATYFTKIVYLLTLFLDGKEINDMVTTLINKFENIASFNEVLSSTECKTQINREYSIFENSNEVSKELRVLNSFARMEMPDASTNREMFVEAAKILGYDADRKNLEKYFDTLLDKNASKAEKGFRNFIRNNVINSLRFKYLIKYCNVEDVKCFSKNKFLVEFVKKNIPEAQILRY

SEQ ID NO: 5155 - protein, 590 aa, Artificial
  Synthetic
MEKMEKIRKSENRKSRAKAAGLKSTFVVADKLALTSFGKGNKANLEKIIKNEEVEEINKPPKFDAKVEEKQIHIIGKTIKDGITEKPAGMRNDLIGAKQELEKMFFGKTFDDNIHIQLIYNILDIKKIFSVYANNIVYAVDHLDRTAKDKDVDYLGTLFTGNTYQHLLSVNPGDSKYKLKKDALKRFNTYYESAKSHFIYFGDVFYRKPTYEEASAMKEKGQGKKAQKPLVKTEAEVHQILRFLGTIRQCLVHKTDAKRDIIFNPDSMSNEFKTLIDSYYNGRVKALNDDFIKHNGSSSLPILFHYYGATEENRRAELTEGFYDFIIKRENKNMGFSLKKIREKMLEKQEASFIKEDGYNSVRHKLYILMDFIIYKTYAADIELQESIVATLRSNLTDEDKEATYEIQAKALWNKIGDDIVKKLMPLIDGNKIKGYKDEKIEIKKEWLKDVMISTENASYMTKMVYFMTLFLDGKEINEFLTVLINKFENIQGFFDVLGHNALAEKIEEPKEISKRPLKGFAELAAFTQKSTDVGLTEHLRLFENSVNISDEIRVTKNFARMERTIPDINRAQYADAAKVLGVIGAGEQD

SEQ ID NO: 5156 - protein, 496 aa, Artificial
  Synthetic
MEKMEKIRKSENRKSRAKAAGLKSTFVVADKLALTSFGKGNKANLEKIIKNEEVEEINKPPKFDAKVEEKQIHIIGKTIKDGITEKPAGMRNDLIGAKQELEKMFFGKTFDDNIHIQLIYNILDIKKIFSVYANNIVYAVDHLDRTAKDKDVDYLGTLFTGNTYQHLLSVNPGDSKYKLKKDALKRFNTYYESAKSHFIYFGDVFYRKPTYEEASAMKEKGQGKKAQKPLVKTEAEVHQILRFLGTIRQCLVHKTDAKRDIIFNPDSMSNEFKTLIDSYYNGRVKALNDDFIKHNGSSSLPILFHYYGATEENRRAELTEGFYDFIIKRENKNMGFSLKKIREKMLEKQEASFIKEDGYNSVRHKLYILMDFIIYKTYAADIELQESIVATLRSNLTDEDKEATYEIQAKALWNKIGDDIVKKLMPLIDGNKIKGYKDEKIEIKKEWLKDVMISTENASYMTKMVYFMTLFLDGKEINEFLTVLINKFENIQGFFD

SEQ ID NO: 5157 - protein, 520 aa, Artificial
  Synthetic
MEKMEKIRKSENRKSRAKAAGLKSTFVVADKLALTSFGKGNKANLEKIIKNEEVEEINKPPKFDAKVEEKQIHIIGKTIKDGITEKPAGMRNDLIGAKQELEKMFFGKTFDDNIHIQLIYNILDIKKIFSVYANNIVYAVDHLDRTAKDKDVDYLGTLFTGNTYQHLLSVNPGDSKYKLKKDALKRFNTYYESAKSHFIYFGDVFYRKPTYKEASAMKEKGQGKKAQKPLVKTKAEVHQILRFLGTIRQCLVHKMDAKWDIIFNPDSMSNEFKTLIDSYYNGRVKALNDDFIKHNRSSSLPILFHYYGATEENRRAELTEGFYDFIIKRENKNMGFSLKKIREKMLEKQEASFIKEDGYNSVRHKLYILMDFIIYKPYAADIELQESIVATLRSNLTDEDKEATYEIQAKALWNKIGDDIVKKLMPLIDGNKIKGYKDEKIEIKKEWLKDVMISTENASYMTKMVYFMTLFLDGKEINEFLTVLINKFENIQGFFDVLGHNAFTQKSTDVGLTEHLRLFE

SEQ ID NO: 5158 - protein, 843 aa, Artificial
  Synthetic
MSEEVKKKSKQKSKTKALGLKSILVKEDEIILTSFGKGSKAIKEKVIKQNVITNIASPATFDVKLDEYNLEVSGKNFITAKPTLPIKVSLSKRQQGKKEFKRRLEEQNLKVQAKREIGEDQIFAKSKLEKHFFGQNFNDNIKVQIIYNILDIGKILAPYVNDIIYSVNNLWRNCKGDYISGIKFETSYQDCDKKFDKRYKNLKKNAIYYSDVFYEVDNNKLVFKNKSDVYNILRVLSLVRQTVMHGYYDNKFLFNDKDLDKELKDLLDWFYREKVKETNINFLKFNQEANFQILDQLYSNINDKKAIYKLFYDYLIRQEGKNLCFSLKKLREELLKRPEFSVITSHDFDSIRPKLYHFIDFIILEYYQKQEKLIFEFVEELRANLDEDKKELIYRNKAENIAPSLKVLIIDVLLPLMNGDKIRSFNKKTKEIDSNLFNEIKITDQASYFTKILYFLCLFLDGKEINEMLSTIINKLENIASFLEVEGIEKSLDEKLALLSKHFGQKRTNSNKQIIKTNFKENYQMFLDSSQIAEELKIVKAITRMKKKIEPKEIMYLEAAYLLGYQSSGNQDEDEKNILKQMKLADRGKGVSKDVRNFITNNVIKSQRFLYLVRHMNPKNIKNVGNNQLIIKFVIDGLPDKQIIRYYNSVTDKNENIPLEMMKQKLVEKITGLKFDDFLLVKNNPKTKKDLEEKEIKKALVGLYLTILYLVYKNLVNVNARYTIAFYTHERDTKFHGFDMKKPESQKEIVKLFMEKPYLKTNQIKYLEINLPQLTDEVIFREYRNQIAHLNAVSELDKYLDKLKPINSYFALYHYINQASLLERLNYKNNKDKDLNGIKNLIH

SEQ ID NO: 5159 - protein, 530 aa, Artificial
  Synthetic
MLKKRIYQNEADQLWTSYQELFKRIRGFKGAQVKEYSSKNMPIPIQKQIQNILKPAEQVTYFTKLMYLLTMFLDGKEINDLLTTLINKFDNISSLLKTMEQLELQTTFKEDYTFFQQSSRLCKEITQLKSFARMGNPISNLKEVMMVDAIQILGTEKSEQELQSMACFFFRDKNGKKLNTGEHGMRNFIGNNVISNTRFQYLIRYGNPQKLHTLSQNETVVRFVLSRIAKNQRVQGMNGKNQIDRYYETCGGTNSWSVSEEEKINFLCKILTNMSYDQFQDVKQSGAEITAEEKRKKERYKAIISLYLTVLYQLIKNLVNINARYIIAFHCLERDAILYSSKFNTSINLKKRYTALTEMILGYETDEKARRKDTRTVYEKAEAAKNRHLKNVKWNCKTRENLENADKNAIVAFRNIVAHLWIIRDADRFITGMGAMKRYFDCYHYLLQRELGYILEKSNQGSEYTKKSLEKVQQYHSYCKDFLHMLCLPFAYCIPRYKNLSIAELFDRHEPEAEPKEEASSVNNSQFITT

SEQ ID NO: 5160 - protein, 524 aa, Artificial
  Synthetic
VPKFPRILPEAKDISLFSKLIYALTMFLDGKEINDLLTTLINKFENIQCFLKIMPQIGVNANLVDEYIFFNNSEKIASELKLIKSFAKMGEPVANTKRAMMIDAIKIIGTELNDDELKTLADLFFFDENGNKKGRNQHGMRNFIINNVISNKRFHYLIRYGDPSHLHEIVKNEAVVKFVLTRIAKLQKKQGQQGKNQIDRYYECCIGKGDKKTVKEKIEALTDIITNMNYDQFEKNRDVIERKGNNNAEKEKYKKILSLYLTVIYHILKNIVNINSRYVIGFRCVERDAQLYKEKGYSINIGKLDRSGYTSVTKLCLGIANDDPCTRKKAEKEMAQAAQDTLNRLSEKNSKLFKKYNSYSDTEKEKEFQKQIIREKAATALNDHLRNPSYNHMLREYLSQTDKTACKIFRNKAAHLEVARYAHQYINEITEVKSYFQLYHYIMQRIIMDNMYDETSGKTKAKENVNDYFDDVRKNKDYNNQLLKLLCVPFGYCIPRFKNLANEALFDMNEDTEPTPNINPVQTS

SEQ ID NO: 5161 - protein, 818 aa, Artificial
  Synthetic
MSKAKTKTKAVGLKSAFIIDDKVLITSFGKNNNAIPEKEIIGENVKNIEENFSLAVDSDKGAKFKIENNKHTIETECNNPQYAVQSDLLHAKDKIEMYIFGKTFPNDNIHIQIAYNILDIKKILSLYANNIIFSLNNLRHKEEGKFEQDFIGMLYTVNTYAELQKNCSKCICQKICNYKLCKNDGDICKSYKKFKNYLAEINPYLSYFSEAFYEYIPEKNSKENDKAKRRSEKDIYNIIRTMSLVRQSCFHDLKSTRSAVFNIEDTEIKELLDRLYQKKIEDVNNGFIKNNGKNIAILADIYNKNTNDEKKKLAADFYNYIILKENKNFGFNLKTVREKLIKKNFENKICDSVRHKAYILMDYMLYRYYSENEEIKKSFVEDLRSNYDDKNSNYNDKKRNIYEKYADEVEPKVKGKIELLINKISPQKIRKEKRMDINKEWIKDVQLKNSGNCFPKVIWLMTLFLDGKEINELVSAMINKFENIQSFIEILIHEHLDHSFDNNGYKMFENSGAIANELKAVKSFSRMQGEIANPTILALHADAARILGLNADYTDTELKEHIKTLYHTEENKNQKPKDNNMRNFIVNNVIKSNRFLYLVRYNNPKRSRKLASNGELVKFVLEGISKDSSGMSKIINRYYVSVNVGIAGEPTNIKEAEKIPLKRKIDKLADMITDMNFDRFKDVKQKMYIPKNSSQEAKEEAQKKAKLENQKKERDKAVIGLYLTVLYLITKNLVKINARYTIAISCLERDTQFFGIDIRDKSETDKRPRKPYITLANKFVNEKYINDKGGHIKKSMQYVANDDRFYREYRNMIAHLEA

SEQ ID NO: 5162 - protein, 659 aa, Artificial
  Synthetic
MKKKNIRATREALKAQKIKKSQENEALKKQKLAEEAAQKRREELEKKNLAQWEETSAEGRRSRVKAVGVKSVFVVGDDLYLATFGNGNETVLEKKITPDGKITTFPEEETFTAKLKFAKTELTEATSIGISNGRIVLPEISVDNPLHTTMQKNTIKKSAGEDMLQLKDVLENRYFDRSFNNDLHIRLIYNILDIEKILAEYTTNAVFAIDNVSGCSDDFLSNFSTRNQWDEFQNPEQHREHFGNKDNVICSVKKQQDLFFNFFKNNRIGYFGKAFFHAESERKIVKKTAKEVYHILTLIGSLRQWITHSTEGGISRLWLYQLEDALSSEYQETMNNCYNSTIYGLQKDFEKTNAPNLNFLAEILGKNASELAEPYFRFIITKEYKNLGFSIKTLREMLLDQPDLQEIRENHNVYDSIRSKLYKMMDFVLVYAYSNERKSKADALASNLRSAITEDAKKRVYQNEADQLWTSYQELFKRIRGFKGAQVKEYSSQNMPIPIQKQIQNILKPAEQVTCFTKLMYLLTMFLDGKEINDLLTTLINKFDNISSLLKTMEQLELQTTFKEDYTFFQQSSCLCEEITQLKSFARMGNPISNLKEVMMVDAIQILGTEKSEQELQSMACFFFRDKNGKKLNAGEHGMRNFIGNNVISNTRFQYLRKH

SEQ ID NO: 5163 - protein, 659 aa, Artificial; identical to SEQ ID NO: 5162
  Synthetic

SEQ ID NO: 5164 - protein, 659 aa, Artificial; identical to SEQ ID NO: 5162
  Synthetic

SEQ ID NO: 5165 - protein, 659 aa, Artificial; identical to SEQ ID NO: 5162
  Synthetic

SEQ ID NO: 5166 - protein, 659 aa, Artificial; identical to SEQ ID NO: 5162
  Synthetic

SEQ ID NO: 5167 - protein, 651 aa, Artificial
  Synthetic
MKKKNIRATREALKAQKIKKSQENEALKKQKLAEEAAQKRREELEKKNLAQWEETSAEGRRSRVKAVGVKSVFVVGDDLYLATFGNGNETVLEKKITPDGKITTFPEEETFTAKLKFAKTELTEATSIGISNGRIVLPEISVDNPLHTTMQKNTIKKSAGEDMLQLKDVLENRYFDRSFNNDLHIRLIYNILDIEKILAEYTTNAVFAIDNVSGCSDDFLSNFSTRNQWDEFQNPEQHREHFGNKDNVICSVKKQQDLFFNFFKNNRIGYFGKAFFHAESERKIVKKTAKEVYHILTLIGSLRQWITHSTEGGISRLWLYQLEDALSSEYQETMNNCYNSTIYGLQKDFEKTNAPNLNFLAEILGENASELAEPYFRFIITKEYKNLGFSIKTLREMLLDQPDLQEIRENHNVYDSIRSKLYKMMDFVLVYAYSNERKSKADALASNLRSAITEDAKKRVYQNEADQLWTSYQELFKRIRGFKGAQVKEYSSQNMPIPIQKQIQNILKPAEQVTCFTKLMYLLTMFLDGKEINDLLTTLINKFDNISSLLKTMEQLELQTTFKEDYTFFQQSSCLCEEITQLKSFARMGNPISNLKEVMMVDAIQILGTEKSEQELQSMACFFFRDKNGKKLNAGEHGMRNFIGNNVISCL

SEQ ID NO: 5168 - protein, 529 aa, Artificial
  Synthetic
MKKKNIRATREALKAQKIKKSQENEALKKQKLAEEAAQKRREELEKKNLAQWEETSAEGRRSRVKAVGVKSVFVVGDDLYLATFGNGNETVLEKKITPDGKITTFPEEETFTAKLKFAQTEPTVATSIGISNGRIVLPEISVDNPLHTTMQKNTIKRSAGEDILQLKDVLENRYFDRSFNDDLHIRLIYNILDIEKILAEYTTNAVFAIDNVSGCSDDFLSNFSTRNQWDEFQNPEQHREHFGNKDNVICSVKKQQDLFFNFFKNNRIGYFGKAFFHAESERKIVKKTEKEVYHILTLIGSLRQWITHSTEGGISRLWLYQLEDALSREYQETMNNCYNSTIYGLQKDFEKTNAPNLNFLAEILGKNASELAEPYFRFIITKEYKNLGFSIKTLREMLLDQPDLQEIRENHNVYDSIRSKLYKMIDFVLVYAYSNERKSKADALASNLRSAITEDAKKKDLSERSGSVVDKLSGIIQENSRFQRCSSKRILKQKHANPHSEADSKYLKASGTSDLLHKVDVFVDDVLRW

SEQ ID NO: 5169 - protein, 612 aa, Artificial
  Synthetic
MVTAERKMTMKKREECLGSREELEQKNLKKWEETNAENRRSRAKAVGVKSVFVVGEDLYLATFGNGNETLLEKKITPDGTITSFPKEEAFTAKLKFAQTESTEATSIGISNGRIVLPEVPVDNPCYAAPQAKTAKKVAGEDLLQLKEVLEKRYFGCSFDDDLHIRLIYNILDIEKILAEYVTNAVFSIDNVSGNAHDFLGYLSTRNSYDAFMHPEKYPEHFENKSDLIERVRKQGDDFLAFVDNKRIGYFGKAFFYQDGRKEIEKPDGEIYHLLTLIGSLRQWITHSDEREEGTSRTWLYQLEKFLLPEYQETMNVNYNDIVKELTTNFTKTNATNLNFLAELLHVPVKAIAESYFRFAITKEYKNLGFCIKTIREILLERRELSDIKENHAVYDSIRSKLYKMMDFVLVHAYESEEGKKEAEELASSLRFALTEEEKESIYLNEAERLWKMYGDKLLKIKDFKGSQVNLYSYKSKPVDVQLPAILKPAKEVTCFTKLMYILTMFLDGKEINDLLTTLINKFDNINSLLKTMEQLELQTAFVKEYTFFSQSQRLCAEITQLKSFARMGKPVSNAKEAMMIDAIQILGTDKTEKELETMAKRFFRDGNGKLLK

SEQ ID NO: 5170 - protein, 444 aa, Artificial
  Synthetic
  misc_feature (440)..(440): Xaa can be any naturally occurring amino acid
MSKHRTSYAKAMGLKSILVSDSVTEMLSFAKGSDARLEKMVEDDRITDLIDKNEEAFSAEFVKNRNDNRYGYSIKNSKFSHPENRSVIAADPLLKGSVKSDMLELKSTLEKRIFGTESNGNALIQIAYNIQDIEKILAEYITNIVYAVNNIAGMDKDIIGFGKFSPEHTYEEFSEPDNHKEHYNNDKYLINAVKNQYEEFDAFLDNPRFGYFGKAFFQKKQNRSTDFVIKYDIECYHILSLISGLRNWIVHNNEDKARVSRTWLYDLENNLDHEYIETLDYMYDDIANEIVNSFSTRNSANVNYISEILNISSDKLAEQYFRFSIMKDQKNLGFNIIKLRETMLDRQEMSDIHENHNVFDTIRSKLYTMMDFVIYRYYMEEDKKTTAENNNLPDERKKLSKKDIFVINLRGCFNDEHKDKLYAEEAEQLWKVLGNIMKQXKACA

SEQ ID NO: 5171 - protein, 836 aa, Artificial
  Synthetic
MKGTVVKNGKFLEIKGENGKIYQLKPFHLPEGKTIQWLNAGDRVTFRTKDKGRIAEKSVDKIKTYKLPVTPRTHEEIFGDKSAQRPKTKAKAIGLKSLLYYDDKIIATSFGKGNKANVEKIVSDKIENIYDPANYSIFINDKLKSFVLQDKKGENSVSINLFNATISNEADHKGEITINAGQVGRDQIGLKDALEEKIFGKTYNDNIHVQIAYNILDVEKILTEYINDIVYAMNNAADISPDRDLVGYLGHLFNYQKYWSNPKSANNKPNFDKFVNSPRLINYGEAFYTVGRDGPRRKSEREIFYMLSFVGYARQFIAHEYGKHISIYNPAKAADKEVADFLDRLFADKIDEVNSDFLKLNAKNIAIICDIFPNENRNTLIKEFYQFSVLKAHKNMGFSIKTLRETLLALEQAQQLRSYIMQHQDFRRQVNTQLDFMIYKRYKDSSRAKSFADALRATARKEDKPALYIAEASKLYAETAKFITTGILAALDSKQAQKLENFPAIPPEAIKDVCIGSQAYDFVKLIYLFTLLLDGKEINNLLTGLISKFDNINSLGRIYTEITGLVNLEDRYVKFEKDYSIFKDCGRVVAQLQMLNSFARMQKRPDSQTNAKAKKAKDPFAKTDFGDAVMVLGVSPQDKKAAIDKLTPGMKNYISNNVLNSSRFRYLVRYADVKNVSILAKSKVLTEFVLADIPDNQIERYTESCGGNSSLSVKEKRQFLAQKIAELSIDNMYVEMDKKATEQQMLQRENNKNILGLYLTVLYLVCKNLVNVNARYLMAFHCLARDSYLLGKPYKKDNVYDYAVLTADYIRHSKNAHMAQFLATDTEKSNNRLIHQ

SEQ ID NO: 5172 - protein, 762 aa, Artificial
  Synthetic
LSTKKRFRYSVAAKAAGLKSSLAVDTDRTVMTSFGHGNAAILEKEIVDGEISVLNIENPAFDAVINDKKYALTGHHAGVHALVDQPQNRSDAVHIRGALEKKYFGDTFADNIHVQIAYNILDITKILTVYANNVVYALNNLVHADDDTQADELDSLGNFSAGTSYAKSKSKSKSKQQDFVELFIKKKEIHGYFGDTFAFLDKRIADADKEKQVYAMLACLGSLRQACSHYRIRYSVNGKNVDADADTWLFSSAQLDQTDPLFSEMLNRIYSHKIKTVNQNFFENNRKANFPILKKMYPETTLKVLMNEYYDFSIRKGYKNFGFSIKSLREALLSPQYESLIGVQIKDNKEYDTVRSKLYQLFDFALTRYFNQHPDMVDAFVVELRSLAKDEDAKNAVYEKYAKAVWNDVKQPIAVMLSYMNGSAIKNIKAFELKPDQKELNGIMNSNALDVPHFCKLVYFLTRFLDGKEINDLLTTLVNKFDNIHSFNQVLTALGLSASYEADYKIFEDSGRVVEYLREINSFARMTVDMEKIKRSAYKKALLILGSSKYSDEDLDARVDEMLGVDYNQNGEKIKVRVDTGFRNFIANNVVESSRFHYLIRYCHPRKIRNLAGNAALIEYQLRRLPELQILRYYEACTEPIKRTARTMDEKIGTLIDLIVKMDFSQFEDVQQNDRVRVFSDAEKKEKIRKMREKQRYQSIISLYLTMLYLNVKNLVNINARYVMAFQAWERDNYLLLQLSGKEAEAEYLNLTRHFIEPLDGA

SEQ ID NO: 5173 - protein, 835 aa, Artificial
  Synthetic
MKSKVIKSPAKAAGLKSILVHDNIMYLTYFDKGPQGGLEKKVTKQKDVYEVLDIANPIHFDAKANRVNIDIQGTNGIIAKPSNPFYSNKVIGMDLVRTKYALEQQIFGQRFMNDNIHVQIAYQVLDILKALVPYINDITYSLNAKIALKDLNLDKDDFFEINPKKIDDSKNERLLQGMMDAIKNNAVYFQEVFYDIKKDKLILKSTDLIKSYLKILIKLRQTVSHYDNSNSHYIFSGGENKEDIQLLKNLFENKRDKVNKDFIDLNKRSNFFILDKIFNIHNLQQSNLMHQYFYEYSILSMHKNIGFSIKTLREEILKLEGASRLLSTEYDSVRGKMYNLLDFILYHYFEIETRGVITQSIVEDLRKNQTEEGKLDIYSTLAVKTLSAVKSKLETLEGLMNGDTIQKINREKTVIRDFQPKLVKGNFLVFIIYFITLFLDKKEVNDLTTTIINKLENIAAFQKVYKEITGHNIEFLNEYQVLENAEQTAKEMRFVQVMGLKKPELIITHSLLLDAHKILGYQPRGDEKDILKETNATKEFRNFLINSVIKSRKFVYLIKHVRAEDISKMAKNKYLVEYVLHRIAKNAPSQIDRYYKTITGQSDGTSKEKIEKLTHRISQLKYSDFAAIKTKTVNPFREQSKALIGLYLTVLQILYKNLVNVNARYTMGFWALEKDTLLHQIPYKGHIPLLGLVEKFLYNSDDPEEAWLKKRQIQIIKQNLSDLGQGKEKHILIKYRNLIAHQNVIRKSHELLKDIRHVDSYFQLFHIAIQKQLNEMIKDGTVNPSSKIKDQLAWVEKNNQVSKNLLHTLNLPFAYNTARYNKLSIGDLFDRNEEK

SEQ ID NO: 5174 - protein, 835 aa, Artificial
  Synthetic
MKSKVIKSPAKAAGLKSILVHDNIMYLTYFDKGPQGGLEKKVTKQKDVYEVLDIANPIHFDAKANRVNIDIQGTNGIIAKPSNPFYSNKVIGMDLVRTKYALEQQIFGQRFMNDNIHVQIAYQVLDILKALVPYINDITYSLNAKIALKDLNLDKDDFFEINPKKIDDSKNERLLQGMMDAIKNNAVYFQEVFYDIKKDKLILKSTDLIKSYLKILTKLRQTVSHYDNSNSHYIFSGGENKEDIQLLKNLFENKREKVNKDFIDLNKRSNFFILDKIFNIHNLQQSNLMHQYFYEYSILSMHKNIGFSIKTLREEILKLEGASRLLSTEYDSVRGKMYNLLDFILYHYFEIETRGVITQSIVEDLRKNQTEEGKLDIYSRLAVKTLSAVKSKLETLEGLMNGDTIQKINREKTVIRDFQPKLVKGNFLVFIIYFITLFLDKKEVNDLTTTIINKLENIAAFQKVYKEITGHNIEFLNEYQVLENAEQTAKEMRFVQVMGLKKPELIITHSLLLDAHKILGYQPRGDEKDILKETNATKEFRNFLINSVIKSRKFVYLIKHVRAEDISKMAKNKYLVEYVLHRIAKNAPSQIDRYYKTITGQSDGTSKEKIEKLTHRISQLKYSDFAAIKTKTVNPFREQSKALIGLYLTVLQILYKNLVNVNARYTMGFWALEKDTLLHQIPYKGHIPLLGLVEKFLYNSDDPEEAWLKKSQIQIIKQNLSDLGQGKEKHILIKYRNLIAHQNVIRKSHELLKDIRHVDSYFQLFHIAIQKQLNEMIKDGTVNPSSKIKDQLAWVEKNNQVSKNLLHTLNLPFAYNTARYNKLSIGDLFDRNEEK

SEQ ID NO: 5175 - protein, 581 aa, Artificial
  Synthetic
LFSLYDIQDLSSQKAIDLARKFYNWNVIHGQKNLGVSVRFLRENLITLSEASFLSLKEFDTIRSKLYLFLDFIIATDYLSLPNQLNPLVEKLRMAKSEEDKDKIYLEESRLIWQTIKDRVHIKLVPLMNTKNIKTLPKRSLDEKHYRAIMIKNDASSFSKLMYVFSTFLDMKESNDLLSGLINKFSEIASMNNLLNESSSIFDNSRINDHSKLFEKSSVIAKELMIVKALIQKQKEVVFSDRSLLDAALTIGIPEELQNIDYVKGLFKQYEQNNFKNFLINNVVKSRRFIYLMRYVNPLIIKQMMTHLPSIRFILNRLPIEQIDRYIFSALGKNPSGFNSVNTKIDELANQLIKIKLEQFTSVVQGRPKKFANQLSKPNFQENNFKEKQKALLGLYLTVPYLFFKGLVNVNSRYTIALHAFERDNDIILNSPEIFKQEKPDYLMLTKHYLKLGKFKTRVKTYLIDNQAHFNANMFKHYRDQIAHLGIIKNAVRFFKSNHHVMKSYFEIYHTILGLGFNDHVHHLDHSQAFLATAIDSIRKYGTYSKDLLNVLHTPFAYNLPRYKNLSIHDLFDKNEITKEK

SEQ ID NO: 5176 - protein, 327 aa, Artificial
  Synthetic
MAKNKIRPGDKRKQDAQAAAAKHRVQNEAREKEIAEEAAKKEAAAAVKKSSITFSDEKGTVKTKSSAKAAGLKSAFVIGDDVLLTSFGKGNDVILEKRFSKENNATDFDNKLNITPISSRVADDKKTKYEFNIRNKATTDDPRINGSASPARQDMLGQKAKLEKKYFGVEFNDNIHIQLIHNILDIEKILAIHINNIVTSLNNIMDVDEPKTGDIIGYSSLLKTWNEFENKTETKLFTDFENFYNNSKLSYFGSGFYDTGFDTKAQLNSKKRSKEEVYYILCLLGQLRQEITHGNSNYIYNLANDTSEAATEVKSILNSFYGAQVEN

SEQ ID NO: 5177 - protein, 334 aa, Artificial
  Synthetic
MILILGEGTIRMAKKKNARQRREEEKNRIKAIIEKIKNKVVEKEETEEIVENNETKNVESIVVEPKKKSLAKASGVKSVFINNDEIIMTSFGRGNDAVIEKIIKDNNIDNENKDKPVYDVVAIENEGNIIKVQSERFKAIESANTEIPPERNGMDLIKRKDKLEEVYFGHTFNDNIHIQLIYNILDIEKILSVYINNIVYALGNLERKDTDEEKDLIGYSSARAKYEDFIENEKLEDRKKLLEEFIENGDRLGYFGNVFFKNDKELKSKKEIYNILGLLGSLRQFCFHYNEAVFENEEGKINQDIAPFSTLSTTYCFLTKSFIYEALRYIRLAL

SEQ ID NO: 5178 - protein, 718 aa, Artificial
  Synthetic
MERQKRKMKSKSKMAGVKSVFVIGDELLMTSFGDGDDAVLEKDIDENGVVNDCRNPAAYDAVYGTDSIRVKKTNNNIRAKVNNPLAKSNIRSEESALFRTRVNEYKREQKDKYETLFFGKTFDDNIHIQLISKILDIEKTFSVVIGNIVYAINNLSLEQSIDRPIDIFGDKNTQGISLREDNDYLKTMLPRCEYLFHNILNSDSDNNSKMNYNKVNKGKEEKDNRNNENIEKLKKALEVIKIIRVDSFHGVDGIKGDQKFPRSKYNLAVNYNEEIQKTISEPFNRKVEEVQQDFYRNSCVNIDFLKEIMYGSNYTDRGSDSLECSYFNFAILKQNKNMGFSITSIRECLLDLYELNFESMQNLRPRANSFCDFLIYDYYCKNESERANLVDCLRSAASEEEKKNIYFQTAERVKEKFRNAFNRISRFDASYIKNSREKNLSGGSSLPKYSFIEGFTKRSKKINDNDEKNADLFCNMLYYLAQFLDGKEINIFLTSIHNIFQNIDSFLKVMKEKGMECKFQKDFKMFSHAGHVAKKIEIVISLAKMKKTLDFYNAQALKDAVTILGVSKKHQYLDMNSYLDFYMFDNRSGATGKNAGKDHNLRNFLVSNVIRSRKFNYLSRYSNLAEVKKLAQNPSLVQFVLSRIEPSLICRYYESSQGISSEGITIDEQIKKLTGIIVDMNIDLFENINNGEIGMRYSKATPQSIERRNQMRVCWFVS

SEQ ID NO: 5179 - protein, 718 aa, Artificial; identical to SEQ ID NO: 5178
  Synthetic

SEQ ID NO: 5180 - protein, 718 aa, Artificial; identical to SEQ ID NO: 5178
  Synthetic

SEQ ID NO: 5181 - protein, 718 aa, Artificial; identical to SEQ ID NO: 5178
  Synthetic

SEQ ID NO: 5182 - protein, 718 aa, Artificial; identical to SEQ ID NO: 5178
  Synthetic

SEQ ID NO: 5183 - protein, 455 aa, Artificial
  Synthetic
MERQKRKMKSKSKMAGVKSVFVIGDELLMTSFGDGDDAVLEKDIDENGVVNDCRNPAAYDAVYGTDSIRVKKTNNNIRAKVNNPLAKSNIRSEESALFRTRVNEYKREQKDKYETLFFGKTFDDNIHIQLISKILDIEKTFSVVIGNIVYAINNLSLEQSIDRPIDIFGDKNTQGISLREDNDYLKTMLPRCEYLFHNILNSDSDNNSKMNYNKVNKGKEEKDNRNNENIEKLKKALEVIKIIRVDSFHGVDGIKGDQKFPRSKYNLAVNYNEEIQKTISEPFNRKVEEVQQDFYRNSCVNIDFLKEIMYGSNYTDRGSDSLECSYFNFAILKQNKNMGFSITSIRECLLDLYELNFESMQNLRPRANSFCDFLIYDYYCKNESERANLVDCLRSAASEEEKKNIYFQTAERVKEKFRNAFNRISRFDASYIKNSREKNLSGGSSLPKYSFIECS

SEQ ID NO: 5184 - protein, 859 aa, Artificial
  Synthetic
MKKSKVKLNGVKAVYHISPDVRVTTAFGRGNNSVLDKRIENGTIEELQNHSDIDVNISRKTYSFRKKSLKKDAGQFSVPDNTNDQLGIRKELEEEIFGEKFDDNIHIQAAYAVNDIIKTLSVAANLAATAINGLDRENTEYDMIGFYIIPHITYQTYAGNKKPKFDEFIGRVKAQGTFSYFPDILPKFREESEEESDKEKLYYLMCIVSLIRNSTIHYAAGNSRNADSMDYIFGELNKEALTETADDLIKSKINSINKGFSNNQKNNIYRLLKAKADTPENTARLIRRLYAFTIRKQDKNLGFSLKKLRECAIRSIEDMKGLLGDTYDTVRSKLYTLVDFVVYSYLKYHKEGKKFSEEMVDQLRAAESDKDKNIVYCQGAKRLYNIKIISQTINALISDIKSDFDQPKHGNECYQPINDGMKEAEKDFITTDQLSLFTKFIYVLCQFLDGKNINILLSSLISKFQQIEAFNGDIRKLNLNIRDDGKIGYDSKKYSIFEKSGQISMELDMLRGVIKMDINDLNAYKTMIKDALLVIGVNESDIDSIYEYYFNQKDKKNSVAGFFRNNIINSRRFRYIIKYINPSDAYRIIQNENVRNYVLGRMNDAIIDRYAHSVGIEDKVHDKRKVLSDILSTVKFDNFTELKYINPKDRNKDQKAKGREKPKAILGLYLTIVYIVVKSLVRINSQYVMAVYHLERDSRLCGVSSNDNYPLSMTKRYCDRDNHLLKEKHIVKLERYQNTPEKICTTYRNAIAHLSAVRKGVKYIGDIQKTDSYFGIYHYCMQKLLYSADSADKQPFADFVSSVFGDEKELDKLRSGIYSQAILRALNYPFGYNPARYKNLSYEKIFMRAWQDEDTNKKT

SEQ ID NO: 5185 - protein, 551 aa, Artificial
  Synthetic
MKKSKVKLNGVKAVYHISPDVRVTAAFGRGNNSVLDKRIENGTIEELQNHSDIDVNISRKTYSFRKKSLKKDAGQFSVPDNTNDQLGIRTELEEEIFGGNFDDNIHIQAAYAVNDIIKTLSVAANLAETAINGLDRKNTENDIIGFYIIPQITYQTYAGNKKPKFDEFIGRVKAQGTFSYFPDILPKFKEESEEESDKEKLYYLMCIISLIRNSATHSKNSNSDTTDYIFGKLNSDNKEALTETADNLIKSKIDSINEGFSKNQKNNIYRLLKAGADTTENTARLIRRLYAFIIKKQDKNLGFSLKKLRECAIRSIEYMKYLPGKKYDTVRSKLYTLVDFVVYSYLKYHKEGKKFSEEMVDQLRAAESDEDKNIVYCQGAERLYNIEIIRRTIKALIKDMDIKSEFKQPDKDNTYYQPIMDGMEEAKKDFITTDQLSLFTKFIYVLCQFLDGKNINILLSSLISKFQQIEAFNGDIRKLNLNIRDDGKIGYDSKKYSIFEKSGQIADDLDRLRGVIKMDINDLNAYETMIKDALRVIGVDESDIESIYQTH

SEQ ID NO: 5186 - protein, 551 aa, Artificial; identical to SEQ ID NO: 5185
  Synthetic

SEQ ID NO: 5187 - protein, 880 aa, Artificial
  Synthetic
MAKKKRMSAKERKQQQINLRIKKATEDSTKKVNTTVAVNNKPISKEIKKSKAKLAGVKWVIKANDDVAYISSFGKGNNSVLEKRIIGDVSSDVNKDSHMYVNPKYTKKNYEIKNGFSSGSSLTTHPNKPDKNSGMDALCLKTYFEKEIFKDKFNDNMHIQAIYNIFDIEKTLAKHITNIIYAVNSLDRSYIQSGNDTIGFGLNFNIPYAEYGGGKDSNGKPENKSAWEKRESFIKFYNNAKDRFGYFESVFYQNGKQISEEKFYIYLNILNFVRNSTFHYNNTSSHLYKERYCKINPKNNLKTDFEFVSYLNEFVKNKFKNVNKNFISNEKNNLYIILNAYGEDIEDVEVVKKYSKELYKLSVLKTNKNLGVNVKKLRESAIEYGYCPLPYDKEKEVAKLSSIKHKLYKTYDFVITHYLNSNDKLLLEIVEALRLSKNDDKKENVYKIYAEKIFKAEYVINPIKTISNLFAEKGDKLFNEKVSISEEYVEDIRIDKNIHNFTKVIFFLTCFLDGKEINDLLTNIISKLQVIEDHNNVIKAIANNNDAVYKDYSDKYAVFKNSGKIATELEAIKSIARMENKINKAFKEPLLKDAMLALGVSPNDLDEKYEKYFKTDVDADKDHQKVSTFLMNNVINNSRFKYVVKYINPADINRLAKNKHLVKFVLDQIPHKQIDSYYNSVSTVEEPSYKGKIQLLTKKITGLNFYSLFENCKIPNVEKEKKKAVITLYFTIIYILVKNLVNINGLYTLALYFVERDGFFYKKICEKKDKKKTNKDVDYLLLPEIFSGSKYREETKNLKLPKEKDREIMKKYLPNDEDRKEYNKFFKQYRNNIVHLNIIANLSKLTSTIDKEINSYFEIFHYCAQRVMFDYCKNNNKVVL

SEQ ID NO: 5188 - protein, 858 aa, Artificial
  Synthetic
LPVNEGETRKDLIGLKKQLEEVVFLKYADENHQEGQHFNDNIRIQIAYSIFDIIKVLVPISAQLIYTVNGLDRHNDKEDAIGYYLNYSVTYENFGAVKENSSEKAKFKILEKRNKYEKFVSKAKENFIYFKDVFYEEKPAQLNNGQKTNKKSQVEYQLKSDEEIYYILNCLNFLRNNIAHFKISNQNDGNAIFRDCYYDKSAPKNLFNKGMYQVIDSAYGKAVDKINKSSVKYEDKNLYLLAKALGFAESKYSERHKELAQLIFKTSILKSNSNRGYSIKKIRELLFEKNILTISDDEKTVNTYRAKLYKILDLVLTYYLSSSEYENMIEKFIDQLRGNQYEEEKQESYANFTEKIGEIDEIRIALKRVVSLFEGKEYANKNVIKLKEEWIDECKINKNVSDFTKLIYFISRFLSGKEINILLTQCISKLQNIDAFNKTVEELVEKGILEMHHYKRDYSLFERSGEIAKELEIVKSISKMDRSFDHYPLEKLYKDFLLTLGVKESNKNDSENNIEDENSLEYCYEKYFSKDSKTKLSAFIKNSVINSQRFLYVVKYVKPKDVNAIMKNPSVVYYVLQQMTEAQIERYCKTIGIDIDFELKKKRKDLLKMLIDIDFSKIRGNRSLQNKKNRGELNRNDTIEREKKKALLGLYYTVAYIFLKNMVNVNGRYILAFYCLERDKILYKEAFAKQLSTIEKSKKWSTREFYDTLTRLFTGKLNLDCQSVPLLSEKASEKLDRYIFEEPKGKSEGEKDGGDWSGYSNINDRIYVFYRNTVEHLNLIGNIGRYLEFYENVAMDCYSYDVAIGSKTKEDIKMSRVYFSFYHHMMQKMFFEEYKASKNRLINKSNNRSHIKSEKKNK

SEQ ID NO: 5189 - protein, 680 aa, Artificial
  Synthetic
MMGKHLNAKQRELEKKLKNQQKGMMYNKSTDAVSVPTLQAAPKKAAEASTLITPGTLKTKAKAMGLKSTLVFDDKIVVTSFLNSKTEENEKCAHIEKITDCNGQTIVERPRMFNTSINAQQVDLSKDNDETNYPNPAFEDCGRDYINIKSALEKRVFGKTYNKDNLHVQIAYNIFDIKKIIGTYINNITYIFYNLGREEYNAKKDIIGNQDSDYINKLLNNTSAYFTYFDGVFKQITDRDSNKDREVKNSYNALVLKVLYYLRQFCMHGNTYTKRNEESFLSDTALYNVKDFFAKADPQINELIDAVYADGIKTINNDFMAHAKNNMYIICEVYKNEVEDSLMKEYYDFVVRKEGNNLGFNTRQLREILIDKYVGNLRDKKYDTFRNKLYTVLGFILVKEIKRNPKIQDSFIAKLRANQSGDEGKLNIYNEFAPKIWSVVSSKFNSAIKCFDEESLSKFKGYKDIDESLISKYGITVSNTDTLVKILYFLCKFLDGKEINELCCAMINKFDNINDLIKTAAQCGEDIEFVKEYKLFINSKDLSDQIRVVKSISKMKPELSNIGEVLLLDAIDILGYKINKYKCDADGNRLVDSNNKPVYSEEYCTFKKDFFETCELDEFGRVKYDKKGKPVINHRRRNFIINNVLSSKWFFYVAKYNRPSECQKFMKSKKLIALALKDVP

SEQ ID NO: 5190 - protein, 768 aa, Artificial
  Synthetic
LNEIRQWTAHYESAYKIFSGSELIKEELGANKEPQNNRWMVIESYYKGLVNRINRGFLNNSALYNFPLLFDLVKPKDENEKKKLIEEYYKFSVLKDGKNVGVNLRTVREAMFKNGFHDVKEKEHDTYRSKFYGIVDFLLYRSESKNFSGWSEELRKTVDKVAKEKCYDKWGESVAARMRPKVTALLDKLSKMEWKKKPNKEDLEKLAEPYKSYLADVQLSADDADPLVKLLAFLCNFWEGKEINELLSAYIHKFENIQEFIDTIEKLEGKKPTFSEKYALFNEPARRRTEEVAEIPGTRAGEIAQNLRVLASIGKMKPDLGDAKRQLYKAAIEMLGVPDDSQFVSDQWLAENVLLDKTQSGYANRKTEVNPFRNFVAKQVIESRRFMYLVRYTKPKTVRTLMENKAVVHYVLSRIDNSKNVKGKEDIITSYYKTLKEYDPQKHQHLPTDKAEREKEINRRIDALADYLCKYSFEKNVLKQKDGIVRNTKSATKNVEIERLKALTGLYLTVAYIAIKNLVKANARYYIAFSIFERDYALFEKKLGRDALDERPKYPDDKGKETEADYNFFALTKYLLDKDDKAFGSWKPYQWDESKNKGENWKALRLHIKQHKKENQRHFSQKWLNFFRQQIENAKNISETGYLLTAARNHAEHLNVLTALPKFVGEFRKTEGKMTSYFELYHFLLQKLMLADAGLKNLDKYRERINKYQTSCKDLIKITYVSLGYNLARYKNLTIEALFDSDSENGKALTKEREKKAEERAKERAKKH

SEQ ID NO: 5191 - protein, 853 aa, Artificial
  Synthetic
  misc_feature (311)..(311): Xaa can be any naturally occurring amino acid
  misc_feature (315)..(315): Xaa can be any naturally occurring amino acid
  misc_feature (334)..(334): Xaa can be any naturally occurring amino acid
  misc_feature (345)..(345): Xaa can be any naturally occurring amino acid
  misc_feature (360)..(360): Xaa can be any naturally occurring amino acid
  misc_feature (380)..(380): Xaa can be any naturally occurring amino acid
  misc_feature (500)..(502): Xaa can be any naturally occurring amino acid
MSDNKKTIAKRMGIKSVLAHGKDEQGHTKLAITAFGKGNKTDDEILKTDAKGTNLEQKHKGRNITAEKIVSKGIQTRGTIAREYHDTFLDTLGENLGEDYLKLKETLEKEFFGKSFPGDSVRIQIIHQILDIQKLLGIYITDIIYCINNLRDETHLKDESDIVGLSMNDDHKLKINLGNMLPYLGFFGDAFKMPPKPKKDKSGKVINQGETPEDVHNKNVLRILGTMRQTAHFRNASLPFARDGKLANRFKKYTEEEKKNPKGKTVKMTVLKWDAWQTVEDYYAKLVDRINEGFCKNAATNVHFLTELLPXESKXQLTEDYFRFAILKEGKNLXVNMKRLREVMXALFVPELTAPETKKXYDSYRAKIYGLTDFLLFKHXHNTKQLEEWVAVLRETSNEDAKENLYDEFARTAWNTVGDSAKQLIENMQSYFTKKEKEITKTAQPVLSTSSIAHTSKKITQFSSFAKLLAFLCNFWEGKEINELLSAYIHKFENIQEFIXXXEKLEGKKPTFSEKYALFNEPARRRTEEVAEIPGTRAGEIAQNLRVLASIGKMKPDLGDAKRQLYKAAIEMLGVPDDSQFVSDQWLAENVLLDKTQSGYANRKTEVNPFRNFVAKQVIESRRFMYLVRYTKPKTVRTLMENKAVVHYVLSRIDNSKNVKGKEDIITSYYKTLKEYDPQKHQHLPTDKAEREKEINRRIDALADYLCKYSFEKNVLKQKDGIVRNTKSATKNVEIERLKALTGLYLTVAYIAIKNLVKANARYYIAFSIFERDYALFEKKLGRDALDERPKYPDDKGKETEADYNFFALTKYLLDKDDKAFGSWKPYQWDESKNKGENWKALRLHIKQHKKEN

SEQ ID NO: 5192 - protein, 861 aa, Artificial
  Synthetic
MGKTHKKNGNGSAKAHGLKMVITSNNDVSVATFGNKTKPTIIEQTLDFDTKEKIYDIDEKNFDASIEPIKTLKLVAKKKINNEKEFPEYNIQVNQNRKDLLGFKDKLEAEMFVGSNYKDNLHVQIAYNILDFKKIIGLFIGDVLNSIEHLSKNPVDEVGTINVNIGYDDLSKSKKEKIDKVLKELYKYSIYFDDVFENNNSLKSDYDILRILSLIRQSVLHDSTFKNSLFTPGNNEALLDLANKAMNFVKNDFNLFKENFSSNSIVNVRILNKKLGENNWGGKYYNYVLRRDNKNIGFSITKIKTKFMEFFFNGKEDEIKTFFGKLSTLFEFLIFEYYKDASHEIFVASIIESLRECRTEEEKEIIYEKEFQRLISENILKKELELISTIDAEYISNVKEESKGYKLNVQKSSWSFNYFPSLIYVLCKFLDQKEVSELTTSIINKLENIKSLILTAKDLKIWDCDFIPELKIFNENQINDIIDEFRVVYNLSVSKRKLKKVEPNTNNTKISKALYIDALNMFKKDDFVNNDNLSDYVQLEKTDEENALKKTKKFLINNIIKNRRFIYLLKYIDPKDCHKLVTNEKILEYIFNGEKDKYLPDSIIESYYSKITGKKINLPSRDRMTNILINLIKEIDISTVISSAFDSERIEKQKQIFTLYLTICYLIVKGLINTNSVYLLACSAYDRDAYYAFGAEEDRTMGLKLLNRYLEGERSKAKPKTRVIAYLEKNIITAKTVLKYDLKRDNLYIGKGYRDAISHFNFVNMAPSYIDRIKSVSSFFDLYNFTVQNWYLEKAKEQNIDDGYVEQLRVNLEKYGKTQKDFLKIINVPFAYNLARYKNLTIEDLFYDRYNLKGDKETSTD

SEQ ID NO: 5193 - protein, 880 aa, Artificial
  Synthetic
MNKIHKKQGKTTAKSLGLKSVLKIENDLVVTTFGKKDNPMVVEQSINKASGEKELYVDEDQVKFDSSLIKEKNILSLDSIQHSNHQIIVNIDQKDASEIGMDYLRLKPELEKEFFGKTFYDNVHIQIAYNLLDLKKIIGLHIGNAIQALENLGRDGSDLVGICDATKPLNYLDDVKQKADIGFMNRLKPYFMYFDGVLKLDNSKNKNGELNQLDIENWDVIRILSLIRQGCAHAGAYSSLLYTAQNNKVYADLINKALSIFSDDLDKFNKSFLKQSKMNLFILFDLYNCRFDRSLQEKIIKEYYRYVLYKDNKNLGFSLKNVRNLIIEGKYDEQERSGKLQTIRSKLNTLLDFYLYGYYQKNPTFVENIVAKLRESKNDEDKEKVYEEEYHRLLSENNYLVDKKCSDIVYRINEAVKNRKIFVNANINAVVEKVSCSCFPSLIYVLCKFLDGKEVNELTTAIINKLENIASLINALVTLKSYGGFSEQYKIFDYPNINGLIDDFRMVKNLTSTKRKLKKASGGEDRIGRQLYADAINIFKEDSFVSANDEKGTGLDQYVNKFFSKDDLGARKVRNLLLNNIIKNRRFVYLIKYIDPKDCYKLVHNEKIVRFALGQYDESQMPLNQLQKYYDAVIENREGFRKCNDRKKIIDTLVSEINRVSIDGILDIGNRLVNRGNNDYINHQKQIISLYLTIAYLIVKGVVHTNSLYFIAWHAYERDNNFKFGNDGKDYLALTKEYLTNKKKRVKQLLDHNIEEANNSLDSKYFSAYRNKVVHLNFCNIFVNYLDGIGDIHSYYDIYQYVIQKWSIAERSKDFIDPQYLTKLSNDLKQYRTYQRNFLKIINLPFAYNLARYKNLTIGDLFNDKYPLPKETVKEFYNEE

SEQ ID NO: 5194 - protein, 327 aa, Artificial
  Synthetic
  misc_feature (16)..(56): Xaa can be any naturally occurring amino acid
  misc_feature (122)..(146): Xaa can be any naturally occurring amino acid
  misc_feature (213)..(235): Xaa can be any naturally occurring amino acid
  misc_feature (288)..(304): Xaa can be any naturally occurring amino acid
MKQQRYESFSLGFVRXXXXXXXXXXXXXXXXXXXXXXXXXXXXXXXXXXXXXXXXXHGDPKQNIYKVEGFGSHTEIANLLDRLYSERVNELNSGFLIKAKNNLILLFRAFGVKGKEQKAAFXXXXXXXXXXXXXXXXXXXXXXXXXADIEEAFEIRKKDYYSVRGKVYPFMDFAIFRYYRNSEEASVKLVSELRASMNEVEKEEVYRREAQKXXXXXXXXXXXXXXXXXXXXXXXKVEDKDISKEMLEDILITPDAAQFTKFVYLITLFINGKEINDLLTTLIHQFEXXXXXXXXXXXXXXXXXRGWKLSSGKSFRFSDGVKRSPGN

SEQ ID NO: 5195 - protein, 699 aa, Artificial
  Synthetic
MNHQTRKSTSKRLGVQTIVNKNNNIFVFSNNQPKTKSVQLADEHQQLIEQNNDLDNFKTDLEYGNIKFGLSNNALEAFYPNQYTIRKKSSSINQWLVQKYCPTQCPDSNLILQLIHNNEDFKKIIALYSDVVFSMKVFKGNRNEDYISKIFNNMNAKEIIDKVKSVIDSIKKRPYLFGFNPKDSASDQQIAYHLKNISMLRNYITHDSNDNLRIDSDTYASLTEQLDQFIEQENKKFTEQNGHNLALISQFYPSWSDEEVVKNYHDYYFNMLDKNLGVNLRQIALLIREKNNISQMLDDDRRAKFNVVLKFYLYTWLKANQAQLDDYIQQLRQAQLDDKDTIYQKIAQDIPANDINRLIKLCQQIDFQIKPTRFKRIPIKTINEQWDFRVLMIYSLTKFLTIKETNELISALLNKIEAMSNLLEIDRALKVQAVDAIQPNQWFFVSLPMPKKPVKNTKQPKPKHQSQSKPANGIRGLAELRAQFQPSITHSVSSDNQLIQHQPVITSLKSIDYQRITRQLTIVNRIRSYHQPKHAEYHRQELIDAISLFWGSDELCITDGIFDEEIKVLVNGSTKPVSRKLKNILRNNVIKTKFFNYLVRYIEPKKVANLLHNNYGLALFLVQQLTPSQLESLMIEYIPLEDENQLVGQTPREELTEAQKQRLEQYEHQLAMIFSEKISLTYCVNRKMTVGRLALLNHI

SEQ ID NO: 5196 - protein, 368 aa, Artificial
  Synthetic
  misc_feature (2)..(5): Xaa can be any naturally occurring amino acid
  misc_feature (255)..(258): Xaa can be any naturally occurring amino acid
  misc_feature (339)..(342): Xaa can be any naturally occurring amino acid
MXXXXLKGKNPFRNFIANNVIESTRFIYVVKFCNPDKVRSLVNNTVVTKFVLGRMPETQIDRYYQSCIANPDSAAQLAARIDALADMMRNMRFEDFKDVQQKSGDPIENMRKERFKAIIRLYLAVVYQLVKNLVNVNSRYVIAFHCLERDCHIYTGKSVSKSKKYFTLIDVLLEEGDSSRSGYLARNVRMREHIAHDVDIGKSLIITTKSTDSATGEVKYSKLRIIGFYRNNIAHLTAVRSFADYIGDIARIDSXXXXDYSLDRKVEDLADMMKKMHFDAFKDVKQDTKSIKNKTEDRKERMRKERYKAMIGLYLSVVYQLVKNLVYVNSRYVMAFHAXXXXDLPRLYGADPHAVEEGSQFQKRSSLR

SEQ ID NO: 5197 - protein, 652 aa, Artificial
  Synthetic
MNIMRNAFKRANYVLCLLLALSGTSCINRLNDEIKEGSILISFSFEASKAATKVTKNTFDIGDRSGIFAMLTGNSLDQQRYIDNLLLECSDNSKLISKKEVYYPEGDATLDFISYYPYQEENVSKGSSLLDVTVQADQNKTANYSLSNFMTARIGNVPNSEKTIKLEYKHRFAKIKLVLIPQEGEDTDEMLKANPRIIATGFRTQAVYDLQSDKLSSVDDASETDIIPFGTWKKEGNTLSGKEFIVIPQTHSDGGQAFTLEWNGKIYPCPLPSATIEEDTELEICINALQSTSATLTGVIANIKEWELSEQGESENRYEITAVHTASLSFSTSDIYRIYHQGKPVAEVCREYLYTAPADAVATKAIVAYSVQDNEQTDLTNGIVLQLPDKTATTHGGKVSWNEADNSLTYISGHSRPIEKFYIDENRKIVTEKPAAPALAINVSSYVIRDIRNGILHTYPIVKIGAQYWMKEDLQTAHYNDSKSMPLRKALGDGEGYLKWAGTNSHFYNGEAVLTGKLAPLDWRLPTENDWNRLKEYIGDIRTVDSYFSIYHYVMQRCITKRENTWSSDVYSATNETGFCIQPAGLLLERENKTALVNANSSTAYWLYDGTQKQLDKVVMFANSNNDIALKNAVKPEGKDYYNAFSIRCIKE

SEQ ID NO: 5198 - protein, 363 aa, Artificial
  Synthetic
VYINSRYALAFAKYEHDASLLLDGWVYDRYKTVFSDLTVDSLQKGKLNRRASKYLQVNLEHSDTDLIRQYRNKVAHLNAMFDLMSKVYVDATMQGKKGMNEHSALVSMIDRSNIPGKVIVLMDRGYESFNNIAHLQEKEWNFIIRAKESYGMISNLQLPNSEEFDVDTTLTLTRRQTKETLALLSAYPERYRWIQPHTTFDYIAPKAPNMYDLHFRVVRFRISDGCYETIYTDLDPETFPVEKIKELYRLRWGIETSFRELKYISGLSCLHGKKADFLLQEVFARLIFYNYASLIARQVPAPQGKQINFSVAILACKQFLKGKIRSAQIFEILSMHLSPIRPGRQYKRYQNPVSAVAFQYRLS

SEQ ID NO: 5199 - protein, 363 aa, Artificial
  Synthetic
VYINSRYALAFAKYEHDASLLLDGWVYDRYKTVFSDLTVDSLQKGKLNRRASKYLQVNLEHSDTDLIRQYRNKVAHLNAMFDLMSKVYVDATMQGKKGMNEHSALVSMIDRSNIPGKVIVLMDRGYESFNNIAHLQEKEWNFIIRAKESYGMISNLQLPNSEEFDVDTTLTLTRRQTKETLALLSAYPERYRWIQPHTTFDYIAPKAPNMYDLHFRVVRFRISDGCYETIYTDLDPETFPVEKIKELYRLRWGIETSFRELKYISGLSCLHGKKADFLLQEVFARLILYNYASLIARKIPVPQEKQINFSVAILVCKQFLKGKIRPAQIFEILSKYLSPIRPGRQYRRYQNPVSAVAFQYRLS

SEQ ID NO: 5200 - protein, 363 aa, Artificial
  Synthetic
VYINSRYALAFAKYEHDASLLLDGWVYDRYKTVFSDLTVDSLQKGKLNRRASKYLQVNLEHSDTDLIRQYRNKVAHLNAMFDLMSKVYVDATMQGKKGMNEHSALVSMIDRSNIPGKVIVLMDRGYESFNNIAHLQEKKWNYIIRAKESYGMISNLQLPNSEEFDVDTTLTLTRRQTKETLALLSAYPERYRWIQPHTTFDYIAPKDPAMYDLRFRVVRFRISGGCYETVYTNLDSETFPIGKIKELYRLRWGIETSFRELKYTIGLSCLHGKKTDFLLQEVFARLILYNYASLIARKIPVPQEKQINFSVAILVCKQFLKGKIRPAQIFGILSKHLSPIRPGRQYKRYQNPVSAVAFQYRFS

SEQ ID NO: 5201 - protein, 722 aa, Artificial
  Synthetic
MRFSCAFFLEQQMRDGADDQQADDSTLKEDHEQLPDVERQLGAEDQTADLREVEDLRDGDDRDDEAGHVARTGARDQDGRGKHIGKADDHRGSGSGGIRHLQQLEQGQEGRAEDLEDVGVVGADQRNGADAHNGGQDAEPHITGVLCAVLKEPADAGEVRNALEREVHAVLAGALVALGDGLRRSFALDHIGLGLFVQGPQQRADQRADDADEADEQVVNAEVLHHPDLIEHDQRKGDGNGGEERRDDARLLSGVVAALILVEGQHDTERAVADPRGHAVDRGAAGDLEERAHELRRQRADILEQTEVGQQRQQEGRDHIDDDQRADQIIEHETALIGAGDGIEDAAPLVGAQLKKCDPREDRTQHTHDDPERTADEAAVKYGAFHDELGLCQRHERHHSGDRHDRHAQNRQESTDRTGNNVRDDLDRDRPLACRVFDRDHKENNTDRGRNDKHRFQFTSVFHILPPLIVEHIKMFLFSSHIFICSQQTSYLSFPEGQVPVRPLPCVPHGICRPAEQARQSLSSLSKLSLEDFRNVEQSANAARNAQKAKYQGMLSLYLNVIYQIIKNMVYINSRYALAFAKYEHDASLLLDGWVYDRYKTVFSDLTVDSLQKGKLNRRASKYLQVNLEHSDTDLIRQYRNKVAHLNAMFDLMSKVYVDATMQGKKGMNEHSALVSMIDRSNIPGKVIVLMDTQKGRCKPNLEQHLSEYDLSLHPTHRGIRI

SEQ ID NO: 5202 - protein, 350 aa, Artificial
  Synthetic
VPHGICRPAEQARQSLSSLSKLSLEDFRNVEQSANAARNAQKAKYQGMLSLYLNVIYQIIKNMVYINSRYVLAFAKYEHDASLLLDGWVYDRYKTVFSDLTVGSLQKGKLNRRASKYLQVNLEHSDTDLIRQYRNKVAHLNAMFDLMSKYYPNIAELSKDEVAKQAPFGAKWRLLAQVEVRCYILISNISGSVKVAPLQILQFPVILPHKFQDAGKFNLQFSDFSEITETADKLRWLRYQKGLRQRDVADYAGIYRSTYIHYEEYGKDFYSPKHMEKIAQLFEVPVERLLDDYNLFLRNGQGKQIKAIRMKLGLTQREYADRLGISLCNLKQWEQNRKQLFKSTWEKYFK

SEQ ID NO: 5203 - protein, 642 aa, Artificial
  Synthetic
  misc_feature (112)..(474): Xaa can be any naturally occurring amino acid
  misc_feature (609)..(612): Xaa can be any naturally occurring amino acid
MEINSRTTPPSRGLKLYELFVLLESQHRSHYTPVAGSETHQYPCIYGRLSWSHYTPVAGSETTEAADLSHKDIMSHYTPVAGSETFSYYPSISAKICRTTPPSRQCHQFKGXXXXXXXXXXXXXXXXXXXXXXXXXXXXXXXXXXXXXXXXXXXXXXXXXXXXXXXXXXXXXXXXXXXXXXXXXXXXXXXXXXXXXXXXXXXXXXXXXXXXXXXXXXXXXXXXXXXXXXXXXXXXXXXXXXXXXXXXXXXXXXXXXXXXXXXXXXXXXXXXXXXXXXXXXXXXXXXXXXXXXXXXXXXXXXXXXXXXXXXXXXXXXXXXXXXXXXXXXXXXXXXXXXXXXXXXXXXXXXXXXXXXXXXXXXXXXXXXXXXXXXXXXXXXXXXXXXXXXXXXXXXXXXXXXXXXXXXXXXXXXXXXXXXXXXXXXXXXXXXXXXXXXXXXXXXXXXXXXXXXXXXXXXXXXXXXXXXXXXXXXXXDGKEINILFTTLINKFENIASFITTAKELSIDVTFHENYAFFNQDCDGYAREIDVVRNIARMKKPVPGARKTMYRDALTVLGIPEHMQADMFDAELEKMLEKPKDEKGRKLKGKNPFRNFIANNVIESNRFIYVXXXXERQEPLPQLHRQQRHRIHPVYLCGEILQSR

SEQ ID NO: 5204 - protein, 15 aa, Artificial
  Synthetic
GGGGSGGGGSGGGGS

SEQ ID NO: 5205 - protein, 7 aa, Simian virus 40
PKKKRKV

SEQ ID NO: 5206 - protein, 16 aa, Artificial
  Synthetic
KRPAATKKAGQAKKKK

SEQ ID NO: 5207 - protein, 9 aa, Homo sapiens
PAAKRVKLD

SEQ ID NO: 5208 - protein, 11 aa, Homo sapiens
RQRRNELKRSP

SEQ ID NO: 5209 - protein, 38 aa, Homo sapiens
NQSSNFGPMKGGNFGGRSSGPYGGGGQYFAKPRNQGGY

SEQ ID NO: 5210 - protein, 42 aa, Homo sapiens
RMRIZFKNKGKDTAELRRRRVEVSVELRKAKKDEQILKRRNV

SEQ ID NO: 5211 - protein, 8 aa, Homo sapiens
VSRKRPRP

SEQ ID NO: 5212 - protein, 8 aa, Homo sapiens
PPKKARED

SEQ ID NO: 5213 - protein, 8 aa, Homo sapiens
PQPKKKPL

SEQ ID NO: 5214 - protein, 12 aa, Mus sp.
SALIKKKKKMAP

SEQ ID NO: 5215 - protein, 5 aa, Influenza virus
DRLRR

SEQ ID NO: 5216 - protein, 7 aa, Influenza virus
PKQKKRK

SEQ ID NO: 5217 - protein, 10 aa, Hepatitis D virus
RKLKKKIKKL

SEQ ID NO: 5218 - protein, 10 aa, Mus sp.
REKKKFLKRR

SEQ ID NO: 5219 - protein, 20 aa, Homo sapiens
KRKGDEVDGVDEVAKKKSKK

SEQ ID NO: 5220 - protein, 17 aa, Homo sapiens
RKCLQAGMNLEARKTKK

SEQ ID NO: 5221 - protein, 4 aa, Artificial
  Synthetic
GGGS

SEQ ID NO: 5222 - protein, 5 aa, Artificial
  Synthetic
GGGGS

SEQ ID NO: 5223 - protein, 9 aa, Artificial
  Synthetic
GGSGGSGGS

SEQ ID NO: 5224 - protein, 10 aa, Artificial
  Synthetic
GGGGSGGGGS

SEQ ID NO: 5225 - protein, 20 aa, Artificial
  Synthetic
GGGGSGGGGSGGGGSGGGGS

SEQ ID NO: 5226 - protein, 25 aa, Artificial
  Synthetic
GGGGSGGGGSGGGGSGGGGSGGGGS

SEQ ID NO: 5227 - protein, 30 aa, Artificial
  Synthetic
GGGGSGGGGSGGGGSGGGGSGGGGSGGGGS

SEQ ID NO: 5228 - protein, 35 aa, Artificial
  Synthetic
GGGGSGGGGSGGGGSGGGGSGGGGSGGGGSGGGGS

SEQ ID NO: 5229 - protein, 40 aa, Artificial
  Synthetic
GGGGSGGGGSGGGGSGGGGSGGGGSGGGGSGGGGSGGGGS

SEQ ID NO: 5230 - protein, 45 aa, Artificial
  Synthetic
GGGGSGGGGSGGGGSGGGGSGGGGSGGGGSGGGGSGGGGSGGGGS

SEQ ID NO: 5231 - protein, 50 aa, Artificial
  Synthetic
GGGGSGGGGSGGGGSGGGGSGGGGSGGGGSGGGGSGGGGSGGGGSGGGGS

SEQ ID NO: 5232 - protein, 55 aa, Artificial
  Synthetic
GGGGSGGGGSGGGGSGGGGSGGGGSGGGGSGGGGSGGGGSGGGGSGGGGSGGGGS
